United States Patent Application Publication US 2014/0259212 A1 - sequence listing, part 25

SEQ ID NO: 81020 - DNA, 834 bp, Mycobacterium smegmatis str. MC2 155
  CDS (1)..(834): transl_table=11
atgccggcaagcccgtacaccgtcaattgctcgatcctgttgaccgagctgccactgctgcagcgccccgaggccgcgcgggccgcgggcttcgacgcggtcgagttctggtggcctttcgccgaggccaccccgtccgaccgcgaggtcgacgagttcgtgagcgcgatctccgacgcgggagtgcagctcaccggtctgaacttcgccgcgggggacatgcccggtggtgagcgcggcatcctgtcgcatccgggacgcagcgcagacttccgcgcgagcgtcgacatcgccgtcgaaatcgccaagcgcctgggcaccaaggctttcaacgccctgtacggcaaccgccgtgacgacgccggcgtcgacgagcaggacgcggcggcggtggagaacctgatctacgcctcggaagccacccgcgccatcgacgccgtcgtcctcatcgaacccgtcagcgggtcaccgctgtacccgctgaaactcgccgccgacgcggtcgccgtgatcgaccgcgtcgcggcgcagtccgacggcaccgccaacaacctgcgtcttctggccgacgtctatcacatgagcgtcaacggcgacgacgtgcctgccgcgctggaaggccatgccgacctgatcggccacgtgcagatcgccgacgcgccgggccgtggtgaaccggggaccgggtcgctgccgctggcgggctacctcgaacagctcgcaggctacggctaccgcggctacgtgggcctggaatacaaggccagccgcgaggatccgttcgactggctgcctctcgaacaccgctcggtgcacgcccgcgccgaccgctga

SEQ ID NO: 81021 - protein, 277 aa, Mycobacterium smegmatis str. MC2 155
MPASPYTVNCSILLTELPLLQRPEAARAAGFDAVEFWWPFAEATPSDREVDEFVSAISDAGVQLTGLNFAAGDMPGGERGILSHPGRSADFRASVDIAVEIAKRLGTKAFNALYGNRRDDAGVDEQDAAAVENLIYASEATRAIDAVVLIEPVSGSPLYPLKLAADAVAVIDRVAAQSDGTANNLRLLADVYHMSVNGDDVPAALEGHADLIGHVQIADAPGRGEPGTGSLPLAGYLEQLAGYGYRGYVGLEYKASREDPFDWLPLEHRSVHARADR

SEQ ID NO: 81022 - DNA, 789 bp, Azoarcus sp. BH72
  CDS (1)..(789): transl_table=11
atgccgaaactcgcggccaacctcacgctgctcttcaccgaactggacttcctcgatcgcttccaggccgcggccgcggcggggttcaaggcggtggagttccagtttccctatgcgtggccggcggcgcggattgccgaacggctggatgcggccggcctgccggtcgtgctgcacaacctgcctgcgggcgactgggctgccggcgagcgcggcatcgcctgtcatccggatcgcgtgggggaattccgggatggcgtcggacgcgccatcgactacgccgttgtgctcgggtgcaaacagctgaactgcctggccggtatcgtgcccgccggcgtgacggcgcaggccgcgcacgagaccttcatcgccaacctgcgcttcgcggccgatgcgctgaagtcggccggtatccggctgctggtggagccgatcaacaccttcgacattcccggcttctacctcagccgcaccgcgcaggcggcggccatcctggacgaggtgggcgcggacaatcttcatatccagtacgacatctatcacgcgcagcggatggaaggcgacctcgccaacaccatcgcccgccacctgccgcgcatcgcccacatgcagattgccgacaacccggggcgccacgaacccggcaccggcgagatcaactacggctggctgttccgccacatcgaccggctgggctacgacggctggatcggctgcgaatacctgccggccgcgggcacgcgcgaaggactgggatggatgacggcactggccgcgatggcgcagtaa

SEQ ID NO: 81023 - protein, 262 aa, Azoarcus sp. BH72
MPKLAANLTLLFTELDFLDRFQAAAAAGFKAVEFQFPYAWPAARIAERLDAAGLPVVLHNLPAGDWAAGERGIACHPDRVGEFRDGVGRAIDYAVVLGCKQLNCLAGIVPAGVTAQAAHETFIANLRFAADALKSAGIRLLVEPINTFDIPGFYLSRTAQAAAILDEVGADNLHIQYDIYHAQRMEGDLANTIARHLPRIAHMQIADNPGRHEPGTGEINYGWLFRHIDRLGYDGWIGCEYLPAAGTREGLGWMTALAAMAQ

SEQ ID NO: 81024 - DNA, 783 bp, Haemophilus somnus 2336
  CDS (1)..(783): transl_table=11
atgcccaaatttgctgcaaatttaaccatgatgtttaacgaagtcccttttttataccgttttgaagcagctgctactgccggttttaaatatgtggaatacctttggccctatgattatccagcagatatgctaaaggaaaaattagataagtatggtttacaacaagttctatttaatacttcagcaggcaatgtagacgccggcgaatggggtgtctctgcgattccggggcgtgaagcggatagtcaccgtgacatcgatcttgctcttgaatatgctcttgccttaggttgttcacacgttcatgtgatggcggcagttgtaccgcaaggcgaagatcgagaagcctataaacagactttcatcaaaaatgtgcaatatgcggcagataaatttaaaccgcacggtattaaagtcttgttagaagcactcagcccggaagtcaaacctaactacctgctgaaaagtcaattcgacacgctagaaattgttgaatccgtcaaccgagataacgtctttgtacagttggattatttccacgcacaaaatgtagatggcaacttgtctcgcttaaccgacaaactcaacggcaaatttgcccatatccaaattgcctccgtgccgaatcgccatgagcctgatgaaggtgaaataaattaccaatatctctttgataaattggatcaaattggctatcaaggttttattggctgtgaatataaaccacgctctgacaccttagcaggtttagattggtttaaaccttatcaacaaaaataa

SEQ ID NO: 81025 - protein, 260 aa, Haemophilus somnus 2336
MPKFAANLTMMFNEVPFLYRFEAAATAGFKYVEYLWPYDYPADMLKEKLDKYGLQQVLFNTSAGNVDAGEWGVSAIPGREADSHRDIDLALEYALALGCSHVHVMAAVVPQGEDREAYKQTFIKNVQYAADKFKPHGIKVLLEALSPEVKPNYLLKSQFDTLEIVESVNRDNVFVQLDYFHAQNVDGNLSRLTDKLNGKFAHIQIASVPNRHEPDEGEINYQYLFDKLDQIGYQGFIGCEYKPRSDTLAGLDWFKPYQQK

SEQ ID NO: 81026 - DNA, 777 bp, Haemophilus influenzae R2866
  CDS (1)..(777): transl_table=11
atgcctaaatttgcagcaaacttaacaatgatgtttaacgaagtgccatttttagatcgctttgaagcggcggctaaagcaggctttaaatatgtcgaattcttatggccttatgattaccctgcacaagaactcaaagcaattttagataagcatggcctaaaagttgtgttatttaataccccagctggtgatgtaaacaaaggtgaatggggtgtttcggcaatccctggccgagaagctgatagccatagagatattgatttggctcttgaatatgcacttgcattaggttgtccaaatgtacatatcatgtcagcagttgtgccagaaggtgcaagccgtgaagaatataaacaaacctttattaaaaacgtacgctatgcatctgataaatataaaccatatggaatcaaaattcagcttgaagctttaagccctgaagtgaaacctaattatttactcaaaagccaatttgatacgcttgaagtggtggaattggttgatcgtgataatgtatttgttcaactcgactattttcatgcacaaaatgtagatggcaatcttgcacgtttaaccgataaattaaatggcaaatttgctcacgttcaaattgcttctgtaccagaccgtcatgaacccgacgaaggtgaaattaactaccaatatatcttcgataaactagatgaaatcggttatacaggctatgttggctgtgaatataaaccacgtggtgaaaccgtaacgggattggattggtttcagaagtataaataa

SEQ ID NO: 81027 - protein, 258 aa, Haemophilus influenzae R2866
MPKFAANLTMMFNEVPFLDRFEAAAKAGFKYVEFLWPYDYPAQELKAILDKHGLKVVLFNTPAGDVNKGEWGVSAIPGREADSHRDIDLALEYALALGCPNVHIMSAVVPEGASREEYKQTFIKNVRYASDKYKPYGIKIQLEALSPEVKPNYLLKSQFDTLEVVELVDRDNVFVQLDYFHAQNVDGNLARLTDKLNGKFAHVQIASVPDRHEPDEGEINYQYIFDKLDEIGYTGYVGCEYKPRGETVTGLDWFQKYK

SEQ ID NO: 81028 - DNA, 777 bp, Burkholderia vietnamiensis G4
  CDS (1)..(777): transl_table=11
atgccccgcttcgccgccaatctgtcgatgatgtacaccgagcacgcgttcctcgaacgcttcgccgccgcgtcgtacgacggctttcgcgccgtcgagtatctgttcccgtacgacttcgcggccgaggacatccgcgcgcgcctcgacgcgcacgacctcgagcaggcgctgttcaacgcgccgcccggcgactgggacgccggcgaacgcggaatcgcgtcgctgccgggccgcgacgacgaattccgccgcggcatcgaccgcgcgctcgactatgcgcgcgtgctcggcaacaagaagctgcacgtgatggccgggatcgtcgcgccgggcgcggaccgcgcgcgccagcgcgacacctacgtcgcgaacctgcgccacgcggcgcaggccgccgccgcgcacggcgtcacgatcctgatcgagccgatcaacccgcgcgacatgcccggctatttcctgaaccgccaggacgatgcgcatgcgatctgcgcggaagtcggcgcgccgaacctgaaggtgcagttcgactgctatcactgccagatcgtcgaaggcgacctcgtgaccaagctcaggcgcgacttcgcgagcatcggccacattcagatcgccggcgtacccgagcggcacgagcccgacgtcggcgaactgaactacccgtacctgttcgcgctgatcgacgcgctcggctacgacggctggatcggctgcgaataccgcccgaaggccggcacgtccgaagggctcggctggctccggccgtacctgtaa

SEQ ID NO: 81029 - protein, 258 aa, Burkholderia vietnamiensis G4
MPRFAANLSMMYTEHAFLERFAAASYDGFRAVEYLFPYDFAAEDIRARLDAHDLEQALFNAPPGDWDAGERGIASLPGRDDEFRRGIDRALDYARVLGNKKLHVMAGIVAPGADRARQRDTYVANLRHAAQAAAAHGVTILIEPINPRDMPGYFLNRQDDAHAICAEVGAPNLKVQFDCYHCQIVEGDLVTKLRRDFASIGHIQIAGVPERHEPDVGELNYPYLFALIDALGYDGWIGCEYRPKAGTSEGLGWLRPYL

SEQ ID NO: 81030 - DNA, 822 bp, Kineococcus radiotolerans SRS30216
  CDS (1)..(822): transl_table=11
gtgaagttcagcgccaacctgtccatgctgtaccaggagctcccgttcctcgagcgcatcccggccgcggccgccgacggcttcaccggcgtggagttcctcggcgcctacgaccaggacgtgctcgaggtgcgggccgcgctcgaggcggcggggctgcggcaggtcctgttcaacgtgccgtccggggactgggccggcggtgaacggggcatcgcgtgcctacccgaacgggtggaggagttcgaggagggagtcgcccgtgccctcgagcacgcccgcacgctgggctgctccctggtcaacgtcctcgccgggcgcgtccccgagggccttgagctcgacacggcgttggagaccttggctgagaacgtgcgcttcgccgcccacgcgctggcgccggcgggagtgaccgtgctcctcgaagccgtcaacacccgcgatgtccccggcttcgccctccccacgatcgccgacgccgctgctctgctctcccgggtgcaggcccccaacaccggcctgcagttcgacgtctaccacgctcaggtcatgcggggggacctgctggcgacgttcgagcggttccggaccgcgatccagcacgtgcagatcgcggacaaccccgggcggcacgaaccgggcaccggagaggtgaactactccttcctcctccccgccctccgagccgccgggtacggcggctacatcggcgcggagtacgtcccgaccaccgcaggcaccggctggctgcgggagttcgcgccggttcccgagccggcctggggagcgactcggggatcggcctgggaagcggcacggtga

SEQ ID NO: 81031 - protein, 273 aa, Kineococcus radiotolerans SRS30216
MKFSANLSMLYQELPFLERIPAAAADGFTGVEFLGAYDQDVLEVRAALEAAGLRQVLFNVPSGDWAGGERGIACLPERVEEFEEGVARALEHARTLGCSLVNVLAGRVPEGLELDTALETLAENVRFAAHALAPAGVTVLLEAVNTRDVPGFALPTIADAAALLSRVQAPNTGLQFDVYHAQVMRGDLLATFERFRTAIQHVQIADNPGRHEPGTGEVNYSFLLPALRAAGYGGYIGAEYVPTTAGTGWLREFAPVPEPAWGATRGSAWEAAR

SEQ ID NO: 81032 - DNA, 756 bp, Sulfitobacter sp. EE-36
  CDS (1)..(756): transl_table=11
atgaagccagccgcgaaccttactctgctgtggtccgagctgccctatcttgaccgttttgccgtcgccgcaaaggcaggatttaccgccgtagaggtgcttttcccctatgatctggccgccaaagagacgctgcgcgcctgtgtcgccaacggcttgcagctgatcctgatcaacgccccgccgcccaattacaccggcggcgcacagggctttgccgcggtgcccgaactggcggcgcgtttccgcgtcgatatccagcgttcgtttcgatatgccaccgcgctcaaggtccgctatctgcatgtcatggcgggcaacgggcaaggcgcgctggcgcggcaaaccttcatcgacaatctgatctgggcggctgatatcgcgcccaaggggctcaccctgacggttgaaccgctgaaccccgtcgcgatgccggggtatttcatgaacgactacgcgcttgccgccgatgtgctgcgtgctgtgaaccggccgaacgtcgggctgcaatatgacagctaccacgcgcagatgatccacggcgacgcggtggcggtgttcgaacaatacaaagacctgatcgtacatgtgcagcttggcgacgcgcccgatcgcagcgcgccgggggcgggtacggttgatttccccgcgctcttcgccgccctgcgccgcgcagggtatcgcggctgggtcagtggcgaatacatccccggcccacggaccgaagacagcctaggctggatgacactcagctag

SEQ ID NO: 81033 - protein, 251 aa, Sulfitobacter sp. EE-36
MKPAANLTLLWSELPYLDRFAVAAKAGFTAVEVLFPYDLAAKETLRACVANGLQLILINAPPPNYTGGAQGFAAVPELAARFRVDIQRSFRYATALKVRYLHVMAGNGQGALARQTFIDNLIWAADIAPKGLTLTVEPLNPVAMPGYFMNDYALAADVLRAVNRPNVGLQYDSYHAQMIHGDAVAVFEQYKDLIVHVQLGDAPDRSAPGAGTVDFPALFAALRRAGYRGWVSGEYIPGPRTEDSLGWMTLS

SEQ ID NO: 81034 - DNA, 777 bp, Roseovarius nubinhibens ISM
  CDS (1)..(777): transl_table=11
atgccgcgctttgccgccaatctttcgctgctcttcaccgaatgcgcgccgctcgaccggttcaaagcggcgcgcgcggcggggtttcagggctgcgagctgctctttccctatgatcatgccgccgccgatctggcgcaggccgcagaggcggcggcgctgccggtggtgttgatcaacacgccggggggcaactgggccgggggcgagcggggcgtggccgccattccgggctgtgaggcgcggtttcgcgacgagttcgatcaggcgcttgcgatggccggggcgcttggcgcgggtcttctgcatgtcctcgctgggctggccgagggggcggcggcgcgggccacctatgtggacaatctgcgctgggccgcggcgcgggcggcggcatctaatcccgcgctgcgcctcacgatagagccgatcaatggccacgacatgccgggctatttcctgcaggatttcgccgaggcccaagcgagtttggcggagattgccgcgcccaatctggggctgcaattcgacgcctaccatgcgcagcggatcaccggggatgcgcgcgccgcttgggacaatctcgacaagatgccgctgcatgttcaggtggcgggcgtgcccggtcgccatgagccacagagcggagacatcgactttcccgcgtttttcacgcagctcgacacgggcggctatgccggttgggtcagcggggaataccacccgaaacgcagcaccacagaggggctgggctggctgcgcgaggcctcgcgcagctaa

SEQ ID NO: 81035 - protein, 258 aa, Roseovarius nubinhibens ISM
MPRFAANLSLLFTECAPLDRFKAARAAGFQGCELLFPYDHAAADLAQAAEAAALPVVLINTPGGNWAGGERGVAAIPGCEARFRDEFDQALAMAGALGAGLLHVLAGLAEGAAARATYVDNLRWAAARAAASNPALRLTIEPINGHDMPGYFLQDFAEAQASLAEIAAPNLGLQFDAYHAQRITGDARAAWDNLDKMPLHVQVAGVPGRHEPQSGDIDFPAFFTQLDTGGYAGWVSGEYHPKRSTTEGLGWLREASRS

SEQ ID NO: 81036 - DNA, 765 bp, Oceanicola batsensis HTCC2597
  CDS (1)..(765): transl_table=11
ttgcccagattttgcgccaacctctctttcctctggaaggatctgccgctgcccgcgcggatctcggcggcggccgaggcaggattctcgggggtcgagatcctgtttccctatgacgaccccgtgccggaggtgcgcgatgcgctggcccggacgggtctgccgttggtgctgatcaactgcccgcctccgaactatgccggcggggacaggggctttgcggcggtcccgggactgggcggccggttccgcagcgatttcctccgcgccctgcgatacgcccgggcgctcggggtcgagcatctgcacatcatgtccggtgcggccgagggagccgaggccgaggcctgtctcgtcgacaacctggcctgggcctgcgccgaggcgcccgggcagagcctgaccatcgagccgatcaacggcgcggacatgccgggctatttcatgaatgatttcgacctggcgctgcgcgtgatcgacagggtcggcgccgcgaacctcggcctgcaattcgacgcctatcacgcgcaccggatcaccggcgatctgcttggcacctgggcaagggcggcgccccgggtccggcacgttcagttcgccgaccatcccggccggcatgagccggggacgggcgaggtggatctgggcgcgttcttcgagcgcctggatgcggacggctttgcgggatgggtcagtgcggaatacgtgccgtcgtccagtccggaggcttccctcggttggatggggtctgccgattcctcctga

SEQ ID NO: 81037 - protein, 254 aa, Oceanicola batsensis HTCC2597
MPRFCANLSFLWKDLPLPARISAAAEAGFSGVEILFPYDDPVPEVRDALARTGLPLVLINCPPPNYAGGDRGFAAVPGLGGRFRSDFLRALRYARALGVEHLHIMSGAAEGAEAEACLVDNLAWACAEAPGQSLTIEPINGADMPGYFMNDFDLALRVIDRVGAANLGLQFDAYHAHRITGDLLGTWARAAPRVRHVQFADHPGRHEPGTGEVDLGAFFERLDADGFAGWVSAEYVPSSSPEASLGWMGSADSS

SEQ ID NO: 81038 - DNA, 804 bp, Xanthobacter autotrophicus Py2
  CDS (1)..(804): transl_table=11
atgccgcgctttgccgccaacctcaccatgatgttcaccgagtggtcgttcctcgaccgcttcgccgccgccgccgatgccggcttcaccgcggtggaattcctcttcccctacgagcatgcgccggaagccgtgggcgaacgcctcgcccgcaacggcctgacccaggccctgttcaacctgccccccggcgattgggcggctggcgagcgcggcatcgctgccttccccgagcgcttcgacgaactgaaggcaggcgttgcgaccggcctcacctatgccgcagccaccggcgtgaagcgcctgcatctcatgtccggccttgccgaccgcgccgaccccaaggcccgcgccgcctatcgcgaggcggtggtctacgccgccggcgcgctggcggagaagggtctcgacctggtgctggagcccatcaacggccgcaacatgccgggctatttcctcaacgatttcgccttcaccgaggcgctcatcgccgagctgggcctgcccaacctgaagctccagttcgacatctatcactgccagatcatccatggcgacgtgaccatgcggctgcgccagctcatgcccatcaccggccatgtgcagatcgccagcgtgccgtcccgcaacgagccggacggcgaggagctgaactatccgttcctgttcgcggagctggatcgcctgggatatgacggcttcgtgggctgcgaatacaacccgcgcgccggcacgctgagcggcctgagctggttcgcgccctatgccgccgccccggccctccaggcgggagcgaacggatga

SEQ ID NO: 81039 - protein, 267 aa, Xanthobacter autotrophicus Py2
MPRFAANLTMMFTEWSFLDRFAAAADAGFTAVEFLFPYEHAPEAVGERLARNGLTQALFNLPPGDWAAGERGIAAFPERFDELKAGVATGLTYAAATGVKRLHLMSGLADRADPKARAAYREAVVYAAGALAEKGLDLVLEPINGRNMPGYFLNDFAFTEALIAELGLPNLKLQFDIYHCQIIHGDVTMRLRQLMPITGHVQIASVPSRNEPDGEELNYPFLFAELDRLGYDGFVGCEYNPRAGTLSGLSWFAPYAAAPALQAGANG

SEQ ID NO: 81040 - DNA, 780 bp, Xanthobacter autotrophicus Py2
  CDS (1)..(780): transl_table=11
atgcccaagttctgcgccaacctcaccatgctgtggaacgagatcgacttcctcgaccggttcaaaaaggcggctgaggccggcttcaccggggtcgagtatctcttcccctatccgtatgaaaaggatgtgctggcggagaagctggccacctacaagctcacccaggtgctgcacaacctgccggccggcgactgggcggcgggcgagcgcggcatcgcctgcctgccgggccgcgaaggcgagttccaggacagcgtcggcaagggcatcgactatgcgaaggctctcggcaccaaggcgctcaactgcctcgtcggcctgaccccgaaggatgttccggccgagaaggtccacgagaccctggtgaagaacctgaagttcgctgccgccgagctgaagaaggccggcatccccttcgtggtggaggccatcaacactcgcgacatcccgggcttccacctgcacaacaccaagcagacgctggcggtgctggacgaagtgggcgcggacgacatcttcttccagtacgacatctatcacatgcagatcatggaaggggacctcacccccaccatccgcaccaacattgcccgcatcaagcacatccagctggccgacaatccgggtcgcggcgagccgggcacgggcgagatcaactatccgttcctgttcaaggccatcgacgacaccggctatgacggctggatcggatgcgaatacaagcccaagaccaccaccgacgagggcatcggctggttcgcgccctacaagggctga

SEQ ID NO: 81041 - protein, 259 aa, Xanthobacter autotrophicus Py2
MPKFCANLTMLWNEIDFLDRFKKAAEAGFTGVEYLFPYPYEKDVLAEKLATYKLTQVLHNLPAGDWAAGERGIACLPGREGEFQDSVGKGIDYAKALGTKALNCLVGLTPKDVPAEKVHETLVKNLKFAAAELKKAGIPFVVEAINTRDIPGFHLHNTKQTLAVLDEVGADDIFFQYDIYHMQIMEGDLTPTIRTNIARIKHIQLADNPGRGEPGTGEINYPFLFKAIDDTGYDGWIGCEYKPKTTTDEGIGWFAPYKG

SEQ ID NO: 81042 - DNA, 816 bp, Oceanobacter sp. RED65
  CDS (1)..(816): transl_table=11
atgcgtttagcagcgaatttatcattgatgtttaccgaagtccctttattacagcgttttcaaaaagccaaagacgctggttttaaaacggtagagattcaatttccctacgaagaaaaaattgaagacttagtcaaggccaaggaggcggccaacgtcgatgtgtgcctcataaatttaccggcaggggacttaatgcaaggcggggaaggtttagcgtgcgttccaggtaaagaaaaagaattcgaagaggctatcaagcttggctttcaatacgcgaaagcgttaggggtaaaatgcgttaatgtactgccaggtcgatgcgatcatgcaggcgaggcagaagtatataccgaagtctttaaaaagaatttagttaaagctgcaagcgcattagcaaagcatcatatcttagtcgtctttgaggcaatcaataccaaggatatgccgggattccttatccacaatactcagcaaatgctagatgtattaacggagcttgatcatccgaatattaaaatgcaatttgatgtctatcatatgcatattatggacggtaatgtggatgaacaaattcgcaaccatgggcaccttatagggcatattcagtttgcggattatccagggcgaggtgaaccgctcagtggtaatttaaattttaaaagcttatttaatgatatccagcatagccattataaggggtatgtagcagctgaatacaaacctactgggaagaccgaagacagcttagcttggatggaaaacctggacttagattggctgcaaacccaaatagaagtgcacggtaatggctga

SEQ ID NO: 81043 - protein, 271 aa, Oceanobacter sp. RED65
MRLAANLSLMFTEVPLLQRFQKAKDAGFKTVEIQFPYEEKIEDLVKAKEAANVDVCLINLPAGDLMQGGEGLACVPGKEKEFEEAIKLGFQYAKALGVKCVNVLPGRCDHAGEAEVYTEVFKKNLVKAASALAKHHILVVFEAINTKDMPGFLIHNTQQMLDVLTELDHPNIKMQFDVYHMHIMDGNVDEQIRNHGHLIGHIQFADYPGRGEPLSGNLNFKSLFNDIQHSHYKGYVAAEYKPTGKTEDSLAWMENLDLDWLQTQIEVHGNG

SEQ ID NO: 81044 - DNA, 789 bp, Desulfitobacterium hafniense DCB-2
  CDS (1)..(789): transl_table=11
atgcatgtaaaaaaagaccaacttgttgccaacttatcctttctctttaatgacctgccgatgatggagcgcttccaggcggtcaaagcggccggacttaaacgggtggagtttatgttcccttacgatttggaccttgcccagctcaaacaggaattggcgtcccaccaattagagatggttctctttaacctccctgccggagactggggagccggtgagcggggtatcgcccttgatcccagccgtcaagaggagtttaaagcgggagtagagaaagctgtcgccctggctcaagctcttcatgtcaaacaaatcaattgcctggtggggaaagtccgtgaggatcaatccccggcggaacagcgggctactctgatcgccaatatccgctatgccgccgagcagctgcagcaaattggcgtcaagctgctcctcgagcccctgaatcgctttgatgccccgggattctatcttaataccaccgaagatgttctgaaggtcattgccgaagctgaccatgagaatgttttcctccaatatgatacctatcacgccgcccgggaaggagaggatctcttacagatcctgcgggaaaagctgccccatatcgctcatattcaagtagccgataaccccggacgtcatcagccgggtacgggggagatcgattaccacgctttctttaagaccttggcggaagtcggctattcctatgccgtctctatggaatatgttcctcagccggatacagtggcttcgttggagtggattaaagcgtttgaatag

SEQ ID NO: 81045 - protein, 262 aa, Desulfitobacterium hafniense DCB-2
MHVKKDQLVANLSFLFNDLPMMERFQAVKAAGLKRVEFMFPYDLDLAQLKQELASHQLEMVLFNLPAGDWGAGERGIALDPSRQEEFKAGVEKAVALAQALHVKQINCLVGKVREDQSPAEQRATLIANIRYAAEQLQQIGVKLLLEPLNRFDAPGFYLNTTEDVLKVIAEADHENVFLQYDTYHAAREGEDLLQILREKLPHIAHIQVADNPGRHQPGTGEIDYHAFFKTLAEVGYSYAVSMEYVPQPDTVASLEWIKAFE

SEQ ID NO: 81046 - DNA, 747 bp, marine gamma proteobacterium HTCC2143
  CDS (1)..(747): transl_table=11
atgttgttcaaagaacatcattttttggatcgctttaatgacgcccgcaaagcggggtttgaaggcgtagagtatgtctcgccgtacgaattttcagtgccagatattaaacaacgtttagatgacaacgatttaaaacaggtgctcttcaatctccccctcggtaattgggccaacggcgaacgcggtatcggttgccaccccggccggattagcgaatatagagacggcgttgataaagccattgagtacgccctcgcgcttgactgcaaacagtgcaacgcattagccggtattgtccccgatgacgtcagttatcaacaagcgcacgaaacgctcattgccaacctttcttatgccgcagaaaaatttgcagcagctaaactcaacctgctaacagaggccataaatacgtatgacatgcccgggttttttctcaatacaacagcacaggcgctgtcgatcattgacgaggtcaacaagcccaatctctactatcagtatgacatctatcatatgcaacgtatggagggagaactcgcttcgactattaaaatgaacctaccacgaattgggcactttcaattggcagacaacccgggccgtcatgaacccggcagtggcgaaatcaattatcacttcttactcaattttattgaaaaaaacggctataagggctggattggtgctgaatataatccgctaacaaccacgcttgaaggactaagctggatgtcaaaatactga

SEQ ID NO: 81047 - protein, 248 aa, marine gamma proteobacterium HTCC2143
MLFKEHHFLDRFNDARKAGFEGVEYVSPYEFSVPDIKQRLDDNDLKQVLFNLPLGNWANGERGIGCHPGRISEYRDGVDKAIEYALALDCKQCNALAGIVPDDVSYQQAHETLIANLSYAAEKFAAAKLNLLTEAINTYDMPGFFLNTTAQALSIIDEVNKPNLYYQYDIYHMQRMEGELASTIKMNLPRIGHFQLADNPGRHEPGSGEINYHFLLNFIEKNGYKGWIGAEYNPLTTTLEGLSWMSKY

SEQ ID NO: 81048 - DNA, 777 bp, Escherichia coli B
  CDS (1)..(777): transl_table=11
atgttacgtttctctgctaatttatcgatgttatttggagaatatgattttctcgcccgttttgagaaagctgcgcagtgtggttttcgcggcgttgaatttatgtttccttatgactacgacattgaagaattaaaacaggtgctggcgagtaataaactcgaacatacgctgcacaatttaccggcgggtgactgggcggcgggggagcgcggtattgcctgtattcctggccgtgaagaagagtttcgggatggcgtagcagcagcgattcgttatgcccgtgcgctgggtaataaaaaaattaactgtctggtcggtaaaacgccggctggtttcagcagtgaacagattcacgcaacgcttgtagaaaacctgcgttatgccgcgaatatgctgatgaaagaagatattttattactgattgaacctattaaccattttgatattcctggtttccatctcaccggaactcggcaggcgctgaaattgattgatgatgttggttgctgcaatttgaaaattcagtatgacatttatcacatgcagcggatggaaggtgaattaaccaacaccatgactcagtgggctgataaaattggtcacctgcaaattgccgataatccgcatcgcggcgaaccgggaaccggagaaattaattatgattatctctttaaggtaatcgaaaattctgactacaacggttgggttgggtgtgaatataaaccccaaaccaccacggaagccggtttacgctggatggatccgtaccgttaa

SEQ ID NO: 81049 - protein, 258 aa, Escherichia coli B
MLRFSANLSMLFGEYDFLARFEKAAQCGFRGVEFMFPYDYDIEELKQVLASNKLEHTLHNLPAGDWAAGERGIACIPGREEEFRDGVAAAIRYARALGNKKINCLVGKTPAGFSSEQIHATLVENLRYAANMLMKEDILLLIEPINHFDIPGFHLTGTRQALKLIDDVGCCNLKIQYDIYHMQRMEGELTNTMTQWADKIGHLQIADNPHRGEPGTGEINYDYLFKVIENSDYNGWVGCEYKPQTTTEAGLRWMDPYR

SEQ ID NO: 81050 - DNA, 783 bp, Pseudomonas putida GB-1
  CDS (1)..(783): transl_table=11
atgcctcgcttcgctgccaacttgtccatgctgttcaccgaacaggacttcctggcccgcttcaaggctgccgccgatgctggtttcagcggcgtcgaatacctcttcccgtacgacttcagcgcggctgaaatcaagcagcagctggaggccaacggcctgacccaggtgttgttcaacctgcccgcgggtgactgggccaagggtgagcgcggcatcacctgccacccagaccgcgtcgaagaattccgtgccggtgtcgacaaggccatcgagtacgccaaggtgctgggcaacacccaggtcaacgccctggccggcatccgcccacaaggcccggactgcgccaccgtgcgcaagaccttcgtcgagaacctgcgctacgccgccgacaagctcaaggccgccggcattcgcctggtcatggaaatgatcaacacccgcgacatcccaggcttctacctgaacaccacccagcaggccctggaaatccaggccgaagtcggcagcgacaacctgttcctgcagtacgacatctaccacatgcagatcatggaaggtgacctggcgcgcaccattcaagccaacctgccactgatcaaccacatccagctggccgacaacccagggcgcaacgagccaggcaccggcgaaatcaactaccgcttcctgttcgagcacctggaccgtatcggctaccagggctgggtgggcgcagagtacaagccgctgaccaccaccgaagcgggcctgggctggctgaaaacccataacgcaatttga

SEQ ID NO: 81051 - protein, 260 aa, Pseudomonas putida GB-1
MPRFAANLSMLFTEQDFLARFKAAADAGFSGVEYLFPYDFSAAEIKQQLEANGLTQVLFNLPAGDWAKGERGITCHPDRVEEFRAGVDKAIEYAKVLGNTQVNALAGIRPQGPDCATVRKTFVENLRYAADKLKAAGIRLVMEMINTRDIPGFYLNTTQQALEIQAEVGSDNLFLQYDIYHMQIMEGDLARTIQANLPLINHIQLADNPGRNEPGTGEINYRFLFEHLDRIGYQGWVGAEYKPLTTTEAGLGWLKTHNAI

SEQ ID NO: 81052 - DNA, 783 bp, Escherichia coli
  CDS (1)..(783): transl_table=11
atggcaaagtttgcagcaaatttatctatgctctttaccgagtatccatttattgaacgttttgcacaggcaagtcacgcaggattccacggcgttgagtatcttttcccctatgacttttccgcagatgagttggtttcgcaactgcatcaacataatctgacgcaggttctgtttaatcttcctgcgggtaactggcaagagggtgaacggggtattgcatgtcatcctggtcgggcaaaagaatttcaggagggtgtttgcagagcgatagaatatgcccaggcccttaattgttcacaagttaattgccttgcaggaaaacatccaggtggttattcgcatgaacaatgtcatgaaacactggtcgaaaatttgcgctatgcagtagataaattggcttctcatggcataaagttagttctggaagccattaatacaaaagatattcccggtttttttgttaacaacaccagacaagctctcaatattattcatgatgtaaatcatcctgattttcgctatcaatacgatatttatcatatgcaaatcatggaagggaatattgctacaacaatcaaaaacaacctgaataacattggacatattcaattagccgataaccctgggcgtcatgaaccagggacgggagaaattaattacccgtggttgttaaattatatagaccagattggttatcagggatggattggttgcgaatatgttccatctacgacaacgactgaaagtctacgctggctaaaaaacgagactcaattttaa

SEQ ID NO: 81053 - protein, 260 aa, Escherichia coli
MAKFAANLSMLFTEYPFIERFAQASHAGFHGVEYLFPYDFSADELVSQLHQHNLTQVLFNLPAGNWQEGERGIACHPGRAKEFQEGVCRAIEYAQALNCSQVNCLAGKHPGGYSHEQCHETLVENLRYAVDKLASHGIKLVLEAINTKDIPGFFVNNTRQALNIIHDVNHPDFRYQYDIYHMQIMEGNIATTIKNNLNNIGHIQLADNPGRHEPGTGEINYPWLLNYIDQIGYQGWIGCEYVPSTTTTESLRWLKNETQF

SEQ ID NO: 81054 - DNA, 777 bp, Klebsiella pneumoniae
  CDS (1)..(777): transl_table=11
atgttgcgcttttctgccaacctttccatgttatttcaggaatatgattttctggatcgctttgagaaagcggcggcctgtggttttcgcgctgttgaatttatgtttccctatgactatgcccccgagctattaaagcaaaagctgagcgacaaccagctggaacatactttacacaatttacccgctggtgactgggcggcaggggaacgaggcatcgcttgtattccaggccgcgaagtggagtttcgcgaaggtgtcgacgccgcaatccgctacgccaaagcgctgggcaatcgtaaaattaactgtctggtcggcaaaactccggtgggttatcgcgaagaacatattcgctcaacgctggtggcgaatttacgttttgccgccgccgcgctggcccaggaaggtatcctgctgctaattgagccgatcaattacttcgacatgccgggcttttatctgaataccacgcatcaggcgttggcgctgattgatgaagtgggtaatgataatctgaaaattcagtacgatatttaccatatgcagcgtatggagggggaattaacccatacgatgcaaacttacgctaatcgtatcggtcacttacagatcgcggataatccgaatcgaggtgaacccgggaccggtgaaattaattatgagtatctttttaatttcatcgataaatcaaactatgacggttgggtaggttgtgaatataaaccattgactaccaccgaagcgggactgacatggtttaatcgctaccgctaa

SEQ ID NO: 81055 - protein, 258 aa, Klebsiella pneumoniae
MLRFSANLSMLFQEYDFLDRFEKAAACGFRAVEFMFPYDYAPELLKQKLSDNQLEHTLHNLPAGDWAAGERGIACIPGREVEFREGVDAAIRYAKALGNRKINCLVGKTPVGYREEHIRSTLVANLRFAAAALAQEGILLLIEPINYFDMPGFYLNTTHQALALIDEVGNDNLKIQYDIYHMQRMEGELTHTMQTYANRIGHLQIADNPNRGEPGTGEINYEYLFNFIDKSNYDGWVGCEYKPLTTTEAGLTWFNRYR

SEQ ID NO: 81056 - DNA, 783 bp, Escherichia coli
  CDS (1)..(783): transl_table=11
atggcaaagtttgcagcgaatttatcaatgctttttaccgagcatccatttattgaacgttttgcgcaggcaagtcacgcaggattccacggcgttgaatatctttttccctatgacttttccactgacgagctggcttcgcaactgcatcaacataatctgactcaggttttgtttaatcttcctgcgggtaactggcaagagggtgaacggggtattgcatgtcatcctagtcgggcaaaagaatttcaggagggtgtttgcagagcgatagaatatgcccaggcccttaattgttcacaagttaattgccttgcaggaaaacatccaggtggttattcgcatgaacaatgtcatgaaacactggtcgaaaatttgcgctatgcagtagataaattggcttctcatggcataaagttagttctggaagccattaatacaaaagatattcccggtttttttgttaacaacaccagacaagccctcaatattatttatgatgtaaatcatcctgattttcgctatcaatacgatatttatcatatgcaaatcatggaagggaatattgctacaacaatcaaaaacaacctgaataacattgaacatattcaattagccgataaccctgggcgtcatgaaccagggacgggagaaattaattacccgtggttgttaaattatatagaccagattggttatcagggatggattggttgcgaatatgttccatctacgacaacgactgaaagtctacgctggctaaaaaacgagactcaattttaa

SEQ ID NO: 81057 - protein, 260 aa, Escherichia coli
MAKFAANLSMLFTEHPFIERFAQASHAGFHGVEYLFPYDFSTDELASQLHQHNLTQVLFNLPAGNWQEGERGIACHPSRAKEFQEGVCRAIEYAQALNCSQVNCLAGKHPGGYSHEQCHETLVENLRYAVDKLASHGIKLVLEAINTKDIPGFFVNNTRQALNIIYDVNHPDFRYQYDIYHMQIMEGNIATTIKNNLNNIEHIQLADNPGRHEPGTGEINYPWLLNYIDQIGYQGWIGCEYVPSTTTTESLRWLKNETQF

SEQ ID NO: 81058 - DNA, 777 bp, Escherichia coli
  CDS (1)..(777): transl_table=11
atgcctcgttttgcagctaatttatccatgatgttcaccgaagtgccttttattgaacgcttcgccgcagcgcgaaaagccgggttcgatgctgtggaatttctgtttccctatgactactccaccctgcaaatccaaaagcaactggagcaaaaccatctgacactggcgctgttcaataccgctcccggagatattaatgcgggggaatggggattatccgcccttcccggacgtgagcacgaagcacacgcagacatcgacctggcactggaatatgcattggcgctcaattgtgaacaagtccatgtgatggcaggcgtcgtgcccgctggcgaagacgctgaacggtaccgggcagtatttatcgataatctccgctacgctgccgaccgctttgcgctacacggcaagcgaatattagttgaagcactcagccccgacgttaagcctcattatctcttctccagccagtatcaggcactggctattgttgaagaggttgcgcgagataacgtgtttattcaactagatacttttcatgcgcaaaaagtagatggcaacctgacgcatttaatccgcgactacgctgggaaatatgcgcacgtacaaattgccggactacctgatcgacatgaaccggacgatggagaaatcaactatccgtggctgttccgcctgttcgatgaggtgggatatcagggctggatcggttgtgaatataaacctcgtggcctcaccgaagaagggcttggctggtttgacgcctggcgctaa

SEQ ID NO: 81059 - protein, 258 aa, Escherichia coli
MPRFAANLSMMFTEVPFIERFAAARKAGFDAVEFLFPYDYSTLQIQKQLEQNHLTLALFNTAPGDINAGEWGLSALPGREHEAHADIDLALEYALALNCEQVHVMAGVVPAGEDAERYRAVFIDNLRYAADRFALHGKRILVEALSPDVKPHYLFSSQYQALAIVEEVARDNVFIQLDTFHAQKVDGNLTHLIRDYAGKYAHVQIAGLPDRHEPDDGEINYPWLFRLFDEVGYQGWIGCEYKPRGLTEEGLGWFDAWR

SEQ ID NO: 81060 - DNA, 777 bp, Escherichia coli
  CDS (1)..(777): transl_table=11
atgcctcgttttgcagctaatttatccatgatgttcaccgaagtgccttttattgaacgcttcgccgcagcgcgaaaagccgggttcgatgctgtggagtttctgtttccctatggctactccccccagcaaatccagcagcaactggtgcaaaaccatctgacactggcgctgttcaataccgctcccggagatattaatgcgggagaatggggattatccgcccttcccggacgtgagcacgaagcacgcgcagacatcgacctggcactggaatatgcattggcgctcaattgtgaacaagtccatgtgatggcaggcgtcgtgcccgctggcgaagatgctgaacggtaccggggagtatttattgataatctccgctacgctgccgaccgctttgcgccacacggcaagcgaatattggttgaagcactcagccccggcgttaagcctcattatctcttctccagccagtatcaggcactggctattgttgaagaggttgcgcgagataacgtgtttattcaactggatactttccatgcgcaaaaagtagatggcaacctgacacatttaatccgcgactacgccgggaaatatgcgcacgtacaaattgccggactacctgatcgacatgaaccggacgatggagaaatcaactatccgtggctgttccgcctgttcgatgaagtgggatatcagggctggatcggttgtgaatacaaacctcgtggcctcaccgaagaagggcttggctggtttgacgcctggcgctaa

SEQ ID NO: 81061 - protein, 258 aa, Escherichia coli
MPRFAANLSMMFTEVPFIERFAAARKAGFDAVEFLFPYGYSPQQIQQQLVQNHLTLALFNTAPGDINAGEWGLSALPGREHEARADIDLALEYALALNCEQVHVMAGVVPAGEDAERYRGVFIDNLRYAADRFAPHGKRILVEALSPGVKPHYLFSSQYQALAIVEEVARDNVFIQLDTFHAQKVDGNLTHLIRDYAGKYAHVQIAGLPDRHEPDDGEINYPWLFRLFDEVGYQGWIGCEYKPRGLTEEGLGWFDAWR

SEQ ID NO: 81062 - DNA, 795 bp, Drosophila melanogaster
  CDS (1)..(795)
atggcactcaagtttgcagcgaatctgaactttttgttcacggaaagagcgacgtcgatcgcggagcgaattcgtctggcccaccagaacggattccgtgcggtagagatcccctatcccgaaggcgagacgagcgacgtggtgtccgccgtaaaggagacgggtgtggtggtcagtctggtgaatctggccttcgacaagagcgacgatcagctgcgtttcggctccaccagtgtgcccggctcggaaaagctgttccgtagccaattggatgccaccattgatttcgcccgacaggttaactgtggcaagattcatctaaccgctggactcttcaagggcggccaggagagtgactacacgaagacgtataccgccaatctaaagatcgccgccgatagccttagagccagtaaaatgatcggcgtgatagagccaattaacaagtacgccgtgcctggctactacatgaattcatactccaaagccgctggaattctggccgatgtagctgcggacaacattcaattgctggccgatctgtatcacctgcagcatttgcacggcaacgtgtccaagacgctcgaggagtacaaggcgctcattggacactttcagatcgcccaggtgccgcatcgccacgagccggatgtttccggtgagctggactacggatttgtgttcaaggctctccaggaattcggctatgatggatggatcggttgcgagtacaagccgaagacgaccactgtcgagggtttgggttgggtctccaaattgggctacacgctataa

SEQ ID NO: 81063 - protein, 264 aa, Drosophila melanogaster
MALKFAANLNFLFTERATSIAERIRLAHQNGFRAVEIPYPEGETSDVVSAVKETGVVVSLVNLAFDKSDDQLRFGSTSVPGSEKLFRSQLDATIDFARQVNCGKIHLTAGLFKGGQESDYTKTYTANLKIAADSLRASKMIGVIEPINKYAVPGYYMNSYSKAAGILADVAADNIQLLADLYHLQHLHGNVSKTLEEYKALIGHFQIAQVPHRHEPDVSGELDYGFVFKALQEFGYDGWIGCEYKPKTTTVEGLGWVSKLGYTL

SEQ ID NO: 81064 - DNA, 777 bp, Escherichia coli
  CDS (1)..(777): transl_table=11
atgttacgtttctctgctaatttatcgatgttatttggagaatatgattttctcgcccgttttgagaaagctgcgcagtgtggttttcgcggcgttgaatttatgtttccttatgactacgacattgaagaattaaaacatgtgctggcgagtaataaactcgaacatacgctgcacaatttaccggcgggtgactgggcggcgggggagcgcggtattgcctgtattcctggccgtgaagaagagtttcgggatggcgtagcagcagcgattcgttatgcccgtgcgctgggtaataaaaaaattaactgtctggtcggtaaaacgccggctggtttcagcagtgaacagattcacgcaacgcttgtagaaaacctgcgttatgccgcgaatatgctgatgaaagaagatattttattactgattgaacctattaaccattttgatattcctggtttccatctcaccggaactcggcaggcgctgaaattgattgatgatgttggttgctgcaatttgaaaattcagtatgacatttatcatatgcagcggatggaaggtgaattaaccaacaccatgactcagtgggctgataaaattggtcacctgcaaattgccgataatccgcatcgcggcgaaccgggaaccggagaaattaattatgattatctctttaaggtaatcgaaaattctgactacaacggttgggttgggtgtgaatataaaccccaaaccaccacggaagccggtttacgctggatggatccgtaccgttaa

SEQ ID NO: 81065 - protein, 258 aa, Escherichia coli
MLRFSANLSMLFGEYDFLARFEKAAQCGFRGVEFMFPYDYDIEELKHVLASNKLEHTLHNLPAGDWAAGERGIACIPGREEEFRDGVAAAIRYARALGNKKINCLVGKTPAGFSSEQIHATLVENLRYAANMLMKEDILLLIEPINHFDIPGFHLTGTRQALKLIDDVGCCNLKIQYDIYHMQRMEGELTNTMTQWADKIGHLQIADNPHRGEPGTGEINYDYLFKVIENSDYNGWVGCEYKPQTTTEAGLRWMDPYR

SEQ ID NO: 81066 - DNA, 840 bp, Streptomyces coelicolor
  CDS (1)..(840): transl_table=11
atgggattcgcagaccagcgcttcaacgtcaacctgtcgatcctcttcacggaactcccgctcctggagcgccccgcggccgccgccgcggccggcttcaccgcggtcgagctgtggtggccctggatcgactcgcccacccccgagcagtccgagctggacgctctgaagtcggccatcgaggacgcgggcgtccagctcaccgggctcaacttctacgccgggcagctgcccggacccgaccggggcgccctgtccatccccggcgaggagtcggagcgcttccgcgccaacatcgacgtggccgccgacttcgccaggtcactgggctgcacggcactcaacgccctgtacggcaaccgcgtcgagggcgtggacccggccgagcaggacaggctcgcgctggagaacctggtcctcgcggcccgcgcggccgaccggatcggcgcggtcctgctggtcgaggcgctcaacaagcccgagtcgccgcggtacccgctggtgtcggcgccggccgcgatcgcggtcgtggaccgggtcaacgaggccaccgggctcggcaacgccaagttcctcatggacctctaccacctgtccatgaacggcgaggacctgccgcaggtgatcgacgcgtacgccgcgaagaccggccatgtgcagatcgccgacaacccgggccgcggcgcccccggtacgggctccctcccgctggaggacctgctcgaccgcctcgcgaaggccgggtacgacggctgggtcggcctggagtacaagcccggcgacgaccccagcgcccagtccttctcctggctgccggccggggcccgcgcggcccgctga

SEQ ID NO: 81067 - protein, 279 aa, Streptomyces coelicolor
MGFADQRFNVNLSILFTELPLLERPAAAAAAGFTAVELWWPWIDSPTPEQSELDALKSAIEDAGVQLTGLNFYAGQLPGPDRGALSIPGEESERFRANIDVAADFARSLGCTALNALYGNRVEGVDPAEQDRLALENLVLAARAADRIGAVLLVEALNKPESPRYPLVSAPAAIAVVDRVNEATGLGNAKFLMDLYHLSMNGEDLPQVIDAYAAKTGHVQIADNPGRGAPGTGSLPLEDLLDRLAKAGYDGWVGLEYKPGDDPSAQSFSWLPAGARAAR

SEQ ID NO: 81068 - DNA, 783 bp, Ralstonia eutropha
  CDS (1)..(783): transl_table=11
atgccgcgcttcgccgcaaacctctcgatgatgtacaacgagcacgccttcctggaccgctttgccgcagccgcggccgacggcttccgggcggtggagttcctgttcccgtacgagcacgccgccgccgagctgcgcgcgcgcctggacgcgaacggcctcacacaggcactgttcaacgcggcgccgggcgactgggcagcaggcgaacgcggcctggccgccctgcccgggcgcgaggcggatttccgcggcaccatcggccgcgcgctggaatacgccggcgtgatcggcaatgaccgcatccacgtgatggcgggcctgatccctgccgatgccgaccgcgcgcgctgccgcgccacatacctcgagaacctcgcctttgctgccaacgctgccgccgcccagggcgtgaccgtgctgatcgagccgatcaacacgcgcgacatgccgggctatttcctgaaccgccaggacgacggccaggctatctgcaaggaagtcggcgcggccaacctgaaggtgcagttcgactgctaccactgccagatcgtcgaaggcgatgtcgcgatgaagctcaagcgcgacatcgcgggcatcggccatatccagatcgccggcgtgcccgagcgccatgagccggacgtgggcgagctgaactatccctacctgttcgaggtcatggacacgctcggctacgacggctggatcggctgcgaataccgcccgcgcgccggcacctcggccggcctgggctggctcaagccctacctgggccgctga

SEQ ID NO: 81069 - protein, 260 aa, Ralstonia eutropha
MPRFAANLSMMYNEHAFLDRFAAAAADGFRAVEFLFPYEHAAAELRARLDANGLTQALFNAAPGDWAAGERGLAALPGREADFRGTIGRALEYAGVIGNDRIHVMAGLIPADADRARCRATYLENLAFAANAAAAQGVTVLIEPINTRDMPGYFLNRQDDGQAICKEVGAANLKVQFDCYHCQIVEGDVAMKLKRDIAGIGHIQIAGVPERHEPDVGELNYPYLFEVMDTLGYDGWIGCEYRPRAGTSAGLGWLKPYLGR

SEQ ID NO: 81070 - DNA, 25 bp, Artificial sequence
  primer
atgcctcgttttgcagctaatttat

SEQ ID NO: 81071 - DNA, 22 bp, Artificial sequence
  primer
ttagcgccaggcgtcaaaccag

SEQ ID NO: 81072 - protein, 276 aa, Artificial sequence
  consensus sequence
  Variant (2)..(2): Xaa in position 2 is any amino acid
  Variant (6)..(15): Xaa in position 6 to 15 is any amino acid
  Variant (16)..(18): Xaa in position 16 to 18 is any or no amino acid
  Variant (21)..(22): Xaa in position 21 to 22 is any amino acid
  Variant (24)..(26): Xaa in position 24 to 26 is any amino acid
  Variant (27)..(27): Xaa in position 27 is any or no amino acid
  Variant (30)..(31): Xaa in position 30 to 31 is any amino acid
  Variant (34)..(36): Xaa in position 34 to 36 is any amino acid
  Variant (38)..(38): Xaa in position 38 is any amino acid
  Variant (39)..(44): Xaa in position 39 to 44 is any or no amino acid
  Variant (46)..(57): Xaa in position 46 to 57 is any amino acid
  Variant (58)..(60): Xaa in position 58 to 60 is any or no amino acid
  Variant (62)..(64): Xaa in position 62 to 64 is any amino acid
  Variant (66)..(66): Xaa in position 66 is any amino acid
  Variant (68)..(70): Xaa in position 68 to 70 is any amino acid
  Variant (72)..(73): Xaa in position 72 to 73 is any amino acid
  Variant (74)..(75): Xaa in position 74 to 75 is any or no amino acid
  Variant (77)..(78): Xaa in position 77 to 78 is any amino acid
  Variant (79)..(79): Xaa in position 79 is any or no amino acid
  Variant (81)..(84): Xaa in position 81 to 84 is any amino acid
  Variant (86)..(95): Xaa in position 86 to 95 is any amino acid
  Variant (96)..(97): Xaa in position 96 to 97 is any or no amino acid
  Variant (99)..(100): Xaa in position 99 to 100 is any amino acid
  Variant (103)..(114): Xaa in position 103 to 114 is any amino acid
  Variant (116)..(128): Xaa in position 116 to 128 is any amino acid
  Variant (129)..(132): Xaa in position 129 to 132 is any or no amino acid
  Variant (135)..(136): Xaa in position 135 to 136 is any amino acid
  Variant (139)..(147): Xaa in position 139 to 147 is any amino acid
  Variant (148)..(152): Xaa in position 148 to 152 is any or no amino acid
  Variant (154)..(155): Xaa in position 154 to 155 is any amino acid
  Variant (157)..(158): Xaa in position 157 to 158 is any amino acid
  Variant (159)..(161): Xaa in position 159 to 161 is any or no amino acid
  Variant (163)..(180): Xaa in position 163 to 180 is any amino acid
  Variant (181)..(188): Xaa in position 181 to 188 is any or no amino acid
  Variant (190)..(192): Xaa in position 190 to 192 is any amino acid
  Variant (194)..(194): Xaa in position 194 is any amino acid
  Variant (196)..(196): Xaa in position 196 is any amino acid
  Variant (199)..(199): Xaa in position 199 is any amino acid
  Variant (201)..(203): Xaa in position 201 to 203 is any amino acid
  Variant (205)..(218): Xaa in position 205 to 218 is any amino acid
  Variant (219)..(220): Xaa in position 219 to 220 is any or no amino acid
  Variant (222)..(222): Xaa in position 222 is any amino acid
  Variant (224)..(224): Xaa in position 224 is any amino acid
  Variant (226)..(227): Xaa in position 226 to 227 is any amino acid
  Variant (229)..(229): Xaa in position 229 is any amino acid
  Variant (231)..(231): Xaa in position 231 is any amino acid
  Variant (234)..(236): Xaa in position 234 to 236 is any amino acid
  Variant (237)..(237): Xaa in position 237 is any or no amino acid
  Variant (239)..(248): Xaa in position 239 to 248 is any amino acid
  Variant (249)..(251): Xaa in position 249 to 251 is any or no amino acid
  Variant (253)..(254): Xaa in position 253 to 254 is any amino acid
  Variant (256)..(256): Xaa in position 256 is any amino acid
  Variant (258)..(259): Xaa in position 258 to 259 is any amino acid
  Variant (261)..(261): Xaa in position 261 is any amino acid
  Variant (264)..(264): Xaa in position 264 is any amino acid
  Variant (266)..(266): Xaa in position 266 is any amino acid
  Variant (267)..(268): Xaa in position 267 to 268 is any or no amino acid
  Variant (270)..(272): Xaa in position 270 to 272 is any amino acid
  Variant (274)..(274): Xaa in position 274 is any amino acid
  Variant (275)..(275): Xaa in position 275 is any or no amino acid
FXANLXXXXXXXXXXXXXRFXXAXXXXGFXXVEXXXPXXXXXXXYXXXXXXXXXXXXXXXLXXXLXNXXXGXXXXGXXXGXXXXPXXXXXXXXXXXXAXXYAXXXXXXXXXXXXGXXXXXXXXXXXXXXXXXNLXXAAXXXXXXXXXXXXXXEXXNXXXXXPXXXXXXXXXXXXXXXXXXXXXXXXXXNXXXQXDXYHXQXXXGXXXXXXXXXXXXXXXXHXQXAXXPXRXEPXXXXEXXXXXXXXXXXXXGXXYXGXXGXEYXPXXXTXXXLXXW

SEQ ID NO: 81073 - protein, 13 aa, Artificial sequence
  protein pattern
  Variant (2)..(2): Xaa in position 2 is Ile, Leu or Val
  Variant (4)..(4): Xaa in position 4 is Phe, Ile, Leu or Val
  Variant (6)..(6): Xaa in position 6 is Asp, Gly, Gln or Ser
  Variant (7)..(7): Xaa in position 7 is any amino acid
  Variant (9)..(9): Xaa in position 9 is any amino acid
  Variant (11)..(11): Xaa in position 11 is any amino acid
HXQXAXXPXRXEP

SEQ ID NO: 81074 - protein, 15 aa, Artificial sequence
  protein pattern
  Variant (2)..(3): Xaa in position 2 to 3 is any amino acid
  Variant (4)..(4): Xaa in position 4 is Phe, Trp or Tyr
  Variant (5)..(5): Xaa in position 5 is Ile, Leu, Met or Val
  Variant (7)..(7): Xaa in position 7 is any amino acid
  Variant (10)..(10): Xaa in position 10 is any amino acid
  Variant (11)..(11): Xaa in position 11 is Ala, Pro or Ser
  Variant (12)..(14): Xaa in position 12 to 14 is any amino acid
  Variant (15)..(15): Xaa in position 15 is Ala, Asp, Gly, Pro or Thr
YXXXXGXEYXXXXXX

SEQ ID NO: 81075 - DNA, 711 bp, Escherichia coli
  CDS (1)..(711): transl_table=11
atggcaaccactcatttggatgtttgcgccgtggttccggcggccggatttggccgtcgaatgcaaacggaatgtcctaagcaatatctctcaatcggtaatcaaaccattcttgaacactcggtgcatgcgctgctggcgcatccccgggtgaaacgtgtcgtcattgccataagtcctggcgatagccgttttgcacaacttcctctggcgaatcatccgcaaatcaccgttgtagatggcggtgatgagcgtgccgattccgtgctggcaggtctgaaagccgctggcgacgcgcagtgggtattggtgcatgacgccgctcgtccttgtttgcatcaggatgacctcgcgcgattgttggcgttgagcgaaaccagccgcacgggggggatcctcgccgcaccagtgcgcgatactatgaaacgtgccgaaccgggcaaaaatgccattgctcataccgttgatcgcaacggcttatggcacgcgctgacgccgcaatttttccctcgtgagctgttacatgactgtctgacgcgcgctctaaatgaaggcgcgactattaccgacgaagcctcggcgctggaatattgcggattccatcctcagttggtcgaaggccgtgcggataacattaaagtcacgcgcccggaagatttggcactggccgagttttacctcacccgaaccatccatcaggagaatacataa

SEQ ID NO: 81076 - protein, 236 aa, Escherichia coli
MATTHLDVCAVVPAAGFGRRMQTECPKQYLSIGNQTILEHSVHALLAHPRVKRVVIAISPGDSRFAQLPLANHPQITVVDGGDERADSVLAGLKAAGDAQWVLVHDAARPCLHQDDLARLLALSETSRTGGILAAPVRDTMKRAEPGKNAIAHTVDRNGLWHALTPQFFPRELLHDCLTRALNEGATITDEASALEYCGFHPQLVEGRADNIKVTRPEDLALAEFYLTRTIHQENT

SEQ ID NO: 81077 - DNA, 975 bp, Arabidopsis thaliana
  CDS (7)..(975)
atggcgatgcttcagacgaatcttggcttcattacttctccgacatttctgtgtccgaagcttaaagtcaaattgaactcttatctgtggtttagctatcgttctcaaggcaatttctcatactctttatatacgttcaaaccaatgaatctctggttcgttcaaaaactggatttttcgaaaagggttaatagaagctacaaaagagatgctttattattgtcaatcaagtgttcttcatcgactggatttgataatagcaatgctgtgaatagcaatgttgttgtgaaggagaagagtgtatctgtgattcttttagctggaggtcaaggcaagagaatgaaaatgagtatgccaaagcagtacataccacttcttggtcagccaattgctttgtatagctttttcacgttttcacgtatgcctgaagtgaaggaaattgtagttgtatgtgatccttttttcagagacatttttgaagaatacgaagaatcaattgatgttgatcttagattcgctattcctggcaaagaaagacaagattctgtttacagtggacttcaggaaatcgatgtgaactctgagcttgtttgtatccacgactctgcccgaccattggtgaatactgaagatgtcgagaaggtccttaaagatggttccgcggttggagcagctgtacttggtgttcctgctaaagctacaatcaaagaggtcaattctgattcgcttgtggtgaaaactctcgacagaaaaaccctatgggaaatgcagacaccacaggtgatcaaaccagagctattgaaaaagggtttcgagcttgtaaaaagtgaaggtctagaggtaacagatgacgtttcgattgttgaatacctcaagcatccagtttatgtctctcaaggatcttatacaaacatcaaggttacaacacctgatgatttactgcttgctgagagaatcttgagcgaggactcatga

SEQ ID NO: 81078 - protein, 322 aa, Arabidopsis thaliana
MLQTNLGFITSPTFLCPKLKVKLNSYLWFSYRSQGNFSYSLYTFKPMNLWFVQKLDFSKRVNRSYKRDALLLSIKCSSSTGFDNSNAVNSNVVVKEKSVSVILLAGGQGKRMKMSMPKQYIPLLGQPIALYSFFTFSRMPEVKEIVVVCDPFFRDIFEEYEESIDVDLRFAIPGKERQDSVYSGLQEIDVNSELVCIHDSARPLVNTEDVEKVLKDGSAVGAAVLGVPAKATIKEVNSDSLVVKTLDRKTLWEMQTPQVIKPELLKKGFELVKSEGLEVTDDVSIVEYLKHPVYVSQGSYTNIKVTTPDDLLLAERILSEDS

SEQ ID NO: 81079 - DNA, 975 bp, Arabidopsis thaliana; identical to SEQ ID NO: 81077
  CDS (145)..(975)

SEQ ID NO: 81080 - protein, 276 aa, Arabidopsis thaliana
MNLWFVQKLDFSKRVNRSYKRDALLLSIKCSSSTGFDNSNAVNSNVVVKEKSVSVILLAGGQGKRMKMSMPKQYIPLLGQPIALYSFFTFSRMPEVKEIVVVCDPFFRDIFEEYEESIDVDLRFAIPGKERQDSVYSGLQEIDVNSELVCIHDSARPLVNTEDVEKVLKDGSAVGAAVLGVPAKATIKEVNSDSLVVKTLDRKTLWEMQTPQVIKPELLKKGFELVKSEGLEVTDDVSIVEYLKHPVYVSQGSYTNIKVTTPDDLLLAERILSEDS

SEQ ID NO: 81081 - DNA, 945 bp, Glycine max
  CDS (1)..(945)
atggtagctattggctttggagcccctccttctccacttccgtttcatcttcgcctggcttcctctccttctcctttggccttcccaataatccacaaattccaaaacgcaggcaagtcagtgataacaatctgttcaaagaaaaatgcaaaatcaagggtggtcactctctgctctgcacctgtgcaagttgatatgcaagagcaggaggttagtgatattactttgagagagagaagtgtttcggttgtcctattggctggagggcagggcaagaggatgggagctagcatgccaaagcagtatcttcctctttttggtcaacccattgctttgtatagtttccacactttttttcacctggttcaagtcaaagaaattattgtggtttgtgatccttcatacaaggacatttttgaagatgcaaagggagattaccaagcagaactcaaatttgcactgcctggaaaagaaagacaggattctgtttataatggctttcaggctgttgatcctaactctgaacttgtttgcattcatgattctgcaagacctttggtattatcagcagatgtgaaaaaggtccttaaagatggtttattgaatggagctgcagttcttggtgtccctgtgaaggccacaatcaaagaggcaaacagggagtcgtttgttgttaaaacactggacagaaaaacgctatgggagatgcagaccccacaggttatcaagcctgagttgttgaggaaaggctttgagcttgtaaatagggaaggtcttgaagttactgatgatgtgtccattgttgaacacctaaaacatcctgtttatatcactcaaggatcttataccaacattaaggtgactacacctgatgacatgttactggcagagagaatattgaatataaatgatgaagacaatatagtcttgccagttcacctttga

SEQ ID NO: 81082 - protein, 314 aa, Glycine max
MVAIGFGAPPSPLPFHLRLASSPSPLAFPIIHKFQNAGKSVITICSKKNAKSRVVTLCSAPVQVDMQEQEVSDITLRERSVSVVLLAGGQGKRMGASMPKQYLPLFGQPIALYSFHTFFHLVQVKEIIVVCDPSYKDIFEDAKGDYQAELKFALPGKERQDSVYNGFQAVDPNSELVCIHDSARPLVLSADVKKVLKDGLLNGAAVLGVPVKATIKEANRESFVVKTLDRKTLWEMQTPQVIKPELLRKGFELVNREGLEVTDDVSIVEHLKHPVYITQGSYTNIKVTTPDDMLLAERILNINDEDNIVLPVHL

SEQ ID NO: 81083 - DNA, 1287 bp, Zea mays
  CDS (140)..(1036)
ttgggtacggcgaggcgcgatactgcagtctccgcgccattccggccgggcgtccagacgtccaccctttctcgcttctcagaccatcgtcaccatccctcccctcggcctcgcgttcgcagcggtcagcgcctccgagatggagctccacctctgcctccgtctccacgtgcgcctcactcctgccgcgaagccaccgccggcgcccgcggtgcttccagttccagcctcccgccgccttcggatgggtggaagctacggggttgctcttaggcggcacacaaggcgttcgaatcgggcaatccacacttccctagccgacggcgagcagggtgtcgctgtcgacgctgtgaaggagaggagcgtctcggtgatcctgttgtctggaggccagggaaagagaatgggggcaagtatgccaaagcagtatctacctctactgggactaccaattgcattgcacagtttaaaaacattctgtcaactgaaggaagtcaaagaagtcgtggtggtgtgtgatccagactacattgatgtatttgaaggttctattaagaacttgcaactacctcttaaatttgcacgcccgggaaaagagagacaggactccgtttttaatggacttcaggaaattgatggggattcggaactagtttgtgtccatgattctgcaaggcccttagtttcttctgaagatgtaaaaaaggtcttagaagatgctgcagtacatggagcagctgttcttggtgtgcctgttaaagctacaataaaggaggccaatagtgattcttttgtcatgaaaactcttgaccggaaaactctatgggaaatgcaaactccacaggtcatgaagccaaatttactcaaagatggttttgagcttgttaaacgggataaccatgaagtcactgatgatgtatccattgtagaatatctaaaacaccctgtgtatatcacggaaggctcctatacaaacattaaggtcactacgcctgatgacttgctactagctgagcgcctgatgaatgagaaatagagctgacatgcaaaattaactgtttgcttgattttatagacatacgattttgtagcagtacagcattcacccgcacttctacaggttttgaaaaccctcatgcacgagataactgactgctttgtaaactttctgtcattctttctagatatatcaataaaaaatggaacaattgtataaaaaaaaaaaaaaaaaagcggccgagattaaattatagctgactgctttgtactttctgtcattctttctag

SEQ ID NO: 81084 - protein, 298 aa, Zea mays
MELHLCLRLHVRLTPAAKPPPAPAVLPVPASRRLRMGGSYGVALRRHTRRSNRAIHTSLADGEQGVAVDAVKERSVSVILLSGGQGKRMGASMPKQYLPLLGLPIALHSLKTFCQLKEVKEVVVVCDPDYIDVFEGSIKNLQLPLKFARPGKERQDSVFNGLQEIDGDSELVCVHDSARPLVSSEDVKKVLEDAAVHGAAVLGVPVKATIKEANSDSFVMKTLDRKTLWEMQTPQVMKPNLLKDGFELVKRDNHEVTDDVSIVEYLKHPVYITEGSYTNIKVTTPDDLLLAERLMNEK

SEQ ID NO: 81085 - DNA, 1305 bp, Sinorhizobium meliloti 1021
  CDS (1)..(1305): transl_table=11
atggctggccatggcaggaccttcgcggtacatcacggcgaatattggcgaatgcgggaccacatacagaagatgcaaggcgaagaacagttctcctgcggcgtcgtgatcgttgcggccggccgcggcgagcgcgccggccagtcggccgagggaccgaagcaataccgcacgatcggtgatcggcccgttatcgcccatacgcttgacattttcgcgacatggcccggagcgggacctgtcgtcgtcgtgatccaccccgatgacgaagagctgttcgcggcggcccgcaagcggatggccggggccttggagctgacggtggtccacggcggagcgacgcgccagctttcggtgctcgccgggctggaagcggtcgccgctaccggcgtggaatacgtgatgatccacgacgcggtgcgcccctttttcgatcacacactgctcgatcgctgcggtgcggcgcttcgtgacggcgcccaggccctcctgccggcaattgcggtcgccgacacgctgaagcgtacgaaggcggccggcctcgttgccgagaccgttccgcgaaccgatctctacgccgcacagacgccgcagtgcttccgcctcgagccgatcctctccgctcaccggcgagcggcggcaagcggcaggtccgactttacggacgacgcctctatcgccgaatgggccggcatccccgtccttctggtggaaggagccgtggacaatttcaagttgacactccggagggacctgtcgatggcagacgagaaactgacccgcatggccattcccgatgtgcgcaccggcaacggatatgacgtgcatcaactcgtggacggcgacggcgtcaccctctgtggtgtcttcatcccccacggccgcaaactctccggccattccgacgcggacgtagccctgcacgccttgacggacgccctgctcgccacttgcggcgccggcgacatcggcgaccacttcccgccatccgacccgcagtggaagggcgcgccttcgcgcatctttctcgagcacgctgcgcggatcgtccgcgagcgcggcggcactgttaccaatgccgacatatcgctgattgccgaggcgcccaaggtcgggccgcatcgtcagcagatgcgcgaaaaccttgcggcgatactcggtatttcgctcgaccgctgttcgatcaaggcgacgaccaacgagaaactcggctttgtcgggcggaacgaaggaattgcggcgatcgccaccgcgaccgtcgtctatgcatcacggagcaagcccgatgtggacgaccgatactga

SEQ ID NO: 81086 - protein, 434 aa, Sinorhizobium meliloti 1021
MAGHGRTFAVHHGEYWRMRDHIQKMQGEEQFSCGVVIVAAGRGERAGQSAEGPKQYRTIGDRPVIAHTLDIFATWPGAGPVVVVIHPDDEELFAAARKRMAGALELTVVHGGATRQLSVLAGLEAVAATGVEYVMIHDAVRPFFDHTLLDRCGAALRDGAQALLPAIAVADTLKRTKAAGLVAETVPRTDLYAAQTPQCFRLEPILSAHRRAAASGRSDFTDDASIAEWAGIPVLLVEGAVDNFKLTLRRDLSMADEKLTRMAIPDVRTGNGYDVHQLVDGDGVTLCGVFIPHGRKLSGHSDADVALHALTDALLATCGAGDIGDHFPPSDPQWKGAPSRIFLEHAARIVRERGGTVTNADISLIAEAPKVGPHRQQMRENLAAILGISLDRCSIKATTNEKLGFVGRNEGIAAIATATVVYASRSKPDVDDRY

SEQ ID NO: 81087 - DNA, 1356 bp, Brucella suis 1330
  CDS (1)..(1356): transl_table=11
ttgatatgcattatgaaatccgcatacagtttaatcaccccgctttccgaacgcaaggaaaagcagcctgaacgcacgataaatcaattgccgtctggcatttgtcgtcgcaaggccttattcggcttgcaggcacaatctttggcagaggttacagtcatttcaaaggcagcagcagtcatcgtggcggccggtcgcggcgagcgggcggggcaaagcgccgaggggccgaagcaatatcggctcattggcgcagaggccgtgcttgcccgcactttgcgcgcttttaccgattgcccgctcatcggcacaatcgccgtcgtcatccatcccgacgatcatgcgctttatcggcgcgctgtgccggagaagcatgagaacgtcatcctcgttaccggtggccccacccgacaggaatcgacccgcctcggtcttctggccttgaaggacgaagcgccgcaatatgtgttgatccatgatggcgtgcgtcctttcatcggtcaggatttgctggaacgcatcattgcaaacctcacccctgataatggtgtgcttcccgccctcgccgtccccgacacgttgaaacgggcggcggcagacggcatggtagagaccaccatttcccgtaccggcttgttcgcggcgcagacgccgcaagcttttccctatgcgccgatcttggacgcacatgagaaagccttcgcaatcaaccgcaccgactttaccgacgatgccgccattgccgaatggcaggaaattgctgttcgcattatcgaaggttcggcggataatacaaagctcacctgggcaaaggatattgaaatggcagacaagcgcctgcggcaggaccatgccgtatttcccgacattcgcacgggcaatggctatgatgttcattctttcgagccgggtgatcatgtcacgctttgcggcgtgaaaatcccccatgaggcaaagctcaacggtcactccgatgccgatgtggcccttcatgcgctgaccgacgccctgctcgccacgcgcggtgcgggtgatattggcacacattttccgccatccgattcgcaatggaaaggagctgcctcacgcatcttcatcgaacatgcggccaaaatcgtccgcgaggcgggaggccggatcgccaatgtggacgtgacactcatcagtgaagcgccgaagatcggcccccatcgcgccgccatgacacaagcactctgcgacatgctgggcatcgccgccgaccgggtttccatcaaggctacgacgaacgaaaagcttggctttgtcggccgtcgcgaaggcattgcagccatcgcaaccgcaaccgtcatctaccccggagaagtaccggaatga

SEQ ID NO: 81088 - protein, 451 aa, Brucella suis 1330
MICIMKSAYSLITPLSERKEKQPERTINQLPSGICRRKALFGLQAQSLAEVTVISKAAAVIVAAGRGERAGQSAEGPKQYRLIGAEAVLARTLRAFTDCPLIGTIAVVIHPDDHALYRRAVPEKHENVILVTGGPTRQESTRLGLLALKDEAPQYVLIHDGVRPFIGQDLLERIIANLTPDNGVLPALAVPDTLKRAAADGMVETTISRTGLFAAQTPQAFPYAPILDAHEKAFAINRTDFTDDAAIAEWQEIAVRIIEGSADNTKLTWAKDIEMADKRLRQDHAVFPDIRTGNGYDVHSFEPGDHVTLCGVKIPHEAKLNGHSDADVALHALTDALLATRGAGDIGTHFPPSDSQWKGAASRIFIEHAAKIVREAGGRIANVDVTLISEAPKIGPHRAAMTQALCDMLGIAADRVSIKATTNEKLGFVGRREGIAAIATATVIYPGEVPE

SEQ ID NO: 81089 - DNA, 762 bp, Clostridium tetani E88
  CDS (1)..(762): transl_table=11
ttgcaagacaaaaaactcaagatgactagaatagaattaaaaggggtatggaaattgagtaaaaattgcgcaataattgtagctgcaggaaaaggaagcaggatgggatttgatatcaataaagtttttatagagataggagaaaagcctataatacaatacagtttggaatgttttgaaagtcatcctgatattgatgaaatagttctagtggctaagctaaatgaaattgaaaaattccaacatattataaaatctaataatatgaaaaaagtaaagaaaatagtagttggtggaaatactagaagagaatctgtagtaaatgccttaagtgtcataaaggattcagatgtagtagttattcatgacggagctagacccttcataagtcatgatttaatctctaaaggaataaaatatgcaaataaatatggtgcgtgtacttgtggagtaacacctaaagatactataaaggttaaagataaattaaactttataaaagaaagtttaaatagagattttttaataagtgttcaaacgcctcaaagcttcaaatataaacttatatgggaaggtcataatcataagattgatgaaaatataaacattacagatgatacatctcttatggaatatttagggcataatgtatttgtatataatggagaatatactaatataaagataacaacaaaagaagatctaatatttgctgaagaatttgtgaagaaattcaataatgttaaaaacagcttgacataa

SEQ ID NO: 81090 - protein, 253 aa, Clostridium tetani E88
MQDKKLKMTRIELKGVWKLSKNCAIIVAAGKGSRMGFDINKVFIEIGEKPIIQYSLECFESHPDIDEIVLVAKLNEIEKFQHIIKSNNMKKVKKIVVGGNTRRESVVNALSVIKDSDVVVIHDGARPFISHDLISKGIKYANKYGACTCGVTPKDTIKVKDKLNFIKESLNRDFLISVQTPQSFKYKLIWEGHNHKIDENINITDDTSLMEYLGHNVFVYNGEYTNIKITTKEDLIFAEEFVKKFNNVKNSLT

SEQ ID NO: 81091 - DNA, 717 bp, Bacteroides thetaiotaomicron VPI-5482
  CDS (1)..(717): transl_table=11
atgaatatagcattgattattgcagggggatccggcaaccggatgggacaagatattccaaaacagtttattcatgtggataattgtccggttattgtacatacaatgttagctttccaaagacatccggacataactgctgttgctgttgtttgtttaggtggatgggaaactgtgttgtcttcatacgctcatcagtataatgtatcaaagttacgttggatatttgctggggggataaatggtcaggaatcaattagtaacggcatatacggtttaaaaaagaacggtgtcaaaaaggatgatctggttttgattcatgatgcggttcgtccactggtatctcagagtattatatcttccaatatcgcaatttgtaagcagtatggttatgctatcactggtattcagtgtagggaggctattttggaaagtgatgatggcttttgttctgtgacaagtattccgcgtgataaattgataagaacgcagacaccccagacttttcggttagaaaatattataaatgtccatgagcaggcaaaatcaaaaggtatcataaactcagtatcttcttgtactcttttggcggaattgggcggatatgaaatgcatatagttccgggagaggagcgaaatataaagattacgactacggaagacctggagattttcaaggttttgaggcaaacgtcaaaagaagactggctgaaatga

SEQ ID NO: 81092 - protein, 238 aa, Bacteroides thetaiotaomicron VPI-5482
MNIALIIAGGSGNRMGQDIPKQFIHVDNCPVIVHTMLAFQRHPDITAVAVVCLGGWETVLSSYAHQYNVSKLRWIFAGGINGQESISNGIYGLKKNGVKKDDLVLIHDAVRPLVSQSIISSNIAICKQYGYAITGIQCREAILESDDGFCSVTSIPRDKLIRTQTPQTFRLENIINVHEQAKSKGIINSVSSCTLLAELGGYEMHIVPGEERNIKITTTEDLEIFKVLRQTSKEDWLK

SEQ ID NO: 81093 - DNA, 705 bp, Enterococcus faecalis V583
  CDS (1)..(705): transl_table=11
atgattacagctttaattattgccggtggggtcggtaaacgaatggggcaggagattcctaaacaatttattatggtagaggaaaaaccgataattatctacacattggaatcttttcaaaagcatccactcattgatcgaatcttagttgtgtgtaaaaaaggttgggaacaaacactagatgcctatgcaaaagagtaccatattgacaaattacaatggattattccaggaggaaattctggtcaagaatcaattaacaatggggttaatttcttaaaagaacattcaaacccagaagatactattgttatccatgacgggattcgtccattagttgatgaattagttttatctgatgtaattgttaagtgtcaagaatacggaaatgcagtgacttcgttgccatataatgaacaaatttttgtaaaagaaactgaggaaacaacacgacaatatattaatcgtgaaacattacgtcgcgtgtcaaccccacaagcctataaatttgaaaaattaacttgggcttacgaaaaagcattccgtgagaatattggtatttctgaatcgtcatacacgaatactatgatggtggatttaggcgaaacactgcattttgctttaggctcagataaaaacattaagttaaccacacaagatgacttacagttatttaaaggcttcttgaaaatgaaagaagagtag

SEQ ID NO: 81094 - protein, 234 aa, Enterococcus faecalis V583
MITALIIAGGVGKRMGQEIPKQFIMVEEKPIIIYTLESFQKHPLIDRILVVCKKGWEQTLDAYAKEYHIDKLQWIIPGGNSGQESINNGVNFLKEHSNPEDTIVIHDGIRPLVDELVLSDVIVKCQEYGNAVTSLPYNEQIFVKETEETTRQYINRETLRRVSTPQAYKFEKLTWAYEKAFRENIGISESSYTNTMMVDLGETLHFALGSDKNIKLTTQDDLQLFKGFLKMKEE

SEQ ID NO: 81095 - DNA, 732 bp, Treponema denticola ATCC 35405
  CDS (1)..(732): transl_table=11
atgaggacgattaaaagtttaggctttgccgccgtaataactgcagcaggcaaatcccaacgaatgaatttagatacaaaaaaagaatatttaagattacctgaatacggagagggcgttacggttctctccgaatgccttttaaaatttttacaaacaaagctgtttgaagtcatagttgttactgttcctgccaaagatatttcggacgcaaataatttaatcttcaacgataaaagaattgaaaaagctctgcttaaaaaaaatacaaaaataatctttacggcaggtgccgatacaagacagacttccgtctttaaagcccttgctaaactcggcgagcttaaagaaaaaaaagaagccgattttaactttgtattaatccatgacggagcccgcccctgggtcagccctgagcttataaaacgagtctccgatgaggtaagcaagcgggaggcggtaatccccggctaccaagccgttgatacacaaaaaatcgccgataaatccggtaaaataacccaacacttaaaaaggagttccgtatattcggtacagacccctcaaggattcgactttgaaaagatactggcagctcataaacaagccctagaaaacggaaaagaatatacagacgacagcgaaatttatggagaatttgccggagacgtttttatctgcacgggagaagtatccaacaaaaaaataacttttaaggaagatataaaatga

SEQ ID NO: 81096 - protein, 243 aa, Treponema denticola ATCC 35405
MRTIKSLGFAAVITAAGKSQRMNLDTKKEYLRLPEYGEGVTVLSECLLKFLQTKLFEVIVVTVPAKDISDANNLIFNDKRIEKALLKKNTKIIFTAGADTRQTSVFKALAKLGELKEKKEADFNFVLIHDGARPWVSPELIKRVSDEVSKREAVIPGYQAVDTQKIADKSGKITQHLKRSSVYSVQTPQGFDFEKILAAHKQALENGKEYTDDSEIYGEFAGDVFICTGEVSNKKITFKEDIK

SEQ ID NO: 81097 - DNA, 672 bp, Prochlorococcus marinus str. MIT 9515
  CDS (1)..(672): transl_table=11
gtgcatgtattaatacccgctgcaggtagtggcagaagaatggaagctggaaaaaataaattacttattgatttagaaggtgaatctcttatttattggactttaaaatctgtattctctgcaagtttggtaagttgggtaggaataattggacaaccaaatgataaaaaaaaattattaaattcagtaaaaaaattttctaatgaaattgaatggattaacggtggaaatacaaggcaagagtctgtctttaatggtttaaattcactaccttctaatgctgagaaagttttaattcatgatggtgcaagatgcttaataaatcctgacttgatcaataaatgtgctttggaattagaagaaaatgatgcagttattttagctactaaagttacagacacaataaaaatagttgataatgaaggttatatccaacaaacgccaaatagacaaaatttgtgggcagctcaaactcctcaaggttttctagtgaagaaattaagagaagctcatgaaatggcgattgagaaaaattggaaagttacagatgatgcctcactctttgaaatgttgaattggcaagtgagaattattgaagggaattcttcgaacataaaaatcacatctccattagatttgcaaatagcgaaactatttttaaaagattattag

SEQ ID NO: 81098 - protein, 223 aa, Prochlorococcus marinus str. MIT 9515
MHVLIPAAGSGRRMEAGKNKLLIDLEGESLIYWTLKSVFSASLVSWVGIIGQPNDKKKLLNSVKKFSNEIEWINGGNTRQESVFNGLNSLPSNAEKVLIHDGARCLINPDLINKCALELEENDAVILATKVTDTIKIVDNEGYIQQTPNRQNLWAAQTPQGFLVKKLREAHEMAIEKNWKVTDDASLFEMLNWQVRIIEGNSSNIKITSPLDLQIAKLFLKDY

SEQ ID NO: 81099 - DNA, 747 bp, Prochlorococcus marinus str. MIT 9303
  CDS (1)..(747): transl_table=11
ttgcgagctgattgtatggaggaggtttcagcctgcttgcggcaggaggcgcatatgcatctgttgattgtcgctgcaggaagcggaagccgtatgggagcggatcgcaacaaattgcttttgcctctggcaggacgccctgttcttgcttggacgattgatgcggtgatgggagccgattcgatcacttgggttggcattgttggccaacctgttgaccgagcaatgatcatggagttgttggctgaggcagccaaacccgttgtttggattgaggggggcagcacaaggcaggaatccgtagagcgtggattacaggcgttgccttcagttgcgcagcatgttcttattcatgatggggctagatgtttagctgaagcggctttgatcaatcgctgtgctgaggcggtggtggctggcgaagcggtgattgcggcaactcctgttaccgacacgatcaagcgagttgatggtcaagggatcattacgggcacaccagatcgtgcggaactttgggcagcccagactccgcagggctttgctgtggagcagctcaagcaaggtcatgctgaggctcaggccaagggttggacagtgactgacgatgcctcgctttatgaacgcctgggatggccggtgcaggtgttggaggccagccctgccaatatcaaggtgactacaccgtttgacctcacggtggccgaagcagtgcttgcgcttagggcaaaaaggcagataggtctctag

SEQ ID NO: 81100 - protein, 248 aa, Prochlorococcus marinus str. MIT 9303
MRADCMEEVSACLRQEAHMHLLIVAAGSGSRMGADRNKLLLPLAGRPVLAWTIDAVMGADSITWVGIVGQPVDRAMIMELLAEAAKPVVWIEGGSTRQESVERGLQALPSVAQHVLIHDGARCLAEAALINRCAEAVVAGEAVIAATPVTDTIKRVDGQGIITGTPDRAELWAAQTPQGFAVEQLKQGHAEAQAKGWTVTDDASLYERLGWPVQVLEASPANIKVTTPFDLTVAEAVLALRAKRQIGL

SEQ ID NO: 81101 - DNA, 714 bp, Clostridium difficile 630
  CDS (1)..(714): transl_table=11
atgtatagtgttataattgttgcagcgggaagcggaaggagaatgaacttagatataaacaaacagttcataaaattaagagaaaaagaaattattgctcatacaattcaagttttttatgaaaatataaatatagatgaaatagtggtatgtataaaaaaagaagaagaagatttttttaaagaaaatataataaataagtataactttaaaaatataaaaatagcatatggcggaaaagaaagacaggactcaatatataatggtttaaaaaaattagataaaaattgtgatatagtacttatccatgatggagcaagaccatttgtcgaccatagaataatcaacgaatctataaaggtagctaaagaaaaaaaggctgtggttgtaggtgttccagtaagtgatactataaagatagtgtcagatggaacagtaaaagaaactccagaaagaaatttgctgtgggcagcacaaacccctcaaacctttgaatataatctcataatagatgcttatgaacaagcatataagaacaattattatggtactgatgattcaatgttggtagaaaatataggtcaaagtgtcactatggtaatgggttcttatgaaaacataaaaataactagtccagaagatttaaatatagcagaacaaatattaaatatggaaaaaagagatgaagttaacagtagaaggagaattatatga

SEQ ID NO: 81102 - protein, 237 aa, Clostridium difficile 630
MYSVIIVAAGSGRRMNLDINKQFIKLREKEIIAHTIQVFYENINIDEIVVCIKKEEEDFFKENIINKYNFKNIKIAYGGKERQDSIYNGLKKLDKNCDIVLIHDGARPFVDHRIINESIKVAKEKKAVVVGVPVSDTIKIVSDGTVKETPERNLLWAAQTPQTFEYNLIIDAYEQAYKNNYYGTDDSMLVENIGQSVTMVMGSYENIKITSPEDLNIAEQILNMEKRDEVNSRRRII

SEQ ID NO: 81103 - DNA, 711 bp, Anaplasma marginale str. St. Maries
  CDS (1)..(711): transl_table=11
atgcgcagttgtgcgatggttgttgtagctgccggagagggtagtaggctctgcgttgctgggttacccaaacaatatgtgaaaattcacaagcaggcagtgttgtggtactccattgttagctcattcgcgccttacatacacaaggtgagggttgtcataagagaggggcacgatgtactttaccaaaatgccataaaatctctgccttcggcaattacagacaggctcctgcctccggtatatgggggcgatagaaggcaagattccgtacgcataggcttggaaagcctggatggcatgaagcccagtattgtggtaatccacgacgcatgccgtccatttgcccaagcgatatcagaaagtaaagtcacagatgcactcacgcagcactcaggggttgtccaaacattacctgtggttgatacaataaaagtcgtgtcagacaataccatagtgggaagtgtagatcgggaaactgcgcgtatagtacaaactccgcaggtgtacacataccgagatgtgcttgcgtgccacagcgcggtgcaccgcacaaacccctatcagtatttcacggatgattcatcagtcatgctggagtgcgggatgtcagttgcggttgttgaggggagccgtaacaatttcaaaatcaccacagctgaggatatattacaggcagagctacacctttccagtgttcctcataattaa

SEQ ID NO: 81104 - protein, 236 aa, Anaplasma marginale str. St. Maries
MRSCAMVVVAAGEGSRLCVAGLPKQYVKIHKQAVLWYSIVSSFAPYIHKVRVVIREGHDVLYQNAIKSLPSAITDRLLPPVYGGDRRQDSVRIGLESLDGMKPSIVVIHDACRPFAQAISESKVTDALTQHSGVVQTLPVVDTIKVVSDNTIVGSVDRETARIVQTPQVYTYRDVLACHSAVHRTNPYQYFTDDSSVMLECGMSVAVVEGSRNNFKITTAEDILQAELHLSSVPHN

SEQ ID NO: 81105 - DNA, 1293 bp, Silicibacter pomeroyi DSS-3
  CDS (1)..(1293): transl_table=11
atgaagcaacggccatcgcacaatgaatccccccggatcaagggccaggaattacgcatctgcctaatttttaatcgcttcaccacgggtcattgccagcgaaggcgtcaccccataaagatcgggcatcacccgcctgccccgcgcccgaggaccgccatgaccacagccgccatcatcgttgccgccgggcgtggcacccgcgcgggcgggggcgtgcccaaacaatggcgcccgctggccgggcgccgggtggccgactggacgctggaccgctttgcgctccggcagatcacccatgtcgttctggtgctgcatcccgaggaccacgacgcctgggacgagtttgccacgaccccgctgatcctggcgccgggcggttctgatcgcgcgggctcggtccgaaatgggctggcggcgctggacggtctgggcatcaccaaggtgctgatccatgacgtcgctcgtccctgtgtctcggccgctacgatcggtgccgtactggacgcgctcgacgcccatcccggcgcggcgcccgggctggcggtgaccgatgcgctctggaccggggccgagggtctggtgaccggtacccgcgagcgcgacgggctgtttgccgcgcagacaccgcagggctttcgctatgacgccatcgtcgcggcccacgccgcccaccccggcggggcggcagatgatgtcgaggtggcgcgcgccgccgagttgaccgtggccatcgtgccgggcgaccccgacaacctgaaaatcacgcgggccgaggatttcgcccgcgccgaacggatattgaggcaggacatggatgtaaggcttggcaatggatatgacgtgcaccggttcggaccgggcgatcacgtgatcctttgcggcatcaaggtgccgcatgaccggggtctgcaaggccattccgatgccgatgtgggcatgcatgcggtcaccgacgcgctctatggcgcgctggtcgagggcgatatcggccgccatttcccgccctcggacccgcaatggaagggcgcggcgagcgagatcttcctgcgccatgcggtcgatctggtgcgcgcgcgcggtttcgctgtgtccaacatcgactgcacgctggtgtgcgaataccccaagatcggcccgcatgcccttgagatgcaggcggaaatggcccggatcatggggctggaggcaagccgggtatcggtcaaggccacgacctccgaacggctggggttcaccggccggagcgaaggcatcgccgcgctggccaccgcctgtctggtgaaaccatga

SEQ ID NO: 81106 - protein, 430 aa, Silicibacter pomeroyi DSS-3
MKQRPSHNESPRIKGQELRICLIFNRFTTGHCQRRRHPIKIGHHPPAPRPRTAMTTAAIIVAAGRGTRAGGGVPKQWRPLAGRRVADWTLDRFALRQITHVVLVLHPEDHDAWDEFATTPLILAPGGSDRAGSVRNGLAALDGLGITKVLIHDVARPCVSAATIGAVLDALDAHPGAAPGLAVTDALWTGAEGLVTGTRERDGLFAAQTPQGFRYDAIVAAHAAHPGGAADDVEVARAAELTVAIVPGDPDNLKITRAEDFARAERILRQDMDVRLGNGYDVHRFGPGDHVILCGIKVPHDRGLQGHSDADVGMHAVTDALYGALVEGDIGRHFPPSDPQWKGAASEIFLRHAVDLVRARGFAVSNIDCTLVCEYPKIGPHALEMQAEMARIMGLEASRVSVKATTSERLGFTGRSEGIAALATACLVKP

SEQ ID NO: 81107 - DNA, 729 bp, Ehrlichia ruminantium str. Welgevonden
  CDS (1)..(729): transl_table=11
atgtatcagtttgtattactaattgttgcagctggcaatagtaagagactcaaaggcagtgaaaaacctaaacaatatatggaattaggtcattatcctatactatatcacacaatcaacaacgtaattactaccccttatattggctatgtgaaagtagttatcagacaagaacatgaatacttatataatagctgtataaaaaaaatacatagtagtaagcttttaccattctcatatggaggaacaagaaggcaggattccgttcgcattggattagaaagtataaaataccttaatccggattttgtaataatacatgacgcatgccgtccttttattagtaccacgctattagataaaatgttaccgcaattaaccaactatgtaggagtaattccagtattatcgattactgaaactatccatatgataaacgaaaaccatactattattaaaaatataaatcgaaacacattaaaattagtacagactcctcaaatatataggtacactgatatactatcgtctcatatgctttcctataccaccgaccccactaaagaatttccagatgaatcatctctaatgatacactacaattttccaatagcaacaattgaaggtagtaactataatttgaaaattacaacaaatgacgatttacatatagcaaccttattatataaatctatgaatactaaagttcctaatcatacccttaactga

SEQ ID NO: 81108 - protein, 242 aa, Ehrlichia ruminantium str. Welgevonden
MYQFVLLIVAAGNSKRLKGSEKPKQYMELGHYPILYHTINNVITTPYIGYVKVVIRQEHEYLYNSCIKKIHSSKLLPFSYGGTRRQDSVRIGLESIKYLNPDFVIIHDACRPFISTTLLDKMLPQLTNYVGVIPVLSITETIHMINENHTIIKNINRNTLKLVQTPQIYRYTDILSSHMLSYTTDPTKEFPDESSLMIHYNFPIATIEGSNYNLKITTNDDLHIATLLYKSMNTKVPNHTLN

SEQ ID NO: 81109 - DNA, 654 bp, Chlamydophila abortus S26/3
  CDS (1)..(654): transl_table=11
gtgtacggtgtgtctatggatcctaagtgttctttgattttacttagtgggggtaaaggagaacggtttggagcaaatcaacctaagcaatacttaccttttcgaggggaacctctcatcctccatgcattaaacatggccttgcgtatccccgaaatctcagaaattattgttgtttgtgatgtaaactacgaaagtatttttgaaggttatcccgtaaaatttgcacgaccagggacacggcgtcaagattctgtattttccggactacagcaagtcgcaaatccttgggttttagttcatgatggtgtacgaccttttatttatcccgatgaagttacagaactggtcacagctgcataccaaacaggagcggcaacgttagtttctaacgttccctatactatcaaacaacgtgatcctgtaaaaactttagaccgcgatgcgttatctattgtccatacaccgcaatgcatcaagacacagatcctcttagagggcctcgaacgggctaatcaagagagaataactctcgttgatgatacacaagctgcagaacttctcaacctacctgttgctttagtattcaataaacatccacagataaaagtgacttatccagaagacctaaccttagctcatgctttgttatga

SEQ ID NO: 81110 - protein, 217 aa, Chlamydophila abortus S26/3
MYGVSMDPKCSLILLSGGKGERFGANQPKQYLPFRGEPLILHALNMALRIPEISEIIVVCDVNYESIFEGYPVKFARPGTRRQDSVFSGLQQVANPWVLVHDGVRPFIYPDEVTELVTAAYQTGAATLVSNVPYTIKQRDPVKTLDRDALSIVHTPQCIKTQILLEGLERANQERITLVDDTQAAELLNLPVALVFNKHPQIKVTYPEDLTLAHALL

SEQ ID NO: 81111 - DNA, 885 bp, Ralstonia eutropha JMP134
  CDS (1)..(885): transl_table=11
gtgcgccgcttgccggattggcaaggcggcatggcggcaaacaagggccgtattatagaatgcgctccggccacggcgcaggccatcgccgtgacgttttcaacgcattttccatttcatcccgaccctgtgtccgaccgccgcttcgccttgattccctgtgccggtaccggcagccgcgcgggtggctccgtgcccaagcaataccagcccgtcgcgggccggcccatgatctggtacgcgctggcagcgttttcggcctgtgacgcgatcagtgccaccgcgctggtgctggcgcccgacgacatgccgctggagtcgcgcttcggcgccgatatctttgccggcttgcgcttcgataccgcttttgtcggcggcgacacgcgccacgcgtcggtgctcgccggcctacatcacctggcgcagctcggcgctaccgacactgactgggtgctggtgcacgatgcggcacgaccgggcctgacgcccgcgatgatccataacctggtgcgcgccgtcgaaagcgataacgacgatgatcccgatgcggcaatcggcggcatcctggccgtgcccgtccccgatacgctgaagcgtgccgatgccggcgagcgcatcggcaccacagtgccgcgcgacggactgtggcaggcccagaccccgcagatgtttcgcgtcggcgtattgcgccaggccttgcaggacgccctggccgcgggcgcggtggtgaccgacgaagccagcgcgatcgaacggctgggcctgcatccgcggctcgtcaacggttcgctgcgcaatttcaaagtgacatatccggaagacttcgcgctggccgaagtgctgctcggcaccgggccggccaggtctgccgattcaggagcctga

SEQ ID NO: 81112 - protein, 294 aa, Ralstonia eutropha JMP134
MRRLPDWQGGMAANKGRIIECAPATAQAIAVTFSTHFPFHPDPVSDRRFALIPCAGTGSRAGGSVPKQYQPVAGRPMIWYALAAFSACDAISATALVLAPDDMPLESRFGADIFAGLRFDTAFVGGDTRHASVLAGLHHLAQLGATDTDWVLVHDAARPGLTPAMIHNLVRAVESDNDDDPDAAIGGILAVPVPDTLKRADAGERIGTTVPRDGLWQAQTPQMFRVGVLRQALQDALAAGAVVTDEASAIERLGLHPRLVNGSLRNFKVTYPEDFALAEVLLGTGPARSADSGA

SEQ ID NO: 81113 - DNA, 696 bp, Ehrlichia canis str. Jake
  CDS (1)..(696): transl_table=11
atgtataaatttatactattaattgttgcagcaggtaacagcagcaggtttaaatggaatattactcctaaacagtattgtttactaggaaatcacaatatactctgtagtacaatcaataatatgatctcacatcctaaaattagccacgtaaaagtagtcataaggaaagaacaccaacacttatacagtagcagcctaccaaaacacgacaaactcttaccaccagtctacggaggagcacgcaggcaagactctgtacgcataggattagagagccttcaagacataaatccacattttgtaataatacacgatgcttgtcgtccttttgtagatttaaaattactggatacaatggaaccaatactaaatcattacgcaggagtagtaccagtgctttcaataattgatactgtacatatggtacatgaagacaatacagttatgaaaaatatagatagagatacaatcaaactcgttcaaacaccacaagcatacaaatataacgatatactattataccataaaactgcatatgatattgaaccttacaatgaattccctgatgaatcatctctcatgctacactataacattccaattatgactgtcgaaggtgattacaataatttcaagatcacaactatagaagatctacatagagcaatcttatatactaaatacacaaattaa

SEQ ID NO: 81114 - protein, 231 aa, Ehrlichia canis str. Jake
MYKFILLIVAAGNSSRFKWNITPKQYCLLGNHNILCSTINNMISHPKISHVKVVIRKEHQHLYSSSLPKHDKLLPPVYGGARRQDSVRIGLESLQDINPHFVIIHDACRPFVDLKLLDTMEPILNHYAGVVPVLSIIDTVHMVHEDNTVMKNIDRDTIKLVQTPQAYKYNDILLYHKTAYDIEPYNEFPDESSLMLHYNIPIMTVEGDYNNFKITTIEDLHRAILYTKYTN

SEQ ID NO: 81115 - DNA, 642 bp, Synechococcus sp. CC9605
  CDS (1)..(642): transl_table=11
atgggtgcggatcgcaacaagctgctgctgccgttggccggacgccccgtcattgcctggaccattgaggcggccctgcggtctgagcggattgaatggatcgggatcgttggccaggaggttgatcgagaggccatccttgcggtgctggatgagcccagcaagccggtgcactggatccagggcggcagcacgcggcaggagtcggttctgtgtggtctggccgggttgcctgagcaggctcgccacgtcttgattcatgacggcgcccgttgtctggctgaaccgaagttgtttgatcgctgtgcagctgtggtggaggacggcacggcgctgattgctgcaacgccggtgagcgacacgatcaagcgtgtgggatccgacggtgtgattcgcgatacgccggatcgatcggagctctgggcggcgcagacgccgcagggctttgctgttgatcagctgcgtcgcggccacgctgaggcggttgcccagggctggacggtcaccgacgatgcgtcgttgtatgagcgtctgggttggcctgtgcaggtcttggatgccggcccggccaacatcaaggtcaccacaccgtttgacctcaccgttgcggaagcggttctcgccctcaggtcagcaggctga

SEQ ID NO: 81116 - protein, 213 aa, Synechococcus sp. CC9605
MGADRNKLLLPLAGRPVIAWTIEAALRSERIEWIGIVGQEVDREAILAVLDEPSKPVHWIQGGSTRQESVLCGLAGLPEQARHVLIHDGARCLAEPKLFDRCAAVVEDGTALIAATPVSDTIKRVGSDGVIRDTPDRSELWAAQTPQGFAVDQLRRGHAEAVAQGWTVTDDASLYERLGWPVQVLDAGPANIKVTTPFDLTVAEAVLALRSAG

SEQ ID NO: 81117 - DNA, 1200 bp, Desulfovibrio desulfuricans G20
  CDS (1)..(1200): transl_table=11
atgcacacatgggcacttcttctggcggcaggccagagctccagaatagcggcagcatgtccgggcgtccgcaaacagtttctgctttggcagaacgcccctcttttctggcattccgcagtcatgctttcccgcgtcagtcgcatgcggggcataatttttgtttttcctgaagacatgctggaagaggcaaccgccatggtcagggaactggatgcaggccgggcactgggcataccatggaaagccgtatcaggcggtgcccgtcggcaggattccgtcgccagcggtctcgggcagcttccggcagagtgcgatacggtgcttgtgcatgatgcagcaagaccttttgccagcgcgtcacttaccaacagcattctggatgcgttgcaggccggagctgaaggagtggtgccggcactggccgttaccgacactataaaggtggtagaagacggcgcggtgctttcaactccggacaggacaaagctcgtggccgttcagactccacagggtttcagccttcaggcgctgctcggtgcgcaccgtcattgcgcagaaaaagcactggccgtcaccgatgatgcatccatgctcgaactgctcggacaacatactgtcataacagtggaaggtgaggcatccaacataaaagtgacgcatccggaggatctgaccatgctgcattcttcagaaaaaaagaatatgcaagtcccctgtgtcggatggggatacgacgtgcaccggttcggttctgacggccgtcccatgaaacttggcggtgtgcccatagcaggcggcccgggcgttatagcgcattcagacggtgacgtgctgctgcatgcccttacagatgccgtgctcggctgcatggggctgggagacatcggcatgctgtttcccgacacagatgcggcgtacgataatgctgatagtgccgtcatgctgaacgaggtgcttgaaaaagccagaaatgcaggcctgctgattacgcacgttgatctgacgataataacgcagattcccagaatcacaccatggcgcgaccagatacataaaaatatctgcagaatcacccgcctggacgcatcttctgtcaacctgaaggcgacaacagaagaaaaactgggcttcaccggggaaaagaaagggataaaggcagttgcggccgtgaccgctctgcgccgggtctcttcctga

SEQ ID NO: 81118 - protein, 399 aa, Desulfovibrio desulfuricans G20
MHTWALLLAAGQSSRIAAACPGVRKQFLLWQNAPLFWHSAVMLSRVSRMRGIIFVFPEDMLEEATAMVRELDAGRALGIPWKAVSGGARRQDSVASGLGQLPAECDTVLVHDAARPFASASLTNSILDALQAGAEGVVPALAVTDTIKVVEDGAVLSTPDRTKLVAVQTPQGFSLQALLGAHRHCAEKALAVTDDASMLELLGQHTVITVEGEASNIKVTHPEDLTMLHSSEKKNMQVPCVGWGYDVHRFGSDGRPMKLGGVPIAGGPGVIAHSDGDVLLHALTDAVLGCMGLGDIGMLFPDTDAAYDNADSAVMLNEVLEKARNAGLLITHVDLTIITQIPRITPWRDQIHKNICRITRLDASSVNLKATTEEKLGFTGEKKGIKAVAAVTALRRVSS

SEQ ID NO: 81119 - DNA, 1155 bp, Rhodospirillum rubrum ATCC 11170
  CDS (1)..(1155): transl_table=11
atggcgaaagtcgcggcgctgatcgtggccgccgggcgcggaaagcgctttggcggcgacctgcccaagcagtatcaaacccttggcgggcgaccgatcctccgccacaccctggcccgtttcgccgcccaccccgatgtcgccctggtccgcgccatcatccatcccgaggatcgcgacctctatggcgccgccgcccatggcctcgccaccctgctcgacgcggtcgagggcggggccgagcgccaggattcggtgcgcctcgggctggaaagcctgaccgatgtcgcccccgattacgtgctgatccacgatggcgcccggccgctggtcgatggcgcgctgatcgaccgggtgatcgccgccctggccgatcaccccggcgccattcccgccctggccgtggccgacaccctgaagcgcggggccggcggcatgatcggccaaaccgtcgatcgcgccggtctgtggcgggcgcagaccccccagggcttccgctacgacgccatcctcgccgcccaccgggcccaggccggcaccatgctcaccgatgacgccgccgttctcgaagccgccggcggcgccgtcgccctggtcgacggcgccgaggacaacgccaagatcacgaccttcgccgatctggagcgggccgaacggctgtttcgcggcgagggcgagcagcggatcggctcgggcttcgatgtccatcgcctggggccgggggatttcgttaccctcaacggcatccgcattccccatagccatgggttggttggccattccgatgcggacgcgccgatgcacgccctgaccgacgccctgctcggctgcctgaacgccggcgacatcggccggcatttcccaccctcggacatgcgctggaagggggcggattcggcgattttcctgcgccatgcggcggcgctgatcaccgccctgggcgggcgcatcctcaatgtcgatatcacgatcttgtgcgagcagcccaagatcggcccgcaccgcgcccgcatgtcggcgcggctggccgaaatcctcgaaatctcggcgacccgcgtcgccgtcaaggccaccaccaccgaggaactgggcttcaccggccgtggcgaaggcatcgccgcccaggccacggcgctgatcaccctgcccttctaa

SEQ ID NO: 81120 - protein, 384 aa, Rhodospirillum rubrum ATCC 11170
MAKVAALIVAAGRGKRFGGDLPKQYQTLGGRPILRHTLARFAAHPDVALVRAIIHPEDRDLYGAAAHGLATLLDAVEGGAERQDSVRLGLESLTDVAPDYVLIHDGARPLVDGALIDRVIAALADHPGAIPALAVADTLKRGAGGMIGQTVDRAGLWRAQTPQGFRYDAILAAHRAQAGTMLTDDAAVLEAAGGAVALVDGAEDNAKITTFADLERAERLFRGEGEQRIGSGFDVHRLGPGDFVTLNGIRIPHSHGLVGHSDADAPMHALTDALLGCLNAGDIGRHFPPSDMRWKGADSAIFLRHAAALITALGGRILNVDITILCEQPKIGPHRARMSARLAEILEISATRVAVKATTTEELGFTGRGEGIAAQATALITLPF

SEQ ID NO: 81121 - DNA, 783 bp, Frankia sp. CcI3
  CDS (1)..(783): transl_table=11
gtgaccgacaccgctgtcgccgtcgccaacggtgcggggagcaccgggaacagcggcccggtctggacgatcgtgctggccggcggcggcggcacgcgtttcggcgggccgaaacagttcttcgacctcgggggtgagcccctgctcgcccatccggtcgcggcggcgcggcccgccagtgacggcatcgtcgtggtcgtccccgccgccctgatcggccactggtcaccgccggacggagtgcggatggtcgctggcggcgccacccgggccgagtccgtccgggcggggctggctgccgtgcccgcggacgccggggtcatcgtggtcaccgacgccgcccatccactcgcgactcccgccctgtaccagcgggtcatcgacgaggtccgcgccggcgccgacgcggccgtacccgggctcccgctcaccgaggtcgtcaaggagatccgctcgacggtgctcggcagcccccccgacgacaccccccggttggtcaccggggcctcgctgccgcgggagactcaccggctcgtgcagaccccgcacgccttccgggcggacctgctgcgctccgtgcacgcggaggcccgcgaggccgtcgaggactcggcgatggttgccgcggccggcggcctggtcgtggtcgtccccggcgagccggcgaacatccatgtcaccacgccggacgaactcgccatggcccggctgcttctcacccatgttcgttccgagggggaacctaatgagttcggtactggtcgaatccacgctgtccgatga

SEQ ID NO: 81122 - protein, 260 aa, Frankia sp. CcI3
MTDTAVAVANGAGSTGNSGPVWTIVLAGGGGTRFGGPKQFFDLGGEPLLAHPVAAARPASDGIVVVVPAALIGHWSPPDGVRMVAGGATRAESVRAGLAAVPADAGVIVVTDAAHPLATPALYQRVIDEVRAGADAAVPGLPLTEVVKEIRSTVLGSPPDDTPRLVTGASLPRETHRLVQTPHAFRADLLRSVHAEAREAVEDSAMVAAAGGLVVVVPGEPANIHVTTPDELAMARLLLTHVRSEGEPNEFGTGRIHAVR

SEQ ID NO: 81123 - DNA, 1161 bp, Novosphingobium aromaticivorans DSM 12444
  CDS (1)..(1161): transl_table=11
atgaacagtgtcccgtcccttcccggccagtcggttgccgcagttgtcgttgccggtggcaaggggctgcgcacgggcgggcccgtgccaaagcagttcgtgatctggcgcggaaagccgcttttgcgccattgcgtggaggcactcgaggccgccggaattgcaccgatcgtcgtcgccattcccgcaggctgggacgaagcggcgacgcaggcgttggcgggaatctccatggtccgcctcgttcacggcggtgcgacacggcaggaatctgtgaaggccgcgctcgaagtgctggaaggcgatgcgcccgctcgcgtgctcatccatgatgccgcacggccagacctgccgggttccgtgatcgaaaggctcctcaccgcgctggacaagcgtaccggggccattccggtgctgcccgttgtggacagcatggtgcgcggatccggagacgcgatgggcgaaacggttgcccgtgaagacctgtatcgcgtccagactccgcaagcgttccactatccggcaatccttgccgcccatagggcctggcagggtgaggctcttgccggcgatgacgcgcaagtggccatgcgagcagcgcacgagatcgcgctcgtcgagggcgatgaagcattgcgaaaggtgacgttcgcgtccgatctcgaggagcagagcatgagcgtcattccccgcaccggaatgggcttcgacgtccataggctggtggaaggcgaggaactttggctttgcggggtgaatatcccgcacggaaaaggtctttcaggacattcggatgcggacgtcgcgatccacgcacttgtcgacgcattgctcggcgcgattgcggcgggggatatcggcgatcattttccgccgtccgatccgcagtggaagggggcctcgtcggaccgttttctcgcgcacgcgggcaccctggtgaccgaagcgggttaccggatagcgaacgtcgacgtgacgattatctgcgaagccccgaagatcggaccgcacaaggcggccatgcgcgagacgcttgcccggattctcgggattgactccgcgctggtctcggtcaaggcgacgacgacggaacgccttggactgactggtcggggcgaaggcatagcggcgcaggccgtggcaacagttgtctcgggctga

SEQ ID NO: 81124 - protein, 386 aa, Novosphingobium aromaticivorans DSM 12444
MNSVPSLPGQSVAAVVVAGGKGLRTGGPVPKQFVIWRGKPLLRHCVEALEAAGIAPIVVAIPAGWDEAATQALAGISMVRLVHGGATRQESVKAALEVLEGDAPARVLIHDAARPDLPGSVIERLLTALDKRTGAIPVLPVVDSMVRGSGDAMGETVAREDLYRVQTPQAFHYPAILAAHRAWQGEALAGDDAQVAMRAAHEIALVEGDEALRKVTFASDLEEQSMSVIPRTGMGFDVHRLVEGEELWLCGVNIPHGKGLSGHSDADVAIHALVDALLGAIAAGDIGDHFPPSDPQWKGASSDRFLAHAGTLVTEAGYRIANVDVTIICEAPKIGPHKAAMRETLARILGIDSALVSVKATTTERLGLTGRGEGIAAQAVATVVSG

SEQ ID NO: 81125 - DNA, 708 bp, Anaplasma phagocytophilum HZ
  CDS (1)..(708): transl_table=11
atgcctcttttcgttgtacttatagtagctgctggagaaagcaggagattgggaaataagaaccaactgaagcaatatctcaggattcaacgtcattctgtgcttgcgcataccatcactcagatggttacttcatttgtacattctgtgaaggttgtgatcggacaggggcaggatgctttctacgaacattccctcttatctcttcctaaaaaggtgacggatttgcttataccaccagtatatggtggagctcgcagacaagattctgtgcgcataggtttggaaagcattgaacacattaatccagaatttgtaataatacatgatgcctgtcgcccttttgctagtttgccaagtgctgacgttataacttaccatctacgggatcatgctgggattgtacctgttttgcagcctagcgataccataagtcgggttgaaaactcagttattatggaggaaatagcgaaggattccgttagaatagttcagacacctcaaatatacaggtacaaggatattttgagatgtcacaaagaagtttacagcacagatccggagaaatatttctcagatgagtcatcagtaatggtagcgtgtgggatgtcagttatcactacagagggagattataacaactttaagattactaccgccgaggatgttactagggctgagttgtatatgcaacacatgggtagttag

SEQ ID NO: 81126 - protein, 235 aa, Anaplasma phagocytophilum HZ
MPLFVVLIVAAGESRRLGNKNQLKQYLRIQRHSVLAHTITQMVTSFVHSVKVVIGQGQDAFYEHSLLSLPKKVTDLLIPPVYGGARRQDSVRIGLESIEHINPEFVIIHDACRPFASLPSADVITYHLRDHAGIVPVLQPSDTISRVENSVIMEEIAKDSVRIVQTPQIYRYKDILRCHKEVYSTDPEKYFSDESSVMVACGMSVITTEGDYNNFKITTAEDVTRAELYMQHMGS

SEQ ID NO: 81127 - DNA, 699 bp, Neorickettsia sennetsu str. Miyayama
  CDS (1)..(699): transl_table=11
atgggtaaaattgccggtctagttgttgctggaggtggtggttcgaggataacgaattcggttctcccaaagcagtacttgcaggtccgcggcaaggcaattttgcagtacacagttgaagccctttttgcccatccgaaaattgagtgtgtacaccttgttgtcaattcaaagtgtgaggtgcactatttgccaattttgcgcaacttgagtgggtatgtagtttcattgtcagaagctggtaatactcgaacggattcagttttttctgggctaaaggcgttagagtgcttaaatcctagtcacgtattgatacaggatgcagctaggccttttacgacccctaaggtgatcaatgcagtaattaagagcttattggagggttgtgagggtgttgttccagttgtgccggtacaggacacaatcataaaaagagaacctgaaggtatagtaaccgatgtcaatagagatgagttaagaatagtgcagacgccacaagggtttgatttttgcaagatttttgcagcatataaggcgcacttcatgtgtccttctaagaggtatacagatgacggaagtctagcgcttgcacacggtataaaggtggaatgtatcccaggtgacagcagtaatcttaagattacccatccttttgatttgaagtttgctgattttctcttagcacagagtcaccgataa

SEQ ID NO: 81128 - protein, 232 aa, Neorickettsia sennetsu str. Miyayama
MGKIAGLVVAGGGGSRITNSVLPKQYLQVRGKAILQYTVEALFAHPKIECVHLVVNSKCEVHYLPILRNLSGYVVSLSEAGNTRTDSVFSGLKALECLNPSHVLIQDAARPFTTPKVINAVIKSLLEGCEGVVPVVPVQDTIIKREPEGIVTDVNRDELRIVQTPQGFDFCKIFAAYKAHFMCPSKRYTDDGSLALAHGIKVECIPGDSSNLKITHPFDLKFADFLLAQSHR

SEQ ID NO: 81129 - DNA, 711 bp, Ehrlichia chaffeensis str. Arkansas
  CDS (1)..(711): transl_table=11
atgcacaagttcacactgttaattgttgcagctggtaacagtaatagatttaaatggagtgctattcctaaacaatattgttcattaggtaatcataatatactttgcagtacaattaataatatgatctcacatcctaagattaattacgtcaaagtagtcattagaaaagagcaccaacatttatatgataattgcttacaaaaaatacaaaatgataaactattacctcctacctatggaggaaaaagaagacaggattctgtacgtatgggattagagagcattcaaaatataaatccatattttgtcataatacatgatgcatgtcgcccatttatagatttaaagatattagatacaatggaatcaatactaactcattatgcaggggttgttccagtactttcaataaccgatactattcatgtagtacatgaaaacaagactgttattcaaaatgttgacaggaacagtattaaattaatccaaacaccacaagcatataaatatagcgaaatactactacatcatagaattgcatataatactgaacccaacagagaatttccagatgaatcatctcttatgatacattacaacataccaataatgacaactgaaggagattacaacaattttaaaattacaactatagaagatttacatagagcaatcttatataccaaacatatagatcacaattattaa

SEQ ID NO: 81130 - protein, 236 aa, Ehrlichia chaffeensis str. Arkansas
MHKFTLLIVAAGNSNRFKWSAIPKQYCSLGNHNILCSTINNMISHPKINYVKVVIRKEHQHLYDNCLQKIQNDKLLPPTYGGKRRQDSVRMGLESIQNINPYFVIIHDACRPFIDLKILDTMESILTHYAGVVPVLSITDTIHVVHENKTVIQNVDRNSIKLIQTPQAYKYSEILLHHRIAYNTEPNREFPDESSLMIHYNIPIMTTEGDYNNFKITTIEDLHRAILYTKHIDHNY

SEQ ID NO: 81131 - DNA, 681 bp, Desulfitobacterium hafniense Y51
  CDS (1)..(681): transl_table=11
atgggagcctctgtcaataaacaattcctccctttacagggacgcccgcttctcgcccatactctctcgctctttgagcggtccggggctgtcgctgagattgtaattgtcagtgcaaaagaggatagggaacgaatcgctgaattggttcgtacagaaggttttcagaaggtctccgccattgtcttaggcggagaagaacgtcaggaatcagtatttgcgggggtaaaggctcttagctcgttaatccaaagggtggcggtccatgatggggcccgcccccttttgacttgtctggaattaaaccggttttttacagaggcggaaaagtttggggcagccattatggctgttccggtcaaggatacgattaaacgagtcgatgcccagggcaaggtcctggagacacctccccgggaaaccctgagggctgtccagactccccaagtctttgcccgctccctcctggaagaagcccatcataaggcaagagaagcggggtacctcaccacggacgatgccgctcttatcgaatggctgggtcaccctgtccaaaccctgatgggttccctggaaaatatcaaaatcaccactcccgaagacctggacctggccgaggctatcctcgccaagcgaatgaatcaggtgaatcatggggacaggtcccttgattcactctag

SEQ ID NO: 81132 - protein, 226 aa, Desulfitobacterium hafniense Y51
MGASVNKQFLPLQGRPLLAHTLSLFERSGAVAEIVIVSAKEDRERIAELVRTEGFQKVSAIVLGGEERQESVFAGVKALSSLIQRVAVHDGARPLLTCLELNRFFTEAEKFGAAIMAVPVKDTIKRVDAQGKVLETPPRETLRAVQTPQVFARSLLEEAHHKAREAGYLTTDDAALIEWLGHPVQTLMGSLENIKITTPEDLDLAEAILAKRMNQVNHGDRSLDSL

SEQ ID NO: 81133 - DNA, 696 bp, Saccharophagus degradans 2-40
  CDS (1)..(696): transl_table=11
atgggggttggtatccctaagcaatatttattgctgtgtggcaaaaccattttagagcatacccttcacaaaataagtcaggtagaaaacctaagcggcatcgttttagtgctagacgcaaacgaccaatactggcccacccttaactgcaatagcattcccaacctgcatgtggtgaatggcggcgctagccgtgcgcaatcggttaaaaatgggttgagctatatagcaaaacaaatagccaataacactgccaataacacaggccaagaccaagaagtaaaagtgttggttcacgatgcggcacgcccctgtgtaaatgtaaaaaatatagaaacacttgtggcgagctgtgagcaggcgaaccaaggtggaatattggcagcgcccgtggcagataccgtaaaacgtgcggttgaacagggcgaggcgcctgcagtgcaggcaacagtagatcgctctttgttatggctagcacacacgccgcagtattttgaattgcactgcctactcaatgcgctaaaccactgcgagcaagcggggctagaggtaaccgatgaggcatctgcaattgagcaaaccggtgggcaggtattattagttgccgacggtaaagacaatattaaaataacgctgccagaagatatgctggtagcagaagcaattttagcgaatcagttaaaacagggtacttag

SEQ ID NO: 81134 - protein, 231 aa, Saccharophagus degradans 2-40
MGVGIPKQYLLLCGKTILEHTLHKISQVENLSGIVLVLDANDQYWPTLNCNSIPNLHVVNGGASRAQSVKNGLSYIAKQIANNTANNTGQDQEVKVLVHDAARPCVNVKNIETLVASCEQANQGGILAAPVADTVKRAVEQGEAPAVQATVDRSLLWLAHTPQYFELHCLLNALNHCEQAGLEVTDEASAIEQTGGQVLLVADGKDNIKITLPEDMLVAEAILANQLKQGT

SEQ ID NO: 81135 - DNA, 717 bp, Methylobacillus flagellatus KT
  CDS (1)..(717): transl_table=11
atgccgcccatgtcgaaatttcatgccctgatccctgcagccggcaccggcagccgcatggggtccaagctacccaaacaatatctgccgctgaacggcaagccactcatctttcatgccttatccctttttgctgcggctccccgcatcagcgccgtgcatgttgtgatcgcaccggatgaccatctgtgggcacaatacggtgcgacgggtctggacgcaaaagtggtcgttcatgcgctgggcggcgcaacccgtgccactactgtcctgaatggactggaggcgatggtgcaccaagtggcggatgacgactggatattagtccatgatgcggcccggccgggattgagcatggccatgctggatcgtttgctggatagtgtgcaggacgatgcggtaggcggcctgctggcaattccattggccgatacactcaagcgtgcagatgccgggcagcgtgtcgcccatacagaatccagagagggtttatggcaggcgcagacgccgcagatgttccgttatgccctattgaagaatgcactgcgccaggcaagcggggcgcctacggatgaagcgcaggcagtggaggccctgggcttcagtccccgtctggtacccggcgaactcaggaacctcaagattacctatccgcaggatttacaactggcagaagcgattctgcttgcagatgccaaggagcagaaaacatcatga

SEQ ID NO: 81136 - protein, 238 aa, Methylobacillus flagellatus KT
MPPMSKFHALIPAAGTGSRMGSKLPKQYLPLNGKPLIFHALSLFAAAPRISAVHVVIAPDDHLWAQYGATGLDAKVVVHALGGATRATTVLNGLEAMVHQVADDDWILVHDAARPGLSMAMLDRLLDSVQDDAVGGLLAIPLADTLKRADAGQRVAHTESREGLWQAQTPQMFRYALLKNALRQASGAPTDEAQAVEALGFSPRLVPGELRNLKITYPQDLQLAEAILLADAKEQKTS

SEQ ID NO: 81137 - DNA, 825 bp, Ralstonia metallidurans CH34
  CDS (1)..(825): transl_table=11
atggcggcgggcgagggccgtattatagaatgcaccccggccggtttgccggccggtttccgatattccatctcccgcaaatccgtgtcagatcgccgcttcgccctgattccctgtgccggtaccggcagtcgtgccggaggccccatccagaagcagtaccagaccgtggccggacggccgatgctttggtatgcgctggccgccttttccgcttgcgatgccatcagcgccaccgcgctggtgctggcccccgacgacatgccgctcgagtcccgtttcggcgccgccgcctttgccgggctccgcttcgatacagcgttcgtcggcggtgattcccgccatgcctcggtactcgccggtctccatcatcttgggaccatgggcgcagtggataccgactgggtgctcgtgcacgatgcggcccggcccggcctgacgcccgcgatgatcgacacacttgtgcgcgctgtcgagtccgacgatgccgccagcgagccgatcggcggcattcttgccgtgccggtgccggacacgctcaagcgtgccgacgccgctgcccgcatcggcgccaccgtgccgcgcgaaggactgtggcaagcccagacaccgcagatgttccgaatcggcgtgctgcgccatgcgctggaggatgcgctggccgcgggcgcggtggtgaccgacgaggcgagtgcgatcgagcggcttggactgcatccgcgcctggtgaatggttcgctgcgcaacttcaaggtgacataccccgaggatttcgcgctggcggacgtactgttgcgcactggcacaccgacttccaacacgtga

SEQ ID NO: 81138 - protein, 274 aa, Ralstonia metallidurans CH34
MAAGEGRIIECTPAGLPAGFRYSISRKSVSDRRFALIPCAGTGSRAGGPIQKQYQTVAGRPMLWYALAAFSACDAISATALVLAPDDMPLESRFGAAAFAGLRFDTAFVGGDSRHASVLAGLHHLGTMGAVDTDWVLVHDAARPGLTPAMIDTLVRAVESDDAASEPIGGILAVPVPDTLKRADAAARIGATVPREGLWQAQTPQMFRIGVLRHALEDALAAGAVVTDEASAIERLGLHPRLVNGSLRNFKVTYPEDFALADVLLRTGTPTSNT

SEQ ID NO: 81139 - DNA, 738 bp, Acidobacteria bacterium Ellin345
  CDS (1)..(738): transl_table=11
atgtcgaaagttatcgtaatcattcccgcagccggccttggaacgcgcatggcccgcggcaaagctggtgtcacgtccaagcagttctttgagttgaacggaacgccgatccttattcacacattgcggaagtttgtagagtgcaagcaggtctcggagatctgggtcgcactgcgtaagaacgagatggcgggattccgcaaacacctcgaacaggcggggatcaagaaagagatcaaactggtagaaggcggcgagcaccgccaggattccgtggccaatgctctgaacgcgattgaggcgagtgcagacgacattgtgctggtgcacgatgccgtgcggccgttcgtgagcccggagacgattacagcggtgattgccgcggttgagaagcatggcgcggcgatcgcgggaacaccggcgattgacacggtgaagcaggtcgagcgaacttcggaaggcgcggtcatcacttcgacgattctccgagagcgcgtggtgctggcgcaaacgccgcagggattccgcttcggcactttgaagaaagcgttcgacgaagcgatccgagagggcttcagtggaactgacgaagcgagcctcatcgagcgcaatggtggcgcggtgcaggtggtgatgggctctgcgaacaacatcaagatcactacgcccgcggatctcgaactcgcggagttcttcatgtcgcaggaagatagccggaaagcgaacctcgccggatga

SEQ ID NO: 81140 - protein, 245 aa, Acidobacteria bacterium Ellin345
MSKVIVIIPAAGLGTRMARGKAGVTSKQFFELNGTPILIHTLRKFVECKQVSEIWVALRKNEMAGFRKHLEQAGIKKEIKLVEGGEHRQDSVANALNAIEASADDIVLVHDAVRPFVSPETITAVIAAVEKHGAAIAGTPAIDTVKQVERTSEGAVITSTILRERVVLAQTPQGFRFGTLKKAFDEAIREGFSGTDEASLIERNGGAVQVVMGSANNIKITTPADLELAEFFMSQEDSRKANLAG

SEQ ID NO: 81141 - DNA, 1149 bp, Silicibacter sp. TM1040
  CDS (1)..(1149): transl_table=11
atgaccctcgccgtattgatcgttgccgccggcaaaggcacccgcgcaggcggtggtctcgccaagcaatggcgcccactggccgggcgactggtcatcgactggacgatcgaggcctttcaacgtgcggggtgcggcaccatcatggttgtgcgcgatcccgacaatgagcacgcgatcgaggcgcttgcgccctaccctgaattattgctcgcagatggcggtccctcgcggtctgaatccgtgcgtaacggtttgattgcgctccaagagatcggtgtcgaacgcgttcttattcatgacgcggcgcgtccatgtgtgtgtcctcaggtgatccaacaggtgctcgacgcacttgatgacacgcctgctgccgcgccaggacttgcggtgacagatgcgctttggaccggggccgatggccatgtcacaggcacgcaggaccgaagcgcgctctttgcggcgcaaacgccgcaaggctttcattttgacgcgatccttgcggcgcatatgcgccacgacggcaccgcagcggatgatgtcgaggttgcccgtcaagcggggctcgcggtccgtatcacgccgggtgacgtcaataatatcaagatcacccggcccgaagatttctcccgcgccgagcacatattgaggagcaccatggacaacattcctgacatcaggcttggaaatggctatgacgttcaccggttcggacccggggatcatgtcatgctctgtggggttcaagtgccgcatgagcgcggtctgcaaggccattccgatgcggatgtgggcatgcacgcggtcaccgacgcactctacggggcgatggcagagggcgacatcggccgccacttcccgccaagcgaccctcagtggaaaggcgcggcgtcggacatcttcctgcgccatgcggtcgaattggcacgctccaaagggttcaccatcaataacgtggattgcaccctcgtctgtgaataccccaaagtcggcccccacgcagaggcgatgcgcgcccggatggcagagatcatgggcatggatatgggacgcctctcgatcaaggcgacaacttcagagcggcttgggttcaccggtcgcaaagaaggcatcgcggcactggcgacagcaacattggtgcgggcatga

SEQ ID NO: 81142 - protein, 382 aa, Silicibacter sp. TM1040
MTLAVLIVAAGKGTRAGGGLAKQWRPLAGRLVIDWTIEAFQRAGCGTIMVVRDPDNEHAIEALAPYPELLLADGGPSRSESVRNGLIALQEIGVERVLIHDAARPCVCPQVIQQVLDALDDTPAAAPGLAVTDALWTGADGHVTGTQDRSALFAAQTPQGFHFDAILAAHMRHDGTAADDVEVARQAGLAVRITPGDVNNIKITRPEDFSRAEHILRSTMDNIPDIRLGNGYDVHRFGPGDHVMLCGVQVPHERGLQGHSDADVGMHAVTDALYGAMAEGDIGRHFPPSDPQWKGAASDIFLRHAVELARSKGFTINNVDCTLVCEYPKVGPHAEAMRARMAEIMGMDMGRLSIKATTSERLGFTGRKEGIAALATATLVRA

SEQ ID NO: 81143 - DNA, 666 bp, Mycobacterium sp. MCS
  CDS (1)..(666): transl_table=11
atgaccacggtggccgttgttccggccgcgggttccggtcaacggctcgcggccggcgcgcccaaagcgttcgtgaatctcgccgggcggccgatgctcgaacgcgccatcgccgggttacggaattccggtgtggtcgacagcatcgtggtcgccgtcccaccgagccgcaccgacgaagccaagctggtattcggcggtgaggcgttgatcgtcgcgggcggcgccgaccgcaccgaatcggtgagagccgcgctcgccgccgtcggcgatgccgactacgtgctcgttcacgacgctgcgcgcgcactcacaccaccatcgctggtggcccgtgtcgtgcgggcgctggaagccgggcacagcgcggtggtgcccgggctcccggtggccgacacgatcaaggccgtcgacgccaacggcgccgtactcggcacacccgagcgggccggactgcgcgcgatccagaccccgcagggtttccacatcgacgtgctgcgccgcgcgtacgcacgggcgggcgacggcggtttcaccgacgacgcgtcgatggtcgagcaggccggcgggcaggtgcaggtcgtcgagggcgacccactggccttcaagatcaccaccccactcgacctcgtgctggccgaggcgatcctggcgggcgcccggtga

SEQ ID NO: 81144 - protein, 221 aa, Mycobacterium sp. MCS
MTTVAVVPAAGSGQRLAAGAPKAFVNLAGRPMLERAIAGLRNSGVVDSIVVAVPPSRTDEAKLVFGGEALIVAGGADRTESVRAALAAVGDADYVLVHDAARALTPPSLVARVVRALEAGHSAVVPGLPVADTIKAVDANGAVLGTPERAGLRAIQTPQGFHIDVLRRAYARAGDGGFTDDASMVEQAGGQVQVVEGDPLAFKITTPLDLVLAEAILAGAR

SEQ ID NO: 81145 - DNA, 696 bp, Rubrobacter xylanophilus DSM 9941
  CDS (1)..(696): transl_table=11
ttgtccggcgcggtggcgctggtgctggccggggggagcggcacccggatgggccgccccaagcagtttatagagctgctggggcgcccggcgctctaccacaccctgcgcgccttccaggaggcccgggaggtcgagaggatctacgccgtcggggaggaggagcgcatccgggacctcgcctccggctgcgggatagacaagctgtgcggctgcgcccgcccgggcgagagccgggccctctcggcgaggaacgggctccttctctgcggggaggaggacggcgtgatctgcctgatccacgacggctcccgctgcctggtgaccccgcagctgatcgggcgcgtggtccgggcggtggaggagggggcggacggcgcgatcccggcggtgccggtcccggacaccataaaggtcgccgacggcgagagggtgctcaagacgctggaccgctcgagcctccgggccgcccagaccccgcaggctttccggctggggctgctgcgccgggtcttctcggcgcccgaggaggtgctgcgcgaggccacggacgacgcctcgctggtggagcgggccgggggggaggtgcgcctggtccccggcgagaggaccaacatcaagctgacctcgccggaggatctcgtgctggccgaggcgatcctcgccgcccgggagcggcgcgggtcgcgcctctga

SEQ ID NO: 81146 - protein, 231 aa, Rubrobacter xylanophilus DSM 9941
MSGAVALVLAGGSGTRMGRPKQFIELLGRPALYHTLRAFQEAREVERIYAVGEEERIRDLASGCGIDKLCGCARPGESRALSARNGLLLCGEEDGVICLIHDGSRCLVTPQLIGRVVRAVEEGADGAIPAVPVPDTIKVADGERVLKTLDRSSLRAAQTPQAFRLGLLRRVFSAPEEVLREATDDASLVERAGGEVRLVPGERTNIKLTSPEDLVLAEAILAARERRGSRL

SEQ ID NO: 81147 - DNA, 1227 bp, Mesorhizobium sp. BNC1
  CDS (1)..(1227): transl_table=11
atgaacgcaccttttgaaaaggataggcgcaaccgtcgagttgccgttgtggtggttgctgcagggcgcggcgagcgggccggccaggcccagaacggcccgaaacaataccggctgattggcggcaagcctgtcatccgccacacacttgaagtcttggcgaagagcaaacgcgtcggcacaatcgccgttgccgtccatccagaggatagctccctcttcaaccaggcacgcgaaggactggatggcgatatccgcgccgttcatggcggagcctcacggcaggaatcgacgcggcttgcgcttgccgcgctcgaagaggtgaagcctgatatcgtgcttatccatgacggcgtaaggccattcatcgatgaagcattgattgagcgcgtcatagaggccgtgggtgaggacagcggtgcccttcccgcacttccggtgtccgacacgctgaaacgttcgggtgtgaacggcatcataacgggcaccgtgccgcgcgacggtctgtttgccgctcagactcctcaaggcttcccttttcgcccgatctatgaggcacaccagaaagcttggcagtccggccgttcggatttcacggacgatgcagctatcgctgaatgggcaggcatttcggtccgccttgtcagcggctcgccggacaatgtgaagctcacatgggccaaggatattgctctggccgaccaaaggttaggacccgccatgacggagttgccggatatccgggtaggcaatggatatgatgtgcatgggttcggtccgggtggccatgtaactctgtgcggtgttcaaatccctcacggcaaaaccctgatgggtcattccgatgcggatgtgggtctgcacgcccttacagatgcgctgctcgccacctgtggggccggcgatataggcacccactttccgccctcggacccgcaatggaaaggcgcaaaatcccgcatttttgtcgaacacgcggtcaatctcctacgtgcgcgcggcgggcgcatcgccaatgctgatgtcacgctcatttgcgaggcgccgcgcatcgggccttatcgcgaggccatgctggcggaactttcggatatgttgcagatttcgccggagcgcgtttccgtcaaggcgactaccaatgaggggctcggtttcattggccgggccgaggggatcgcggcgatcgccacggctacggtcgcctaccctggctccctgggaaactga

SEQ ID NO: 81148 - protein, 408 aa, Mesorhizobium sp. BNC1
MNAPFEKDRRNRRVAVVVVAAGRGERAGQAQNGPKQYRLIGGKPVIRHTLEVLAKSKRVGTIAVAVHPEDSSLFNQAREGLDGDIRAVHGGASRQESTRLALAALEEVKPDIVLIHDGVRPFIDEALIERVIEAVGEDSGALPALPVSDTLKRSGVNGIITGTVPRDGLFAAQTPQGFPFRPIYEAHQKAWQSGRSDFTDDAAIAEWAGISVRLVSGSPDNVKLTWAKDIALADQRLGPAMTELPDIRVGNGYDVHGFGPGGHVTLCGVQIPHGKTLMGHSDADVGLHALTDALLATCGAGDIGTHFPPSDPQWKGAKSRIFVEHAVNLLRARGGRIANADVTLICEAPRIGPYREAMLAELSDMLQISPERVSVKATTNEGLGFIGRAEGIAAIATATVAYPGSLGN

SEQ ID NO: 81149 - DNA, 687 bp, Cytophaga hutchinsonii ATCC 33406
  CDS (1)..(687): transl_table=11
atgcatcatatgaatagatttgctgtaattgttgccggaggatcgggttcaaggatgggaagtgatacaccaaagcaattccttccgattggaaatgctcctattttaatgcataccattaaacggttttttaccagtaccgaagcggtaaatattattctggtattgccggaagaacaaatggaccgctggcatcagctgtgtgaaaagtattccttttccattccgcacttaattgtttccggcgggaaaaaccggtttcagtcggtacggaacggattgaacagcattggcgtgaacgacggcctggtcgctattcacgacggggtacggccgttcataagcaagcgtattatcgaagaatcatttaaggttgctcttgaaaaaggaaacgcggtagccgcggtggaattaaaggattcgatccggctggtggataaaaaaggaaacaaaacagttaaccgggttgattaccggattgtgcagacacctcaaacatttaagatttcgcaggtcagagacgcctttcaccgtgcctcaaacgatcagtatacagacgatgcaagtgtggctgaagcggcagggtacagcatacagctgattgaaggttcttatgagaacattaaaatcacaacgcctgaagaccttgccatggcagaagctattctgaaaaaattcgactactaa

SEQ ID NO: 81150 - protein, 228 aa, Cytophaga hutchinsonii ATCC 33406
MHHMNRFAVIVAGGSGSRMGSDTPKQFLPIGNAPILMHTIKRFFTSTEAVNIILVLPEEQMDRWHQLCEKYSFSIPHLIVSGGKNRFQSVRNGLNSIGVNDGLVAIHDGVRPFISKRIIEESFKVALEKGNAVAAVELKDSIRLVDKKGNKTVNRVDYRIVQTPQTFKISQVRDAFHRASNDQYTDDASVAEAAGYSIQLIEGSYENIKITTPEDLAMAEAILKKFDY

SEQ ID NO: 81151 - DNA, 681 bp, Rhodococcus sp. RHA1
  CDS (1)..(681): transl_table=11
gtggccgacggaaaaggtcctgtagtcgcgctggttcccgccgcaggtcagggagtacgtttgggcgagaacaggcccaaggcattcgttgatctgggtgggacgaccatgctgacacgcgcggtcgacgggctcctgcagtcgggggctgtcgaccgcgtcgtcgtgatcgttccggaggagctcgtcgagtcgacgcgaaccctccttcccggtgaggtcaccgtcgtggccggcggaagtgagcggaccgattcggttcgcgccggactggccgtcgcggatgacgccgactatgtgctcgtgcacgacgccgcccgcgcgctcacgccaccgtcgctcatcgcgcgggtggtcgaggagctgcgatgcggccgcaatgcggtcatccccgtcctgccggtgacggacaccatcaagaccgtcgacgttctcggcgcggtcaccggcacccccgaacggtccgaactgcgggccgtacagacgccgcagggtttcaccgcggaactgctccggcgcgcctacgctgccgccgacggcatcgccacggacgacgccggcctggtggagcgcctcggggaacgggtccgcagcatcgtcggagaacccacagcattcaagatcaccacgccgctggacctcgtgctggcccgcgcgctggtggaagagggagcgcactag

SEQ ID NO: 81152 - protein, 226 aa, Rhodococcus sp. RHA1
MADGKGPVVALVPAAGQGVRLGENRPKAFVDLGGTTMLTRAVDGLLQSGAVDRVVVIVPEELVESTRTLLPGEVTVVAGGSERTDSVRAGLAVADDADYVLVHDAARALTPPSLIARVVEELRCGRNAVIPVLPVTDTIKTVDVLGAVTGTPERSELRAVQTPQGFTAELLRRAYAAADGIATDDAGLVERLGERVRSIVGEPTAFKITTPLDLVLARALVEEGAH

SEQ ID NO: 81153 - DNA, 684 bp, Haemophilus somnus 129PT
  CDS (1)..(684): transl_table=11
atggatagagaaattgttgctataatacctgctgctggcattggttgccgtatgcaagcagatcgcccaaaacaatatttaaagatactgggcaaaacaattttagagcatacattaagtatttttttgagttgcgaaaaaattagccaaattgttttatccgtcgctgaaaatgatccttatttaactgaaattgagctgttgcgaaatcctcgtatcaaaattgttataggcggagaaactcgtgcagactctgtactaaacggcctacgtcacattaaaaataaaaaagcctgggtacttgtgcatgatgcagcacgtccttgtttacgcaatgaagatttagatacattactacaagttgaagatcaaaatggtgctattttagccattcctgcggtagatactattaaacgatcaaattcagtattgcaaattcaatgtacagaagaccgtaatcaattatggttggcacaaacaccgcaatttttccctgtacacttattgcaacacgctctagagcaagcagcaaaacgaggtattatcgtcacagatgaagcattagcgatggaacttgccggatttagaccgcacttagtagcaggtcatagtgataatattaaagtaacacatcctgaagacttagcattggcagaattttttttaactagaaaacaaaggtaa

SEQ ID NO: 81154 - protein, 227 aa, Haemophilus somnus 129PT
MDREIVAIIPAAGIGCRMQADRPKQYLKILGKTILEHTLSIFLSCEKISQIVLSVAENDPYLTEIELLRNPRIKIVIGGETRADSVLNGLRHIKNKKAWVLVHDAARPCLRNEDLDTLLQVEDQNGAILAIPAVDTIKRSNSVLQIQCTEDRNQLWLAQTPQFFPVHLLQHALEQAAKRGIIVTDEALAMELAGFRPHLVAGHSDNIKVTHPEDLALAEFFLTRKQR

SEQ ID NO: 81155 - DNA, 681 bp, Trichodesmium erythraeum IMS101
  CDS (1)..(681): transl_table=11
atgaatctattaattcctgctgctggtatagggcgacgcatgggaggttcccgaaataagcttttgttaactctattgggcaagtctttattgagttggactcttgaagctgcggtaaaatctgatcatatcacttggattggtattattggacaacctattgattttcctgattttcaaaaaaatatttcagatttatctactgacaagcacatagagctaattgagggtggagctactcgtcaggagtcggtttataatggtttacaggctttaccatccgcagcagaacgagttttaattcacgatggggctaggtgtttagctactcctgaactgttggacagatgtgcggtggagattctcaaatgccctggtataattgcttctgtgccagttaaagacacaattaaggttgttgacccttcaggtataattcaggatacaccaaatcgtcgcaatttatgggctgctcaaacaccccaaggatttgatgttaagctgttgaaagaatgccataaaaaggggcaaattttaggttgggaagttactgatgatgctgctttatttgaaaaatgtggtttacctgtaaaaattttggagggagaggaaactaatttaaaggtgacaactcctctagatttaaaaatagcagaatttattttgcttaaagccttatag

SEQ ID NO: 81156 - protein, 226 aa, Trichodesmium erythraeum IMS101
MNLLIPAAGIGRRMGGSRNKLLLTLLGKSLLSWTLEAAVKSDHITWIGIIGQPIDFPDFQKNISDLSTDKHIELIEGGATRQESVYNGLQALPSAAERVLIHDGARCLATPELLDRCAVEILKCPGIIASVPVKDTIKVVDPSGIIQDTPNRRNLWAAQTPQGFDVKLLKECHKKGQILGWEVTDDAALFEKCGLPVKILEGEETNLKVTTPLDLKIAEFILLKAL

SEQ ID NO: 81157 - DNA, 750 bp, Shewanella sp. MR-7
  CDS (1)..(750): transl_table=11
atggataccgtattagaagccgcgccgcaggtcgaaacccaagttgcagttcaaattgatcctttctcgcaccatgtggtcgcgattgtgcccgccgcggggataggcagtcgcatgggcgcgggcaaacccaagcaatatttaaccttgctggggcaaagcattctggctcataccttagacaagttattgtcccatccgcaaattaaccaagtgattgtggcactgcatccagaggataacgagtttgctgcgttaccgcaggccaagcatcccaagctggtgactgtcattggcggctctgagcgcgccgactcggtactggcggctctcgataaggcgcctgataatggttgggctttagtacacgatgcggccagaccctgcctgatggcgcaagacatagataaattgttggcatcgcgggtgcattttccccagggggcgattttggccatgcctgtgcgggataccatgaagcgcgccaatagcttaggtgaaattagctcgaccgtttgccgcgataatctctggcatgcgttgacgccgcagttatttccaacctccttgttgcgattacatttaaaagccgcgcttgccgcgggtgctgttgtgaccgatgaggcctcggcgatggagtgggcgggtatttcccctggtttggtcgctgggcgggcggataacattaaagtgacccatcccgatgatttggagttggcagagctctttttactgcgcgcaaatgcttga

SEQ ID NO: 81158 - protein, 249 aa, Shewanella sp. MR-7
MDTVLEAAPQVETQVAVQIDPFSHHVVAIVPAAGIGSRMGAGKPKQYLTLLGQSILAHTLDKLLSHPQINQVIVALHPEDNEFAALPQAKHPKLVTVIGGSERADSVLAALDKAPDNGWALVHDAARPCLMAQDIDKLLASRVHFPQGAILAMPVRDTMKRANSLGEISSTVCRDNLWHALTPQLFPTSLLRLHLKAALAAGAVVTDEASAMEWAGISPGLVAGRADNIKVTHPDDLELAELFLLRANA

SEQ ID NO: 81159 - DNA, 708 bp, Alkalilimnicola ehrlichei MLHE-1
  CDS (1)..(708): transl_table=11
gtgagtgaaccacggatctgggcggtcctgccggcggccggtgtcggccggcgtatgggcggaccgctgcccaaacagtacctgccgctggccgggcgtccggtgatcgcccggaccctggatcgactgctggcactgccggccgtgcacggcgccgtggtggccctctcccccgaggataaccactgggatgccctgggctaccgacaccggaaacccgtgcaccgggtgccgggtggggcggaacgcagcgattcggtccaatccgttctgcattggctcgccgaacaggggggcacacgggactatgccctggtgcatgacgcggtgcggccctgtgtcgggatggcggagctggagcggctgattgaccgcgcccgggacgagcgcggcggcttgctcgcctttccggtgcgcgacaccctcaagagggacgacggtgacggccacgtggcccgcaccgtggaccgcgaggggctgtggcacgccctgacccctcagctctttccggtgatggcattgcgcgaggcgctggcgaaggccggcgaggccggactcaccatcaccgacgatgcctcggccatggaggcggtgggcgggcgcccgcgcctgatcccgggcgaggccaccaacatcaagatcacccgcccggcggacctggcccttgcggaggccatcctggtcgcccagggcgggaccggcgcctga

SEQ ID NO: 81160 - protein, 235 aa, Alkalilimnicola ehrlichei MLHE-1
MSEPRIWAVLPAAGVGRRMGGPLPKQYLPLAGRPVIARTLDRLLALPAVHGAVVALSPEDNHWDALGYRHRKPVHRVPGGAERSDSVQSVLHWLAEQGGTRDYALVHDAVRPCVGMAELERLIDRARDERGGLLAFPVRDTLKRDDGDGHVARTVDREGLWHALTPQLFPVMALREALAKAGEAGLTITDDASAMEAVGGRPRLIPGEATNIKITRPADLALAEAILVAQGGTGA

SEQ ID NO: 81161 - DNA, 1137 bp, Hyphomonas neptunium ATCC 15444
  CDS (1)..(1137): transl_table=11
atgaccgagaccgtcgccataatcgttgccggaggccggggccagcgcgcaggcgcagagcgcccgaaacagtggcaaatgctgctgggaaagcgggtgatcgactggtcaattgccgcatttgtggaccatccgcagatctcgcaagtggtgatcgtggcgggggatgagctgggtgactgttccgcggagcccaaaattattcaagcaaaaccgggcaatacgcgcacccaatctgtgctgagcgggctggcggcggcgactatttcggaagacgccactgtcgttatacatgatgctgcgcggccgggtattgatgcggcaactatctccagcctgatcgcgcgcctgcaggacccatctgtgtcaggcgcggcccccgcgatgccagttgcggacgctttgaagacaaactcgggacaaagctggacaaatgtggacaggaccggcctcgtccgggtccagacaccgcaggccttccgcctcggcgagatccgcgcggcgctttccgcggccggtcccgatctggtcgatgacctgaccgccatcgaggctgccggcgggagggtcgagatcgtctccggctcggcgcggctgaccaagatcacttacccagaggatttcgacatgctggcccgcctcctctcccccaccggcgccccgcgcatcggcaagggctatgacgtgcatgagtttgaggcgggggatcatgtcaccttgtgcggggtggccattccccacatcgccaaactcaagggccattcggacgcggacgcggcctggcatgcgctgaccgatgcgatccttggcgcggtggcgctgggggatattggggatcactttccgccatcggacccgcagtggaagggggctgacagtggcctctttctcaaagaggcccagaggctcgccgaggcgaagggctatgtcatcgccaattgcgacatcacggtgatctgtgaagcgcccaaggtgaagccccaccgcgaggcgatgcgggcgcggacggcggagctgctcgggctgccgctggacgctgtgagcgtgaaggcgacgacgacggaggggctgggctttaccgggcggcgcgaggggattgcggcggaggctgtggcgctgctgatgccgaaggggtga

SEQ ID NO: 81162 - protein, 378 aa, Hyphomonas neptunium ATCC 15444
MTETVAIIVAGGRGQRAGAERPKQWQMLLGKRVIDWSIAAFVDHPQISQVVIVAGDELGDCSAEPKIIQAKPGNTRTQSVLSGLAAATISEDATVVIHDAARPGIDAATISSLIARLQDPSVSGAAPAMPVADALKTNSGQSWTNVDRTGLVRVQTPQAFRLGEIRAALSAAGPDLVDDLTAIEAAGGRVEIVSGSARLTKITYPEDFDMLARLLSPTGAPRIGKGYDVHEFEAGDHVTLCGVAIPHIAKLKGHSDADAAWHALTDAILGAVALGDIGDHFPPSDPQWKGADSGLFLKEAQRLAEAKGYVIANCDITVICEAPKVKPHREAMRARTAELLGLPLDAVSVKATTTEGLGFTGRREGIAAEAVALLMPKG

SEQ ID NO: 81163 - DNA, 1218 bp, Rhizobium leguminosarum bv. viciae 3841
  CDS (1)..(1218): transl_table=11
atgctgcaaatgccttctaagcaaccgatatcggctggaattgtcatcgtggccgccggccgcggcgagcgcgcgggatcatccaaggaaggccccaagcagtatcgcatgatcggcggcaagccggttatcgtgcatacgcttgaaaacttcatgacatgggaagcggcaactgagatcgtcgtcgtcatccatcccgatgacgaggcgctgtttgcgagagccttccgtcacatcatctcggcaacgccgatcgaaacggtgcatgggggtgcgaccaggcagcaatccgtgcttgccggcctcagatacctcaaggacaagcaaatcagccatgtgctgatccacgatgccgtgcggccattcttcgatcatgcgcttctcgatcgcatcgccgagagccttgacgccggcgcgcaggcggtcctgccggcgatcccggtcaccgatacgctgaaacgcgccgacaacgccggcaccgtgctgacgacggtttcacgcgagcatctttacgcggcgcagacgccgcaatccttcgccttcgaaacgatcctcgaggcgcatgagaaggcggccgcaagcggtcgaagcgatttcaccgacgacgcctcgatcgccgaatggctgggcattccggtgacgatcgtcgagggcaccgccgacaacgtcaagctgacggtcaaagacgatatcgccatggccgacgacaagctctcggcttcgctgcttccagacgtgcgcaccggcaacggctacgacgtgcaccagctcgtcgcgggcgatggcgtgacgctctgcggcgtgttcattccgcatgaccagaagctgaaaggacactccgatgccgacgttgcgctgcatgcgctgacggacgcgctgctcgccacctgcggcgccggcgatatcggcgatcatttcccgccgtccgacccgcaatggaagggggcggcctcgcggatcttcatcgagcatgccgcccggatcgtgcgcgagcgcggcggcacgatcatgaatgccgacgtctcgctgatcgccgaggcgcccaaggtcggcccgcatcgcgacgccatgcgggcgaaactatcggactatctcggcatcgatatcgagcgttgctcggtcaaggcgacgaccaatgagacgatcggcttcgtcggccggcgcgaaggcatcgcggcgatcgccacggcgaccgtcgtctatcgcgggaggaaatga

SEQ ID NO: 81164 - protein, 405 aa, Rhizobium leguminosarum bv. viciae 3841
MLQMPSKQPISAGIVIVAAGRGERAGSSKEGPKQYRMIGGKPVIVHTLENFMTWEAATEIVVVIHPDDEALFARAFRHIISATPIETVHGGATRQQSVLAGLRYLKDKQISHVLIHDAVRPFFDHALLDRIAESLDAGAQAVLPAIPVTDTLKRADNAGTVLTTVSREHLYAAQTPQSFAFETILEAHEKAAASGRSDFTDDASIAEWLGIPVTIVEGTADNVKLTVKDDIAMADDKLSASLLPDVRTGNGYDVHQLVAGDGVTLCGVFIPHDQKLKGHSDADVALHALTDALLATCGAGDIGDHFPPSDPQWKGAASRIFIEHAARIVRERGGTIMNADVSLIAEAPKVGPHRDAMRAKLSDYLGIDIERCSVKATTNETIGFVGRREGIAAIATATVVYRGRK

SEQ ID NO: 81165 - DNA, 705 bp, Pseudomonas aeruginosa UCBPP-PA14
  CDS (1)..(705): transl_table=11
atgacgacttccgaccttcccgccttctggacggtgatccccgccgccggcgtgggttcgcgcatgcgcgccgaccgcccgaagcaatatctcgatcttgccggccgtaccgtgatcgagcgcaccctcgattgtttcctcgagcacccgatgctcaggggcctggtggtctgcctggccgaagacgatccctactggcccgggctggactgcgccgccagccggcatgtgcagcgcgccgccgggggcgtcgaacgcgccgactcagtgttgagcggcttgctgcgcctgctggagctgggggcacaggccgacgattgggtgctggtgcatgacgctgcgcgaccgaacctgacccgcggcgacctcgaccgcctgctcgaagaactcgccgaagatccggtcggcgggctgctggcggtgccggcgagggacaccctcaagcgtgccgaccgcgacggccgggtcagcgaaaccatcgaccgctcggtggtctggctggcctatacgccacagatgttccgcctcggcgccctgcaccgggcactggccgatgcgctggtggccggcgtggcgatcaccgacgaggcttcggcgatggagtgggccggctatgcgccgaaactggtggaagggcgcgccgacaacctgaagatcaccaccccggaagacctactgcgcctgcagcgcagttttccgcactga

SEQ ID NO: 81166 - protein, 234 aa, Pseudomonas aeruginosa UCBPP-PA14
MTTSDLPAFWTVIPAAGVGSRMRADRPKQYLDLAGRTVIERTLDCFLEHPMLRGLVVCLAEDDPYWPGLDCAASRHVQRAAGGVERADSVLSGLLRLLELGAQADDWVLVHDAARPNLTRGDLDRLLEELAEDPVGGLLAVPARDTLKRADRDGRVSETIDRSVVWLAYTPQMFRLGALHRALADALVAGVAITDEASAMEWAGYAPKLVEGRADNLKITTPEDLLRLQRSFPH

SEQ ID NO: 81167 - DNA, 735 bp, Solibacter usitatus Ellin6076
  CDS (1)..(735): transl_table=11
atgaaagtcgccgtgatattacccgcggccggcctgggcacccgtatgggaaaaggcaccgcggagaaggccggcaccagccgcaagcaattcatgctgctggagggctcgccgattctgatgcacaccgtgcgcaagtttgccgcctctccccgcgtgggggagatcgtgatcgcggtgcgcgccgaagataccgagtgggttcgagaagtggtgacgcaggaatttccaggcggccgggtgcgcgtggtcgcgggcggcaacagccggcaggaatcggtggagaacgcgctgagctcgctgagtccggattgcgaactggtggcagtgcacgacgcggtgcgcccgtttatcgacctggacatcatgcacgcggtcttcgacgaggccgcggaaaccggcgcggcgattgtcggcgtcccggcggtggacaccgtgaagcaggtgacgcggggcaccacccacgtgcgggtgcgggcgaccctgccgcgcgaaaagctggtgatggcgcagaccccgcaggtcttccgccacgatttgctgctgcgcgcgtttcaggaagcgcgcaaggacggcttcatcggcaccgacgaaagcagcatggtggagcggctcgacgtggaagtcagcgtggtgccgggcagtgaccgcaatatcaagatcaccaagcccaccgatatggagctggcgcatctgttcctgcgcgaagaagccgcgcggagcacgctctcttga

SEQ ID NO: 81168 - protein, 244 aa, Solibacter usitatus Ellin6076
MKVAVILPAAGLGTRMGKGTAEKAGTSRKQFMLLEGSPILMHTVRKFAASPRVGEIVIAVRAEDTEWVREVVTQEFPGGRVRVVAGGNSRQESVENALSSLSPDCELVAVHDAVRPFIDLDIMHAVFDEAAETGAAIVGVPAVDTVKQVTRGTTHVRVRATLPREKLVMAQTPQVFRHDLLLRAFQEARKDGFIGTDESSMVERLDVEVSVVPGSDRNIKITKPTDMELAHLFLREEAARSTLS

SEQ ID NO: 81169 - DNA, 729 bp, Magnetococcus sp. MC-1
  CDS (1)..(729): transl_table=11
atgcacgaaaattcacacccttctgccacagaagaattatgcgccttggtgctggtggccgccggtcgaggcagccgttttggagatgatttacctaagcagtatcatcttattgatgaccagccggtcattttacataccatgcgtcgcttccatcagcaccgcctgattagccatattatcccggttatcgccaatggagatccccattggcaggtgtggtcacaccagtttgccgcactagccaagctgcaaccccctgttatcggtggtgcagaacgacaagattcggtgcgcaatggtctgttggtggcgcagcagttgggcgtgccatgggttgccattcacgatgccgcccgtccgttgataagccaagctctcttagacagactgctccaagcccgcagccgggcgcaaggcattctaaccgccctgcccgctcacgatacggtcaagcaggtggatgataaggggtttgtggtgcgcaccctggatcggcgtaccatctggttggcgcagaccccccagatttttcccaccgccttaatgttagatctgcaccaacaggccagcgccgcaggctttaccgccacggatgatgcttcgctcatggagtgggccggtttacccgtgctgcctattgagggggacccacacctattaaaaatcacccggcctgaggatttagaaaccgttcgtgccctgattcaaggcaaggagatcgtatga

SEQ ID NO: 81170 - protein, 242 aa, Magnetococcus sp. MC-1
MHENSHPSATEELCALVLVAAGRGSRFGDDLPKQYHLIDDQPVILHTMRRFHQHRLISHIIPVIANGDPHWQVWSHQFAALAKLQPPVIGGAERQDSVRNGLLVAQQLGVPWVAIHDAARPLISQALLDRLLQARSRAQGILTALPAHDTVKQVDDKGFVVRTLDRRTIWLAQTPQIFPTALMLDLHQQASAAGFTATDDASLMEWAGLPVLPIEGDPHLLKITRPEDLETVRALIQGKEIV

SEQ ID NO: 81171 - DNA, 750 bp, Shewanella sp. ANA-3
  CDS (1)..(750): transl_table=11
atggataccgtattagaggccgcgccgcaggtcgaaacccaagttgcagttcaaattgatcctttctcgcaccatgtggtggcgattgtgcccgccgcggggattggcagccgcatgggcgcgggcaaacccaaacaatatttaaccttgctgggacaaagcattctggctcataccttagataagttattatcccatccgcaaattaaccaagtgattgtggcgctgcatcctgaggataccaagtttgccgcgttgccgcaggccaagcatcccaagctggtaactgtcattggcggttctgagcgtgccgactcggtgctggcggcactcgataaggcgcctgataatggttgggctttagttcacgatgcggccagaccctgcctgacggcgcaagacattgataaattgttggcatcgcgggtgcactttccccaaggggcgattttagccatgcctgtgcgggataccatgaagcgcgccaatagcttaggtgaaattagctcgactgtttgccgcgataatctctggcatgcgttgacaccgcagttattcccaacctccttgttgcgattacatttaaaagccgcgcttgccgcgggggctgtcgtgaccgatgaagcctcggcgatggagtgggcgggcatttcccctggtttggtcgcggggcgggcggataacattaaagtcacccatcccgatgatttggagttggcagaactttttttactgcgcgcgaatgcttga

SEQ ID NO: 81172 - protein, 249 aa, Shewanella sp. ANA-3
MDTVLEAAPQVETQVAVQIDPFSHHVVAIVPAAGIGSRMGAGKPKQYLTLLGQSILAHTLDKLLSHPQINQVIVALHPEDTKFAALPQAKHPKLVTVIGGSERADSVLAALDKAPDNGWALVHDAARPCLTAQDIDKLLASRVHFPQGAILAMPVRDTMKRANSLGEISSTVCRDNLWHALTPQLFPTSLLRLHLKAALAAGAVVTDEASAMEWAGISPGLVAGRADNIKVTHPDDLELAELFLLRANA

SEQ ID NO: 81173 - DNA, 690 bp, Mycobacterium avium 104
  CDS (1)..(690): transl_table=11
ttggccccggagacgggcagctcaggcgccgtagccgccgtcgtcccggctgccgggtcgggggagcgactggcagcgggaattcccaaggcattctgtgagatcgacggtgccagcatgctggcccgcgccgtcgccggtctgctggactccaaggtggtcgaccacgtggtggtggcggtgcccgccgaccgcgtcgacgaggccaaacgactgctggccgcgcaggccaccgtcgtcgccggcggagccgaccgcaccgcatccgtgcgcctggccctggccgccgtgcccggcaaccccgcgttcgtgctggtgcacgacgccgcccgcgccctgacgccgccggcgctgatcgcccgggtggtgcaggcgctgcgcgacggtcaccgcgccgtggtgccggcgctgccgctgcacgacaccgtcaaggccgtcgacgccaacggggtggtgctcggcacgccggaacgcgacgggctgcgggcggtgcagacaccgcagggtttcgccaccgacctgctgctgcgcgcctacgccgccggggccggcacggcgggtttcaccgacgatgcgtcgctggtcgagcacgtcggcggccaggtccaggtggtcgacggcgacccgctggccttcaagatcaccacccagctcgatctgctgctggccgagaccatcgtgcgccggtga

SEQ ID NO: 81174 - protein, 229 aa, Mycobacterium avium 104
MAPETGSSGAVAAVVPAAGSGERLAAGIPKAFCEIDGASMLARAVAGLLDSKVVDHVVVAVPADRVDEAKRLLAAQATVVAGGADRTASVRLALAAVPGNPAFVLVHDAARALTPPALIARVVQALRDGHRAVVPALPLHDTVKAVDANGVVLGTPERDGLRAVQTPQGFATDLLLRAYAAGAGTAGFTDDASLVEHVGGQVQVVDGDPLAFKITTQLDLLLAETIVRR

SEQ ID NO: 81175 - DNA, 669 bp, Mycobacterium smegmatis str. MC2 155
  CDS (1)..(669): transl_table=11
gtggcgacggttgccgtcgtcccggccgccggctctggtgagcggctgcgcgcgggacggccgaaagcattcgtgacactggggggaacaccccttcttgagcacgctctgtcggggcttcgcgcttccggcgtgatcgaccggatcgtgatcgcggtaccgcccgcgctcaccgacgagtcgaaactggtgttcggcggtgaagactccgtgatcgtctccggtggggtcgatcgcacagagtcggttgcgctcgctctcgaagcggccggtgacgccgagttcgtcctggtgcacgacgccgcacgcgcactgaccccgcccgcgttgatcgcccgggtggtggctgcgctgaaagaagggcacagtgccgtcgtacccggactcgcgccggccgacaccataaaggctgtcgacgccaacggcgcggtgctcggaacgcccgagcgggccggtctgcgcgctgtccagacgcctcagggtttccatgccgacgtgctgcggcgcgcctacgcgcgcgccacggccggcggcgtgaccgacgacgcgtcattggtcgaacaactcgggacgcccgtgcagatcgtcgacggcgacccgctggcattcaagatcaccacaccgctggatctcgtgctcgccgaggccgtcctggcgcgcggcgcatga

SEQ ID NO: 81176 - protein, 222 aa, Mycobacterium smegmatis str. MC2 155
MATVAVVPAAGSGERLRAGRPKAFVTLGGTPLLEHALSGLRASGVIDRIVIAVPPALTDESKLVFGGEDSVIVSGGVDRTESVALALEAAGDAEFVLVHDAARALTPPALIARVVAALKEGHSAVVPGLAPADTIKAVDANGAVLGTPERAGLRAVQTPQGFHADVLRRAYARATAGGVTDDASLVEQLGTPVQIVDGDPLAFKITTPLDLVLAEAVLARGA

SEQ ID NO: 81177 - DNA, 672 bp, Nocardioides sp. JS614
  CDS (1)..(672): transl_table=11
gtgcccgccgccgccgtcgtgatcctggccgccgggtccggctcgcgggtcggggcggcgaccaacaaggtgctgctgcccctgggcgaccggccggtgctcgcctggtcggtgcgcgacgcgctcggcctcgaggacgtacgccgggtgctggtggtggtccgcccgggcgagcgtgatgcggtcgccgcggccctcgccccgcacctcggcgcggcggagatcggggtggtcgagggtggcgcgacccgccacggctcggagtggaacgcgctgcgcgcgctggccgccgaggtcgagaccggagagatcgacgtgatcgcgatccacgacggggcccggccgctggcgggacccgacctgttccgggccaccatcgccgcggcccggtcacgcggcggcgcgatcccggtcgtcgcgctccgcgggctgctggcccgagacggccgggcgctgccggagctggacggggtgcagaccccccaggcgttccgggcgcgcgagctggtggccgcctactcccgtgcggcggcggacggcttcgagggcaccgacaccgcgacctgctgggcccgctacaccgacctgccggtggtcgccgtaccgagcagctcgcacaacctgaaggtcacgttcccggaggacctggcggtcgccgaccgcctgcggtga

SEQ ID NO: 81178 - protein, 223 aa, Nocardioides sp. JS614
MPAAAVVILAAGSGSRVGAATNKVLLPLGDRPVLAWSVRDALGLEDVRRVLVVVRPGERDAVAAALAPHLGAAEIGVVEGGATRHGSEWNALRALAAEVETGEIDVIAIHDGARPLAGPDLFRATIAAARSRGGAIPVVALRGLLARDGRALPELDGVQTPQAFRARELVAAYSRAAADGFEGTDTATCWARYTDLPVVAVPSSSHNLKVTFPEDLAVADRLR

SEQ ID NO: 81179 - DNA, 711 bp, Azoarcus sp. BH72
  CDS (1)..(711): transl_table=11
atgcagaatttccatccccgccatttcgccatcgtgcccgccgccggcagcggcagccgcatgggcagcgagcgtcccaagcagtacctgccgctgctcggcaagcccctcatctaccacacgctgtcggtgctgtgcgccgcgcctgagatcgacaaggtgttcgtcgtgctgtcggtcggcgacgccgagtggggccgccacgactggcgcgcgctggggcccaagctggtgccgctgttctgcggcggtccgacgcgcgcggattcggttctggccggcctgcgcgcgatcgccggtgaggcggtgcagagcgactgggtactggtgcatgacgcggcgcggccttgcctcgcgccctggcatatcgacaagctggtgcgcgaactcgccggcgacgaggtcggcggactgcttgcggtgccggtggccgacacgctgaagcgcgccgacggccaccgccatgtggcggcgacggtgccgcgcgacagcctgtggcaggcgcagacgccgcagatgttccgctacgtgatgctgcgccgcgcgctggaaagcgctaccgacgttaccgacgaggcaagcgcgatcgaagcggccggcctgcggccacggctggtgcagggtgacgcgaccaacctgaaggtgacctatccgctcgacctccacctggccgagtggattctcaacaaccgtactggagtgcagcaatga

SEQ ID NO: 81180 - protein, 236 aa, Azoarcus sp. BH72
MQNFHPRHFAIVPAAGSGSRMGSERPKQYLPLLGKPLIYHTLSVLCAAPEIDKVFVVLSVGDAEWGRHDWRALGPKLVPLFCGGPTRADSVLAGLRAIAGEAVQSDWVLVHDAARPCLAPWHIDKLVRELAGDEVGGLLAVPVADTLKRADGHRHVAATVPRDSLWQAQTPQMFRYVMLRRALESATDVTDEASAIEAAGLRPRLVQGDATNLKVTYPLDLHLAEWILNNRTGVQQ

SEQ ID NO: 81181 - DNA, 690 bp, Neisseria meningitidis FAM18
  CDS (1)..(690): transl_table=11
atgaagcgcaaaaatatcgcgctgattcccgccgccggcatcggggcgcgtttcggtgcggacaaacccaagcaatatgtcgaaatcggaagcaaaaccgttttagaacatacgcttgggatttttgaacggcatgagggcgtcgatttgaccgtcgttgtcgtctcgcccgaagacacgtttgccgataaggttcagacggcatttccacaggttcgggtgtggaaaaacggcggacagacccgcgccgaaaccgtccgaaacggtgtggcaaaattgttggaaaccggtttggcggcggaaaccgacaatattctggtacacgatgccgcgcgttgctgcctgccgtctgaagctttgacgcggttgatagaacaggcgggcaacgctgccgaaggtgggattttggcaattcccgttgccgatacgctcaagcgcgcggacggtgggaacattagtgcaaccgtcgagcggacgagcctttggcaggcacaaacgccgcagcttttccgcgccgggctgctgcaccgcgcattggctgcggaaaacttggacggcattaccgatgaagcgtccgccgtcgaaaaattgggcatccaccctttgctggtgcagggcgacgcgcgcaatttgaaactgacgcagccgcaggacgcatacatcgtcaggctgctgctcgatgccgtctga

SEQ ID NO: 81182 - protein, 229 aa, Neisseria meningitidis FAM18
MKRKNIALIPAAGIGARFGADKPKQYVEIGSKTVLEHTLGIFERHEGVDLTVVVVSPEDTFADKVQTAFPQVRVWKNGGQTRAETVRNGVAKLLETGLAAETDNILVHDAARCCLPSEALTRLIEQAGNAAEGGILAIPVADTLKRADGGNISATVERTSLWQAQTPQLFRAGLLHRALAAENLDGITDEASAVEKLGIHPLLVQGDARNLKLTQPQDAYIVRLLLDAV

SEQ ID NO: 81183 - DNA, 1155 bp, Magnetospirillum magnetotacticum MS-1
  CDS (1)..(1155): transl_table=11
atggccaagacggttgtgctggtggtggcggcggggcgcggacggcggttcggcggcgacctgcccaagcaataccatgatctggccggacgcatggtgctgcgccacaccctggcagccttcgccaccaatcccgagattgccgccgtgcgcgccgtcatccatcccgacgaccgccagctctacgacatggccgcagccggtctcaacctgctggaaccggtccatggcggcgccactcgccaggacagcgtgcgtctgggcctggaaagcctgaaggatctggctcccgccaatgtgttgatccacgacggggcgcggcccttcatcgatcacggcaccatcggccgggtcatccgcgcgctcgacaaccaccccggtgcccttcctgttgtgccggtggccgatacgctgaaacgaggccaggacggtttcgtggccgacacggtggatcgctccaatctgttccgcgcccagactccccagggattccgctatgccgatatcattgccgctcaccaggcggtgatcggcaatgaactgaccgatgacgccgccgtggcggaaaaggccggtctggcggtggaactggtgaacggcgcggaagacaacgtcaagatcaccaccagcgccgatcttgagcgggcgcgccgcttattcgacggccccggcgaggtccgttcggcctcgggctatgacgtgcaccgcttcgaccccgccaagaaaagcgtgtggctgtgcggcgtcgagattcctcatgaagcgggcctggaaggccattccgatgccgacgtctccctgcacgcgcttaccgacgcggtgctgggcgccatctcggccggtgatatcggccatcacttcccccccaccgatcctaaatggaagggcgcggcctcggaccagttcctggcccatgcgggctcgctggtcaccgccaagggcgggcgcatcgtcaatgtggatgtcaccatcatctgcgagcggcccaaagtgggcccccaccgcgccgccatggcggccagggtggcggaaatcctggggatttcccaagaccgggtcagcgtcaaggccaccaccacggaaggtctgggcttcaccggccgccgcgaaggcatcgccgcccaggccatggcttcggtctggctgccccgctag

SEQ ID NO: 81184 - protein, 384 aa, Magnetospirillum magnetotacticum MS-1
MAKTVVLVVAAGRGRRFGGDLPKQYHDLAGRMVLRHTLAAFATNPEIAAVRAVIHPDDRQLYDMAAAGLNLLEPVHGGATRQDSVRLGLESLKDLAPANVLIHDGARPFIDHGTIGRVIRALDNHPGALPVVPVADTLKRGQDGFVADTVDRSNLFRAQTPQGFRYADIIAAHQAVIGNELTDDAAVAEKAGLAVELVNGAEDNVKITTSADLERARRLFDGPGEVRSASGYDVHRFDPAKKSVWLCGVEIPHEAGLEGHSDADVSLHALTDAVLGAISAGDIGHHFPPTDPKWKGAASDQFLAHAGSLVTAKGGRIVNVDVTIICERPKVGPHRAAMAARVAEILGISQDRVSVKATTTEGLGFTGRREGIAAQAMASVWLPR

SEQ ID NO: 81185 - DNA, 645 bp, Nostoc punctiforme PCC 73102
  CDS (1)..(645): transl_table=11
atgggtagtaaccgcaataaactcctgctgaaagtgcgatcgcaaccaattattgcttggactctattagccgcagaagctgccaatacaatcagttggatcgggattatttctcagcctaccgattggccagacttcagagcaattctcgccgatctcaagcttactaaaccagtggaattgattcaaggtggctccacgcgtcaagaatctgtttacaacggcttgcaggctttgccactagccgcagaacaagtgttgattcacgatggcgctagatgtctcgccacaccagatttatttaactcttgtgcccaagccattcgccactgtcccggtttaattgctggtgtacccgtcaaagacaccatcaaagttgttgatgaacaaggcataattcaagaaacacccgacagacaaaaattgtgggcggcacaaactccccaaggatttgatgtcaagttgttgaaacagtgccacgctgaaggagtccgtcaaggttgggaagtaactgacgatgccgctttatttgaaaagtgcggcatcgaagtccgaattgtcgagggagaggagacaaatttaaaagtgacgactccacaagatttagcgatcgcagaatttattctcacaactagaggcgtttga

SEQ ID NO: 81186 - protein, 214 aa, Nostoc punctiforme PCC 73102
MGSNRNKLLLKVRSQPIIAWTLLAAEAANTISWIGIISQPTDWPDFRAILADLKLTKPVELIQGGSTRQESVYNGLQALPLAAEQVLIHDGARCLATPDLFNSCAQAIRHCPGLIAGVPVKDTIKVVDEQGIIQETPDRQKLWAAQTPQGFDVKLLKQCHAEGVRQGWEVTDDAALFEKCGIEVRIVEGEETNLKVTTPQDLAIAEFILTTRGV

SEQ ID NO: 81187 - DNA, 876 bp, Bifidobacterium longum DJO10A
  CDS (1)..(876): transl_table=11
atgactgagagagatttcgatacccccgtcgagacgcctaccgtccaaccggcccccgctcagggtgccaaaccggcgcaaaccgtgccggtggtggccgtggtgctggccgccggcttcggtacgcgcttcgaccccgataatcccaagcagcttgtctccgtgggcggcaagcccatcgtgtgctggagcattgatgcctttgaacattgcgatcgcgtcagcgacatcgtggtggtggtcaatcccaaggtgcgcggtgaagtggaaacgttggttggcgagatgggctacaccaaagtccgcgtcatcattgacggtggtgacgaacgtgtggacagtaccgccgccgcgctcgacatgctggctacggctggcattccggacgatgccaagattctgatccatgacgccgtccgtccgttcgtggaacagtccgccatcgacggttcgattgatgcgctcgaccagttcacggccgcgaccgtggcctacgcctcaaccgacaccgtgctgttgaccgaggatctgggcgatttgaaagtggtcaagtcggtgccggaccgcccgaacaccttccgcgcgcagaccccgcaatccttccgcttcgcgacgattcgtcacgcttacgatttggctgccgccgacccggacttccatcccaccgacgacacgcgcgtagtggtcgattatctgcctgatgaacccgtcgccattgtctccggtgcggaaaccaacctgaagatcaccacgctggaagatattcccacagctgagcgtatcgccgaggagattctcggtcgtgatcccaaggaagaggcccgcgcccgcatgcacgccctgctggcccaagcggccggccagatgcatcgctag

SEQ ID NO: 81188 - protein, 291 aa, Bifidobacterium longum DJO10A
MTERDFDTPVETPTVQPAPAQGAKPAQTVPVVAVVLAAGFGTRFDPDNPKQLVSVGGKPIVCWSIDAFEHCDRVSDIVVVVNPKVRGEVETLVGEMGYTKVRVIIDGGDERVDSTAAALDMLATAGIPDDAKILIHDAVRPFVEQSAIDGSIDALDQFTAATVAYASTDTVLLTEDLGDLKVVKSVPDRPNTFRAQTPQSFRFATIRHAYDLAAADPDFHPTDDTRVVVDYLPDEPVAIVSGAETNLKITTLEDIPTAERIAEEILGRDPKEEARARMHALLAQAAGQMHR

SEQ ID NO: 81189 - DNA, 684 bp, Haemophilus somnus 2336
  CDS (1)..(684): transl_table=11
atggatagagaaattgttgctataatacctgctgctggcattggttgccgtatgcaagcagatcgcccaaaacaatatttaaagatactgggcaaaacaattttagagcatacattaagtatttttttgagttgcgaaaaaattagccaaattgttttatctgtcgctgaaaatgatccttatttaattgatattgagttattgcgaaatcctcgtatcaatatggttattggcggaaagaatcgtgcggaatccgtgctaaacggcctacgtcaccttaaaaataaaaaagcctgggtgcttgtgcatgatgcagcacgtccttgtttacgcaatgaagatttagatacattactacaagttgaagatcaaaatggtgctattttagccattcctgcggtagatactattaaacgatcaaattcagtattgcaaattcaatgtacagaagaccgtaatcaattatggttggctcaaacaccgcaatttttccctgtacacttattgcaacacgctctagagcaagcagcaaaacgaggtattatcgtcacagatgaagcattagcgatggaacttgccggatttagaccgcacttagtagcaggacatagtgataatattaaagtaacacgtcctgaagacttggcattggcagaattttttttaactagaaaacaaaggtaa

SEQ ID NO: 81190 - protein, 227 aa, Haemophilus somnus 2336
MDREIVAIIPAAGIGCRMQADRPKQYLKILGKTILEHTLSIFLSCEKISQIVLSVAENDPYLIDIELLRNPRINMVIGGKNRAESVLNGLRHLKNKKAWVLVHDAARPCLRNEDLDTLLQVEDQNGAILAIPAVDTIKRSNSVLQIQCTEDRNQLWLAQTPQFFPVHLLQHALEQAAKRGIIVTDEALAMELAGFRPHLVAGHSDNIKVTRPEDLALAEFFLTRKQR

SEQ ID NO: 81191 - DNA, 696 bp, Fusobacterium nucleatum subsp. vincentii ATCC 49256
  CDS (1)..(696): transl_table=11
atgtacagtagtaactctgaaataaaaaagaaagttacttttattttagcagcagcaggtcaaggaaaaagaatgaatttaaattcacctaaacaatttttagactataaaggagagccacttttttactcatctttaaaaattgcctttgacaataaatatatagatgatattattatagtaactaataaagaaaatttaaattttatggtaaaatattgtcaagacaaaaatttattttcaaaagtcaaatatatagttgaaggtggaagtgaaagacaatattctatctataatgctataaaaaaaatagaagatacagatattgtaatagtacaagatgcagcaagaccttttctaaaagatagatatatagaagaaagtataaaaattttagataatgattgtgatggagcaattattggtgtaaaatgtaaagatactattaagattattgataaaaatggaatagtattagaaacaccaaatagagataacttgataatggttcacacaccacagacttttaaatttgaaattttaaaaaaagcatatcaaatggcagaggaaaaaaacatattagccacagatgatgcaagtttggtggagatgatatctgaaaaagttaaatttattaatggagattatgataatattaagattacggtacaagaggacttaaagtttttaaaataa

SEQ ID NO: 81192 - protein, 231 aa, Fusobacterium nucleatum subsp. vincentii ATCC 49256
MYSSNSEIKKKVTFILAAAGQGKRMNLNSPKQFLDYKGEPLFYSSLKIAFDNKYIDDIIIVTNKENLNFMVKYCQDKNLFSKVKYIVEGGSERQYSIYNAIKKIEDTDIVIVQDAARPFLKDRYIEESIKILDNDCDGAIIGVKCKDTIKIIDKNGIVLETPNRDNLIMVHTPQTFKFEILKKAYQMAEEKNILATDDASLVEMISEKVKFINGDYDNIKITVQEDLKFLK

SEQ ID NO: 81193 - DNA, 678 bp, Haemophilus influenzae R2846
  CDS (1)..(678): transl_table=11
atggctcgttcaattattgtggtcttgccagctgctggcgtgggttcacggatgcaagcggataaaccgaaacaatatttaacgctgcttggcaaaacactgcttgaacatacactcgatgtgatgctttcttatcctgccgtatctaaaattatcttggcggtaagcaaagatgatccttatatttctacactatcgctcgatcctaaaattcagttagtggaaggtggcacaacgcgagctgaatctgtcttaaatggtttaaatgcaattgcggaaaaaaatgcctgggtgcttgttcatgatgctgctcgcccttgtttacaacatgctgatattgataaattgttagctattgaagataaacaaggtgcgattttggcaatcccagtaacagatacgattaaacgagcggacaatcagcaatgtattgtaaaaacagaagatcgtagccagctttggcaagcaatgacaccgcagtttttcccagtagatatattaagagatgcgctttccacaggaattcaacaaggtgcgaatataacagatgaagcatccgcaatagaacttgctggatttcgaccgcacttagtggctggacgcagcgataatttaaaagtgactcgtccagaagatttagcattagcagaattttatttaacaaggaataaattatga

SEQ ID NO: 81194 - protein, 225 aa, Haemophilus influenzae R2846
MARSIIVVLPAAGVGSRMQADKPKQYLTLLGKTLLEHTLDVMLSYPAVSKIILAVSKDDPYISTLSLDPKIQLVEGGTTRAESVLNGLNAIAEKNAWVLVHDAARPCLQHADIDKLLAIEDKQGAILAIPVTDTIKRADNQQCIVKTEDRSQLWQAMTPQFFPVDILRDALSTGIQQGANITDEASAIELAGFRPHLVAGRSDNLKVTRPEDLALAEFYLTRNKL

SEQ ID NO: 81195 - DNA, 687 bp, Actinobacillus pleuropneumoniae serovar 1 str. 4074
  CDS (1)..(687): transl_table=11
atgacacgaaaaattattgcggtaattcctgcctcgggtgtcggtagccgtatgcaagccggtttacccaaacaatatttaaaattacaaaataaaacgattttagagcatacgctcgaaatttttttagcacatccggatattgaaaaaattgttgttgccgttgccgaaaccgatccgttttatcctcaagtcgctttattagactcgcctaaaatccaaatcgtatttggcggagaaactcgggcgcattccgtttttaatgcgctgcaagttattgaagatgatagttgggtattagtacatgatgcggcacgtccctgtttaaagcggtcggatttagataaacttttacaaatcgatgataaacagggtgcgatattagcgactccggcaatcgatacgatgaaaagagccgacggtaacaaaattatgcgcactgaagatcgttcaacgctttggcatgcacttacccctcaattttttcctactcggctactgaagcaagcgcttatttcagcatttaagaaaaatttaaccgtaacggacgaggcttccgcaatggaatttagcggttatcagccacgtcttattgcggggcgcagcgataacttaaaaattactcgccctgaagatttagccttagcggaattttacttaacccaaaacacggagaaaaaaatatga

SEQ ID NO: 81196 - protein, 228 aa, Actinobacillus pleuropneumoniae serovar 1 str. 4074
MTRKIIAVIPASGVGSRMQAGLPKQYLKLQNKTILEHTLEIFLAHPDIEKIVVAVAETDPFYPQVALLDSPKIQIVFGGETRAHSVFNALQVIEDDSWVLVHDAARPCLKRSDLDKLLQIDDKQGAILATPAIDTMKRADGNKIMRTEDRSTLWHALTPQFFPTRLLKQALISAFKKNLTVTDEASAMEFSGYQPRLIAGRSDNLKITRPEDLALAEFYLTQNTEKKI

SEQ ID NO: 81197 - DNA, 699 bp, Listeria monocytogenes str. 1/2a F6854
  CDS (1)..(699): transl_table=11
atgaattatgagttggtttttttagcggcaggtcaagggaagcggatgaatgcccagaaaaacaaaatgtggctagagctagttggcgaaccaattttcattcatgccttgcgtccttttttagcggataatcgttgttccaaagtgattgttgtgtgtcaagaagaggaaagaaagcatgtaaaagaattaatgagtcagcttaatgtggctgagcaccgaattgagattgttaaaggtggaagtgagcgccaatacagtgttgcggcaggtcttgaacgttgtgggacggagcgtgttgtcttagtgcatgatggcgcaagaccgtttatcacgttagatattattgatcgattattaattggtgtagagcaaagtaaagccgcgatttgtgcagtaaaagtaaaagatacggtgaaacgagtggtgaatggtgtcgttcaagaaaccgttgaccgtgaaaatctttggcaagttcaaacgccgcaagcctttgaactgcctattttacgaaaagcgcatcagcttgctcgaaaagaacagtttttagggacggatgaagctagtctggttgagcgaattccttgtcctgttgctattgtccaaggaagctattataatattaagctgacaactcctgaagatatgccgctcgcaaaggcgattttaggggaacttggagggatagcaaatgattag

SEQ ID NO: 81198 - protein, 232 aa, Listeria monocytogenes str. 1/2a F6854
MNYELVFLAAGQGKRMNAQKNKMWLELVGEPIFIHALRPFLADNRCSKVIVVCQEEERKHVKELMSQLNVAEHRIEIVKGGSERQYSVAAGLERCGTERVVLVHDGARPFITLDIIDRLLIGVEQSKAAICAVKVKDTVKRVVNGVVQETVDRENLWQVQTPQAFELPILRKAHQLARKEQFLGTDEASLVERIPCPVAIVQGSYYNIKLTTPEDMPLAKAILGELGGIAND

SEQ ID NO: 81199 - DNA, 681 bp, Bacillus cereus G9241
  CDS (1)..(681): transl_table=11
atgtatacattaattattccagcagctggtcaaggaaagcggatgggcgctggcaaaaataagttgttcttacttattaatgaagtaccgattattgtgcatacgttacgtgcttttgaaaaggataaagcatgtaaaaatattattatggcaattaacgaagaagagcgtccgtattttgaagagttaatgcagaagtatccggttgaaaagccagtacaatttattcaaggtggagctgaaagacaagatagtgtgtataacgcgattcagcatacgagtgatgttgagtatgttcttgtacatgacggtgcgcgcccgttcgtaacgaataaagtgattcaagatgtattaactgcagcagaaaaatatggagcttccatttgtgcggtgccagtgaaagatactgttaagaaagtagagcagggtgttgttgtcgaaacggtagaaagatctcagcttaaagctgtacaaacaccacaagggttctctgtttctcttttgttagaagctcatagaagtgcgaaacagagttgttttcttggtacagatgatgcaagtctcgtagaacgtatcgggaagcaagtaggtgtagtagaggggagttactataatattaaagtgacgactccagaggatttactaattgctgaaagttttcttcacgttcaaaagaaatga

SEQ ID NO: 81200 - protein, 226 aa, Bacillus cereus G9241
MYTLIIPAAGQGKRMGAGKNKLFLLINEVPIIVHTLRAFEKDKACKNIIMAINEEERPYFEELMQKYPVEKPVQFIQGGAERQDSVYNAIQHTSDVEYVLVHDGARPFVTNKVIQDVLTAAEKYGASICAVPVKDTVKKVEQGVVVETVERSQLKAVQTPQGFSVSLLLEAHRSAKQSCFLGTDDASLVERIGKQVGVVEGSYYNIKVTTPEDLLIAESFLHVQKK

SEQ ID NO: 81201 - DNA, 687 bp, Crocosphaera watsonii WH 8501
  CDS (1)..(687): transl_table=11
atgtatctattaattccagcagcaggaatgggtaaacgaatgggaagcgaacgcaataaactattgcttaatcttttaggcaaacctttattaagttggacacttctcgcagcagaaacagcacaaaaaattgagtggattggtattataggacaaccctacgatttccctgaatttaaaaatatcttagagaatatttctcttaacaaacccgtggaattaatctcaggaggagaaacccgtcaacagtctgtctataacggtttacaagcattaccaaaagaagcggaaaacgttttaattcacgacggggcaagatgtttagtaacccctaatttattcgatagatgtgcagaagaacttttaaattgtcaagggttaattgctgctattcctgttaaagataccattaaaattgttgatagtaaacaatttattaaagatactccaaaacgttctaatttatgggccgcacaaactccccaaggatttgatgttaatctattaaaagaaagtcatgaaaaaggctatcaaatgggttggcaagtaaccgatgatgctgctttatttgaaaaatgtcaattaccagtcaaaattgttcaaggagaagaaacaaacttaaaagtaactacccctgtagatttagcgatcgccgagtttattttaaaacaaagattgacacaataa

SEQ ID NO: 81202 - protein, 228 aa, Crocosphaera watsonii WH 8501
MYLLIPAAGMGKRMGSERNKLLLNLLGKPLLSWTLLAAETAQKIEWIGIIGQPYDFPEFKNILENISLNKPVELISGGETRQQSVYNGLQALPKEAENVLIHDGARCLVTPNLFDRCAEELLNCQGLIAAIPVKDTIKIVDSKQFIKDTPKRSNLWAAQTPQGFDVNLLKESHEKGYQMGWQVTDDAALFEKCQLPVKIVQGEETNLKVTTPVDLAIAEFILKQRLTQ

SEQ ID NO: 81203 - DNA, 684 bp, Exiguobacterium sibiricum 255-15
  CDS (1)..(684): transl_table=11
atgaaagagcacacataccggatcgtcattccggctgccggcgcagggaaacggatgggggccgatcggaacaagttgatgctgacgttacgaaatcgttccatcatcgagtggacacttgacgtttttgagcaggatccggcttgtcttgaaatcattctcgcgatcaatccagccgagcagtcctggttcgaaggcattacaacaccctataagacaccaatccgtcttgtcccgggcggacgtgaacgccaggaaagcgtccagcgtggtctggaagcgttgacggagcccggaatcgtgttgattcatgacggggcacgaccattcgtgacgattgcatcgattcagcaggtcgtcgaagcagcggaacggaccggcgctgcaattttaggtgtaccgattaaggataccgtcaaacggattgacggcgacacgattgtcgagacggttcctcgggagcaattaatggctgctcaaacaccgcaagcctttaagctagagacgatccgaagcatccatgccaaagcggcaacggaatttttaggtacggatgacgcaagtttgatagaatgggacggaggaacggtgacttgggttaccggacaatacgagaacattaaagtgacgacaccggacgatttattgtttggagaagctattttaacgaaacgggggaaatga

SEQ ID NO: 81204 - protein, 227 aa, Exiguobacterium sibiricum 255-15
MKEHTYRIVIPAAGAGKRMGADRNKLMLTLRNRSIIEWTLDVFEQDPACLEIILAINPAEQSWFEGITTPYKTPIRLVPGGRERQESVQRGLEALTEPGIVLIHDGARPFVTIASIQQVVEAAERTGAAILGVPIKDTVKRIDGDTIVETVPREQLMAAQTPQAFKLETIRSIHAKAATEFLGTDDASLIEWDGGTVTWVTGQYENIKVTTPDDLLFGEAILTKRGK

SEQ ID NO: 81205 - DNA, 735 bp, Prosthecochloris aestuarii DSM 271
  CDS (1)..(735): transl_table=11
atgagttcagttgccattatcgcagccagcggcgtaggaaaaagaatgaacctccgcaacggactgagcaagcagtttctcgaaatcggaggatatccggttatctaccacacacttgctgcctttcaacgcgccagctctatcgacaagatctacatagcgacaaagcctgacagtattgcaacacttgaaactcttgccgaagaacaccagttcagcaagatcaatgccattattgcaggcggaaaggaacgtcaggactcgatcagcaactgcatagaattgattgccttgcacattgaaaaagccgaaatcgaccggccagacaccattctggtgcatgacggagcgcgcccgttcatcacacccgatgaaatcgatcaaattgcacaactgtcacaccactacggtgcctgcgtaccggcgacaaagccaaaagacacgatcaaatacatatcagatcaacccggatttttcggcgaaacgcttgatcgaagtcttctcctgcaggtgcagacgcctcagggcttcgcttcagaaaagctcgttgaagcccacaggaaagctcgtgaggcagagtcctatgcgactgacgacgctgcgctggtagaaaagtttttccccgatcagaagatcaaggtctttgaaatgggctaccacaatatcaagattacaacccctgaagacatctttctcggcgaagcgatctacgcacagcttcagcagcaatcctga

SEQ ID NO: 81206 - protein, 244 aa, Prosthecochloris aestuarii DSM 271
MSSVAIIAASGVGKRMNLRNGLSKQFLEIGGYPVIYHTLAAFQRASSIDKIYIATKPDSIATLETLAEEHQFSKINAIIAGGKERQDSISNCIELIALHIEKAEIDRPDTILVHDGARPFITPDEIDQIAQLSHHYGACVPATKPKDTIKYISDQPGFFGETLDRSLLLQVQTPQGFASEKLVEAHRKAREAESYATDDAALVEKFFPDQKIKVFEMGYHNIKITTPEDIFLGEAIYAQLQQQS

SEQ ID NO: 81207 - DNA, 696 bp, Xylella fastidiosa Ann-1
  CDS (1)..(696): transl_table=11
atgagtgttggtgtttgggcggtgatccctgcggctggccgtggggtccgatttggttctcctgtgcccaagcagtatttacccgttgttgggcggccgttgattgtctataccctggaagcattggcagcacatccggcggtgtgtgggttgatggtggtggtggctgagggcgatctggcttggtccggctggacagaggtggcaggtaagccattgttgacttgcagtggaggcgtgacccgtgctgcttcggtattgtctggcttgttggcgttgccacaggtggtgcacgctgatgatttcgtgttggtccatgatgctgcgcgtcccaacgtggctttgtccgatctggaacgattgctggaggcgggctgtgcccatccagtgggtgcgatcctggctgtaccggtgcgtgacacgctgaagcgtgccggttctgatggcagtattgacggcaccgagccacgtgaacggttatggcgtgcattcactccacagttgtttcggcgatctcagttggtgcgcggtttgcaggtcgctgcagcggatgggatcgagatgaccgatgaagcgatggtcatggagcggcagggattgcgtcctcttctggtggagtgtgccgagagtaattttaagatcacaacgccagatgatttggtgcgtttcgagtttgaattggcgcggcgtgtttga

SEQ ID NO: 81208 - protein, 231 aa, Xylella fastidiosa Ann-1
MSVGVWAVIPAAGRGVRFGSPVPKQYLPVVGRPLIVYTLEALAAHPAVCGLMVVVAEGDLAWSGWTEVAGKPLLTCSGGVTRAASVLSGLLALPQVVHADDFVLVHDAARPNVALSDLERLLEAGCAHPVGAILAVPVRDTLKRAGSDGSIDGTEPRERLWRAFTPQLFRRSQLVRGLQVAAADGIEMTDEAMVMERQGLRPLLVECAESNFKITTPDDLVRFEFELARRV

SEQ ID NO: 81209 - DNA, 1143 bp, Sulfitobacter sp. EE-36
  CDS (1)..(1143): transl_table=11
atggcgtcgacaccgaaaatcgcagcgctcatcgtggccgccggacgtgggacccgtgcggggggcgccgtgcccaaacaatggcagccgctgtgcgggaaacgcgtgatcgaccacacgcttgcggctttccagcggcatccgcagatcgaccggatcatcatcgtattaagcgccagtgacatggcgcaggccgaaggtttcaccgcgcaaggctgtcttgtcgccgaagggggcgcggatcgcgcagcatcggtgcgcaacggtctggcgctgctgggggatgcggatctggtgctgatccatgatgccgcccgcccctgtgtcacgccgcagatcatcgacggtgtgatcgacgcgctggtcacagatgccgcagccgcccccggcctgcctgttaccgacgcgctttgggtggccgaagacggtgccgtcgcaggcacgcaggaccgtaccgcgctttatgccgcacaaaccccgcaaggcttcgatgccgccacgatccgcgccgctcatgccgcctttgaaggcatcgccgccgatgatgtagaggtcgcccgcgccgccggtgttgcggttgccatcacccccggcagcgtcgataacctgaaaatcacggtgccgggcgatttgacccgcgccgctcgcatattggagtcttcgatggatattcgcaccggcaacgggtttgatgtacatgctttcggtccgggggatcacgtcacactttgcggagtcgatatcccgcatgatcaggggctggtcggccattccgacgccgatgtcggtatgcatacggtcaccgatgcgatctatggcgcgttggctatgggcgacatcggccagcatttccccccgtccgacccgcagtggaaaggggcgcaaagccatatctttctgcgccatgccgccgatctggcgcgcagcgaagggttcaccctgacccatgtcgattgcacgctgatctgcgaataccccaaagtggggcctcatgccgcagagatgcgccgcgtgatggcggatatcctgtcccttgaggaaagccgtgtgtcggtcaaggcgacgacctcggaacgtttggggtttaccggccgcggcgaaggcatcgcctgcatggccacagcaacattggtgaaactatga

SEQ ID NO: 81210 - protein, 380 aa, Sulfitobacter sp. EE-36
MASTPKIAALIVAAGRGTRAGGAVPKQWQPLCGKRVIDHTLAAFQRHPQIDRIIIVLSASDMAQAEGFTAQGCLVAEGGADRAASVRNGLALLGDADLVLIHDAARPCVTPQIIDGVIDALVTDAAAAPGLPVTDALWVAEDGAVAGTQDRTALYAAQTPQGFDAATIRAAHAAFEGIAADDVEVARAAGVAVAITPGSVDNLKITVPGDLTRAARILESSMDIRTGNGFDVHAFGPGDHVTLCGVDIPHDQGLVGHSDADVGMHTVTDAIYGALAMGDIGQHFPPSDPQWKGAQSHIFLRHAADLARSEGFTLTHVDCTLICEYPKVGPHAAEMRRVMADILSLEESRVSVKATTSERLGFTGRGEGIACMATATLVKL

SEQ ID NO: 81211 - DNA, 1155 bp, Roseovarius nubinhibens ISM
  CDS (1)..(1155): transl_table=11
atgatcatcgctgccctcattgtcgccgctggccgtggttcgcgcgccgaaaccccgctgcccaagcagtggcaaccgctcgggcctgcccgcgtcgccgatgtgacgctggcgcgctttgccacccacccgcgcatcggcccgatctgcatggtgctgcatcccgacgacatggccctcgcccccgatcaccccggtctgatccttgcgcccggcggcagcacgcgcgccgcctcggtccgcaacgggctcgacgcgctggccgagcacgccccggaccttgtgctgatccatgacgtggcccggccttgcgtttcgtcctccgtcatcgacggggtgatcgcggcgctcgcccatggccccgccgccgcccccgcgctgccggtcaccgacgcgctctggcgcggcgccgaggcccgcgtcaccggcaccgaagaccggacaggtctcttccgcgcccagacgccgcagggctttcacttcgccgccatccgcgacgcccacgccaaggcccagaacgacgcccagacccagggcacagccgacgccgccgatgatgtggccattgcccgcgccgccgggcttgacgtcatcatcacccggggggatgaggccaatatcaagatcacctggcccgaggatttcgcccgggcgcaacgcatattggggagcgagatgaaaatcagactgggcaatggctatgacgtgcaccggttcgggccgggcgatgcggtggtgctctgcggtgtaaccatcccgcatgatcgcggcctccaaggccattccgatgccgatgtcggcatgcacgcgctcaccgatgccatctatggcgcgctggccgagggcgacattggccgtcatttcccgccctccgacatgcaatggaaaggcgcggacagccgcatttttctccgccatgccgtcggcctcgccgccgataaaggctacaagatcaacaatctagacgtcactcttgtctgcgaataccccaagatcggcccccaggccgaggccatgcgcgcggccctagccgagctctgccagacgccgctcgatgctgtctcggtcaaggccacgacctccgaacggctgggcttcaccgggcgcggcgaaggcattgcggcgctggccaccgtcaccctcaccggtctctga

SEQ ID NO: 81212 - protein, 384 aa, Roseovarius nubinhibens ISM
MIIAALIVAAGRGSRAETPLPKQWQPLGPARVADVTLARFATHPRIGPICMVLHPDDMALAPDHPGLILAPGGSTRAASVRNGLDALAEHAPDLVLIHDVARPCVSSSVIDGVIAALAHGPAAAPALPVTDALWRGAEARVTGTEDRTGLFRAQTPQGFHFAAIRDAHAKAQNDAQTQGTADAADDVAIARAAGLDVIITRGDEANIKITWPEDFARAQRILGSEMKIRLGNGYDVHRFGPGDAVVLCGVTIPHDRGLQGHSDADVGMHALTDAIYGALAEGDIGRHFPPSDMQWKGADSRIFLRHAVGLAADKGYKINNLDVTLVCEYPKIGPQAEAMRAALAELCQTPLDAVSVKATTSERLGFTGRGEGIAALATVTLTGL

SEQ ID NO: 81213 - DNA, 675 bp, Prochlorococcus marinus str. MIT 9211
  CDS (1)..(675): transl_table=11
ttgctaattgcagcagcaggtagtggcagccgaatgggtgcagattgcaacaagttgttgttgcaaatagagggagaacccatcttaaaatggactttagagtcagttgctttggctagttcaattaaatggattggcattattggccagccttgcgataaacatgcaattatgcagattgttcaggatttttctaaacctgtccaatggataaatgggggtaaaacgcgtcaagagtcagttcaaaaaggattagctgctttgcctgatgaagcaatacatgtattaatacacgatggagctagatgtttagtagagcctgagttgtttgatcagtgtgcacagatggttttgaagggtgttgccatcattgctgccacgccagttgtcgacacaataaagacagttgatagtaatggttatatatcaggtactccagatagatctaaattgtgggccgctcaaacgccccagggattttcagttgaacaactcaaggaaggtcatgcgacagctattgctaaaaattggaatgtcacagatgatgcttcacttttcgaaaaactagcctggccagtaaggattctcgaatcttctccatcaaatataaaggtcacaactccatttgatttgtcaattgcccagtcaataattgctatgaagagacaatcctaa

SEQ ID NO: 81214 - protein, 224 aa, Prochlorococcus marinus str. MIT 9211
MLIAAAGSGSRMGADCNKLLLQIEGEPILKWTLESVALASSIKWIGIIGQPCDKHAIMQIVQDFSKPVQWINGGKTRQESVQKGLAALPDEAIHVLIHDGARCLVEPELFDQCAQMVLKGVAIIAATPVVDTIKTVDSNGYISGTPDRSKLWAAQTPQGFSVEQLKEGHATAIAKNWNVTDDASLFEKLAWPVRILESSPSNIKVTTPFDLSIAQSIIAMKRQS

SEQ ID NO: 81215 - DNA, 1161 bp, Erythrobacter sp. NAP1
  CDS (1)..(1161): transl_table=11
atggaccaagccaccaccctccccccatttgccgctatcgtcgttgcagcgggaaagggattgagggtcggcggcgacacgcccaagcagtatcgcaactggcgcggcaagcctcttatccgccattccgtcgagactcttcgcgccgctggtgcggatcctcttttggtggtgatcgcaactggagccgaggatgatgccgaagatgctttgaagggtcttaccgggtttcgatttgaggaaggcggcgcatcacgacaggattccgtgcgagccgggcttgaagcattggcggaagaaccgccggcaaaagtcctcatccatgatgcagctcgccccgacctgccgttggaagtgatccagcggctccttgcagctctggatgagcatcaaggtgcgatcccgacccttcccgtcgtcgacagcctcgcggtcgccagtgacgccagcaccatggcgggcaaggccgatcgggagacccttcgaagagtgcagactccccaggctttccggtttgaggacattcttgctgctcaccgcgaatggaattcacaaaccgatgccggagatgacgcgcaagtccttgcagccatgcaaggttcagtcgcactggttcagggtgatgaacgcctcaagaagatcacttttgcagaagacctgatggacacagccggtattgccccgttccgcatcggacaaggatatgacgtccaccgcctggcagaaggcgaagagctgtggttgtgcggtgtaaagcttgaacacacccacggcttggctggccattccgatgccgacgtggcgcttcatgcgataaccgatgcggtgctgggcgccatcggcaacggcgatatcggaacgcattttccaccaagcgatgaccaatgggcaggagcacgctcaggtcaattcctagaacatgccgttaagcttgctgaggaagcgggttacgcgctcggaaacatcgacctaacgcttatctgtgaggccccgaagatcggcccacatcgccccgccatgagggctgaagtggcgaggattaccggccttggagaagatgctgttagtatcaaggcaacgacgacagaaaagctgggttttaccggccgaggtgaaggtatcgctgcacaggcgattgtcgcgcttcacgcggcaaactga

SEQ ID NO: 81216 - protein, 386 aa, Erythrobacter sp. NAP1
MDQATTLPPFAAIVVAAGKGLRVGGDTPKQYRNWRGKPLIRHSVETLRAAGADPLLVVIATGAEDDAEDALKGLTGFRFEEGGASRQDSVRAGLEALAEEPPAKVLIHDAARPDLPLEVIQRLLAALDEHQGAIPTLPVVDSLAVASDASTMAGKADRETLRRVQTPQAFRFEDILAAHREWNSQTDAGDDAQVLAAMQGSVALVQGDERLKKITFAEDLMDTAGIAPFRIGQGYDVHRLAEGEELWLCGVKLEHTHGLAGHSDADVALHAITDAVLGAIGNGDIGTHFPPSDDQWAGARSGQFLEHAVKLAEEAGYALGNIDLTLICEAPKIGPHRPAMRAEVARITGLGEDAVSIKATTTEKLGFTGRGEGIAAQAIVALHAAN

SEQ ID NO: 81217 - DNA, 717 bp, Synechococcus sp. RS9917
  CDS (1)..(717): transl_table=11
atggaggccgtttccgcccgctggtccgaggagtcgcttgtgcatctgttgatcgccgccgcaggcagtggacgtcgcatgggtgccgagtgcaacaagctgctcctgccattggccgggaggccggtgctggcctggaccctggaggcggcgttgcaggcctcgtccatttcctggatcggcatcgttggccaaccggtggatcaggtcgccatcgccccgctgatgcgcgacacggccaagccggtgatctggatcgaggggggcagcacccgccagcagtctgtggagcgaggtctggcagccctgccggcggaggccgtgcatgtgctcattcacgacggagcgcgttgcctggtggagccggagctgttcaatcgctgtgcttcagcggtgaaggcgggagaagcggtgattgccgccacccccgtgaccgacacgatcaagcgtgtggatgcggcggggcggatcacagcaacgccggatcgctccagcctctgggcggcgcagactccccaggggtttgccgtggagcagctgcggcaggggcaccgccaagcgctcgagcagggctggactgtcaccgacgatgcctcgctgtatgaacggctgggctggcaggtgcgcgtgctggaggccggccccgccaacatcaaggtcacgacgccctttgatctcaccgtggcggaggcggtgctggcgctcagagcaggctga

SEQ ID NO: 81218 - protein, 238 aa, Synechococcus sp. RS9917
MEAVSARWSEESLVHLLIAAAGSGRRMGAECNKLLLPLAGRPVLAWTLEAALQASSISWIGIVGQPVDQVAIAPLMRDTAKPVIWIEGGSTRQQSVERGLAALPAEAVHVLIHDGARCLVEPELFNRCASAVKAGEAVIAATPVTDTIKRVDAAGRITATPDRSSLWAAQTPQGFAVEQLRQGHRQALEQGWTVTDDASLYERLGWQVRVLEAGPANIKVTTPFDLTVAEAVLALRAG

SEQ ID NO: 81219 - DNA, 684 bp, Synechococcus sp. WH 5701
  CDS (1)..(684): transl_table=11
ttgctgatcgccgctgctggcagtggccgccggatgggtgccgagcgcaacaagctgctgctgcccgtggcagggcgccccgtgctggcctggaccctggaggcggctctcgccacgcctgagatcagctggatcggggtggtgggccagagccgggatcaggcggaggtggcggccctggtggcggccgcggcgcccgatcggcccgtgcactggatcgagggcggtgacacccgccaggactcggtgcgcctcggcctggcggccctgccgccggacgctgaagcgcttctcatccacgacggcgcccgctgcctggtggagccggaactgatcagccgctgcgccgctgcggcagcccggggagaggctgtgattgccgcggtgccggtgtcggacacgatcaagcgggtggcggccgacggcaccatcgaggacacccccgatcgccaggcgctctgggcggcccagactccgcagggctttcctctggcccagctgcgccgcggccatgccacggcagcggccgagggttggagtgtcaccgacgacgcctcgctgttcgagcgcctgggctggccggtgcgggtgatcgaggcctcagcctcaaacatcaagctcaccaccccttttgatctcaccatcgccgaggcggtgctggctgcccgcagcggctgttcttag

SEQ ID NO: 81220 - protein, 227 aa, Synechococcus sp. WH 5701
MLIAAAGSGRRMGAERNKLLLPVAGRPVLAWTLEAALATPEISWIGVVGQSRDQAEVAALVAAAAPDRPVHWIEGGDTRQDSVRLGLAALPPDAEALLIHDGARCLVEPELISRCAAAAARGEAVIAAVPVSDTIKRVAADGTIEDTPDRQALWAAQTPQGFPLAQLRRGHATAAAEGWSVTDDASLFERLGWPVRVIEASASNIKLTTPFDLTIAEAVLAARSGCS

SEQ ID NO: 81221 - DNA, 672 bp, Synechococcus sp. WH 7805
  CDS (1)..(672): transl_table=11
gtgcatctgttgattgctgcagcgggcagtggccggcgcatgggggcggatcgcaacaaacttctgcttcctgtgaatggtcgcccggtcctcgcctggaccctcgaggccgccttcgcagctgagtccatccattggatcggcgtgatcggccaacctgtggaccaacccgccatggctgccttgttcgcccaggccccgcaaccggtgacctggattgaaggaggtagtacccggcaggagtcggtggagcgaggcttgcaggccctaccccaggacgcacgccaggtgcttattcatgacggtgcccgatgccttgtggctccgcaggtgttcaatcgctgtactgaggtgctcattcagggcggtgcggtcatcgctgcaacccctgtgagtgacaccatcaagcgtgttgactcccagggcgtgatcactgacactcccgatcgttctgagctatgggccgcccagacgccccagggattctcagtgtcagaactgcgcgaaggtcatgcccaggcgagagctcgcaactgggtggtcaccgacgatgcctcgttgtttgagcgtcttggctgggcggtgcgggtactcgacgcagggccaggaaacatcaaggtgaccacaccgttcgatctcactgtggctgctgcggtcttggctcagcgctga

SEQ ID NO: 81222 - protein, 223 aa, Synechococcus sp. WH 7805
MHLLIAAAGSGRRMGADRNKLLLPVNGRPVLAWTLEAAFAAESIHWIGVIGQPVDQPAMAALFAQAPQPVTWIEGGSTRQESVERGLQALPQDARQVLIHDGARCLVAPQVFNRCTEVLIQGGAVIAATPVSDTIKRVDSQGVITDTPDRSELWAAQTPQGFSVSELREGHAQARARNWVVTDDASLFERLGWAVRVLDAGPGNIKVTTPFDLTVAAAVLAQR

SEQ ID NO: 81223 - DNA, 699 bp, Pseudoalteromonas tunicata D2
  CDS (1)..(699): transl_table=11
atgaaacaagtcaaaatagctgccattgtgccagcggctggagtgggaagtcgcatgcaaagcgccttacctaaacagtatattaagattaatcaacaaactgtcttagagcacactttaaataagctgttatctgttgcggccattgagcatattatggttgcaattagcccagacgatatgtggtttggtgagcttggaataaatgacgaaaaaattacctgcaccgaaggcggggcgcagcgcgcgaataccgtattaaatgcattaactcttttaaaagatcaaggggttgattgggtattagtacatgatgcagcgcgccctttagtacactcaagcgatattgagctattaattgatcgttgtttatcaagccaaacgggtgggattttagcctcaaaagtgaaagataccattaagcaaggtggccaatttattgaagctactgttcctcgtgatgcgctttggcaggctttaacaccgcaaatgtttcaagttgatttactttttcacgcactcacaaatgctttaaacgcaggttttattgtgaccgatgaagcctctgctatggagcacgctcagcatccagtgatgcttattgctgggcgctcagacaacataaaaattaccacccctgaagatttaatacttgctgaattttacctcagcacaacgcgcagtttggagacacaatga

SEQ ID NO: 81224 - protein, 232 aa, Pseudoalteromonas tunicata D2
MKQVKIAAIVPAAGVGSRMQSALPKQYIKINQQTVLEHTLNKLLSVAAIEHIMVAISPDDMWFGELGINDEKITCTEGGAQRANTVLNALTLLKDQGVDWVLVHDAARPLVHSSDIELLIDRCLSSQTGGILASKVKDTIKQGGQFIEATVPRDALWQALTPQMFQVDLLFHALTNALNAGFIVTDEASAMEHAQHPVMLIAGRSDNIKITTPEDLILAEFYLSTTRSLETQ

SEQ ID NO: 81225 - DNA, 711 bp, Photobacterium sp. SKA34
  CDS (1)..(711): transl_table=11
atgatcgataaatgtattgctattgtacctgcagcagggattggtagccgaatggccgctgatcgtcctaagcaatatttaacgattgctggtaaaacgattctagaacattcggttgagcggttattaagcttgcctgaagtccaacatgttgtgattgcggtaggtaagaatgatccttacttttcgacgttaccattagcgaacgatcctcgtatcactgtggttgatggcggtaatgagcgtgttgattcggtattttcaggcttagcagcaatcaatgatgataacgcttgggtgatggtacatgatgccgctcgcccttgtgtaggtatcgaagatcttcgtcaattaatggctgcggctgaaacgtctgaatatggcgcaatccttgccacgccggtacgcgataccatgaaacgtagcactgttaattcaaattcactcgcagtgattgatcatacagttgaccgtgagcaactatggcatgcattaacacctcaaatgtttcgtgccggtcaactacgtgatgcgttaacgaccgctttaacaaaagaggcggtgatcactgatgaagcgtctgcgcttgaattttgtggtttttctcctgtgctggtgaaagggcgtgcggataacctaaaagtaacccaaccagaagatttagctttagctgagttctacctacaacaattattaaaggaattaccataa

SEQ ID NO: 81226 - protein, 236 aa, Photobacterium sp. SKA34
MIDKCIAIVPAAGIGSRMAADRPKQYLTIAGKTILEHSVERLLSLPEVQHVVIAVGKNDPYFSTLPLANDPRITVVDGGNERVDSVFSGLAAINDDNAWVMVHDAARPCVGIEDLRQLMAAAETSEYGAILATPVRDTMKRSTVNSNSLAVIDHTVDREQLWHALTPQMFRAGQLRDALTTALTKEAVITDEASALEFCGFSPVLVKGRADNLKVTQPEDLALAEFYLQQLLKELP

SEQ ID NO: 81227 - DNA, 1470 bp, Xanthobacter autotrophicus Py2
  CDS (1)..(1470): transl_table=11
atgggggcgaggatcaccgcattgggcagcgcgtgggagccgatccgcaacgccggaatggaaaatgcgacagtctcttgcacagaaattaggccacctcgcttctgcctacatcttagacaagtgcgcggcacaagcaagggcagtctgcgtggaagtgcagcgcagcagaatttaccccatcgccggttacctgcaccggtgctccgacccattccgggacgggattcacccccgctcgcaccaggggggccgggcatgagcgaagtggcgaatccctcatgcgtggccattatcgtcgccgccggacgcggcacccgcgccggtggaccgctgccgaagcaatatcaggccatcggcggcgagccggtgctgcgccgcacgctgcgccttttcgcgacccatccgcagatcacggccgtgctcgccgtcatccatagcgatgattctgtccgctttgcggacacggcccgcgatctgcccaagatcttggcaccggccttcggcggggcgacccgccaggcgtctgtccgcgcggggctggaagcccttgccgccgcatcgtgcaccagcccggacctggtgctggtgcacgatgcggcgcgcccctacacctcgccggacctcatcgcccgcgctgtggcggcggcgcaggccgcggatgccgccattcccgtgctccccgtaaccgacacggtgaagcgggtggatgccgccggcatcgtggccgagaccttggaccgcgcggcgctgcgcacggtgcagaccccgcaggcgttccgcttcgacgccctgcgcgccgcccatgccgctgccgccgcggccggggtggagacgttgaccgacgatgcggcggtgatggaatgggccggccagcccgtggccaccttcgaaggcgagagcaccaacgtgaagctgaccacccctgaagacatgacccgcgccgccggcgcctccttcgcagatcttggcgacgtgcgcaccggcaccggcttcgacgtgcacgccttcggccccggcgaccatgtgatgctcggcggggtcgcggtgccccacagcgccggcctcgtcggccattccgatgcggacgtgggcctgcacgccctcaccgacgcgctgctcggtgcgctgtgcgatggcgacatcggagcccatttcccgccctccgacccgcagtggaagggcgcgtcctccgaccgtttccttgcccatgcggtggagaaggtgacggcgcggggcgggcgcattgcccatctcgacctcaccctcatctgcgaggcgccgaaggtggggccgcaccgcgacgccatccgcgccgccatttcgcttatcaccggcgtgcccctcgcccgcgtttcggtgaaggcgaccaccaccgagaagctgggcttcaccggccggcgggagggcatcgccgccatggccagcgccaccatccgcctgcccttcgcggacgaggcggagggctga

SEQ ID NO: 81228 - protein, 489 aa, Xanthobacter autotrophicus Py2
MGARITALGSAWEPIRNAGMENATVSCTEIRPPRFCLHLRQVRGTSKGSLRGSAAQQNLPHRRLPAPVLRPIPGRDSPPLAPGGPGMSEVANPSCVAIIVAAGRGTRAGGPLPKQYQAIGGEPVLRRTLRLFATHPQITAVLAVIHSDDSVRFADTARDLPKILAPAFGGATRQASVRAGLEALAAASCTSPDLVLVHDAARPYTSPDLIARAVAAAQAADAAIPVLPVTDTVKRVDAAGIVAETLDRAALRTVQTPQAFRFDALRAAHAAAAAAGVETLTDDAAVMEWAGQPVATFEGESTNVKLTTPEDMTRAAGASFADLGDVRTGTGFDVHAFGPGDHVMLGGVAVPHSAGLVGHSDADVGLHALTDALLGALCDGDIGAHFPPSDPQWKGASSDRFLAHAVEKVTARGGRIAHLDLTLICEAPKVGPHRDAIRAAISLITGVPLARVSVKATTTEKLGFTGRREGIAAMASATIRLPFADEAEG

SEQ ID NO: 81229 - DNA, 714 bp, marine gamma proteobacterium HTCC2207
  CDS (1)..(714): transl_table=11
atgactactgttaactattgggcaattgttcccgccgccggaagtggtcagcgctttgggggcgaggtagcaaaacagtttcagccgctcggtgatcatctaatcgctcagcacagtctaagccgtctgttaaatattccctgtattgcacgaatcattgttcccagtgatatggcctcgccctattggctgcagattcctgccgccagtgatccacgggtcgagctggttgccggtggctctgaacgggtgcattcagtactgcaggggttgttggctattggcgatcgagctgagagcagcgactgggtgttggtgcatgatatggcgcgtccctgcatcactagcggcgatatcaataagttgatcagcgagttagccggccatgctgtgggtggcatactcgccacctcggtgactgacacgttaaaaacaatcggcgccgacaatcatattcaagcaacgccagatcgcaatctctatcgtgcggcgcaaaccccgcagatgttccgttacgggctgttggtgaaagcccttgagatcatgctcagtgacggccaaacccccactgacgaagcatcggctatagagtatttgggtgagcaagcaaaagttgtcgagggtcgccgcgacaatataaaaattacccaccgcgaagatttgattatcgccgcagcgattatgaatcaacaggagactgaacaatgcgtatag

SEQ ID NO: 81230 - protein, 237 aa, marine gamma proteobacterium HTCC2207
MTTVNYWAIVPAAGSGQRFGGEVAKQFQPLGDHLIAQHSLSRLLNIPCIARIIVPSDMASPYWLQIPAASDPRVELVAGGSERVHSVLQGLLAIGDRAESSDWVLVHDMARPCITSGDINKLISELAGHAVGGILATSVTDTLKTIGADNHIQATPDRNLYRAAQTPQMFRYGLLVKALEIMLSDGQTPTDEASAIEYLGEQAKVVEGRRDNIKITHREDLIIAAAIMNQQETEQCV

SEQ ID NO: 81231 - DNA, 1203 bp, delta proteobacterium MLMS-1
  CDS (1)..(1203): transl_table=11
gtgcagctaaaaaaccccgctgattgcgcggccattattgccgccggcggctccggcagccggatggggggcggggtgcccaagcagtttctggaactggccggggtgccgctgctgatccatggcctgcgggcctttgcggcggtgccggagatcggcacgctggtggtcagcagccgggccgattatctggcctatacccgcgagctggccgcccaccacggttttaccgagcttttggtggtggccggcggcgacagccgccagcaatcggtaatgaacggcctggccgccatcaccgacagcggccgacagtgccggctggtggcggtccatgacggggcccgccccctggtgagcccggaattgatccgccgctgcctgcaagccgccggccggcacggggccgccatcgccgccaccgaggtccaggacaccctgaaacaaagcggcaagccgccgctgatcgacgccaccgtcgaccgcgccggcctctggcaggcccagaccccccaggtggccgaatccggcctgttgcgccgggccctggagcaggcccgggccgccggcttcaccggcaccgacgaggcctcgctgctggaacgactgggggtaccggtggccctggtcgaagccggagccggcaatctcaaaatcacccgcccccatgacctgccactggccgaggccctgatgtccaagcaagcgccctcccccaccgccgcgaccaggatcggccacggctatgacgtccaccgcctggtgccggagcgcaaactgatcctggccggggtggaaatcccccaccagcttggcctgctgggccattccgacgccgatgtcgccacccacgccctctgtgatgccattctgggcgccctgggcaacggcgacatcggccgccatttccccgatgacgatccccgctaccaggggatttccagtctcaaactattggaggcggtgatcgcccaggccgcggccgccggctggcgcatcaataacgccgatcttaccattatcgcccaacagcccaagctggccccccacctgccggccatggtccggcaattggccgccgcttgccaagtcagcccggagcggctcaatatcaaggccaccaccaccgaagggttgggttttgccggccgccaggaaggcatcgccgccaccgccgtggtgttattggcgccgctgccttaa

SEQ ID NO: 81232 - protein, 400 aa, delta proteobacterium MLMS-1
MQLKNPADCAAIIAAGGSGSRMGGGVPKQFLELAGVPLLIHGLRAFAAVPEIGTLVVSSRADYLAYTRELAAHHGFTELLVVAGGDSRQQSVMNGLAAITDSGRQCRLVAVHDGARPLVSPELIRRCLQAAGRHGAAIAATEVQDTLKQSGKPPLIDATVDRAGLWQAQTPQVAESGLLRRALEQARAAGFTGTDEASLLERLGVPVALVEAGAGNLKITRPHDLPLAEALMSKQAPSPTAATRIGHGYDVHRLVPERKLILAGVEIPHQLGLLGHSDADVATHALCDAILGALGNGDIGRHFPDDDPRYQGISSLKLLEAVIAQAAAAGWRINNADLTIIAQQPKLAPHLPAMVRQLAAACQVSPERLNIKATTTEGLGFAGRQEGIAATAVVLLAPLP

SEQ ID NO: 81233 - DNA, 1203 bp, delta proteobacterium MLMS-1
  CDS (1)..(1203): transl_table=11
gtgcagctaaaaaaagccgctgattgcgcggccattatcgccgccggcggctccggcagccggatggggggcggggtgcccaagcagtttctggagctggccggggtgccgctgctgatccatggcctgcgggcctttgcggcggtgccggagatcgggacgctggtggtcagcagccgggccgattatctggcctatacccgcgagttggccgcccaccacggttttaccgagcttttggtggtggccggcggcgacagccgccagcaatcggtaatgaacggcctggccgccatcaccgacagcggccgacagtgccggctggtggcggtccatgacggggcccgccccctggtgagcccggaattgatccgccgctgcctgcaagccgccggccggcacggggccgccatcgccgccaccgaggtccaggacaccctgaaacaaagcggcaagccgccgctgatcgacgccaccgtcgaccgcgccggcctctggcaggcccaaaccccccaggtggccgagttcagcctgctgcgccgggccctggagcaggcccgggccgccggcttcaccggcaccgacgaggcctcgctgctggaacggctgggggtgccggtggccctggtcgaagccggggccggcaatctcaaaatcacccgcccccatgacctgccactggccgaggccctgatgtccaagcaagcgccctcccccaccgccgcgaccaggatcggccacggttatgacgtccaccgcctggtgccggagcgcaaactgatcctggccggggtggaaatcccccaccggcttggcctgctgggccattccgacgccgatgtcgccacccacgccctctgtgatgccattctgggcgccctgggcaacggcgatatcggccgccatttccccgatgacgatccccgctaccgggggatttccagtctcaaactattggaggcggtgatcgcccaggccgcggccgccggctggcgcctcaataacgccgatcttaccatcatcgcccaacagcccaaactggccccccacctgccggccatggtccggcaattggccgccgcttgccaagtcagcccggagcggctcaatatcaaggccaccaccaccgaagggttgggttttgccggccgccaggaaggcatcgccgccaccgccgtggtgttattgacgccgctgccttaa

SEQ ID NO: 81234 - protein, 400 aa, delta proteobacterium MLMS-1
MQLKKAADCAAIIAAGGSGSRMGGGVPKQFLELAGVPLLIHGLRAFAAVPEIGTLVVSSRADYLAYTRELAAHHGFTELLVVAGGDSRQQSVMNGLAAITDSGRQCRLVAVHDGARPLVSPELIRRCLQAAGRHGAAIAATEVQDTLKQSGKPPLIDATVDRAGLWQAQTPQVAEFSLLRRALEQARAAGFTGTDEASLLERLGVPVALVEAGAGNLKITRPHDLPLAEALMSKQAPSPTAATRIGHGYDVHRLVPERKLILAGVEIPHRLGLLGHSDADVATHALCDAILGALGNGDIGRHFPDDDPRYRGISSLKLLEAVIAQAAAAGWRLNNADLTIIAQQPKLAPHLPAMVRQLAAACQVSPERLNIKATTTEGLGFAGRQEGIAATAVVLLTPLP

SEQ ID NO: 81235 - DNA, 729 bp, Rickettsiella grylli
  CDS (1)..(729): transl_table=11
atgaaagactttactaattatttcgctattgttccggccgctggtgttggccatcgcatggggctcgatttcccaaaacaatatatctcgattaaaggaaaaacaatacttgaatatacattaaccacgctactcaactctccaaagtttaaaaaatgtgttgtggttatccataaaaaagacgatctttggccaaaacttcgtgttcgttcttctcatttaatgactgcatggggaggggaagaacgttgtcattcagtattcaatggtttgttagctttaaaaaacatttcaaaaaaaaacgattggatcgtcatccatgatgccgttcgaccacttttacatgaaagtgatattgatcttcttattaaccaattaaatgaccatcccgtgggtggattattaggacatccgattaaaaacaccgttaaatacgtcgacaaacagcaatttaaaacattggatcgacaaaaaatatggttagcagtcactcctcaaatgtttcgttatcattggctagtgaaagcgcttgcgttggccatcaaaaaaaataaatgtattaccgatgaagcgagcgccattgaactcatcggacaacaacctaaattattagaaggacgtgctgataatattaaaataacgactaaagaagatttaaatttactggattattatctttccattcgatccaacccacccgatcactcatttaacccctatttagagtaa

SEQ ID NO: 81236 - protein, 242 aa, Rickettsiella grylli
MKDFTNYFAIVPAAGVGHRMGLDFPKQYISIKGKTILEYTLTTLLNSPKFKKCVVVIHKKDDLWPKLRVRSSHLMTAWGGEERCHSVFNGLLALKNISKKNDWIVIHDAVRPLLHESDIDLLINQLNDHPVGGLLGHPIKNTVKYVDKQQFKTLDRQKIWLAVTPQMFRYHWLVKALALAIKKNKCITDEASAIELIGQQPKLLEGRADNIKITTKEDLNLLDYYLSIRSNPPDHSFNPYLE

SEQ ID NO: 81237 - DNA, 687 bp, Oceanobacter sp. RED65
  CDS (1)..(687): transl_table=11
atggcgctttatgcagtcgttcctgctgcgggcgttggcaaacgaatgaaagccgaccgaccaaagcaatatttacaggttaatggtcaaagtattcttgagcatacattaacacgattattatgctttcccatgtttgagaaaatcatgatcgctgtgaatcatgatgatccttttttccacaatatgcccgtatcaaaagatgttcgcattctgaattgtgatggaggtaaagagcgtgtcgattctgttttgaacggcctcaatgcattagttcagcaaggagccgacgtaagcgattgggtaatggttcatgatgtggcacgaccctgtatctccctaaatgacattcaacgcttgtacgatgcacgaaatgaacatggtgccattattggggcccccgttcgcgatacgatgaagcgtactgacgctcaaggtaatatcattgagaccgttgagcgagagcaactctggcatgcattgacaccgcaacttgctccactaggtgtattaaaaaaagcgatcgaatttagtctacagaataatttgcccgtaacggatgaagcatcggctctggaacacgtcggacttaaaccgataatgatcgcaggacttgctagtaatattaaagtgactcatccagatgatttagcgatgattacacagtttttaaccaatgaaagttag

SEQ ID NO: 81238 - protein, 228 aa, Oceanobacter sp. RED65
MALYAVVPAAGVGKRMKADRPKQYLQVNGQSILEHTLTRLLCFPMFEKIMIAVNHDDPFFHNMPVSKDVRILNCDGGKERVDSVLNGLNALVQQGADVSDWVMVHDVARPCISLNDIQRLYDARNEHGAIIGAPVRDTMKRTDAQGNIIETVEREQLWHALTPQLAPLGVLKKAIEFSLQNNLPVTDEASALEHVGLKPIMIAGLASNIKVTHPDDLAMITQFLTNES

SEQ ID NO: 81239 - DNA, 729 bp, Desulfitobacterium hafniense DCB-2
  CDS (1)..(729): transl_table=11
ttggttaagctgggtgtcatcatccctgctgcaggtcaaggaaaacgcatgggagcctctgtcaataaacaattcctccctttacagggacgcccgcttctcgcccatactctctcgctctttgagcggtccggggctgtcgctgagattgtaattgtcagtgcaaaagaggatagggaacgaatcgctgaattggttcgtacagaaggttttcagaaggtctccgccattgtcttaggcggagaagaacgtcaggaatcagtatttgcgggggtaaaggctcttagctcgttaatccaaagggtggcggtccatgatggggcccgcccccttttgacttgtctggaattaaaccggttttttacagaggcggaaaagtttggggcagccattatggctgttccggtcaaggatacgattaaacgagtcgatgcccagggcaaggtcctggagacacctccccgggaaaccctgagggctgtccagactccccaagtctttgcccgctccctcctggaagaagcccatcataaggcaagagaagcggggtacctcaccacggacgatgccgctcttatcgaatggctgggtcaccctgtccaaaccctgatgggttccctggaaaatatcaaaatcaccactcccgaagacctggacctggccgaggctatcctcgccaagcgaatgaatcaggtgaatcatggggacaggtcccttgattcactctag

SEQ ID NO: 81240 - protein, 242 aa, Desulfitobacterium hafniense DCB-2
MVKLGVIIPAAGQGKRMGASVNKQFLPLQGRPLLAHTLSLFERSGAVAEIVIVSAKEDRERIAELVRTEGFQKVSAIVLGGEERQESVFAGVKALSSLIQRVAVHDGARPLLTCLELNRFFTEAEKFGAAIMAVPVKDTIKRVDAQGKVLETPPRETLRAVQTPQVFARSLLEEAHHKAREAGYLTTDDAALIEWLGHPVQTLMGSLENIKITTPEDLDLAEAILAKRMNQVNHGDRSLDSL

SEQ ID NO: 81241 - DNA, 732 bp, Synechococcus sp. RS9916
  CDS (1)..(732): transl_table=11
atggaggccgtttccccctgccggccgcaggagtcgcttgtgcatctgttgattgccgccgccggaagtggtcgtcgcatgggggctgaccgcaacaagctgctgttgccgttgttgaagaggcctgtgctggcctggactttggaggcggcgctccaggccgaggccattgcttggatcggcatcgtcggtcaggtcggtgatcgtgaggccattgcagacatcaccgctgcggcggcgccacgggccggatccaagcccatttgctggattgaaggaggtcgtacccgtcaggagtcggtcttgcgcggcctggcggggttgccggcgggtgcggagcatgtgctgatccatgacggcgcccgttgcctggcggaacccgacctgttcaatcgctgtgctcaggccgtgatggccggagaggctgtgatcgcagcgaccccggtcacggacacgatcaagcgggtcaatcccaaggggttgatcacggcaacccctgatcgttccgaactttgggcggcgcagacgccccaggggtttgcggttgaccagttgcgggaaggccatgcggaggcctgtcggcgcggctgggaggtcacggacgatgcctccctttatgaacggcttggttgggatgtgacggtgctggatgccggacccgccaatatcaaggtcacgacaccgtttgatttggtggtggcagaggctgttctgtcgctcagaggagcctga

SEQ ID NO: 81242 - protein, 243 aa, Synechococcus sp. RS9916
MEAVSPCRPQESLVHLLIAAAGSGRRMGADRNKLLLPLLKRPVLAWTLEAALQAEAIAWIGIVGQVGDREAIADITAAAAPRAGSKPICWIEGGRTRQESVLRGLAGLPAGAEHVLIHDGARCLAEPDLFNRCAQAVMAGEAVIAATPVTDTIKRVNPKGLITATPDRSELWAAQTPQGFAVDQLREGHAEACRRGWEVTDDASLYERLGWDVTVLDAGPANIKVTTPFDLVVAEAVLSLRGA

SEQ ID NO: 81243 - DNA, 705 bp, Vibrio sp. Ex25
  CDS (1)..(705): transl_table=11
atgttggatgtgaactcatcgcatgtcgcaattgttcctgctgccggtgtcggtagtcgaatgaaggctgaccgccctaagcaatatttattgatcgacggaaaagcggtgctggaacacactgtagaaaagttgctgtcgcacccacgaatttcgaaagtggttgtcgccattaccgaaggtgacccttatttccctgagttaaccatcgcgaaccatcccgatgtaattcaagtcgcgggtggtaaagagcgcgctgattccgtactttcagggctaaactatgtcaatgaacatctggaaagcgagtgggtattggtccacgacgctgcaaggccatgtgtattaacatccgacattgaccgtttgattgatatttgctgcgctcacccaacgggtggcatccttgcatctccagtgagagacacaatgaagcgagcgaatgcagcacaagatataggtcatacggtagagagagaagcattgtggcatgcactgactccacaaatgtttaaaactcaacaactgactcgagcactggctgacgcattagaacaaggcgtagccatcacggatgaagcatcggctttagagtggttgggcgaagcgcctgctttagtccagggtaatgcgaacaacataaaaattactcagccagaagatctcgcgttagccgagttttatctgagccgtgagcgcggctaa

SEQ ID NO: 81244 - protein, 234 aa, Vibrio sp. Ex25
MLDVNSSHVAIVPAAGVGSRMKADRPKQYLLIDGKAVLEHTVEKLLSHPRISKVVVAITEGDPYFPELTIANHPDVIQVAGGKERADSVLSGLNYVNEHLESEWVLVHDAARPCVLTSDIDRLIDICCAHPTGGILASPVRDTMKRANAAQDIGHTVEREALWHALTPQMFKTQQLTRALADALEQGVAITDEASALEWLGEAPALVQGNANNIKITQPEDLALAEFYLSRERG

SEQ ID NO: 81245 - DNA, 702 bp, Alteromonadales bacterium TW-7
  CDS (1)..(702): transl_table=11
atgagaaataaacaaaccatagtcgcgattgtacccgcggcgggtgtaggcagcagaatgcagcacaatgcacctaaacaatatatacaattagcgggtaaaacaattttagagcacaccctagcaaaactatctcaattaccacaactacaaactattgttgttgcccttagcgatacagacccatactttggtgaactaccattaatcgatgcgcgcattgttcgttcaagtggtggcaaagaacgtgctgattcagtacttaatagtttgttatttttagcacccaatccccctgattgggtattagtgcacgatgcagcgcgcccattggttgatctagcagacatagagcgccttatcagtgagtgccttagtgcaaatgaaggcggaattttagccactaaagtaaaagacaccatcaaacgcggcgatacacactcaaagcaaaccgtcccccgagacgacctatggcaagcgcttacccctcaattttttaagtacagtgaccttaaaaatgcgctgcaaaatgcgctgcaaagtggggtgcctattaccgacgaagccagtgcaattgagtgggtaaacaaaccagtaaaacttatagcgggtcgtagcgataatattaaaataaccacgccagaagatttagctttggcggggtttttattaaataaacaacaaaacgagagtgcagtatga

SEQ ID NO: 81246 - protein, 233 aa, Alteromonadales bacterium TW-7
MRNKQTIVAIVPAAGVGSRMQHNAPKQYIQLAGKTILEHTLAKLSQLPQLQTIVVALSDTDPYFGELPLIDARIVRSSGGKERADSVLNSLLFLAPNPPDWVLVHDAARPLVDLADIERLISECLSANEGGILATKVKDTIKRGDTHSKQTVPRDDLWQALTPQFFKYSDLKNALQNALQSGVPITDEASAIEWVNKPVKLIAGRSDNIKITTPEDLALAGFLLNKQQNESAV

SEQ ID NO: 81247 - DNA, 723 bp, marine gamma proteobacterium HTCC2143
  CDS (1)..(723): transl_table=11
atggccacagataacgcggtaaaatattacgccgttgttcctgctgccggggttgggcgccgcatgggagcctcggcatcgctgccaaaacagtatttatcactgttcgacaaaaccgtcatggaacatacccttgagaagctgctgggcgaacaacgcttagaacggattgtggtggtggtgggtcaagacgataatcattggcaaacgttaccgatcttgcagcaccctcgaattactataaccaccggtggcgacgaacgctgtcattcagtggttaatggtctggaaaaattgtcatcgctgtgcgcgactaacgactggattctggtacatgacgtagtgcgcccctgtgtgtcggcgatggacattgcaacactcatcaacgaagttgctgacgacgacgttggtggcattctggctataccggtgagtgatacgattaaacaggtgagcggcggccatagtgttgcaaccatcgaccggcagttgttatggcgggcccaaacaccgcaaatgttccgctacgataaactccacgctgcgctcatcgacggcctagaaaaacaatgtcaactcaccgacgaagcatcggcgatagagttggcggggtaccggcccaaaattgttgaaggcacggcctcgaacttaaaaattacccgcgcagatgatctgccactagcagaatattatctgcaaagagagcaacaagaatgcgaatag

SEQ ID NO: 81248 - protein, 240 aa, marine gamma proteobacterium HTCC2143
MATDNAVKYYAVVPAAGVGRRMGASASLPKQYLSLFDKTVMEHTLEKLLGEQRLERIVVVVGQDDNHWQTLPILQHPRITITTGGDERCHSVVNGLEKLSSLCATNDWILVHDVVRPCVSAMDIATLINEVADDDVGGILAIPVSDTIKQVSGGHSVATIDRQLLWRAQTPQMFRYDKLHAALIDGLEKQCQLTDEASAIELAGYRPKIVEGTASNLKITRADDLPLAEYYLQREQQECE

SEQ ID NO: 81249 - DNA, 705 bp, marine gamma proteobacterium HTCC2080
  CDS (1)..(705): transl_table=11
atgagtagcttgtgggccgtggttcccgccgctgggtcgggtcaacgtatggcggcagaaatccccaagcagtatctgcggattgcggggacgacgatacttgaatatgccttgcgtggccttctggcttgccctgatattcggggggttgtcgtggtagtagatcctagcgatcgccgtgctgatgagatttcgagtctcagtgatcccagggttagccgtgcttctgggggcgcagaacgtgctgactcggtgctttctggtttgcgtagtctcgcggggattgcagcgcaggacgattgggtattagtgcatgatgcggccaggccctgcctacccttagcggatttgcagcgatttgttgattcgattaaggccggcggtgttggcgggctcttggcacagcgggtcaatgacactatcaagcgcgttggcagcgatcaccgcgttgaagaaacccttgatcgtgaaagcttgtggcgcgctcaaaccccccagatgtttcgctggtctgagctgtcctctgcccttgagcagtctttagataagcggttgcctgttactgatgaggccagtgcgatggaacaagcggggtatgatgtgcaggttgttgagggtccttcgtgcaatttaaaggtgactgtgcctgatgacctaagggtggcagagtactatttaaaaacctgggcggtgaagcggacatga

SEQ ID NO: 81250 - protein, 234 aa, marine gamma proteobacterium HTCC2080
MSSLWAVVPAAGSGQRMAAEIPKQYLRIAGTTILEYALRGLLACPDIRGVVVVVDPSDRRADEISSLSDPRVSRASGGAERADSVLSGLRSLAGIAAQDDWVLVHDAARPCLPLADLQRFVDSIKAGGVGGLLAQRVNDTIKRVGSDHRVEETLDRESLWRAQTPQMFRWSELSSALEQSLDKRLPVTDEASAMEQAGYDVQVVEGPSCNLKVTVPDDLRVAEYYLKTWAVKRT

SEQ ID NO: 81251 - DNA, 708 bp, Pseudomonas putida GB-1
  CDS (1)..(708): transl_table=11
atgatcaataccttgccggccttctgggccgtgattcctgctgcgggcgttggtgcccgcatggctgccgaccgccccaagcaatacctggagctggctgggcagacccttctcgagcacagcctcgattgttttcttggccacccggcgcttgcaggggtggtagtcagcattgccgatgacgacccgtattggcctggcctgcgctacgccagcgacccgcgcatccagcgcgcggcaggtgggcgtgagcgcgctgactcggtgctcaacgccttgctggtgctgcatgcccaaggggcctcggacagcgattgggtactggtgcacgatgccgcgcggccaaacctggcgcgcagcgacctggacaagctgttgtcggaattggcagacgacccggtgggtggcctgctggcggtgccggcgcgcgataccctcaagcgtgccgatggcaatggccgggtgagcgctaccgtggaccgcagcaccatctggcaggcgtatacgccgcagatgttccgcctgggtgcgttgcaccgtgcgttggccgagtgcctggtgtcggatgtcgtggtgaccgatgaggcttcggccatcgagtggtccggtcaagcgccgcggctggttgaagggcgaagtgacaacatcaaggtgacccggccggaagacctggagtggttgcgccagcgttgggcagggcgtcgctaa

SEQ ID NO: 81252 - protein, 235 aa, Pseudomonas putida GB-1
MINTLPAFWAVIPAAGVGARMAADRPKQYLELAGQTLLEHSLDCFLGHPALAGVVVSIADDDPYWPGLRYASDPRIQRAAGGRERADSVLNALLVLHAQGASDSDWVLVHDAARPNLARSDLDKLLSELADDPVGGLLAVPARDTLKRADGNGRVSATVDRSTIWQAYTPQMFRLGALHRALAECLVSDVVVTDEASAIEWSGQAPRLVEGRSDNIKVTRPEDLEWLRQRWAGRR

SEQ ID NO: 81253 - DNA, 1411 bp, Ginkgo biloba
  CDS (50)..(1033)
gaaaatcctcgcacttcctaagccttcgacgccagatagcttaacagaaatggcattagcatgtaacaccgttcccagttcattgtctcctcacaaatccaagctgtgcatttcttctccacagagcagacataatttgtatgaatttgttggtgccaaaacatccttccaagctgagctgtgcattttatctccacagcgtagacataatttgaatgcatttccgagtgccagaagatctttccagactgtcgcacgttttagaggatatggatttgtgccaaagcgtaggccattgttaagggcttttgcagataagggtgctgattctgggacggatgtggtggttccagagaaaggtgtctctgttgttctattggcaggaggaaaagggaagcgaatgggggcaagcatgcccaaacaatatctcccattgttaggccaacctattgccctctatagtttctacactttctctcgcatgtctgaagtgaaggaaattattacagtgtgcgacccttcatacagagatatatttgaagaagctaggaatagtgtgaagataaatcttaagtttgcgcttccgggcaaagagcgacaagattcagtgttcaatggccttcaggaagttgaccaagctacagaacttgtatgtgtgcatgactcggcacgtcctcttgttttatctgaagatgtagaaaaggccttgcaggatgcatggattcatggagcagcagtgcttggagtgcctgtcaaggctaccatcaaggaggcaagtagtgatggctttgtggtgaagacattaaacaggcaaacgttgtgggaaatgcagacaccacaggttattaaaccgaacctgcttcgaaaagggtttgaacttgtccaccgggaaggactagaggttacagatgatgtatccattgtggagcaccttaagcacccagtttacattactgaaggttcttatacaaacatcaaggtgactacaccagatgatttactacttgcagaaaggattttgaaacaaagttgagctgatttcaagcattaattggcaactcctaagtagatggctatttgttcccattcttttcaacttaataaagttccctaaaagatcaactcttaagtagatagcttattccttttggtatattgatggcaagtgggatctgattcacctgtctgtgctgcattttacttctgtccgctattaatgttttccattcatcaattatttgtatgcattcgtgcattttcttgtccaaaatgccctggcataaaactaagagtgcaggccttaaagagttttgtgagtgtactctgtttttcctcacgaggaagaggcatcaatagcagcagcattaacaaagagaagcaatgcctcagcaaaaaaaaaaaaaaaaaaaaa

SEQ ID NO: 81254 - protein, 327 aa, Ginkgo biloba
MALACNTVPSSLSPHKSKLCISSPQSRHNLYEFVGAKTSFQAELCILSPQRRHNLNAFPSARRSFQTVARFRGYGFVPKRRPLLRAFADKGADSGTDVVVPEKGVSVVLLAGGKGKRMGASMPKQYLPLLGQPIALYSFYTFSRMSEVKEIITVCDPSYRDIFEEARNSVKINLKFALPGKERQDSVFNGLQEVDQATELVCVHDSARPLVLSEDVEKALQDAWIHGAAVLGVPVKATIKEASSDGFVVKTLNRQTLWEMQTPQVIKPNLLRKGFELVHREGLEVTDDVSIVEHLKHPVYITEGSYTNIKVTTPDDLLLAERILKQS

SEQ ID NO: 81255 - DNA, 687 bp, Spiroplasma citri
  CDS (1)..(687): transl_table=4
atgaaaaattatacggtaattattgttgcagcgggaaagtcatcacgttttaatcaaaaggataataagttgttatatcaacttaataataaacaaactattattgagcaaacattaatgttatttttaaacgatccactttgtactgaaattattgttggtgttagcgaagaaactttaacttttttattgaaaaaaaattatcaagcaaagaatgtgcaatttattatgggcggagcagaacgagttgatacaatttatcaatgtttaattaatcataaaattagtaatgatattataatgattcatgatggtgtccgttgttttacgagcttaacttttattaatcaattaaatcaagtttttcagtcacaaaattatgaagtgttagttccaattttgccaattacagaaacccttaaaaaggttaaaaataattttgttgaaaaaacattaccacgagaagaatattttacaactcaaactccacaaatttttaaggcagaattattatatcaagtttatgaagcatatttccagacgaaaaataaaacaataatttatgatgatagttatttagtagagttgttttcaccaaaaacaaaaattcatacaatttatggtgaaaaacaaaacattaaattaacttatgctgatgatttaaaattattaaaattaataaaataa

SEQ ID NO: 81256 - protein, 228 aa, Spiroplasma citri
MKNYTVIIVAAGKSSRFNQKDNKLLYQLNNKQTIIEQTLMLFLNDPLCTEIIVGVSEETLTFLLKKNYQAKNVQFIMGGAERVDTIYQCLINHKISNDIIMIHDGVRCFTSLTFINQLNQVFQSQNYEVLVPILPITETLKKVKNNFVEKTLPREEYFTTQTPQIFKAELLYQVYEAYFQTKNKTIIYDDSYLVELFSPKTKIHTIYGEKQNIKLTYADDLKLLKLIK

SEQ ID NO: 81257 - DNA, 1213 bp, Stevia rebaudiana
  CDS (70)..(1023)
tttatagttccttccatcttcaacagaagaacacacaggttttccagagaaagagagaaacagtgagtgatgacgattcttcaagttatgtcgcccctcaatgcatctccgtcacagattctcctctctaagcctcaaattccgtccaattcagtctacctaccggcggttgacctgtaccggcatcctcgattatcatcgtgttactcgtcaagtaagagcaacttcaatttggttagaaaacattcgatttgtagcggttttacagtcacttgttctgctaatgattctgctaaaactacaaatgagaagcctgaatatgttagagagaaaagtgtctcggtggttcttctggctggtggtcaagggaaaagaatgggtgcaagcatgccaaagcagtatcttccacttttagggcaaccaattgctttgtatagtttctacactttttcacggatgcgtgaggttaaagaaattgttgtagtatgcgatccatcatatcaagacatttttgaagatgccagagataacatcagtgtggacctaaaatttgcattgcctggtaaagaaagacaagattctgtttttagtggacttcagtcaattgatttggcgtctgagcttgtatgcatccacgattctgcgagacctttggtgacatctggtgatgtacttaaggttctgaatgatgggttgcgagttggagcatcagtacttggtgttcctgctaaagctactatcaaagagggaaatagtgaatcatttgtggtgaagactttggacagaaaaaccctttgggaaatgcaaactccacaggtcatcaagcctgacttgctgaagaaaggctttgagcttgtaaatagagaaggccttgaagtcacagatgacgtgtccattgttgagcacctcaaacatcctgtatacatcacacaaggatcttatactaacatcaaggttacaactccggacgatttattacttgctgagaggatattaaataacgactcatttgtgcccgcttaattattcattttgtagatgttgtacaataagttgaatggctgttgatatgatactaaattaggatcaacagtctcaaagtgcttgttgggagctgtactttgctcttgatgtttttgcaggtttgtatcttgaaaatgtctgtttaaaaaaataatataataaaagtggttacaaaagtaaccttcgtctc

SEQ ID NO: 81258 - protein, 317 aa, Stevia rebaudiana
MTILQVMSPLNASPSQILLSKPQIPSNSVYLPAVDLYRHPRLSSCYSSSKSNFNLVRKHSICSGFTVTCSANDSAKTTNEKPEYVREKSVSVVLLAGGQGKRMGASMPKQYLPLLGQPIALYSFYTFSRMREVKEIVVVCDPSYQDIFEDARDNISVDLKFALPGKERQDSVFSGLQSIDLASELVCIHDSARPLVTSGDVLKVLNDGLRVGASVLGVPAKATIKEGNSESFVVKTLDRKTLWEMQTPQVIKPDLLKKGFELVNREGLEVTDDVSIVEHLKHPVYITQGSYTNIKVTTPDDLLLAERILNNDSFVPA

SEQ ID NO: 81259 - DNA, 1263 bp, Aspergillus oryzae
  CDS (1)..(1263)
atgtcctcaacgctcccaactttcggcactgttctcgtcgccgcaggaacaggcacacgagcaggaaacgccaaatgttctaaggtatatcgcgaacttgccggagagactgttatatcccgtgttgtccgagcctttcgtgcctgggatcccggccatcccattgtaattgtgcggcatgagaatgatgcggcactccttgcgaatgcgattgagggagccgatggacaggtatatgagacagttggcgaggccacgagacaggcttctgttctggagggcttgatattcttgtcgtcattggaacaacccccatcgcatgttctgatccacgatgcggcgagacggtttatatcgccgtctttgttggacaagacccgacatgggatgcgtgaacagcctgatgtcggaataattttggcgattccagtttctgacacaatcaagtccgttgatgagaatggcttgatctcccgcacagtaccgcgaaaaggtctataccgtgcgcaaacgccacaagcattttcgctacccactgcactgaagattcacgaccagcttgcctatgatacaagtgtcgagtatacagatgatgcctctctctttgagcaagcaggcctatccgtccgtgtcatacaaggagaagagaagaacatgaaactcacatatccgacggatttcgaacaagcggaacgaatccttcaagctaagcctcgattaccagaggtttctattcccgatgtccgcgttggacatggatatgacacccatcgactcagtcctgcgacagaaatcaccctctgtgatgtcaaaatcccccatacctccggactgctgggccactcagacgcggatgtaggccttcatgctgtaacgaatgcgttactgggcacgattggggcagatgacatcagaagtcatttttcgccatcagatcccaagtggaaaggtgcttcatcggatcagtttgttcgacatgccaggaaacttgtcagtgatgctgatggcgtcattacccatggcgatgtgagcttaatatgtgaacggcctaagattggtccacatcgggatgcactcaaaacgtctgtggctcgtatactctctttggataagtcgcgtgtatccattaaggctgggacaaatgagaaggtgggctttgtgggaagagaagagggcatcatcggatttgcaacggtaacggctgtgtttcctggcggcgtcccgcaggctgaaatcaatcctgattatgatactacctactag

SEQ ID NO: 81260 - protein, 420 aa, Aspergillus oryzae
MSSTLPTFGTVLVAAGTGTRAGNAKCSKVYRELAGETVISRVVRAFRAWDPGHPIVIVRHENDAALLANAIEGADGQVYETVGEATRQASVLEGLIFLSSLEQPPSHVLIHDAARRFISPSLLDKTRHGMREQPDVGIILAIPVSDTIKSVDENGLISRTVPRKGLYRAQTPQAFSLPTALKIHDQLAYDTSVEYTDDASLFEQAGLSVRVIQGEEKNMKLTYPTDFEQAERILQAKPRLPEVSIPDVRVGHGYDTHRLSPATEITLCDVKIPHTSGLLGHSDADVGLHAVTNALLGTIGADDIRSHFSPSDPKWKGASSDQFVRHARKLVSDADGVITHGDVSLICERPKIGPHRDALKTSVARILSLDKSRVSIKAGTNEKVGFVGREEGIIGFATVTAVFPGGVPQAEINPDYDTTY

SEQ ID NO: 81261 - DNA, 894 bp, Oryza sativa
  CDS (1)..(894)
atggagctccgcctctgcctccgcctccacgcgccgcccgcctccgccccgacgacgcatccgccgccgccgctgtcgccgtcgcccaatctcgcgctccgccgcctccggaccggtgggagctgtgcggttgctccgcggcggcacgcgaggaaatggggttcggctgtctgcgccgccaaagccgacggcgcgcagggtgaggccgtgaaggagaggagcgtctcggtggtgctcttgtccggcgggcaggggaagagaatgggggcaagtatgccaaaacaatatctaccattattggggctgccgattgcactgcacagtttaaagacattctgtcagctgaaggaagtaaaagaagttgtagtggtgtgtgatccagactacaaagatatatttgaaggctctattgaaaacgtgcaaataccaattaaatttgcactcccagggaaagagagacaagactctgtttataatggactacaggagattgatggagactctgaacttgtttgtgtacatgattctgcaaggcccttagtgtcatctgaagatgtcaaaaaggtattagaagatgctatagtgcacggagctgctgttcttggtgtgcctgtgaaagctactatcaaggaggctgacagcaattcttttgtcgtaaaaacacttgataggaaaactctttgggaaatgcaaactccacaggtgatgaggcccagtttactcagagatggttttgagctagttaaacgggatggacttgaggtcactgatgacgtgtccattgtagaatacctgaagcactctgtttatatcacagagggctcttacacaaacataaaggtgacgactcctgatgacttgctcctggctgagcgcctgatgaatgagaaataa

SEQ ID NO: 81262 - protein, 297 aa, Oryza sativa
MELRLCLRLHAPPASAPTTHPPPPLSPSPNLALRRLRTGGSCAVAPRRHARKWGSAVCAAKADGAQGEAVKERSVSVVLLSGGQGKRMGASMPKQYLPLLGLPIALHSLKTFCQLKEVKEVVVVCDPDYKDIFEGSIENVQIPIKFALPGKERQDSVYNGLQEIDGDSELVCVHDSARPLVSSEDVKKVLEDAIVHGAAVLGVPVKATIKEADSNSFVVKTLDRKTLWEMQTPQVMRPSLLRDGFELVKRDGLEVTDDVSIVEYLKHSVYITEGSYTNIKVTTPDDLLLAERLMNEK

SEQ ID NO: 81263 - DNA, 699 bp, Listeria innocua
  CDS (1)..(699): transl_table=11
atgaattatgagctgatttttttagcagcaggacaaggcaaacgtatgaacgcggaaaaaaataaaatgtggctggatttagttggtgaaccaattttcattcatgccctgcgtccttttttggcggataatcgttgctcgaaggtgattgtcgtgtgccaagaaacggaaagaaaacatgtgagaaagttgatgcaacaacttgatgttgcagaagatagagtcgaggtcgtaaaaggcggaagtgagcgtcagtatagtgtagctgctggacttgaatgttgtggtttagagagcgtagtgcttgtgcatgacggagctaggccttttgtgacgctagatattattgatcgtctgttattaggtgtgaaacaaaataaagctgctatttgtgctgttcaagtgaaagatactgtaaagcgagttattcacgatgttgtaaaggaaacagttgatcgtgataatctctggcagattcaaacgccacaagcttttgaattacacattttacaaaaggcacatcgtctcgcaaaaaaagaccaatttctaggaactgatgaagctagtttggtcgagcggattccataccctgttgctattgtccaaggaagctattataatataaagctgacaactcctgaagatatgccacttgcaaaggcgattttaggagaacttggagggaaagtaaatgattag

SEQ ID NO: 81264 - protein, 232 aa, Listeria innocua
MNYELIFLAAGQGKRMNAEKNKMWLDLVGEPIFIHALRPFLADNRCSKVIVVCQETERKHVRKLMQQLDVAEDRVEVVKGGSERQYSVAAGLECCGLESVVLVHDGARPFVTLDIIDRLLLGVKQNKAAICAVQVKDTVKRVIHDVVKETVDRDNLWQIQTPQAFELHILQKAHRLAKKDQFLGTDEASLVERIPYPVAIVQGSYYNIKLTTPEDMPLAKAILGELGGKVND

SEQ ID NO: 81265 - DNA, 699 bp, Listeria monocytogenes
  CDS (1)..(699): transl_table=11
atgaattatgagttggtttttttagcggcaggtcaagggaagcggatgaatgcccagaaaaacaaaatgtggctagagctagttggcgaaccaattttcattcatgccttgcgtccttttttagcggataatcgttgttccaaagtgattgttgtgtgtcaagaagaggaaagaaagcatgtaaaagaattaatgagtcagcttaatgtggctgagcaccgaattgagattgttaaaggtggaagtgagcgccaatacagtgttgcggcaggtcttgaacgttgtgggacggggcgtgttgtcttagtgcatgatggcgcaagaccgtttatcacgttagatattattgatcgattattaattggtgtagagcaaagtaaagccgctatttgtgcagtaaaagtaaaagatacggtgaaacgagtgatgaatggtgtcgttcaagaaaccgttgaccgtgaaaatctttggcaagttcaaacgccgcaagcctttgagctgcctattttacgaaaagcgcatcagcttgctcgaaaagaacagtttttagggacggatgaagctagtctggttgagcgaattccttgtcctgttgctattgtccaaggaagctattataatattaagctgacaactcctgaagatatgccgctcgcaaaggcgattttaggggaacttggagggatagcaaatgattag

SEQ ID NO: 81266 - protein, 232 aa, Listeria monocytogenes
MNYELVFLAAGQGKRMNAQKNKMWLELVGEPIFIHALRPFLADNRCSKVIVVCQEEERKHVKELMSQLNVAEHRIEIVKGGSERQYSVAAGLERCGTGRVVLVHDGARPFITLDIIDRLLIGVEQSKAAICAVKVKDTVKRVMNGVVQETVDRENLWQVQTPQAFELPILRKAHQLARKEQFLGTDEASLVERIPCPVAIVQGSYYNIKLTTPEDMPLAKAILGELGGIAND

SEQ ID NO: 81267 - DNA, 717 bp, Staphylococcus aureus
  CDS (1)..(717): transl_table=11
atgatttatgcaggtattttagcaggaggtattggttcgagaatggggaacgtgccattaccaaaacaatttttagatattgataataaaccgattttaatccatacaattgagaagttcattttagtgagtgaatttaatgagattattatcgcaacgccagcacagtggatttcccatacacaggatattttaaaaaaatataacattacagatcaacgtgtcaaagtagttgcaggtggtacggatcgaaatgaaacaattatgaacattatcgaccatattcgcaatgtaaatggaattaataatgatgatgtgattgtaactcatgatgccgtaagaccatttttaactcaacgtattattaaagagaacattgaagtagcagcaaaatatggtgcagtagatacagtcattgaagcaattgatacgattgtaatgtctaaagataaacagaacatacacagtatccctgtaaggaatgaaatgtatcaaggccaaacaccacaatcatttaatattaaattattacaagatagttatcgcgccttaagtagtgaacaaaaagaaatcttatcagatgcatgtaaaatcattgtcgaatctggacatgcagttaaattggtacgtggagaactatacaacattaaagtgacaacaccgtatgatttaaaagtagcaaatgccattattcaaggtgatattgccgatgattaa

SEQ ID NO: 81268 - protein, 238 aa, Staphylococcus aureus
MIYAGILAGGIGSRMGNVPLPKQFLDIDNKPILIHTIEKFILVSEFNEIIIATPAQWISHTQDILKKYNITDQRVKVVAGGTDRNETIMNIIDHIRNVNGINNDDVIVTHDAVRPFLTQRIIKENIEVAAKYGAVDTVIEAIDTIVMSKDKQNIHSIPVRNEMYQGQTPQSFNIKLLQDSYRALSSEQKEILSDACKIIVESGHAVKLVRGELYNIKVTTPYDLKVANAIIQGDIADD

SEQ ID NO: 81269 - DNA, 717 bp, Staphylococcus aureus
  CDS (1)..(717): transl_table=11
atgatttatgcaggtattttagcaggaggtattggttcgagaatgggaaacgtgccattaccaaaacaatttttagatattgataataaaccgattttaattcatacaattgagaagttcattttagtgagtgaatttaatgagattattatcgcaacgccagcacagtggatttcgcatacgcaagatattttaaaaaaatataacattacagatcaacgtgtcaaagtagttgcaggtggtacggatcgaaacgaaacaattatgaacattatcgaccatattcgcaatacgcagggtatcaacgatgatgatgtgattgtaactcatgatgccgtaagaccatttttaactcaacgtattattaaagagaacattgaagtagcagcaaaatatggtgcagtagatacagtcattgaagcaattgatacgattgtaatgtctaaagataaacagaacatacacagtatccctgtaaggaatgaaatgtatcaaggccaaacaccacaatcatttaatattaaattattacaagatagttatcgtgccttaagtagtgcacaaaaagaaatcttatcagatgcatgtaaaatcattgtcgaatctggacatgcagttaaattggtacgcggagaactatacaacattaaagtgacaacaccgtatgatttaaaagtagcaaatgccattattcaaggtgatattgccgatgattaa

SEQ ID NO: 81270 - protein, 238 aa, Staphylococcus aureus
MIYAGILAGGIGSRMGNVPLPKQFLDIDNKPILIHTIEKFILVSEFNEIIIATPAQWISHTQDILKKYNITDQRVKVVAGGTDRNETIMNIIDHIRNTQGINDDDVIVTHDAVRPFLTQRIIKENIEVAAKYGAVDTVIEAIDTIVMSKDKQNIHSIPVRNEMYQGQTPQSFNIKLLQDSYRALSSAQKEILSDACKIIVESGHAVKLVRGELYNIKVTTPYDLKVANAIIQGDIADD

SEQ ID NO: 81271 - DNA, 705 bp, Vibrio parahaemolyticus
  CDS (1)..(705): transl_table=11
atgtcagagaacgtttcatctcatatcgctattgtacctgcggctggtgttggtagccgaatgaaagcagatcgacctaaacagtatttgttaatcgatggaaaaacggtattggaacataccgtagagaaactgcttgctcaccctcaaatcgcgaaagttgtggttgcggttacagaaggtgacccatactaccctgaactatcgattgccctgcacccagacgtaatacgtgtcgctggtggtaaagaaagagccgattcagtgctttcagggctaaactatgtaagtgcgcagcttccgtgtgaatgggttctggtccatgatgccgcgagaccttgcgtaacattaaacgatattgatcgtctgattgatgtttgttgtgctcatcctactggtggcattcttgcctcgcccgtgagagatacaatgaaacgagcgaacaaagaaaacaacatcgatcataccgtagacagagaagcattgtggcatgcactgactccacaaatgtttaaaactcagcagctaacaagagcactggcagacgcattgcagcaaggtgttgcgatcactgatgaagcatcggctttagagtggttgggagaaacgccagctttagttcaaggtagtgcgaataacattaaaattactcagccagaagatctcgccttagccgagttttatcttagccgtgagcgcggctag

SEQ ID NO: 81272 - protein, 234 aa, Vibrio parahaemolyticus
MSENVSSHIAIVPAAGVGSRMKADRPKQYLLIDGKTVLEHTVEKLLAHPQIAKVVVAVTEGDPYYPELSIALHPDVIRVAGGKERADSVLSGLNYVSAQLPCEWVLVHDAARPCVTLNDIDRLIDVCCAHPTGGILASPVRDTMKRANKENNIDHTVDREALWHALTPQMFKTQQLTRALADALQQGVAITDEASALEWLGETPALVQGSANNIKITQPEDLALAEFYLSRERG

SEQ ID NO: 81273 - DNA, 714 bp, Listeria innocua
  CDS (1)..(714): transl_table=11
atgatatacgctcaaattttagctggaggaaaaggtacgcgaatgggtaacgttagcatgccgaaacaatttctacctctaaatggtaaaccaatcattgttcatacagtagaaaaatttattttaaatacacgatttgataaaattcttatttcttcacctaaagaatggatgaatcatgctgaagataatattaaaaaatatatttctgatgatcgaattgtcgtaattgaaggcggggaagaccgtaatgaaacaattatgaatggaattcgttatgtcgaaaaaacatttggtttaaacgatgaagatattatcgtaacacatgatgctgtgcgcccatttttaacgcaccgaattattgaagaaaacattgatgctgcgattgaaacaggcgctgtagatactgttattgaagcacttgatacaatcgttgaatcaagtaatcatgaatttattacagatattcctgtcagagatcaaatgtatcaagggcaaacaccacaaagtttcaatatgaaaaaagtatataatcattatcaaaacttaagcgcagagaaaaaacaaattttaacagacgcatgtaaaatttgtttgcttgctggcgatcaggtgaagcttgttaaaggcgagatattcaatataaaaattacaactccatatgatttgaaagtagcgaatgcgattattcaggagcggatagccaatgattaa

SEQ ID NO: 81274 - protein, 237 aa, Listeria innocua
MIYAQILAGGKGTRMGNVSMPKQFLPLNGKPIIVHTVEKFILNTRFDKILISSPKEWMNHAEDNIKKYISDDRIVVIEGGEDRNETIMNGIRYVEKTFGLNDEDIIVTHDAVRPFLTHRIIEENIDAAIETGAVDTVIEALDTIVESSNHEFITDIPVRDQMYQGQTPQSFNMKKVYNHYQNLSAEKKQILTDACKICLLAGDQVKLVKGEIFNIKITTPYDLKVANAIIQERIAND

SEQ ID NO: 81275 - DNA, 714 bp, Listeria monocytogenes serotype 4b
  CDS (1)..(714): transl_table=11
atgatatacgctcaaattttagctggaggaaaaggtacgcggatgggtaacgttagcatgccaaaacaatttctacctctaaatggtaaaccaattattgttcataccgttgaaaaatttattctaaatactcgatttgataaaattcttatttcctcaccaaaagaatggatgaaccacgctgaggataatattaaaaagtatatttctgatgatcgtattgtagtcattgaaggcggagaagaccgcaatgaaacaattatgaatggtattcgttttgtggaaaaaacatatggcttaacagatgatgatattatcgtgacgcatgatgctgttcgtccatttttaacacatcgtattattgaagaaaatatagatgctgcacttgaaacaggagcagtagatactgttattgaagcacttgatacaatcgttgaatcaagcaatcatgaggtgattacagatattccggtcagagatcacatgtatcaaggacaaacaccgcaaagcttcaatatgaaaaaagtattcaatcactaccaaaatctaacaccagagaaaaaacaaattctaacagatgcatgtaaaatttgtttgcttgctggcgatgatgtgaaattagttaaaggtgaaattttcaacattaagattacgacgccttatgatttgaaagtagcgaatgcgattattcaggagcggatagccaatgattaa

SEQ ID NO: 81276 - protein, 237 aa, Listeria monocytogenes serotype 4b
MIYAQILAGGKGTRMGNVSMPKQFLPLNGKPIIVHTVEKFILNTRFDKILISSPKEWMNHAEDNIKKYISDDRIVVIEGGEDRNETIMNGIRFVEKTYGLTDDDIIVTHDAVRPFLTHRIIEENIDAALETGAVDTVIEALDTIVESSNHEVITDIPVRDHMYQGQTPQSFNMKKVFNHYQNLTPEKKQILTDACKICLLAGDDVKLVKGEIFNIKITTPYDLKVANAIIQERIAND

SEQ ID NO: 81277 - DNA, 711 bp, Listeria monocytogenes
  CDS (1)..(711): transl_table=11
atgatttatgcagagatattagctggcggtaaaggtacgcgcatgggaaatgtcaatatgccgaagcagtacttgccattaaaaggaaaaccaattattgttcatacaattgagaaattcattttaaatgaccgttttgaaaaaattattattgcaacacctaaagattggattaatcacacacaagatattattaaaaaatatatatttgattcgcgtgtaattgttattgaaggcggaacagatcgaaatgaaacaattatgaacggtatccgttatgtagaaaaagaattcggcttaaatgaagatgatattattgtaacgcatgatgccgttagaccatttatcacacatcgtattattgaagaaaatattgatatggcattagaatttggctctgtagataccgttatccctgcagttgatactattgtagaatctactaaccatgactttatcacagatattccagttcgtggcaatatctatcaaggtcaaacgccacaaagctttaacatgaaaacgattcaaaaacattataataatttaacagatgatgaaaaacaaatcttaacagatgcttgtaaaatttgtttgcttgccggtgaaaaagttaaacttgtaaacggtggaatttcaaacataaaaattaccactccatatgatttaaaagtggcaaatgcgattgtacaggagaggattaactcatga

SEQ ID NO: 81278 - protein, 236 aa, Listeria monocytogenes
MIYAEILAGGKGTRMGNVNMPKQYLPLKGKPIIVHTIEKFILNDRFEKIIIATPKDWINHTQDIIKKYIFDSRVIVIEGGTDRNETIMNGIRYVEKEFGLNEDDIIVTHDAVRPFITHRIIEENIDMALEFGSVDTVIPAVDTIVESTNHDFITDIPVRGNIYQGQTPQSFNMKTIQKHYNNLTDDEKQILTDACKICLLAGEKVKLVNGGISNIKITTPYDLKVANAIVQERINS

SEQ ID NO: 81279 - DNA, 717 bp, Staphylococcus aureus
  CDS (1)..(717): transl_table=11
atgaaatacgctggtattctagctggaggtataggctcaagaatgggtaacgtacctttacctaaacaatttttagatttagacaacaaaccgattttaatccatacattagaaaaatttattttaattaatgattttgaaaaaattattatcgcgacgccacaacaatggatgacgcatacgaaagatacacttagaaaattcaaaatttctgatgaaagaattgaagtcattcaaggtggtagcgatcgtaacgatacaattatgaatatcgttaaacatattgaatcaacaaatggtattaacgatgacgatgtcattgtgacacatgatgcagttagaccatttttaacgcatcgtattattaaagaaaatattcaagctgctttagagtacggtgcagtagatacagtgattgatgctatagatacgattgttacatctaaagataatcaaacgattgatgcaattccagtgcgtaatgaaatgtaccaaggtcaaacacctcaatcgtttaatattaatttattaaaagaaagctatgcacagttgagtgatgagcaaaagagtattttatctgatgcttgtaagattattgtagaaacaaacaaaccggttcgacttgtaaaaggtgagttatataacattaaagtaacaacaccttacgatttaaaagtagcgaatgctattattcgaggtggtattgccgatgattaa

SEQ ID NO: 81280 - protein, 238 aa, Staphylococcus aureus
MKYAGILAGGIGSRMGNVPLPKQFLDLDNKPILIHTLEKFILINDFEKIIIATPQQWMTHTKDTLRKFKISDERIEVIQGGSDRNDTIMNIVKHIESTNGINDDDVIVTHDAVRPFLTHRIIKENIQAALEYGAVDTVIDAIDTIVTSKDNQTIDAIPVRNEMYQGQTPQSFNINLLKESYAQLSDEQKSILSDACKIIVETNKPVRLVKGELYNIKVTTPYDLKVANAIIRGGIADD

SEQ ID NO: 81281 - DNA, 717 bp, Vibrio parahaemolyticus
  CDS (1)..(717): transl_table=11
atgaatgttgccttgatttttgctggtggtgtcggaacccgaatgcaaaacagcactaaaccgaagcagtttttagagctatataacaagccagtaattatatacacacttgagaagtttgaagagaacaaaaacattgatgccattgttgtggtttgcgttgaaccgtggatcgattatttacgcaaactgttgttcaaatttgatattcagaaagtgaagtttgttattcccggtggtgaaactggccaggagtctatatttaacggcttatgtaagatagaagaagagtttgatcataactctgttgtattgattcatgatggcgttcgacctttaatcaatgacgaaattatcaaccgaaatatcgaagcggtcaaaagtcacggtagtgcgatcactacttgtcctccagtagagacctttgtccttgtcgacaatgaagacgtcgtgaaagacgttcacgatcgttcgttatctcgattagcgaaagcgccacaaagcttttatttgcgcgatattcttaaagtacatcgtcaagcgcgtgaggactgttacaccgaagcgatcgattcatgttcgttgatgacaaagtacggatacgatgtccgcctagtctctggcatttctgaaaacattaaaatcacgtcacccatcgatttctttatttttaaggcaataatcgatacgcaggaaaatctacaggtttttggttaa

SEQ ID NO: 81282 - protein, 238 aa, Vibrio parahaemolyticus
MNVALIFAGGVGTRMQNSTKPKQFLELYNKPVIIYTLEKFEENKNIDAIVVVCVEPWIDYLRKLLFKFDIQKVKFVIPGGETGQESIFNGLCKIEEEFDHNSVVLIHDGVRPLINDEIINRNIEAVKSHGSAITTCPPVETFVLVDNEDVVKDVHDRSLSRLAKAPQSFYLRDILKVHRQAREDCYTEAIDSCSLMTKYGYDVRLVSGISENIKITSPIDFFIFKAIIDTQENLQVFG

SEQ ID NO: 81283 - DNA, 1203 bp, Agrobacterium tumefaciens
  CDS (1)..(1203): transl_table=11
atgcaggaaagtactatgaaattcggcatcgtcatcgtcgccgccggacgcggtgaaagagcaggctcacccgaggaagggcccaagcaatatcgcccgatcggcggcagggccgtgatcgagcacacattggcgaccttcctgcgctggaacgacgcctgcccgatcgtggtcgtcagccatgccgacgatgcggccctgctgtcaccgatccttgcgcggcttgatgccggcgagcggatcaccacagtcacgggcggcgccacacgtcagcaatcggtactggccgggcttgaggcactctcctcgcacggccttacccatgtgatgatccatgatgccgtgcggcctttcgtcgccgcggacatgctggagcgtatcgccgcgctgcaccgggcgggcgcgggtggcgttctgcctgccctgcccgtcaccgatacgctgaagcgcggcctggaggatcgcgttgtggagacggtttcccggcagggactgtatgcggcgcagacaccgcaaagtttcagctacagcgacattcttgacgcgcatcgtgccgccgctgcttcaggcaaaacggatttcaccgatgacgcgtcgattgccgaatggacgggactgaccgtgacgctgaccgaaggttcggtcgacaatgtgaagctcactctcaagcgggatatcgccatggctgacgaaaagctctcccacgccttgcccgatgtgcgcaccggcaatggttacgacgtgcaccagctggaggccggcgacggcgtgacgctctgcggcatcttcatcgagcacgatcagcgactgaaaggccattcggatgctgatgtggcgctacatgcgctgacggatgccctgctcgccacctgcggtgccggtgatatcggcgatcatttcccgccttccgacccgcaatggaagggtgcggcctcgcgcatcttccttgaacatgcggccaaggtcgtgcgcgacaatggcggcacgatcatgaatgccgatgtctcgctgatcgccgaagcgccacgcatcggtccacatcgccaagccatgcgggaagcactttcggacatgctcggcattgcgctggagcgctgctcggtgaaggcgacaaccaatgagacgatcggtttcgtcggccgccgggaaggcatcgcggccatcgccaccgccaccgtcgtctaccaaggcagaccgctatga

SEQ ID NO: 81284 - protein, 400 aa, Agrobacterium tumefaciens
MQESTMKFGIVIVAAGRGERAGSPEEGPKQYRPIGGRAVIEHTLATFLRWNDACPIVVVSHADDAALLSPILARLDAGERITTVTGGATRQQSVLAGLEALSSHGLTHVMIHDAVRPFVAADMLERIAALHRAGAGGVLPALPVTDTLKRGLEDRVVETVSRQGLYAAQTPQSFSYSDILDAHRAAAASGKTDFTDDASIAEWTGLTVTLTEGSVDNVKLTLKRDIAMADEKLSHALPDVRTGNGYDVHQLEAGDGVTLCGIFIEHDQRLKGHSDADVALHALTDALLATCGAGDIGDHFPPSDPQWKGAASRIFLEHAAKVVRDNGGTIMNADVSLIAEAPRIGPHRQAMREALSDMLGIALERCSVKATTNETIGFVGRREGIAAIATATVVYQGRPL

SEQ ID NO: 81285 - DNA, 1197 bp, Bradyrhizobium japonicum
  CDS (1)..(1197): transl_table=11
atggcgaaatcacagcgcaccgcagtcgttcttgtcgcggcaggtcgcggcctgcgcgccggtgccggcgggccgaagcaatatcgcgagatcggcgggcagcccgtgatctatcgcgccatggaagccttcagccgccaccccgacgtgtttgcagtgcagcccgtggtcaaccccgacgacagcgccatgttcacggcagcggtcgctggattgaagcacgagccgccgaccaatggcggcgccacgcgccaggcctcggtgcttgccggtctcgaagcgctcgcaaagcaccagcccgacatcgtcctgatccacgacgccgcgcgtcccttcgtctcggacggtgtgatctcgcgcgcgatcgatgcggcgagccgcaccggcgccgcgatccccgtcgttcccgtcaccgacaccatcaagctcaccggcgcgagcggcaacgtcgaggacacgccggatcgggcccgcctgcggatcgcgcagacgccgcaatcctttcgtttcgatgtcatcctcgaggcgcatcgtcgcgcggcgaaggacgggcgcagcgatttcaccgatgatgccgcgattgccgaatgggcgggattgacggttgcaacctttgaaggcgatgttgccaacatgaagctcaccactcccgaagatttcgtgcgcgaggaagcgcgcctggccgcccagctcggcgacatcaggaccggcacgggctacgacgtccacgccttcggcgaaggcgaccacgtcatgatctgcggcgtccgcgtgccgcacagcaagggttttctcgcgcattccgacggcgatgtcggcctgcatgcgctggtggatgccatcctcggcgcgctggccgacggcgacatcggctcgcacttcccgccgagcgatgcgaagtggaagggcgcctcctccgaccagttcctgaaatacgccatcgaacgcgtcgcccagcgcggcggccgcgtcgccaatctcgaggtgacgatgatctgcgagcggccaaagatcggccccctgcgcgacaccatgcgcgcgcgcatcgccgagatctccggcgtcgacatctcgcgcgtcgcggtgaaggcgacgaccagcgagcggctcggcttcaccggccgcgaggaaggcatcgcggccaccgcgagcgccaccatccgcctgccgtttaacgagaagacctggagcgtctag

SEQ ID NO: 81286 - protein, 398 aa, Bradyrhizobium japonicum
MAKSQRTAVVLVAAGRGLRAGAGGPKQYREIGGQPVIYRAMEAFSRHPDVFAVQPVVNPDDSAMFTAAVAGLKHEPPTNGGATRQASVLAGLEALAKHQPDIVLIHDAARPFVSDGVISRAIDAASRTGAAIPVVPVTDTIKLTGASGNVEDTPDRARLRIAQTPQSFRFDVILEAHRRAAKDGRSDFTDDAAIAEWAGLTVATFEGDVANMKLTTPEDFVREEARLAAQLGDIRTGTGYDVHAFGEGDHVMICGVRVPHSKGFLAHSDGDVGLHALVDAILGALADGDIGSHFPPSDAKWKGASSDQFLKYAIERVAQRGGRVANLEVTMICERPKIGPLRDTMRARIAEISGVDISRVAVKATTSERLGFTGREEGIAATASATIRLPFNEKTWSV

SEQ ID NO: 81287 - DNA, 1149 bp, Caulobacter crescentus
  CDS (1)..(1149): transl_table=11
atgaccttctccgtcgtcatcgtcgccgcaggctccggaacccgggccgggccaggccaagccaagcaatggcgcgttctggccggtaggcccgtcctgcgctggtcggtggaagcgtttctggcggcgggcgcggccgaggtcgtggtcgtcaccacagcggacggcgaagccttcctcccgcgtatgctggagggcctccagggctggcgctcgactctgggcggcgcgactcgggcgctatctgttcaggcaggccttgcagccctgtccgagcgcccgggcgctgagccggtgatgatccacgatgcggctcgccccttcgtgtcgcgcaacgtgatcctcgccttgctcggggcgctgtccgacgccgacctcgccctgcccgccctcgccgtcgccgacaccttgaagcgacagccgaccggcgaagcggctcagaccgtctcgcgcgagcacctgtggcgcgcgcagacaccgcaagcggcgcgtcgcgatacgctcatcgccgcctatgccgcctggacccatggagaacccaccgacgacgcccaggtcgtcgaggcggcgggcgggcgcatcgctttgaccgcgggtgacccgcttctcacgaaactgacctatccagaggatttcgccatggccgaacatctcgccggcgtcgcgcgcgtcactcgtgtcggccaaggcttcgatgcgcatcgctggggccctggcgaggaggtctggctctgcggcgttgcgatcaagcacgacgagaccctggtggggcactcggatgccgacgccggcctgcacgcgctgaccgacgccatcctcggcgcgatcggcgaaggcgacatcggcgaccacttcccgcccacggaccccaagtggaagggcgccgcctccgaccagtttctgaagcacgcggtcgatctggtgaccgccaagggcggcgcgctggtcaatgtcgacgtgacgctgatctgcgagcgccccaagatcaagccgcaccgccaggccatgcgcgagcgactggccgagattctctcgatcccggtcgaccgcgtcagcgtcaaggcgaccactaccgagaagatgggcttcaccggccgcggcgaaggcctggccgcctcggccgtcgtcgcggtcgagacgccggcctga

SEQ ID NO: 81288 - protein, 382 aa, Caulobacter crescentus
MTFSVVIVAAGSGTRAGPGQAKQWRVLAGRPVLRWSVEAFLAAGAAEVVVVTTADGEAFLPRMLEGLQGWRSTLGGATRALSVQAGLAALSERPGAEPVMIHDAARPFVSRNVILALLGALSDADLALPALAVADTLKRQPTGEAAQTVSREHLWRAQTPQAARRDTLIAAYAAWTHGEPTDDAQVVEAAGGRIALTAGDPLLTKLTYPEDFAMAEHLAGVARVTRVGQGFDAHRWGPGEEVWLCGVAIKHDETLVGHSDADAGLHALTDAILGAIGEGDIGDHFPPTDPKWKGAASDQFLKHAVDLVTAKGGALVNVDVTLICERPKIKPHRQAMRERLAEILSIPVDRVSVKATTTEKMGFTGRGEGLAASAVVAVETPA

SEQ ID NO: 81289 - DNA, 1167 bp, Gluconobacter oxydans
  CDS (1)..(1167): transl_table=11
atgcgtatcgctgccctccttcttgctgccggtcgtggccggcgctttgacgcctcctcgcagagcggggaaaattcttccaagcagttccggatgctgcggggcaaacccgtcatccgccgcgctgccgaagccctcctgccgcatgtcgacgtactcctgccggtcggggacgatcccctgctggccgacagcctcgaaggactggatatcctgccccccgtcagcggtggcgcggaacgccatgacagcgtgcgtaacggcctcgaagccctggccaaactgcccgaaccgcccgatctggtgctggtccatgatggcgcccgcccctgcgtcccggccgaagtcgtgcaaaacgtcatcaacgccctgaaaacccatgagggcgtgatcccggccgtcgccgtcatcgacacgatcaagaaggccaaagacggcatcatcgttgataccgtcccgcgtgacgggctgtggcgcgcccagaccccgcagggtttccgcttcggtaccctgctcgaacttcaccgcacccatcgtgacgcccgcaccgatgatgccgccctgctcgaacaggctggccatccggtcgcgatcgtcgaagggtcggaagacaatatcaaactgactgttgcggaggacctgatgcgtcttgaaggtgtgattgaccggaacctgctgccccgcgtcggactgggctatgacgtccatgccttcgaggaaggccgcaaactgatcctgtgcggcatcgaggtgccccatacgaagggcctagccggacattccgacgccgatgtcggcatccacacgctgtgcgacgccatttacggcgcgctggccgaaggcgatatcggccgccatttcccgccgtccgacaacaaatggaaggacatggattcggcccgcttcctagtccatgccggcgagcgcatccgcgagcgcggcggcttcctcgtgaacgccgacgtcacgctgatctgcgaacgccccaagatcggcccgcacgctgaagccatgcgcaatcgcctcgccgatctcctgaaggtcagcgtcagccgcatctcggtcaaagccaccacatccgagcgtctgggcttcacgggccgcgaagaagggattgccgccaccgccacagtgagcattatggttcccgataacggggaagcctga

SEQ ID NO: 81290 - protein, 388 aa, Gluconobacter oxydans
MRIAALLLAAGRGRRFDASSQSGENSSKQFRMLRGKPVIRRAAEALLPHVDVLLPVGDDPLLADSLEGLDILPPVSGGAERHDSVRNGLEALAKLPEPPDLVLVHDGARPCVPAEVVQNVINALKTHEGVIPAVAVIDTIKKAKDGIIVDTVPRDGLWRAQTPQGFRFGTLLELHRTHRDARTDDAALLEQAGHPVAIVEGSEDNIKLTVAEDLMRLEGVIDRNLLPRVGLGYDVHAFEEGRKLILCGIEVPHTKGLAGHSDADVGIHTLCDAIYGALAEGDIGRHFPPSDNKWKDMDSARFLVHAGERIRERGGFLVNADVTLICERPKIGPHAEAMRNRLADLLKVSVSRISVKATTSERLGFTGREEGIAATATVSIMVPDNGEA

SEQ ID NO: 81291 - DNA, 1224 bp, Rhizobium loti
  CDS (1)..(1224): transl_table=11
atgactgaggcaagtgaaaacgcgagcgcgacaggtggggttgcggtggtgatcgtcgccgccggccgcggcgctcgtgccgggcaggccaacggacccaagcaataccagaacattggcggccgcgccgtcattgcgcacacgctggagatatttctggcccatccgcgaaccgaccggatcgtcgtcgccatccacgccgacgaccacgaattgttccggcaagcggcgggcagccaggctgagcgcgtcaccgccatcattggcggaccgacccggcaggagtccgtccggctcgggctgctggcgctgaaggagcatgcgccgggccaggttctaattcacgacgccgtccgcccgttcgtcgatgcggacctgatcgaccgaaccatttccgccatcggcgagaacgagggggcgttgcccgccctccccgtcgcagacacgctgaagcgcgaatcggccgccggagtggtcgcggaaaccgtttcccgaagcgggctgcacgcggcgcaaacgccgcaaggttttccctacgggccgatccttgccgcacacgacaaggcctttcaactgggtaggctggacttcactgatgacgcggccatcgccgaatgggcgcatattccagtcaagctcgttccgggctcgccggacaatgtcaaactcacctgggcacgggacatcgccatggcgcaccagcggctttccagcgaacgcacacatttccccgacatccgcaccggcaacggctacgatgtccacgcctttgagcccggcgatcacgtcactttgtgcggcgtcgccattccacatgacaagaaactgtccggtcattccgatgccgatgtcggcctgcatgccttgaccgacgcgctgctggcgacctgcggagccggtgacatcggtacgcattttccgccgtccgatccgcagtggaaaggtgcggcgtcgcggatcttcgtcgaacacgcggcgaaagtcgtgcgccagcgcggcggacgcatcgccaatgccgacatcacgctgatctgcgaggcgccgcgcgtcggcccgcatcgcgaggcgatgacggcagccctgtcgcggatgctgggcatttccgccgaccgcatctcgatcaaggcgacaaccaacgaaaaactcggcttcgtcggccgcgaggaaggcattgcggcgatcgccaccgccagcgtggtgttccccggcgaggtgccggaatga

SEQ ID NO: 81292 - protein, 407 aa, Rhizobium loti
MTEASENASATGGVAVVIVAAGRGARAGQANGPKQYQNIGGRAVIAHTLEIFLAHPRTDRIVVAIHADDHELFRQAAGSQAERVTAIIGGPTRQESVRLGLLALKEHAPGQVLIHDAVRPFVDADLIDRTISAIGENEGALPALPVADTLKRESAAGVVAETVSRSGLHAAQTPQGFPYGPILAAHDKAFQLGRLDFTDDAAIAEWAHIPVKLVPGSPDNVKLTWARDIAMAHQRLSSERTHFPDIRTGNGYDVHAFEPGDHVTLCGVAIPHDKKLSGHSDADVGLHALTDALLATCGAGDIGTHFPPSDPQWKGAASRIFVEHAAKVVRQRGGRIANADITLICEAPRVGPHREAMTAALSRMLGISADRISIKATTNEKLGFVGREEGIAAIATASVVFPGEVPE

SEQ ID NO: 81293 - DNA, 1233 bp, Rhizobium meliloti
  CDS (1)..(1233): transl_table=11
atgcaaggcgaagaacagttctcctgcggcgtcgtgatcgttgcggccggccgcggcgagcgcgccggccagtcggccgagggaccgaagcaataccgcacgatcggtgatcggcccgttatcgcccatacgcttgacattttcgcgacatggcccggagcgggacctgtcgtcgtcgtgatccaccccgatgacgaagagctgttcgcggcggcccgcaagcggatggccggggccttggagctgacggtggtccacggcggagcgacgcgccagctttcggtgctcgccgggctggaagcggtcgccgctaccggcgtggaatacgtgatgatccacgacgcggtgcgcccctttttcgatcacacactgctcgatcgctgcggtgcggcgcttcgtgacggcgcccaggccctcctgccggcaattgcggtcgccgacacgctgaagcgtacgaaggcggccggcctcgttgccgagaccgttccgcgaaccgatctctacgccgcacagacgccgcagtgcttccgcctcgagccgatcctctccgctcaccggcgagcggcggcaagcggcaggtccgactttacggacgacgcctctatcgccgaatgggccggcatccccgtccttctggtggaaggagccgtggacaatttcaagttgacactccggagggacctgtcgatggcagacgagaaactgacccgcatggccattcccgatgtgcgcaccggcaacggatatgacgtgcatcaactcgtggacggcgacggcgtcaccctctgtggtgtcttcatcccccacggccgcaaactctccggccattccgacgcggacgtagccctgcacgccttgacggacgccctgctcgccacttgcggcgccggcgacatcggcgaccacttcccgccatccgacccgcagtggaagggcgcgccttcgcgcatctttctcgagcacgctgcgcggatcgtccgcgagcgcggcggcactgttaccaatgccgacatatcgctgattgccgaggcgcccaaggtcgggccgcatcgtcagcagatgcgcgaaaaccttgcggcgatactcggtatttcgctcgaccgctgttcgatcaaggcgacgaccaacgagaaactcggctttgtcgggcggaacgaaggaattgcggcgatcgccaccgcgaccgtcgtctatgcatcacggagcaagcccgatgtggacgaccgatactga

SEQ ID NO: 81294 - protein, 410 aa, Rhizobium meliloti
MQGEEQFSCGVVIVAAGRGERAGQSAEGPKQYRTIGDRPVIAHTLDIFATWPGAGPVVVVIHPDDEELFAAARKRMAGALELTVVHGGATRQLSVLAGLEAVAATGVEYVMIHDAVRPFFDHTLLDRCGAALRDGAQALLPAIAVADTLKRTKAAGLVAETVPRTDLYAAQTPQCFRLEPILSAHRRAAASGRSDFTDDASIAEWAGIPVLLVEGAVDNFKLTLRRDLSMADEKLTRMAIPDVRTGNGYDVHQLVDGDGVTLCGVFIPHGRKLSGHSDADVALHALTDALLATCGAGDIGDHFPPSDPQWKGAPSRIFLEHAARIVRERGGTVTNADISLIAEAPKVGPHRQQMRENLAAILGISLDRCSIKATTNEKLGFVGRNEGIAAIATATVVYASRSKPDVDDRY

SEQ ID NO: 81295 - DNA, 1140 bp, Rhodobacter capsulatus
  CDS (1)..(1140): transl_table=11
atgacggttgcggtgatcatcgtcgcggcgggtcgcggcacgcgggcgggcgaaggcctgccgaaacaatggcgcgatctggccgggcggccggttctggcacagacggtcgcggctttcgcggggctcggccggattctggtcgtgctgcatcccgacgacatggggcttggcatggatttgctgggcggctcggtcgtgctggtcgcgggcggatcgacgcggtcggaaagcgtgaagaatgcgctcgaggcgctggaaggctcggatgtgacgcgggtcctgatccatgacggcgcccggccgctggttccggcctcggtcaccgccgcggttctggccgccttggagaccacgccgggggctgcgcccgcgctggccgtgaccgatgcgctgtggcgtggcgaagccggtctggtcgcgggcacgcaggaccgcgaggggctttaccgggcgcagacgccgcagggcttccgcttccccgagattctggcggcgcatcgcgcccatccgggcggggccgccgatgatgtcgaggtcgcccgtcacgcggggctttccgtggcgatcgttccggggcatgaagacaatctgaagatcacctatgcgccggattttgcccgcgccgaggcgatattgcgtgaacgaaaggggctgacgatggatgtgcgactgggcaacggctatgatgtgcacgccttctgcgagggcgatcatgtggtgctgtgcggggtgaaggtgccgcatgtgaaggcgcttctgggccattccgacgccgatgtgggcatgcatgcgctgaccgacgcgatctatggcgcgctggccgagggcgatatcggccgtcacttcccgcccagcgatccgcaatggaaaggcgccgccagctggatctttctggatcatgcggcgaaactggcgaagtcgcgcggcttccggatcggcaatgccgatgtgacgctgatctgcgaacggcccaaggtcggcccgcatgcggtcgcgatggcggcggaactcgcccggatcatggagatcgagccctcgcgcgtgtcggtcaaggccacgacctcggagcggctgggctttacgggccgcgaggaaggcatcgcctcgatcgccaccgtgacgctgatcggcgcgtaa

SEQ ID NO: 81296 - protein, 379 aa, Rhodobacter capsulatus
MTVAVIIVAAGRGTRAGEGLPKQWRDLAGRPVLAQTVAAFAGLGRILVVLHPDDMGLGMDLLGGSVVLVAGGSTRSESVKNALEALEGSDVTRVLIHDGARPLVPASVTAAVLAALETTPGAAPALAVTDALWRGEAGLVAGTQDREGLYRAQTPQGFRFPEILAAHRAHPGGAADDVEVARHAGLSVAIVPGHEDNLKITYAPDFARAEAILRERKGLTMDVRLGNGYDVHAFCEGDHVVLCGVKVPHVKALLGHSDADVGMHALTDAIYGALAEGDIGRHFPPSDPQWKGAASWIFLDHAAKLAKSRGFRIGNADVTLICERPKVGPHAVAMAAELARIMEIEPSRVSVKATTSERLGFTGREEGIASIATVTLIGA

SEQ ID NO: 81297 - DNA, 1197 bp, Rhodopseudomonas palustris
  CDS (1)..(1197): transl_table=11
atgacgaactcgccccgtactgctgccatcatcgtcgccgccgggcgcggcctgcgcgccggcgcgggcggccccaagcaataccgcagcctcgccggcaggccggtgatcgcgcgagcgatggagccgttctgcacccatccgggcgtgatggcggtgcagccggtgacgaatcccgacgacaccgagatgttcaacgcggcagtcgccggcctgaatttccgccccgcggtcggcggcggcgcaacccggcaggcgtccgtgcgcgccggcctggaggcgctcgccgagctgaagccggacatcgtgctgatccacgacgcggcgcgttgcttcgtcaccccggagctgatctcgcgcgcgatcaccgcggccggcgcgaccggcgctgcgctgccggtcgtccccgtgaccgacacgatcaagcaggtcgacagcagcggcgcggtcgacgcgacgccggaccgcgctagcttgcggatcgcccagaccccacaggcgttccgtttcgatgtgatcctcgacgcccaccgccgcgcggcctctggcggacgggacgatttcaccgacgacgccgcgatcgccgaatgggcgggattgacggtgtcgaccttcgagggcgatgctaacaacatgaagatgaccaccccggaagatttcgcgcgcgaggaaagccggctgatggcggcgctcggcgacatccgcaccggcaccggctacgacgtgcatgcgttcggcgaaggtgatcacgtctggctgtgtggcctaaaggtgccgcacacccgcggcttcctggctcattcggacggcgacgtcggcctgcacgcgctggtcgacgcgatcctcggcgccctggctgatggtgatatcggctcgcacttcccgccgaccgatccgcagtggaaaggcgccgcctccgacaagtttttgaagtacgcgatcgaccgcgtcaccgcgcgcggcggccgcgtcgccaatctcgaagtgacgatgatctgtgagcggccgaagatcggcccgctgcgcgacgcgatgcgtcagcgtatcgccgagatcaccggcgtgccggtgtcgcgcgtcgcggtgaaggccaccaccagcgagaagctcggcttcaccggccgtgaggaaggcatcgcggcgaccgcatccgccaccatccggctgccctggggcgccgacggactggccggctga

SEQ ID NO: 81298 - protein, 398 aa, Rhodopseudomonas palustris
MTNSPRTAAIIVAAGRGLRAGAGGPKQYRSLAGRPVIARAMEPFCTHPGVMAVQPVTNPDDTEMFNAAVAGLNFRPAVGGGATRQASVRAGLEALAELKPDIVLIHDAARCFVTPELISRAITAAGATGAALPVVPVTDTIKQVDSSGAVDATPDRASLRIAQTPQAFRFDVILDAHRRAASGGRDDFTDDAAIAEWAGLTVSTFEGDANNMKMTTPEDFAREESRLMAALGDIRTGTGYDVHAFGEGDHVWLCGLKVPHTRGFLAHSDGDVGLHALVDAILGALADGDIGSHFPPTDPQWKGAASDKFLKYAIDRVTARGGRVANLEVTMICERPKIGPLRDAMRQRIAEITGVPVSRVAVKATTSEKLGFTGREEGIAATASATIRLPWGADGLAG

SEQ ID NO: 81299 - DNA, 1161 bp, Zymomonas mobilis
  CDS (1)..(1161): transl_table=11
atgatgaaaagaacagataatatagcgcttattgtggcggccggtcagggtaaacgtgcaggtgaaggcctgccgaagcaatatcggcagatcgctggtaaagctattctggcacatgcgattgataacctgctcgcccatcccgaaattgatacggtacaagtcgttatcgcggacgggcatcagacgttatatcaagaggctgttggagaccgagatttaccgcagccagtgatcggtggcgtttttcggcgcgattctgttattaatggtttgaaggctgcacatgaccgtggttacaaacgggttttgattcatgatgccgcccgcccttttctacccaaaacagtgattgatcgcctactcgacgccttgaaatcatctaaggcagcaatacccgttttgccagttgttgatactcttgttaatcaagaagtcgaagccgttgaccgcaatctgttccatcgtgttcaaaccccgcaagcctttgatcttgagaccgtgatcgctgcacatcaggcatggacaggcagcgatgaaccaacagatgatgcgcaggttgtccgcgcttttggtaaaaaaattgccttggtaacaggcgatagactactcgagaaactgacctatcctgctgatttttctgtagccgaggctcaaatgactgaaaaaatgatttctgtttgcggttcaggtttcgatgttcattgtttcgaagctggtgaccatattatgttgggtggcatcaaaattccgcatgaccatggtcttgccggtcactccgatgccgatgtcgcactccatgctttgacagatgctttgctgggggcgattgctgatggcgatatcggaacccattttccgccaagcgacccgcaatggaagggtgcaaattcgacccaattccttgaatatgctgttgcgcttgccaagaaagccggagctatcattgaccatgcggatgtaacggttatctgtgaagcgccgaaagtggggccttatcggccagccatgcgtaagcatattgcccagattctggggcttcctgaacaaagggtcagcatcaaagcaacgacaactgaaaagcttggttttacaggccgcaaagaagggatcgctgcccaagcggttaccagtattcgcttgccggatattttgtgctaa

SEQ ID NO: 81300 - protein, 386 aa, Zymomonas mobilis
MMKRTDNIALIVAAGQGKRAGEGLPKQYRQIAGKAILAHAIDNLLAHPEIDTVQVVIADGHQTLYQEAVGDRDLPQPVIGGVFRRDSVINGLKAAHDRGYKRVLIHDAARPFLPKTVIDRLLDALKSSKAAIPVLPVVDTLVNQEVEAVDRNLFHRVQTPQAFDLETVIAAHQAWTGSDEPTDDAQVVRAFGKKIALVTGDRLLEKLTYPADFSVAEAQMTEKMISVCGSGFDVHCFEAGDHIMLGGIKIPHDHGLAGHSDADVALHALTDALLGAIADGDIGTHFPPSDPQWKGANSTQFLEYAVALAKKAGAIIDHADVTVICEAPKVGPYRPAMRKHIAQILGLPEQRVSIKATTTEKLGFTGRKEGIAAQAVTSIRLPDILC

SEQ ID NO: 81301 - DNA, 642 bp, Aquifex aeolicus
  CDS (1)..(642): transl_table=11
atgtacacggcaataatcctcgctgctggtagaggtagcagaataggtttcaggaaacagtttgcaaccctttgcggaaagcctctatttatgcactcccttgagaaagttctggacatatttgaagaagtaatactcgttctcccagaggatttcttagataaagttaaagttcacccgaaagtgaagaaagtagcgggaggaccagaaagacaggactctgtatttaacgcattgttacaggccacaggagacatcgtagtaatacacgactccgcaagaccactcgctacaaaaaagatgtttttagaagtagcccagctcggggattaccacgggaaagtggtggcttctcctgcaagggatactttaaaggaagtagtagaaggtaaggtgataaaaactttaaatcgctctttaatctggcacgcccagacaccccaggccttcaggagggatattctcctcgagtgtcacatgagggcaaaggcagagggtttcgtcggaacggacgacgcaagcctgctggaacgctacggctacagcgtgggagttgttgaaggaagctactggaatgtcaagataacttatcctgaggatttagaaatggtgaaaaagataatgggatgcgaagaggattaa

SEQ ID NO: 81302 - protein, 213 aa, Aquifex aeolicus
MYTAIILAAGRGSRIGFRKQFATLCGKPLFMHSLEKVLDIFEEVILVLPEDFLDKVKVHPKVKKVAGGPERQDSVFNALLQATGDIVVIHDSARPLATKKMFLEVAQLGDYHGKVVASPARDTLKEVVEGKVIKTLNRSLIWHAQTPQAFRRDILLECHMRAKAEGFVGTDDASLLERYGYSVGVVEGSYWNVKITYPEDLEMVKKIMGCEED

SEQ ID NO: 81303 - DNA, 909 bp, Arabidopsis thaliana
  CDS (1)..(909)
atggcgatgcttcagacgaatcttggcttcattacttctccgacatttctgtgtccgaagcttaaagtcaaattgaactcttatctgtggtttagctatcgttctcaagttcaaaaactggatttttcgaaaagggttaatagaagctacaaaagagatgctttattattgtcaatcaagtgttcttcatcgactggatttgataatagcaatgttgttgtgaaggagaagagtgtatctgtgattcttttagctggaggtcaaggcaagagaatgaaaatgagtatgccaaagcagtacataccacttcttggtcagccaattgctttgtatagctttttcacgttttcacgtatgcctgaagtgaaggaaattgtagttgtatgtgatccttttttcagagacatttttgaagaatacgaagaatcaattgatgttgatcttagattcgctattcctggcaaagaaagacaagattctgtttacagtggacttcaggaaatcgatgtgaactctgagcttgtttgtatccacgactctgcccgaccattggtgaatactgaagatgtcgagaaggtccttaaagatggttccgcggttggagcagctgtacttggtgttcctgctaaagctacaatcaaagaggtcaattctgattcgcttgtggtgaaaactctcgacagaaaaaccctatgggaaatgcagacaccacaggtgatcaaaccagagctattgaaaaagggtttcgagcttgtaaaaagtgaaggtctagaggtaacagatgacgtttcgattgttgaatacctcaagcatccagtttatgtctctcaaggatcttatacaaacatcaaggttacaacacctgatgatttactgcttgctgagagaatcttgagcgaggactcatga

SEQ ID NO: 81304 - protein, 302 aa, Arabidopsis thaliana
MAMLQTNLGFITSPTFLCPKLKVKLNSYLWFSYRSQVQKLDFSKRVNRSYKRDALLLSIKCSSSTGFDNSNVVVKEKSVSVILLAGGQGKRMKMSMPKQYIPLLGQPIALYSFFTFSRMPEVKEIVVVCDPFFRDIFEEYEESIDVDLRFAIPGKERQDSVYSGLQEIDVNSELVCIHDSARPLVNTEDVEKVLKDGSAVGAAVLGVPAKATIKEVNSDSLVVKTLDRKTLWEMQTPQVIKPELLKKGFELVKSEGLEVTDDVSIVEYLKHPVYVSQGSYTNIKVTTPDDLLLAERILSEDS

SEQ ID NO: 81305 - DNA, 681 bp, Bacillus anthracis
  CDS (1)..(681): transl_table=11
atgtatacattaattattccagcagctggtcagggaaagcggatgggtgctggcaaaaataagttgttcttacttattaatgaagtaccgattattgtgcatacgttacgtgcttttgaaaaggataaagcatgtaaaaatattattatggcaattaacgaagaagagcgtccatattttgaagagttaatgcagaagtatccggttgaaaagccagtacaatttattcaaggtggagctgaaagacaagatagtgtatataatgcgattcagcatacgactgatgttgagtatgttcttgtacatgacggtgcgcgcccgttcgtaacgaataaagtaatccaagatgtattaactgcagcagaaaaatatggagcttccatttgtgcggtgccagtgaaagatactgttaagaaagtagagcagggtgttgttgtcgaaacggtagaaagatcgcaacttaaagctgtacaaacaccgcaagggttctctgtttcgcttttgttagaagctcatagaagtgcgaagcagagttgtttccttggtacagatgatgcaagtctcgtagaacgtatcgggaagcaagtaggtgtagtagaggggagttactataatattaaagtgacgaccccagaggatttactaattgctgaaagttttcttcacgttcaaaagaaatga

SEQ ID NO: 81306 - protein, 226 aa, Bacillus anthracis
MYTLIIPAAGQGKRMGAGKNKLFLLINEVPIIVHTLRAFEKDKACKNIIMAINEEERPYFEELMQKYPVEKPVQFIQGGAERQDSVYNAIQHTTDVEYVLVHDGARPFVTNKVIQDVLTAAEKYGASICAVPVKDTVKKVEQGVVVETVERSQLKAVQTPQGFSVSLLLEAHRSAKQSCFLGTDDASLVERIGKQVGVVEGSYYNIKVTTPEDLLIAESFLHVQKK

SEQ ID NO: 81307 - DNA, 660 bp, Bacteroides fragilis
  CDS (1)..(660): transl_table=11
atgtgtcggactgctttgattgtagccggagggaagggactccgtatggggagcgaacttcccaaacagtttcttcccatcggtggtaaacctgtattgatgcgtacgctggaagcttttcaccgtttcgatgaaaaaatgcagattattcttgtattacctcgggagcaacaggacttttggcgtgaactttgtgaagagcatggctttgacattaaacatctgattgccgatggaggtgaaacacgtttccattcggtcaagaatggattggctcttgtgaacggtatcggtgtagtgggaatacatgatggtgtccgtcctttcgtttcacaggaagtgattgcccgctgcttcctggaagcagtagtccgaaaagccgtcatacccgtcattgatgtggtagaaactgtgcgtcatctcaccgaatcgggcagtgaaaccgtaagccgtaatgactataaattagtgcagactccccaggtgttcgatgcagatctgctgaagagagcttatgaacaggaatttactcccttttttacagatgatgcttcggtggtggaagccatgggtgttcctgtctacctggtggaggggaatcgtgaaaatataaaaataactactccttttgatttgaaagtagcttcagccttgttgtaa

SEQ ID NO: 81308 - protein, 219 aa, Bacteroides fragilis
MCRTALIVAGGKGLRMGSELPKQFLPIGGKPVLMRTLEAFHRFDEKMQIILVLPREQQDFWRELCEEHGFDIKHLIADGGETRFHSVKNGLALVNGIGVVGIHDGVRPFVSQEVIARCFLEAVVRKAVIPVIDVVETVRHLTESGSETVSRNDYKLVQTPQVFDADLLKRAYEQEFTPFFTDDASVVEAMGVPVYLVEGNRENIKITTPFDLKVASALL

SEQ ID NO: 81309 - DNA, 660 bp, Bacteroides fragilis
  CDS (1)..(660): transl_table=11
atgtgtcggactgctttgattgtagccggagggaagggactccgtatggggagcgaacttcccaaacagtttcttcccatcgatggtaaacctgtattgatgcgtacgctggaagcttttcaccgtttcgatgaaaaaatgcagattattcttgtattacctcgggagcaacaggacttttggcgtgaactttgtgaagagcatggctttgatattaaacatcagattgccgatggaggtgaaacacgtttccattcggtcaagaatggattggctcttgtgaacggtatcggtgtagtgggaatacatgatggtgtccgtcctttcgtttcacaggaagtgattgcccgctgcttccgggaagcagtagtccgaaaagccgtcatacccgtcattgatgtggtagaaactgtgcgtcatctcaccgaatcgggcagtgaaaccgtaagtcgtaatgactataaattagtgcagactccccaggtgttcgatgcagatctgctgaagagagcttatgaacaggaatttactcccttttttacagatgatgcttcggtggtagaagccatgggtgttcctgtctacctggtggaggggaatcgtgaaaatataaaaataactactccttttgatttgaaagtagcttcagccttgttgtaa

SEQ ID NO: 81310 - protein, 219 aa, Bacteroides fragilis
MCRTALIVAGGKGLRMGSELPKQFLPIDGKPVLMRTLEAFHRFDEKMQIILVLPREQQDFWRELCEEHGFDIKHQIADGGETRFHSVKNGLALVNGIGVVGIHDGVRPFVSQEVIARCFREAVVRKAVIPVIDVVETVRHLTESGSETVSRNDYKLVQTPQVFDADLLKRAYEQEFTPFFTDDASVVEAMGVPVYLVEGNRENIKITTPFDLKVASALL

SEQ ID NO: 81311 - DNA, 687 bp, Bacillus halodurans
  CDS (1)..(687): transl_table=11
atggagtattccgttgtaatccccgctgctggtcaaggaaagcggatgagggcaggacataataaacaatttatcgagttaggcggcaagccgattctcgctcatacattggctgttttcgagcaagatgattggtgtacaaatgtagttattgttgccaatgaacaagagatcgaggagatgggggagctagcaaatcgttaccagatctcgaaggcaaaaaaaattgtggctggagggcgagagcgacaagagagcgtctttgctggtttaaaagcactgtcacaggatgggctcgtcttaatacatgacggagcgcgaccatttgttacagaaaaagaaatccattcgctagtggagacagcagctaagacccatgcagcggttttagctgttccggtaaaagacacgatcaagcgtgtggaaggggaagctgttttagaaacgatgccgcgggaagagctatgggctgtgcaaacccctcaggcgtttgacttagcattgattaaacaagcacatcaaaaggcggaaaacgaacaaatgcttgggacagatgatgctagcttgatggaatggctcgggtattcagtcgctgtcgttcaaggaagctactttaattttaagctaacgacaccggaagatttattgtttgctgaagccattttagcggaaaaggagagacgatag

SEQ ID NO: 81312 - protein, 228 aa, Bacillus halodurans
MEYSVVIPAAGQGKRMRAGHNKQFIELGGKPILAHTLAVFEQDDWCTNVVIVANEQEIEEMGELANRYQISKAKKIVAGGRERQESVFAGLKALSQDGLVLIHDGARPFVTEKEIHSLVETAAKTHAAVLAVPVKDTIKRVEGEAVLETMPREELWAVQTPQAFDLALIKQAHQKAENEQMLGTDDASLMEWLGYSVAVVQGSYFNFKLTTPEDLLFAEAILAEKERR

SEQ ID NO: 81313 - DNA, 690 bp, Bacillus clausii
  CDS (1)..(690): transl_table=11
atggagtacgctgcaattgtcctagcggccggacaaggaaaacgaatgaaagcaggtatgaacaaacagttaatcgatttaaacggcattcctcttatcgtccattcactcaggctgtttgaagaagatgcggcttgtaaagcaatctggcttgtagtgagtgaaacggaaaggcagacaatggagaagcttgttgcagagtatcagataggcaaagtaaaagggcttgtaaatggaggagctgaacggcaagacagcgtttatgccgggttaaaaggaatggaggaggcagaaatcgtccttattcacgatggtgcccggccgtttgtcgctaaacctattttgacaaagctggccgatgaagcggctcaaagcggcgccgcgattgccgctgtaccggtcaaagatacagtcaagcttgccgacaaaaacagcgttgcgcgtacagttgaacggaaaaacctctgggctgcgcaaacaccacaagctttccagtatgagctcgtcttggccgcccacgaagacgctaaaaaacacgggtttctcgggaccgacgatgcaagtcttgtagaaagattggacaagcgcgtcaccattgtcgagagcgattacttaaatattaaattaacgactgaggaagacctgttatttgctgaaacgatattaaagaaaagggagaaccaattatga

SEQ ID NO: 81314 - protein, 229 aa, Bacillus clausii
MEYAAIVLAAGQGKRMKAGMNKQLIDLNGIPLIVHSLRLFEEDAACKAIWLVVSETERQTMEKLVAEYQIGKVKGLVNGGAERQDSVYAGLKGMEEAEIVLIHDGARPFVAKPILTKLADEAAQSGAAIAAVPVKDTVKLADKNSVARTVERKNLWAAQTPQAFQYELVLAAHEDAKKHGFLGTDDASLVERLDKRVTIVESDYLNIKLTTEEDLLFAETILKKRENQL

SEQ ID NO: 81315 - DNA, 699 bp, Bacillus subtilis
  CDS (1)..(699): transl_table=11
atgagttatgatgtggtgattcctgcagccggacagggaaagcggatgaaggcagggagaaataaactgttcattgagctgaagggagacccggtgatcatacacacgttaagagtgtttgacagccaccggcagtgcgataaaatcattttggtgattaacgagcaggagcgggagcactttcagcaattgctgtccgattacccgtttcaaacttcaattgagcttgttgcaggcggagatgagcgacagcacagtgtgtataaggggctgaaagccgtaaagcaggaaaagattgtccttgtacatgacggtgcccgtccatttataaaacatgaacaaattgacgaactgatcgcagaggcggaacagacaggagcggccatccttgctgttccggtaaaagatacgattaaacgcgttcaagatttacaagtcagtgagacgattgaacgttcaagcttgtgggctgtccaaacgccacaagcttttcgtctttctttattgatgaaggctcacgctgaggccgagcgcaagggatttttagggacggatgacgccagcctcgttgaacagatggagggcggttcggtccgtgttgtagaaggcagctatacaaatattaagctgacgacgccagacgatttgacgtcagctgaagctatcatggaatcagaaagtgggaataaacatgtttag

SEQ ID NO: 81316 - protein, 232 aa, Bacillus subtilis
MSYDVVIPAAGQGKRMKAGRNKLFIELKGDPVIIHTLRVFDSHRQCDKIILVINEQEREHFQQLLSDYPFQTSIELVAGGDERQHSVYKGLKAVKQEKIVLVHDGARPFIKHEQIDELIAEAEQTGAAILAVPVKDTIKRVQDLQVSETIERSSLWAVQTPQAFRLSLLMKAHAEAERKGFLGTDDASLVEQMEGGSVRVVEGSYTNIKLTTPDDLTSAEAIMESESGNKHV

SEQ ID NO: 81317 - DNA, 660 bp, Bacteroides thetaiotaomicron
  CDS (1)..(660): transl_table=11
atgaaacaatctgtgattattgtcgccggtggaaagggcttgcgaatgggaagcgatcttcccaaacaatttcttcctgtcggtggcaaacctgtgctgatgcatacgctggaagcattccgcaagtacgatgcgatgcttcagattattctggtacttccccgtgaacagcaggacttctggaaacagctttgcgaagaacatcatttttcggtggaacatcttgtggcagatggcggcgagacccgttttcattcggtgaagaacgggctggcacttgtgcaggctcccggtctggtaggagtgcacgacggagttcgtccgtttgtaacccttgaagtgattcgccggtgttacgagctggcggaacagcataaagctgtgattccggtggtggatgtagtcgaaacgctgcgccatctgacggatgccggaagcgaaacggtgagccgtactgaatataagttagtgcagactcctcaggtttttgaggtggagctgctgaaacaggcttatggacaggagtttactccgttctttacggacgatgcttcggtggtcgaagcaatgggcgtacccgtacatctggcagaaggtaatcgtgaaaacataaaaataacaactccctttgacctgaagatcgggagtgctctcttgtaa

SEQ ID NO: 81318 - protein, 219 aa, Bacteroides thetaiotaomicron
MKQSVIIVAGGKGLRMGSDLPKQFLPVGGKPVLMHTLEAFRKYDAMLQIILVLPREQQDFWKQLCEEHHFSVEHLVADGGETRFHSVKNGLALVQAPGLVGVHDGVRPFVTLEVIRRCYELAEQHKAVIPVVDVVETLRHLTDAGSETVSRTEYKLVQTPQVFEVELLKQAYGQEFTPFFTDDASVVEAMGVPVHLAEGNRENIKITTPFDLKIGSALL

SEQ ID NO: 81319 - DNA, 876 bp, Bifidobacterium longum
  CDS (1)..(876): transl_table=11
atgactgagagagatttcgatacccccgtcgagacgcctaccgtccagccggcccccgctcagggcgccaaaccggcgcaaaccgtgccggtggtggccgtggtgctggccgccggcttcggtacgcgcttcgaccccgataatcccaagcagcttgtctccgtgggcggcaagcccatcgtgtgctggagcattgatgcctttgaacattgcgaccgcgtcagcgacatcgtggtggtggtcaatcccaaggtgcgcggtgaagtggaaacgttggttggcgagatgggctacaccaaggtccgcgtcatcattgacggcggtgacgagcgtgtggacagtaccgccaccgcgctcgacatgctggctacggctggcattccggacgatgccaagattctgatccatgacgccgtccgtccgttcgtggaacagtccgccatcgacggttcgattgatgcgctcgaccagttcacggccgcaaccgtggcctacgcctcaaccgacaccgtgctgttgaccgaggatctgggcgatttgaaagtggtcaagtcggtgccggaccgcccgaacaccttccgcgcgcagaccccgcaatccttccgcttcgcgacgattcgtcacgcttacgatttggctgccgccgacccggacttccatcccaccgacgacacgcgcgtagtggtcgattatctgcctgatgaacccgtcgccattgtctccggtgcggaaaccaacctgaagatcaccacgctggaagatattcccacagctgagcgtatcgccgaggagattctcggtcgtgatcccaaggaagaggcccgcgcccgcatgcacgccctgctggcccaagcggccggccagatgcatcgctag

SEQ ID NO: 81320 - protein, 291 aa, Bifidobacterium longum
MTERDFDTPVETPTVQPAPAQGAKPAQTVPVVAVVLAAGFGTRFDPDNPKQLVSVGGKPIVCWSIDAFEHCDRVSDIVVVVNPKVRGEVETLVGEMGYTKVRVIIDGGDERVDSTATALDMLATAGIPDDAKILIHDAVRPFVEQSAIDGSIDALDQFTAATVAYASTDTVLLTEDLGDLKVVKSVPDRPNTFRAQTPQSFRFATIRHAYDLAAADPDFHPTDDTRVVVDYLPDEPVAIVSGAETNLKITTLEDIPTAERIAEEILGRDPKEEARARMHALLAQAAGQMHR

SEQ ID NO: 81321 - DNA, 684 bp, Bordetella bronchiseptica
  CDS (1)..(684): transl_table=11
atgtccgagtccctgatcgctatcgtgccggccgccggcatcggcgcgcgcgccagcctgcccggcgaggcggccgttccgaaacaatatcgcccgctggccgggcagcccatgctgcgccacgcggtgcgcgccctgctggccgatccgcgcatcgtccaggtgcgcgtggcggtcagcgccggcgacggctgggtcgagcaggcgctggctggcctgccgcgtaccgtatggcgcccatgcggcggcccgaaccgcgccgacacggtggccgccgccctggccgacagcggggcggccgccgacgactggatactggtgcacgacgccgcccggccgggcttgccggccgcggcgctggcgcgcctgatcgacgcctgcctggacgatgcggttgggggcctgctggccctgccggtcgccgataccgtcaaggcgggccggcagcgcgtatcgcgcaccgtcgatcgcgacggcctgtggctggcccagacgccgcagatgtttcgcgccggcttgctgcgcgacgcgctggcgcgcgcgcgggccgcgggcctggccgttaccgacgaggcgtcggcggtggaggcggccggccatgccccgcgcctggtggcgggcgcgttgcgcaatttcaaggtgacctggcccgatgatttcgaactgatggaaaaatggctatga

SEQ ID NO: 81322 - protein, 227 aa, Bordetella bronchiseptica
MSESLIAIVPAAGIGARASLPGEAAVPKQYRPLAGQPMLRHAVRALLADPRIVQVRVAVSAGDGWVEQALAGLPRTVWRPCGGPNRADTVAAALADSGAAADDWILVHDAARPGLPAAALARLIDACLDDAVGGLLALPVADTVKAGRQRVSRTVDRDGLWLAQTPQMFRAGLLRDALARARAAGLAVTDEASAVEAAGHAPRLVAGALRNFKVTWPDDFELMEKWL

SEQ ID NO: 81323 - DNA, 684 bp, Bordetella parapertussis
  CDS (1)..(684): transl_table=11
atgtccgagtccctgatcgctatcgtgccggccgccggcatcggcgcgcgcgccagcctgcccggcgaggcggccgttccgaaacaatatcgcccgctggccgggcagcccatgctgcgccacgcggtgcgcgccctgctggccgatccgcgcatcgtccaggtgcgcgtggcggtcagcgccggcgacggctgggtcgagcaggcgctggctggcctgccgcgtaccgtatggcgcccatgcggcggcccgaaccgcgtcgacacggtggccgcggccctggccgacagcggggcggacgccgacgactggatactggtgcacgacgccgcccggccgggcttgccggccgcggcgctggcgcgcctgatcgacgcctgcctggacgatgcggtcgggggcctgctggccctgccggtagccgataccgtcaaggcgggccggcagcgcgtatcgcgcaccgtcgatcgcgacggcctgtggctggcccagacgccgcagatgtttcgcgccggcttgctgcgcgacgcgctggcgcgcgcgcgggccgcgggcctggccgttaccgacgaggcgtcggcggtggaggcggccggccatgccccgcgcctggtggcgggcgcgttgcgcaatttcaaggtgacctggcccgatgatttcgaactgatggaaaaatggctatga

SEQ ID NO: 81324 - protein, 227 aa, Bordetella parapertussis
MSESLIAIVPAAGIGARASLPGEAAVPKQYRPLAGQPMLRHAVRALLADPRIVQVRVAVSAGDGWVEQALAGLPRTVWRPCGGPNRVDTVAAALADSGADADDWILVHDAARPGLPAAALARLIDACLDDAVGGLLALPVADTVKAGRQRVSRTVDRDGLWLAQTPQMFRAGLLRDALARARAAGLAVTDEASAVEAAGHAPRLVAGALRNFKVTWPDDFELMEKWL

SEQ ID NO: 81325 - DNA, 645 bp, Chlamydophila caviae
  CDS (7)..(645): transl_table=11
gtgtatatggatcctaaatgttctttgattttacttagtggaggtaaaggagaacgcttcggagcaaatcaacctaaacaatatctaccttttcaaggggaaccccttatcctacacgcgttaaaaaccgctctccatattcctgaaatcactgaagttattgttgtttgtgatgtaagctatcgccatatttttgaaggctttcctgtaaaatttgcagagtctgggaaacgtcgtcaagattctgttttttcagggctacaacacgtgagcaacccctgggtattgattcatgacggcgtacgtccttttatctatcctgacgaagttactgagcttattgctgtagcgcaacaaacaggagctgcaacattagtatctaacgttccctatacgatcaaacaacgtcatcctgtaaaaactttagatcgtgatgctctttctattgttcatacacctcaatgtgtaaagaccgagatactctctgcaggtcttgagtttgctagtagggagggaatcaccctggttgatgatacacaagctgcagagctattagacattcctgtatctttagtctccagtaaacatccccaaataaaaattacttatcccgaagatttaaccattgctcatgccttgctatga

SEQ ID NO: 81326 - protein, 212 aa, Chlamydophila caviae
MDPKCSLILLSGGKGERFGANQPKQYLPFQGEPLILHALKTALHIPEITEVIVVCDVSYRHIFEGFPVKFAESGKRRQDSVFSGLQHVSNPWVLIHDGVRPFIYPDEVTELIAVAQQTGAATLVSNVPYTIKQRHPVKTLDRDALSIVHTPQCVKTEILSAGLEFASREGITLVDDTQAAELLDIPVSLVSSKHPQIKITYPEDLTIAHALL

SEQ ID NO: 81327 - DNA, 657 bp, Chlamydia muridarum
  CDS (1)..(657): transl_table=11
atgaaccttagctgttccctcgtattgttaggaggagggagaggcgagcgttttaactccccccaacccaagcaatacactcctctttgtggggagccgctaattcttcatgccctacattcctatcaaagcctccccttcattcaagaaatcgttgttgtctgcgaagaacactaccaagaattgttctccccctactccgtgaaatttgcttcaccaggagctctacgtcaagattccgtcttttctggattacaacaagtttctttgccatgggtatgcgtacatgatggcgttcgccctttcgtctatgcaaatgaagtttctgaagtctgctccgcagctcttaaaactggagcagcagctctcgccacctccgcaacttatacaataaaatctcgtactccagtacgcaccttagatagagatgctgtggcagtaattcatactccccaatgcattaatacagaaatactgaaagaaggtcttcttcttgctaacatgatggattttaccttatctgatgattcggaagccgctgaactacttggtatagaacctactctggtattcagtaacagagtgcaaatgaagattacctaccctgaagatcttttatttgccgaagctcttctctctaaggctcacattcgttaa

SEQ ID NO: 81328 - protein, 218 aa, Chlamydia muridarum
MNLSCSLVLLGGGRGERFNSPQPKQYTPLCGEPLILHALHSYQSLPFIQEIVVVCEEHYQELFSPYSVKFASPGALRQDSVFSGLQQVSLPWVCVHDGVRPFVYANEVSEVCSAALKTGAAALATSATYTIKSRTPVRTLDRDAVAVIHTPQCINTEILKEGLLLANMMDFTLSDDSEAAELLGIEPTLVFSNRVQMKITYPEDLLFAEALLSKAHIR

SEQ ID NO: 81329 - DNA, 636 bp, Chlamydia pneumoniae
  CDS (1)..(636): transl_table=11
atgattaagtcttctctaatacttcttagtggaggacaaggtacacgttttggatctaaaattcctaagcagtacctccctctaaatggaactcccttagttcttcactcattaaagatactctcttctttgccacaaattgctgaggtgattgttgtttgcgacccctcatatcaagaaacctttcaagaatatcctgtctcttttgccattcctggagagcgtcgccaagattctgtcttttcaggactacagcaagtctcctatccctgggtaatcatccacgatggagcacgtccttttatctatcccgacgaaattcatgatttattagaaacagcagaaaagatcggggcgacagctctagcgtctccgattccctataccataaaacaacgcaatcctgtgcgcactctggaccgagacaatttagcaataattcatacccctcagtgtataaaaacggaaatcctcagagagggtctagctcttgcaaaagaaaaacagctcacactggtagacgacatcgaagctgctgaaatcataggcaaaccctcgcaactcgttttcaataagcatcctcaaatcaaaatttcctaccccgaagatctaacgattgcccaagccctcctatga

SEQ ID NO: 81330 - protein, 211 aa, Chlamydia pneumoniae
MIKSSLILLSGGQGTRFGSKIPKQYLPLNGTPLVLHSLKILSSLPQIAEVIVVCDPSYQETFQEYPVSFAIPGERRQDSVFSGLQQVSYPWVIIHDGARPFIYPDEIHDLLETAEKIGATALASPIPYTIKQRNPVRTLDRDNLAIIHTPQCIKTEILREGLALAKEKQLTLVDDIEAAEIIGKPSQLVFNKHPQIKISYPEDLTIAQALL

SEQ ID NO: 81331 - DNA, 741 bp, Chlorobium tepidum
  CDS (1)..(741): transl_table=11
atgaaaacagtagtcatcattgcggcaagcggcgtcggcaaacgcatgaagctcgatggcggccgcagcaagcagatgcttgaaatcggcggccagccggtcatctggcacaccatgaaagcgtttcaggaggcatcgacggtcgaatcggtttacatcgccacgctgccagacagcatcccggttttcaaggagattgcgaaagcaaacggattcacgaagatcacagcaataatcgaaggcggcaaggagcggcaggactcgatcggtaattgcatgaagctgatcgaacaagagattgagaactcgggagtgatgcccgacgccatcctcgtgcacgacggcgcacgcccgtttatccagccggaggagatcgacgacatcgcgcgtctgtcggcgacacacggcgcatgcgtgcccgccacaaaaccgaaagataccatcaagtatgtcggctgcaatccggagattttcggcgaaacgctcgaccgcagccgcctgctccaggtacagacaccgcagggattcgcccccgcaaagcttatcgaagcccaccgcctcgccggtgaagagcaatggtacgccaccgatgacgccgccctcgtggagcgctatttcccgcagcaagcgattcgcatctacgaaaccggctaccacaacatcaagatcaccacgcccgaagatgtcttcattggtgaagcgattcttgccgggctaaaagccagaaaatcgaaaaattaa

SEQ ID NO: 81332 - protein, 246 aa, Chlorobium tepidum
MKTVVIIAASGVGKRMKLDGGRSKQMLEIGGQPVIWHTMKAFQEASTVESVYIATLPDSIPVFKEIAKANGFTKITAIIEGGKERQDSIGNCMKLIEQEIENSGVMPDAILVHDGARPFIQPEEIDDIARLSATHGACVPATKPKDTIKYVGCNPEIFGETLDRSRLLQVQTPQGFAPAKLIEAHRLAGEEQWYATDDAALVERYFPQQAIRIYETGYHNIKITTPEDVFIGEAILAGLKARKSKN

SEQ ID NO: 81333 - DNA, 678 bp, Chromobacterium violaceum
  CDS (1)..(678): transl_table=11
atgatcgcgctggtgccggcggccggctccggcagccgtttcggcgcgcccagccccaagcagtatctgcaattgaatggcaagccgctgatgtggcacacgctggccacggtggcggcggtgcccgatgtggacgaagtggcggtggtgatttcgccgcaggacgagtggttcgacgatttcgcatgggacttgcccaagctgtcggtccatcgcgtcggcggcgccagccgcgcccagagcgtggcgagcggcttggccgcgctggcctgcgccgacgacgactgggtgctggtccacgacgccgctcgctgctgcctgtcggtggccgccgtcgagcgcctgatcgccgcgctgtccggccacgcggtcggcggcttgctggcgctgccggtgccggacaccgtcaagcgcgccgacatcgacggccacgtcgcggccaccgtgccgcgcaacggcctgtggctggcgcagacgccgcagatgttccgcgccggcctgctggccagggcgttgtccagcgcggcggccgaggacatcaccgacgaggcgtccgccgtcgagcggctgggcgtgaaaccgctgctggtggagggcgacgcgcagaacttcaagatcacctatccgcgcgatctggcgctggcccgggccatcctggccgcgcgcgacgaatactga

SEQ ID NO: 81334 - protein, 225 aa, Chromobacterium violaceum
MIALVPAAGSGSRFGAPSPKQYLQLNGKPLMWHTLATVAAVPDVDEVAVVISPQDEWFDDFAWDLPKLSVHRVGGASRAQSVASGLAALACADDDWVLVHDAARCCLSVAAVERLIAALSGHAVGGLLALPVPDTVKRADIDGHVAATVPRNGLWLAQTPQMFRAGLLARALSSAAAEDITDEASAVERLGVKPLLVEGDAQNFKITYPRDLALARAILAARDEY

SEQ ID NO: 81335 - DNA, 690 bp, Clostridium acetobutylicum
  CDS (1)..(690): transl_table=11
atgaattgtgcaattataatggcagctggcagaggtagtagaatgaaggtgaataagaacaaacagttcattcttattcaaggtaagcctattttagcatatacaatagacaagtttcaaagaagtccgttaatcgatgagataataatcgtggcagctgagagtgaaataaatttttgtatgcaagaaatagtttataagtacaaattcaataaggttaaaaatatagtttctggtggcagtgagaggcagcagtcagttatgaatggccttaaagctgttaaatctgcgaatattgtattaatacatgatggagcaagaccatttgtagacaataaaattatagaaaatggaataaaatatgctgaaaagtatggtggagcagcttgtggtgtgcagcctaaagatactataaagataaaaagtgaagatggattttctgaaaagacaattgatagaagtaaattgttttgtgttcaaactccacaatgttttaaatatgattcaatacttaaggctcatataaatgctgaaaaagaaggtattttagcaactgatgataccatgatatttgaaatgtcaggaaacaaagtatacctttatgatgggagttatgaaaacctaaaaattactacaccagacgatttatatgctgcagaaacactattaaaaaaaaatagtatacaatag

SEQ ID NO: 81336 - protein, 229 aa, Clostridium acetobutylicum
MNCAIIMAAGRGSRMKVNKNKQFILIQGKPILAYTIDKFQRSPLIDEIIIVAAESEINFCMQEIVYKYKFNKVKNIVSGGSERQQSVMNGLKAVKSANIVLIHDGARPFVDNKIIENGIKYAEKYGGAACGVQPKDTIKIKSEDGFSEKTIDRSKLFCVQTPQCFKYDSILKAHINAEKEGILATDDTMIFEMSGNKVYLYDGSYENLKITTPDDLYAAETLLKKNSIQ

SEQ ID NO: 81337 - DNA, 678 bp, Clostridium perfringens
  CDS (1)..(678): transl_table=11
atgggaaaagtagttagcgtaatattagcaggtggaaaaggaaaaagaatgggtgctgaagttagtaagcaattcattgaaataaatggaaaacctataatatattatactttaaaagcttttgaggagtgtaaaggtattgatgaaataattcttgttctacctaaggatgaaatagattattttaaaagagaaatagaacctagatttgattttaaaatatctaaaattattgaaggtggaaaggaaagacaggattcagtttacaatgcattaaattccataggagattgtgatattgttttaatacatgatggagcaagagcttttgtaagcaataaaataatagaagacggaataaagtattctagagagtttggagcagcagctccaggtgttatgccaaaggacactataaaagttaaaaatttagaaggattctctgtggatacaccaaatagagcatctttagtagctgttcaaactccacaatgctttaaatataatttaataaaaaaaggtcataacaaagttaaaaatgaaaagattcaagttacggatgatactatgatagtagaacttttaggagaaaaagtttatctttttgaaggtgactataaaaacataaaggttacaacaccagaagacttaatattagcagaacattttgttaagtaa

SEQ ID NO: 81338 - protein, 225 aa, Clostridium perfringens
MGKVVSVILAGGKGKRMGAEVSKQFIEINGKPIIYYTLKAFEECKGIDEIILVLPKDEIDYFKREIEPRFDFKISKIIEGGKERQDSVYNALNSIGDCDIVLIHDGARAFVSNKIIEDGIKYSREFGAAAPGVMPKDTIKVKNLEGFSVDTPNRASLVAVQTPQCFKYNLIKKGHNKVKNEKIQVTDDTMIVELLGEKVYLFEGDYKNIKVTTPEDLILAEHFVK

SEQ ID NO: 81339 - DNA, 732 bp, Colwellia psychrerythraea
  CDS (1)..(732): transl_table=11
atggcgtcaactctaaagtttattgttattgtacccgctgcaggcgtaggtaaacgcatgcaggcaaattgtcccaaacaataccttcgcatcaataatgaaacaattttatcgcatactgtgatgaggttgttaagtcacccgttaatcagtcaagttattgttgctttaggaaccgaggatcaatactttgcggaatctgaactagcacatcataaagacatcattcgtgtaaacggaggtactgaacgagttaattcagtgctcaatggtttaaaggctgtcgatagcgataaatacccttgggtattagtacatgatgcggcgcgcccctgtgttagccatcaagatatcgataagttaattactcgatgcttacgcaaagattacggcggaatattagccacgcctgttagagacaccatgaaacgtggcgtacttattaaagacagtgctaaaggtgataatactattatcgagagcaccgtcgagcgagagcaattatggcatgctttgacaccacagatgtataagactgatgagttaacacttgccatagagcaagctctagaaaatagtttaaaaataacggatgaagcttcagctattgaacaggctaacttacctagcttattagtttcagcaagtagtgaaaatataaagataactcaccctaatgatttagcattagctgaattttatttaaataagcaagcgaataataccaattag

SEQ ID NO: 81340 - protein, 243 aa, Colwellia psychrerythraea
MASTLKFIVIVPAAGVGKRMQANCPKQYLRINNETILSHTVMRLLSHPLISQVIVALGTEDQYFAESELAHHKDIIRVNGGTERVNSVLNGLKAVDSDKYPWVLVHDAARPCVSHQDIDKLITRCLRKDYGGILATPVRDTMKRGVLIKDSAKGDNTIIESTVEREQLWHALTPQMYKTDELTLAIEQALENSLKITDEASAIEQANLPSLLVSASSENIKITHPNDLALAEFYLNKQANNTN

SEQ ID NO: 81341 - DNA, 735 bp, Corynebacterium diphtheriae
  CDS (1)..(735): transl_table=11
atgtcgcgcagagttgtagccctcgtggcggcagcgggtaaaggcactcggctgggtgcagatctgcccaaggcctacgtcccattgcgggacattccactggtggtgcgctctgtgcgtgcgatgattacctctgcggtagttgacgaggtcatcgtgattatcagcccccaaatgcaggattatgctgccgcgctgttgctgcgttgggggctttttagtgccgacatccctgtgcgtcttgtccatggcggtgccgagcgcgccgactccgtgtggtgcggtttgcaggctatcgctgataccgacgcggtggtgctcatccatgattcagcacgcgcgctcaccccacctggcatgattgcccgagttgcacgtgcggtactcgacggtaacaaggctgttattcctgttgtgccggttgccgacaccatcaaaacagtccacggcaccaccgttgtagcaacgcctccacggagagacttgcgtgcggtccaaaccccacaaggtttcgatattgcggcattgcgggcagccaatattgcatatcagcagcaacaacccgattttgaagcgaccgacgatgccagcctcatggagtggtttggcaccccagtgctgtgcgttgatggcgaccccatggcctttaaggtgactacgccgcttgattatgcgctggcaaaagccgtgactgaccaagcagaaccaacgattttcgaggtacccagtgactaa

SEQ ID NO: 81342 - protein, 244 aa, Corynebacterium diphtheriae
MSRRVVALVAAAGKGTRLGADLPKAYVPLRDIPLVVRSVRAMITSAVVDEVIVIISPQMQDYAAALLLRWGLFSADIPVRLVHGGAERADSVWCGLQAIADTDAVVLIHDSARALTPPGMIARVARAVLDGNKAVIPVVPVADTIKTVHGTTVVATPPRRDLRAVQTPQGFDIAALRAANIAYQQQQPDFEATDDASLMEWFGTPVLCVDGDPMAFKVTTPLDYALAKAVTDQAEPTIFEVPSD

SEQ ID NO: 81343 - DNA, 747 bp, Corynebacterium efficiens
  CDS (1)..(747): transl_table=11
atgtccaggctccccgtggtcgccctccttgcggcggccggtcgaggtacccggttgggtggcccgatccccaaggcgttcgtgacgctgcggggcaggtcactggtggaacgctccctccgggcgatgctcacctcggaggtggtggatgaggtcatcatcctggtcagccccgatatggaggactacgcccgggagctgttgacccgacgtggcctgctcaacgatccggaaggtgtgcgcgtccgcctggttcacggtggtggcgaacgcgcggactccgtgtgggcgggtctgcaggccatcgatcatgatgatgcgatcgtgctcatccatgacagtgcccgcgccctgacccctccggggatgatcgcgcgggtcgcgcggatggttgcggacggtgcgcccgcggtgatcccggtggtgccggtcgccgatacgatcaagcgtgtcgacggatcgacagtcgtcgacacgcccaacagggcggacctccgtgcggtgcagaccccgcagggtttcctcctgtcccggttgcgcgccgccaacgagaaattcttcgccaccccggatccgggtttcatccccactgatgatgccagtctgatggagtggtacggcgtggaggtcacctgcgtgcagggcgatccgatggctttcaaggtgaccacgccgattgacatgatgcttgcccagcggatcaccgatgaggcagaaccgacgatttttgaggtgccaggtgactga

SEQ ID NO: 81344 - protein, 248 aa, Corynebacterium efficiens
MSRLPVVALLAAAGRGTRLGGPIPKAFVTLRGRSLVERSLRAMLTSEVVDEVIILVSPDMEDYARELLTRRGLLNDPEGVRVRLVHGGGERADSVWAGLQAIDHDDAIVLIHDSARALTPPGMIARVARMVADGAPAVIPVVPVADTIKRVDGSTVVDTPNRADLRAVQTPQGFLLSRLRAANEKFFATPDPGFIPTDDASLMEWYGVEVTCVQGDPMAFKVTTPIDMMLAQRITDEAEPTIFEVPGD

SEQ ID NO: 81345 - DNA, 687 bp, Dechloromonas aromatica
  CDS (1)..(687): transl_table=11
atgccacgtcattacgcaatcgttcccgctgccggcagcggttcccgcttcggcgccgagaagccaaagcagtacctggacctccttggccgccccctgatttttcacactttggccgccctgactgccagcccggacattgagcgcgtctgggtggtacttgctccggatgacccgtggtggccacgctacgactggagcgaactcggttccaagctcgaaactgtacgctgcggcggggcgacacgcgctgaaagtgtgagcaacggtttgagggcggcagcgatggttgctgcagacgatgactgggtgctggtgcacgatgcagcgcggccctgtctctcggcggctatgctcgatgcgctgtttgccgaactggccagcgatccggtcggcggcatcctggctgtgccggtcgccgacaccttgaagcgggctgatgccgaacagcgtgtcggcgccaccgaaccccgcgatggtctttggcaggcgcaaacgccgcaaatgttccgctacggcttgctcggtgaagcactggaaaaatgtcgtgacgtgaccgatgaagctggcgccatcgaggcggtggggttgaaacccaagctggtgcgcggcgattcgaccaatctgaaagttacttatccggccgatctcgcgctggctgcgatgatactgagggcacgcaaatga

SEQ ID NO: 81346 - protein, 228 aa, Dechloromonas aromatica
MPRHYAIVPAAGSGSRFGAEKPKQYLDLLGRPLIFHTLAALTASPDIERVWVVLAPDDPWWPRYDWSELGSKLETVRCGGATRAESVSNGLRAAAMVAADDDWVLVHDAARPCLSAAMLDALFAELASDPVGGILAVPVADTLKRADAEQRVGATEPRDGLWQAQTPQMFRYGLLGEALEKCRDVTDEAGAIEAVGLKPKLVRGDSTNLKVTYPADLALAAMILRARK

SEQ ID NO: 81347 - DNA, 684 bp, Dehalococcoides sp
  CDS (1)..(684): transl_table=11
atgtttttgaatgaaaaagtaggggcagttattgtagctgccggtcagagccgccgaatggaggggcaggacaagatttttgcccttctggcgggtaaacctgttttggctcacacgctttcggtttttcaagaatccccgcaggtagatgatattgctctggttatggcagaacacaatattgaaaaagccaaagagctggttaaggaatataatttcagcaaggttatagccatttgctccggcgggacactccgccaggactctgtccgctcagggctgtcagccctgtgtgactgtggctggatacttattcatgacggggcgcgccctctgcttgagcctgactctatacccgaagggttggaagcggctaaactctgcggttcggccatcgcggcagtgccgctcaaagataccattaaagaaatatccccggaagggctggtggaaaaaaccctgcccagagagaggctgatatccgtccagacacctcaggtgtttcgggcagatattatccaaaaagcctaccagcgggtgggtataatcgccactgacgatgcccaactggtagaaaaactgaagctcccagtcaggatattctccggcgcatgtgctaatataaagataaccacacctgaagacctgcttatggcagaaatactgctgaagaaaggacggtga

SEQ ID NO: 81348 - protein, 227 aa, Dehalococcoides sp
MFLNEKVGAVIVAAGQSRRMEGQDKIFALLAGKPVLAHTLSVFQESPQVDDIALVMAEHNIEKAKELVKEYNFSKVIAICSGGTLRQDSVRSGLSALCDCGWILIHDGARPLLEPDSIPEGLEAAKLCGSAIAAVPLKDTIKEISPEGLVEKTLPRERLISVQTPQVFRADIIQKAYQRVGIIATDDAQLVEKLKLPVRIFSGACANIKITTPEDLLMAEILLKKGR

SEQ ID NO: 81349 - DNA, 696 bp, Fusobacterium nucleatum subsp
  CDS (1)..(696): transl_table=11
atgtacagtagtaactctgaaataaaaaagaaagttacttttattttagcagcggcaggtcaaggaaaaaggatgaatttaaactcacctaaacaatttttagactatagaggagagccacttttttattcatctttaaaacttgcatttgaaaataagaatattaatgatattattataataactaataaagaaaatttaaattttatggtaaaatattgtcaaaacaaaaatttattttcaaaagtcaaatatatagttgaaggtggaagtgaaagacaatattctatctataatgctattaaaaaaataaaagatacagatattgtaataattcaagatgcagcaagaccttttttaaaagataagtatatagaagaaagtctaaaaattttaaatgatgattgtgatggagcaattattggtgtaaaatgtaaagatacaatcaagattattgatgaaaatggaatagtactagaaacaccaaatagagataacttgataatggttcatacaccacaaacttttaagtttgaaattttaaaaaaggcccatcaaatggcagaggaaaaaaatatactggctactgatgatgcaagtctagttgagatgatttctggaaaaattaaaattatttatggagattatgataatattaagattacagtacaagaggatttaaagtttttaaaataa

SEQ ID NO: 81350 - protein, 231 aa, Fusobacterium nucleatum subsp
MYSSNSEIKKKVTFILAAAGQGKRMNLNSPKQFLDYRGEPLFYSSLKLAFENKNINDIIIITNKENLNFMVKYCQNKNLFSKVKYIVEGGSERQYSIYNAIKKIKDTDIVIIQDAARPFLKDKYIEESLKILNDDCDGAIIGVKCKDTIKIIDENGIVLETPNRDNLIMVHTPQTFKFEILKKAHQMAEEKNILATDDASLVEMISGKIKIIYGDYDNIKITVQEDLKFLK

SEQ ID NO: 81351 - DNA, 687 bp, Geobacillus kaustophilus
  CDS (1)..(687): transl_table=11
atgaattacgaagcgattgtcttggcggccgggcgaggaaagcggatgaacgccggcatgaacaagcaattccttgagcttggcggtgagccgctcatcgttcggacgctgaacgtgtttgagcgcgatgagcggtgcacccgcatcgtgctcgtcgtcaacccagccgagcgaagccgatttgagcagctgctcgcccgctttcgcattcaaaaagtcgccgcgcttaccgacggcggcgaggagcggcagcatagcgtctataacggattgcaggcgctcgcgggggaggagattgttctcatccatgacggcgcccgcccgtttgtccgcgtccatcatttgcacgagctagtgaacgccgctgttcagtacggggcggcgatcccggcagtgcgggtgaaagatacgatcaaaaaagcgaacggtttgtttgtcgaacagacgattgatcgttccagcttgtgggcggtgcagacgccacaagcttttcgtctgtctttgatcatggaagcgcacgaagcggcgaaacaggctggctatctcggcacggatgacgccagccttgtggagcgaatcggcaagccggtgaagatcattgagggggattatcgcaatattaagctgacgacgccggaggaccttttgtttgctgaagcgattttggcaagccggatggccgaatag

SEQ ID NO: 81352 - protein, 228 aa, Geobacillus kaustophilus
MNYEAIVLAAGRGKRMNAGMNKQFLELGGEPLIVRTLNVFERDERCTRIVLVVNPAERSRFEQLLARFRIQKVAALTDGGEERQHSVYNGLQALAGEEIVLIHDGARPFVRVHHLHELVNAAVQYGAAIPAVRVKDTIKKANGLFVEQTIDRSSLWAVQTPQAFRLSLIMEAHEAAKQAGYLGTDDASLVERIGKPVKIIEGDYRNIKLTTPEDLLFAEAILASRMAE

SEQ ID NO: 81353 - DNA, 699 bp, Geobacter metallireducens
  CDS (1)..(699): transl_table=11
atggcagttttcgccctgattccagcggcaggcatgggcaagcggatgggtgcctccatcaacaagcagtatctgctcctgggcggaatgccgatccttgcccgcaccctggaagtcttcgagcgctcccccctggtggacggcatcttcgtcgtgattccagcggacgagatccctttctgccgggagcaggtggtggagcggcacggcttttcgaaggtgcggagcatcgttgccggcggagccgagcgtcagcagtcggtactgaacggcctgcgggccatggaggggacggcgggggagtacgacgtgattctcatccacgacggggtccgcccctttgtcacggaggatatcctcggccgggcaaccgcaacggcccgggaaaacgacggagcccttgtggcggtaccggccaaggacacggtgaaggtggtggaggacggcatcatcaccgcaacgccgtcacgggagaccctctggctcgcccagactccccaggccttccgctacggcgtcatccgcgcagcccacgaggtggccgacgccgagcggttcctcggcaccgacgacgccatgctcgtggaacgcctggggcgacaggtacggatcgttctgggagactaccgcaacgttaagatcacgacgccggaggatatggttctggcagaagcgttcatcaaggagaagctgccatga

SEQ ID NO: 81354 - protein, 232 aa, Geobacter metallireducens
MAVFALIPAAGMGKRMGASINKQYLLLGGMPILARTLEVFERSPLVDGIFVVIPADEIPFCREQVVERHGFSKVRSIVAGGAERQQSVLNGLRAMEGTAGEYDVILIHDGVRPFVTEDILGRATATARENDGALVAVPAKDTVKVVEDGIITATPSRETLWLAQTPQAFRYGVIRAAHEVADAERFLGTDDAMLVERLGRQVRIVLGDYRNVKITTPEDMVLAEAFIKEKLP

SEQ ID NO: 81355 - DNA, 699 bp, Geobacter sulfurreducens
  CDS (1)..(699): transl_table=11
atggccgttttcgccctggtcccggccgccggcatgggtaagcggatgggggcctccatcaacaaacagtacctcatcctggcggggagaccgatcctcgcccataccctgagtgttttcgagggggcgtcctttgttgacggcatatttgtcatcactcccgaggacgagattcccttctgccgtgaccacgtggttgagcgctacggcttcaccaaggttcgcggcatcgttgccggcggtgcggagcgccaacattcggtcctgaacgggttgcgggccatggagggaactgtggcggacgacgacgtgatccttatccatgatggggtccgcccctttgtcagtacggacgtgctggcccgggcaaccgcggtggcccgggaggacgacggagcccttgttgccgtgccggccaaagacacggtgaagacggttgaagacggcatcatcaccggtacccctccccgggagaccctctggctcgcccagacgccccaggcgtttcgctacgccgtcatccgcgcggctcacgaaattgccgacgcggaacgctttctcggcaccgacgatgccatgctcgtggagcgcctgggccgcagcgtgcggatcgtcgtgggagattaccgcaacatcaagatcacgacgcccgaggacatggtcctggccgaggcgtttctgaaggagctcgcggcgtga

SEQ ID NO: 81356 - protein, 232 aa, Geobacter sulfurreducens
MAVFALVPAAGMGKRMGASINKQYLILAGRPILAHTLSVFEGASFVDGIFVITPEDEIPFCRDHVVERYGFTKVRGIVAGGAERQHSVLNGLRAMEGTVADDDVILIHDGVRPFVSTDVLARATAVAREDDGALVAVPAKDTVKTVEDGIITGTPPRETLWLAQTPQAFRYAVIRAAHEIADAERFLGTDDAMLVERLGRSVRIVVGDYRNIKITTPEDMVLAEAFLKELAA

SEQ ID NO: 81357 - DNA, 702 bp, Gloeobacter violaceus
  CDS (1)..(702): transl_table=11
atgcaccttttgattcccgccgccgggcgcggtagccgcatgggcgcagacggcaacaagctgctcttgccgctgtcgggccggccgcttctggcctggacgctcgcagcagcggcacaagccccttcaacccgctggataggcatcatcggccagccgatggacgaagaagcgatccggttactggcgcagaagctgggtctgcgggtgccggtgcactggatcgaagggggcgagacccgtcagcagtcggtttaccgggggctgctcgcgcttcctgtagaagcgcagcaggtactcatccacgatggagcgcgctgtctggcaagcccggcccttttcgagcgctgtgccgccgcactggctgaattttccgccatcgtcgccgctgtgccggtcaaggacaccatcaaacaggtatacccccagagccgtcaggtggagaaaaccattccccgcgagcagctctgggcggcccagacgccccagggcggcaatgtcgggaggctgaaagccgcccacgcctgggccgctgcccaagcggtcgccgtcaccgacgacgcggcgctatgcgaactgcgcggcgagccggtgcaggtcgtccccggcgaggaaaccaatctcaagatcaccacgcctgcagatctgttggtggccgaggctatcttgaaaacacagctgcgccaggatcccagcccatga

SEQ ID NO: 81358 - protein, 233 aa, Gloeobacter violaceus
MHLLIPAAGRGSRMGADGNKLLLPLSGRPLLAWTLAAAAQAPSTRWIGIIGQPMDEEAIRLLAQKLGLRVPVHWIEGGETRQQSVYRGLLALPVEAQQVLIHDGARCLASPALFERCAAALAEFSAIVAAVPVKDTIKQVYPQSRQVEKTIPREQLWAAQTPQGGNVGRLKAAHAWAAAQAVAVTDDAALCELRGEPVQVVPGEETNLKITTPADLLVAEAILKTQLRQDPSP

SEQ ID NO: 81359 - DNA, 681 bp, Haemophilus ducreyi
  CDS (1)..(681): transl_table=11
atgaacagaaaaattattgcaataattcccgcttcaggcataggtagcagaatgaatgccgccttacccaagcaatacctcacactgcaaggcaaaacgattttagaacataccgttgccatcttcttaaatcatcctcaaattgacaaaatagttattgcactttcggcaaacgatcaacatcaccaacacattagcttattaacttccgacaaaattcaattagtcaacggcggagcgagccgagccgaatccgtatttaatgcattacaaagtattgatgaacatagctgggcattagtacacgacgcagccagaccttgcctcaagcgctcagatttagataaattattacaaattaccgatcaaaacggtgccattcttgccagccccgtggttgacaccctcaaacgagcagaagggaacaaaatcagccacaccgaagatcgcacaacattatggcacgccctcacgccacaatttttcccgacggctttactcaaacaagcgctacaacaagcctttgaccgtcagcaaaatgtcacagacgaagcttcggcaatggaattagccggttatcaaccgactttaatcacaggtagcaatagcaatttaaaaattacccgccccgaagatcttgctttggcagaattctatttaatgcattcattggagaaataa

SEQ ID NO: 81360 - protein, 226 aa, Haemophilus ducreyi
MNRKIIAIIPASGIGSRMNAALPKQYLTLQGKTILEHTVAIFLNHPQIDKIVIALSANDQHHQHISLLTSDKIQLVNGGASRAESVFNALQSIDEHSWALVHDAARPCLKRSDLDKLLQITDQNGAILASPVVDTLKRAEGNKISHTEDRTTLWHALTPQFFPTALLKQALQQAFDRQQNVTDEASAMELAGYQPTLITGSNSNLKITRPEDLALAEFYLMHSLEK

SEQ ID NO: 81361 - DNA, 678 bp, Haemophilus influenzae
  CDS (1)..(678): transl_table=11
atggctcgttcaattattgcggtcttgccagctgctggtgttggttcacgaatgcaagcggataaaccgaaacaatatttaacgctgcttggcaaaacactgcttgaacatacactcgatgtgatgctttcttatcctgccgtatctaaaattatcttggcggtaagcaaagatgatccttatatttctacactatcgctcgatcctaaaattcagttagtggaaggtggcacaacgcgagctgaatcggtcttaaatggtttaaatgcaattgcggaaaaaaatgcctgggtgcttgttcatgatgctgctcgcccttgtttacaacatgctgatattgataaattgttagctattgaagataaacaaggtgcgattttggcaatcccagtaacagatacgattaaacgagcggacaatcagcaatgtattgtaaaaacagaagatcgtagccagctttggcaagcaatgacaccgcagtttttcccagtagatatattaagagatgcgctttccacaggaattcaacaaggtgcgaatataacagatgaagcatcagcaatagaacttgctggatttcgaccgcacttagtggctggacgtagcgataatttaaaagtcactcgtcctgaagatttagcattagcagaattttatttaacaaggaataaattatga

SEQ ID NO: 81362 - protein, 225 aa, Haemophilus influenzae
MARSIIAVLPAAGVGSRMQADKPKQYLTLLGKTLLEHTLDVMLSYPAVSKIILAVSKDDPYISTLSLDPKIQLVEGGTTRAESVLNGLNAIAEKNAWVLVHDAARPCLQHADIDKLLAIEDKQGAILAIPVTDTIKRADNQQCIVKTEDRSQLWQAMTPQFFPVDILRDALSTGIQQGANITDEASAIELAGFRPHLVAGRSDNLKVTRPEDLALAEFYLTRNKL

SEQ ID NO: 81363 - DNA, 762 bp, Idiomarina loihiensis
  CDS (1)..(762): transl_table=11
atgaagagtgagtctgaaagccacgcacaaagccagattgattcgttaatggctgtgatccctgcggctggcagcggaagccggatgcaggctaacatccctaagcagtttctgatggtcgctaaccggactttgctggagtacagcatcgaagccgtattaaaggatgcgcgggttgaacaggttttcgttgcggtttctgactctaatgctgaataccttattgaacttaaaaagagcctgccaacaaaggttcattttgtgacaggcggcaacagccgcgctgaatccgtattggctggagttaaagttgctgtttcgcaaggggctacccatgtgctggtacatgacgcagcacgtccatgcctaccaaaaaaggcattaacagcggtcattaataccggattaaaggaccctcaaggcgcaattcttgccattccggtaagagattccttaaaacgcgctgttatctctgtcaatgatgaaaccggtgttacccatatagaatccagtgttgatcgggaggccttgtggcaggcgcagacaccacaagtttttaatgcagagcgtttacaacaagccatagagcatatgggggcattaaaccctcagttaactgatgaagcttctgctatgcagtggtgtggtttccagccggcgcttattcctggctctatccgcaacttaaaagtgactcacccggaagattttgaatgtgttcgcgactggttattagcggacaataatgatcataaaaattaa

SEQ ID NO: 81364 - protein, 253 aa, Idiomarina loihiensis
MKSESESHAQSQIDSLMAVIPAAGSGSRMQANIPKQFLMVANRTLLEYSIEAVLKDARVEQVFVAVSDSNAEYLIELKKSLPTKVHFVTGGNSRAESVLAGVKVAVSQGATHVLVHDAARPCLPKKALTAVINTGLKDPQGAILAIPVRDSLKRAVISVNDETGVTHIESSVDREALWQAQTPQVFNAERLQQAIEHMGALNPQLTDEASAMQWCGFQPALIPGSIRNLKVTHPEDFECVRDWLLADNNDHKN

SEQ ID NO: 81365 - DNA, 702 bp, Lactobacillus plantarum
  CDS (1)..(702): transl_table=11
atgatttatgcacaaatattagccggcggtaaaggaactcgtatgggcaatgttccgatgccaaagcaattcttgctgcttgccgacaaaccaatcttaatccataccatcgaaaaatttacacttgaaagtcgctttgatgccattttggtcgtctgtccagccgattgggtcagccatactgaagatatcattaaaaagtacatcaccgatgagcgcgttcacgttgtcgttggtggggccgaccgtaacgaaacactaatgagtggaatcaactatatccaagatcattacgggattcaagacgatgatgttgttgttacccatgacgcagttcggccgttcatcacacaacgtatcattaacgacaatatcgtcgccgttttagaaaataaagcagtcgatactgtcgtcccagcaatcgatacaatcgtccgcggtgctaatgatcaggtgaccgatattccggttcgttccgaaatgtatcagggtcaaacccctcaaagttttcacatcaaaatattgatcgactcatataacgcactcagctccgaacaaaaggcatcactgtctgattcatgcaaaatctgctcgctggctggtcaaaaggttagtttagtacgtggtgaaaattataattttaaaatcacaacgccgtttgacttacgcgttgcatcagcattagtagaaaagaggtcataa

SEQ ID NO: 81366 - protein, 233 aa, Lactobacillus plantarum
MIYAQILAGGKGTRMGNVPMPKQFLLLADKPILIHTIEKFTLESRFDAILVVCPADWVSHTEDIIKKYITDERVHVVVGGADRNETLMSGINYIQDHYGIQDDDVVVTHDAVRPFITQRIINDNIVAVLENKAVDTVVPAIDTIVRGANDQVTDIPVRSEMYQGQTPQSFHIKILIDSYNALSSEQKASLSDSCKICSLAGQKVSLVRGENYNFKITTPFDLRVASALVEKRS

SEQ ID NO: 81367 - DNA, 687 bp, Mannheimia succiniciproducens
  CDS (1)..(687): transl_table=11
atgactcgtcactctcgcccaatcattgcggtcgtgccggcagccggtgtcggtagccgtatgcaagccgataaaccgaaacaatatttaaccttgttgggtaaaaccttattggaacataccttagaggttttattgagctatacgcctattcagcagattattctggcggtggcggaaaacgacccttatttagaccaactggatgtaattcgccaacctaaaatcaaaattgttcaaggcggcagggatcgggcagggtcggtgtttaacgggcttaaggctattacccagcctcatgcctgggtaatggtacacgatgcggcgcgtccttgtctgactcatgaagatttggataaattactgcaaattgaagatgataacggcggcattttagccattccggcggtagataccataaagcgcgcctcggcggaaaaacagattatacaaacggaagatcgcagccagttatggcaggcgcaaacgccgcaatttttccgcgcggatttgttatatcgcgccttacaacaggcgtttgaacacggcttagcagtgaccgatgaagcctccgccatggaatttgccggatttcgaccgcacttggttgccggaagaagcgataatctgaaagtcacccgcccggaagacttaaaattagccgaattttatttgtcacgaaagtag

SEQ ID NO: 81368 - protein, 228 aa, Mannheimia succiniciproducens
MTRHSRPIIAVVPAAGVGSRMQADKPKQYLTLLGKTLLEHTLEVLLSYTPIQQIILAVAENDPYLDQLDVIRQPKIKIVQGGRDRAGSVFNGLKAITQPHAWVMVHDAARPCLTHEDLDKLLQIEDDNGGILAIPAVDTIKRASAEKQIIQTEDRSQLWQAQTPQFFRADLLYRALQQAFEHGLAVTDEASAMEFAGFRPHLVAGRSDNLKVTRPEDLKLAEFYLSRK

SEQ ID NO: 81369 - DNA, 705 bp, Methylococcus capsulatus
  CDS (1)..(705): transl_table=11
atgagcactgacgcgcgtttctggatcgtcgtccccgccgccggcgtgggcaaacggatgggggccgacatccccaaacagtacctggacgtggcgggcaaaccagtcctgcagcacacgctcgaacgcctgctctcggtccgccgcgtcaccgcggtcatggtcgcgctgggcgcgaacgacgagttctggccggagctgccctgctcacgcgagccgcgggtgctcgccacgacgggcggcagggaacgcgcagactccgtgctgagcgccctgaccgccctggccggccgggccgcggacggcgactgggtgctggtccacgacgcagcccgcctctgcgtcacccgtgacgacgtcgagcgcctcatggaaaccctggaagacgaccccgtgggcggcatcctggctctgccggtcaccgacaccctcaagacggtcgagaacggcaccatccagggctccgcagaccgcagtcgcgtctggcgcgccctcaccccccagatgttccgctaccgagcgctcaaagaggcgctggaagcagcggcacgacggggactgacggtgacggacgaagccagcgccctggagctggccggcctgtcgccgcgggtagtggaggggcgccccgacaacatcaagatcacccggccggaggacctccctttggccgccttctatctggagcgacaatgtttcgaatag

SEQ ID NO: 81370 - protein, 234 aa, Methylococcus capsulatus
MSTDARFWIVVPAAGVGKRMGADIPKQYLDVAGKPVLQHTLERLLSVRRVTAVMVALGANDEFWPELPCSREPRVLATTGGRERADSVLSALTALAGRAADGDWVLVHDAARLCVTRDDVERLMETLEDDPVGGILALPVTDTLKTVENGTIQGSADRSRVWRALTPQMFRYRALKEALEAAARRGLTVTDEASALELAGLSPRVVEGRPDNIKITRPEDLPLAAFYLERQCFE

SEQ ID NO: 81371 - DNA, 726 bp, Mycobacterium leprae
  CDS (1)..(726): transl_table=11
atggctgtggcaacgggcactgtagttgcagtggtcccggccgccggggcggggaagcggctagcggccggcattccgaaggcattctgtgaacttgacgggcgtacgcttgtcgaacgtgctgtcgttggcttgctggaatctggcgttgttgaccatgttgtggtggcggtgcctgctgatcgcattgcccagacccagtgggtgctatcccaacggctagccaattcggcgggtcaacacgccacagttgtggccggcggggccgaccgcaccaaatcggtgtgtcaggctcttgcgacccttcccgccccgtcaagggtgggcgcacccgagtttatattggtgcatgatgccgcgcgggcgctgacaccagcacggttaatcgtgcgggtggttgatgctttgcgtgctggtcataccgcggtcgttccagcgctgccactgtctgacaccattaaagccgtggacgccaacggaatggttcttggcactccggcgcgggtcggcttgcgggcggtgcagaccccgcaggggtttgctaccgagctgctatggtgcgcttatcagcgtggcccccatcttgatgccgtcgatttcaccgacgatgcttcccttgtcgaacatctcggtggccaggttcaggtggtcgccggcgatccactggcgttcaagatcaccactcagttggatctgctgctggcgaagaagattctgcgccggtga

SEQ ID NO: 81372 - protein, 241 aa, Mycobacterium leprae
MAVATGTVVAVVPAAGAGKRLAAGIPKAFCELDGRTLVERAVVGLLESGVVDHVVVAVPADRIAQTQWVLSQRLANSAGQHATVVAGGADRTKSVCQALATLPAPSRVGAPEFILVHDAARALTPARLIVRVVDALRAGHTAVVPALPLSDTIKAVDANGMVLGTPARVGLRAVQTPQGFATELLWCAYQRGPHLDAVDFTDDASLVEHLGGQVQVVAGDPLAFKITTQLDLLLAKKILRR

SEQ ID NO: 81373 - DNA, 690 bp, Neisseria meningitidis serogroup A
  CDS (1)..(690): transl_table=11
atgaagcgcaaaaatatcgcgctgattcccgccgccggcatcggggcgcgtttcggtgcggacaaacccaagcaatatgtcgaaatcggaagcaaaaccgttttagaacatacgattgggatttttgaacggcatgaggccgtcgatttgaccgtcgttgtcgtctcgcccgaagacacgtttgccgataaggttcagacggcatttccacaggttcgggtgtggaaaaacggcggacagacccgcgccgaaactgtccgcaacggtgtggcaaaattgttggaaaccggtttggcggcggaaaccgacaatattctggtacacgatgccgcgcgttgctgcctgccgtctgaagctttgacgcggttgatagaacaggcgggcaacgctgccgaaggtgggattttggcaattcccgttgccgatacgctcaagtgcgcggacggtgggaacattagtgcaaccgtcgagcggacgagcctttggcaggcgcaaacgccgcagcttttccgcgccgggctgctgcaccgcgcattggctgcggaaaacttggacggcattaccgatgaagcgtccgccgtggaaaaattgggcatccgccctttgctggtgcagggcgacgcgcgcaatttgaaactgacgcagccgcaggacgcatacatcgtcaggctgctgctcgatgccgtctga

SEQ ID NO: 81374 - protein, 229 aa, Neisseria meningitidis serogroup A
MKRKNIALIPAAGIGARFGADKPKQYVEIGSKTVLEHTIGIFERHEAVDLTVVVVSPEDTFADKVQTAFPQVRVWKNGGQTRAETVRNGVAKLLETGLAAETDNILVHDAARCCLPSEALTRLIEQAGNAAEGGILAIPVADTLKCADGGNISATVERTSLWQAQTPQLFRAGLLHRALAAENLDGITDEASAVEKLGIRPLLVQGDARNLKLTQPQDAYIVRLLLDAV

SEQ ID NO: 81375 - DNA, 690 bp, Neisseria meningitidis serogroup B
  CDS (1)..(690): transl_table=11
atgaagcgcaaaaatatcgcgctgattcccgccgccggcatcggggcgcgtttcggtgcggacaaacccaagcaatatgtcgaaatcggaagcaaaaccgttttagaacatacgattgggatttttgaacggcatgaggccgtcgatttgaccgtcgttgtcgtctcgcccgaagacacgtttgccgataaggttcagacggcatttccacaggttcgggtgtggaaaaacggcggacagacccgcgccgaaaccgtccgcaacggtgtggcaaaactgttggaaaccggtttggcggcggaaaccgacaatattctggtacacgatgccgcgcgttgctgcctgccgtctgaagctttgacgcggttgatagaacaggcgggcaacgccgccgaaggcgggattttggcaattcccattgccgatacgctcaagtgcgcggacggtgggaacattagtgcaaccgtcgagcggacgagcctttggcaggcgcaaacgccgcagcttttccgcgccgggctgctgcaccgcgcattggctgcggaaaacttggacggcattaccgatgaagcgtccgccgtggaaaaattgggtgtgcgtccgctactgatacagggcgacgtgcgcaatttgaaactgacgcagccgcaggacgcatacatcgtcaggctgctgctcgatgccgtctga

SEQ ID NO: 81376 - protein, 229 aa, Neisseria meningitidis serogroup B
MKRKNIALIPAAGIGARFGADKPKQYVEIGSKTVLEHTIGIFERHEAVDLTVVVVSPEDTFADKVQTAFPQVRVWKNGGQTRAETVRNGVAKLLETGLAAETDNILVHDAARCCLPSEALTRLIEQAGNAAEGGILAIPIADTLKCADGGNISATVERTSLWQAQTPQLFRAGLLHRALAAENLDGITDEASAVEKLGVRPLLIQGDVRNLKLTQPQDAYIVRLLLDAV

SEQ ID NO: 81377 - DNA, 708 bp, Nitrosomonas europaea
  CDS (1)..(708): transl_table=11
atggctgaattcatagcactgatcccggctgccggttccggctcgcgtatgggagaagatattcccaagcagtaccggccactggccagtaaaccgatgatttatcatgcgttgcgcaccttgtgtagcgcagagcgtattggcatggtctgtgttgtactggcacctgacgatacagaatgggcacggcatgactggagtgaatttgccggcaagatccgggtgtttggctgcggcggggcaacccgtgccgaaagcgtcaccaacgggctgaaagcattgcgtgctgagaatcatgtacaggatcaggattggatactggtacacgatgcagctcgtccagggttgagccgggcgctggttgaacgattgctcgatcagcttgcgcaggatgaaatcggtggcctgctggcagtgccgctggcagatacattaaagcgtgcagatgatactggccgggtgatgtgcactgagccgagagaacgtctgtggcaggcacaaacaccacagatgtttcgtacgaagttattacttgaagcactggaaaaagccccgacaggaattaccgatgatgccagtgccgtggaagcgctgggattctctcccaaactggtaacgggcgatgcttataacttcaaagtgacgtatccgcaggatttgaaactggctgaactgatcctgcaagagcgtaccgcaacgcagaactga

SEQ ID NO: 81378 - protein, 235 aa, Nitrosomonas europaea
MAEFIALIPAAGSGSRMGEDIPKQYRPLASKPMIYHALRTLCSAERIGMVCVVLAPDDTEWARHDWSEFAGKIRVFGCGGATRAESVTNGLKALRAENHVQDQDWILVHDAARPGLSRALVERLLDQLAQDEIGGLLAVPLADTLKRADDTGRVMCTEPRERLWQAQTPQMFRTKLLLEALEKAPTGITDDASAVEALGFSPKLVTGDAYNFKVTYPQDLKLAELILQERTATQN

SEQ ID NO: 81379 - DNA, 717 bp, Pasteurella multocida
  CDS (1)..(717): transl_table=11
atgacaacgccgattgctaaatctacacgtcgtattgttgctgttgtgcctgcggcgggcataggtagccgcatgcaaatggataaaccgaagcagtatctgcacattcatggcaaaacgatcttagaacatactttatctgtgctgttaggttatccattaattgaaaaaattattttagcggtggcagcaaacgatccctatatttccacttgccctttattaacacacccgaaaattcagctggtcgaagggggcagcagtcgtgctgactcagtgctcaatgggcttaacgcggtcaaaagtgcggtacaaaatagcgaagatttttgggtgatggtgcatgatgcggcacgcccttgtttaacacatcaagatttagataaattggtgcaagtggaagatcaaaacggggcgattctggctattcccgccaccgataccattaaacgtgctttacacaatcagcaaattcattataccgaagatcgctcgcaactttggctagcgcagacgccacaattttttcccatagcaaccttagcacaagccttagaacaggcattggcgcaaggtttacaggtgacggatgaagcctctgccatggaatttgctggatttcgaccgcacttagtggcagggcgaagcgataatattaaagtgacccgtccagaagatttcgcgttagcagaattttatttaagcagaacaaaatag

SEQ ID NO: 81380 - protein, 238 aa, Pasteurella multocida
MTTPIAKSTRRIVAVVPAAGIGSRMQMDKPKQYLHIHGKTILEHTLSVLLGYPLIEKIILAVAANDPYISTCPLLTHPKIQLVEGGSSRADSVLNGLNAVKSAVQNSEDFWVMVHDAARPCLTHQDLDKLVQVEDQNGAILAIPATDTIKRALHNQQIHYTEDRSQLWLAQTPQFFPIATLAQALEQALAQGLQVTDEASAMEFAGFRPHLVAGRSDNIKVTRPEDFALAEFYLSRTK

SEQ ID NO: 81381 - DNA, 705 bp, Photobacterium profundum
  CDS (1)..(705): transl_table=11
atgactcaacagcttaccgcagttgttcctgctgctggtattggtagccgtatggctgctgatcgccctaagcaatatttacatatcgcgggtaaaacaattttagaacacacgattgatcgtttgtttagtcaccccgccattacacgagtgattattgcgattagccaaacagatccctattttgcttcactgccactggctaacgacccacgtataaccgtggttgatggtggtgccgagcgtgcagattctgtgtttgctggtttagccgcgattgatgatgaaaatacttgggtgttggttcatgatgctgctcgtccttgtgtgcggcttaatgatttagaacggcttgttgaggcggcgatacgcagtgacagtggagcgatccttgcggctccggttcgcgatacaatgaagcgaggttgccagcaaattaatgggctgcagggcattgtatcaacggttgatcgcaataatctttggcatgcccttacaccgcaaatgtttaaagtgaagcaactaaaagattcattacagcatgcactcaaagaaggtgcggttattaccgacgaggcgtcggctctggagtattgtgggtatatcccacagctagtaaaagggcgttcagataaccttaaggtgacccaacctgaagatttagccttggctggtttctacttagaacaattaatgaaggaataa

SEQ ID NO: 81382 - protein, 234 aa, Photobacterium profundum
MTQQLTAVVPAAGIGSRMAADRPKQYLHIAGKTILEHTIDRLFSHPAITRVIIAISQTDPYFASLPLANDPRITVVDGGAERADSVFAGLAAIDDENTWVLVHDAARPCVRLNDLERLVEAAIRSDSGAILAAPVRDTMKRGCQQINGLQGIVSTVDRNNLWHALTPQMFKVKQLKDSLQHALKEGAVITDEASALEYCGYIPQLVKGRSDNLKVTQPEDLALAGFYLEQLMKE

SEQ ID NO: 81383 - DNA, 669 bp, Porphyromonas gingivalis
  CDS (1)..(669): transl_table=11
atggagcaaaaacgctatgctctgatcgtagccggtggtcatgggctacgtatgggggccgatcggccaaaacagtttttgcttttggccggtctaccggtgctgatgcatacgctgaatcgctttgcccctcatgtcgatgctattgtattggtattgcccacagatcatcatgcttattggcaggaattgtgccggaagtatgacttttcggtctctcatcgagtggttgcaggtggaaatacacgtttcgcctctgttcggaatggattgcaggttgtccctgatggtgttttggttgctgttcatgacggggtacgtcctttggtcagtgctgaaactatcgatgcctgtttcgatcttgcagagttgaagggggctgtcgctccttgtcgccctatgaccgaatcgcttcgctattatgccactgatggcaattatgcagtggacaggagtcggtacgtcacggtacaaactccacagacctttcggagcgaatggcttcgagaggcctatcggcaaccctatgaagagtattttaccgatgattgttcggtatatgaacaccattttggccgaccggtggcattgattgtcggtaatatcgaaaatatcaaattgactactcctctcgatctatcccttgccaaactgttattgacatcctaa

SEQ ID NO: 81384 - protein, 222 aa, Porphyromonas gingivalis
MEQKRYALIVAGGHGLRMGADRPKQFLLLAGLPVLMHTLNRFAPHVDAIVLVLPTDHHAYWQELCRKYDFSVSHRVVAGGNTRFASVRNGLQVVPDGVLVAVHDGVRPLVSAETIDACFDLAELKGAVAPCRPMTESLRYYATDGNYAVDRSRYVTVQTPQTFRSEWLREAYRQPYEEYFTDDCSVYEHHFGRPVALIVGNIENIKLTTPLDLSLAKLLLTS

SEQ ID NO: 81385 - DNA, 678 bp, Prochlorococcus marinus
  CDS (1)..(678): transl_table=11
atgcatctgttgattgtcgctgcaggtagcggaagccgtatgggagcggatcgcaacaaattgcttttgcctctggcaggacgccctgttcttgcctggacgattgatgcggtgatggaagccgattcgatcacttgggttggcattgttggccaacctgtggaccgagcaatgatcatggagttgttggctgaggccgccaaacccgtcgtttggattgaggggggcagcacaaggcaggaatccgtagagcgtggattacaggcgttgccttcagttgcgcagcatgttcttattcatgatggggctagatgtttagctgaagcggctttgatcaatcgctgtgctgaggcggtggtggctggcgcagcggtgattgcggcaactccggttaccgacacgatcaagcgcgttgatggtcaagggatcattacgggcacaccagatcgtgcggaactatgggcagcccagactccgcagggctttgctgtggagcagctcaagcaaggtcatgctgaggctcaggccaagggttggacagtgactgacgacgcctcgctttatgaacgcctgggatggccggtgcaggtgctggaggccagccctgccaatatcaaagtcacaactccgtttgatctcaccgtagccgaggcagtgattgcactgagagcaaactag

SEQ ID NO: 81386 - protein, 225 aa, Prochlorococcus marinus
MHLLIVAAGSGSRMGADRNKLLLPLAGRPVLAWTIDAVMEADSITWVGIVGQPVDRAMIMELLAEAAKPVVWIEGGSTRQESVERGLQALPSVAQHVLIHDGARCLAEAALINRCAEAVVAGAAVIAATPVTDTIKRVDGQGIITGTPDRAELWAAQTPQGFAVEQLKQGHAEAQAKGWTVTDDASLYERLGWPVQVLEASPANIKVTTPFDLTVAEAVIALRAN

SEQ ID NO: 81387 - DNA, 705 bp, Pseudomonas aeruginosa
  CDS (1)..(705): transl_table=11
atgacgacttccgaccttcccgccttctggacggtgatccccgccgccggcgtgggttcgcgcatgcgcgccgaccgcccgaagcaatatctcgatcttgccggtcgcaccgtgatcgagcgtaccctcgattgtttcctcgaacacccgatgctcaggggcctggtggtctgcctggccgaggacgatccctactggcccgggctggactgcgccgccagccggcatgtgcagcgcgccgccgggggcgccgagcgcgccggctcggtgttgaacggcttgctgcgcctgctggagttgggggcacaggccgacgactgggtgctggtgcatgacgccgcgcggccgaacctgacccgcggcgacctcgaccgcctgctcgaagaactcgccgaagatccggtcggcgggctgctggcggtgccggcgagggacactctcaagcgctccgaccgcgacggccgggtcagcgaaaccatcgaccgctcggtggtctggctggcctatacgccgcagatgttccgcctcggcgccctgcaccgggcgctggccgatgcgttggtggccggcgtggcgatcaccgacgaggcttcggcgatggagtgggccggctatgcgccgaagctggtggaagggcgcgccgacaacctgaagatcaccaccccggaagacctgctgcgcctgcagcgcagttttccgcactga

SEQ ID NO: 81388 - protein, 234 aa, Pseudomonas aeruginosa
MTTSDLPAFWTVIPAAGVGSRMRADRPKQYLDLAGRTVIERTLDCFLEHPMLRGLVVCLAEDDPYWPGLDCAASRHVQRAAGGAERAGSVLNGLLRLLELGAQADDWVLVHDAARPNLTRGDLDRLLEELAEDPVGGLLAVPARDTLKRSDRDGRVSETIDRSVVWLAYTPQMFRLGALHRALADALVAGVAITDEASAMEWAGYAPKLVEGRADNLKITTPEDLLRLQRSFPH

SEQ ID NO: 81389 - DNA, 708 bp, Pseudomonas fluorescens
  CDS (1)..(708): transl_table=11
atgagcgacgtattgccggccttctgggccgtgattcctgccgcgggcgttggtgcccgcatggccgcggaccgccccaagcagtacctgcaactgggtggacgcacaattcttgaacacagcctgggctgctttctcgaccaccccggcctcaaggggctggtggtcagcctggcggttgatgatccttactggccggccctggcttgcgcccatgattcgcggatccagcgggtcgaaggtggtgctgagcgttccggctcggtgctcaatgccttgctccatctgcatgcccagggcgcagccgatgacgactgggtgctggttcacgatgccgcccggcccaatctttcccgggatgacctggacaaactgctgggtgagttgatggatgacccggtgggggggctgctcgcagttccggcccgggacaccctgaaacgtgtggacaagcacggtcgagtgctggaaaccgttgaccgcagtttgatctggcaagcctacacaccgcagatgttccgcctcggtgccctgcatcgggccctggccgacagcctggtggccgatgtggcgattaccgatgaagcttcggcgatggaatgggccggccaggcgccgcgcctgatcgaaggccgctcggataacctcaaggtcacccgtcccgaagacctggaatggttgcgccagcgctggtccaaccgccgctga

SEQ ID NO: 81390 - protein, 235 aa, Pseudomonas fluorescens
MSDVLPAFWAVIPAAGVGARMAADRPKQYLQLGGRTILEHSLGCFLDHPGLKGLVVSLAVDDPYWPALACAHDSRIQRVEGGAERSGSVLNALLHLHAQGAADDDWVLVHDAARPNLSRDDLDKLLGELMDDPVGGLLAVPARDTLKRVDKHGRVLETVDRSLIWQAYTPQMFRLGALHRALADSLVADVAITDEASAMEWAGQAPRLIEGRSDNLKVTRPEDLEWLRQRWSNRR

SEQ ID NO: 81391 - DNA, 708 bp, Pseudomonas fluorescens
  CDS (1)..(708): transl_table=11
atgatcgattccctgccggccttctgggccgtgattcctgccgcgggcgtcggtgcccgaatggccgcggaccgtcccaagcaatacctgcaactgggcgggcgcacaattctcgaacacagcctcggctgtttcctcgatcacccgagcctcaagggcctggtggtcagtcttgccgtcgatgatccttattggccgaacctggccagcgccagtgatccgcgaattcaacgggtcgacggtggcaccgaacgttccggctcggtactcaatgccttgctgcatctgcacgcccaaggtgccgacgacgaggactgggtgctggtgcacgatgcggcgcggcccaatctgagccgtgacgatctcgacaaattgctcgctgagctggcgaacgatccggtcggtggtttgctggctgtgccggcgaaggacactctcaagcgggtcgacaagcacggtcgggtggtggaaaccgtcgatcgcagtgtgatctggcaagcctatacgccgcagatgttccgcctcggtgcgctgcaccgggctttggccgacagtctcgtggcggttgcagtcatcaccgatgaagcttcggcgatggagtgggctggcatggcgccgcgtctgatcgagggccgcgcggataacttgaaagtcacccgccccgaagacctcgaatggttgcgtcagcgctggaccaaccgtcgttaa

SEQ ID NO: 81392 - protein, 235 aa, Pseudomonas fluorescens
MIDSLPAFWAVIPAAGVGARMAADRPKQYLQLGGRTILEHSLGCFLDHPSLKGLVVSLAVDDPYWPNLASASDPRIQRVDGGTERSGSVLNALLHLHAQGADDEDWVLVHDAARPNLSRDDLDKLLAELANDPVGGLLAVPAKDTLKRVDKHGRVVETVDRSVIWQAYTPQMFRLGALHRALADSLVAVAVITDEASAMEWAGMAPRLIEGRADNLKVTRPEDLEWLRQRWTNRR

SEQ ID NO: 81393 - DNA, 708 bp, Pseudomonas putida
  CDS (1)..(708): transl_table=11
atgatcgatatcttgccggccttctgggccgtgatccctgcggcgggtgtaggtgcccgcatggctgccgaccgccccaagcaatacctggagctggctgggcagacccttctcgagcacagcctcgactgttttcttggccacccggcgctcaagggcgtggtggtcagcattgccgaagatgacccgtactggcctggcctgcgctgcgccagcgacccacgcatccactgcgcggcgggcgggcgtgaacgcgctgactcggtgcttaacgccttgctggtgctgcatgcccagggggcggcggacagcgactgggtgctggtgcacgatgctgcgcggccgaacctggcgcgcagcgacctggacaagctgttgtcggagctggcggacgacccggtgggtggcctgctggcggtgccggcgcgcgacaccctcaagcgtgccgacagccatggccgggtgagtgctaccgtggaccgcagcaccatctggcaggcgtacacaccgcagatgttccgccttggagcgttgcatcgggcgctggctgagtgcctggtgtcggatgtggtggtgaccgacgaagcctcggccatcgaatggtccggtcaggcgccgcggctggtggaagggcgcagtgacaacataaaggtgacccggcccgaagatctcgaatggttgcgccagcgctgggcgggtaaacgctga

SEQ ID NO: 81394 - protein, 235 aa, Pseudomonas putida
MIDILPAFWAVIPAAGVGARMAADRPKQYLELAGQTLLEHSLDCFLGHPALKGVVVSIAEDDPYWPGLRCASDPRIHCAAGGRERADSVLNALLVLHAQGAADSDWVLVHDAARPNLARSDLDKLLSELADDPVGGLLAVPARDTLKRADSHGRVSATVDRSTIWQAYTPQMFRLGALHRALAECLVSDVVVTDEASAIEWSGQAPRLVEGRSDNIKVTRPEDLEWLRQRWAGKR

SEQ ID NO: 81395 - DNA, 762 bp, Ralstonia solanacearum
  CDS (1)..(762): transl_table=11
atgtccgtttcctcccgtcccggccgacgccggtttgcgctgatcccgtccgccggcaccggcacgcgtgccggcggcgatctgcccaagcagtaccagcccctcgctggccgcccgatgctgtggcataccgtgcaggccttcctggccagcgcggcgatcgaccgggtggtggtggtgacttcgccgggcgcgccggcgctggcggcgcgctttcccggcctgggtttcgacgcggcccggctggtggaggtcgattgcggcggcgattcgcgccatgcctcggtcaccaacggcctggcggcgctgcgtggcctcggcgcgcacgaagacgactgggtgctcgtgcacgatgccgcccgcccgggcctcacgcctgccctgatcgcgcggctggtcggcgccgtcgaggccgacggcgggcaggcggtcggcggcatcctggcgctgccggtagccgatacgctcaagcgcgccgatgccgggcagcacatcgccgagaccgtgccgcgcggcggcctgtggcaggcgcagacgccgcagatgtttccgctcggcctgctgcagcgcgccctgtcggaggccctgaccgcgcagcgcatcgtcaccgatgaggccagcgccatcgaggccgccggtcaccggcccttgctggtggccggcgcgctgcgcaacttcaaggtgacttatcccgacgatttcgcgctcgccgaggccatcctcgcgggcgccgcaccgacccaggaggattcgcaagcatga

SEQ ID NO: 81396 - protein, 253 aa, Ralstonia solanacearum
MSVSSRPGRRRFALIPSAGTGTRAGGDLPKQYQPLAGRPMLWHTVQAFLASAAIDRVVVVTSPGAPALAARFPGLGFDAARLVEVDCGGDSRHASVTNGLAALRGLGAHEDDWVLVHDAARPGLTPALIARLVGAVEADGGQAVGGILALPVADTLKRADAGQHIAETVPRGGLWQAQTPQMFPLGLLQRALSEALTAQRIVTDEASAIEAAGHRPLLVAGALRNFKVTYPDDFALAEAILAGAAPTQEDSQA

SEQ ID NO: 81397 - DNA, 732 bp, Rhodopirellula baltica
  CDS (1)..(732): transl_table=11
atgaactgcgctgcttccgtttctgtgatcatgcccgctgctggcagcgggcaacgctttggcagccagtccaacaagctgttcgcacacctggacggcaaaccgctttggcaacacgccattgatcgcttccaacatcgcggcgacgttcggcaaatcgtcctggcggtctccgaagaagacgagtccaggtttcgtgaacaaatcgcggccatctcttccgccgttccgatccacctcgttcgaggcggcgcaacacgcagcgaaagcgttggtgcggcattggaacaagtgaaacgatttgcagccgaatccgctgcggccaatgcatccacgcagacgctagtcgccattcatgacgcagcacgacccttggtccgccaatctgacctggaccgggtcatcgccaaggcggctgaaaccggcgccgccatcctcgccgctcccgtctcaggaacgctcaaacgagccacgggcgatggatcggaaacagtcgatcgccgcaacacctacgtcgcgctgactccccaggtgttcgcgatcgacgtcatttgtcaagcttacgctcgcgatcgaggccgcatggccacggacgacgcccaactggtcgagcgaacctctcacccggttcagcttgtcactggttccgctgacaacttgaaaattaccttccccgaagatctccgcatcgcggaggcgatcctgaacgagtgccgaagcgaattcgtatga

SEQ ID NO: 81398 - protein, 243 aa, Rhodopirellula baltica
MNCAASVSVIMPAAGSGQRFGSQSNKLFAHLDGKPLWQHAIDRFQHRGDVRQIVLAVSEEDESRFREQIAAISSAVPIHLVRGGATRSESVGAALEQVKRFAAESAAANASTQTLVAIHDAARPLVRQSDLDRVIAKAAETGAAILAAPVSGTLKRATGDGSETVDRRNTYVALTPQVFAIDVICQAYARDRGRMATDDAQLVERTSHPVQLVTGSADNLKITFPEDLRIAEAILNECRSEFV

SEQ ID NO: 81399 - DNA, 678 bp, Rhodobacter sphaeroides
  CDS (1)..(678): transl_table=11
atgacgacagccgcaatcatcgtcgccgccggacgcggcacacgcgcgggcggagacctgccgaaacagtggcagccgctggcgggccggccggtgctggcccatacgctggcggccttccgggccgcggccggggtgagccgcaccctcctcgtcatccaccctgacgaccgcgcccgggctgaagcgcttccgggcgtggccgagggcaaggtcgaactcgtcgagggcggcgcctcgcgcgacgcctcggtgcgcaatgcgctcgaggcgctggccggggcaggaatcgagcgggtgctgatccatgacggcgcgcgccccctcgtggcgcccgaactgatcgcgcgcacgctcgccgccctcgagacggcgccgggcgccgcgcccgccgtgcccgtctcggatgcgctctggcgcggcgaaggcggccgcgtcgtgggcacgcaggaccgcaccggcctctttcgcgcgcagaccccgcaggccttccgctatgaggcgatccttgccgcccaccgcgcccatcccggcggggccgccgacgatgtcgaggtggcccgcgcggccgggctcgaggtggccatcgtcgagggctgcgaggacaatctgaaagtgacttatcccggcgatttcgcgcgggccgagcggctgctcgcgcttgcggccgggctctga

SEQ ID NO: 81400 - protein, 225 aa, Rhodobacter sphaeroides
MTTAAIIVAAGRGTRAGGDLPKQWQPLAGRPVLAHTLAAFRAAAGVSRTLLVIHPDDRARAEALPGVAEGKVELVEGGASRDASVRNALEALAGAGIERVLIHDGARPLVAPELIARTLAALETAPGAAPAVPVSDALWRGEGGRVVGTQDRTGLFRAQTPQAFRYEAILAAHRAHPGGAADDVEVARAAGLEVAIVEGCEDNLKVTYPGDFARAERLLALAAGL

SEQ ID NO: 81401 - DNA, 711 bp, Salmonella paratyphi
  CDS (1)..(711): transl_table=11
atggcagccactttattggacgtttgcgccgtggtgccggcggccggatttggccgccgaatgcaaacagaatgtcctaagcagtatctctcaatcggtaataaaaccattctggagcactcagttcatgcgctgctggcgcatcctcgggtgacacgcgttgttattgctatcagccctggcgatcatcgctttgcccaacttccgctggcgaatcatccgcaaatcaccgttgtggatggcggcaacgaacgcgctgattccgttttggccgggttacaggccgttgcaaaggcgcagtgggtgctggtgcacgacgcggcaagaccctgtttgcatcaggatgacctggcgcggttactggccatcagcgaaaacagccgggtcggcggtatcctcgccagtccggtgcgcgacaccatgaaacgcggcgaaccagggaaaaccgctattgcccataccgtagagcgcgccgatttatggcacgcgctcaccccgcagtttttcccccgcgaactcttgcacgattgtctgacgcgtgcgctgaatgaaggcgcgatcatcaccgacgaggcgtcagcgctggagtattgtggttttcatccggcgctggtagaaggtcgcgcggataacatcaaggtcacccgtccggaagatctggcgctggcggaattttatctgacccgaaccatccaccaggagaaagcataa

SEQ ID NO: 81402 - protein, 236 aa, Salmonella paratyphi
MAATLLDVCAVVPAAGFGRRMQTECPKQYLSIGNKTILEHSVHALLAHPRVTRVVIAISPGDHRFAQLPLANHPQITVVDGGNERADSVLAGLQAVAKAQWVLVHDAARPCLHQDDLARLLAISENSRVGGILASPVRDTMKRGEPGKTAIAHTVERADLWHALTPQFFPRELLHDCLTRALNEGAIITDEASALEYCGFHPALVEGRADNIKVTRPEDLALAEFYLTRTIHQEKA

SEQ ID NO: 81403 - DNA, 711 bp, Salmonella typhimurium
  CDS (1)..(711): transl_table=11
atggcagccactttattggacgtttgcgccgtggtgccggcggccggatttggccgccgaatgcaaacagaatgtcctaagcagtatctctcaatcggtaataaaaccattctggagcactcagttcatgcgctgctggcgcatcctcgggtgacacgcgttgttattgctatcagccctggcgatcatcgctttgcccaacttccgctggcgaatcatccgcaaatcaccgttgtggatggcggcaacgaacgcgctgattccgttttggccgggttacaggccgttgcaaaggcgcagtgggtgctggtgcacgacgcggcaagaccctgtttgcatcaggatgaccttgcgcggttgctggctatcagcgaaaacagccgggtcggcggtatcctcgccagtccggtgcgcgacaccatgaaacgcggcgaaccggggaagaacgctattgcccataccgtagagcgcgccgatttatggcacgcgctcaccccgcagtttttcccccgcgaactcttgtacgattgtctgacgcgtgcgctgaatgaaggcgcgaccatcaccgacgaagcgtcagcgctggaatattgtggttttcatccggcgctggtagaaggtcgcgcggataatatcaaggtcacccgtccggaagatctggcgctggcggaattttatctgacccgaaccatccaccaggagaaagcataa

SEQ ID NO: 81404 - protein, 236 aa, Salmonella typhimurium
MAATLLDVCAVVPAAGFGRRMQTECPKQYLSIGNKTILEHSVHALLAHPRVTRVVIAISPGDHRFAQLPLANHPQITVVDGGNERADSVLAGLQAVAKAQWVLVHDAARPCLHQDDLARLLAISENSRVGGILASPVRDTMKRGEPGKNAIAHTVERADLWHALTPQFFPRELLYDCLTRALNEGATITDEASALEYCGFHPALVEGRADNIKVTRPEDLALAEFYLTRTIHQEKA

SEQ ID NO: 81405 - DNA, 750 bp, Shewanella oneidensis
  CDS (1)..(750): transl_table=11
atggatatcgtcttagaagccacgtcgcaaaccgaaacacaagttgctgttcaacttgaacctttatcgtccaatgtggtggctattgttcccgccgcagggattggtagtcgcatgggggctggtaaacccaagcaatatttacctttattgggccaaagcattttggcgcatacgttagacaaattattgtcccatccgctaattagccaagtgattgttgcgctgcatccagaggatgctgacttttatgcattacctcaggccaagcatcctaaactcaaaactgtgattggcggttctgagcgcgccaactcagtactcgcggcccttgataaggcgcctgacaatagctgggctttagttcacgatgcggcaagaccctgcttgatggcgagtgatattgataaattgctgacatcgagggtgcaatttccccaaggggcgattttggccatgccagtgcgagatactatgaagcgcgccaatagcttaggtgaaatcaactcgaccgtgtgccgcgataatctctggcatgcattgacgccgcaattgtttccaacgtcactattgcgattacatctacagggcgcactaaacgccggcgctgtggtaaccgatgaagcctcggcaatggaatgggctggcatttctcccggattggttgctggacgggcggataatatcaaagtcactcatcccgatgatttagaattggcagagctttttttaatgcgcgctaaggcttga

SEQ ID NO: 81406 - protein, 249 aa, Shewanella oneidensis
MDIVLEATSQTETQVAVQLEPLSSNVVAIVPAAGIGSRMGAGKPKQYLPLLGQSILAHTLDKLLSHPLISQVIVALHPEDADFYALPQAKHPKLKTVIGGSERANSVLAALDKAPDNSWALVHDAARPCLMASDIDKLLTSRVQFPQGAILAMPVRDTMKRANSLGEINSTVCRDNLWHALTPQLFPTSLLRLHLQGALNAGAVVTDEASAMEWAGISPGLVAGRADNIKVTHPDDLELAELFLMRAKA

SEQ ID NO: 81407 - DNA, 711 bp, Shigella flexneri
  CDS (1)..(711): transl_table=11
atggcaaccactcatttggatgtttgcgccgtggttccggcggccggatttggccgtcgaatgcaaacggaatgtcctaagcaatatctctcaatcggtaatcaaaccattcttgaacactcggtgcatgcgctgctggcgcatccccgggtgacacgtgtcgtcattgccataagtcctggcgatagccgttttgcacaacttcctctggcgaatcatccgcaaatcaccgttgtagatggcggtgatgagcgtgccgattccgtgctggcaggtctgaaagccgctggcgatgtgcagtgggtattggtgcatgacgccgctcgtccttgtttgcatcaggatgaccttgcgcgattgttggcgttgagcgaaaccagccgcacgggagggatcctcgccgcaccagtgcgcgatactatgaaacgtgccgaaccgggcaaaaatgccattgctcataccgttgatcgcaacggcttatggcacgcgctgacgccgcaatttttccctcgtgagctgttacatgactgtctgacgcgcgctctaaatgaaggcgctaccattaccgacgaagcctcggcgctggaatattgcggatttcatccgcagttggtcgaaggccgcgcggataacattaaagtcacgcgcccggaagatttggcactggccgagttttacctcacccgaaccatccatcaggagaatacataa

SEQ ID NO: 81408 - protein, 236 aa, Shigella flexneri
MATTHLDVCAVVPAAGFGRRMQTECPKQYLSIGNQTILEHSVHALLAHPRVTRVVIAISPGDSRFAQLPLANHPQITVVDGGDERADSVLAGLKAAGDVQWVLVHDAARPCLHQDDLARLLALSETSRTGGILAAPVRDTMKRAEPGKNAIAHTVDRNGLWHALTPQFFPRELLHDCLTRALNEGATITDEASALEYCGFHPQLVEGRADNIKVTRPEDLALAEFYLTRTIHQENT

SEQ ID NO: 81409 - DNA, 717 bp, Staphylococcus epidermidis
  CDS (1)..(717): transl_table=11
atgatttatgcgggtatattagcaggtggtattggttctagaatgggaaatgttccattacccaaacaatttttattattacaaggaaaacctattattattcatacagtagaaaaatttttaatgtataaggactttgatgaaatcattattgccacgcctcaaaagtggatcaattatatgcacgatttgctaaacaattatcgattagacgataagaaaataaaagtaatacaaggcggcgacgacagaaatcacactataatgaatattatagaaagcattgagcaacataaaaaattaaatgatgaagatatcatcgttacccatgatgcagttagaccatttctaacaaatcgaattattagagagaatgtggaatatgctagtcaatatggcgctgtagatacggttgttaatgctgttgatactatcatttcttcaaatgatgcacaatttatttctgagattccaattagaagtgagatgtatcaaggacagacgcctcaaacttttaaaataaaagagttaaaggatagctatttatcgttaactcaatctcaaaaggaaatattaactgacgcgtgtaaaatactcgtagaattgggtaagccagtaaaattagtcaaaggagagttatttaacataaaaattacaacaccatatgatttaaaagttgcgaattcaattattactggagctgttgataatgattaa

SEQ ID NO: 81410 - protein, 238 aa, Staphylococcus epidermidis
MIYAGILAGGIGSRMGNVPLPKQFLLLQGKPIIIHTVEKFLMYKDFDEIIIATPQKWINYMHDLLNNYRLDDKKIKVIQGGDDRNHTIMNIIESIEQHKKLNDEDIIVTHDAVRPFLTNRIIRENVEYASQYGAVDTVVNAVDTIISSNDAQFISEIPIRSEMYQGQTPQTFKIKELKDSYLSLTQSQKEILTDACKILVELGKPVKLVKGELFNIKITTPYDLKVANSIITGAVDND

SEQ ID NO: 81411 - DNA, 717 bp, Staphylococcus epidermidis
  CDS (1)..(717): transl_table=11
atgatttatgcgggtatattagcaggtggtattggttctagaatgggaaatgttccattacccaaacaatttttatcattacaaggaaaacctattattattcatacagtagaaaaatttttaatgtataaggactttgatgaaatcatcattgccacgcctcaaaagtggatcaattatatgctcgatttgctaaacaattatcaattagacgataagaaaataaaagtaatacaaggcggagacgaccgaaatcactctataatgaatattatagaaagcattgagcaacataaaaaattaaatgatgaagatataatcgttacccatgatgcagttaggccatttctaacaaatcgaattattagagagaatgtggaatatgccagtcaatatggtgcagtagatacggttgttaatgctgttgatactatcatttcttcaaatgatgcacaatttatttctgggattccaataagaagtgagatgtatcaaggacagacgcctcaaacttttaaaataaaagagttaaaggatagctatttatcgttaactcaatctcaaaaggaaatattaactgacgcgtgtaaaatactcgtagaattgggtaagccagtaaaattagtcaaaggagagttatttaacataaaaataacaacaccatatgatttaaaagttgcgaattcaattattactggagctgttgataatgattaa

SEQ ID NO: 81412 - protein, 238 aa, Staphylococcus epidermidis
MIYAGILAGGIGSRMGNVPLPKQFLSLQGKPIIIHTVEKFLMYKDFDEIIIATPQKWINYMLDLLNNYQLDDKKIKVIQGGDDRNHSIMNIIESIEQHKKLNDEDIIVTHDAVRPFLTNRIIRENVEYASQYGAVDTVVNAVDTIISSNDAQFISGIPIRSEMYQGQTPQTFKIKELKDSYLSLTQSQKEILTDACKILVELGKPVKLVKGELFNIKITTPYDLKVANSIITGAVDND

SEQ ID NO: 81413 - DNA, 720 bp, Streptococcus agalactiae serotype III
  CDS (1)..(720): transl_table=11
atgaatattggagttatttttgcaggtggtgttggtcgtcgcatgaataccaaaggtaaaccaaagcaattcctagaagtgcatggtaaacccattattgtacacacaattgatattttccaaaatacagaagctattgatgctgtagtagttgtctgtgtatcagactggctagattatatgaataatctggtagagcgtttcaaccttacgaaagtaaaagcagttgttgcaggtggagaaactggccaaatgtcaatttttaaggggcttgaagccgctgaacagctggctacagatgatgccgttgttttaattcatgacggagtacgtccattgattaatgaagaagttattaatgctaatataaagtcagtaaaagaaacaggaagtgcggtaacttcagttcgtgctaaagagacagttgttctagtcaatgattcttctaaaatatctgaagttgttgatcgtactcgttccttcattgctaaagcgccacaaagtttttatctatcagatatcctttctgttgaacgtgatgccattagcaaagggattactgatgcaattgattctagtactttgatgggtatgtacaatcgtgaactcactattgttgagggaccatatgaaaatatcaagataacaacaccagatgatttttatatgtttaaagctttgtatgatgctagagaaaatgaacaaatttatgggatgtaa

SEQ ID NO: 81414 - protein, 239 aa, Streptococcus agalactiae serotype III
MNIGVIFAGGVGRRMNTKGKPKQFLEVHGKPIIVHTIDIFQNTEAIDAVVVVCVSDWLDYMNNLVERFNLTKVKAVVAGGETGQMSIFKGLEAAEQLATDDAVVLIHDGVRPLINEEVINANIKSVKETGSAVTSVRAKETVVLVNDSSKISEVVDRTRSFIAKAPQSFYLSDILSVERDAISKGITDAIDSSTLMGMYNRELTIVEGPYENIKITTPDDFYMFKALYDARENEQIYGM

SEQ ID NO: 81415 - DNA, 753 bp, Streptomyces avermitilis
  CDS (1)..(753): transl_table=11
atgtctgacgattcgcgcccctcgccgtcgggtgcacgtaccgcggccgtgattccggccgccggacggggcgtacgcctcggtcccggcgcccccaaagcgctccgcgcgctgaacggcacgcccatgctcatccacgcggtacgcgcgatggccgcgtcccgtgccgtctccctcgtggtcgtcgtggccccgcccgacggcaccgccgaggtcaagtcgctgctcgacgcgcacgcactgcccgagcgcacggatttcgtcgtcgtcccgggcggtgagtcccgccaggagtccgtgaagctcggcctcgacgcgctgccgcccggcatcgacatcgtgctcgtgcacgacgcggcccgcccgctggtccccgtcgacacggtagacgcagtgatcgaggcggtacgggacggcgcgcccgcggtcgtcccggcgctgccgctcgccgacaccgtcaagcaggtcgagcccgcggccgtgcccggggagcccgagcccgtcgtcgccacgcccgagcgggcccggctgcgtgccgtccagaccccgcagggcttcgaccgcgacacgctggtccgcgcccacgagaccgtcaccgacaacgtcaccgacgacgcgagcatggtcgagcagctcggtgcccgggtcgtggtcgtgcccggtcacgaggaggcgttcaaggtgacacgccccctggatctcgtgctcgccgaggcggttctcgcccgcaggaggctgaacgatggcttctga

SEQ ID NO: 81416 - protein, 250 aa, Streptomyces avermitilis
MSDDSRPSPSGARTAAVIPAAGRGVRLGPGAPKALRALNGTPMLIHAVRAMAASRAVSLVVVVAPPDGTAEVKSLLDAHALPERTDFVVVPGGESRQESVKLGLDALPPGIDIVLVHDAARPLVPVDTVDAVIEAVRDGAPAVVPALPLADTVKQVEPAAVPGEPEPVVATPERARLRAVQTPQGFDRDTLVRAHETVTDNVTDDASMVEQLGARVVVVPGHEEAFKVTRPLDLVLAEAVLARRRLNDGF

SEQ ID NO: 81417 - DNA, 813 bp, Streptomyces coelicolor
  CDS (1)..(813): transl_table=11
atgtctgacgaatcgcgtccctcacccgccgaaacgcctgcgacgacgttcgcggagacatccgcggagacgtccgccgcgggccgttcgcccgccaggaccgccgccgtgattccggcggcgggccggggagtgcggctcggtccgggcgcccccaaggccctgcgcgcgctgggcggcacgccgatgctcatccacgcggtccgggcgatggccgcctcccgcgcggtctccctcgtcgtggtcgtcgccccgcccgacggcgcgggcgaggtcaagagcctcctcgacgcgcacgcgctgcccgagaggacggacttcgtcgtggtgcccggcggcgagacccggcaggagtcggtacggctcggcctggacgcgctgccgcccgagtacggcatcgtcctcgtgcacgacgcggcccggccgctggtgccggtggacacggtggacgcggtgatcgacgccgtacgggagggggcgcccgcggtggtgccggcggtgccgctcgccgacaccgtcaagcaggtcgagcccgcggcggcgccgggcgagccggagccggtggtggccacgcccgagcgggcgcggctgcgcgcggtgcagaccccgcagggtttcgaccgcgcgacgctggtgcgggcccacgggacggtgaccgacgacgtcaccgacgacgcgagcatggtcgagcagctgggtctcgcggtggtggtggtgccggggcacgaggaggcgttcaaggtgacgcgcccgctcgacctggtgctcgcggaggcggtactggcgcgcaggaggctgaacgatgggttctga

SEQ ID NO: 81418 - protein, 270 aa, Streptomyces coelicolor
MSDESRPSPAETPATTFAETSAETSAAGRSPARTAAVIPAAGRGVRLGPGAPKALRALGGTPMLIHAVRAMAASRAVSLVVVVAPPDGAGEVKSLLDAHALPERTDFVVVPGGETRQESVRLGLDALPPEYGIVLVHDAARPLVPVDTVDAVIDAVREGAPAVVPAVPLADTVKQVEPAAAPGEPEPVVATPERARLRAVQTPQGFDRATLVRAHGTVTDDVTDDASMVEQLGLAVVVVPGHEEAFKVTRPLDLVLAEAVLARRRLNDGF

SEQ ID NO: 81419 - DNA, 708 bp, Streptococcus pneumoniae
  CDS (1)..(708): transl_table=11
atgatttatgcaggaattcttgccggtggaactggcacacgcatggggatcagtaacttgccaaaacaatttttagagctaggtgatcgacctattttgattcatacaattgaaaaatttgtcttggagccaagtattgaaaaaattgtagttggtgttcatggagactgggtttctcatgcagaagatcttgtagataaatatcttcctctttataaggaacgtatcatcattacaaagggtggtgctgaccgcaatacaagtattaagaacatcattgaagccattgatgcttatcgtccgcttactccagaggatatcgttgttacccacgattctgttcgtccatttattacacttcgcatgattcaggacaatatccaacttgcccaaaatcatgacgcagtggacacagtggtagaagcggttgatactatcgttgaaagtaccaatggtcaatttattacagatattccaaatcgtgctcacctttatcaaggacaaacacctcaaacattccgttgcaaggacttcatggacctttatggatctctttctgatgaagagaaggaaatcttgacagatgcatgtaaaatctttgtgatcaaaggaaaagatgtggctttggccaaaggtgaatactcaaatctgaagattacaaccgtaacagatttgaagattgcaaaaagtatgattgagaaagactag

SEQ ID NO: 81420 - protein, 235 aa, Streptococcus pneumoniae
MIYAGILAGGTGTRMGISNLPKQFLELGDRPILIHTIEKFVLEPSIEKIVVGVHGDWVSHAEDLVDKYLPLYKERIIITKGGADRNTSIKNIIEAIDAYRPLTPEDIVVTHDSVRPFITLRMIQDNIQLAQNHDAVDTVVEAVDTIVESTNGQFITDIPNRAHLYQGQTPQTFRCKDFMDLYGSLSDEEKEILTDACKIFVIKGKDVALAKGEYSNLKITTVTDLKIAKSMIEKD

SEQ ID NO: 81421 - DNA, 750 bp, Thermobifida fusca
  CDS (1)..(750): transl_table=11
atgtcgctcgatcagcccgcgcaccgccggccgcgggtcgccgctgctgtcctcgccggcggcgtagggtcgcgcatgggcagtgcgcaccccaaacagctcctgcggctggctgggcagaccatcctggaacgctcggtcgccgccctgtgcgccgccccagaggtggacgaggtcgtcgtggtcatgaacgccgcccacctcgcggaagcggagaagatcctcgccgaaggcaggtacgacaaggtgtcccggatcgttccgggaggagcgagccgttccgagagctctctcgccgccctgcaggcagtcgacgactacgacgacaacgacctgctgctcctgcacgacgccgcgcgtccgctggtcagcggccgcacgatcactgcctgtgtgactgaacttaccgaagtcggcgcggtcggcgtggctgtaccgtccagtgacaccgtggtccaggtcaccttggacgcctctggacgcgaagtgatcgccgcggtccccgaccgcgctgcgctgcgtcggatgcagaccccgcagggttttcggctcggcgtgatccgccgggcctatgcgcgagcgttcgccgaacccgggttcaccgccacggacgactgcggtgtcgtcctgcgctacctgcctgaggaacccgtgcgtatcgtcaccggggaggagagcaacatcaaagtgacccatcccagcgaccttgccgtggctgaagccctgctccgcaccggggtggcgcagtga

SEQ ID NO: 81422 - protein, 249 aa, Thermobifida fusca
MSLDQPAHRRPRVAAAVLAGGVGSRMGSAHPKQLLRLAGQTILERSVAALCAAPEVDEVVVVMNAAHLAEAEKILAEGRYDKVSRIVPGGASRSESSLAALQAVDDYDDNDLLLLHDAARPLVSGRTITACVTELTEVGAVGVAVPSSDTVVQVTLDASGREVIAAVPDRAALRRMQTPQGFRLGVIRRAYARAFAEPGFTATDDCGVVLRYLPEEPVRIVTGEESNIKVTHPSDLAVAEALLRTGVAQ

SEQ ID NO: 81423 - DNA, 669 bp, Thermotoga maritima
  CDS (1)..(669): transl_table=11
atgaacgtagcgattctccttgcagcgggaaaaggtgaaagaatgtctgaaaacgttccaaaacagttcctcgagatagagggaaggatgcttttcgagtatccgctttccacgtttttgaaaagtgaagcgatagatggtgttgtgatagtgacacgaagagagtggttcgaagttgtagagaaaagagtgttccacgaaaaagtactcggaattgtcgagggtggagatacacgaagccagagtgtgagaagcgccctcgaatttcttgaaaagttctctccctcttacgttctcgtacacgactcagcacggccgtttctgaggaagaaacacgtgtcggaggttctcagaagagcccgcgaaacgggagcggcaaccctcgcgttgaagaattccgacgcgctcgtaagagttgagaacgacagaatagaatacatcccaagaaaaggagtgtacagaattcttacaccgcaggctttttcttacgagattttgaaaaaggcccatgaaaatggtggcgaatgggcagacgacacggaacctgttcaaaagctcggagtgaaaatagccttggtcgagggagatcctttgtgtttcaaagtgacgtttaaagaagacctggaactggcgagaatcatcgccagagaatgggagaggataccatga

SEQ ID NO: 81424 - protein, 222 aa, Thermotoga maritima
MNVAILLAAGKGERMSENVPKQFLEIEGRMLFEYPLSTFLKSEAIDGVVIVTRREWFEVVEKRVFHEKVLGIVEGGDTRSQSVRSALEFLEKFSPSYVLVHDSARPFLRKKHVSEVLRRARETGAATLALKNSDALVRVENDRIEYIPRKGVYRILTPQAFSYEILKKAHENGGEWADDTEPVQKLGVKIALVEGDPLCFKVTFKEDLELARIIAREWERIP

SEQ ID NO: 81425 - DNA, 684 bp, Thermoanaerobacter tengcongensis
  CDS (1)..(684): transl_table=11
atgaatgtgagcgctgtaatagtagccgctggaagaagcactagaatgaataaaagtttgaataaagtttatctttcaattgcaggtaaaccagtgctttattactctattaaggcatttgatgaaattgaatggattaaagaaataattgtggtcacttctccagaagagacggagtattgtcaggagaacgtcttggagaaattttattggaataagccttttaaaattgtaaaggggggtgaagaaaggcagtattctgtttacaacggaatttctgtggtagataaagattgtgaaattgtcgctatacacgacggagcaaggcctttggtgactaaagagattataatggaagctataaaagcagcttatctttacaaggctgcagctgttggagttcctgtgaaagacaccataaaagtggcagatgaagataatttcattttagatactcctgacaggagatacctgtgggctattcaaactccccaggtatttgaaaaagaattgatagtgaaagctcacaggaaagctcttgaagagggctttttgggtacagatgacagcgttttggtggaaaggatgggatttaaagttaaactagtggaaggggattataaaaatatcaaaataactactccagaagatttggtcgtggcagaactttttttgagaaaataa

SEQ ID NO: 81426 - protein, 227 aa, Thermoanaerobacter tengcongensis
MNVSAVIVAAGRSTRMNKSLNKVYLSIAGKPVLYYSIKAFDEIEWIKEIIVVTSPEETEYCQENVLEKFYWNKPFKIVKGGEERQYSVYNGISVVDKDCEIVAIHDGARPLVTKEIIMEAIKAAYLYKAAAVGVPVKDTIKVADEDNFILDTPDRRYLWAIQTPQVFEKELIVKAHRKALEEGFLGTDDSVLVERMGFKVKLVEGDYKNIKITTPEDLVVAELFLRK

SEQ ID NO: 81427 - DNA, 702 bp, Thiobacillus denitrificans
  CDS (1)..(702): transl_table=11
atgaaattctacgcactgatacccgctgccggctcgggctcacgcatgggcggcgcgatcgaaaagcagtatatggatgtcaactcggtgccgatgatcgcgcacgcgatgatggtgctcgcgcgcgagccgcgcatcgcccgaatttttgttgtgctctcgccgaccgacaagcgctggaacaactacgaatggcagggctgggaggagcgcatcgaagtcctgcgctgtggcggcgggacccgcgccgaaaccgtgctgaacgcgctcgacgccatcgccgaggtctgcgaccccgctgactgggtgctcgtgcacgacgccgcgcggccctgtctgcccgacgaaatgctcggcaagctgctcgacgaagttgcggacgacccggtcggcgggttgcttgcggtgccggtcgccgacaccctcaagcgcgccgctggcgacacgtcatcgggcacgcgggttgaggccaccgtgccgcgtgccggcctgtggcaggcgcagaccccgcagatgttccgccacggcacgctgaccgaagcgctgcgcgcggcgggcagcgacatgaccgacgaggcctcggcgatcgagaagctcgggctgcagccgcagctcgtcgaatccgacagccgcaacctcaaggtcacctatccgcaggacctcgaactcgcgagcctgatcctggggaagatgaatgcgtga

SEQ ID NO: 81428 - protein, 233 aa, Thiobacillus denitrificans
MKFYALIPAAGSGSRMGGAIEKQYMDVNSVPMIAHAMMVLAREPRIARIFVVLSPTDKRWNNYEWQGWEERIEVLRCGGGTRAETVLNALDAIAEVCDPADWVLVHDAARPCLPDEMLGKLLDEVADDPVGGLLAVPVADTLKRAAGDTSSGTRVEATVPRAGLWQAQTPQMFRHGTLTEALRAAGSDMTDEASAIEKLGLQPQLVESDSRNLKVTYPQDLELASLILGKMNA

SEQ ID NO: 81429 - DNA, 699 bp, Vibrio cholerae
  CDS (1)..(699): transl_table=11
atgaacaacatgacagcgattgtccccgccgcgggtgtgggtagccgcatgcaagcggatcgccctaagcagtatttaaccttgctcgataaaacggtgctcgaacacaccgttgaacatcttttagaacatcctctcatcgaacacgtggtagtggcggtgagtgctgatgacccctattttgcgaatttgcctctggcgcatcatccgcgtgtgattcgtgtcgatggcggcaaagagcgggcggattcggtattgtcggcactggagtatgtctgccagcatcgcctcagtgaatgggtattggtgcatgatgcggcgcgtccgtgtgtgactcacgccgatatcactcagctcatcaccacggctttagctcatccgattggtgcgattttggcctcgcccgtgcgggataccatgaaacgtggcgatcacttacagcagattgtgcatacggtcgatcgcactgcgctctggcatgcgctgacaccgcaaatgtttcgtgcccaatcactgcgtgagaggttattcgccgctttacagcagcaagtcacgattaccgatgaagcctcagcctttgaatggcgtggtgaaaagcctgctttagtggcaggacgtgccgataatctcaaaattactcaacctgaagatctcgcgttggccgagttctatttaagtcgtaataaggaaaaatcatga

SEQ ID NO: 81430 - protein, 232 aa, Vibrio cholerae
MNNMTAIVPAAGVGSRMQADRPKQYLTLLDKTVLEHTVEHLLEHPLIEHVVVAVSADDPYFANLPLAHHPRVIRVDGGKERADSVLSALEYVCQHRLSEWVLVHDAARPCVTHADITQLITTALAHPIGAILASPVRDTMKRGDHLQQIVHTVDRTALWHALTPQMFRAQSLRERLFAALQQQVTITDEASAFEWRGEKPALVAGRADNLKITQPEDLALAEFYLSRNKEKS

SEQ ID NO: 81431 - DNA, 714 bp, Vibrio vulnificus
  CDS (1)..(714): transl_table=11
atggcgcgtagtatgacgtcattggtcgcagtggtaccagccgcaggtgtcggcagtcgaatgaaggcagaccgaccaaagcagtatttgcagattcacggcaaaaccattttagaacataccatcgaaaggttgctctctcacccggccattacacaagtcgtcgttgccgtgagtgaagacgacccctattactcagagctcgccattgcgcagcatcccgatatcgttcgtgttgctggtgggaaagagcgagcagattcggtgttatcggcgttacgtttcctttcgctgcagcaacaaaaagcagactgggttctcgtgcatgatgctgcaagaccttgtgttgctcatcaagatattgatgccttgattgaacgctgctcttcgcatgaaacgggtgggattttggcgacgcccgtacgtgacaccatgaagcgcgccaacgcacaacaaatgatcgaccatacagtggatcgcaatgcactttggcatgccttaacgccgcaaatgttcaaagccgaagtactgacagacgcgctaagcgatgcgttggcgcaaggtgtggcgattaccgacgaagcctctgcgctagagtggcgaggagagctgccagctttagttcaaggatgttcgagtaacatcaaagtcactcaacctgaagatcttgctttagcggaattttatttgagccgagaaaaggatagaaaatga

SEQ ID NO: 81432 - protein, 237 aa, Vibrio vulnificus
MARSMTSLVAVVPAAGVGSRMKADRPKQYLQIHGKTILEHTIERLLSHPAITQVVVAVSEDDPYYSELAIAQHPDIVRVAGGKERADSVLSALRFLSLQQQKADWVLVHDAARPCVAHQDIDALIERCSSHETGGILATPVRDTMKRANAQQMIDHTVDRNALWHALTPQMFKAEVLTDALSDALAQGVAITDEASALEWRGELPALVQGCSSNIKVTQPEDLALAEFYLSREKDRK

SEQ ID NO: 81433 - DNA, 714 bp, Vibrio vulnificus
  CDS (1)..(714): transl_table=11
atggcgcgtagtatgacgtcattggtcgcagtggtaccagccgcaggtgtcggtagtcgaatgaaggcagaccgaccaaagcagtatttgcagattcacggcaaaaccattttagaacataccatcgaaaggttgctctctcacccggccattacacaagtcgtcgttgccgtgagtgaagacgacccctattactcagatctcgccattgcgcagcatcccgatatcattcgtgtcgctggtgggaaagagcgtgcagattcggtgttatcggcgttatgtttcctttcgcagcagccacaaaaaacagattgggttctcgtacatgatgccgcaagaccttgtgttgctcatcaagatattgatgccttgattgaacgctgttcctcgcatgaaacgggggggattttggcgacgcccgtacgtgacaccatgaagcgcgccaacgcacaacaaatgatcgaccatacagtggatcgcaatgcactttggcatgccttaacgccgcaaatgttcaaagccgaagtactgacagacgcactaagcgatgcgttggcgcaaggtgtggcgataaccgatgaagcctctgcgctagagtggcgaggagcgctgccagctttagttcaagggtgttcgagtaacatcaaagtcactcaacctgaagatcttgctttagcggaattttatttgagccgagaaaaggatagaaaatga

SEQ ID NO: 81434 - protein, 237 aa, Vibrio vulnificus
MARSMTSLVAVVPAAGVGSRMKADRPKQYLQIHGKTILEHTIERLLSHPAITQVVVAVSEDDPYYSDLAIAQHPDIIRVAGGKERADSVLSALCFLSQQPQKTDWVLVHDAARPCVAHQDIDALIERCSSHETGGILATPVRDTMKRANAQQMIDHTVDRNALWHALTPQMFKAEVLTDALSDALAQGVAITDEASALEWRGALPALVQGCSSNIKVTQPEDLALAEFYLSREKDRK

SEQ ID NO: 81435 - DNA, 690 bp, Wigglesworthia glossinidia brevipalpis
  CDS (1)..(690): transl_table=11
atgattaatcatcctgaaattattgtgatttttccagcagcaggaataggaaaaagaatggggtataaatatccaaaacaatatataaaaataaaaaataaaactatattagaacattctataagtttatttatagataaaatatatgttaaaaaaatattaatagcaattaataaaaaagattattggtttaataaattatcaatattaaaaaataaaaaaataaatatagttataggtggaaaatctagaacagaatctgtaatatcagcgctaaaatttgttagtaaagtagattgggttctagttcatgatgcagttcgtccttgcctgcataaaaatgatcttaataaattattaaaagtaatcaatatatctccttttggagcaattttagctgctccaatttatgatactgttaaaaaatcttatggtaattttattagtcatactataaaaagaaataaattatggagagcactaactccccaattatttaatttaaaaattttaataaattgtttaaaaattattacttctaaaggtgaaataataactgatgaatcttcagctttagaaaaatgtggatataaattaaatttagtacatggtagatcagataatataaaaattacatatccagaagatttaaattttgcaaatttttttattaataatattaaggagtag

SEQ ID NO: 81436 - protein, 229 aa, Wigglesworthia glossinidia brevipalpis
MINHPEIIVIFPAAGIGKRMGYKYPKQYIKIKNKTILEHSISLFIDKIYVKKILIAINKKDYWFNKLSILKNKKINIVIGGKSRTESVISALKFVSKVDWVLVHDAVRPCLHKNDLNKLLKVINISPFGAILAAPIYDTVKKSYGNFISHTIKRNKLWRALTPQLFNLKILINCLKIITSKGEIITDESSALEKCGYKLNLVHGRSDNIKITYPEDLNFANFFINNIKE

SEQ ID NO: 81437 - DNA, 696 bp, Xylella fastidiosa
  CDS (1)..(696): transl_table=11
atgagtgttggtgtttgggcggtgatccctgcggctggccgtggggtccgatttggttctcctgtgcccaagcagtatttacccgttgttgggcggccgttgattgtctataccctggaagcgttggcagcacatccggcggtgtgtgggttgatggtggtggtggctgagggcgatctggcttggtccagctggacagaggtggcaggtaagccattgttgacttgcagtggaggcgtgacccgtgctgcttcggtattgtctggcttgttggcgttgccacaggtggtgcacgctgatgatttcgtgttggtccatgatgctgcgcgtcccaacgtggctttgtccgatctggaacgattgctggaggcgggctgtgcccatccagtgggtgcgatcctggctgtaccagtgcgcgacacgctgaagcgtgccggtgctgatggcagtattgatggcaccgagccacgtgaacggttatggcgtgcattcactccacagttgtttcggcgatctcagttggtgcgcggtttgcaggtcgctgcagcggatgggatcgagatcaccgatgaagcgatggtcatggagcggcagggattgcgtcctcttctggtggagtgtgccgagagtaattttaagatcacgacgccagatgatttggtgcgtttcgagtttgaattggcgcggcgtgtttga

SEQ ID NO: 81438 - protein, 231 aa, Xylella fastidiosa
MSVGVWAVIPAAGRGVRFGSPVPKQYLPVVGRPLIVYTLEALAAHPAVCGLMVVVAEGDLAWSSWTEVAGKPLLTCSGGVTRAASVLSGLLALPQVVHADDFVLVHDAARPNVALSDLERLLEAGCAHPVGAILAVPVRDTLKRAGADGSIDGTEPRERLWRAFTPQLFRRSQLVRGLQVAAADGIEITDEAMVMERQGLRPLLVECAESNFKITTPDDLVRFEFELARRV

SEQ ID NO: 81439 - DNA, 696 bp, Xylella fastidiosa
  CDS (1)..(696): transl_table=11
atgagtgttggtgtttgggcggtgatccctgcggctggccgtggggtccgatttggttctcctgtgcccaaacagtatttacccgttgttgggcggccgttgattgtctataccctggaagcattggcagcacatccggcggtgtgtgggttgatggtggtggtggctgagggcgatctggcttggtccggctggacagagctggcaggtaagccattgttgacttgcagtggaggcgtgacccgtgctgcttcggtattgtctggcttgttggcgttgccacaggtggtgcacgctgatgatttcgtgttggtccatgatgctgcgcgtcccaacgtggctttgtccgatctggaacgattgctggaggcgggctgtgcccatccagtgggtgcgatcctggctgtaccggtgcgcgacacgctgaagcgtgccggttctgatggcagtattgacggcaccgagccacgtgaacggttatggcgtgcattcactccacagttgtttcggcgatctcagttggtgcgcggtttgcaggtcgctgcagcggatgggatcgagatgaccgatgaagcgatggtcatggagcggcagggattgcgtcctcttctggtggagtgtgccgagagtaattttaagatcacgacgccagatgatttggtgcgtttcgagtttgaattggcgcggcgtgtttga

SEQ ID NO: 81440 - protein, 231 aa, Xylella fastidiosa
MSVGVWAVIPAAGRGVRFGSPVPKQYLPVVGRPLIVYTLEALAAHPAVCGLMVVVAEGDLAWSGWTELAGKPLLTCSGGVTRAASVLSGLLALPQVVHADDFVLVHDAARPNVALSDLERLLEAGCAHPVGAILAVPVRDTLKRAGSDGSIDGTEPRERLWRAFTPQLFRRSQLVRGLQVAAADGIEMTDEAMVMERQGLRPLLVECAESNFKITTPDDLVRFEFELARRV

SEQ ID NO: 81441 - DNA, 726 bp, Yersinia pestis
  CDS (1)..(726): transl_table=11
atgagtaacttcgcagtttcccttcctgaagtgatcgctgtattaccggctgcgggtattggtagccgtatgttggtggattgccctaagcagtatttaactgtggggggcaaaacaatcattgaacatgctattttttctttgcttcaccacccacgaattcagcgggttatcgttgtgatccatccgcaggacacacaattctctaggttgtccgttgcgcaggatccacgtatcagtacagtttacggtggcgatcaacgggctaactccgtgatggcgggtttacaattggcagggcaggctgaatgggtgttagttcatgatgcggcacgcccctgtttgcaccttgatgatctcagccggctgttatcgattaccgaatgcagtcaggtggggggaattctggcggcccctgtgcgtgatacgatgaaacgtgccgagccgggtattcaagccatcgctcatacggtggatcgtcaggacctgtggcatgcgctgacgcctcaacttttcccgctagaattattaaaattgtgcttatcccgtgcgttaagagaaggggtggcggtgactgatgaggcctctgcattagagcattgcggttatcatccgatattggttaccggccgttctgataatattaaagtgacgcgcccagaagatctggcattggcggagttttatttaacccagcggcagtctctcaataacgacagtctctga

SEQ ID NO: 81442 - protein, 241 aa, Yersinia pestis
MSNFAVSLPEVIAVLPAAGIGSRMLVDCPKQYLTVGGKTIIEHAIFSLLHHPRIQRVIVVIHPQDTQFSRLSVAQDPRISTVYGGDQRANSVMAGLQLAGQAEWVLVHDAARPCLHLDDLSRLLSITECSQVGGILAAPVRDTMKRAEPGIQAIAHTVDRQDLWHALTPQLFPLELLKLCLSRALREGVAVTDEASALEHCGYHPILVTGRSDNIKVTRPEDLALAEFYLTQRQSLNNDSL

SEQ ID NO: 81443 - DNA, 726 bp, Yersinia pseudotuberculosis
  CDS (1)..(726): transl_table=11
atgagtaacttcgcagtttcccttcctgaagtgatcgctgtattaccggctgcaggtattggtagccgtatgttggcggattgccctaagcagtatttaactgtggggggcaaaacaatcattgaacatgctattttttctttgcttcaccacccacgaattcagcgggttatcgttgtgatccatccgcaggacacacaattctctaggttgtccgttgcgcaggatccacgtatcagtacagtttacggtggcgatcaacgggctaactccgtgatggcgggtttacaattggcagggcaggctgaatgggtgttagttcatgatgcggcacgcccctgtttgcaccttgatgatctcagccggctgttatcgattaccgaatgcagtcaggtggggggaattctggcggcccctgtgcgtgatacgatgaaacgtgccgagccgggtattcaagccatcgctcatacggtggatcgtcaggacctgtggcatgcgctgacgcctcaacttttcccgctagaattattaaaattgtgcttatcccgtgcgttaagagaaggggtggcggtgactgatgaggcctctgcattagagtattgcggttatcatccgatattggttaccggccgttctgataatattaaagtgacgcgcccagaagatctggcattggcggagttttatttaacccagcggcagtctctcaataacgacagtctctga

SEQ ID NO: 81444 - protein, 241 aa, Yersinia pseudotuberculosis
MSNFAVSLPEVIAVLPAAGIGSRMLADCPKQYLTVGGKTIIEHAIFSLLHHPRIQRVIVVIHPQDTQFSRLSVAQDPRISTVYGGDQRANSVMAGLQLAGQAEWVLVHDAARPCLHLDDLSRLLSITECSQVGGILAAPVRDTMKRAEPGIQAIAHTVDRQDLWHALTPQLFPLELLKLCLSRALREGVAVTDEASALEYCGYHPILVTGRSDNIKVTRPEDLALAEFYLTQRQSLNNDSL

SEQ ID NO: 81445 - DNA, 1071 bp, Oryza sativa
  CDS (1)..(1071)
atggcagtggaggccggctcggcgcgagaggcgcgggcggcggagatggaggccggcttggcgcgagaggcgcggccgatggagggaggccgaactggcgcgagaggcgcgtccggtggaggaggccggcttggcgcgagaggcgcggccggcggtggaagaggcgaccttggtgcgtggtggagctgctggtgggtgtggcgcgttcttcggcgcatgaaggctggccgacggggggcgtcggtgcaggggccccacatgtcggtagagtttgagtggtggtggagcatcggtgggagctgtgcggttgctccgcggcggcacgcgaggaaatggggttcggctgtctgcgccgccaaagccgacggcgcgcagggtgaggccgtgaaggagaggagcgtctcggtggtgctcttgtccggcgggcaggggaagagaatgggggcaagtatgccaaaacaatatctaccattattggggctgccgattgcactgcacagtttaaagacattctgtcagctgaaggaagtaaaagaagttgtagtggtgtgtgatccagactacaaagatatatttgaaggctctattgaaaacgtgcaaataccaattaaatttgcactcccagggaaagagagacaagactctgtttataatggactacaggagattgatggagactctgaacttgtttgtgtacatgattctgcaaggcccttagtgtcatctgaagatgtcaaaaaggtattagaagatgctatagtgcacggagctgctgttcttggtgtgcctgtgaaagctactatcaaggaggctgacagcaattcttttgtcgtaaaaacacttgataggaaaactctttgggaaatgcaaactccacaggtgatgaggcccagtttactcagagatggttttgagctagttaaacgggatggacttgaggtcactgatgacgtgtccattgtagaatacctgaagcactctgtttatatcacagagggctcttacacaaacataaaggtgacgactcctgatgacttgctcctggctgagcgcctgatgaatgagaaataa

SEQ ID NO: 81446 - protein, 356 aa, Oryza sativa
MAVEAGSAREARAAEMEAGLAREARPMEGGRTGARGASGGGGRLGARGAAGGGRGDLGAWWSCWWVWRVLRRMKAGRRGASVQGPHMSVEFEWWWSIGGSCAVAPRRHARKWGSAVCAAKADGAQGEAVKERSVSVVLLSGGQGKRMGASMPKQYLPLLGLPIALHSLKTFCQLKEVKEVVVVCDPDYKDIFEGSIENVQIPIKFALPGKERQDSVYNGLQEIDGDSELVCVHDSARPLVSSEDVKKVLEDAIVHGAAVLGVPVKATIKEADSNSFVVKTLDRKTLWEMQTPQVMRPSLLRDGFELVKRDGLEVTDDVSIVEYLKHSVYITEGSYTNIKVTTPDDLLLAERLMNEK

SEQ ID NO: 81447 - DNA, 22 bp, Artificial sequence
  primer
atggcaaccactcatttggatg

SEQ ID NO: 81448 - DNA, 25 bp, Artificial sequence
  primer
ttatgtattctcctgatggatggtt

SEQ ID NO: 81449 - protein, 266 aa, Artificial sequence
  consensus sequence
  Variant (2)..(2): Xaa in position 2 is any amino acid
  Variant (4)..(4): Xaa in position 4 is any amino acid
  Variant (6)..(6): Xaa in position 6 is any amino acid
  Variant (8)..(11): Xaa in position 8 to 11 is any amino acid
  Variant (12)..(20): Xaa in position 12 to 20 is any or no amino acid
  Variant (23)..(69): Xaa in position 23 to 69 is any amino acid
  Variant (70)..(90): Xaa in position 70 to 90 is any or no amino acid
  Variant (92)..(93): Xaa in position 92 to 93 is any amino acid
  Variant (95)..(96): Xaa in position 95 to 96 is any amino acid
  Variant (99)..(100): Xaa in position 99 to 100 is any amino acid
  Variant (101)..(101): Xaa in position 101 is any or no amino acid
  Variant (103)..(109): Xaa in position 103 to 109 is any amino acid
  Variant (110)..(124): Xaa in position 110 to 124 is any or no amino acid
  Variant (126)..(127): Xaa in position 126 to 127 is any amino acid
  Variant (130)..(131): Xaa in position 130 to 131 is any amino acid
  Variant (134)..(159): Xaa in position 134 to 159 is any amino acid
  Variant (160)..(168): Xaa in position 160 to 168 is any or no amino acid
  Variant (171)..(174): Xaa in position 171 to 174 is any amino acid
  Variant (175)..(193): Xaa in position 175 to 193 is any or no amino acid
  Variant (195)..(196): Xaa in position 195 to 196 is any amino acid
  Variant (198)..(204): Xaa in position 198 to 204 is any amino acid
  Variant (208)..(208): Xaa in position 208 is any amino acid
  Variant (210)..(224): Xaa in position 210 to 224 is any amino acid
  Variant (225)..(234): Xaa in position 225 to 234 is any or no amino acid
  Variant (236)..(251): Xaa in position 236 to 251 is any amino acid
  Variant (252)..(253): Xaa in position 252 to 253 is any or no amino acid
  Variant (255)..(257): Xaa in position 255 to 257 is any amino acid
  Variant (259)..(259): Xaa in position 259 is any amino acid
  Variant (261)..(261): Xaa in position 261 is any amino acid
  Variant (263)..(263): Xaa in position 263 is any amino acid
  Variant (265)..(265): Xaa in position 265 is any amino acid
AXGXGXRXXXXXXXXXXXXXKQXXXXXXXXXXXXXXXXXXXXXXXXXXXXXXXXXXXXXXXXXXXXXXXXXXXXXXXXXXXXXXXXXXXXGXXRXXSVXXXLXXXXXXXXXXXXXXXXXXXXXXVXXHDXXRPXXXXXXXXXXXXXXXXXXXXXXXXXXXXXXXXXXXDTXXXXXXXXXXXXXXXXXXXXXXXTXXRXXXXXXXTPQXFXXXXXXXXXXXXXXXXXXXXXXXXXDXXXXXXXXXXXXXXXXXXGXXXNXKXTXPXD

SEQ ID NO: 81450 - protein, 38 aa, Artificial sequence
  protein pattern
  Variant (2)..(2): Xaa in position 2 is Ala, Asp or Glu
  Variant (3)..(3): Xaa in position 3 is Ala, Cys, Ser, Thr or Val
  Variant (4)..(17): Xaa in position 4 to 17 is any amino acid
  Variant (18)..(18): Xaa in position 18 is Ala, Cys, Asp, Gly or Ser
  Variant (19)..(21): Xaa in position 19 to 21 is any amino acid
  Variant (23)..(23): Xaa in position 23 is any amino acid
  Variant (25)..(25): Xaa in position 25 is Ile, Leu, Met or Val
  Variant (27)..(29): Xaa in position 27 to 29 is any amino acid
  Variant (31)..(37): Xaa in position 31 to 37 is any or no amino acid
DXXXXXXXXXXXXXXXXXXXXNXKXTXXXDXXXXXXXL

SEQ ID NO: 81451 - DNA, 735 bp, Escherichia coli; identical to SEQ ID NO: 12312
  CDS (1)..(735)

SEQ ID NO: 81452 - protein, 244 aa, Escherichia coli; identical to SEQ ID NO: 12313

SEQ ID NO: 81453 - DNA, 762 bp, Photobacterium profundum SS9
  CDS (1)..(762): transl_table=11
atgcctaactatgcattagcagatttactggaaaaaacgaagatagaacagattctgcaattggctgagattaatgctgaacttgaagcgctttctgcacaggaaagagtacgttgggcactggcgaatcttggtagtgaatttgctcttgcgtctagttttggtattcaatctgctgtgatgttgcacttggtcacgaatgaatcccctaaagtgccagttattttaacggacacggggtatttgtttcctgaaacctatcaattcattgatcagctgactctccgcctatcgttaaacctttatgtataccgtgctgaaataagctcggcatggcaagaagcacgacacggtaagctgtgggaacaaggggttgacggtattaaacaatataaccgcttgaataaagtcgaacctatgcggcgcgcgttagatgaattgaatgtaagcgcatggttttcagggctacgtcgcgaacaatcgagttctcgtgcatcattgccagtgttggctattcaaaacggcgtatttaaattcctgcctcttattgattggactgataatgatatcgagcaatacttgaatcaatatgatcttccttatcatcctcttcgtgatgaaggctacctttctatgggtgatacgcatacgactaaaaagtgggagcctggaatgacggaggaagaaacccgtttctttggtttaaagcgagagtgtggtttacatgaagaagatgcagaatcggatggctctggtatttaa

SEQ ID NO: 81454 - protein, 253 aa, Photobacterium profundum SS9
MPNYALADLLEKTKIEQILQLAEINAELEALSAQERVRWALANLGSEFALASSFGIQSAVMLHLVTNESPKVPVILTDTGYLFPETYQFIDQLTLRLSLNLYVYRAEISSAWQEARHGKLWEQGVDGIKQYNRLNKVEPMRRALDELNVSAWFSGLRREQSSSRASLPVLAIQNGVFKFLPLIDWTDNDIEQYLNQYDLPYHPLRDEGYLSMGDTHTTKKWEPGMTEEETRFFGLKRECGLHEEDAESDGSGI

SEQ ID NO: 81455 - DNA, 735 bp, Zymomonas mobilis subsp. mobilis ZM4
  CDS (1)..(735): transl_table=11
atgtctgcgtttcatctcgaaactttaaaatccttgcccaaagccgaacaagaggcggctttgtccgaagccaatcggcaattggaagagatgagcgcagaagatcgtctcaaatgggcttttgacaatctttcgggtcaatttgtgctgtcatccagcttcggcattcaggcagctgtgatgctgcatctggtgacccgaaagaaagccgatattccagttatccttactgataccggctatctttttcctgaaacctatcgctttattgatgctctgacagaaaagctcgatttgaatcttcaagtctttcgggcggctttgtctccggcatggcaagaagctcgctatggtaaattatgggaacagggtgtcgaaggtatcgaacggtataacgacatcaacaaagtcgaacccatgaaccgcgctttaaaaaccttggaggctggaacatggtttgccggattacggcgcgatcagtcgaaaagccggtcacatctaccgattttggcaatccagcgcggggttttcaaattcctgccgatcatcgactgggataaccgcaaaatccactattatctgaaagagcacgacctcccttatcacccgctttgggatgaaggctatctctctgtcggcgacactcacacaacccgcaaatgggaagaggggatgagcgaggaagaaacccgctttttcggtttaaaaagggaatgtgggctacatgaaggataa

SEQ ID NO: 81456 - protein, 244 aa, Zymomonas mobilis subsp. mobilis ZM4
MSAFHLETLKSLPKAEQEAALSEANRQLEEMSAEDRLKWAFDNLSGQFVLSSSFGIQAAVMLHLVTRKKADIPVILTDTGYLFPETYRFIDALTEKLDLNLQVFRAALSPAWQEARYGKLWEQGVEGIERYNDINKVEPMNRALKTLEAGTWFAGLRRDQSKSRSHLPILAIQRGVFKFLPIIDWDNRKIHYYLKEHDLPYHPLWDEGYLSVGDTHTTRKWEEGMSEEETRFFGLKRECGLHEG

SEQ ID NO: 81457 - DNA, 735 bp, Erwinia chrysanthemi
  CDS (1)..(735): transl_table=11
atgtctacgctgaatctggaggcgctgcgcgccttgccccaaccggaacagaccgccgcgctggcggacgtcaacgaacagctggagaatttgtccgcgcaggagcgcgtcagctgggcgctggaaaacttgccgggcgagtttgtgctttcctccagtttcggcattcaggcggcggtgtgcctgcatttggttacccgacagcggccggatattccggttatcctcaccgataccggttatctgtttacggagacgtatcagttcatcgaccaactgaccgaacagctagctcttaacctgcagatctaccgcgccgcacagtctcctgcctggcaggaggcgcgttacggcaagctgtgggagcaggggctggaaggcattgagcagtacaaccagatcaataaagtcgagccgatggatcgggcgttgcaagaactgtgcgccggcacctggttcgccggtctgcgccgtgaacaatcggacagccgcgaaggattgccggtgctggcgatcaaacgcggggtattcaagtttttgccgattatcgactgggataaccgcacggtgtaccagtatctgaaagccaacggattgagctaccacccgctatgggaacagggctatctgtcggtgggcgatacccataccacccgcaagtgggaaccgggcatgagcgaggaagaaacccgtttcttcggcctgaaacgcgaatgtgggctgcacgaaggctga

SEQ ID NO: 81458 - protein, 244 aa, Erwinia chrysanthemi
MSTLNLEALRALPQPEQTAALADVNEQLENLSAQERVSWALENLPGEFVLSSSFGIQAAVCLHLVTRQRPDIPVILTDTGYLFTETYQFIDQLTEQLALNLQIYRAAQSPAWQEARYGKLWEQGLEGIEQYNQINKVEPMDRALQELCAGTWFAGLRREQSDSREGLPVLAIKRGVFKFLPIIDWDNRTVYQYLKANGLSYHPLWEQGYLSVGDTHTTRKWEPGMSEEETRFFGLKRECGLHEG

SEQ ID NO: 81459 - DNA, 711 bp, Streptomyces coelicolor A3(2); identical to SEQ ID NO: 12154
  CDS (1)..(711): transl_table=11

SEQ ID NO: 81460 - protein, 236 aa, Streptomyces coelicolor A3(2); identical to SEQ ID NO: 12155

SEQ ID NO: 81461 - DNA, 735 bp, Pseudomonas putida KT2440; identical to SEQ ID NO: 12158
  CDS (1)..(735): transl_table=11

SEQ ID NO: 81462 - protein, 244 aa, Pseudomonas putida KT2440; identical to SEQ ID NO: 12159

SEQ ID NO: 81463 - DNA, 741 bp, Candidatus Blochmannia floridanus; identical to SEQ ID NO: 12162
  CDS (1)..(741): transl_table=11

SEQ ID NO: 81464 - protein, 246 aa, Candidatus Blochmannia floridanus; identical to SEQ ID NO: 12163

SEQ ID NO: 81465 - DNA, 801 bp, Prochlorococcus marinus str. MIT 9313; identical to SEQ ID NO: 12164
  CDS (1)..(801): transl_table=11

SEQ ID NO: 81466 - protein, 266 aa, Prochlorococcus marinus str. MIT 9313; identical to SEQ ID NO: 12165

SEQ ID NO: 81467 - DNA, 765 bp, Synechococcus sp. WH 8102; identical to SEQ ID NO: 12166
  CDS (1)..(765): transl_table=11

SEQ ID NO: 81468 - protein, 254 aa, Synechococcus sp. WH 8102; identical to SEQ ID NO: 12167

SEQ ID NO: 81469 - DNA, 795 bp, Kluyveromyces lactis NRRL Y-1140; identical to SEQ ID NO: 12182
  CDS (1)..(795)

SEQ ID NO: 81470 - protein, 264 aa, Kluyveromyces lactis NRRL Y-1140; identical to SEQ ID NO: 12183

SEQ ID NO: 81471 - DNA, 783 bp, Debaryomyces hansenii CBS767; identical to SEQ ID NO: 12184
  CDS (1)..(783)

SEQ ID NO: 81472 - protein, 260 aa, Debaryomyces hansenii CBS767; identical to SEQ ID NO: 12185

SEQ ID NO: 81473 - DNA, 759 bp, Candida albicans SC5314; identical to SEQ ID NO: 12190
  CDS (1)..(759): transl_table=12

SEQ ID NO: 81474 - protein, 252 aa, Candida albicans SC5314; identical to SEQ ID NO: 12191

SEQ ID NO: 81475 - DNA, 819 bp, Cryptococcus neoformans var. neoformans B-3501A; identical to SEQ ID NO: 12192
  CDS (1)..(819)

SEQ ID NO: 81476 - protein, 272 aa, Cryptococcus neoformans var. neoformans B-3501A; identical to SEQ ID NO: 12193

SEQ ID NO: 81477 - DNA, 801 bp, Prochlorococcus marinus str. MIT 9303
  CDS (1)..(801): transl_table=11
atgactgatggctccattaatacggtgaccactgccacgtctactgcggcaggccaatctccgagtgtgcaggttgcctcgcttctcgagatgcctctggaggatgctcggatacaccttgccaaactttctgcccagaaccgtcttgagtgggcactgaagcagtttggtcaaggctttgttctgacaacgagcttcggcattcaatcagctgttctgctgcacatgctccatggtcttgatggtggttcggtggtccctgtggtctgggtggatacgggctatctaccagctgagacctatttctatgccgatcagctcacgcgtcagcttgggttggatttaaaggtggttcaaagctcaatgtctcccgctcggatggaggcaatctatggccggctctgggagacaggctcggtgaaggatctggagacatatcaccgtattcgcaaggtggagcccctcgagcaggctctggatgatctccatgtgcattgctgggccagtggggtgcgcagtgatcagaccgactatcggcgctcaatggcttttttggacctgattcgtgatcgcctttcattgaggcctttactcgactggactcccaaggaggttttctattacatgcaggagcatcagttgccgcagcatcctctgtttgaaaagggttactccaccgtcggcgatttgcattccagtgctcccgatgggggggaggcgtctggacgggagacacgctttggaggtcttaaacaggaatgcggccttcacctcccaggtgtgttgggcgaaggcatctaa

SEQ ID NO: 81478 - protein, 266 aa, Prochlorococcus marinus str. MIT 9303
MTDGSINTVTTATSTAAGQSPSVQVASLLEMPLEDARIHLAKLSAQNRLEWALKQFGQGFVLTTSFGIQSAVLLHMLHGLDGGSVVPVVWVDTGYLPAETYFYADQLTRQLGLDLKVVQSSMSPARMEAIYGRLWETGSVKDLETYHRIRKVEPLEQALDDLHVHCWASGVRSDQTDYRRSMAFLDLIRDRLSLRPLLDWTPKEVFYYMQEHQLPQHPLFEKGYSTVGDLHSSAPDGGEASGRETRFGGLKQECGLHLPGVLGEGI

SEQ ID NO: 81479 - DNA, 735 bp, Erwinia carotovora subsp. atroseptica SCRI1043; identical to SEQ ID NO: 12196
  CDS (1)..(735): transl_table=11

SEQ ID NO: 81480 - protein, 244 aa, Erwinia carotovora subsp. atroseptica SCRI1043; identical to SEQ ID NO: 12197

SEQ ID NO: 81481 - DNA, 735 bp, Yersinia pseudotuberculosis IP 32953; identical to SEQ ID NO: 12198
  CDS (1)..(735): transl_table=11

SEQ ID NO: 81482 - protein, 244 aa, Yersinia pseudotuberculosis IP 32953; identical to SEQ ID NO: 12199

SEQ ID NO: 81483 - DNA, 786 bp, Corynebacterium glutamicum ATCC 13032; identical to SEQ ID NO: 12206
  CDS (1)..(786): transl_table=11

SEQ ID NO: 81484 - protein, 261 aa, Corynebacterium glutamicum ATCC 13032; identical to SEQ ID NO: 12207

SEQ ID NO: 81485 - DNA, 762 bp, Colwellia psychrerythraea 34H; identical to SEQ ID NO: 12208
  CDS (1)..(762): transl_table=11

SEQ ID NO: 81486 - protein, 253 aa, Colwellia psychrerythraea 34H; identical to SEQ ID NO: 12209

SEQ ID NO: 81487 - DNA, 747 bp, Synechococcus sp. CC9605; identical to SEQ ID NO: 12218
  CDS (1)..(747): transl_table=11

SEQ ID NO: 81488 - protein, 248 aa, Synechococcus sp. CC9605; identical to SEQ ID NO: 12219

SEQ ID NO: 81489 - DNA, 804 bp, Trichodesmium erythraeum IMS101; identical to SEQ ID NO: 12228
  CDS (1)..(804): transl_table=11

SEQ ID NO: 81490 - protein, 267 aa, Trichodesmium erythraeum IMS101; identical to SEQ ID NO: 12229

SEQ ID NO: 81491 - DNA, 774 bp, Synechococcus sp. CC9311
  CDS (1)..(774): transl_table=11
atgagggatgtgtccacctccaagaatcagcctgtcgttgccgctggccccaaggctgaggcggcagaactccaacacgcgcgtgagcagcttgagccgttggatgcgcgcgcaaggttgctatgggcctatgagcagtttgggtcgggttttgccctgacaacgagcttcggaatccaatcctctgtgttgctgcacttgttgagcgggatggatcgaggccgagatattccagtgatctgggtggataccggctatctcccccctgagacctatcgctacgccgaagatcttcgcgaacgcttcgatctgaatctccacatcgctcagtcttcctcgtctgcagctcggatggaggcgctccatggccgcctctgggaatcaggtgttgttgaggacatggagctctacctcaaaatccgcaaggtagagccccttgaagaagcgatgcatcgtcttcaggtgtcttgctgggcgagcggtgtgcgccgtgctcagacggatacacgccgaagcatgactgcgctcgatcccattcgcggtcgcttgtccctgaggccgctattggagtggacctcacgcgatgtcttctactacatgaaggagaacgatcttcctcagcaccccttatttgatcaggggtattccacggttggagactggcactccagtggccctgacgggcaggaggcgacgggacgagacactcgctttgctggcctgaagcaggaatgtggcatccacgtgccaggtgttatgggtgatggcatctag

SEQ ID NO: 81492 - protein, 257 aa, Synechococcus sp. CC9311
MRDVSTSKNQPVVAAGPKAEAAELQHAREQLEPLDARARLLWAYEQFGSGFALTTSFGIQSSVLLHLLSGMDRGRDIPVIWVDTGYLPPETYRYAEDLRERFDLNLHIAQSSSSAARMEALHGRLWESGVVEDMELYLKIRKVEPLEEAMHRLQVSCWASGVRRAQTDTRRSMTALDPIRGRLSLRPLLEWTSRDVFYYMKENDLPQHPLFDQGYSTVGDWHSSGPDGQEATGRDTRFAGLKQECGIHVPGVMGDGI

SEQ ID NO: 81493 - DNA, 798 bp, Shewanella sp. MR-7; identical to SEQ ID NO: 12230
  CDS (1)..(798): transl_table=11

SEQ ID NO: 81494 - protein, 265 aa, Shewanella sp. MR-7; identical to SEQ ID NO: 12231

SEQ ID NO: 81495 - DNA, 738 bp, Alkalilimnicola ehrlichei MLHE-1; identical to SEQ ID NO: 12232
  CDS (1)..(738): transl_table=11

SEQ ID NO: 81496 - protein, 245 aa, Alkalilimnicola ehrlichei MLHE-1; identical to SEQ ID NO: 12233

SEQ ID NO: 81497 - DNA, 831 bp, Crocosphaera watsonii WH 8501; identical to SEQ ID NO: 12246
  CDS (1)..(831): transl_table=11

SEQ ID NO: 81498 - protein, 276 aa, Crocosphaera watsonii WH 8501; identical to SEQ ID NO: 12247

SEQ ID NO: 81499 - DNA, 714 bp, Xylella fastidiosa Dixon; identical to SEQ ID NO: 12248
  CDS (1)..(714): transl_table=11

SEQ ID NO: 81500 - protein, 237 aa, Xylella fastidiosa Dixon; identical to SEQ ID NO: 12249

SEQ ID NO: 81501 - DNA, 714 bp, Xylella fastidiosa Ann-1; identical to SEQ ID NO: 12250
  CDS (1)..(714): transl_table=11

SEQ ID NO: 81502 - protein, 237 aa, Xylella fastidiosa Ann-1; identical to SEQ ID NO: 12251

SEQ ID NO: 81503 - DNA, 768 bp, Prochlorococcus marinus str. MIT 9211
  CDS (1)..(768): transl_table=11
atggagagtaaaaacatccctaataaaaacatgaaaagcaattcccttttgaaaattccgattgaagaagctcggcaacatcttaaaaagatgtctcccgaacaacgaatggaatggggctatgaacaatttggtgaaaatttcaccctcacgacaagttttggtattcaatcatgcgtcttattaaacatgctttcacaaattaaggctgcaaaaaaaattaaagttatttgggttgatactggttacctgcctacagaaacttatcaatatgctgaactactcactgaaaaacttcatctcaatctaaaaattgtccaaagtgaaatgtcaccagcaaggatggaggctttagaagggcagctatggaaaaataattcagtgaaagatattgagaaatatcacctgattcgtaaagtaacgccgttggaaaaagccttagaagacttaagagttaaatgttgggcgagtggtgttcgaggtgggcaaaccaagcatagagggacaatgacattattagatcacatccgaaatcgtctttcactcagaccaattctcgagtggagtccaaaagatattttttattatatggaaaaaaataatcttccccatcatccactttttgatcaaggttattcaacagttggagattggcattcaagcgctccagatggtcctcagagtatgggaagagatacgaggttcggaggattaaaacaagaatgtggaattcacatttcaaatgaaactgagggcattccaaattga

SEQ ID NO: 81504 - protein, 255 aa, Prochlorococcus marinus str. MIT 9211
MESKNIPNKNMKSNSLLKIPIEEARQHLKKMSPEQRMEWGYEQFGENFTLTTSFGIQSCVLLNMLSQIKAAKKIKVIWVDTGYLPTETYQYAELLTEKLHLNLKIVQSEMSPARMEALEGQLWKNNSVKDIEKYHLIRKVTPLEKALEDLRVKCWASGVRGGQTKHRGTMTLLDHIRNRLSLRPILEWSPKDIFYYMEKNNLPHHPLFDQGYSTVGDWHSSAPDGPQSMGRDTRFGGLKQECGIHISNETEGIPN

SEQ ID NO: 81505 - DNA, 762 bp, Synechococcus sp. WH 5701; identical to SEQ ID NO: 12254
  CDS (1)..(762): transl_table=11

SEQ ID NO: 81506 - protein, 253 aa, Synechococcus sp. WH 5701; identical to SEQ ID NO: 12255

SEQ ID NO: 81507 - DNA, 741 bp, Pseudoalteromonas tunicata D2; identical to SEQ ID NO: 12258
  CDS (1)..(741): transl_table=11

SEQ ID NO: 81508 - protein, 246 aa, Pseudoalteromonas tunicata D2; identical to SEQ ID NO: 12259

SEQ ID NO: 81509 - DNA, 765 bp, Photobacterium sp. SKA34; identical to SEQ ID NO: 12260
  CDS (1)..(765): transl_table=11

SEQ ID NO: 81510 - protein, 254 aa, Photobacterium sp. SKA34; identical to SEQ ID NO: 12261

SEQ ID NO: 81511 - DNA, 789 bp, Synechococcus sp. RS9916; identical to SEQ ID NO: 12264
  CDS (1)..(789): transl_table=11

SEQ ID NO: 81512 - protein, 262 aa, Synechococcus sp. RS9916; identical to SEQ ID NO: 12265

SEQ ID NO: 81513 - DNA, 780 bp, Vibrio sp. Ex25; identical to SEQ ID NO: 12266
  CDS (1)..(780): transl_table=11

SEQ ID NO: 81514 - protein, 259 aa, Vibrio sp. Ex25; identical to SEQ ID NO: 12267

SEQ ID NO: 81515 - DNA, 741 bp, Alteromonadales bacterium TW-7; identical to SEQ ID NO: 12268
  CDS (1)..(741): transl_table=11

SEQ ID NO: 81516 - protein, 246 aa, Alteromonadales bacterium TW-7; identical to SEQ ID NO: 12269

SEQ ID NO: 81517 - DNA, 735 bp, Klebsiella pneumoniae; identical to SEQ ID NO: 12270
  CDS (1)..(735): transl_table=11

SEQ ID NO: 81518 - protein, 244 aa, Klebsiella pneumoniae; identical to SEQ ID NO: 12271

SEQ ID NO: 81519 - DNA, 927 bp, Aspergillus oryzae; identical to SEQ ID NO: 12272
  CDS (1)..(927)

SEQ ID NO: 81520 - protein, 308 aa, Aspergillus oryzae; identical to SEQ ID NO: 12273

SEQ ID NO: 81521 - DNA, 1401 bp, Zea mays
  CDS (1)..(1401)
atggcttccgctaccacctccatctcgtcgcaccccgccgccctccgcgacgtcaaagctgcgaggattggcgggctgaggcagcagcaggcgagcgtggccccgtcggcggcggcagcgcgtggccagcgcgctcgggcggtgcgatcgctgcgcgcggcggagcctgcgaggcagccggtggcggcttccgcggccgcggcggcgccggccgcgcccgtggccgacgaggcggcggcccttgcggccgtggactacgaggccctggcgcgtgagctggagggcgcgtcgccgctggagatcatggatcgggcgctggccatgttcggctccgaaatcgccatcgccttcagcggcgcggaggacgtggcgctgatcgagtacgccaagctgacggggcgtccgttccgggtgttcagcctggacacggggcgtctgaacccggagacgtaccagctattcgacaaggtggagaagcactacggcatccgcatcgagtacatgttcccggacgcgagcgaggtgcaggagctggtgcgcaccaagggcctcttctccttctacgaggacggccaccaggagtgctgccgcgtgcgcaaggtgcggcccctgcgcagggcgctcagggggctcagggcgtggatcaccggccagaggaaggaccagtcccccggcaccagggccagcatccctctggtccaggttgacccttccttcgaaggcctggacggcggggctggtagcttggtcaagtggaaccccgtggccaacgtcgacggcaaggacatctggactttcctgcggaccatggacgtccctgtcaacgccctgcacgcccagggctacgtgtccatcgggtgcgagccgtgcaccaggcctgtcctgccggggcagcacgagcgggaaggccggtggtggtgggaggacgccaaggccaaggagtgcggcctccacaagggcaacatcgacaaggacggccaggcggcggcggcggcggcggcccccaggactgccaacggcaacggctcggcgggcgccccggacatcttcgagagccccgccgtcgtgtccctcacccgcgccggggtcgagaacctgctgcgcctggagagccgcgccgagccgtggctcgtggtgctgtacgcgccctggtgcccgttctgccaggccatggaggcctcctacgtggagctggccgagaggctggcggggtccggcggcgtgaaggtggcccggttccgcgccgacggcgagcagaagccgttcgcgcaggccgagctgcagctgcagagcttccccaccgtgctcctgttccccagccgcaccgcccggcccatcaagtacccgtcggagaagagggacgtcgactcgctcctcgccttcgtcaacagcctccggtga

SEQ ID NO: 81522 - protein, 466 aa, Zea mays; identical to SEQ ID NO: 12279

SEQ ID NO: 81523 - DNA, 1386 bp, Zea mays; identical to SEQ ID NO: 12280
  CDS (1)..(1386)

SEQ ID NO: 81524 - protein, 461 aa, Zea mays; identical to SEQ ID NO: 12281

SEQ ID NO: 81525 - DNA, 930 bp, Penicillium chrysogenum; identical to SEQ ID NO: 12296
  CDS (1)..(930)

SEQ ID NO: 81526 - protein, 309 aa, Penicillium chrysogenum; identical to SEQ ID NO: 12297

SEQ ID NO: 81527 - DNA, 900 bp, Aspergillus terreus; identical to SEQ ID NO: 12298
  CDS (1)..(900)

SEQ ID NO: 81528 - protein, 299 aa, Aspergillus terreus; identical to SEQ ID NO: 12299

SEQ ID NO: 81529 - DNA, 753 bp, Burkholderia cepacia
  CDS (1)..(753): transl_table=11
atgagcaccgcgaccgccaccgcgctgacgccggaactcgccgcgaaggtcgagcgcctcgacgcgctgctcgcgcagatcggcgagcgtcacgacaaggtgaagttcgcgagcagcctcgccgcggaagacatgctgctcacgcacgcgatcctgtcgaagggcgtgccgatcggcatcttctcgctgaacacgggccgcctgcacgcggaaacgctcggcatgatcgaccgggtgcgcgagcgctacggctacgagatcgagcagttccatccgcagcaggacgcggtcgaccggtacgttgccgagcacggcctgaatgcgttctacgagagcgtcgagctgcgcaagtcgtgctgccacatccgcaaggtcgagccgctgaaccgtgcgctggccgacgtcggcgcgtgggtgacgggccagcgccgcgagcagtcggtcacgcgcgcggagctgcacgaggaagaacaggacgaagcgcgcgggatcgcgaagtacaacccgctcgccgactggacggaagccgacgtgtgggcgtaccttaaggcgtttgacgtgccggtcaatccgctgcatgcgcgcggctacccgagcatcggctgcgagccgtgtacgcgtgcgatccgccccggcgaggacagccgcgcgggccgctggtggtgggagtcgcgcgacacgaaggaatgcgggctgcacatcacgacgatcacgccgattcccgcgaatgccgaagccggcgccgcgcactga

SEQ ID NO: 81530 - protein, 250 aa, Burkholderia cepacia
MSTATATALTPELAAKVERLDALLAQIGERHDKVKFASSLAAEDMLLTHAILSKGVPIGIFSLNTGRLHAETLGMIDRVRERYGYEIEQFHPQQDAVDRYVAEHGLNAFYESVELRKSCCHIRKVEPLNRALADVGAWVTGQRREQSVTRAELHEEEQDEARGIAKYNPLADWTEADVWAYLKAFDVPVNPLHARGYPSIGCEPCTRAIRPGEDSRAGRWWWESRDTKECGLHITTITPIPANAEAGAAH

SEQ ID NO: 81531 - DNA, 1395 bp, Brassica juncea
  CDS (1)..(1395)
atggcactagcgatcaacgtttcttcatcttcttcttctgcgatctcaacctctagcttcccttcttcagagctcaaagtttcagctccacggatcggttcgttgaggttatcggatcgtgtcaatgtctcatcggtgtctctgagtctatccgggaaacgatcctcggtgaagcctctgaatgtgcagtcaattgcaaaggagtcgtttggttctatggtggcttctgaggttacagagaaacaagatgtggtggaagtggaagactttgaggagctagcaaagagtctagagactgcttctcctcttgagattatggacaaagctcttgagacattcggaaacgacatcgcaatcgcctttagtggagcagaagacgttgctctcatcgagtatgctcatcttactggaagacccttcagggttttcagtttggacacagggagattgaatcccgaaacatacagactctttgataccgtggagaagcactatggtattcgaattgagtatatgtttcccgatgctgttgaggttcaagctttggttaggaacaagggtttgttctctttctacgaagatggtcaccaagagtgttgccggatcagaaaggtgagacctttgaggcgtgcgttgaaggggttacgcgcttggatcactggacaaaggaaagatcaatcaccagggacaaggtctgagattcctgttgttcaagttgatccagtgtttgaagggttagatggtggagctggtagtttggtgaagtggaatccagttgcgaacgtcgagggaaacgatgtttggaacttcttgaggacaatggatgttcctgtgaacacccttcacgctgcggggtatgtttcaatcggatgtgagccgtgcacgagagcggttttgcctggtcagcacgagagagaagggagatggtggtgggaagatgctaaggctaaagagtgtggacttcacaaagggaatatcaaggagagtagcaacggaaacgctaccgctaatgtcaatggcacatcctccacggttgctgatatcttcaaaagcgagaatgttgtgagcttgagcaggcaagggatcgagaatctgatgaagctggagaatcgtaaagaggcttggatcgttgtgctttacgcaccttggtgcccgttttgtcaagcgatggaagcttcttttgatgagttggcggataagttgggtgggagtggcgtgaaggtggccaagtttagagctgatggtgaccaaaaggagtttgctaaaagggagctgcagcttgggagcttcccaacaatacttgtgttcccaaagaactcttcaagaccaatcaagtatccatcagagaagagagatgttgattctttgacatcgttcttgaaccttgttcggtga

SEQ ID NO: 81532 - protein, 464 aa, Brassica juncea
MALAINVSSSSSSAISTSSFPSSELKVSAPRIGSLRLSDRVNVSSVSLSLSGKRSSVKPLNVQSIAKESFGSMVASEVTEKQDVVEVEDFEELAKSLETASPLEIMDKALETFGNDIAIAFSGAEDVALIEYAHLTGRPFRVFSLDTGRLNPETYRLFDTVEKHYGIRIEYMFPDAVEVQALVRNKGLFSFYEDGHQECCRIRKVRPLRRALKGLRAWITGQRKDQSPGTRSEIPVVQVDPVFEGLDGGAGSLVKWNPVANVEGNDVWNFLRTMDVPVNTLHAAGYVSIGCEPCTRAVLPGQHEREGRWWWEDAKAKECGLHKGNIKESSNGNATANVNGTSSTVADIFKSENVVSLSRQGIENLMKLENRKEAWIVVLYAPWCPFCQAMEASFDELADKLGGSGVKVAKFRADGDQKEFAKRELQLGSFPTILVFPKNSSRPIKYPSEKRDVDSLTSFLNLVR

SEQ ID NO: 81533 - DNA, 702 bp, Bacillus subtilis; identical to SEQ ID NO: 12304
  CDS (1)..(702): transl_table=11

SEQ ID NO: 81534 - protein, 233 aa, Bacillus subtilis; identical to SEQ ID NO: 12305

SEQ ID NO: 81535 - DNA, 783 bp, Agrobacterium tumefaciens
  CDS (1)..(783): transl_table=11
atggaaatcccggacgtgacaatgaccatcaattcaacaaatgcttctgccgataccgcatccctcgacgccacgcttgccgggctcgatcttgccggacgtctttctttcgttgccggcctcggcgggcgcgcggtcttcaccaccagcctcggcatcgaggatcaggtcatcaccgccgccatcggtacgcatcgtctgccgattgacgtcgtgacgctggaaaccgggcggctgttcaaggagacagtcgatctcatcgatgaaaccgaagaacgtttcggcatcgaaatccgccgcttccgtcccgaacaagacgatatcgacgcctatgcagcgaagtatggtctcaacggcttttacgagagcgtcgaagcccgccacgcctgctgtcatgtcagaaagctgatcccgcttggcaaggcactggagggtgcagctttctggatcaccgggctccgtcgcggccagtccggcaatcgcgccgcgaccccattcgccgagttcgacgctgagcgtaatcttatcaagatcaatgctttggccgactgggacatcgaacagatcagggcctatgtcgccgaggaaaacatccccgtcaacccgttgcatcagcgcggttacccctccatcggctgcgagccgtgtacgcgcgccatcaagcccggcgagcctgagcgcgccggacgatggtggtgggagaacgacgagaagcgcgaatgcggtcttcacgtcgccggtgcggagcagacaccccccgtttccgccatcccgcaacgataa

SEQ ID NO: 81536 - protein, 260 aa, Agrobacterium tumefaciens
MEIPDVTMTINSTNASADTASLDATLAGLDLAGRLSFVAGLGGRAVFTTSLGIEDQVITAAIGTHRLPIDVVTLETGRLFKETVDLIDETEERFGIEIRRFRPEQDDIDAYAAKYGLNGFYESVEARHACCHVRKLIPLGKALEGAAFWITGLRRGQSGNRAATPFAEFDAERNLIKINALADWDIEQIRAYVAEENIPVNPLHQRGYPSIGCEPCTRAIKPGEPERAGRWWWENDEKRECGLHVAGAEQTPPVSAIPQR

SEQ ID NO: 81537 - DNA, 681 bp, Bacillus anthracis; identical to SEQ ID NO: 12306
  CDS (1)..(681): transl_table=11

SEQ ID NO: 81538 - protein, 226 aa, Bacillus anthracis; identical to SEQ ID NO: 12307

SEQ ID NO: 81539 - DNA, 735 bp, Escherichia coli O157
  CDS (1)..(735): transl_table=11
atgtccaaactcgatctaaacgccctgaacgaactgccgaaggtagatcgcattctggcgctggcggaaactaacgcccaactggaaaaactggacgctgaaggccgcgtagcctgggcgctggataatctgcccggtgaatatgtactttcttccagctttggcattcaggcggcggtgagcctgcatctggtgaatcaaattcgcccggatattccggtgatcctcaccgatacgggttacttgttcccggaaacctaccgctttattgacgagttaacggacaaactcaagctcaacctgaaagtgtaccgtgctaccgaaagcgcagcctggcaggaagcacgctacggaaaactgtgggaacagggcgttgaaggcattgaaaagtacaatgacatcaacaaagtcgaaccgatgaaccgggcgctgaaagaacttaacgcgcaaacctggtttgctggcctgcgccgtgaacaatccggcagtcgcgccaatttaccggtgctggcaattcagcgtggcgtatttaaagtgctgccgattatcgactgggataaccgaacgatatatcagtatctgcaaaagaatggcctgaaatatcacccattatgggacgaaggatatttatcggtgggcgatacccatacaacccgtaaatgggaacccggcatggcggaagaagaaacgcgtttctttggcttaaaaagggaatgtgggttacacgaagggtaa

SEQ ID NO: 81540 - protein, 244 aa, Escherichia coli O157
MSKLDLNALNELPKVDRILALAETNAQLEKLDAEGRVAWALDNLPGEYVLSSSFGIQAAVSLHLVNQIRPDIPVILTDTGYLFPETYRFIDELTDKLKLNLKVYRATESAAWQEARYGKLWEQGVEGIEKYNDINKVEPMNRALKELNAQTWFAGLRREQSGSRANLPVLAIQRGVFKVLPIIDWDNRTIYQYLQKNGLKYHPLWDEGYLSVGDTHTTRKWEPGMAEEETRFFGLKRECGLHEG

SEQ ID NO: 81541 - DNA, 798 bp, Rhizobium meliloti; identical to SEQ ID NO: 12314
  CDS (1)..(798): transl_table=11

SEQ ID NO: 81542 - protein, 265 aa, Rhizobium meliloti; identical to SEQ ID NO: 12315

SEQ ID NO: 81543 - DNA, 735 bp, Salmonella typhimurium; identical to SEQ ID NO: 12316
  CDS (1)..(735): transl_table=11

SEQ ID NO: 81544 - protein, 244 aa, Salmonella typhimurium; identical to SEQ ID NO: 12317

SEQ ID NO: 81545 - DNA, 735 bp, Shigella flexneri; identical to SEQ ID NO: 12318
  CDS (1)..(735): transl_table=11

SEQ ID NO: 81546 - protein, 244 aa, Shigella flexneri; identical to SEQ ID NO: 12319

SEQ ID NO: 81547 - DNA, 750 bp, Synechocystis sp
  CDS (1)..(750): transl_table=11
atgtcccatactctgactaagctcgatctacccaccttacaaacggagctggaaaatgccaccgcccaacagatcattacctgggcggcccaaacctttggccctggcttggtgatgagtactagttttggcattcaggcggcggtgatgctccatttagtgactagcattgtgcccaatattcctgttatctggattgacacgggctatttaccgctggaaacctatcaatttgcggatcagttgaccggacggctacagctaaatttaaaggtttaccaatctcccctcagcccagctcgcatggaagctctgtacggcaagctctggcaacaaaaagacgtggaatccctcaaccgttatgatcaaatccgcaaagttgaaccgatgcagagggcattaaaagaactagaggcgatcgcctggttgacggggttaaggagggatcaaactcggcaccgccagaatttgaaaccagtggatctccagggtaatcagtataaagttctccccattttggactggaattctaagatggtttacgaatatctcaccgcccacgatttaccctaccatccgttttttgaccagggttacgtctctgtgggggattggcattctagccggcccctgatggcccacgatgaagatgaaagggatacccgtttccacggcctcaaacaggaatgtggtttacatttacccctgtccccggaagctggccagagtttggattccagtgctttgtag

SEQ ID NO: 81548 - protein, 249 aa, Synechocystis sp; identical to SEQ ID NO: 12141

SEQ ID NO: 81549 - DNA, 720 bp, Thiocapsa roseopersicina; identical to SEQ ID NO: 12320
  CDS (1)..(720): transl_table=11

SEQ ID NO: 81550 - protein, 239 aa, Thiocapsa roseopersicina; identical to SEQ ID NO: 12321

SEQ ID NO: 81551 - DNA, 762 bp, Vibrio cholerae
  CDS (1)..(762): transl_table=11
atgcctaatcgtaccgttccaacactagaagagttactaacgttaaataaggtgcagcaaacgctgcgcctaacggaagtcaatcagcatctggaatccctcactgcgcaagagcgcgtcgtctggggtctagaaaatctgcagggcaatcatgcactgtcatcgagctttggtatccaagccgcagtgatgcttcatttattaacttcagtgaagagtgacattcctgtcgttttaaccgataccggctatctgttcccagaaacctatcagtttatcgatgagttgactgagcggctcaatctgaacttaaaagtttactccgcgcctgtatcagcggcttggcaagaagctcgctacggaaaactgtgggaacaaggtgttgaaggaatcgaacgctacaaccagattaataaagtagaaccgatgcgtagagcattagatgaactcaacattggcacttggttctcgggcttacgacgtgaacagtcacaatcacgagcaagcctaccgattctatcggtacaaaatggcgtgtttaaattcctgccagtgatcgattggaccaataaagaggtgcactattatctcaaggataacgatctaccttatcacccactttgggaacaaggttatctttcggttggtgatacacacaccacacagaaatggcagccgggaatgaatgaagagcaaactcgcttctttggtttaaagcgtgagtgtgggttacacgaagatcataacgatacacatcaataa

SEQ ID NO: 81552 - protein, 253 aa, Vibrio cholerae
MPNRTVPTLEELLTLNKVQQTLRLTEVNQHLESLTAQERVVWGLENLQGNHALSSSFGIQAAVMLHLLTSVKSDIPVVLTDTGYLFPETYQFIDELTERLNLNLKVYSAPVSAAWQEARYGKLWEQGVEGIERYNQINKVEPMRRALDELNIGTWFSGLRREQSQSRASLPILSVQNGVFKFLPVIDWTNKEVHYYLKDNDLPYHPLWEQGYLSVGDTHTTQKWQPGMNEEQTRFFGLKRECGLHEDHNDTHQ

SEQ ID NO: 81553 - DNA, 780 bp, Vibrio parahaemolyticus
  CDS (1)..(780): transl_table=11
atgcttgattctgtggcttccaaaccggagctggcggagttactgacattaacaaagacggagcaaatactccgtcttgcacaaatcaatgtcgaacttgaaccgctgtcggcacaagagcgagtaaagtgggctttggaaaatctggatggagagtttgcggtatcctcaagctttggtatccaagccgctgtcatgcttcatcttgtgactcaagaaaaacctgacatcccaattattcttacggataccggatatctgtttgcagaaacgtatcgctttattgatgagttgacagaaaaactcaaccttaatctaaaagtttatcgagcggagcaaagtgctcaatggcaagaagcacgttatggcaaattatgggagcagggcgttgaggggatcgagaagtacaacaaaataaataaagtcgagccaatgcgtcgtgcattgaaagaacttaatgttggaacatggttttcaggtttacgtagagagcaaagtaaatcacgagcgggtttaccgatactgtcgattcaaaatggcgtgtttaagtttctgcccgtaatcgattggacgaataaagatgttcactactacctcgagcaacatggtcttacctatcacccactttgggaagaaggttacttgtctgttggggatacacatacgacacgtaaatgggagccaggaatgtcagaggaagagactcgcttctttggtttaaagcgtgaatgtggacttcatgaagatgatggtaatgaacaagatggttcaggtatctag

SEQ ID NO: 81554 - protein, 259 aa, Vibrio parahaemolyticus
MLDSVASKPELAELLTLTKTEQILRLAQINVELEPLSAQERVKWALENLDGEFAVSSSFGIQAAVMLHLVTQEKPDIPIILTDTGYLFAETYRFIDELTEKLNLNLKVYRAEQSAQWQEARYGKLWEQGVEGIEKYNKINKVEPMRRALKELNVGTWFSGLRREQSKSRAGLPILSIQNGVFKFLPVIDWTNKDVHYYLEQHGLTYHPLWEEGYLSVGDTHTTRKWEPGMSEEETRFFGLKRECGLHEDDGNEQDGSGI

SEQ ID NO: 81555 - DNA, 777 bp, Vibrio vulnificus; identical to SEQ ID NO: 12322
  CDS (1)..(777): transl_table=11

SEQ ID NO: 81556 - protein, 258 aa, Vibrio vulnificus; identical to SEQ ID NO: 12323

SEQ ID NO: 81557 - DNA, 777 bp, Vibrio vulnificus
  CDS (1)..(777): transl_table=11
atgcttgattctgttgcttcaacgctgcagctatcagaattactctcgttaaccaaggcggagcaaagtatccgccttgccgaaatcaacgttgagttagagatgctgtcagctcaagagagggtcgcttgggctctgcaaaatttggaaggggcacacgctgtttcgtcgagttttgggattcaagcggctgtcatgctgcatttgttatcgaagcagcaagccgatattcccgtcattttgaccgatacgggctacctatttcctgaaacgtatcaatttattgatgagttaactaaatctctaaacctaaacctcaaagtataccgagcgaatgagagtgcaaactggcaggaagctcgatacggtaaactgtgggagcaaggtatagaaggaatagaaaaatacaacaagcttaataaagtcgaacctatgcgtcgtgcactgaatgagcttaatgttaaaacctggttttccggattacgccgagagcaatctcaatcccgagcaggcctacctattctgtcgatacaaaatggagtgtttaaattcttgcctgtagttgattggagtaacaaagacgtacactactatttaaaagaacacggtctttcatatcatcccctttgggagcagggctatctttctgtaggagatacgcatacaactcaaaaatgggagccagggatgagtgaagaagaaactcgtttctttggcttgaagcgtgagtgtggacttcacgaagaagataatgaacaagatggttctggtatttaa

SEQ ID NO: 81558 - protein, 258 aa, Vibrio vulnificus
MLDSVASTLQLSELLSLTKAEQSIRLAEINVELEMLSAQERVAWALQNLEGAHAVSSSFGIQAAVMLHLLSKQQADIPVILTDTGYLFPETYQFIDELTKSLNLNLKVYRANESANWQEARYGKLWEQGIEGIEKYNKLNKVEPMRRALNELNVKTWFSGLRREQSQSRAGLPILSIQNGVFKFLPVVDWSNKDVHYYLKEHGLSYHPLWEQGYLSVGDTHTTQKWEPGMSEEETRFFGLKRECGLHEEDNEQDGSGI

SEQ ID NO: 81559 - DNA, 714 bp, Xylella fastidiosa
  CDS (1)..(714): transl_table=11
atgaccgtacttcccgccttacctcctctggacgatctggaaacgctcaacgtccacctagaaacgctgagtgctgaaaatcgcgtgtgctgggcactggagcgcggtcctgaccaccctgcactgtcttccagcttcggcgcgcaatcggccgtcatgctgcatctactcacccggtttgcaccggatattccggtgatcctggtcgacaccggctatcttttcccagaaacctaccgtttcgccgacacgctgaccgaacgactcaagctcaatctgaaggtataccagccgctgcgtagcggcgcttggacggaagcccgtcatggtcgactatgggaacaagggatcgacggaattaatcaatacaacaccctgcacaaggtcgaaccgatgcgcagggcattagaggaattgcaagtcggcacctggtttaccggcctacgtcgcggacaatccagtacccgtacccaaacatcaatcgtgcaacagcgtgacgagcggtacaaaatcagcccaattgcagactggaccgaccgcgatatctgggaatacatgaaacaccatgatctgccctatcacccgctttgggaacagggctacgtttcaatcggcgacattcacacgacacgccccttggaaccaggcatgcgcgaagaagacacacgcttcttcggattcaaacgtgaatgcgggattcacgagaacatctaa

SEQ ID NO: 81560 - protein, 237 aa, Xylella fastidiosa
MTVLPALPPLDDLETLNVHLETLSAENRVCWALERGPDHPALSSSFGAQSAVMLHLLTRFAPDIPVILVDTGYLFPETYRFADTLTERLKLNLKVYQPLRSGAWTEARHGRLWEQGIDGINQYNTLHKVEPMRRALEELQVGTWFTGLRRGQSSTRTQTSIVQQRDERYKISPIADWTDRDIWEYMKHHDLPYHPLWEQGYVSIGDIHTTRPLEPGMREEDTRFFGFKRECGIHENI

SEQ ID NO: 81561 - DNA, 801 bp, Schizosaccharomyces pombe; identical to SEQ ID NO: 12326
  CDS (1)..(801)

SEQ ID NO: 81562 - protein, 266 aa, Schizosaccharomyces pombe; identical to SEQ ID NO: 12327

SEQ ID NO: 81563 - DNA, 786 bp, Saccharomyces cerevisiae; identical to SEQ ID NO: 12328
  CDS (1)..(786)

SEQ ID NO: 81564 - protein, 261 aa, Saccharomyces cerevisiae; identical to SEQ ID NO: 12329

SEQ ID NO: 81565 - DNA, 1395 bp, Brassica napus; identical to SEQ ID NO: 12330
  CDS (1)..(1395)

SEQ ID NO: 81566 - protein, 464 aa, Brassica napus; identical to SEQ ID NO: 12331

SEQ ID NO: 81567 - DNA, 1401 bp, Glycine max; identical to SEQ ID NO: 12332
  CDS (1)..(1401)

SEQ ID NO: 81568 - protein, 466 aa, Glycine max; identical to SEQ ID NO: 12333

SEQ ID NO: 81569 - DNA, 1401 bp, Glycine max; identical to SEQ ID NO: 12334
  CDS (1)..(1401)

SEQ ID NO: 81570 - protein, 466 aa, Glycine max; identical to SEQ ID NO: 12335

SEQ ID NO: 81571 - DNA, 24 bp, Artificial sequence
  primer
atgtccaaactcgatctaaacgcc

SEQ ID NO: 81572 - DNA, 24 bp, Artificial sequence
  primer
ttacccttcgtgtaacccacattc

SEQ ID NO: 81573 - protein, 236 aa, Artificial sequence
  consensus sequence
  Variant (2)..(13): Xaa in position 2 to 13 is any amino acid
  Variant (14)..(14): Xaa in position 14 is any or no amino acid
  Variant (16)..(16): Xaa in position 16 is any amino acid
  Variant (18)..(21): Xaa in position 18 to 21 is any amino acid
  Variant (23)..(39): Xaa in position 23 to 39 is any amino acid
  Variant (40)..(45): Xaa in position 40 to 45 is any or no amino acid
  Variant (49)..(52): Xaa in position 49 to 52 is any amino acid
  Variant (55)..(85): Xaa in position 55 to 85 is any amino acid
  Variant (86)..(91): Xaa in position 86 to 91 is any or no amino acid
  Variant (93)..(93): Xaa in position 93 is any amino acid
  Variant (94)..(94): Xaa in position 94 is any or no amino acid
  Variant (97)..(107): Xaa in position 97 to 107 is any amino acid
  Variant (108)..(111): Xaa in position 108 to 111 is any or no amino acid
  Variant (114)..(114): Xaa in position 114 is any amino acid
  Variant (116)..(117): Xaa in position 116 to 117 is any amino acid
  Variant (121)..(125): Xaa in position 121 to 125 is any amino acid
  Variant (126)..(127): Xaa in position 126 to 127 is any or no amino acid
  Variant (129)..(130): Xaa in position 129 to 130 is any amino acid
  Variant (132)..(132): Xaa in position 132 is any amino acid
  Variant (134)..(135): Xaa in position 134 to 135 is any amino acid
  Variant (137)..(139): Xaa in position 137 to 139 is any amino acid
  Variant (140)..(140): Xaa in position 140 is any or no amino acid
  Variant (142)..(154): Xaa in position 142 to 154 is any amino acid
  Variant (155)..(164): Xaa in position 155 to 164 is any or no amino acid
  Variant (166)..(167): Xaa in position 166 to 167 is any amino acid
  Variant (169)..(171): Xaa in position 169 to 171 is any amino acid
  Variant (173)..(179): Xaa in position 173 to 179 is any amino acid
  Variant (181)..(190): Xaa in position 181 to 190 is any amino acid
  Variant (192)..(194): Xaa in position 192 to 194 is any amino acid
  Variant (197)..(197): Xaa in position 197 is any amino acid
  Variant (199)..(199): Xaa in position 199 is any amino acid
  Variant (201)..(204): Xaa in position 201 to 204 is any amino acid
  Variant (206)..(215): Xaa in position 206 to 215 is any amino acid
  Variant (216)..(221): Xaa in position 216 to 221 is any or no amino acid
  Variant (223)..(224): Xaa in position 223 to 224 is any amino acid
  Variant (226)..(228): Xaa in position 226 to 228 is any amino acid
  Variant (229)..(231): Xaa in position 229 to 231 is any or no amino acid
  Variant (235)..(235): Xaa in position 235 is any amino acid
WXXXXXXXXXXXXXSXGXXXXVXXXXXXXXXXXXXXXXXXXXXXXDTGXXXXETXXXXXXXXXXXXXXXXXXXXXXXXXXXXXXXXXXXXXGXXLWXXXXXXXXXXXXXXXKVXPXXRALXXXXXXXWXXGXRXXQXXXXRXXXXXXXXXXXXXXXXXXXXXXXKXXPXXXWXXXXXXXYXXXXXXXXXXLXXXGYXSXGXXXXTXXXXXXXXXXXXXXXXRXXGXXXXXXECGXH

SEQ ID NO: 81574 - protein, 27 aa, Artificial sequence
  protein pattern
  Variant (2)..(6): Xaa in position 2 to 6 is any amino acid
  Variant (7)..(7): Xaa in position 7 is Ile, Leu or Val
  Variant (8)..(10): Xaa in position 8 to 10 is any amino acid
  Variant (11)..(11): Xaa in position 11 is Glu, Pro or Ser
  Variant (12)..(12): Xaa in position 12 is Phe or Leu
  Variant (13)..(15): Xaa in position 13 to 15 is any amino acid
  Variant (18)..(18): Xaa in position 18 is any or no amino acid
  Variant (20)..(20): Xaa in position 20 is any amino acid
  Variant (21)..(21): Xaa in position 21 is any or no amino acid
  Variant (23)..(23): Xaa in position 23 is Cys or Asp
  Variant (24)..(25): Xaa in position 24 to 25 is any amino acid
  Variant (26)..(26): Xaa in position 26 is Cys, Ser or Thr
  Variant (27)..(27): Xaa in position 27 is Ser or Thr
YXXXXXXXXXXXXXXGYXSXXGXXXXX

SEQ ID NO: 81575 - protein, 13 aa, Artificial sequence
  protein pattern
  Variant (2)..(2): Xaa in position 2 is Phe or Trp
  Variant (3)..(3): Xaa in position 3 is any amino acid
  Variant (5)..(7): Xaa in position 5 to 7 is any amino acid
  Variant (8)..(8): Xaa in position 8 is any or no amino acid
  Variant (12)..(12): Xaa in position 12 is Ile or Leu
RXXGXXXXECGXH

SEQ ID NO: 81576 - DNA, 1332 bp, Escherichia coli
  CDS (1)..(1332): transl_table=11
atggtaaaggaacgtaaaaccgagttggtcgagggattccgccattcggttccctatatcaatacccaccggggaaaaacgtttgtcatcatgctcggcggtgaagccattgagcatgagaatttctccagtatcgttaatgatatcgggttgttgcacagcctcggcatccgtctggtggtggtctatggcgcacgtccgcagatcgacgcaaatctggctgcgcatcaccacgaaccgctgtatcacaagaatatacgtgtgaccgacgccaaaacactggaactggtgaagcaggctgcgggaacattgcaactggatattactgctcgcctgtcgatgagtctcaataacacgccgctgcagggcgcgcatatcaacgtcgtcagtggcaattttattattgcccagccgctgggcgtcgatgacggcgtggattactgccatagcgggcgtatccggcggattgatgaagacgcgatccatcgtcaactggacagcggtgcaatagtgctaatggggccggtcgctgtttcagtcactggcgagagctttaacctgacctcggaagagattgccactcaactggccatcaaactgaaagctgaaaagatgattggtttttgctcttcccagggcgtcactaatgacgacggtgatattgtctccgaacttttccctaacgaagcgcaagcgcgggtagaagcccaggaagagaaaggcgattacaactccggtacggtgcgctttttgcgtggcgcagtgaaagcctgccgcagcggcgtgcgtcgctgtcatttaatcagttatcaggaagatggcgcgctgttgcaagagttgttctcacgcgacggtatcggtacgcagattgtgatggaaagcgccgagcagattcgtcgcgcaacaatcaacgatattggcggtattctggagttgattcgcccactggagcagcaaggtattctggtacgccgttctcgcgagcagctggagatggaaatcgacaaattcaccattattcagcgcgataacacgactattgcctgcgccgcgctctatccgttcccggaagagaagattggggaaatggcctgtgtggcagttcacccggattaccgcagttcatcaaggggtgaagttctgctggaacgcattgccgctcaggcgaagcagagcggcttaagcaaattgtttgtgctgaccacgcgcagtattcactggttccaggaacgtggatttaccccagtggatattgatttactgcccgagagcaaaaagcagttgtacaactaccagcgtaaatccaaagtgttgatggcggatttagggtaa

SEQ ID NO: 81577 - protein, 443 aa, Escherichia coli; identical to SEQ ID NO: 16230

SEQ ID NO: 81578 - DNA, 1956 bp, Brassica napus; identical to SEQ ID NO: 16157
  CDS (98)..(1870)

SEQ ID NO: 81579 - protein, 590 aa, Brassica napus; identical to SEQ ID NO: 16158

SEQ ID NO: 81580 - DNA, 1326 bp, Photobacterium profundum
  CDS (1)..(1326): transl_table=11
atgaaacttcgtagtactgccctcgtaaaaggctttaggcaatcagccccctacgtgaatgcacactcaggtaaaacggttgtcattatgttaggcggcgaagccattgctgatcctaactttgcaaatattgttaacgatatcgcgctgttaaacagccttgggttacagattgttgtggtatatggcgctcgcccgcaaatatcacacttattaacctcacagggctacacaacgccttaccataaaggcattcgggttaccgacgcacgcgcgctagagttagtaaaacaagcggcggggcaattacagctcgatattacggcacgattttcgatggggctcaacaacacaccaatggcaggggcgcagataaatgtcatcagtggcaatttcattatcgcccagccacttggtatcgatgacggtatcgattattaccatactggccgtattcgccgtattgatatcgatggtattcagcgtcaacttaatcaacattcaattgtattgctcggcccagtggccagctcagtcaccggcgaatgctttaaccttacctcagaagaagtcgcaactcagctagccataagattaaaggccgataagttaattggtttttgctcggaacaaggggttattgaccttgatggtgaagtggcatcagagatgctgcccaacgaagcagaaacggctctacagcgtttaatcgaagcacaagaagatgattgtggtaccgctcgtttcttacgaggggccgttagtgcatgtcgtgctggcgtaccacgaagccatctgattagctataaagaagacggggctttaatccaagagctcttctcgcttgatggtattggtacccaaatcgtgatggcaagtgctgaaaaagtgcgtggtgcaggcattgatgacattggtggtattctcgaccttatctaccctctcgaacaagaaggcattttagtacgtcgctctcgtgaacaactcgaacaagaaatcgaacagttcaccattattgaacgcgatgggctcattattgcttgcgctgcactgtatccatttcctgatgaaaaaattgccgagatggcatgtgttgctgttcaccctgattttagagacggggatcgtggtgtcatactgcttaatcgccttcgtcagcaagccaaagaacagcgcttaaaacacgtttttgtcttaaccactcgcagcgtacattggttcctagagcaaggttttatcgagtccgatgtagaacaattaccgatggctaaaaaagcgttatataacttccaacgtcgatccaagattttagtattggctgtttag

SEQ ID NO: 81581 - protein, 441 aa, Photobacterium profundum
MKLRSTALVKGFRQSAPYVNAHSGKTVVIMLGGEAIADPNFANIVNDIALLNSLGLQIVVVYGARPQISHLLTSQGYTTPYHKGIRVTDARALELVKQAAGQLQLDITARFSMGLNNTPMAGAQINVISGNFIIAQPLGIDDGIDYYHTGRIRRIDIDGIQRQLNQHSIVLLGPVASSVTGECFNLTSEEVATQLAIRLKADKLIGFCSEQGVIDLDGEVASEMLPNEAETALQRLIEAQEDDCGTARFLRGAVSACRAGVPRSHLISYKEDGALIQELFSLDGIGTQIVMASAEKVRGAGIDDIGGILDLIYPLEQEGILVRRSREQLEQEIEQFTIIERDGLIIACAALYPFPDEKIAEMACVAVHPDFRDGDRGVILLNRLRQQAKEQRLKHVFVLTTRSVHWFLEQGFIESDVEQLPMAKKALYNFQRRSKILVLAV

SEQ ID NO: 81582 - DNA, 1851 bp, Oryza sativa (japonica cultivar-group); identical to SEQ ID NO: 16163
  CDS (1)..(1851)

SEQ ID NO: 81583 - protein, 616 aa, Oryza sativa (japonica cultivar-group); identical to SEQ ID NO: 16164

SEQ ID NO: 81584 - DNA, 1794 bp, Oryza sativa (japonica cultivar-group); identical to SEQ ID NO: 16165
  CDS (1)..(1794)

SEQ ID NO: 81585 - protein, 597 aa, Oryza sativa (japonica cultivar-group); identical to SEQ ID NO: 16166

SEQ ID NO: 81586 - DNA, 1830 bp, Arabidopsis thaliana; identical to SEQ ID NO: 16167
  CDS (1)..(1830)

SEQ ID NO: 81587 - protein, 609 aa, Arabidopsis thaliana; identical to SEQ ID NO: 16168

SEQ ID NO: 81588 - DNA, 1371 bp, Vibrio cholerae O1 biovar eltor str. N16961
  CDS (1)..(1371): transl_table=11
ttgcgcatatttaaacaccaaggatgttcagccgtgaaaattcgcagtaccgctctcgtcaaaggatttcgccagtcagcgccctacgttaatgcccaccgtgggaaaaccatggtcgttatgctgggaggagaagcgattgccgataaaaattttcctaacatcatcagcgatatcgctctgctgcacagccttggcgttaaagtggtactcgtgcacggagctcggccacaaatcaatcaaatccttgaaaaaaatcaacgtgatacgccataccacaaaggggtgcggatcactgatgaatcctcactcggcttagtgatgcaagccgccggacaactacaacacgcgatcactgcgcgtctttcgatgagcctcaacaatacgccaatggcgggcactcaactcaacgttgtgagcggcaatttcatcatctctcaaccactaggtatagatgaaggtgtcgattactgccacagcgggcgcattcgccggattgatgtggaaggcatcaaccgtatgctggatttaggttcgattgtgctgcttggcccgattgctagctctgtcactggtgagtgtttcaatctgctttctgaggaagtggcgacccaagtggcgataaaacttaaagccgataagctgatcggtttttgcccacagcaagggatcatagataccaaaggcaacgcgattgccgaactcttcccaagcgatgtagagcgcctcgtcaaaagcatggagcaagagtgcgcaccagatgatgaagagtgtttcagcaccatgcgttttttgcgcgccgctttaaaagcctgccgcgcgggtgtgccacgcagccacttggtgagttacaaagaagatggtgcattaatccaagagctgttctcgtttgatggtatcggcacccagatcgtaatggcgagtgcggagcagatccgccaagccacgattgatgatatcggcggtatttttgatttgattcgtcctctggaagagcaaggcattctggtacgccgctctcgtgaacagttggagcaagagatccataaattcaccatcatcgacaaagatggcttagtgattggctgctcggcactctacccttatccagaagaacgcatggctgagatggcttgtgtcgcgattcatcctgaatatcgtgatggtcaccgcggattgcatttattggtccacagcaagcatcaagccaagcaaatgggcattcgtcacctgtttgtgctaaccactcacagcacacactggttccgtgaacaaggtttcaatgaagtcgatgtcgaagcgttaccgatggcgaaaaagagcttatacaactaccaacgccgctcaaaaattttgatgctgcagctttaa

SEQ ID NO: 81589 - protein, 456 aa, Vibrio cholerae O1 biovar eltor str. N16961
MRIFKHQGCSAVKIRSTALVKGFRQSAPYVNAHRGKTMVVMLGGEAIADKNFPNIISDIALLHSLGVKVVLVHGARPQINQILEKNQRDTPYHKGVRITDESSLGLVMQAAGQLQHAITARLSMSLNNTPMAGTQLNVVSGNFIISQPLGIDEGVDYCHSGRIRRIDVEGINRMLDLGSIVLLGPIASSVTGECFNLLSEEVATQVAIKLKADKLIGFCPQQGIIDTKGNAIAELFPSDVERLVKSMEQECAPDDEECFSTMRFLRAALKACRAGVPRSHLVSYKEDGALIQELFSFDGIGTQIVMASAEQIRQATIDDIGGIFDLIRPLEEQGILVRRSREQLEQEIHKFTIIDKDGLVIGCSALYPYPEERMAEMACVAIHPEYRDGHRGLHLLVHSKHQAKQMGIRHLFVLTTHSTHWFREQGFNEVDVEALPMAKKSLYNYQRRSKILMLQL

SEQ ID NO: 81590 - DNA, 1398 bp, Escherichia coli CFT073; identical to SEQ ID NO: 16169
  CDS (1)..(1398): transl_table=11

SEQ ID NO: 81591 - protein, 465 aa, Escherichia coli CFT073; identical to SEQ ID NO: 16170

SEQ ID NO: 81592 - DNA, 1335 bp, Nitrosomonas europaea ATCC 19718
  CDS (1)..(1335): transl_table=11
atgaaatcggataccgaatttgtcacctggtttcgttccgtcaccccccatatccatgccagccatggaaaagtcttcgtcatcgctttcgggggtgaagtcgttgagaacggaaaatttgttgagctggtgcaggatttcaatctgcttgccagcctcggcatccaactggtgctggtacatggtgcacgcccgcaaattgaatcccggcttcgggcaaatcagcaggaaatgagctatgtgcagggcatgcgtgttactgatgctgcaaccctgcaatgtgtgaaagaagccgtcggcaaagtacgggtcgagatcgaagccctgctgtcgatgggcttacccaacacacccatggccaatgccgccatacgggtagccagcggtaacttcgtaaccgcccggccggtcggtgtgttggaaggcgtggatctgcaatacacgggagaagtacgtcgtatcaatatcacggcaattctcgatcagctcgaacaagggacggtagtactgctctcccctctgggttattcgccgacaggggaaattttcaacctgacgctggaaaatattgccgctgaagtagctgccgctctccaggccgataaattaatttttctggtggatacaccaggaatccggcagcaaactgaatcaggcgccgtattactgccggaactcactgtcaggcagggtaaaacactacttgcaacaatggaaacagcaacagatcagccggatgaggatacccggctctacctgccatgggcgttacatgcatgtgaaaagggagtgaagcgcgttcatctcgtcagccgccatatcgatggcgcactgctgctcgaactgttcactcatagcggtattggcagcatgatcacacgtgacccgttgcaaatcatccgccaagctgaaatcgaagacatcggtgctattctccaattgatcgaaccattagagaatgcaggtatcctggtacggcgcaaccgggaattgctggaaatggaaattgagcgcttcacagtgatcgaacacgacaacatgatcatcgcttgtgcggcactctaccctttcccggatgacaaagcatgcgaactggcctgcctcgcagtacaccccgaatatcgcaaggcaggtatcggccggatactgatcgatcatcttgaagatcaggccagggaacaaggttaccgccgcctgttcgcacttaccacccgtaccactcactggttcgtagaacgcggcttttcggaaaccacccctgaccagcttcctcgactgaaacagaatttttacaactaccagcggcgttccaaggtattcgtcaaattgatctga

SEQ ID NO: 81593 - protein, 444 aa, Nitrosomonas europaea ATCC 19718
MKSDTEFVTWFRSVTPHIHASHGKVFVIAFGGEVVENGKFVELVQDFNLLASLGIQLVLVHGARPQIESRLRANQQEMSYVQGMRVTDAATLQCVKEAVGKVRVEIEALLSMGLPNTPMANAAIRVASGNFVTARPVGVLEGVDLQYTGEVRRINITAILDQLEQGTVVLLSPLGYSPTGEIFNLTLENIAAEVAAALQADKLIFLVDTPGIRQQTESGAVLLPELTVRQGKTLLATMETATDQPDEDTRLYLPWALHACEKGVKRVHLVSRHIDGALLLELFTHSGIGSMITRDPLQIIRQAEIEDIGAILQLIEPLENAGILVRRNRELLEMEIERFTVIEHDNMIIACAALYPFPDDKACELACLAVHPEYRKAGIGRILIDHLEDQAREQGYRRLFALTTRTTHWFVERGFSETTPDQLPRLKQNFYNYQRRSKVFVKLI

SEQ ID NO: 81594 - DNA, 1404 bp, Bordetella parapertussis 12822
  CDS (1)..(1404): transl_table=11
atgcaagaccgctgcccgcaccaagaccacaggagtattccgaccatcatgcccgatctggaaccagacaccgtctccgcgctcgaagcccccgaattcgcccccgcgcaattcgtccgatggttccgcgaagtggcgccctacgtgcatgcgttccgaggcaagaccttcgtggtggcgttcggcggcgagctggtgcaggccggcgccctcaatgtcctggtgcaggacctctccctgctgtcggccctgggcatccacctggtgctggtgcacggctcgcgcccgcaggtcaatgaacagctgcgcctgaagggctacacccagcagttcggccggggcctggcgcccaccgacccggccgcgctggaatgcgccaaggaggcggccggcgagatccgcctggacatcgaggccgccttcagccagggcctgcccaacacgccgatgtcgcattcgcacatccgcgtcctgtcgggcaacttcgtcaccgcccggcccaccggcgtggtggacggcatcgactacaagcacaccggccaggtgcgcaagatcgatgtcgacgcgctcaagttcgccatcgagcagggctcggtggtgctgctctcgccgctgggcttctcgcccaccggcgacgccttcaacctggccatggaagacctggccaccagcgtggcggtggccctgcgcgccgagaaactgatcttcctgtccggcgagcccggcgtgctcgacggcaacggcgccgtcgacaccgagctggcgcgcgtggatgccgacgccctgctggcgcgcggggaactggacgaggacaccacctacttcctgcagcatgcctcgctggccgtcaagcgcggcgtggcgcgcgcccacctggtgccctacgcgctggacggcagcgtgctgctggagatcttcacccacgacggcgtgggcaccatggtggtcgaggacacgctggacgacctgcgcgcagccacgctcgacgacgtgggcgccatcctcagcctgatcgaaccgctggaaaccgacggcaccctggtgccgcgcccgcgcagcgccatcgagcgcgacgtggaacgcttcaccgtgctcgagcacgatggcgtgatctacggctgtgccgcgctgtatccgttccccgaggaccagatggccgagatggcctgcctgatcgtgcaccccgaatggcagggctccggcgaaggcgagatcctgctgcgccacatggagtcgcgcgcccgcgccagcggcgcgcgccgcctgttcgtgctgaccacccgcacttcgcactggttcatgaaacgcggcttcgtacgcggcggcgtcgccgacctgccgcgcgacaagcagaacaattacaaccgctcgcgcaacagcctggttttcatcaagaaactgtaa

SEQ ID NO: 81595 - protein, 467 aa, Bordetella parapertussis 12822
MQDRCPHQDHRSIPTIMPDLEPDTVSALEAPEFAPAQFVRWFREVAPYVHAFRGKTFVVAFGGELVQAGALNVLVQDLSLLSALGIHLVLVHGSRPQVNEQLRLKGYTQQFGRGLAPTDPAALECAKEAAGEIRLDIEAAFSQGLPNTPMSHSHIRVLSGNFVTARPTGVVDGIDYKHTGQVRKIDVDALKFAIEQGSVVLLSPLGFSPTGDAFNLAMEDLATSVAVALRAEKLIFLSGEPGVLDGNGAVDTELARVDADALLARGELDEDTTYFLQHASLAVKRGVARAHLVPYALDGSVLLEIFTHDGVGTMVVEDTLDDLRAATLDDVGAILSLIEPLETDGTLVPRPRSAIERDVERFTVLEHDGVIYGCAALYPFPEDQMAEMACLIVHPEWQGSGEGEILLRHMESRARASGARRLFVLTTRTSHWFMKRGFVRGGVADLPRDKQNNYNRSRNSLVFIKKL

SEQ ID NO: 81596 - DNA, 1308 bp, Chromobacterium violaceum ATCC 12472
  CDS (1)..(1308): transl_table=11
atgctgacccgcgagttcgtccacaccttccgcgaagccgccccctacatcaacgcctaccgcggcaagaccttcgtgctggccatgggcggcgagagcctgctggacggcgacttttccagcatggcccaggacatcaacctgctggtcagcctgggcgtgcgcatcgtgctggtgcacggcatccgcccgcagatcgaaaccctgctcaagcgccacggcatcgcccgcctgttccaccgcgatcgccgcgtcaccgacgccgctaccatggacatcgtcaagcaggcggccggcgccacccgccatgacgtcgaggcccggctgtcgatgggcatgccgcactcgccgatgcacggcgcccacctgcgcgtggccggcggcaacttcgtcaccgcccagccgctcggcgtgctggacggcgtggacatgcagtacaccggccaggtgcggcgcgtggacgccgcggcgatccgccagcgcctggacgccggggaactggtgctgctgaccccggtcggctattcgctgaccggcgagagcttcaacctgaccatggaagagctggccacccacgccgccatcgcgctgaaggcggagaagctgatcttcgtcgtagaaggccgcggcgcggtggagcaggacagcgagctgatcagcacgctgaccgcccagcaagccgagcagctgctgcaggcgggcagcctgcaggacgacgtcgccgcctgcctgccctattgcatacgcgccacccgcgaaggcattccccgcgcccacctggtcagccgccatcaggacggcgcgctgctgctggagcacttcacccgcggcggcaacggcaccatgatcgcccgcgacccgctggtcaaggtccgccacgccagcatagaggacgtaggcgacatcatggggctgatccgcccgctggaggaacagggcattctggtgcgccgcagccgcgagcggctggaggtggagataggcgaatactcggtgctggagcacgacggcaagatctacggctgcgtggcgatgcacccgttcccggaagcggagacggccgaactggcctgcctcgccgtgtcgcaggaaaaacgcgacggcggcttcggcgagatgctgctcaagcacgtggaataccaggcgcgcacccagggcctgcgatcgctgttcgtgctgaccacccagacctcgcactggttcgtcgagcgtggtttcgccgaggccgacaagagctcgctgccgctggcgcgccagcagttttacaattaccagcgccgctcgaaggtgttcgtaaagaagctgtaa

SEQ ID NO: 81597 - protein, 435 aa, Chromobacterium violaceum ATCC 12472
MLTREFVHTFREAAPYINAYRGKTFVLAMGGESLLDGDFSSMAQDINLLVSLGVRIVLVHGIRPQIETLLKRHGIARLFHRDRRVTDAATMDIVKQAAGATRHDVEARLSMGMPHSPMHGAHLRVAGGNFVTAQPLGVLDGVDMQYTGQVRRVDAAAIRQRLDAGELVLLTPVGYSLTGESFNLTMEELATHAAIALKAEKLIFVVEGRGAVEQDSELISTLTAQQAEQLLQAGSLQDDVAACLPYCIRATREGIPRAHLVSRHQDGALLLEHFTRGGNGTMIARDPLVKVRHASIEDVGDIMGLIRPLEEQGILVRRSRERLEVEIGEYSVLEHDGKIYGCVAMHPFPEAETAELACLAVSQEKRDGGFGEMLLKHVEYQARTQGLRSLFVLTTQTSHWFVERGFAEADKSSLPLARQQFYNYQRRSKVFVKKL

SEQ ID NO: 81598 - DNA, 1842 bp, Arabidopsis thaliana; identical to SEQ ID NO: 16175
  CDS (1)..(1842)

SEQ ID NO: 81599 - protein, 613 aa, Arabidopsis thaliana; identical to SEQ ID NO: 16176

SEQ ID NO: 81600 - DNA, 1350 bp, Yersinia pestis biovar Microtus str. 91001
  CDS (1)..(1350): transl_table=11
gtgaaggaacgtagtactgaactggttcaaggatttcgccactcagttccctatatcaatgcgcaccgcggcaagacatttgttgtcatgctaggtggcgaagcgattgaacatgaaaacttctctagtatcgtcaacgatataggcttattacatagccttgggatcagattagtcgtggtatacggtgcccgaccacagattgacagtaatctggcagatcataactacgaacctatttatcataaacatacccgagtgactgacgcccggactctggagatggtcaagcaagcggccggtttattacaactggatatcacggccaggctttcaatgagtttgaacaacaccccactgcaaggtgctcatatcaacgtagttagcggtaactttatcattgctcaaccgctaggtgtggatgatggtgttgattattgccatagcgggcgtatccggcgcattgatgaagaagctattcatcgccaattggataatggcgctatcgttttgctggggccagttgcggtatcggtcacaggtgaaagctttaacctcacatcagaggaagttgcaactcagttagccatcaaactgaaagcggagaaaatgattggattctgctcatcacaaggggtgactgatagcgaaggtaatattatttcagaattgttcccaaacgatgcgcaaaagcggattgaagacctggaacaggatggggattacaattcgggcacagtacgtttcttgcgtggtgccgttaaagcctgccgcagcggtgtgcgccgtagccatttactcagctatcaggaagatggcgctctgattcaagaactcttctcccgtgacggtatcggtacccagattgtcatggaaagtgcggagcaagtccgccgagccaccatcaacgatatcggcggtatcttggaactgattcgcccattggaacaacaagggatcttggtgcgccgttcacgtgaacaattagagatggagatcgataagtttactattattgaacgggataatttaactatcgcttgcgccgccctctatccgttccctgatgaacatattggtgaaatggcttgtgtcgcggtccatccagattatcgcagctcctcccggggagaaatgctgctgaataggataaccaatcaggcgcgacaaatgggccttaaaaagctgtttgtgctgaccacacgcagcattcactggttccaggaacgcggttttacacctgcagaggtagatgttttacctattcaaaaacaggaactgtataactattgtaacgaacggtgcaatagtgatccacacccaacgcctgaaatcagatccagggggtaa

SEQ ID NO: 81601 - protein, 449 aa, Yersinia pestis biovar Microtus str. 91001
MKERSTELVQGFRHSVPYINAHRGKTFVVMLGGEAIEHENFSSIVNDIGLLHSLGIRLVVVYGARPQIDSNLADHNYEPIYHKHTRVTDARTLEMVKQAAGLLQLDITARLSMSLNNTPLQGAHINVVSGNFIIAQPLGVDDGVDYCHSGRIRRIDEEAIHRQLDNGAIVLLGPVAVSVTGESFNLTSEEVATQLAIKLKAEKMIGFCSSQGVTDSEGNIISELFPNDAQKRIEDLEQDGDYNSGTVRFLRGAVKACRSGVRRSHLLSYQEDGALIQELFSRDGIGTQIVMESAEQVRRATINDIGGILELIRPLEQQGILVRRSREQLEMEIDKFTIIERDNLTIACAALYPFPDEHIGEMACVAVHPDYRSSSRGEMLLNRITNQARQMGLKKLFVLTTRSIHWFQERGFTPAEVDVLPIQKQELYNYCNERCNSDPHPTPEIRSRG

SEQ ID NO: 81602 - DNA, 1311 bp, Herminiimonas arsenicoxydans; identical to SEQ ID NO: 16177
  CDS (1)..(1311): transl_table=11

SEQ ID NO: 81603 - protein, 436 aa, Herminiimonas arsenicoxydans; identical to SEQ ID NO: 16178

SEQ ID NO: 81604 - DNA, 1356 bp, Acinetobacter sp. ADP1; identical to SEQ ID NO: 16179
  CDS (1)..(1356): transl_table=11

SEQ ID NO: 81605 - protein, 451 aa, Acinetobacter sp. ADP1; identical to SEQ ID NO: 16180

SEQ ID NO: 81606 - DNA, 1326 bp, Erwinia carotovora subsp. atroseptica SCRI1043; identical to SEQ ID NO: 16181
  CDS (1)..(1326): transl_table=11

SEQ ID NO: 81607 - protein, 441 aa, Erwinia carotovora subsp. atroseptica SCRI1043; identical to SEQ ID NO: 16182

SEQ ID NO: 81608 - DNA, 1320 bp, Mannheimia succiniciproducens MBEL55E; identical to SEQ ID NO: 16183
  CDS (1)..(1320): transl_table=11

SEQ ID NO: 81609 - protein, 439 aa, Mannheimia succiniciproducens MBEL55E; identical to SEQ ID NO: 16184

SEQ ID NO: 81610 - DNA, 1311 bp, Colwellia psychrerythraea 34H; identical to SEQ ID NO: 16193
  CDS (1)..(1311): transl_table=11

SEQ ID NO: 81611 - protein, 436 aa, Colwellia psychrerythraea 34H; identical to SEQ ID NO: 16194

SEQ ID NO: 81612 - DNA, 1320 bp, Dechloromonas aromatica RCB; identical to SEQ ID NO: 16197
  CDS (1)..(1320): transl_table=11

SEQ ID NO: 81613 - protein, 439 aa, Dechloromonas aromatica RCB; identical to SEQ ID NO: 16198

SEQ ID NO: 81614 - DNA, 1329 bp, Thiobacillus denitrificans ATCC 25259; identical to SEQ ID NO: 16199
  CDS (1)..(1329): transl_table=11

SEQ ID NO: 81615 - protein, 442 aa, Thiobacillus denitrificans ATCC 25259; identical to SEQ ID NO: 16200

SEQ ID NO: 81616 - DNA, 1320 bp, Saccharophagus degradans 2-40; identical to SEQ ID NO: 16205
  CDS (1)..(1320): transl_table=11

SEQ ID NO: 81617 - protein, 439 aa, Saccharophagus degradans 2-40; identical to SEQ ID NO: 16206

SEQ ID NO: 81618 - DNA, 1566 bp, Methylobacillus flagellatus KT; identical to SEQ ID NO: 16207
  CDS (1)..(1566): transl_table=11

SEQ ID NO: 81619 - protein, 521 aa, Methylobacillus flagellatus KT; identical to SEQ ID NO: 16208

SEQ ID NO: 81620 - DNA, 1389 bp, Burkholderia xenovorans LB400
  CDS (1)..(1389): transl_table=11
atgaattcccaaaccgacctcgtccccgcgcccgcgagcgctccggcccccgccgcagcaacggaaaacctcgcacagcacgcgcaattcgtcgactggatgcgctcagtcgccccttacatccatgcgttccgtaacaagacgttcgtcgtcggtttcggcggcgaggtggtgcatcaggggctcctgaatgcgctcgtgtccgatatcgcgctgttgcaggcaatgggcatccagatcgtgctggtgcacggctcgcggccgcaggtcgaagagcagatgagcctgcacggcgtggaatccgagttttcgcacggcatgcgcattaccgacgcgcgcgctttggagtccgcgaaagaagcggccggcgaagtacgtctggatatcgaggccgcgatcagccaggggttgccgaacacgccaatggcgcacgcgcacatcagcgtggtgtcgggcaacttcgtgacggcgcggccggtcggcattctcgacggggtcgatttcgcccacaccggcgtggtgcgcaagatcgacgccgattcgatccgccattcgctggcaagccgcaagctggtgctgctctcgccgctcggcttctcgcccaccggcgaggccttcaatctggctatggaagacgtggcgtccgccgcggcaatcgcgctgcgcgccgacaagatcgtgttcctgaccgaaacgccgggcctgatgcaagccggcgaagacggtcccgaactggtgcgcgaactgtcgctcgacgacgcctacaagctgcatgaaagcggcgaagtcaccggcgacgccggcttctacctgaaacactcgatccgcgcctgccgcggcggcgtcgcgcgggcgcacatcatcccttacgcgctcgacggcagcctgctgctcgagctgttcctgcacgacggcgtgggcacgatgatctcgtacgagaatctcgaaagcctgcgcgaagccacgccggacgacgtcggcggcattctggcgctgatcgagccgctcgaatcggacggcacgctggtgcggcgcgggcgtcaccagatcgaacgcgacatcgaccatttctcggtgatcgagcacgatggcgtgctgttcggctgcgcggcgctgtatccgtacacgcaggagcgcatcggcgaaatggcgtgcctgacggtcgcccccgaagcgcaaggcaccggcgacggcgagcggctgttgaagcgcatcgagcagcgcgcgcgggcgcgcggcctgacgcgcattttcgtgctcaccacgcgtaccgaacactggtttctcaaacgcggcttcgtcaaggtcacggtcgacgacctgcccgaagaccgccgcagactctataactggcagcgcaagtcgctcgtgctgatgaaacagctctga

SEQ ID NO: 81621 - protein, 462 aa, Burkholderia xenovorans LB400
MNSQTDLVPAPASAPAPAAATENLAQHAQFVDWMRSVAPYIHAFRNKTFVVGFGGEVVHQGLLNALVSDIALLQAMGIQIVLVHGSRPQVEEQMSLHGVESEFSHGMRITDARALESAKEAAGEVRLDIEAAISQGLPNTPMAHAHISVVSGNFVTARPVGILDGVDFAHTGVVRKIDADSIRHSLASRKLVLLSPLGFSPTGEAFNLAMEDVASAAAIALRADKIVFLTETPGLMQAGEDGPELVRELSLDDAYKLHESGEVTGDAGFYLKHSIRACRGGVARAHIIPYALDGSLLLELFLHDGVGTMISYENLESLREATPDDVGGILALIEPLESDGTLVRRGRHQIERDIDHFSVIEHDGVLFGCAALYPYTQERIGEMACLTVAPEAQGTGDGERLLKRIEQRARARGLTRIFVLTTRTEHWFLKRGFVKVTVDDLPEDRRRLYNWQRKSLVLMKQL

SEQ ID NO: 81622 - DNA, 1338 bp, Shewanella sp. MR-4
  CDS (1)..(1338): transl_table=11
atgaggtgtaaacaacgcgtgcgtaccactgaactggttgatggatttcgtcattccgccccttacgtcaatgcccatagagggaaaacctttgtggtgatgttgggtggcgaggctttagcacaaaatcaatttcgcggcattttaaatgacgtggccctgttgcacagtttaggcattaaagtggtgttagtgtatggcgcgaggccgcaaatcgattcggcattagcggccaatgggattgaacccgcctaccacgaaggtgtacgtatcaccgatgaagactcactcaaagtgatcaagcaggtcgcgggtgcattgcagtttgatatcaccgcacgtttatcgatgagtctaagtaatacgccgatgcaaggcgcgcaaattaacttagtcagcggtaactttgtgatcgcccagccactgggggtcgataatggcatcgatttttgcctaagtggcaaagtgcgccgtatcgatactcaagggcttaagcgtcagctcgataaccactgtattgtgttgatggggccgattgctgcatccgttactggcgaaagctttaacctcaccgccgaagagattgccactcaggttgcgatcaagcttaaggccgacaagatgatcggctttagttcgcaaaatggcatcctcgatcgcaatggcgatgtgattgccgaattaatgccaaatgatgcgcaaaacattctgactaagctcgcagagcaaggttcggcctgtattggtactatggccttcctcaaggcgagtatcgatgcgtgccgcaatggtgtgccccgttgtcatttggtcagttatctcgatgacggtgccttgctgcaggagttgttctcccgtgaaggcataggcacgcaaatcgtgactgaaagcgctgagcgtctgcgccgcgcatcgattagcgatattggcggtgtactgaacttaattcgtcctctggaagaacagggcattttagtgcgccgaagccgtgagcagcttgagattgaaatcgagcagtttatgttgattgagcgtgatggcttagtcattggctgcgccgccctgtatccctttgaagaggataacgccggtgagtttgcctgtttggtggtgcatccggattatcgcgatgcggataggggcagcttattgctgaaaaatatcataggccaggcgcgtagccgtggttattcccgtttgtttgccttgaccacccgcagcattcactggtttttagaacatggctttgtgatcgaagatgtggaagccttaccgcagaagaaaaagcagctgtataactatcagcgccgctctaaaattctcgccctcgatctttaa

SEQ ID NO: 81623 - protein, 445 aa, Shewanella sp. MR-4
MRCKQRVRTTELVDGFRHSAPYVNAHRGKTFVVMLGGEALAQNQFRGILNDVALLHSLGIKVVLVYGARPQIDSALAANGIEPAYHEGVRITDEDSLKVIKQVAGALQFDITARLSMSLSNTPMQGAQINLVSGNFVIAQPLGVDNGIDFCLSGKVRRIDTQGLKRQLDNHCIVLMGPIAASVTGESFNLTAEEIATQVAIKLKADKMIGFSSQNGILDRNGDVIAELMPNDAQNILTKLAEQGSACIGTMAFLKASIDACRNGVPRCHLVSYLDDGALLQELFSREGIGTQIVTESAERLRRASISDIGGVLNLIRPLEEQGILVRRSREQLEIEIEQFMLIERDGLVIGCAALYPFEEDNAGEFACLVVHPDYRDADRGSLLLKNIIGQARSRGYSRLFALTTRSIHWFLEHGFVIEDVEALPQKKKQLYNYQRRSKILALDL

SEQ ID NO: 81624 - DNA, 1338 bp, Shewanella sp. MR-7; identical to SEQ ID NO: 16211
  CDS (1)..(1338): transl_table=11

SEQ ID NO: 81625 - protein, 445 aa, Shewanella sp. MR-7; identical to SEQ ID NO: 16212

SEQ ID NO: 81626 - DNA, 1335 bp, Alkalilimnicola ehrlichei MLHE-1; identical to SEQ ID NO: 16213
  CDS (1)..(1335): transl_table=11

SEQ ID NO: 81627 - protein, 444 aa, Alkalilimnicola ehrlichei MLHE-1; identical to SEQ ID NO: 16214

SEQ ID NO: 81628 - DNA, 1338 bp, Shewanella sp. ANA-3
  CDS (1)..(1338): transl_table=11
atgaggtgtaaacaacgcgtgcgtaccactgaactggttgatggatttcgtcattctgccccttacgtcaatgcccatagagggaaaacctttgtggtgatgttgggtggcgaggctttagcacaaaatcaatttcgcggcattttgaatgacgtggccctgttgcacagtttaggcattaaagtggtgttggtgtatggcgcgaggccgcaaatcgatgcggcgttggcagccaatgggattgaacccgcctaccacgaaggtgtacgtatcaccgatgaagactcgcttaaagtgatcaagcaggtcgcgggcgcattgcagtttgatatcaccgcgcgtttatcgatgagcctcagtaatacgccgatgcaaggcgcgcaaatcaacttagtcagcggtaactttgtgatcgcccagcctctgggggtcgataatggcgtggatttttgtttaagcggcaaagtgcgccgtatcgatactcaagggcttaagcgtcagctcgataatcactgtatcgtgttgatggggccgattgccgcatcggtcactggcgaaagctttaacctcaccgctgaagagattgccactcaagtcgcgatcaagctgaaggccgacaagatgattggctttagttcgcaaaacggcatcctcgatcgcaatggcgatgtgattgctgaattaatgccaaatgacgcgcaaaacattctgactaagctcgctgagcaaggttctgcctgtgtgggcactatggctttcctcaaggcgagcattgatgcgtgccgcaatggtgtgccacgttgccatttggtcagttacctcgatgacggcgccttgctgcaggagttgttctcccgtgagggcataggtacgcaaatcgtgacagaaagcgctgagcgtctgcgccgcgcgtcgattagcgatattggtggcgtactaaacttaattcgtcccttggaagagcaaggcattttggtgcgccgcagtcgtgagcagcttgagattgagatcgagcaatttatgttgattgagcgtgatggcttagtcattggctgtgcggccctgtatcctttcgaggaggataacgccggggagtttgcctgtttggtagtgcacccagattatcgcgatgcggataggggcagtttgctgctgaaaaacatcataggtcaggcgcgtagccgcggttattcccgtttgtttgccttgactacccgcagcattcactggttcttagagcatggctttgtgattgaagatgtggaagccttaccgcagaagaaaaagcagctgtataactatcagcgccgctctaaaattctcgccctcgatctgtaa

SEQ ID NO: 81629 - protein, 445 aa, Shewanella sp. ANA-3
MRCKQRVRTTELVDGFRHSAPYVNAHRGKTFVVMLGGEALAQNQFRGILNDVALLHSLGIKVVLVYGARPQIDAALAANGIEPAYHEGVRITDEDSLKVIKQVAGALQFDITARLSMSLSNTPMQGAQINLVSGNFVIAQPLGVDNGVDFCLSGKVRRIDTQGLKRQLDNHCIVLMGPIAASVTGESFNLTAEEIATQVAIKLKADKMIGFSSQNGILDRNGDVIAELMPNDAQNILTKLAEQGSACVGTMAFLKASIDACRNGVPRCHLVSYLDDGALLQELFSREGIGTQIVTESAERLRRASISDIGGVLNLIRPLEEQGILVRRSREQLEIEIEQFMLIERDGLVIGCAALYPFEEDNAGEFACLVVHPDYRDADRGSLLLKNIIGQARSRGYSRLFALTTRSIHWFLEHGFVIEDVEALPQKKKQLYNYQRRSKILALDL

SEQ ID NO: 81630 - DNA, 1359 bp, Azoarcus sp. BH72
  CDS (1)..(1359): transl_table=11
ttgaacgccgaatccccaaccgcccaggctgcacttcccgttgctgcagactccaccgctcagttcgttgcctgggtgcggggtgctgcgccctacatccacgcttttcgcggcaagaccttcgtggtggcgtttggcggcgaggtggcgggcggtgagcgggcgcaaagcctcgcctacgattgcaacctgctggcggcgctcggaatccgcctggtgctggttcacggtgcgcgtccgcagatcgacgccgaagtcgcccggcgcggactggaaccgcgctttcacaacggcctgagggtcacggatgccgcggcgcttgagtgcgtcaaggcggcgatggcagttacccggttcgaggtcgaggcactgttgtcccagggcttgccgaatacgccgatggccggcagctacatgcgggtcacgggcggcaacttcatcaccgcgcggccgttcggcgtggtcgatggcgtcgacttccaatacaccggtgccgtgcggcgcatcatcgccgacgaaatcaacgccgacctcgaccagcagaacgtggtgctgatcacgccgctgggcgtgtctccggcgggcgaaatcttcaatctctgcatggaagaggtggccgaggcggtggcggttgcgctgaaggccgaaaagctgatctacctgtgcgatgcgccgggcctgctcgaccccgagggcaagctggtggagtcggtcaccgcggacgaggccgcgcgcaagctggaggcgggagaaggcctgaccgaggacctccatctctatctgccgtgcgcgatccgcgccgtccgcaagggcgtgtcgcgctgccacctgatcgaccgcgacaaggacggcgggctgctgctggagttctttacccacgcgggcgtcggcaccgtcgtctcgcgcgatccgcttttccgcctgcgcgaagcgaccatcgacgacgtcggtgcgctggtgtcgctgatctcgccgatggaagccgacggcaccctggtacggcgcgggcgtgaattgctggaacaggaagtcgaccgcttcagcgtcgtcgagcacgacggcgtgctggtgggctgcgcggcgctgtacccgttcagcgacgagagcgcggccgaactggcctgcctcgcggtgatgccggaataccgccgcgccgggttgggcgaccagctcttgcgtcgtatcgaacgccgcgcgcgcatgcagcggctggaacgtctgttcgtgcttaccacgcgcaccgcgcactggttccgcgagcgtggcttcagcgaggtcagtcccgaggcactgccacggcaaaagcgcgagctgtacaacttccagcgccggtccaaggtattcgccaagccgctatga

SEQ ID NO: 81631 - protein, 452 aa, Azoarcus sp. BH72
MNAESPTAQAALPVAADSTAQFVAWVRGAAPYIHAFRGKTFVVAFGGEVAGGERAQSLAYDCNLLAALGIRLVLVHGARPQIDAEVARRGLEPRFHNGLRVTDAAALECVKAAMAVTRFEVEALLSQGLPNTPMAGSYMRVTGGNFITARPFGVVDGVDFQYTGAVRRIIADEINADLDQQNVVLITPLGVSPAGEIFNLCMEEVAEAVAVALKAEKLIYLCDAPGLLDPEGKLVESVTADEAARKLEAGEGLTEDLHLYLPCAIRAVRKGVSRCHLIDRDKDGGLLLEFFTHAGVGTVVSRDPLFRLREATIDDVGALVSLISPMEADGTLVRRGRELLEQEVDRFSVVEHDGVLVGCAALYPFSDESAAELACLAVMPEYRRAGLGDQLLRRIERRARMQRLERLFVLTTRTAHWFRERGFSEVSPEALPRQKRELYNFQRRSKVFAKPL

SEQ ID NO: 81632 - DNA, 1347 bp, Acidovorax sp. JS42
  CDS (1)..(1347): transl_table=11
atgtccacggtcttcaacttcaccttcgttccctggttcaggtccgtggcgccgtacatccacaagttccggcaccagaccttcgtggtgggcctgacgggtgaggccatcgccgcgggcaagctgcagagcatcgtgcaggacctggcgatgatccaggccatgggcgtgaagatcgtgttggtgcatggctttcgcccgcaggtcaacgaacagctgcacgccaaggggcacgccccgcgctactcgcacggcatgcgcgtgaccgattccgtggcgctggactgcgcccaggaggccgcgggccagctgcgctatgagatcgaggccgccttcagccagggcctgcccaacacgcccatggcaggctcgcgcgtgcgcgtgatctcgggcaacttcctgacggcacgacccgtgggcatcgtcgatggcgtagatttccagcactccggcctggtgcgcaaggtggacgtggagggcattcgccgcacgctggagtccgatgccatggtgctcatctcgcccttcggcttctcgcccacgggcgaggctttcaacttggccatggaggaagtcgccacacgcgtggccaccgagctcaaggcagacaagctgctgttcctgaccgaagtgccgggcatccgcatccagccgctggaacccgacgccgaggacaaccccatcgacaccgaactgcccctggccgcagcgcgccagctgctggcccagttgccgcccgcgcagcagccgaccgatgtgggtttttacctgcagcattgcgtgagggcctgcgagcacggcgtggagcgcagccatatcctgccgttcgcggtggacggcgcgctgctgctggagatctacgtgcacgacggcatcggcaccatggtcatcgacgaaaagttggaagagctgcgcgaagccaccatcgacgatgtgggcggcatcatccagctcatcgagccgttcgagcgcgacggcacgctggtcaagcgcgaccgcaccgagatcgagcgcgacatcgccgcctacaccgtgatcgagcacgacggcgtgatcttcggctgcgccgcgctctacccctacccggaggccggcacggccgagatggccgccgtcaccgtgtccccgcaaagccagggcacgggcgacggcgagaagctgctcaagcgcatcgagcagcgcgcgcgcatgctgggcctgtccagcatctttgtgctgaccacgcgcaccatgcactggttcatcaagcggggcttttcgcccgtggacccagactggctgcccgacgcacgcaagcgcaagtacaactgggaccgcaagagccaggtgctggtcaagaagctctga

SEQ ID NO: 81633 - protein, 448 aa, Acidovorax sp. JS42
MSTVFNFTFVPWFRSVAPYIHKFRHQTFVVGLTGEAIAAGKLQSIVQDLAMIQAMGVKIVLVHGFRPQVNEQLHAKGHAPRYSHGMRVTDSVALDCAQEAAGQLRYEIEAAFSQGLPNTPMAGSRVRVISGNFLTARPVGIVDGVDFQHSGLVRKVDVEGIRRTLESDAMVLISPFGFSPTGEAFNLAMEEVATRVATELKADKLLFLTEVPGIRIQPLEPDAEDNPIDTELPLAAARQLLAQLPPAQQPTDVGFYLQHCVRACEHGVERSHILPFAVDGALLLEIYVHDGIGTMVIDEKLEELREATIDDVGGIIQLIEPFERDGTLVKRDRTEIERDIAAYTVIEHDGVIFGCAALYPYPEAGTAEMAAVTVSPQSQGTGDGEKLLKRIEQRARMLGLSSIFVLTTRTMHWFIKRGFSPVDPDWLPDARKRKYNWDRKSQVLVKKL

SEQ ID NO: 81634 - DNA, 1338 bp, Pseudoalteromonas tunicata D2
  CDS (1)..(1338): transl_table=11
atggtcataaatactgcgagaaccactgaacttgttgaaggatttcgtcaatcagcgccttatgttaatgcccatcgcggtaaaacgtttgtattaatgttaggtggcgaagcagttaaccatgcaggttatcgtagcatcattaatgatattgcattactcaatagtttaggcattaaaacagtattggtgtatggcgctcggccacaaatcgataaagcccttcaacaagcacatattcaaagtgaatttcatcaaggtgttcgtattactgatgacgaatcattcaccctgatcaaacaagttgcaggtgctctacagcttgatttaaccgctcgtttatcaaccagcttaagtaataccccaatgtcaggggcacaaattaacgttgtgagcggcaactttgtgattgctcaaccgctaggtgttgccgatggtgttgattattgccattcaggccgtgtacgccgtattgatgttgaaggtattcgtcgccagcttaataacagtggtttagttttattagggccaattgcagcttctgtaacaggtgaaagttttaaccttactgcagaggaagtcgccactcaggttgctatcaaactaaaagctgacaaaatgattggtttttgctctgagaacggcattctaaatgatttaggtgatgtaattcctgaactaatgcctaacgatgctgaaaccgaattagtaaaataccaacaagatcacgatgcttgtgccagcactacggcttttttagcggccagtatagatgcttgtcgcaatgggatcccgcgctgccatttagtcagctatcaccaagatggtgctttgctgcaagagctattttcacgcgatggtatcggcacacaaattgtaacgcaaagcgctgaaatattacgtcgtgcgaccatctctgacattggcggtattttagatttaattcgtccgcttgaagaacaaggctatttagtgcgtcgctcacgcgaacaacttgaaattgaaattgagcaatttaccattattgttcgtgatggtttaattattggctgcgcggcacttaatccgtttgaagaagagcaagctggtgaatttgcctgcttggttgtgcacccacaatatcgtgacgcagatcgcggttctgtattacttcgcactgttattcaacaggcaaaatcattacattacaaaaccttatttgccctaaccacccgcagtattcattggtttttagagcatggctttgagtttgccaatgttgaagatttacctgaaaagaaaaagtcgctgtataactatcagcgccgctcgaaaattttagcgcttaagcttagataa

SEQ ID NO: 81635 - protein, 445 aa, Pseudoalteromonas tunicata D2
MVINTARTTELVEGFRQSAPYVNAHRGKTFVLMLGGEAVNHAGYRSIINDIALLNSLGIKTVLVYGARPQIDKALQQAHIQSEFHQGVRITDDESFTLIKQVAGALQLDLTARLSTSLSNTPMSGAQINVVSGNFVIAQPLGVADGVDYCHSGRVRRIDVEGIRRQLNNSGLVLLGPIAASVTGESFNLTAEEVATQVAIKLKADKMIGFCSENGILNDLGDVIPELMPNDAETELVKYQQDHDACASTTAFLAASIDACRNGIPRCHLVSYHQDGALLQELFSRDGIGTQIVTQSAEILRRATISDIGGILDLIRPLEEQGYLVRRSREQLEIEIEQFTIIVRDGLIIGCAALNPFEEEQAGEFACLVVHPQYRDADRGSVLLRTVIQQAKSLHYKTLFALTTRSIHWFLEHGFEFANVEDLPEKKKSLYNYQRRSKILALKLR

SEQ ID NO: 81636 - DNA, 1251 bp, Oceanospirillum sp. MED92
  CDS (1)..(1251): transl_table=11
atgctgagtggagaagcggttgccgatccgaattttgctaacattgtgcacgatattgctctgcttaatagtctgggggtgcgcttagtacttgtgcatgggtctcgtccacagattgaagaacgcctgcagcagaagcagatcggtactcgtctgcatcatcaccttcgtgttactgatcaggataccctgacctgtgttattgaggcttcagctattgtcagggctgaggtcgaggcgcgcttatcgcttgggttacctaatacgcccatggcaggatcgcgaattaaagtcgtttccggaaactttgtgaccgccaagcctgttggggttctggatggtgtcgatatggcgcatactggccaggtacgccgacttgacagtgatgcgatccgtcagcagttggatgatggcaatattgttctgctctctaatctgggttattcaccgactggtgagctattcaatatcgcagcggaagatgttgcgacctgcactgctgcggccgttcaggcggaaaagctcattttgtttggcgctgatcagggggtgaaggacagttccggtcagttacgcagtgagctgcttacccgaaaggcggaaaggctggtggctcagtatctgtcatcattacaagatagtgataagccgcacacggaactatcccgtcatcttgaggccgctgtgaatgcatgccggagtggtgttaatcgttgtcatctgatcagttataaagaggacggcgcgctgctgggtgaactgttcacccgtgatggtgaaggcaccatggtcttgcaggagtcctatgaaaagctccgccaggctagcattgaagatgttggcgcggtaatggagttgattcaaccacttgaacaggatggtacgctggttcgtcgatcccgtgaagtgctggaaaatgagatcgaacgctttactctgattgagcgagatggcgtggtgatcggatgtgctgcgctttatcccttcccggaagagaatatgggcgagctggcttgtgtagttgtatctgcggaatacaagggtggctccagaggcgacaaactgctgactgcgattgagaaacaagcaacggatgcagggctagagcagttgtttgtcctgaccaccaaaactgctcattggtttgttgagagagggttctctgaacacaaggtggaacaattgccgagcgagaagaaagcgattttcaacctacaacgaaattcaaaggtattcgtaaagtccctttag

SEQ ID NO: 81637 - protein, 416 aa, Oceanospirillum sp. MED92
MLSGEAVADPNFANIVHDIALLNSLGVRLVLVHGSRPQIEERLQQKQIGTRLHHHLRVTDQDTLTCVIEASAIVRAEVEARLSLGLPNTPMAGSRIKVVSGNFVTAKPVGVLDGVDMAHTGQVRRLDSDAIRQQLDDGNIVLLSNLGYSPTGELFNIAAEDVATCTAAAVQAEKLILFGADQGVKDSSGQLRSELLTRKAERLVAQYLSSLQDSDKPHTELSRHLEAAVNACRSGVNRCHLISYKEDGALLGELFTRDGEGTMVLQESYEKLRQASIEDVGAVMELIQPLEQDGTLVRRSREVLENEIERFTLIERDGVVIGCAALYPFPEENMGELACVVVSAEYKGGSRGDKLLTAIEKQATDAGLEQLFVLTTKTAHWFVERGFSEHKVEQLPSEKKAIFNLQRNSKVFVKSL

SEQ ID NO: 81638 - DNA, 1350 bp, marine gamma proteobacterium HTCC2207
  CDS (1)..(1350): transl_table=11
ttggccgctgttgcttataatcgcccgatgactactcaaaactacgtacaattttttcgtgagacttcgccctatatccatgcgcacaggggtaaaacctttgttattgcagtcagtggtgaggcggtgctggacagcaattttgacagcattgttcacgatatagcgctgatgcaaagtctcggggtcaatgtggtgctggtccacggtgcccgtcctcagattgaccagcgtctgcaactggccggtttgctaaccgattttcgccagcaggtgcgcatcactgacggcgatgccatgcagtgtgtcaaagaggcggtgggctctacacgcttccaaattgaagccgcgctgtctatgggcttgcctaattcacccatgcacggtgctcgcgtgcgtgtgatcggtggcaactttatcactgccaaacctgtaggggttcgcgatggcatcgattttcagcgtgccggagaaattcgccgtatcgatagcagcgctattcaaaaccaactcgacgctggtgccttagtgctcatgtcttcgattgggttctcaccgaccggtgaagcgtttaatctcagttaccaggatgtagcgactcaaacagctatagcgctaaatgccgagaaacttattttggtcagccaagcggcgggcataaacgacggcgataacaatctactgcgcaatctttccttacctgaggtgagcgatcttaaggcaacactgaaaaactctggtggcgaagactctgtgatctacggcttactctccgccgcctaccaagcctgtcgcaataatgtcgaccgcgtgcatctggtcggctgcagcgaagacggaacattgctcagtgagctatttactcgcgagggcagcggcacactaataatgcagaatcattctgaagtgattcgagcagccaccatagatgacgttggcggtattcttgatctaatctcgccactggaacagcagggaattttggttaaacgttctcgtgaattactcgagacagaaatttcacgatttacggtagtggtgcatcctgagggcactctgctcggctgcgctgcactctatccgatagcagatagtcatgccggcgagctcgcttgtgttgcgacacatccagaatttcacaatcagggcatcgcttcacgtctgcttaagtgcattgaaaaagatgccacagacaatgggcttgcagtgctatttgtactcactacccaaaccgctcactggtttagagagcaaggtttttccgaggcagaagtcagtgcactgccagcagagaaacagtctctctacaattatcagcgtcaatcgcgcatctttagcaaaaagctttaa

SEQ ID NO: 81639 - protein, 449 aa, marine gamma proteobacterium HTCC2207
MAAVAYNRPMTTQNYVQFFRETSPYIHAHRGKTFVIAVSGEAVLDSNFDSIVHDIALMQSLGVNVVLVHGARPQIDQRLQLAGLLTDFRQQVRITDGDAMQCVKEAVGSTRFQIEAALSMGLPNSPMHGARVRVIGGNFITAKPVGVRDGIDFQRAGEIRRIDSSAIQNQLDAGALVLMSSIGFSPTGEAFNLSYQDVATQTAIALNAEKLILVSQAAGINDGDNNLLRNLSLPEVSDLKATLKNSGGEDSVIYGLLSAAYQACRNNVDRVHLVGCSEDGTLLSELFTREGSGTLIMQNHSEVIRAATIDDVGGILDLISPLEQQGILVKRSRELLETEISRFTVVVHPEGTLLGCAALYPIADSHAGELACVATHPEFHNQGIASRLLKCIEKDATDNGLAVLFVLTTQTAHWFREQGFSEAEVSALPAEKQSLYNYQRQSRIFSKKL

SEQ ID NO: 81640 - DNA, 1215 bp, Oceanobacter sp. RED65
  CDS (1)..(1215): transl_table=11
atgctaggtggcgacactttggcccacggccatttagacaacataattcaagatatcgcattattgagtagtctgggtgttcgcctagttttagttcatggagctcgacctcaaattgatgaattatgtttacaaaaaaacatccaaagtcgcttccacctaaacaagcgcatcactgatgctcctatgatgcaaaccgtacagcaggcagtgggccaactacgctctttgatcgaagcaaaactcagtacgggcacaagcaatagccccatgcatggcgcagatattcgtgtggtcggtggcaattttgtcatggcaaaacccttaggagtcatagacggtgtggatttcgcgcatacaggtcaagttcgccgcgtggatgttcaagcaataaaaaaagtacacgaaaataaagccatcgtgttactaaactgcttaggttatagccgcactggagaaacctataatttagcagtagaggatgtcgccactcataccgccatatctttgcaagctgataagctgatcatgtttggtgatgaaaattgtttgcatgatgttgatggcaatctaattaaagacatcatcagtagtgaaattcaatctcacttagccaccatgaacgatgagcaaacccgccaatacatggctgcaaagcacgccatcgatcaaggggtacatcgctgtcagcatatcagccaccacaaagatggcgctttactcactgagctatttacgttggaaggttcaggcacattggtgagtaaaaagcatcaagagcaaatgcgccaagcaagcctcaatgacgtagtgggcattttagaactgcttagcccattggaagaacaaggcatattagtgcgacgcaatagagaggtcttagaaactgaaatcgcacaattccgagttcttgtgaaagacgatatggtcattggctgtgctgcactctacccgtatgagcatatggctgaacttgcatgcgttgctgtccatcctgaatactatggtggacaacgaggcgaacgtttattgcaagaaattgaaaaagaagctcgccttcagggtattcagcaattgtttgtattaaccacgcaaacgtcgctttggtttgaagagcgtggtttcaaagctgcagacatcaacgctctacctgatagcaaacagtctttgtataattaccaacgaaacagcaaagtgtttttaaagaatctttaa

SEQ ID NO: 81641 - protein, 404 aa, Oceanobacter sp. RED65
MLGGDTLAHGHLDNIIQDIALLSSLGVRLVLVHGARPQIDELCLQKNIQSRFHLNKRITDAPMMQTVQQAVGQLRSLIEAKLSTGTSNSPMHGADIRVVGGNFVMAKPLGVIDGVDFAHTGQVRRVDVQAIKKVHENKAIVLLNCLGYSRTGETYNLAVEDVATHTAISLQADKLIMFGDENCLHDVDGNLIKDIISSEIQSHLATMNDEQTRQYMAAKHAIDQGVHRCQHISHHKDGALLTELFTLEGSGTLVSKKHQEQMRQASLNDVVGILELLSPLEEQGILVRRNREVLETEIAQFRVLVKDDMVIGCAALYPYEHMAELACVAVHPEYYGGQRGERLLQEIEKEARLQGIQQLFVLTTQTSLWFEERGFKAADINALPDSKQSLYNYQRNSKVFLKNL

SEQ ID NO: 81642 - DNA, 1347 bp, Vibrio sp. Ex25; identical to SEQ ID NO: 17400
  CDS (1)..(1347): transl_table=11

SEQ ID NO: 81643 - protein, 448 aa, Vibrio sp. Ex25; identical to SEQ ID NO: 17401

SEQ ID NO: 81644 - DNA, 1224 bp, marine gamma proteobacterium HTCC2143
  CDS (1)..(1224): transl_table=11
atgtttagcggagaagccgtcgcacatactaactttgccaatatcattcacgacatcgctctgctaaacagcctcggggtaaaactggttcttgtgcatggagcaaggccacagattgaagagcggaccatgttacggggcgtcgatagtcagtttgaagacgatattagaattactgattcgcagactttggaatgtgtaaaagatgctacaggttcattaagagcacatatagaagcactgttgactatgggtctggccaactcacccatgcacggttcacagatcagagtatgctccggtaattttgtcgtcgctaagcccattggcattcttgcaggcgttgactaccaacataccggaaccgttagaagaatcgatggtgaaggtgtcgaaaaacaactcgctgacggttctatcgttttattatcgcccattggttattcaccgacgggtgaggtctttaatttatcacatcaggatgttgctactgagatagcgatgacactaaatgcagacaagctcatcgttttttccgagcaggatggcctactgaatagcgatggccacctcatccaaaactgtgaagtcagcgcgatacaacagttgtctgagcaatgtgacgataaacaaactgcccagctactcaagacaattatctctagcattgaaaatggcgtcaatcgttgtcactgcgtcagttataccgatgatggcgcactgttacaggaactttttactcgggacggtgcgggtacattaatttcacacaatcactatgaacagctacgaccggcttctatagaggatgttggtggcattttggaacttattgaaccgctggaggcagcgggcactctagttaagcgatctcgagagttgctagaaaatgaaattgaccagttcaccgtcattgatcgggacgggatgatcctcgcctgtgcagcgctatattcccatgcgggaatccagtcgggggaaatcgcctgcgtcgctactcacccagattatcgaggcgaagatcggggtgaacgcttactggcggcactggaattgcaggctaaaaagtttaagctcaacaacgtgttcgtattgacgacacagacagcccactggtttcaggagctgggttatcttgaagtctcacgcgatcaattgcctgaacaaaaacaaacaccctacaatttgcagcgaaattccaaggtttttatcaaacaactgtaa

SEQ ID NO: 81645 - protein, 407 aa, marine gamma proteobacterium HTCC2143
MFSGEAVAHTNFANIIHDIALLNSLGVKLVLVHGARPQIEERTMLRGVDSQFEDDIRITDSQTLECVKDATGSLRAHIEALLTMGLANSPMHGSQIRVCSGNFVVAKPIGILAGVDYQHTGTVRRIDGEGVEKQLADGSIVLLSPIGYSPTGEVFNLSHQDVATEIAMTLNADKLIVFSEQDGLLNSDGHLIQNCEVSAIQQLSEQCDDKQTAQLLKTIISSIENGVNRCHCVSYTDDGALLQELFTRDGAGTLISHNHYEQLRPASIEDVGGILELIEPLEAAGTLVKRSRELLENEIDQFTVIDRDGMILACAALYSHAGIQSGEIACVATHPDYRGEDRGERLLAALELQAKKFKLNNVFVLTTQTAHWFQELGYLEVSRDQLPEQKQTPYNLQRNSKVFIKQL

SEQ ID NO: 81646 - DNA, 1305 bp, marine gamma proteobacterium HTCC2080
  CDS (1)..(1305): transl_table=11
ttggcgccctccaaccatcacatagagtggtttcgacataccagtccctatatccgggcccaccgtggtcggaccttcgtaatttatttgggtaatggcgctctggaaagcgatcaatttaataatctaataaatgatctctgcctactgcaccttctgggtattaggttggtgcttgtccacgccacgcgtagtgaagttgagcaagcgctggttgctctgggtattactgggcagcttcaccaaggtattcggattactgatgccgaagttttgggtgtggtacgcgacgtttccgcgactcagcgcttgcagttggaaagccaactgtcccaagggcttcccgattcacccatgcacggtgcccgtctgcgagtggtaagtggcaatttcatcacagcgaggcccgttggcattgtcgatggcgtcgatttccttttcacgggcgccgtgcggcggcttgacgccgtcggcatgacagccgccctcgacaatcaggccattgtgctgttgtctccactgggcttttctaccactggagaagtttttaatttgagtgctgacgaagtagcaaccgctaccgcgattgctctgggtgctgacaaattgatttttatgggtgacacagaggggcttaaagataatcaaggaaccctagttcgccagtgcaccgtagccgctgcccgcgcgcttcccattgagaaccccatacaagccagccaacgtgacgccgcctgccgcgcctgtgagcagggtgtcagtcgtgcgcactttctaagctacgcccacaacggtgcacttattgaagaactatttagccatgatggtgctggtaccttggtgagtgaggccgtcttcgagcaacaccgcagagcgagtattgatgatatcgccggcgtgctcgacttagtaaaaccccttgaagaaaccggcgtattagtccgtcgctcccgagagcgttttgaacaggagattaccaactttaccgtattagagcgcgatggtcgggtattagcctgcgctgcactttatccttttgagggtactcagacagctgaaatcgcctgtattgccacccaccccgactaccgcaatagcggcagaggcatgcacttgctcgagcttctgcaaactcaggctcaggaacaaggtattcgccaactctttgtgcttaccactcagactacccactggtttattgagcagggtttcgttgatgccagccttgatcagcttccttccgaacgtcaagcgctctataacttgcaacgaaactctaaagtactgatcaagagcctcgactga

SEQ ID NO: 81647 - protein, 434 aa, marine gamma proteobacterium HTCC2080
MAPSNHHIEWFRHTSPYIRAHRGRTFVIYLGNGALESDQFNNLINDLCLLHLLGIRLVLVHATRSEVEQALVALGITGQLHQGIRITDAEVLGVVRDVSATQRLQLESQLSQGLPDSPMHGARLRVVSGNFITARPVGIVDGVDFLFTGAVRRLDAVGMTAALDNQAIVLLSPLGFSTTGEVFNLSADEVATATAIALGADKLIFMGDTEGLKDNQGTLVRQCTVAAARALPIENPIQASQRDAACRACEQGVSRAHFLSYAHNGALIEELFSHDGAGTLVSEAVFEQHRRASIDDIAGVLDLVKPLEETGVLVRRSRERFEQEITNFTVLERDGRVLACAALYPFEGTQTAEIACIATHPDYRNSGRGMHLLELLQTQAQEQGIRQLFVLTTQTTHWFIEQGFVDASLDQLPSERQALYNLQRNSKVLIKSLD

SEQ ID NO: 81648 - DNA, 1299 bp, Pseudomonas putida GB-1; identical to SEQ ID NO: 16215
  CDS (1)..(1299): transl_table=11

SEQ ID NO: 81649 - protein, 432 aa, Pseudomonas putida GB-1; identical to SEQ ID NO: 16216

SEQ ID NO: 81650 - DNA, 1308 bp, Marinobacter sp. ELB17; identical to SEQ ID NO: 16217
  CDS (1)..(1308): transl_table=11

SEQ ID NO: 81651 - protein, 435 aa, Marinobacter sp. ELB17; identical to SEQ ID NO: 16218

SEQ ID NO: 81652 - DNA, 1863 bp, Arabidopsis thaliana; identical to SEQ ID NO: 16223
  CDS (1)..(1863)

SEQ ID NO: 81653 - protein, 620 aa, Arabidopsis thaliana; identical to SEQ ID NO: 16224

SEQ ID NO: 81654 - DNA, 1728 bp, Oryza sativa subsp; identical to SEQ ID NO: 16227
  CDS (1)..(1728)

SEQ ID NO: 81655 - protein, 575 aa, Oryza sativa subsp; identical to SEQ ID NO: 16228

SEQ ID NO: 81656 - DNA, 1329 bp, Buchnera aphidicola subsp
  CDS (1)..(1329): transl_table=11
atgaaagaacgtaatactgaattagttcagggttttcgtcacagcgttccttacattaatgctcatcgaggtaaaacgtttgtaataatgttaggtggtgaagcgatcaaatatggaaatttttatagtatcattaatgatataggattattacatagtttaggcattcgtttggtagttgtatacggcgcttgtcctcaaattaatactagtttaaaagaaaaaaatatcaaaataatttatcataaatctatacgtattactgatttagcatctttggagcaagtgaaacaggctgcaggaaaattgcaacttgacattaccgcacgtttgtcgatgagtttaactaacacccctcttcaaggagcaaatattagcgtggttagtggtaattttattatttcacaaccattaggagttgatgatggcgtagactactgtcatagtggcagagttaggaggattgataaaaatgcaattaattgtcaattaaataatggagcaatagttttaattggtccagtagctgtttctgtaacaggagaaagttttaatttaacttccgaagaaatagctactcaagttagcattgaactaaaagcagaaaaaatgataggtttttgtggtaatcaaggagtgattaatgacgaaggtaaaattatttctgaattactgtctaatgatataaaaaatataattaaaaaattggaaaaaaaaggtgattatatttcctctactgttcgttttttaaaaggatcaataaaagcctgcaagagtggagttaatcgtagtcatttaattagctatcataaaagcggagctcttttacaagaattattttctcgtgatggtattggtactcaaatggttatggaatcagcagaaaaaataagaggagctagtattaatgatattggaggaatattagaattaattcgtccattagaacataaaggaattttagttcgtagatcacgagagcaattagaaatagaagtagataaatttactattattgaacatgataatttaactattgcttgtgcagcgttatatcctttttttaaggaaaaaataggagaaatggcctgtctagctgttcatcccgattatcgcaattcttctcgtggggacgcattgttaaaaaaaattaaaatgaacgctaaagacatgcacttgaaaagaatttttgtattaacaacccagagtattcattggtttcaagaaagaggttttattttagtggacattgaagttttaccggaaagtaaaaagaagatgtataactatcagcgtggttcaaaaattttaatgattgatgtaatttaa

SEQ ID NO: 81657 - protein, 442 aa, Buchnera aphidicola subsp
MKERNTELVQGFRHSVPYINAHRGKTFVIMLGGEAIKYGNFYSIINDIGLLHSLGIRLVVVYGACPQINTSLKEKNIKIIYHKSIRITDLASLEQVKQAAGKLQLDITARLSMSLTNTPLQGANISVVSGNFIISQPLGVDDGVDYCHSGRVRRIDKNAINCQLNNGAIVLIGPVAVSVTGESFNLTSEEIATQVSIELKAEKMIGFCGNQGVINDEGKIISELLSNDIKNIIKKLEKKGDYISSTVRFLKGSIKACKSGVNRSHLISYHKSGALLQELFSRDGIGTQMVMESAEKIRGASINDIGGILELIRPLEHKGILVRRSREQLEIEVDKFTIIEHDNLTIACAALYPFFKEKIGEMACLAVHPDYRNSSRGDALLKKIKMNAKDMHLKRIFVLTTQSIHWFQERGFILVDIEVLPESKKKMYNYQRGSKILMIDVI

SEQ ID NO: 81658 - DNA, 1314 bp, Haemophilus ducreyi
  CDS (1)..(1314): transl_table=11
atgcgtaatacagaattaattgaatggttcaggcaatcagcgccatacgttaatatgcacagacataaaacttttgtcattatgcttgatggtaacgcaattgcacatccaaattttattaatattaccaacgatattagtttattacatagtttagggattaaattagtaattgtgtttggggcccgttgtcaaattgaaaacttgttaaagcaaaataatatttcttcaagttatcatcataatattcgtgttacagacagcaatatgcttgaaatcattaaacaagctgtgggtggcttacattatgatattttctcccgcttatcgcttaggttaccccattcaccggtgctgaatgtagtcagcagtaatgctattcttgcccaaccgcttggtgtgattgacggcgtagattatggcttgagtggtaaaattagacggattaatattgaggccattcaacagcaattagcgcaaaatgcaattgtcgtgattggtccaatagcgccatcagtaaccggaaaaatgtttaatttggcgtttgaagaaattgcgactcaattagccatcaaacttaaagtggataaattaatagccttttgcgaccgccaaggattactagacgaacagggtaaggtcatttcagatattcacccgcgtgaagccaaacaacatttaaaaaaatttattcagcaaggtgattatcaccattctgccgcgcgttttttacaagcggcgatagatgtttgccatgcaggcattaaacgctcacatttaatcagttatcaaacggatggttctttgttgcaagagttattttcacgtgatggcgttggtactcagctatccgaagcaagctcagaatgtattcgacttgccacatcatttgatattgctggtttattgaatttaattcgcccgttagaggatcaaggtcttttagtcaaacgttcacgtgaacaattagaaatggaaattagccaatatacgattattgaacgtgatggtattgtaattgcttgcgcagctttgatacattatcccgctgagaaaatggcagaaatggcttgtgttgccgtacatcctgattatcgtgattctgcgagaggcgatattttactagaagcgattaaacgacgcgcctataaattaaatattgaaaaattatttgtattaactacccaaacaatacaatggtttcaagaacgaggttttgtgcaaatacaaccaacggatttacccgttgaaaaacaacgccattataattatcaacgtatgtcaaaagtattaatgttggcattggataattag

SEQ ID NO: 81659 - protein, 437 aa, Haemophilus ducreyi
MRNTELIEWFRQSAPYVNMHRHKTFVIMLDGNAIAHPNFINITNDISLLHSLGIKLVIVFGARCQIENLLKQNNISSSYHHNIRVTDSNMLEIIKQAVGGLHYDIFSRLSLRLPHSPVLNVVSSNAILAQPLGVIDGVDYGLSGKIRRINIEAIQQQLAQNAIVVIGPIAPSVTGKMFNLAFEEIATQLAIKLKVDKLIAFCDRQGLLDEQGKVISDIHPREAKQHLKKFIQQGDYHHSAARFLQAAIDVCHAGIKRSHLISYQTDGSLLQELFSRDGVGTQLSEASSECIRLATSFDIAGLLNLIRPLEDQGLLVKRSREQLEMEISQYTIIERDGIVIACAALIHYPAEKMAEMACVAVHPDYRDSARGDILLEAIKRRAYKLNIEKLFVLTTQTIQWFQERGFVQIQPTDLPVEKQRHYNYQRMSKVLMLALDN

SEQ ID NO: 81660 - DNA, 1311 bp, Neisseria meningitidis serogroup B
  CDS (1)..(1311): transl_table=11
atgagcgcgcccgacctctttgtcgcccacttccgcgaagccgtcccctacatccgccaaatgcgcggcaaaacgctggtcgccggcatagacgaccgcctgctcgaaggtgataccttaaacaagctcgccgccgacatcgggctgttgtcgcaactgggcatcaggctcgtcctcatccacggcgcgcgccacttcctcgaccgccacgccgccgctcaaggccgcacgccgcattattgccggggcttgcgcgttaccgacgaaacctcgctcgaacaggcgcagcagtttgccggcaccgtccgcagccgttttgaagccgcattgtgcggcagcgtttccgggttcgcgcgcgcgccttccgtcccgctcgtatcgggcaacttcctgaccgcccgtccgataggtgtgattgacggaaccgatatggaatacgcgggcgttatccgcaaaaccgacaccgccgccctccgtttccaactcgacgcgggcaatatcgtctggctgccgccgctcggacattcctacagcggcaagaccttctatctcgatatgcttcaaaccgccgcctccgccgccgtctcgcttcaggccgaaaaactcgtttacctgaccctttcagacggcatttcccgccccgacggcacgctcgccgaaaccctctcggcacaggaagcgcaatcgctggcggaacacgccggcggcgaaacgcgacggctgatttcgtccgccgttgccgcgctcgaaggcggcgtgcatcgcgtccaaatcctcaacggagccgccgacggcagcctgctgcaagaactcttcacccgcaacggcatcggcacgtccattgccaaagaagccttcgtctccatccggcaggcgcacagcggcgacatcccgcacatcgccgccctcatccgcccgctggaagaacagggcatcctgctgcaccgcagccgcgaatacctcgaaaaccacatttccgaattttccatcctcgaacacgacggcaacctgtacggttgcgccgccctgaaaacctttgccgaagccgattgcggcgaaatcgcctgccttgccgtctcgccgcaggcacaggacggcggctacggcgaacgcctgcttgcccacattatcgataaggcgcgcggcataggcataagcaggctgttcgcactgtccacaaataccggcgaatggtttgccgaacgcggctttcagacggcatcggaagacgagttgcccgaaacgcggcgcaaagactaccgcagcaacggacggaactcgcatattctggtacgtcgcctgcaccgctga

SEQ ID NO: 81661 - protein, 436 aa, Neisseria meningitidis serogroup B
MSAPDLFVAHFREAVPYIRQMRGKTLVAGIDDRLLEGDTLNKLAADIGLLSQLGIRLVLIHGARHFLDRHAAAQGRTPHYCRGLRVTDETSLEQAQQFAGTVRSRFEAALCGSVSGFARAPSVPLVSGNFLTARPIGVIDGTDMEYAGVIRKTDTAALRFQLDAGNIVWLPPLGHSYSGKTFYLDMLQTAASAAVSLQAEKLVYLTLSDGISRPDGTLAETLSAQEAQSLAEHAGGETRRLISSAVAALEGGVHRVQILNGAADGSLLQELFTRNGIGTSIAKEAFVSIRQAHSGDIPHIAALIRPLEEQGILLHRSREYLENHISEFSILEHDGNLYGCAALKTFAEADCGEIACLAVSPQAQDGGYGERLLAHIIDKARGIGISRLFALSTNTGEWFAERGFQTASEDELPETRRKDYRSNGRNSHILVRRLHR

SEQ ID NO: 81662 - DNA, 1323 bp, Pasteurella multocida
  CDS (1)..(1323): transl_table=11
atgcgcagtacagaattagttcattggtttagacaatcaaccccttatgtcaatatgcatagaggcaaaacttttgtcattatgcttgatggggacactattgcttgtccaaattttgttaatattatcaatgatatcagcctgctacatagtttaggcattaagttagttttagtgtttggtgcacgttatcaaatcaatgagctgttacagcaacatcagattgaatcggtctatcataaaaatattcgtattactgacttaacaagtttagaactggtgaaacaagctgtgggtaagctcaattacgatattgcttcacgcttgtcactacgtctccctcattctcctttaattgatgtggtcagcggtaacttcgtattagcccaacctattggcgtagatgacggcatcgattatcaattaagtggcaaaattcgccgtattaatacagaaagtatccagcaacaattagatcgtgatgcgattgtcttaattggaccaattgcaccttctgttactggagaaagctttaatttgcctttcgaagaaattgcttcacagcttgccattaagttaaaagctgaaaaattgataggcttttccgcaacacaaggcatcttagatgaaaacaaccaaacaatcagtgatctgttgccgcaagatgccgagctttacttagctaaactgatacaacaaaaccaatatcacagctctcaagctcgctttttacaagcagctattgaggcttgccgatttggcataaagcgttcacatttgatcagttatgaagaagatggctcactgttgcaggaattatttacgcgtgacggggttggtactcagctatccatggaacattccgaaaccattcgcttagcgacggtcagtgatattcccgcgttactcgaattgattcgtccacttgaacagcaaggaattttagtcaaacgctcacgcgaacaattagaaatggaaattaaccaatatacgattatcgatcgcgatggtgtgattattgcttgtgctgccttaaattgctatgccgatgagaaaatggcagaaatggcttgtgtggcggttcacccagattaccgtaattcttcgcgtggcgatattttattagaagctatccaaaaacgcgctaaacaactgggaattgaaaagctgtttgttctcacaacgcgtacagtacattggttccaagaaagaggttttcaactcgcagagatcgcagatttaccagacaaaaaacgtcaacactataattatcaacgtcgttccaaaatcttgattcaagcgctacaaaataaaaaaggctaa

SEQ ID NO: 81663 - protein, 440 aa, Pasteurella multocida
MRSTELVHWFRQSTPYVNMHRGKTFVIMLDGDTIACPNFVNIINDISLLHSLGIKLVLVFGARYQINELLQQHQIESVYHKNIRITDLTSLELVKQAVGKLNYDIASRLSLRLPHSPLIDVVSGNFVLAQPIGVDDGIDYQLSGKIRRINTESIQQQLDRDAIVLIGPIAPSVTGESFNLPFEEIASQLAIKLKAEKLIGFSATQGILDENNQTISDLLPQDAELYLAKLIQQNQYHSSQARFLQAAIEACRFGIKRSHLISYEEDGSLLQELFTRDGVGTQLSMEHSETIRLATVSDIPALLELIRPLEQQGILVKRSREQLEMEINQYTIIDRDGVIIACAALNCYADEKMAEMACVAVHPDYRNSSRGDILLEAIQKRAKQLGIEKLFVLTTRTVHWFQERGFQLAEIADLPDKKRQHYNYQRRSKILIQALQNKKG

SEQ ID NO: 81664 - DNA, 1347 bp, Photorhabdus luminescens subsp
  CDS (1)..(1347): transl_table=11
atgaaagaacgaagcaccgagttagttgaaggatttcgtcattctgttccgtacatcaatgcacaccgtggtaaaacttttgttatcatgcttggtggagaggctattgctcacgaaaattttaccaatattatcaacgatataggattactgcatagtttaggcatccgcctggtcgtcgtttatggtgccagacctcaaattgagcaaaaccttgcagaccatcattacgaaccggtttaccacaaacacacccgtgttaccgataataaaacattagaattagtcaaacaatctgctggcttgctgcaactggatatcactgcacgcctttctatgaatttgaataataccccgttacaaggtgccaacattaatgttgtcagtggtaacttcattattgctcaacctcttggcgttgatgatggtgtggattattgccacagcggaaaaattcgccgtatcgatgagcatgccataaatcgtcaattagacaatggcgcaatcgtgctaattggccctgtcgcagtttctgtcaccggagagagttttaatctggcatttgaagatgttgctactcaattagctatcaaactacaggctgaaaaactgattggattctgttctactcaaggtgtacaagacaaagacggaaaaattctatcggaagtttttcttaatcaagcaccggaactgattaaagagctagaagttaaaggtgactactattcaggcacagtctgttttttgcggagtgcaataaaagcttgccgtcgtggcgttcgtcgcagccatttattaagttatcaggcagatggttctctacttcaagaattattctcccgagatggtattggcactcaaatagtgatggaaagtgcggaacaaatacgccgagctaatatcaatgatattggtggtattctcgaacttattcgcccactggaacaacagggtattctggttcgccgttcaagagaacaacttgagagagaaattgataaattcatcattatcgaacgcgataacctaactatcgcctgtgccgcgctctacccttatcctgaagagaaaattggcgaaatggcttgtttagcggtgaatcctaaataccgcagctctttaagaggtgaagtattactgaatcgcattgcggaacacgccaaacagctcggactggaaaaactgtttgttctgactacccgcagcattcattggttccaagagcgaggttttgagcccgcagaactctcaatgctaccgattcagaaacaagtgttatataactatcagcgccgttctaaaattcttatgctgaatttggaaccacagcctggattcacataa

SEQ ID NO: 81665 - protein, 448 aa, Photorhabdus luminescens subsp
MKERSTELVEGFRHSVPYINAHRGKTFVIMLGGEAIAHENFTNIINDIGLLHSLGIRLVVVYGARPQIEQNLADHHYEPVYHKHTRVTDNKTLELVKQSAGLLQLDITARLSMNLNNTPLQGANINVVSGNFIIAQPLGVDDGVDYCHSGKIRRIDEHAINRQLDNGAIVLIGPVAVSVTGESFNLAFEDVATQLAIKLQAEKLIGFCSTQGVQDKDGKILSEVFLNQAPELIKELEVKGDYYSGTVCFLRSAIKACRRGVRRSHLLSYQADGSLLQELFSRDGIGTQIVMESAEQIRRANINDIGGILELIRPLEQQGILVRRSREQLEREIDKFIIIERDNLTIACAALYPYPEEKIGEMACLAVNPKYRSSLRGEVLLNRIAEHAKQLGLEKLFVLTTRSIHWFQERGFEPAELSMLPIQKQVLYNYQRRSKILMLNLEPQPGFT

SEQ ID NO: 81666 - DNA, 1299 bp, Pseudomonas aeruginosa
  CDS (1)..(1299): transl_table=11
atgcccgactacgtcaactggttacgtcacgcttcgccctacatcaactcgcaccgggaccgcaccttcgtggtcatgctccccggcgaaggggtggagcatcccaatttcggcaatatcgtccacgacctagtccttctccacagcctcggtgcgcgcctggtgctggtgcacggttcgcgtccgcagatcgaggcgcgcctggccgcgcgcggcctggctccgcgctatcaccgcgacctgcgagtgaccgatgcaccgaccctggagtgcgtcatcgacgccgtgggtagcctgcgcatcgccatcgaggcgcggctgtcgatggacatggccgcctcgccgatgcagggcgcgcgcctgcgggtcgctggcggcaacctggtcaccgcgcggccgatcggcgtggtcgagggtgtcgactatcaccataccggtgaggtccgtcgcatcgaccgcaagggtattggccgccttctcgacgagcgcagcatcgttctgctctcgccgctgggctactcgccgaccggggaaatcttcaacctggcctgtgaagacgtggccatgcgcgccgccatcgacctggaagcggaaaagctgattctctacggcgccgaacagggcttgctggacgcatccggcaaactggtccgcgaactgcgcccgcagcaggtgcccgcgcacctgcaacggctgggcaacagctaccaggccgagctgctggacgccgcggcgcaggcctgccgggccggggtcaagcgcagccatatcgtcagctacaccgaggacggcgcgctgctcagcgagctattcacccgcaccggcaacggcaccctggtcgcccaggagcagttcgagcagttgcgcgaggcgggcatcgaggacgttggcgggctgatcgagctgatccgcccgctggaagagcagggcatcctggtacgccgttcccgcgaggtgctggaacgcgagatcgaacagttcagcatcgtcgagcgcgaagggctgatcatcgcctgcgccgcgctctacccgatcgccgattccgaggcgggcgagctggcctgtctggcggtcaacccggagtaccgccacggcgggcgtggcgacgaactgctggagcggatcgaggagcgcgcgcgcggactcggcctgaagaccctgttcgtgctcaccacgcggaccgcgcactggttccgcgagcgcggcttccagcctagcagcgtcgaacggctaccggcggcgcgggcctcgctgtacaacttccagcgcaattcgcaggtattcgagaagagcctgtga

SEQ ID NO: 81667 - protein, 432 aa, Pseudomonas aeruginosa; identical to SEQ ID NO: 16232

SEQ ID NO: 81668 - DNA, 1299 bp, Pseudomonas putida; identical to SEQ ID NO: 16233
  CDS (1)..(1299): transl_table=11

SEQ ID NO: 81669 - protein, 432 aa, Pseudomonas putida; identical to SEQ ID NO: 16234

SEQ ID NO: 81670 - DNA, 1332 bp, Salmonella typhimurium; identical to SEQ ID NO: 17422
  CDS (1)..(1332): transl_table=11

SEQ ID NO: 81671 - protein, 443 aa, Salmonella typhimurium; identical to SEQ ID NO: 17423

SEQ ID NO: 81672 - DNA, 1338 bp, Shewanella oneidensis
  CDS (1)..(1338): transl_table=11
atgaggtgtaaacaacgcgtgcgtaccactgaactggttgatggatttcgtcattccgccccttacgtcaatgcccatagagggaaaacctttgtggtgatgctgggtggagaagctttggcacaaaatcaatttcgcggcattctgaatgacgtggcgttgttgcacagtttaggcattaaagtggtgttggtgtatggtgcgaggccgcaaatcgatgcagcgttagccgctaatgggattgaacccgcctaccatgatggtgtacgtatcaccgatgaagactcgctaaaagtgattaagcaagtggcgggtgcattgcagtttgatattacggcgcgtttatccatgagcttaagcaatacgcccatgcaaggcgcacaaatcaacttagtcagcggtaactttgtcattgcccagcccttaggggtcgataatggcgtggatttttgtttaagcggcaaggtgcgccggattgatgcgcaggggcttaagcgtcagctcgataatcactgtatcgtattgatggggccgattgcggcatccgttactggtgaaagttttaatcttaccgctgaagaaattgctactcaggtagcgataaaacttaaagcagacaagatgattggttttagttcgcaaaatggcattctcgatcgcaatggagatgtgattgccgagttaatgccaaatgatgcgcaaaagattcttaataagctcgcagagcagggttcagcctgtattggcactatggccttcctcaaggccagtattgatgcttgccgcaatggcgtgccccgctgccatttggttagctatctcgacgacggcgctttgctgcaggaactgttttcccgcgaggggattggtacgcagatcgtgaccgagagtgctgaacgtttacgccgtgcatcgattagcgatattggcggtattctcaatctgatccgtccgttagaggagcagggcattttggtgcgccgtagtcgtgagcagctcgagatcgaaattgagcagtttatgctgattgagcgtgatggcttagtgattggctgtgcggctttgtatccgttcgaagaagataatgccggggagtttgcttgccttgtggtgcatccagattatcgcgatgccgacagggggagcttgctgctgaagaatattattggtcaggcccgcagccgtggttattcacggttgtttgcattaacaacccgcagcattcactggtttttagagcatggctttgtgattgaagatgtggatgcattgccgcagaagaaaaagcagctgtataactatcagcgccgctccaaaattctcgcccttgatctataa

SEQ ID NO: 81673 - protein, 445 aa, Shewanella oneidensis
MRCKQRVRTTELVDGFRHSAPYVNAHRGKTFVVMLGGEALAQNQFRGILNDVALLHSLGIKVVLVYGARPQIDAALAANGIEPAYHDGVRITDEDSLKVIKQVAGALQFDITARLSMSLSNTPMQGAQINLVSGNFVIAQPLGVDNGVDFCLSGKVRRIDAQGLKRQLDNHCIVLMGPIAASVTGESFNLTAEEIATQVAIKLKADKMIGFSSQNGILDRNGDVIAELMPNDAQKILNKLAEQGSACIGTMAFLKASIDACRNGVPRCHLVSYLDDGALLQELFSREGIGTQIVTESAERLRRASISDIGGILNLIRPLEEQGILVRRSREQLEIEIEQFMLIERDGLVIGCAALYPFEEDNAGEFACLVVHPDYRDADRGSLLLKNIIGQARSRGYSRLFALTTRSIHWFLEHGFVIEDVDALPQKKKQLYNYQRRSKILALDL

SEQ ID NO: 81674 - DNA, 1338 bp, Vibrio parahaemolyticus; identical to SEQ ID NO: 17424
  CDS (1)..(1338): transl_table=11

SEQ ID NO: 81675 - protein, 445 aa, Vibrio parahaemolyticus; identical to SEQ ID NO: 17425

SEQ ID NO: 81676 - DNA, 1338 bp, Vibrio vulnificus
  CDS (1)..(1338): transl_table=11
gtgaaaattcgcagcacggcattagttaaaggtttcagacaatccactccgtacgtcaacgcgcaccgcggcaaaaccatggttattctccttggtggtgaagcgatcgctgacaaaaacttcagcaatattattaatgatatagctctaatgcacagccttggcgttaaagtggttctggtctatggtgccagaccgcaaatcaatcaattacttgacaagcaatcaagccaaaccccttatcacaaacacattcgtgtgactgacgaaaactcactttcgatagttatgcaagctgctggacagttgcaattggcgatcacagccagcctctccatgagcttgaataatacgccgatggccggaacgcacctcaatgtggtcagtggaaattttgtcatcgctcaaccattaggtatagatgaaggtgtcgattactgccacagtggtcgcattcgtcgcattgataccgaggccatcaatcgctccttggatcaaggttccatcgtactgctggggccgattgccagttcggtgactggtgaatgctttaacttgctttctgaagaagtagcaacacaagtggcgatcaaacttaaagccgacaaactgattggcttttgttctgagcaaggcgtgattgatgaagagggcaatgccgtcgccgagttgtttccaagcgatgcggagaaattcattcaaaagctctcggtcgatgtcgatcccgatagtgacttccattccggcacactgcgttttctcaaaggggcagtggcagcttgccgcgctggcgttccccgtagccatttaatcagttacaaaattgatggggctttaatccaagaactgttttcatttgacggtatcggcacacaagtggtcatggccagtgctgagcaagttcgtcaggcttgcattgatgatattggcggcattcttgaactgattcgccctctggaagagcaaggcattctagtaaggcgctctcgcgagcaacttgagcaagaggttgaacgctttaccatcattgagaaagatggcctgatcattggctgcgccgccttgtacccttatatcgatgagcatatggcggagatggcgtgtgtggccattcatcctgattatcgcgatggtaaccgtggcctgttgctgctcaattacatgaagcatcggtcgaaatccatcggcattgagcaaatttttgttctcaccacgcacagcgttcattggtttagagagcaaggtttctacgaaattggcgtcgactcactgccaatggcgaagaaaagtttgtacaactatcagcgtcgttcaaaaattttggcactgccactttga

SEQ ID NO: 81677 - protein, 445 aa, Vibrio vulnificus
MKIRSTALVKGFRQSTPYVNAHRGKTMVILLGGEAIADKNFSNIINDIALMHSLGVKVVLVYGARPQINQLLDKQSSQTPYHKHIRVTDENSLSIVMQAAGQLQLAITASLSMSLNNTPMAGTHLNVVSGNFVIAQPLGIDEGVDYCHSGRIRRIDTEAINRSLDQGSIVLLGPIASSVTGECFNLLSEEVATQVAIKLKADKLIGFCSEQGVIDEEGNAVAELFPSDAEKFIQKLSVDVDPDSDFHSGTLRFLKGAVAACRAGVPRSHLISYKIDGALIQELFSFDGIGTQVVMASAEQVRQACIDDIGGILELIRPLEEQGILVRRSREQLEQEVERFTIIEKDGLIIGCAALYPYIDEHMAEMACVAIHPDYRDGNRGLLLLNYMKHRSKSIGIEQIFVLTTHSVHWFREQGFYEIGVDSLPMAKKSLYNYQRRSKILALPL

SEQ ID NO: 81678 - DNA, 1776 bp, Oryza sativa; identical to SEQ ID NO: 16243
  CDS (1)..(1776)

SEQ ID NO: 81679 - protein, 591 aa, Oryza sativa; identical to SEQ ID NO: 16244

SEQ ID NO: 81680 - DNA, 25 bp, Artificial sequence
  primer
atggtaaaggaacgtaaaaccgagt

SEQ ID NO: 81681 - DNA, 24 bp, Artificial sequence
  primer
ttaccctaaatccgccatcaacac

SEQ ID NO: 81682 - protein, 543 aa, Artificial sequence
  consensus sequence
  Variant (2)..(3): Xaa in position 2 to 3 is any amino acid
  Variant (6)..(8): Xaa in position 6 to 8 is any amino acid
  Variant (11)..(14): Xaa in position 11 to 14 is any amino acid
  Variant (16)..(17): Xaa in position 16 to 17 is any amino acid
  Variant (19)..(19): Xaa in position 19 is any amino acid
  Variant (21)..(23): Xaa in position 21 to 23 is any amino acid
  Variant (24)..(24): Xaa in position 24 is any or no amino acid
  Variant (26)..(38): Xaa in position 26 to 38 is any amino acid
  Variant (39)..(42): Xaa in position 39 to 42 is any or no amino acid
  Variant (44)..(45): Xaa in position 44 to 45 is any amino acid
  Variant (48)..(49): Xaa in position 48 to 49 is any amino acid
  Variant (52)..(54): Xaa in position 52 to 54 is any amino acid
  Variant (56)..(56): Xaa in position 56 is any amino acid
  Variant (58)..(58): Xaa in position 58 is any amino acid
  Variant (60)..(60): Xaa in position 60 is any amino acid
  Variant (62)..(62): Xaa in position 62 is any amino acid
  Variant (65)..(67): Xaa in position 65 to 67 is any amino acid
  Variant (69)..(80): Xaa in position 69 to 80 is any amino acid
  Variant (81)..(81): Xaa in position 81 is any or no amino acid
  Variant (83)..(83): Xaa in position 83 is any amino acid
  Variant (86)..(88): Xaa in position 86 to 88 is any amino acid
  Variant (90)..(94): Xaa in position 90 to 94 is any amino acid
  Variant (96)..(96): Xaa in position 96 is any amino acid
  Variant (98)..(102): Xaa in position 98 to 102 is any amino acid
  Variant (104)..(104): Xaa in position 104 is any amino acid
  Variant (106)..(106): Xaa in position 106 is any amino acid
  Variant (109)..(113): Xaa in position 109 to 113 is any amino acid
  Variant (114)..(114): Xaa in position 114 is any or no amino acid
  Variant (116)..(118): Xaa in position 116 to 118 is any amino acid
  Variant (119)..(131): Xaa in position 119 to 131 is any or no amino acid
  Variant (133)..(134): Xaa in position 133 to 134 is any amino acid
  Variant (138)..(139): Xaa in position 138 to 139 is any amino acid
  Variant (141)..(141): Xaa in position 141 is any amino acid
  Variant (143)..(143): Xaa in position 143 is any amino acid
  Variant (146)..(147): Xaa in position 146 to 147 is any amino acid
  Variant (149)..(149): Xaa in position 149 is any amino acid
  Variant (151)..(154): Xaa in position 151 to 154 is any amino acid
  Variant (156)..(157): Xaa in position 156 to 157 is any amino acid
  Variant (159)..(160): Xaa in position 159 to 160 is any amino acid
  Variant (162)..(164): Xaa in position 162 to 164 is any amino acid
  Variant (166)..(168): Xaa in position 166 to 168 is any amino acid
  Variant (170)..(174): Xaa in position 170 to 174 is any amino acid
  Variant (177)..(182): Xaa in position 177 to 182 is any amino acid
  Variant (184)..(184): Xaa in position 184 is any amino acid
  Variant (188)..(188): Xaa in position 188 is any amino acid
  Variant (192)..(195): Xaa in position 192 to 195 is any amino acid
  Variant (196)..(196): Xaa in position 196 is any or no amino acid
  Variant (198)..(200): Xaa in position 198 to 200 is any amino acid
  Variant (202)..(205): Xaa in position 202 to 205 is any amino acid
  Variant (207)..(207): Xaa in position 207 is any amino acid
  Variant (209)..(209): Xaa in position 209 is any amino acid
  Variant (211)..(221): Xaa in position 211 to 221 is any amino acid
  Variant (222)..(228): Xaa in position 222 to 228 is any or no amino acid
  Variant (230)..(253): Xaa in position 230 to 253 is any amino acid
  Variant (254)..(336): Xaa in position 254 to 336 is any or no amino acid
  Variant (338)..(343): Xaa in position 338 to 343 is any amino acid
  Variant (345)..(346): Xaa in position 345 to 346 is any amino acid
  Variant (349)..(349): Xaa in position 349 is any amino acid
  Variant (351)..(351): Xaa in position 351 is any amino acid
  Variant (353)..(358): Xaa in position 353 to 358 is any amino acid
  Variant (361)..(361): Xaa in position 361 is any amino acid
  Variant (364)..(364): Xaa in position 364 is any amino acid
  Variant (368)..(370): Xaa in position 368 to 370 is any amino acid
  Variant (372)..(372): Xaa in position 372 is any amino acid
  Variant (375)..(380): Xaa in position 375 to 380 is any amino acid
  Variant (381)..(381): Xaa in position 381 is any or no amino acid
  Variant (383)..(384): Xaa in position 383 to 384 is any amino acid
  Variant (386)..(386): Xaa in position 386 is any amino acid
  Variant (388)..(390): Xaa in position 388 to 390 is any amino acid
  Variant (392)..(393): Xaa in position 392 to 393 is any amino acid
  Variant (395)..(397): Xaa in position 395 to 397 is any amino acid
  Variant (400)..(400): Xaa in position 400 is any amino acid
  Variant (404)..(405): Xaa in position 404 to 405 is any amino acid
  Variant (407)..(407): Xaa in position 407 is any amino acid
  Variant (410)..(410): Xaa in position 410 is any amino acid
  Variant (412)..(412): Xaa in position 412 is any amino acid
  Variant (415)..(415): Xaa in position 415 is any amino acid
  Variant (418)..(422): Xaa in position 418 to 422 is any amino acid
  Variant (424)..(428): Xaa in position 424 to 428 is any amino acid
  Variant (429)..(429): Xaa in position 429 is any or no amino acid
  Variant (431)..(435): Xaa in position 431 to 435 is any amino acid
  Variant (440)..(440): Xaa in position 440 is any amino acid
  Variant (442)..(446): Xaa in position 442 to 446 is any amino acid
  Variant (447)..(452): Xaa in position 447 to 452 is any or no amino acid
  Variant (454)..(454): Xaa in position 454 is any amino acid
  Variant (457)..(458): Xaa in position 457 to 458 is any amino acid
  Variant (460)..(463): Xaa in position 460 to 463 is any amino acid
  Variant (465)..(468): Xaa in position 465 to 468 is any amino acid
  Variant (470)..(471): Xaa in position 470 to 471 is any amino acid
  Variant (474)..(476): Xaa in position 474 to 476 is any amino acid
  Variant (477)..(485): Xaa in position 477 to 485 is any or no amino acid
  Variant (487)..(489): Xaa in position 487 to 489 is any amino acid
  Variant (491)..(494): Xaa in position 491 to 494 is any amino acid
  Variant (496)..(496): Xaa in position 496 is any amino acid
  Variant (500)..(503): Xaa in position 500 to 503 is any amino acid
  Variant (506)..(508): Xaa in position 506 to 508 is any amino acid
  Variant (511)..(517): Xaa in position 511 to 517 is any amino acid
  Variant (520)..(525): Xaa in position 520 to 525 is any amino acid
  Variant (528)..(529): Xaa in position 528 to 529 is any amino acid
  Variant (530)..(533): Xaa in position 530 to 533 is any or no amino acid
  Variant (535)..(535): Xaa in position 535 is any amino acid
  Variant (537)..(542): Xaa in position 537 to 542 is any amino acid
VXXFRXXXPYXXXXRXXTXVXXXXGXXXXXXXXXXXXXXXXXDXXLLXXLGXXXVXVXGXRXQIXXXLXXXXXXXXXXXXXRXTDXXXLXXXXXAXGXXXXXIXAXLSXXXXXXPXXXXXXXXXXXXXXXXVXXGNFXXAXPXGVXXGXDXXXXGXXRXXDXXXIXXXLXXXXXVLXXXXXXSXTGEXFNLXXXXXAXXXAXXXXAXKXIXXXXXXXXXXXXXXXXXXGXXXXXXXXXXXXXXXXXXXXXXXXXXXXXXXXXXXXXXXXXXXXXXXXXXXXXXXXXXXXXXXXXXXXXXXXXXXXXXXXXXXXXXXXXXXXXXXXXXXXXXXXXXXLXXXXXXCXXGVXRXHXXXXXXDGXLLXELFXXXGXGTXXXXXXXEXXRXAXXXDXXGXXXLIXPLEXXGXLVXRXREXLEXXXXXFXXXXXXDXXXXXCAALXPXXXXXXXXXXXEXACXXVXXXXRXXXXGXXLLXXXXXXXXXXXXAXXXGXXXXFXLTTXXXXWFXXXGFXXXXXXXLPXXXXXXYNXXXXXXRXSXXXXXXL

SEQ ID NO: 81683 - protein, 25 aa, Artificial sequence
  protein pattern
  Variant (2)..(2): Xaa in position 2 is any or no amino acid
  Variant (5)..(5): Xaa in position 5 is Phe, Ile, Leu or Val
  Variant (6)..(6): Xaa in position 6 is any amino acid
  Variant (7)..(7): Xaa in position 7 is Ala or Ser
  Variant (8)..(10): Xaa in position 8 to 10 is any amino acid
  Variant (12)..(12): Xaa in position 12 is Ile or Val
  Variant (13)..(13): Xaa in position 13 is any amino acid
  Variant (14)..(14): Xaa in position 14 is Ala, Asp, Glu, Gly, Asn or Ser
  Variant (16)..(16): Xaa in position 16 is any amino acid
  Variant (18)..(20): Xaa in position 18 to 20 is any amino acid
  Variant (21)..(21): Xaa in position 21 is Ala, Ser or Thr
  Variant (23)..(24): Xaa in position 23 to 24 is any amino acid
  Variant (25)..(25): Xaa in position 25 is Lys or Arg
GXNFXXXXXXGXXXGXDXXXXGXXX

SEQ ID NO: 81684 - protein, 28 aa, Artificial sequence
  protein pattern
  Variant (3)..(3): Xaa in position 3 is any amino acid
  Variant (5)..(5): Xaa in position 5 is Ala, Cys, Ser, Thr or Val
  Variant (7)..(7): Xaa in position 7 is any amino acid
  Variant (8)..(8): Xaa in position 8 is Ile, Leu or Val
  Variant (9)..(9): Xaa in position 9 is Asp, Gly, Pro or Ser
  Variant (10)..(12): Xaa in position 10 to 12 is any amino acid
  Variant (13)..(13): Xaa in position 13 is Asp, Gly, Asn, Ser or Thr
  Variant (15)..(15): Xaa in position 15 is Ala, Gly, Ser or Val
  Variant (16)..(16): Xaa in position 16 is Ala, Ile, Leu or Val
  Variant (17)..(17): Xaa in position 17 is Ile or Leu
  Variant (18)..(18): Xaa in position 18 is any amino acid
  Variant (20)..(20): Xaa in position 20 is Phe, Ile or Leu
  Variant (22)..(23): Xaa in position 22 to 23 is any amino acid
  Variant (24)..(24): Xaa in position 24 is Ala, Asp, Glu, Gly or Thr
  Variant (26)..(26): Xaa in position 26 is any amino acid
GVXRXHXXXXXXXGXXXXEXFXXXGXGT

SEQ ID NO: 81685 - protein, 21 aa, Artificial sequence
  protein pattern
  Variant (2)..(4): Xaa in position 2 to 4 is any amino acid
  Variant (5)..(5): Xaa in position 5 is Ile or Leu
  Variant (6)..(6): Xaa in position 6 is Phe or Tyr
  Variant (7)..(7): Xaa in position 7 is Ala, Leu or Val
  Variant (9)..(9): Xaa in position 9 is Ser or Thr
  Variant (11)..(11): Xaa in position 11 is any amino acid
  Variant (12)..(12): Xaa in position 12 is Ala, Ser or Thr
  Variant (13)..(14): Xaa in position 13 to 14 is any amino acid
  Variant (17)..(17): Xaa in position 17 is any amino acid
  Variant (18)..(18): Xaa in position 18 is Glu, Lys or Arg
  Variant (19)..(19): Xaa in position 19 is any amino acid
  Variant (20)..(20): Xaa in position 20 is Asp or Gly
GXXXXXXLXTXXXXWFXXXXF

SEQ ID NO: 81686 - protein, 19 aa, Artificial sequence
  protein pattern
  Variant (2)..(2): Xaa in position 2 is any amino acid
  Variant (3)..(3): Xaa in position 3 is Ala, Ser or Val
  Variant (4)..(4): Xaa in position 4 is any amino acid
  Variant (7)..(7): Xaa in position 7 is Ile, Leu or Val
  Variant (8)..(10): Xaa in position 8 to 10 is any amino acid
  Variant (12)..(13): Xaa in position 12 to 13 is any amino acid
  Variant (15)..(15): Xaa in position 15 is Phe, Leu, Met or Val
  Variant (17)..(17): Xaa in position 17 is Ala, Ile, Leu or Val
  Variant (18)..(18): Xaa in position 18 is any amino acid
  Variant (19)..(19): Xaa in position 19 is Phe, Ile, Leu, Met or Val
RXXXPYXXXXRXXTXVXXX

SEQ ID NO: 81687 - protein, 18 aa, Artificial sequence
  protein pattern
  Variant (2)..(2): Xaa in position 2 is any amino acid
  Variant (3)..(3): Xaa in position 3 is Ile, Leu or Val
  Variant (4)..(4): Xaa in position 4 is Ile, Leu, Met or Val
  Variant (5)..(6): Xaa in position 5 to 6 is any amino acid
  Variant (7)..(7): Xaa in position 7 is Asp or Glu
  Variant (8)..(8): Xaa in position 8 is Asp, Glu, Gly or Asn
  Variant (9)..(11): Xaa in position 9 to 11 is any amino acid
  Variant (12)..(12): Xaa in position 12 is Ala or Gly
  Variant (17)..(17): Xaa in position 17 is any amino acid
  Variant (18)..(18): Xaa in position 18 is Pro, Gln, Ser or Thr
FXXXXXXXXXXXCAALXX

SEQ ID NO: 81688 - protein, 27 aa, Artificial sequence
  protein pattern
  Variant (2)..(2): Xaa in position 2 is Phe, Ile, Leu or Val
  Variant (3)..(3): Xaa in position 3 is Ala, Gly, Asn, Ser or Val
  Variant (4)..(4): Xaa in position 4 is Phe, Leu or Met
  Variant (5)..(5): Xaa in position 5 is Ile, Leu or Met
  Variant (6)..(7): Xaa in position 6 to 7 is any amino acid
  Variant (8)..(8): Xaa in position 8 is Leu or Met
  Variant (9)..(9): Xaa in position 9 is Asp or Gly
  Variant (10)..(10): Xaa in position 10 is Ala, Ile, Leu or Val
  Variant (11)..(12): Xaa in position 11 to 12 is any amino acid
  Variant (14)..(14): Xaa in position 14 is any or no amino acid
  Variant (16)..(16): Xaa in position 16 is any amino acid
  Variant (17)..(17): Xaa in position 17 is any or no amino acid
  Variant (19)..(21): Xaa in position 19 to 21 is any amino acid
  Variant (23)..(23): Xaa in position 23 is Ile or Val
  Variant (24)..(24): Xaa in position 24 is Asp, Glu, Asn, Gln or Ser
  Variant (25)..(26): Xaa in position 25 to 26 is any amino acid
DXXXXXXXXXXXVXVXXGXXXQXXXXL

SEQ ID NO: 81689 - protein, 28 aa, Artificial sequence
  protein pattern
  Variant (2)..(2): Xaa in position 2 is Ile or Val
  Variant (4)..(4): Xaa in position 4 is Asp or Thr
  Variant (5)..(7): Xaa in position 5 to 7 is any amino acid
  Variant (9)..(13): Xaa in position 9 to 13 is any amino acid
  Variant (14)..(14): Xaa in position 14 is any or no amino acid
  Variant (16)..(16): Xaa in position 16 is any or no amino acid
  Variant (18)..(18): Xaa in position 18 is any amino acid
  Variant (19)..(19): Xaa in position 19 is Ile, Leu or Val
  Variant (20)..(22): Xaa in position 20 to 22 is any amino acid
  Variant (23)..(23): Xaa in position 23 is Phe, Ile or Leu
  Variant (24)..(24): Xaa in position 24 is any amino acid
  Variant (25)..(25): Xaa in position 25 is Ala or Ser
  Variant (26)..(26): Xaa in position 26 is any amino acid
  Variant (27)..(27): Xaa in position 27 is Phe, Ile or Leu
  Variant (28)..(28): Xaa in position 28 is Cys, Ser or Thr
RXTXXXXLXXXXXXAXGXXXXXXXXXXX

SEQ ID NO: 81690 - protein, 28 aa, Artificial sequence
  protein pattern
  Variant (2)..(2): Xaa in position 2 is Phe, Ile, Leu, Met or Val
  Variant (4)..(4): Xaa in position 4 is Ala, Cys or Gly
  Variant (5)..(5): Xaa in position 5 is Phe, Ile, Leu, Met or Val
  Variant (6)..(6): Xaa in position 6 is Ala or Val
  Variant (7)..(11): Xaa in position 7 to 11 is any amino acid
  Variant (13)..(13): Xaa in position 13 is any amino acid
  Variant (14)..(16): Xaa in position 14 to 16 is any or no amino acid
  Variant (18)..(19): Xaa in position 18 to 19 is any amino acid
  Variant (20)..(20): Xaa in position 20 is Gly, Ile or Leu
  Variant (21)..(21): Xaa in position 21 is Ile, Leu, Met or Val
  Variant (22)..(27): Xaa in position 22 to 27 is any amino acid
  Variant (28)..(28): Xaa in position 28 is Ala, Asp, Gly, Ser or Thr
EXAXXXXXXXXRXXXXGXXXXXXXXXXX

SEQ ID NO: 81691 - protein, 14 aa, Artificial sequence
  protein pattern
  Variant (2)..(4): Xaa in position 2 to 4 is any amino acid
  Variant (6)..(7): Xaa in position 6 to 7 is any amino acid
  Variant (8)..(8): Xaa in position 8 is Ile or Leu
  Variant (9)..(9): Xaa in position 9 is any amino acid
  Variant (11)..(11): Xaa in position 11 is Asp or Glu
  Variant (13)..(13): Xaa in position 13 is Leu or Met
AXXXAXXXXAXKXI

SEQ ID NO: 81692 - DNA, 876 bp, Escherichia coli
  CDS (1)..(876): transl_table=11
atgaccagtagctatctgcattttccggagtttgatccggtcattttctcaataggacccgtggcgcttcactggtacggcctgatgtatctggtgggtttcatttttgcaatgtggctggcaacacgacgggcgaatcgtccgggcagcggctggaccaaaaatgaagttgaaaacttactctatgcgggcttcctcggcgtcttcctcgggggacgtattggttatgttctgttctacaatttcccgcagtttatggccgatccgctgtatctgttccgtgtctgggacggcggcatgtctttccacggcggcctgattggcgttatcgtggtgatgattatcttcgcccgccgtactaaacgttccttcttccaggtctctgattttatcgcaccactcattccgtttggtcttggtgccgggcgtctgggcaactttattaacggtgaattgtggggccgcgttgacccgaacttcccgtttgccatgctgttccctggctcccgtacagaagatattttgctgctgcaaaccaacccgcagtggcaatccattttcgacacttacggtgtgctgccgcgccacccatcacagctttacgagctgctgctggaaggtgtggtgctgtttattatcctcaacctgtatattcgtaaaccacgcccaatgggagctgtctcaggtttgttcctgattggttacggcgcgtttcgcatcattgttgagtttttccgccagcccgacgcgcagtttaccggtgcctgggtgcagtacatcagcatggggcaaattctttccatcccgatgattgtcgcgggtgtgatcatgatggtctgggcatatcgtcgcagcccacagcaacacgtttcctaa

SEQ ID NO: 81693 - protein, 291 aa, Escherichia coli
MTSSYLHFPEFDPVIFSIGPVALHWYGLMYLVGFIFAMWLATRRANRPGSGWTKNEVENLLYAGFLGVFLGGRIGYVLFYNFPQFMADPLYLFRVWDGGMSFHGGLIGVIVVMIIFARRTKRSFFQVSDFIAPLIPFGLGAGRLGNFINGELWGRVDPNFPFAMLFPGSRTEDILLLQTNPQWQSIFDTYGVLPRHPSQLYELLLEGVVLFIILNLYIRKPRPMGAVSGLFLIGYGAFRIIVEFFRQPDAQFTGAWVQYISMGQILSIPMIVAGVIMMVWAYRRSPQQHVS

SEQ ID NO: 81694 - DNA, 912 bp, Prochlorococcus marinus str. NATL1A
  CDS (1)..(912): transl_table=11
atggaacatatttttttagagcttagatcacctgggcctgatttgtttcaactgggccctttttctttaaggtggtatggattgctaatagctatttcagttttagtaggtctaaatttatcaagtgagttggcctcaaaaaaaggattaaaaaaaagccttattaacgatttacttcctattttagttttggcatctgtaattggtgcaagaatttattatgttgcatttgaatggagaaattacactggaaaaaacttctggagttcaattaatttcctgaacttaaatattcctcttcccagtgccctagaaatctggggaggaggaattgcaattcatggggcactgataatgggtacattgtccattatatttttttgccgctggagaaaagaacctttttgggatgttattgatgttttggtcccctcagttgcattaggccaagcaataggtagatggggaaatttttttaataatgaagcttttgggatacctacaaatttaccttggaaattatttataccttatagatttaggccagaaatcttctcaacacaagattattttcaccctacctttctttatgaatccgtatggaatatttttgtttttggcatactgatttttctttttagaaagtcaaataaaaaagaacttaagcttccacctggtagcttaagttgcttgtatttaatcacttacagcttaggcaggttttggatagaaggcttaagaactgatcctctctgcttgggtggggttccacctttttgtgagggaggactaagaatcgcacaattgattagcttatttttaattagtgcaggtttattaggaatatggagaatttatgtttctaaaaaagcgctccccgatccttcctcaattaatgggagaaatcaatga

SEQ ID NO: 81695 - protein, 303 aa, Prochlorococcus marinus str. NATL1A
MEHIFLELRSPGPDLFQLGPFSLRWYGLLIAISVLVGLNLSSELASKKGLKKSLINDLLPILVLASVIGARIYYVAFEWRNYTGKNFWSSINFLNLNIPLPSALEIWGGGIAIHGALIMGTLSIIFFCRWRKEPFWDVIDVLVPSVALGQAIGRWGNFFNNEAFGIPTNLPWKLFIPYRFRPEIFSTQDYFHPTFLYESVWNIFVFGILIFLFRKSNKKELKLPPGSLSCLYLITYSLGRFWIEGLRTDPLCLGGVPPFCEGGLRIAQLISLFLISAGLLGIWRIYVSKKALPDPSSINGRNQ

SEQ ID NO: 81696 - DNA, 783 bp, Herminiimonas arsenicoxydans
  CDS (1)..(783): transl_table=11
atgcccgatccgattgcactcgctatcggtccgctcgcgatacgctggtacggtttgatgtacctcgccgcatttgcgcaattcatctggctggcgcgtattcgcatcaagcagccgcatattgccagcgctggctggaagaaggaagacatcgatgacatgctgttctacggcgtgctcggcgtcatcgtcggcggccggctgggtgaagtaattttctacgatccggcatactatttctcgcatccgctggaaatcttcaagatctggaaaggcggcatgtcctttcacggcggcttcctcggtgtgctgtttgcgatgaacatctgggcccgcaggcagggacgcaatgttctggacgtatgggatttcatcgcacccatggtgccgctcggttatgccttcggccgcctcggcaatttcatcaatgccgaattgccgggtcgcgtcgccgatgcatcgctgccgtgggccatgatctggccgaatgtcgataatctgccgcgtcatccatcgcccttgtatcaggcgctggtcgatggcttgctgatgtttatcctgctgtggatattctcgcgtaaagcgcgcccgcgcatggcggtcggcggcatgttcgcgttgctgtatggctcggcgcgcttcttcaccgaatacttccgcatgccggattacgaagtccatttcgccgggatcacgatttctgccggacagatgttgtcagtgccgctcatcatccttggcgtcgccatgttgatactcgcataccggaagaaggctgcatga

SEQ ID NO: 81697 - protein, 260 aa, Herminiimonas arsenicoxydans
MPDPIALAIGPLAIRWYGLMYLAAFAQFIWLARIRIKQPHIASAGWKKEDIDDMLFYGVLGVIVGGRLGEVIFYDPAYYFSHPLEIFKIWKGGMSFHGGFLGVLFAMNIWARRQGRNVLDVWDFIAPMVPLGYAFGRLGNFINAELPGRVADASLPWAMIWPNVDNLPRHPSPLYQALVDGLLMFILLWIFSRKARPRMAVGGMFALLYGSARFFTEYFRMPDYEVHFAGITISAGQMLSVPLIILGVAMLILAYRKKAA

SEQ ID NO: 81698 - DNA, 858 bp, Bradyrhizobium sp. ORS278
  CDS (1)..(858): transl_table=11
atgacgcctctcctcatcgactttcccgtgttcgacccggtcgcgatcgcgatcggtccgttcgcgatccgctggtacgcattggcctatatctgcggcatcgtgatcggctggctctacgcccgctcgctgctgaagaaggaccgactgtggggcggcccggcgccgatctcgctgctccagctcgacgacttcatcctgtgggccacgatcggcatcatcctgggcggccgcaccggctatgtgctgttctataatctgccgttctttatcaagaacccgctcgagatctttcagctgtggaacggcggcatgtcgttccatggcggcttcatgggctgcgtggtcgcggtgatctggttcgcccgccgcaacggcctgccgatcctgtcgctcggcgacatcaccaccgcggtggccccgatcggcctgctgctcggccgcatcgccaatttcatcaatggcgaattgtggggccgcgccgccgatgcgagcgtgccctgggcgatgatcttcccgcacgatccgacccatctgccgcgtcatccgagccagctctatgaagcgggtctcgaaggcgtcgtgctgttcatcgcgctggccatcatgatccgcttcggcgcgctgaagcggccgggcctgatcctcggcggcttcatcggcctctacggcatcgcgcgtatcgtcagcgagctgttccgcgaacccgacgtgcaactcggctttctctggcgcggcctcaccatgggcatggtgctctcggtgccgatgctgatcgtcggtgcaatcctggtgatcagggcgttgcgccagcccgaggtccatcacgccactccctcgctgcaggcccagccgtga

SEQ ID NO: 81699 - protein, 285 aa, Bradyrhizobium sp. ORS278
MTPLLIDFPVFDPVAIAIGPFAIRWYALAYICGIVIGWLYARSLLKKDRLWGGPAPISLLQLDDFILWATIGIILGGRTGYVLFYNLPFFIKNPLEIFQLWNGGMSFHGGFMGCVVAVIWFARRNGLPILSLGDITTAVAPIGLLLGRIANFINGELWGRAADASVPWAMIFPHDPTHLPRHPSQLYEAGLEGVVLFIALAIMIRFGALKRPGLILGGFIGLYGIARIVSELFREPDVQLGFLWRGLTMGMVLSVPMLIVGAILVIRALRQPEVHHATPSLQAQP

SEQ ID NO: 81700 - DNA, 789 bp, Dichelobacter nodosus VCS1703A
  CDS (1)..(789): transl_table=11
atgccgatggctttggttcaccctcaaataaatcccaatatttttgaaatcggtcccattcatgccacatggtatggattgatgtatgtcattggttttatgctcggttattggttgggcaaacgacgcagccaaaaaacgccgaactggaacgctgccatgctcgatgatttgctgacatatttaatgattgccgtgattttaggcggtcgcgtgggctatgttttgttttacggcatgagctattgggcgcaagattggctttatcctttgaaaatttatcaaggcggcatgtcgtttcacggcggattattgggcgtagtgtttgcttgttttctttttgcgcgcaaataccacatgaaaacgttgacggttggcgattttgtggcgccgctgtttccgttagggctttttttcggcagattgggcaattttattaacggcgaattgtggggacgggtaacagatgttccgtgggcaatgatttttccgcacgcgcccgattatttgccgcggcacccaacgcaattatatgaagcggcgttagaagggttggttttatttatcgtactttattgttatgcgcgaaaaccgcgaccgcgtggacgcgtggttggcgtttttttgttgggttacggtatcgcgcgttttatcgttgaattttggcggcagcccgatgcgcatttgggttttattggatttcattggttaacgatggggcaagcgttatgcattccaatgattgtaattggtattggattatgtttgcgcccagttaaagcgcaatga

SEQ ID NO: 81701 - protein, 262 aa, Dichelobacter nodosus VCS1703A
MPMALVHPQINPNIFEIGPIHATWYGLMYVIGFMLGYWLGKRRSQKTPNWNAAMLDDLLTYLMIAVILGGRVGYVLFYGMSYWAQDWLYPLKIYQGGMSFHGGLLGVVFACFLFARKYHMKTLTVGDFVAPLFPLGLFFGRLGNFINGELWGRVTDVPWAMIFPHAPDYLPRHPTQLYEAALEGLVLFIVLYCYARKPRPRGRVVGVFLLGYGIARFIVEFWRQPDAHLGFIGFHWLTMGQALCIPMIVIGIGLCLRPVKAQ

SEQ ID NO: 81702 - DNA, 852 bp, Neisseria gonorrhoeae FA 1090
  CDS (1)..(852): transl_table=11
atgattatccatcaccaattcgatcccgtcctcatcagtatcggcccgcttgccgtccgctggtatgccttaagctacatcctcggatttattctttttacctttctcggcagaaggcgcatcgcgcaaggcttgtccgtttttaccaaagaatcgctcgacgacttcctgacatggggcattttgggcgtgattttgggcggacgcttgggctatgtcctgttttacaaattctccgactacctcgcccatccgcttgatattttcaaggtatgggaaggcggaatgtcgttccacggcggctttttgggtgtagttattgccatatggttgttcagccgcaagcacggcatcggcttcctcaaactgatggacacggtcgcgccgctcgttccgctgggtctcgcttcgggacgtatcggcaactttatcaacggcgaactttggggacgcattaccgacattaacgcattttgggcaatgggcttcccgcaagcgcattacgaagatgccgaagccgccgcgcacaatccgctttgggcagaatggctgcaacaatacggtatgctgccgcgtcatccctcgcagctttatcagtttgcccttgaaggcatctgcctgttcgccgtcgtttggctgttttccaaaaaaccgcgcccgaccgggcagactgccgcgctttttctcggcggctacggcgtgttccgctttattgccgaatttgcgcgccaacccgacgactatctcgggctgctgaccttggggctgtcgatggggcaatggttgagcgtcccgatgattgttttgggtatcgtcggctttgtccggttcggcatgaaaaaacagcactga

SEQ ID NO: 81703 - protein, 283 aa, Neisseria gonorrhoeae FA 1090
MIIHHQFDPVLISIGPLAVRWYALSYILGFILFTFLGRRRIAQGLSVFTKESLDDFLTWGILGVILGGRLGYVLFYKFSDYLAHPLDIFKVWEGGMSFHGGFLGVVIAIWLFSRKHGIGFLKLMDTVAPLVPLGLASGRIGNFINGELWGRITDINAFWAMGFPQAHYEDAEAAAHNPLWAEWLQQYGMLPRHPSQLYQFALEGICLFAVVWLFSKKPRPTGQTAALFLGGYGVFRFIAEFARQPDDYLGLLTLGLSMGQWLSVPMIVLGIVGFVRFGMKKQH

SEQ ID NO: 81704 - DNA, 813 bp, Pseudomonas syringae pv. syringae B728a
  CDS (1)..(813): transl_table=11
atgctgccttacccgcagattgacccggtagccgtcgctatcggcccgctgcaaattcactggtacgggttgatgtacctggtcggtatcggcggcgcctggctgctcgcgtcgcgtcgcctgaacaagttcgacccgacctggaccaaggaaaaactttccgatctgattttctggctggccatgggcgtgattgtcggtgggcggctgggctacgtgctgttctatgacctgtcggcctacatcgccaatccgctgctgatcttcgaggtctggaagggcggcatggcgttccacggcggctttgtcggcgtgatgatcgcggcctggtggtttggcaagcgcaacggcaaaagcttcttccagctgatggacttcgttgccccgctggtgccgatcggcctgggtgccgggcgtatcggcaacttcatcaacgccgagctgtggggcaagccgaccgatgtgccgtgggccatggtcttcccgccgttcagcgaccctgcgcaactggcgcgccatccctcgcagctgtatcagttcgcgctggaaggcgttgcgctgttcatcatcctcaatctgtacgcccgcaagccgcgtccgaccatggccgtttccggcatgtttgcgctgttctacgggatcttccgctttgtggtcgagtttgtccgcgtccctgacgcccagttgggttacctggcgtggggctgggtgaccatgggtcagatcctcagcctgccgatgatcatcgcgggcctgttgctgatctggctggcctacaagcgcgacccgtccgccagcaaagcagcggcctaa

SEQ ID NO: 81705 - protein, 270 aa, Pseudomonas syringae pv. syringae B728a
MLPYPQIDPVAVAIGPLQIHWYGLMYLVGIGGAWLLASRRLNKFDPTWTKEKLSDLIFWLAMGVIVGGRLGYVLFYDLSAYIANPLLIFEVWKGGMAFHGGFVGVMIAAWWFGKRNGKSFFQLMDFVAPLVPIGLGAGRIGNFINAELWGKPTDVPWAMVFPPFSDPAQLARHPSQLYQFALEGVALFIILNLYARKPRPTMAVSGMFALFYGIFRFVVEFVRVPDAQLGYLAWGWVTMGQILSLPMIIAGLLLIWLAYKRDPSASKAAA

SEQ ID NO: 81706 - DNA, 885 bp, Psychrobacter arcticus 273-4
  CDS (1)..(885): transl_table=11
atgatgattcatcctcagtatgatcctgtagcattagcacttggacctatcgaaatccattggtatgggctgatgtatttgctggcatttgctaccgcttacggtctggcttggtatcgtagcagtaaacgcgacaattggaccaccgatatggtgtctgatttggtattttatggtgcgcttggtgtgatcttaggcggtcgtattggctatgtgctgttttatcagttcggtgagctggtacaaaaccctgcttatctattaaaagtttgggaaggcggcatgtctttccacggcggttttatcggtgtcatgttgggcatgtggttctttgctcgtaaatataagaaaactgccttccaagtattcgattttatcgtgccttgtgtaccaacaggcttactgtttggtcgcatcggcaactatattaatggcgagctatgggggcgcgtatcagacggtggctataactggctgacctactttccgcaagctgctgcctttgatatggagcaattacagagtaatccacaattgcaagagttgataattgaggttaatggtcaatatgtgttgcctcgtcacccatctcagctatacgaagcttttgctgaaggtctgctgctatttatcttcttatggtggtattcatcaaaaccacgtccacgtatggccgcctctgctgtattcttgctaggttacggcatcagccgcttcatcatcgaattcttccgccagcccgatgttgaccaaggattcattttattaggctggatgaccaaagggcagctattgagcgcaccaatgatcattgctggcttaatcatgctgatttatgcttacaaacgcggtatctatgattggggtaagcaggcggcttattaa

SEQ ID NO: 81707 - protein, 294 aa, Psychrobacter arcticus 273-4
MMIHPQYDPVALALGPIEIHWYGLMYLLAFATAYGLAWYRSSKRDNWTTDMVSDLVFYGALGVILGGRIGYVLFYQFGELVQNPAYLLKVWEGGMSFHGGFIGVMLGMWFFARKYKKTAFQVFDFIVPCVPTGLLFGRIGNYINGELWGRVSDGGYNWLTYFPQAAAFDMEQLQSNPQLQELIIEVNGQYVLPRHPSQLYEAFAEGLLLFIFLWWYSSKPRPRMAASAVFLLGYGISRFIIEFFRQPDVDQGFILLGWMTKGQLLSAPMIIAGLIMLIYAYKRGIYDWGKQAAY

SEQ ID NO: 81708 - DNA, 873 bp, Colwellia psychrerythraea 34H
  CDS (1)..(873): transl_table=11
atgacagacaagtttttacaatttccggtgatagacccgatcatatttagcattggcccggtatctttacgttggtatggcaccatgtacttaattggctttcttgccgctatgtttatggcaaacaaggctgctgatagaagtaacggtttatggacgcgagatcaagttagtgacgtattattttatggattcttaggtgtcattctaggtggccgtgttggttatgtactattttaccaattcgaatatttcttatcagatccactctatttatttgaaatatggcaaggaggcatgtccttccatggcgggttattgggcgtcattcttgcggtgtttatttttgcccgtaaaaccaataaatcctttttagcggtaggcgattttgttgtacccctagtacccattggtttaggaatgggccgtttaggtaactttattaacgctgaactttggggacgtcaaaccgatgtttcttgggctatggtctttccaaccgatccattacaagtgccacgtcatccatcgcaattgtatgagtttgctttagaaggggtcgtgctctttgctatcttatatattattagccgtaaaacacgcagcctaggactagcatcaggtactttcttaattggttatggcgtatttagaagtattgtcgaattcttccgtgagcctgacgcgcaccttggtttgtatttctcctttatttcaaaaggccaaattttgagtatcccgatgatcttagcaggtatacttattatctatttaggctatttatcgcaacaaaaatcagccattgctcaaggtgataaagctctagcagctggcggaaaatcaggtaaaaaaacagtaaaaggaaataactaa

SEQ ID NO: 81709 - protein, 290 aa, Colwellia psychrerythraea 34H
MTDKFLQFPVIDPIIFSIGPVSLRWYGTMYLIGFLAAMFMANKAADRSNGLWTRDQVSDVLFYGFLGVILGGRVGYVLFYQFEYFLSDPLYLFEIWQGGMSFHGGLLGVILAVFIFARKTNKSFLAVGDFVVPLVPIGLGMGRLGNFINAELWGRQTDVSWAMVFPTDPLQVPRHPSQLYEFALEGVVLFAILYIISRKTRSLGLASGTFLIGYGVFRSIVEFFREPDAHLGLYFSFISKGQILSIPMILAGILIIYLGYLSQQKSAIAQGDKALAAGGKSGKKTVKGNN

SEQ ID NO: 81710 - DNA, 792 bp, Dechloromonas aromatica RCB
  CDS (1)..(792): transl_table=11
atgcttcttcacccacagttcgaccccgtcgctttctctgtcggcccgctctccgtgcgctggtacggtttgatgtatctggtggccttcgttcagtttatttttcttggccgctaccggatcaaaacccggccaggcttcctgagcgtagaacagttggacgacctgctgttctacggcatgctcggcgtgattcttggcggtcggctgggacaggtcctgttttacgaaccagcctatttcctggccaatccgctggaaatattcgcggtgtggaaaggcggcatgagttttcatggcggcttcctcggcgttctggtcgccatgggcctctggacgcgcaaacaccacctgaactggttcgaggtgatggatttcgtggcgccgctggtgccgctaggcctggccgccggacgcgttggcaatttcatcaacggcgagctgtggggccgcgtggccgatgccagcctgccgtgggcaatgatcttcccgcagtcgggcgacatgcagccgcgccacccatcgcagctctaccacgttggactggaaggcctcgcgctgttcgtgatcctctggtggttcaccgccaagccgcgcccgcgcgctgctgcctcgggtgccttcctgatcggttacggcgccttccgtttcattaccgagtattttcgcgagccggatcacggtattttcgggcagtcctacacaatcagcatgggacagtggctgtcgttgccgatgatcctgatcggggtggccatggtggtctttgcctaccggaagaaatccctataa

SEQ ID NO: 81711 - protein, 263 aa, Dechloromonas aromatica RCB
MLLHPQFDPVAFSVGPLSVRWYGLMYLVAFVQFIFLGRYRIKTRPGFLSVEQLDDLLFYGMLGVILGGRLGQVLFYEPAYFLANPLEIFAVWKGGMSFHGGFLGVLVAMGLWTRKHHLNWFEVMDFVAPLVPLGLAAGRVGNFINGELWGRVADASLPWAMIFPQSGDMQPRHPSQLYHVGLEGLALFVILWWFTAKPRPRAAASGAFLIGYGAFRFITEYFREPDHGIFGQSYTISMGQWLSLPMILIGVAMVVFAYRKKSL

SEQ ID NO: 81712 - DNA, 786 bp, Ehrlichia canis str. Jake
  CDS (1)..(786): transl_table=11
atgattatagatcaagtagcttttaggattgggcctttgcaaataagatggtattctttgtcatatatatttggcatgatatttgcttactggtatataaaaaagatagataaatatcaagtttttaacaaagaaagttatgaatcagtaatatcttggtgggtgatttctgtaattcttggtggcaggattggatacatattgttctataatctagatttttatatacactttcctattgaaatgcttaagttatggaatggaggcatgtcatttcatggtgctttagttggagtaatgattggcatgtatattttttgtagaaagaataaaatagatgttcttgctgcttttgatttaggtgcatgtgctgtgcctgttggtatattttttggacgtattgcaaatttcattaacggggaattgtatggtaaagtcactgatataaaaattggaatgatttttcctgcaagtggtgacctactttataggcatccaagtcagttgtatgaagcttttggtgaaggatttttgttatttataataacgaattctcttttcttttttactaaaatcaaaacatctaaaggaatgctaagttctgttttttgtatatggtatggggtaataaggttttttattgagtttgttagagaaccagatgtacaaattggctatattatttttgatcaaataactatgggacagttattgtccatttttatgataattatgggtttttattttataaaattggctaaagtacaagataaattttcaatttaa

SEQ ID NO: 81713 - protein, 261 aa, Ehrlichia canis str. Jake
MIIDQVAFRIGPLQIRWYSLSYIFGMIFAYWYIKKIDKYQVFNKESYESVISWWVISVILGGRIGYILFYNLDFYIHFPIEMLKLWNGGMSFHGALVGVMIGMYIFCRKNKIDVLAAFDLGACAVPVGIFFGRIANFINGELYGKVTDIKIGMIFPASGDLLYRHPSQLYEAFGEGFLLFIITNSLFFFTKIKTSKGMLSSVFCIWYGVIRFFIEFVREPDVQIGYIIFDQITMGQLLSIFMIIMGFYFIKLAKVQDKFSI

SEQ ID NO: 81714 - DNA, 852 bp, Thiobacillus denitrificans ATCC 25259
  CDS (1)..(852): transl_table=11
gtggtcactcaggcaatctataatcagccagcaattttacccgcccaggccctgcatcacatgctcgttcacccgcaattcgaccccgtcgccctgcagctcgggcccgtcgccatccactggtacggcctcatgtatctgctcgccttcgtccaggtcatcctgctcgggcgctgggcgattcgccaccgcgcgtggaccggctgggacgcgaagatgctcgacgacgtgctgttctacggcgtgctcggcgtcgtgctcggcggccgcctcggctatgtgcttttctacaagcccgccgactacctcgccgccccgctcgacctcttcaaggtgtgggaaggcggcatgagcttccatggcggcttcctcggcgtcatcgtcgcgatggcgctgttcgcccggcgccacaagctccgctggctcgccgtcaccgacttcatcgcgccgctcgtgccgctggggctggccgccgggcggctcggcaacttcatcaacggcgaactctgggggcgcccggccgacccgaacctgccatgggcgatggtctttccccaggccggggacgacatcgcgcgccacccctcgcagctctaccagttcgccggcgaaggcctgctgctgttcgcgctgctgtggctctattcagccaaaccgcgcccggtcggcgcggtctcgggcgtcttcctgatcggctacggcagcctgcgcttcctcgccgaattcgcgcgcgagcccgacgcctatctcggcctgctcgggctcggcctgtcgatgggccagtggctgtcgctgccgatggtcgtcgccggcgttctgatgctgcgctgggcgcagcgccgcgcaccatga

SEQ ID NO: 81715 - protein, 283 aa, Thiobacillus denitrificans ATCC 25259
MVTQAIYNQPAILPAQALHHMLVHPQFDPVALQLGPVAIHWYGLMYLLAFVQVILLGRWAIRHRAWTGWDAKMLDDVLFYGVLGVVLGGRLGYVLFYKPADYLAAPLDLFKVWEGGMSFHGGFLGVIVAMALFARRHKLRWLAVTDFIAPLVPLGLAAGRLGNFINGELWGRPADPNLPWAMVFPQAGDDIARHPSQLYQFAGEGLLLFALLWLYSAKPRPVGAVSGVFLIGYGSLRFLAEFAREPDAYLGLLGLGLSMGQWLSLPMVVAGVLMLRWAQRRAP

SEQ ID NO: 81716 - DNA, 849 bp, Anabaena variabilis ATCC 29413
  CDS (1)..(849): transl_table=11
atggcattgcctttggcgtttctgtttacttctccagggccggttctggtggaaataggcccaatcactattcgctggtatggcttattgattgctacggctgtgctaattggtgttagcctttctcaatacttggcaaagcgccgacaggtgaatcctgacttactcagtgacttgtcaatttggctggtgattggggcgattcccgcagcccggatttattacgttttgtttcagtggtcagagtatgcccagcatccagaacggattattgcgatttggcaggggggaattgcgattcacggagcgattattggcgggactctagcagcgttaatttttgccaagctcaagcgagttcctttttggcaattagctgatttggtggctccttcactgattttagggcaagcgatcgggcgttggggtaatttcttcaactcagaagcttttggtcgtcctaccaatttaccctggaagttatacattcccatagaacgccgtcctccagatttagcaagttttgagtactttcacccaacattcctttatgaatctatttgggacttaatggtttttgccttgctaatcactttattctttcgtagtttagctggcaaaccacgcctcaaagtaggtacgttattcatggtttacctagcaacctacagcttaggacgcttatggattgaaggtctgcggacagatagcttaatgcttgggccgctacgcatcgcacaagttgtcagcctgacaggtattactttaggattagccggattagcttggttgtacgttcgcaaacgtcctttacctgacgttgtttcttctcccaaagatacggagtag

SEQ ID NO: 81717 - protein, 282 aa, Anabaena variabilis ATCC 29413
MALPLAFLFTSPGPVLVEIGPITIRWYGLLIATAVLIGVSLSQYLAKRRQVNPDLLSDLSIWLVIGAIPAARIYYVLFQWSEYAQHPERIIAIWQGGIAIHGAIIGGTLAALIFAKLKRVPFWQLADLVAPSLILGQAIGRWGNFFNSEAFGRPTNLPWKLYIPIERRPPDLASFEYFHPTFLYESIWDLMVFALLITLFFRSLAGKPRLKVGTLFMVYLATYSLGRLWIEGLRTDSLMLGPLRIAQVVSLTGITLGLAGLAWLYVRKRPLPDVVSSPKDTE

SEQ ID NO: 81718 - DNA, 816 bp, Pseudomonas fluorescens PfO-1
  CDS (1)..(816): transl_table=11
atgctgccttacccgcagatcgatccggtggctttggccatcggtccgctgaaaatccactggtacggcctgatgtacctggtcggcatcggcggcgcgtggctgctggcatcgcgccggctcaaccgtttcgacccgacctggaccaaggaaaagctgtccgacctggtgttctggctgtcgatgggggtgattgtcggcgggcgtctgggctatgtgctgttctacgacctgagcgcctacatcgccaacccgacgctgattttcgaagtgtggaagggcggcatgtcattccacggcggtttcatcggcgtaatgctggccgcgctgtggttcggcaagcgtaacggcaagtcgttcttccagctgatggacttcgtggcgccgatggtgccgatcggtctgggcgccgggcgtatcggcaacttcatcaacgccgagctgtggggcaaggccaccgacgtgccgtgggccatggtgttcccgccgttcagcgacccggcgcaactgccgcgtcacccgtcgcagctttatcagttcgcgctggaaggcgtggcgctgttcctgatcctctggctgttctcgcgcaaaccgcggccgaccatggcggtctcgggcatgttcgcgctgttctatggcatcttccgtttcatcgtcgaattcgtccgcgtgccggacgcgcaactgggctacctggcctggaactggctgaccatgggtcaggtactctgcgtaccgatgatcatcggcgggctgttcctgatctggctggcctaccaccgcgccccggcggcgccggttgcaccgacagcttaa

SEQ ID NO: 81719 - protein, 271 aa, Pseudomonas fluorescens PfO-1
MLPYPQIDPVALAIGPLKIHWYGLMYLVGIGGAWLLASRRLNRFDPTWTKEKLSDLVFWLSMGVIVGGRLGYVLFYDLSAYIANPTLIFEVWKGGMSFHGGFIGVMLAALWFGKRNGKSFFQLMDFVAPMVPIGLGAGRIGNFINAELWGKATDVPWAMVFPPFSDPAQLPRHPSQLYQFALEGVALFLILWLFSRKPRPTMAVSGMFALFYGIFRFIVEFVRVPDAQLGYLAWNWLTMGQVLCVPMIIGGLFLIWLAYHRAPAAPVAPTA

SEQ ID NO: 81720 - DNA, 879 bp, Rhodobacter sphaeroides 2.4.1
  CDS (1)..(879): transl_table=11
atgtcctacattcccttccccgacatctcgcccgaactcttctcgatcgagctgttcggggtgaccttcgcgctgcgctggtatgcgctggcctatatcgcgggcctcctgatcggctggcggctggtgctgcgcatgatccgtgcggagcggctctggagcttcggtcctccgatgaccgaggaccagctggagcggctgctgacctgggtgatcctcggcgtgatcctcggcggacggctgggcttcgtgctcttctaccagccggcccattatctcgcccacccgctcgacatcctgaaggtctgggagggcggcatgtccttccacggaggcttcctcggagtgatgacggcgctcgtggccttctgcctgaaggaacgcatctccatcctgccggtggcggaccttctggccgccgccacgccgccgggcctcttcctcgggcggatcgcgaacttcatcaatgccgagctctggggccggcccacgaccctgccctggggcgtggcctttcccggcgaggcggcgcagagctgccccgggatcgaggggatctgcgcccgccatccctcgcagatctacgaggccgggctagagggaattctgctgttcacggtcctgagccttctcgtctggcggcgcggctggctgcactggccggggtccgtgtccggcatgttccttgcgggctacggcgccacgcgcttccttgtcgagttcgtgcgccagcccgatgcgcagttcgtgagcgccggcaacccgctgggcctcgcgtggcagatctcgggctacgggctgaccatggggcagatcctgtcgctgccgatgatcctgctcgggctctatctcattctgcgcagccggcggaccgcgtga

SEQ ID NO: 81721 - protein, 292 aa, Rhodobacter sphaeroides 2.4.1
MSYIPFPDISPELFSIELFGVTFALRWYALAYIAGLLIGWRLVLRMIRAERLWSFGPPMTEDQLERLLTWVILGVILGGRLGFVLFYQPAHYLAHPLDILKVWEGGMSFHGGFLGVMTALVAFCLKERISILPVADLLAAATPPGLFLGRIANFINAELWGRPTTLPWGVAFPGEAAQSCPGIEGICARHPSQIYEAGLEGILLFTVLSLLVWRRGWLHWPGSVSGMFLAGYGATRFLVEFVRQPDAQFVSAGNPLGLAWQISGYGLTMGQILSLPMILLGLYLILRSRRTA

SEQ ID NO: 81722 - DNA, 891 bp, Burkholderia sp. 383
  CDS (1)..(891): transl_table=11
atgatcattcacccgaatttcgaccccgttgcgatccatctcgggccgctggccgtgcgctggtacgggctcatgtatctcgtcggcttcatcgcggcgatcgtcgtcggccggatccgcctgaagttgccgcacgtcgcggcgcagggctggaccgcgaaggacatcgacgacatgatgttctacggcgtgctcggcaccgtgctcggcggccggctcggctatgtgctgttctacaaggccgacttctatttctcgcatccgctcgacgtgttcaaggtgtgggaaggcggcatgtcgtttcatggcggcttcctcggcgtgacgctcgcgatgatgctgttcgcgtggcagcgcaagcgccactggctgcaggtcaccgatttcgtcgcgccgatggtgccgacggggctcgcggccgggcggctcggcaacttcatcaacggtgaactgtggggccgcgtgaccgacccgtccgcaccgtgggcgatgctgttcccgggcgcgatgcgcgacgatgcggcatggttgccgaagcatccggaactcgtcgagaagtggcatctcgccgacgtgttcatgcaataccagatgctgccgcgccatccgtcacagctctatgaaatcgcgctcgaaggcatcgtgctgttcttcgcgctgttcctcttcgcgcgcaagtcgcggccgatgggcgccgtgtccgcgctgttcctgatcggctatggtctcgcacgcttcacggtcgagttcgcgcgcgagcccgacgacttcctcggcctgctcgcgctcggcctgtcgatggggcagtggctgtcgctgccgatgatcctcgcgggcgtcgcgctgatggtctgggcgtatcgccgccgcgcggcgaatgccgctgcgtga

SEQ ID NO: 81723 - protein, 296 aa, Burkholderia sp. 383
MIIHPNFDPVAIHLGPLAVRWYGLMYLVGFIAAIVVGRIRLKLPHVAAQGWTAKDIDDMMFYGVLGTVLGGRLGYVLFYKADFYFSHPLDVFKVWEGGMSFHGGFLGVTLAMMLFAWQRKRHWLQVTDFVAPMVPTGLAAGRLGNFINGELWGRVTDPSAPWAMLFPGAMRDDAAWLPKHPELVEKWHLADVFMQYQMLPRHPSQLYEIALEGIVLFFALFLFARKSRPMGAVSALFLIGYGLARFTVEFAREPDDFLGLLALGLSMGQWLSLPMILAGVALMVWAYRRRAANAAA

SEQ ID NO: 81724 - DNA, 804 bp, Desulfovibrio desulfuricans G20
  CDS (1)..(804): transl_table=11
atgatcaaatatcccgcttttgaccctgtagcctttacgctcggaccgctgaacatccgctggtacggactcatgtatattctgggtttcgttgccgcgtggctgcttgcccggtcgcgcgctctcaagacggggtccggctggacagtagaacaggttgacgatctggtaacgtacagcgtttttggtgtcattctgggtggcagactgggctacacactgttttacgaaacgtcatactttttaaataacccgctggatattttcaaaatatggaacgggggaatgagctttcatgggggattgctgggtgtcatcattgccatctggctgtttgcccgccacacaggtaaatccctttttgaagtaggagacttcactgcgcctctggtagctccgggcctgcttgccggacggctgggcaactttataaacggtgaactgtggggaagacatacctccgctgaatggggcatggtgtttcccggcgccggaccgctgccccgccacccgtcgcagctttacgaagccgcgctcgaaggtgtcgctctctttataattctgtggctgttctctgccaaaccacggccccgcatggcggtttctggcatgttcctgctgctgtacggcagcttccgcttctttgtggaattcttccgcgaacccgatctgcatctcggctatctggccttcggctgggttaccatgggacagattctgtgcctgcccatgatcctcggcgggctcgtactggtaggctttgccatgaaaaatgaaaagcaggccgccttaaaaacagagtaa

SEQ ID NO: 81725 - protein, 267 aa, Desulfovibrio desulfuricans G20
MIKYPAFDPVAFTLGPLNIRWYGLMYILGFVAAWLLARSRALKTGSGWTVEQVDDLVTYSVFGVILGGRLGYTLFYETSYFLNNPLDIFKIWNGGMSFHGGLLGVIIAIWLFARHTGKSLFEVGDFTAPLVAPGLLAGRLGNFINGELWGRHTSAEWGMVFPGAGPLPRHPSQLYEAALEGVALFIILWLFSAKPRPRMAVSGMFLLLYGSFRFFVEFFREPDLHLGYLAFGWVTMGQILCLPMILGGLVLVGFAMKNEKQAALKTE

SEQ ID NO: 81726 - DNA, 825 bp, Rhodospirillum rubrum ATCC 11170
  CDS (1)..(825): transl_table=11
atgcttttcgctcttccctttccggccatcgatccggttctcgtcgagatcggcccctttgccatccgctggtacgcgctggcctatatcgtcggtctgcttggcggctggtggtacacgcgctttttgtcgcggcgctcgcggccgccggtgatgagcgacgccgacgtcgacgatcttctggtctgggcgacgctgggcaccatcctgggcgggcgtctgggctatgtggtgttctacaacgccgcccatttcctggccaatcccctggaaatccccatgctctggcatggcgggatgagcttccacggcgggttggtcggcgtcatcaccgccaccgtgctgttttgccgcagccgcaggctgtcggtcgcccgggtgggcgatctggtcgccctggtggcgccgctcggcctgttcttcggccggttggccaatttcatcaatggcgagttgttcggccgtccggcccccgatgtgccctgggcgatggtctttccccatggcggccctttgccgcgccatcccagccagctttacgaggcgacgctggaggggctggtgctgttttgcctgctcggtctgctgtggcgtttcacggcgttgtcgcgcaagcccggccagatcatcggcctgttcctgatcggctatggactgtcgcggatcaccgccgaattcttccgcgagcccgacgcccagatcggctttctggccctgggcgtgaccatgggccagattctgtcgctgccgatgatcctggccggtatcgtggttttcgtggtggcccgccgcgccaagccgctggcggttcccggtgggcgctga

SEQ ID NO: 81727 - protein, 274 aa, Rhodospirillum rubrum ATCC 11170
MLFALPFPAIDPVLVEIGPFAIRWYALAYIVGLLGGWWYTRFLSRRSRPPVMSDADVDDLLVWATLGTILGGRLGYVVFYNAAHFLANPLEIPMLWHGGMSFHGGLVGVITATVLFCRSRRLSVARVGDLVALVAPLGLFFGRLANFINGELFGRPAPDVPWAMVFPHGGPLPRHPSQLYEATLEGLVLFCLLGLLWRFTALSRKPGQIIGLFLIGYGLSRITAEFFREPDAQIGFLALGVTMGQILSLPMILAGIVVFVVARRAKPLAVPGGR

SEQ ID NO: 81728 - DNA, 861 bp, Syntrophus aciditrophicus SB
  CDS (1)..(861): transl_table=11
atggatgcgtttttcctcttctggcagcaccttccggaaaccctccggccggaactcttttccatcggctccttccaggtccgctattacagcctgatgtacctggcggccttctgtctgacctatgttcttgtcatgcaccgggtaaaaaaggaaggcaattccttttccggagaaacgatacaggatcttctgctctgggccattctcggtttggttgtcggggcgcggctggggtatgtctttttctataatttcagctattatctgagccatcccctggaaattctgctgccctttgaattttccggcggcatccggtttgtgggcatcagcgggatgtcttatcatggcggggccattggcgcgcttctggccacgtttctcttctgccggaagcggggcatttccttctggaccattcttgaactcttttcgcccgccgtgcccctgggctatacgttcggccggatcggcaacttcatcaacggagagctctacggacgggtgacaacagttccctggggcatgtattttcccctggatcccctgcatgagcttcgtcatccttctcagctttacgaggccttttttgaaggcatcgttctttttgcgattctctggggcatccgcagacggagtccctttgacggttttctcttcgcttcctatctcttcggctacggtctggtccgatttttcatcgaatttttccgggagccggacgcgcagttggggctgatgtggggaggagtcttcagcatggggcaggctctctgccttctcatgatggcagccggcgttctggtgtatattcttcgcaggccgcagaagagcggatcgcaggttgatcctgtttag

SEQ ID NO: 81729 - protein, 286 aa, Syntrophus aciditrophicus SB
MDAFFLFWQHLPETLRPELFSIGSFQVRYYSLMYLAAFCLTYVLVMHRVKKEGNSFSGETIQDLLLWAILGLVVGARLGYVFFYNFSYYLSHPLEILLPFEFSGGIRFVGISGMSYHGGAIGALLATFLFCRKRGISFWTILELFSPAVPLGYTFGRIGNFINGELYGRVTTVPWGMYFPLDPLHELRHPSQLYEAFFEGIVLFAILWGIRRRSPFDGFLFASYLFGYGLVRFFIEFFREPDAQLGLMWGGVFSMGQALCLLMMAAGVLVYILRRPQKSGSQVDPV

SEQ ID NO: 81730 - DNA, 900 bp, Novosphingobium aromaticivorans DSM 12444
  CDS (1)..(900): transl_table=11
ttgctgtcactactgtcaacagcaaccgcgcttgccgtaacgtccgcgtctgcggcgggcgctggcgggccgattcgctgggaagacctgggcgtttccccgatcgcgctcgacctcggcttcttcgccctgaaatggtactcgctcgcctaccttgccggcatcatcctcggctactggcacctgtcaaagatgatccgccagccgggcgcgccgatggcacaacgccacgcggacgacctgttcttctacgcgacgctcggcatcatcctgggcgggcggctcggctatgcgatcttctatgcccccgaactgctcagccacccgcagaacctggtcaagctgtgggaaggcggcatgagcttccacgggggcctgatgggcactgtgctggcaatcgcgtgggtggcatggcggggccggctcaacttcgtgcgagtgtgcgactacatcgcggtctgcgtgcccttcggcctgctcttcgggcgcctcgccaatttcatgaacggcgagctttggggccgcgaagcgggtccggacgtgccgtgggcgatggtctttcccggcggcggcccgatcgcgcggcacccaagccagctctacgaggccgggctcgaagggcttgtgctgatggtcgtcctgctcctcctgttctggaagtccagagcgcgctggcggccgggcctcctcgtcggcacgttcgcgctcgggtatgggctggcgcgcttcacggtcgagttcttccgcgaacccgatgcccagcttctcgagttcgcgcagcgctcgggcctttcgatgggccagtggctgaccataccgatgatggccatcggcctaggcttcctgctcaacgcggtcgtgcgcaagccgctgtcgacgacgggagccgcgcccgcgtga

SEQ ID NO: 81731 - protein, 299 aa, Novosphingobium aromaticivorans DSM 12444
MLSLLSTATALAVTSASAAGAGGPIRWEDLGVSPIALDLGFFALKWYSLAYLAGIILGYWHLSKMIRQPGAPMAQRHADDLFFYATLGIILGGRLGYAIFYAPELLSHPQNLVKLWEGGMSFHGGLMGTVLAIAWVAWRGRLNFVRVCDYIAVCVPFGLLFGRLANFMNGELWGREAGPDVPWAMVFPGGGPIARHPSQLYEAGLEGLVLMVVLLLLFWKSRARWRPGLLVGTFALGYGLARFTVEFFREPDAQLLEFAQRSGLSMGQWLTIPMMAIGLGFLLNAVVRKPLSTTGAAPA

SEQ ID NO: 81732 - DNA, 801 bp, Neorickettsia sennetsu str. Miyayama
  CDS (1)..(801): transl_table=11
gtgacctgttccatagttttaccgtatcttgacccggttgccttttctttcggtcctatcacggtgcgatggtacgcctttgcatatatttttggcatagtctacggttatctttttgtttcgaagcactcgaatctcacacgcaaggagctagatactcttttttaccaggctacattgggaataatctttggcggcaggttaggctatgtaattttttataattcaacctactacatcgcaaacccacttgaaatattgatgctatggcgtggaggtatgtcatttcacgggggccttctcggactgatactagcgttgtttctcttctcgtatcagcactcgtacaaatttttctaccttacagatttaattgctcccactgcgagcctaggtatttttcttggaaggatcggaaacttcgtgaatgctgaactatatggtagacaaacaacgcgtagttggggtgtcattttctcaaacggtgatggtctccctagacaccctgtacagctctatgagggatttcttgaagggtttcttctcttcttagctacgcaactactcttcttcaagacacctatattgaaataccctggaatgctatccggaatctggctcagcttatatggctcgacaaggataattctagagaattttagggaaccagaccctcaaattggttatttttttcactttattactatgggacaaattctgtccttgcccatgataggaatgggcgttgtgatgattttaatcgcaacgaagacgttcaatgagtatgtcccaggtaaatga

SEQ ID NO: 81733 - protein, 266 aa, Neorickettsia sennetsu str. Miyayama
MTCSIVLPYLDPVAFSFGPITVRWYAFAYIFGIVYGYLFVSKHSNLTRKELDTLFYQATLGIIFGGRLGYVIFYNSTYYIANPLEILMLWRGGMSFHGGLLGLILALFLFSYQHSYKFFYLTDLIAPTASLGIFLGRIGNFVNAELYGRQTTRSWGVIFSNGDGLPRHPVQLYEGFLEGFLLFLATQLLFFKTPILKYPGMLSGIWLSLYGSTRIILENFREPDPQIGYFFHFITMGQILSLPMIGMGVVMILIATKTFNEYVPGK

SEQ ID NO: 81734 - DNA, 843 bp, Ehrlichia chaffeensis str. Arkansas
  CDS (1)..(843): transl_table=11
ttgcgaaaatgttgcaattgtttcatactattcagaacatatattttatatacttttatgattatagatccagtagcttttagattgggattactagaaataaagtggtattcgttatcctatgtattgggtatagtgtttgcttattggtatataagaaaaatagataagtatagagtttttagcaaagaaagttatgaatcaataatgtcatggtgggttatttctataattcttggtggtaggataggatatatattgttttataacttagatttttatatacattttcctattgaaatgtttaagttgtggaatggtggtatgtcatttcatggtggtttaatagggataattagtggcatgtatattttttgtagaaaaaataaaataagtattctttctgctcttgatttaggtgcatgtgctgtacctgttggaatattttttggacgcattgcaaattttattaatggtgagttatatggtaaggtcacagatataaaatttggtatggtttttcctaatagtggtgattctttctatagacatcccagccaattatatgaagctttttttgaagggtttctattatttgtaataatgaattctctttttttctttacaaatgttagagcatctcaaggaatgctgagtgctgtttattgtatatggtatggagtagtgcggttttttattgagtttattagagaacctgatgctcaggttggttacattttgtttaatcagttaactatgggacaattgctatctgttttcatggtgattatgggtttttattttataaaattagctaagatgaaagctaaattgtcaatgtaa

SEQ ID NO: 81735 - protein, 280 aa, Ehrlichia chaffeensis str. Arkansas
MRKCCNCFILFRTYILYTFMIIDPVAFRLGLLEIKWYSLSYVLGIVFAYWYIRKIDKYRVFSKESYESIMSWWVISIILGGRIGYILFYNLDFYIHFPIEMFKLWNGGMSFHGGLIGIISGMYIFCRKNKISILSALDLGACAVPVGIFFGRIANFINGELYGKVTDIKFGMVFPNSGDSFYRHPSQLYEAFFEGFLLFVIMNSLFFFTNVRASQGMLSAVYCIWYGVVRFFIEFIREPDAQVGYILFNQLTMGQLLSVFMVIMGFYFIKLAKMKAKLSM

SEQ ID NO: 81736 - DNA, 807 bp, Francisella tularensis subsp. holarctica
  CDS (1)..(807): transl_table=11
atgctacaatatcctcatattaatccagttgcattgcagcttggtcctatcaagattcattggtatggtttgatgtacctacttggtatttttgccggctggtacttaactagatatagagcaaaagttaaaccatgggcacctatcaaaccagagcaagttggcgatttaactttttatgttgcactaggtgttatccttggtggtagaatcggctatattatcttctataatcttccttattatttccataatccatcacaaatgtttttcttatgggatggtggaatgtcattccatggtggatttattggggtgcttatagcatttgccctatttgcacgtaaaattggtgcaaatttctttgatttgggtgagtttgttgcaccagttataccaattggtttaggtgctggtagaataggcaactttatcaatggcgagcttttgggtaaagttacagactctccattaggtatggttttcccaactggaggtcctttaccaagatatccatcacagctattcgagtttttcttcgagggagttgtcttatttagtgttctatggcttgttaccatcaagaaaagaccccgttatcttgtactaggacttttcatgtttttatatggttatgctagatttatctgtgaattttttagacagccagacccgcagtatggctatatattctttaattggatgactatggggcaaatattatcaatcccaatgatattactaggagcggtaattttaatcgcagtatttattaaaacaaggaagaataaatgcgagaatatctaa

SEQ ID NO: 81737 - protein, 268 aa, Francisella tularensis subsp. holarctica
MLQYPHINPVALQLGPIKIHWYGLMYLLGIFAGWYLTRYRAKVKPWAPIKPEQVGDLTFYVALGVILGGRIGYIIFYNLPYYFHNPSQMFFLWDGGMSFHGGFIGVLIAFALFARKIGANFFDLGEFVAPVIPIGLGAGRIGNFINGELLGKVTDSPLGMVFPTGGPLPRYPSQLFEFFFEGVVLFSVLWLVTIKKRPRYLVLGLFMFLYGYARFICEFFRQPDPQYGYIFFNWMTMGQILSIPMILLGAVILIAVFIKTRKNKCENI

SEQ ID NO: 81738 - DNA, 825 bp, Saccharophagus degradans 2-40
  CDS (1)..(825): transl_table=11
atgaattatccggatattgatcctattgcgctctccattggggcgttcgaactgtttggctttgaaattgggcctattaatgttcactggtacggcattatgtacctgtgcgcatttttgggggcttggggcttgggccgctatcgggccagcaagccgggcgcttgccttaccaaggcgcaggtggaagaccttatcttctacggcgctgtaggggttgtggtgggtggtcgtcttggttatgtgtttttctacaatttctctgcctttttggctgaccccgtttggttatttaaagtgtgggagggcggcatggcgttccacggcggtttaattggtgtggcagttgccatgctgttattcgcccgcaaggtaaaccgcaatttctttgatgtgatggactttactgcacccttggtgcctataggtttgggctttggccgtataggcaactttattggtggcgagctgtggggccgcgaaacaaccgtgtcttggggtatggtgttccctaaggatgagcttggacttgtgcgtcatccatcgcagctgtatcaagcatttttagagggcgttgtactgtttgcaattctcttctggttttcggctaagccgcgcccgcgcgcagcggtttcggcactgttcttaattgtgtatggttgtcagcgttttgcggttgagtttgttcgccagccagatgagcatattcaattcgatttatttgactgggtaacgcgcggccaaatactgtcgctgccaatgattgcagtgggtttaattgtatttgcatgggcctatcgcaccaagcctggcgctactcgttaa

SEQ ID NO: 81739 - protein, 274 aa, Saccharophagus degradans 2-40
MNYPDIDPIALSIGAFELFGFEIGPINVHWYGIMYLCAFLGAWGLGRYRASKPGACLTKAQVEDLIFYGAVGVVVGGRLGYVFFYNFSAFLADPVWLFKVWEGGMAFHGGLIGVAVAMLLFARKVNRNFFDVMDFTAPLVPIGLGFGRIGNFIGGELWGRETTVSWGMVFPKDELGLVRHPSQLYQAFLEGVVLFAILFWFSAKPRPRAAVSALFLIVYGCQRFAVEFVRQPDEHIQFDLFDWVTRGQILSLPMIAVGLIVFAWAYRTKPGATR

SEQ ID NO: 81740 - DNA, 786 bp, Methylobacillus flagellatus KT
  CDS (1)..(786): transl_table=11
atgcttgttcacccacaatttgatccagtcgccattcacctgggctcgttcggtatccattggtatggcctgatgtatctcattggattcctggcctttctgtggctgggtcgctggcgcatcgcccaccagccttggtggggaaaagctggctggacgaaaaaaaacctcgacgatgccctgttctatggcgcactgggcgtcatcctcggcggcagactgggctatgccctgttctaccaacacgaatactatctgacccacccgcacgaaatcctctttctctggcaaggcggtatgtccttccacggcggcttcctcggcgtcatggtcgccatgttgctattcgccaaacggcgtggcctgacctttttcggcatcatggattttgtcgctcccctggtgcctgtaggcctgggtgcaggacgcatgggcaacttcatcaatggcgagctctggggccgtgccagcgacctgccctgggccatggtgttcccccatgtggacagcatcgcgcgccacccttcgcagctttacgaattcctgctcgaaggcgtcgcgctcttcatcctgctctggtggtactccagcaagccacgcgccaggggatcggtgtcggcactgttcctgatcggctatggcagcttccgcttcctggttgaatttacccgtgagccggacagcttcctcggactgctatcgctgggtttgagcatggggcaatggctgagcctgccgatggtgatcgcgggcgtgtggctgctgattgtgagcttgcgccgatga

SEQ ID NO: 81741 - protein, 261 aa, Methylobacillus flagellatus KT
MLVHPQFDPVAIHLGSFGIHWYGLMYLIGFLAFLWLGRWRIAHQPWWGKAGWTKKNLDDALFYGALGVILGGRLGYALFYQHEYYLTHPHEILFLWQGGMSFHGGFLGVMVAMLLFAKRRGLTFFGIMDFVAPLVPVGLGAGRMGNFINGELWGRASDLPWAMVFPHVDSIARHPSQLYEFLLEGVALFILLWWYSSKPRARGSVSALFLIGYGSFRFLVEFTREPDSFLGLLSLGLSMGQWLSLPMVIAGVWLLIVSLRR

SEQ ID NO: 81742 - DNA, 909 bp, Silicibacter sp. TM1040
  CDS (1)..(909): transl_table=11
atgctcgcagagatgatccaattcccgaacctgtcgccggagattttctccgtcacgctctttggaaccgagttcgcgctgcgctggtatgcgctggcctatatcgttggcatcctgatcgcatggtttctggctgtgcgggcggtgaaacgtccggcgctctgggccaatgaggccccgccgatgaccccgcgccaggtcgaggacctgatgacctggatcattcttggcgtgatcttgggtgggcggatcggctatgtgctcttttatcaaccctcggtctatctgcaaaacccagcacagatcctgcggatctgggagggcggcatggcctttcacggcggcctactgggggttgtgctcgcgtcctggttttatgcgcgagcgcacaatatcaacaagctgcagatcgcggatctcgtcgcccatgcggtcgcaccgggcctcttgctggggcggcttgcgaatttcgtaaatgcagagctctgggggcgcgcaaccgatctgccgtggggcgttgcctttccgggcagcgccgcgcagaagtgtggtcaggctctgggcgagatctgcgcccgccatcccagccaactttatgaggccgcaatggaagggctgatccttggcgccctcatcctgtggatggtctaccggcgccaagcgtttcaagcccccggccgtatcctgggcgtgttccttgcgggctatggtattgcacgtttcatcgtcgagttcttccgccagccggatgcgcagttcatctccgagggcaacccgctgggtcttgcctggcacatcggcggtttcggtctcacgcagggacaggcgctctcgatcccgatgatcctgattgggctgtggttcgtcttgcgcgccggaaaaactgacctccatgaggtgcgcgcatga

SEQ ID NO: 81743 - protein, 302 aa, Silicibacter sp. TM1040
MLAEMIQFPNLSPEIFSVTLFGTEFALRWYALAYIVGILIAWFLAVRAVKRPALWANEAPPMTPRQVEDLMTWIILGVILGGRIGYVLFYQPSVYLQNPAQILRIWEGGMAFHGGLLGVVLASWFYARAHNINKLQIADLVAHAVAPGLLLGRLANFVNAELWGRATDLPWGVAFPGSAAQKCGQALGEICARHPSQLYEAAMEGLILGALILWMVYRRQAFQAPGRILGVFLAGYGIARFIVEFFRQPDAQFISEGNPLGLAWHIGGFGLTQGQALSIPMILIGLWFVLRAGKTDLHEVRA

SEQ ID NO: 81744 - DNA, 867 bp, Trichodesmium erythraeum IMS101
  CDS (1)..(867): transl_table=11
atgacagtagagattaccttattgcctttaggctttcaatttacttctccaggtccaattatttttcagttgggacctttgataattcgctggtatggacttttaattgcagctgcactattaattggagtcactctttcccaatacttagctaaacttcgtcatgttaacccagaattattgggtgatttagtgatttggttagtattagccgcaattcctggagcccgtttgtactatgttctctttgagtgggaacaatatcaacaaaatcctatagatatgattgctatttggaaaggaggaattgcaattcatggagcaattattggtggggcgatcgctgctttgatttttgccagactcaataaaatttctttctggcaattagcagatttagtagctccttctttaattttaggacaagtcatcggtcggtggggtaattttttcaattctgaggcttttggcagtcccacagatttaccttggaagttgtatattcctccagaacgtcgtccgttagacttaataagttttgattatttccatccgacttttttatatgagtctttatggaatttgatagtatttggattattaatatttcttttttttagagatttgcggggtagacctcgacttaaaccagggactttatttctagtctatatggttgcttatagtagtggacggatttggattgaagcattgcgcactgatagtttaatgttaggaccattacgcattgctcagtttgtcagtttagctggtattttgttgggattaataggtttagggtggctatatttgttgaaacgacctttgctagatgttttacccccagaagttaaagaaacaaactga

SEQ ID NO: 81745 - protein, 288 aa, Trichodesmium erythraeum IMS101
MTVEITLLPLGFQFTSPGPIIFQLGPLIIRWYGLLIAAALLIGVTLSQYLAKLRHVNPELLGDLVIWLVLAAIPGARLYYVLFEWEQYQQNPIDMIAIWKGGIAIHGAIIGGAIAALIFARLNKISFWQLADLVAPSLILGQVIGRWGNFFNSEAFGSPTDLPWKLYIPPERRPLDLISFDYFHPTFLYESLWNLIVFGLLIFLFFRDLRGRPRLKPGTLFLVYMVAYSSGRIWIEALRTDSLMLGPLRIAQFVSLAGILLGLIGLGWLYLLKRPLLDVLPPEVKETN

SEQ ID NO: 81746 - DNA, 867 bp, Synechococcus sp. CC9311
  CDS (1)..(867): transl_table=11
gtgatcattcccattgtatttacatcacctgggcccgtgctttttcagttcgggcccattactttgcgctggtacggactactcatagcgctggccgtgctcatcggcctcaatttatcgagctggttagctaaacagagaaatcttgaatcgggattaattagcgaccttcttcccattctggtgctggctgccatcatcggtgctcgtctctattacgtggcctttgaatggcgctcttaccaaaactcctggtgggatgtgtttgcgatttggcaaggggggattgcgatccatggagcattgataggaggcacaatctccgtaattttgttctctcgttggcggaaagtttccttttgggatcttctcgatgttttggtcccatccgtgatccttggtcaaacaattggacgctgggggaattttttcaattcagaagcctttggggttccgacccaattgccttggaaattatttatcccttattcaagccgtccccagatcttttctgattcagagttctttcaccccacattcctttacgaatctctttggaatttggcggttttcattgtgctgataacgttgtttcaatgggcgcggagtgggcgtatttcactcccatcaggagctcttagttgtgtttatttgctctgctacagccttggtcgtgtgtggattgagggtctgcgaattgatccgctctgcttaggaggagtccctccattttgcgacgggggcttgaggattgctcagttgatgagcctctcattgctgctgcttgcgggctttggtttgttttggctatacgggaaacgaaagcctttgcctgatccaggcttacgcatcccaggtactccatga

SEQ ID NO: 81747 - protein, 288 aa, Synechococcus sp. CC9311
MIIPIVFTSPGPVLFQFGPITLRWYGLLIALAVLIGLNLSSWLAKQRNLESGLISDLLPILVLAAIIGARLYYVAFEWRSYQNSWWDVFAIWQGGIAIHGALIGGTISVILFSRWRKVSFWDLLDVLVPSVILGQTIGRWGNFFNSEAFGVPTQLPWKLFIPYSSRPQIFSDSEFFHPTFLYESLWNLAVFIVLITLFQWARSGRISLPSGALSCVYLLCYSLGRVWIEGLRIDPLCLGGVPPFCDGGLRIAQLMSLSLLLLAGFGLFWLYGKRKPLPDPGLRIPGTP

SEQ ID NO: 81748 - DNA, 807 bp, Shewanella sp. MR-4
  CDS (1)..(807): transl_table=11
atggcattgaattttcctaatatcgatcctgtgatcgtgaagtttggcccctttgatatttttggacaaacctttgaacccgccctacgttggtatggatttacttacttagttggctttgtcgccgccatgtggttactcaatcgtcaggctgaccgctccaatggtttatggtcgagggaacaggtttccgatttgctgttttatggctttttaggggtgattttaggtggccgcatcggctacgtgctcttctatcatttcgattatttcctcgctagcccaatgtatttgtttaagatttcagaaggtggtatgtcttttcacggcggtctgatgggggttattaccgccatgatttatatcgcctggaagcaaaagcgtaccttctttgcggtcgcagatatggtggcgcccgtggtgcctatcggcttaggtgcgggccgtatcggtaactttattaacggtgagttatggggccgagtcaccgatgtcccttgggccatggtgttcccaagtggtggaccagaacctcgtcatccatcacaactctatcaattcgcccttgaaggggtagccttattcctgctcctctattggttcagtaaacgaacgaagaaagtcggcgccgtgtcgggcatgttcttactcggatacgggattttccgtgtgattgttgaaaccgtaagacaacctgatgcgcagttaggtctctactggggctttatgacgatgggtcagatcctatctgtgccgatggtcctcttcggtttatatctcattcttcgtccagagggtaagcagtaa

SEQ ID NO: 81749 - protein, 268 aa, Shewanella sp. MR-4
MALNFPNIDPVIVKFGPFDIFGQTFEPALRWYGFTYLVGFVAAMWLLNRQADRSNGLWSREQVSDLLFYGFLGVILGGRIGYVLFYHFDYFLASPMYLFKISEGGMSFHGGLMGVITAMIYIAWKQKRTFFAVADMVAPVVPIGLGAGRIGNFINGELWGRVTDVPWAMVFPSGGPEPRHPSQLYQFALEGVALFLLLYWFSKRTKKVGAVSGMFLLGYGIFRVIVETVRQPDAQLGLYWGFMTMGQILSVPMVLFGLYLILRPEGKQ

SEQ ID NO: 81750 - DNA, 843 bp, Alkalilimnicola ehrlichei MLHE-1
  CDS (1)..(843): transl_table=11
atggccgtgcggtgcggcggccataacgggtatcatgcccccatgctcacttaccccgatatcgaccccgtcgccatccagctcggtccgctggccgttcactggtatggcctgatgtatgtcttcggctttgccgccggctggtggctcggccgcctgcgcgcccggcggccgcactccccgctgacccccgcccaggtggacgatctggtcttctacatcgccgtgggggtggtggtggggggcaagctgggctaccacctcttctacaacctgggggggcttgcggccgatccgctctcgctattgcgcctctgggagggcggcatgtcgttccacggcggcatgctcggggtctttcttgcctgctggctcttccagcgccgcctcggctgcggctttttccgcatgaccgactttgtcgccccgctgatcccgccgggcctcggcttcggccgcatcggcaacttcatcaatggcgaactctggggcgcgcccagcaacctgccctgggccatggtctacccgccactgggccccgacccccgccatccttcccagctctaccaggccctgttggaggggctggtgctgttcctcatcgtctggtggttctcccgccggccgcgcccggcgatggcggtgagcggggtctttctggtggcctacggcagtttccgcttcctggtggagttcgtgcgcctcccggacgagcacatcggttacctggccttcggctgggtgaccatggggcaggtcctgtcgctgccgatgatcctgggcgggggcgtgctgctggcattggcctaccggggcgcgcggagacaagcggcaccgaattga

SEQ ID NO: 81751 - protein, 280 aa, Alkalilimnicola ehrlichei MLHE-1
MAVRCGGHNGYHAPMLTYPDIDPVAIQLGPLAVHWYGLMYVFGFAAGWWLGRLRARRPHSPLTPAQVDDLVFYIAVGVVVGGKLGYHLFYNLGGLAADPLSLLRLWEGGMSFHGGMLGVFLACWLFQRRLGCGFFRMTDFVAPLIPPGLGFGRIGNFINGELWGAPSNLPWAMVYPPLGPDPRHPSQLYQALLEGLVLFLIVWWFSRRPRPAMAVSGVFLVAYGSFRFLVEFVRLPDEHIGYLAFGWVTMGQVLSLPMILGGGVLLALAYRGARRQAAPN

SEQ ID NO: 81752 - DNA, 930 bp, Hyphomonas neptunium ATCC 15444
  CDS (1)..(930): transl_table=11
atgggtcagaccgctctgaaattccccgaatggagccccgcgctcgtttccctcgatttcagcttcattggtctcggcacgtttcatctgcgctggtatgcgctcggctacatcgccggcatcggcctggcctgggcgtatgccaaccagctgctcaagcggcccgaactgttcggcggcgccgcgccgctgaccaaggacagcctcgatgatctgatgttctggatcatcatcggcatcatcctgggcgggcgcttcggctacatcctgttctatatggtgccctaccagatggacgttctggtctccgatccgatgacggtgctgcgcatatgggatggcggcatggccttccatggcggcattctgggcgtcgcggtcgtgctctggtggtttgcagccaagcgcggtgtgaacctgctatccgtaggcgacatcgccggcgtgaccgcccccatcggcatcggcctcgtgcgcatcgccaacttcaccaatgccgaactctacggccgcccgacagacgcctccgtcggcatggtgttccccgaaggctacgtgcccggctccaccccgcccgcctataactgggaaacaggtgactgggtgtatcgcggcgacgaactcgcgcgccatcccagccagctttacgaatcggtgctcgaaggctggctgccgctgctggtcctgtcggtcctcatctggaagttcggcgcgctgaaacgccccggtctcgtggccggtatcttcctcctgttctatggcttcggccgctcggtcgccgagcatttccgggaacccgacgcgttcgtgaatggtctgccggaatggctgaccatgggcatgattctctccacgcccatgtggctcggcggcgcctggctcatctggaacgcgctgcgcaagccgccggtgggcaccccgcaacaatga

SEQ ID NO: 81753 - protein, 309 aa, Hyphomonas neptunium ATCC 15444
MGQTALKFPEWSPALVSLDFSFIGLGTFHLRWYALGYIAGIGLAWAYANQLLKRPELFGGAAPLTKDSLDDLMFWIIIGIILGGRFGYILFYMVPYQMDVLVSDPMTVLRIWDGGMAFHGGILGVAVVLWWFAAKRGVNLLSVGDIAGVTAPIGIGLVRIANFTNAELYGRPTDASVGMVFPEGYVPGSTPPAYNWETGDWVYRGDELARHPSQLYESVLEGWLPLLVLSVLIWKFGALKRPGLVAGIFLLFYGFGRSVAEHFREPDAFVNGLPEWLTMGMILSTPMWLGGAWLIWNALRKPPVGTPQQ

SEQ ID NO: 81754 - DNA, 819 bp, Rhizobium leguminosarum bv. viciae 3841
  CDS (1)..(819): transl_table=11
atgcctttgccggatatcgatccgatcgccttttcgatcggtccgctggcgattcattggtacggtctcgcctatgtcgccgggatcctgctcggctgggcctatgcgcgtcgcatcgcagccaatgacagtctctggcccggcaacgtctcgccgatatcaaagacgcagctcgatgattttatcgtctgggcagcacttggcgtcgtcctcggcggtcgtctcggctatattttcttctatgatctccccgccgtcctgcgcactcccgtccgtgcgctcgagatctggaacggcggcatgtccttccacggcggcctgaccggcacgacgatcgccatgatcctctttgcccgccgcaacgccattccggtctggagcctgttcgacattgtcgccgccgtcgttcccttcggtctgttcttcggccgcatcgccaatttcatcaatggcgagctctggggccggttgaccgacgtgccctgggccgtggccttcccgaccggcggtcccttcgcccgccatccgagccagctttacgaagccggcctcgaaggcatcgttctgctcctggtgctggccgccttcgtctatggcatgcgcgcgctgaaaagccccggcttcattacaggcgtcttcgtctgcggttatgcgctgtcgcgcatcttcgttgaattcttccgcgagcctgatgcccagctcggttacctcctcggcacgaactggctgaccatgggcatggtgctctcctccccgatgatcctgcttggcctctgggcgatgctgcgggcccgccgccaggctgcgctgcagctctga

SEQ ID NO: 81755 - protein, 272 aa, Rhizobium leguminosarum bv. viciae 3841
MPLPDIDPIAFSIGPLAIHWYGLAYVAGILLGWAYARRIAANDSLWPGNVSPISKTQLDDFIVWAALGVVLGGRLGYIFFYDLPAVLRTPVRALEIWNGGMSFHGGLTGTTIAMILFARRNAIPVWSLFDIVAAVVPFGLFFGRIANFINGELWGRLTDVPWAVAFPTGGPFARHPSQLYEAGLEGIVLLLVLAAFVYGMRALKSPGFITGVFVCGYALSRIFVEFFREPDAQLGYLLGTNWLTMGMVLSSPMILLGLWAMLRARRQAALQL

SEQ ID NO: 81756 - DNA, 816 bp, Magnetococcus sp. MC-1
  CDS (1)..(816): transl_table=11
atgattgtttttccccagatagacccagtgttggtggagattggcccgctggcaatccgctggtatgggatgatgtataccctctcctttttgatcggctggccgctgcttaagcggcgtgctgccaaggttatgcccgatcttagtgtggaccatttgggtgatattatggtctatactctgctgggtttggtgttgggggggcgggttggttatgtactgttctacaattttgactattttctgagccatcccaccgccatttttcatatttgggaaggggggatgtcctttcacggtggtttgattggaggcgtggtggcttgcctgctctacgctcgcaaaagccagattccgtgtttaatgttggcggatttggtctttcccatcgtgccattggggctattttttgggcgtattggtaattttatcaatggcgaattatggggccggaccaccgatttgccatggggtatggtctttccaggggcgggggagctgccccgacacccaagccagctttatgaagccatgctggaaggagttattctgtttattgttttgaatggcttagcgcggcgttcccgcaccagcggttttttgctgggtagttttatggtggggtatggcgtgtcgcgctttttggtggagtttgtacggcagccagatgcccatttgggcctgttaaccttggggctctccatgggccagtggcttaccttgccgctctttttgttggggggctggttgatgtttcgtcctggggccggtccagggttgccgggacagggaaagggctgtgaacgatccttgtga

SEQ ID NO: 81757 - protein, 271 aa, Magnetococcus sp. MC-1
MIVFPQIDPVLVEIGPLAIRWYGMMYTLSFLIGWPLLKRRAAKVMPDLSVDHLGDIMVYTLLGLVLGGRVGYVLFYNFDYFLSHPTAIFHIWEGGMSFHGGLIGGVVACLLYARKSQIPCLMLADLVFPIVPLGLFFGRIGNFINGELWGRTTDLPWGMVFPGAGELPRHPSQLYEAMLEGVILFIVLNGLARRSRTSGFLLGSFMVGYGVSRFLVEFVRQPDAHLGLLTLGLSMGQWLTLPLFLLGGWLMFRPGAGPGLPGQGKGCERSL

SEQ ID NO: 81758 - DNA, 807 bp, Shewanella sp. ANA-3
  CDS (1)..(807): transl_table=11
atggcattgaattttcccaatatcgatcccgtgatcgtgaagtttggtccctttgatatttttggacaaacctttgaacctgccctgcgttggtatggatttacttacctagttggctttgtcgccgccatgtggttactcaatcgtcaggccgaccgctccaatggtttatggtcgagggaacaggtttccgatctgctgttttatggctttttaggggtgattttaggtggccgtatcggctatgtgctcttctatcatttcgattacttcctcgctagcccaatgtatttgtttaagatttcagaaggtggcatgtctttccacggcggcttgatgggggtgattaccgccatgatttatatcgcctggaagcaaaagcgtaccttctttgcggtcgcagacatggtggcgcccgtggtgcccattggcttaggtgcggggcgtattggtaactttatcaatggtgagttgtggggccgtgtcaccgatgtcccttgggccatggtgttcccaagtggtggacctgaacctcgtcacccatcacaactctatcaattcgcccttgaaggggtggccttattcctgctcctctattggttcagtaaacgaacgaagaaagtcggcgccgtgtcgggcatgttcttactcggatacggaattttccgtgtgattgttgaaaccgtaagacaacctgatgcgcagttaggtctctactggggctttatgacgatggggcagatcctctctgtgccgatgatcctcttcggtttatatttaattcttcgtccagagggtaagcagtaa

SEQ ID NO: 81759 - protein, 268 aa, Shewanella sp. ANA-3
MALNFPNIDPVIVKFGPFDIFGQTFEPALRWYGFTYLVGFVAAMWLLNRQADRSNGLWSREQVSDLLFYGFLGVILGGRIGYVLFYHFDYFLASPMYLFKISEGGMSFHGGLMGVITAMIYIAWKQKRTFFAVADMVAPVVPIGLGAGRIGNFINGELWGRVTDVPWAMVFPSGGPEPRHPSQLYQFALEGVALFLLLYWFSKRTKKVGAVSGMFLLGYGIFRVIVETVRQPDAQLGLYWGFMTMGQILSVPMILFGLYLILRPEGKQ

SEQ ID NO: 81760 - DNA, 798 bp, Azoarcus sp. BH72
  CDS (1)..(798): transl_table=11
atgctcgtgcatccccagttcgacccggtcgcgattgcggtgggtccggtcgcagtgcgctggtacggcctgatgtacctgctggccttcgtgctcttcgtggtgctggggcgggcgcacgcgcggcggcggcccgaactcggctggaacgcgcaggcgatcgacgacctgctgctctacggggtgctgggcgtcatcatcggcgggcgcctcggcgaagtgctgttctaccaacccggctattacctgtcccatcccgcggagatccttgccgtctggaagggcggcatgagctttcacggcggcttcctcggcgtgctcgtcgccatgtggctgtacggacaacgcagcggccggggcttctggcagatcaccgacttcatcgccccgctggtgccgaccgggctcgcggccgggcgtatcggcaacttcatcaatggcgaactgtggggacggccggcgtcgccggacctgccctgggcgatgatctttccgtgggtggatgccctgccacgccacccgtcgcagctgtaccaggcagcgggtgaaggcctgctgctgttcgcgatcgtgtgggtgttcgccgccaagccccgcccgctgcgggcggtgtcggccgtattcctgatcggctacggcagccttcgcttcgtcgcggagttcttccgtacgcccgatccgggaatcttcagcgatctggtaccggggctgtcgaccgcgcagtggctgtgcgtgcccatggtcgtcgtgggcctcgcgctcctgaaacacgctgcgcacgcccgcgcgcgcggctga

SEQ ID NO: 81761 - protein, 265 aa, Azoarcus sp. BH72
MLVHPQFDPVAIAVGPVAVRWYGLMYLLAFVLFVVLGRAHARRRPELGWNAQAIDDLLLYGVLGVIIGGRLGEVLFYQPGYYLSHPAEILAVWKGGMSFHGGFLGVLVAMWLYGQRSGRGFWQITDFIAPLVPTGLAAGRIGNFINGELWGRPASPDLPWAMIFPWVDALPRHPSQLYQAAGEGLLLFAIVWVFAAKPRPLRAVSAVFLIGYGSLRFVAEFFRTPDPGIFSDLVPGLSTAQWLCVPMVVVGLALLKHAAHARARG

SEQ ID NO: 81762 - DNA, 834 bp, Acidovorax sp. JS42
  CDS (1)..(834): transl_table=11
atgcccgccatgctgatgtacccccaaatcgaccccgtggccctgcaggtcgggcctttgtccattcactggtacggcctgacctatctggccggttttgcgctgttcatgttcctgggcatgcgccgcctgagccaccagccctacgcatccctgcgtggcgaccaggcgtggtcgcgcaaggacgtggaggacatcctgttcctgggcgtgctgggcgtggtggtgggcgggcggctggggtactgcctgttctacaagccgggctactacctgagccacccgctggagatcttctacgtgtggcagggcggcatgagctttcacggcgggttgctgggcgtgatcggctccatgctgtggtttgcgcattcgcgccgcaggccctggctgcaggtggccgatttcgtggcgccgtgcgtgcccacggggttggcggccgggcgcatcggcaacttcatcaacggcgaactgtgggggcgcttcgcgccgcaggatctgccctggggcatggtgttcccgcaaagcggctccatgctgccgcgccatccgtcgcagatctaccagttcctgctcgaaggcctgctgctgttcgtgctgctgtggctgtatgcgcgccagccgcgcaagcgtggcgaggtagcggcggcgttcctcgtgggctatggcgtgctgcgcttcacggccgagtatttccgcgagcccgacagcttcctgggcctgttgtcgctgggcatgagcatgggccagtggctgtgcatcccgatggtggcggccggggtggcgatgtgggtctgggcgcagcggcaggatgctccggagggatttgcataa

SEQ ID NO: 81763 - protein, 277 aa, Acidovorax sp. JS42
MPAMLMYPQIDPVALQVGPLSIHWYGLTYLAGFALFMFLGMRRLSHQPYASLRGDQAWSRKDVEDILFLGVLGVVVGGRLGYCLFYKPGYYLSHPLEIFYVWQGGMSFHGGLLGVIGSMLWFAHSRRRPWLQVADFVAPCVPTGLAAGRIGNFINGELWGRFAPQDLPWGMVFPQSGSMLPRHPSQIYQFLLEGLLLFVLLWLYARQPRKRGEVAAAFLVGYGVLRFTAEYFREPDSFLGLLSLGMSMGQWLCIPMVAAGVAMWVWAQRQDAPEGFA

SEQ ID NO: 81764 - DNA, 876 bp, Nostoc punctiforme PCC 73102
  CDS (1)..(876): transl_table=11
atggcactggatttttccaccttgcccttggcgtttcaatttacttctccaggacctattctggtgaaattagggccactaagtatccgatggtatggcttattgattgccacagcagtgttaattggcgtaatcctttctcaagaattggcaaagcgccgtaatgttaatcctgagttgctaggcgatttgtttttttggttgttgattggggcaattcccggcgcacggctatattacgttttctttgaatggtcaaaatatgccccaactccaggaaaaattttcgctatctgggaaggaggtattgccattcatggagcaattattggtggcgttttggctgcgttaatctttgccaaaatcaagcaggtttctttctggcaactggcagatttagtagcaccttcgctgattttagggcaggcgatcggacgttggggcaatttctttaattctgaagcttttggcgatcctactgatttaccctggaagctgtatataccaccagaccatcgtcctttagaatatgctagtttcgattacttccatcccacctttctgtatgaatctctatgggatttaatggtgtttacactactcataacgttgtttttccggtctttatccggtaagccacgtttaaaggtaggcactctgtttttagtttactggccagcctacagcttaggacgcttgtggattgaaggtttccgtactgatagcttaatgctggggccattacgaatggcacaagtagtcagtagtctaggaattttatttggattagttggattagcttggctttacttactcaaacgccctttacccgatgtagtgcctactcccaagggaaatggagagatgaggggataa

SEQ ID NO: 81765 - protein, 291 aa, Nostoc punctiforme PCC 73102
MALDFSTLPLAFQFTSPGPILVKLGPLSIRWYGLLIATAVLIGVILSQELAKRRNVNPELLGDLFFWLLIGAIPGARLYYVFFEWSKYAPTPGKIFAIWEGGIAIHGAIIGGVLAALIFAKIKQVSFWQLADLVAPSLILGQAIGRWGNFFNSEAFGDPTDLPWKLYIPPDHRPLEYASFDYFHPTFLYESLWDLMVFTLLITLFFRSLSGKPRLKVGTLFLVYWPAYSLGRLWIEGFRTDSLMLGPLRMAQVVSSLGILFGLVGLAWLYLLKRPLPDVVPTPKGNGEMRG

SEQ ID NO: 81766 - DNA, 867 bp, Fusobacterium nucleatum subsp. vincentii ATCC 49256
  CDS (1)..(867): transl_table=11
atgaatccagtatttttaaaaataggtcctattgaattacattattatggacttatgtatgcaatagcattttttgttggtatcagtcttggaaaaaaaattgcaaaggaaagaaattttgatgttgatatagttgaaaattatgcttttgttgcaattatttcaggacttataggtggaaggctttattatgttttattcaatcttccttattatttacagaatcctcttgaaattccagctgtttggcatggtggaatggcaatacatggtggtatattaggaggaattattggtactcttatttttgcaaaagttaaaaaaataaatcctctaattttaggagattttgcagcaggtccatttattttaggacaagcaattggaagaataggaaattttatgaatggtgaaatacatggagttccaacttttacaccattttctgttatatttaatttaaaacctaaattttatgaatggtattcttattatcaatcattatcaatttcagaaaaagcaaattatcctgatcttgttccttggggaattgtatttcctacttcatctcctgctggaagtgaatttcctaacttagcattacacccagctatgttatatgaaatgattttaaaccttattggtttctttataatttggtttattttaagaaagaaagaagataaagcccctggttatttatggtggtggtatataataatctattctataaatagaattatagtaagttttttcagagttgaagatttaatgttctttaattttagggcacctcatgttataagtatcattttaattgtagtttcaattttctttttaaagaaagataacaaaaaaacattttaa

SEQ ID NO: 81767 - protein, 288 aa, Fusobacterium nucleatum subsp. vincentii ATCC 49256
MNPVFLKIGPIELHYYGLMYAIAFFVGISLGKKIAKERNFDVDIVENYAFVAIISGLIGGRLYYVLFNLPYYLQNPLEIPAVWHGGMAIHGGILGGIIGTLIFAKVKKINPLILGDFAAGPFILGQAIGRIGNFMNGEIHGVPTFTPFSVIFNLKPKFYEWYSYYQSLSISEKANYPDLVPWGIVFPTSSPAGSEFPNLALHPAMLYEMILNLIGFFIIWFILRKKEDKAPGYLWWWYIIIYSINRIIVSFFRVEDLMFFNFRAPHVISIILIVVSIFFLKKDNKKTF

SEQ ID NO: 81768 - DNA, 807 bp, Haemophilus influenzae R2866
  CDS (1)..(807): transl_table=11
atgaattcaaattatttacttcttccccactttgatccgagtatttttacgcttggcgatagtaatatcggcttacgttggtatggtttgatgtaccttttaggttttgtttttgcacgttggcttgcggttcgccgtgctaatcgcccaaatagcggttggacagtagatcaagttgatagcttacttttcaatggttttatgggggtgtttattggcggacgtgttggcgatgtatttttctataatctcgatcatttcttacaagaaccactttatttattccgcgtttgggaaggtggaatgtcgttccacggtggcttaattggtgtaattgttgctatgatttggacatcctattcacaaaaacgtaatttttggcaaacggctgattttgttgcgcctttgattccgtttggtttaggtttaggcagaattggtaatttcattaatcttgaactatggggacgcgaaacgaatgtgccttgggcaatgattttcccgaatgatcctcttttactgcctcgtcatccatcacaactttatgaagcttttttagaaggcctggtgttgtttgcgattctgaatatttttattaaaaagccacgtccaatggcttctgttgcaggtttattcttaattggttatggcgtcttccgttttattgtggaatatgtgcgtgaacctgaagttgaaaatttctttgggattattacacgagggcaagccctttgcttgccgatgattattggtggtgctttcattatggcttgggcttattcacgcaaaagtgcggtcataaaatag

SEQ ID NO: 81769 - protein, 268 aa, Haemophilus influenzae R2866
MNSNYLLLPHFDPSIFTLGDSNIGLRWYGLMYLLGFVFARWLAVRRANRPNSGWTVDQVDSLLFNGFMGVFIGGRVGDVFFYNLDHFLQEPLYLFRVWEGGMSFHGGLIGVIVAMIWTSYSQKRNFWQTADFVAPLIPFGLGLGRIGNFINLELWGRETNVPWAMIFPNDPLLLPRHPSQLYEAFLEGLVLFAILNIFIKKPRPMASVAGLFLIGYGVFRFIVEYVREPEVENFFGIITRGQALCLPMIIGGAFIMAWAYSRKSAVIK

SEQ ID NO: 81770 - DNA, 810 bp, Magnetospirillum magnetotacticum MS-1
  CDS (1)..(810): transl_table=11
atgaccttcgcgctcgcctatccccatatcgaccccatcgccttgcagttggggcccatcgccatccgctggtacgcgctggcctatatcgccgggctgatgctgggctggcgctacgtcaagtttctggtggcgcgcccgcccaatgccatgaccgagctggaggtggacgacttcctggtctgggccaccctgggcgtggttctgggcggacggctgggctatgtgctgttctacaagccgctccactacctggagaatcccctggagattcccatggtctggcagggcggcatgtcgttccacggcggcgccctgggcgtcatcatcggcatcatcgccttttcccggttcagaggccgcaacctgttccaggtgggtgacgtcatctgctgcgccgtgcccatcggcctgttctttggccgcatcgccaatttcgtcaatggcgagctctttggccgcatcgctcccgatgtggactgggccatggtgtttcccggcggcgggccgctgccccgtcatcccagccagctttacgaggccggtctggaaggcgcggtgctgttcctgatcctgttcggcctgtggaagctgacccaaatccgctaccgcgcgggcgccctgtcgggtgtcttcctggcgggctatggtctggcgcgcatcgcctcggaattcttccgccagcccgatgcccatctgggctttctgtggggcggggccaccatggggcagttgctgtccatcccccaggtggtggtcggtttggctctgctggtatgggctctgcggcgagcgccggtgggcaaatga

SEQ ID NO: 81771 - protein, 269 aa, Magnetospirillum magnetotacticum MS-1
MTFALAYPHIDPIALQLGPIAIRWYALAYIAGLMLGWRYVKFLVARPPNAMTELEVDDFLVWATLGVVLGGRLGYVLFYKPLHYLENPLEIPMVWQGGMSFHGGALGVIIGIIAFSRFRGRNLFQVGDVICCAVPIGLFFGRIANFVNGELFGRIAPDVDWAMVFPGGGPLPRHPSQLYEAGLEGAVLFLILFGLWKLTQIRYRAGALSGVFLAGYGLARIASEFFRQPDAHLGFLWGGATMGQLLSIPQVVVGLALLVWALRRAPVGK

SEQ ID NO: 81772 - DNA, 780 bp, Rickettsia rickettsii
  CDS (1)..(780): transl_table=11
atgacatttcctaatatcaatccagttattttctctataggtccacttgctatctcttggtattctctttcatatgtaataggaattttgctaggctggttctatgcaaataaaattatagaaaaatttaagcctcaaattaccaaaaaaaatctagaagatttcattacttatgccgttataggcataatagtcggaggcagactagggtttgttttattatataacccttctagatatttttcaaatccaatagatatcttaaaaacttatgaaggcgggatgtctttccatggcggagctttaggggggattattgctgcttatttgttttgccgaaaatataaaattaattttttaagtctcacggatataatagcccctgtagtacctatcggattatttttaggtaggatcgctaattttattaacggcgaactatacggacgtattacaaatgcttcttttggtatgatttttccaaatagcgatttgatgccaagacatcctagtcaattatatgaagctttttttgaaggtttagtattatttagtatcttagcatatgcaacatttaagcacaaaactcttaaaaagtgcggtttaaactcaggcatatttttcacattttacggtcttttccgaatcactattgaaatatttagagaacccgacatacaaatcgggtttattttagatagcttaactatgggacaaattttatctgtacctatgttacttttaggaagttatttaatatgtcaatcgaatccaaaataa

SEQ ID NO: 81773 - protein, 259 aa, Rickettsia rickettsii
MTFPNINPVIFSIGPLAISWYSLSYVIGILLGWFYANKIIEKFKPQITKKNLEDFITYAVIGIIVGGRLGFVLLYNPSRYFSNPIDILKTYEGGMSFHGGALGGIIAAYLFCRKYKINFLSLTDIIAPVVPIGLFLGRIANFINGELYGRITNASFGMIFPNSDLMPRHPSQLYEAFFEGLVLFSILAYATFKHKTLKKCGLNSGIFFTFYGLFRITIEIFREPDIQIGFILDSLTMGQILSVPMLLLGSYLICQSNPK

SEQ ID NO: 81774 - DNA, 792 bp, Wolbachia endosymbiont of Drosophila simulans
  CDS (1)..(792): transl_table=11
atgtctttaaatccagtaattttcagcatcggtcctgtttctatatattggtattccttagcctacgttttgggtatagtgtttgcatattggtatttacataggctagatgaccaaaaaatatttactaagaatttttacgattcgttattaacagccactattgtaggtattatccttggaggtagacttggctacgtattgatatatgatccagttctttatataagcaaccctatcgagatattgaagacctgggaaggagggatgtcatttcatggcggtgctataggagttttgcttgcagtaataatctcctgcagaagacataacattcctatattttatgcactggacctagtttcttgcggagttcccataggtttatttttaggtcgcataggcaattttataaacggagagttatttggcagagttacaactatgccatggggtatggtatttccagagagtggtgataatttgctgcatcatccaagccagctttatgaggcactttttgaaggactgctactttttgcagttgcaaattcactgtttttcttaactagaataagactgtatcacggtgcgttaactggtattgcagttatgtggtatggaatagcacgttttttcgttgagttttttcgcgaaccagactatcaaattggctatttgtggcttgatttaactatggggcagttgctttctatacctatggttttgctaggaatgcttgtatatctaggcgcattaaatttaaaatttaatacgaaatctgtcacatag

SEQ ID NO: 81775 - protein, 263 aa, Wolbachia endosymbiont of Drosophila simulans
MSLNPVIFSIGPVSIYWYSLAYVLGIVFAYWYLHRLDDQKIFTKNFYDSLLTATIVGIILGGRLGYVLIYDPVLYISNPIEILKTWEGGMSFHGGAIGVLLAVIISCRRHNIPIFYALDLVSCGVPIGLFLGRIGNFINGELFGRVTTMPWGMVFPESGDNLLHHPSQLYEALFEGLLLFAVANSLFFLTRIRLYHGALTGIAVMWYGIARFFVEFFREPDYQIGYLWLDLTMGQLLSIPMVLLGMLVYLGALNLKFNTKSVT

SEQ ID NO: 81776 - DNA, 831 bp, Crocosphaera watsonii WH 8501
  CDS (1)..(831): transl_table=11
atgctgttagggtttcaatttcagtctccaggcccaatactatttgaagcagggccctttatcgttcgttggtatggtttattaatcgccagtgcggtgttaattggggtaactttatctcaatggttagctaaacgtcgtaaaatcaatcctgatctcattggggatttagctatctggttaattattggggccataccctgtgccagactctactacgtactatttcaatggcaagaatacactcaacgtcccgaagatattattgcgatctggaaaggaggaatagctattcatggggcgattataggaggaaccttagcagccctaatttttggtcgtttaaacaaaatttccgtgtggcaattagccgatctggtagttccttccttggcgttaggacaagcgatcggtagatggggtaatttcttcaactctgaagcctttggcgcacccactaacttaccttggaagctttatatcccagcgaataaccgccctatagcctatctaacctcggaatacttccatcccacctttctttacgagtctgcttggaatgtgatggtatttatacttctgctgtccttgttcttttggggactaaaatatcctaatcggttttatgtaggaaccctctcgttagtctatttgatcgcctacagtagtggcagaatttggatagaagcattaagaaccgatagtttaatgttaggaccattgagggtggcacaggtcattagtttagttatgattagtgtaggggttttggggctagtgtggttatatcgtttaagaaaacctttgccagacgtggtttccccccagtaa

SEQ ID NO: 81777 - protein, 276 aa, Crocosphaera watsonii WH 8501
MLLGFQFQSPGPILFEAGPFIVRWYGLLIASAVLIGVTLSQWLAKRRKINPDLIGDLAIWLIIGAIPCARLYYVLFQWQEYTQRPEDIIAIWKGGIAIHGAIIGGTLAALIFGRLNKISVWQLADLVVPSLALGQAIGRWGNFFNSEAFGAPTNLPWKLYIPANNRPIAYLTSEYFHPTFLYESAWNVMVFILLLSLFFWGLKYPNRFYVGTLSLVYLIAYSSGRIWIEALRTDSLMLGPLRVAQVISLVMISVGVLGLVWLYRLRKPLPDVVSPQ

SEQ ID NO: 81778 - DNA, 846 bp, Prosthecochloris aestuarii DSM 271
  CDS (1)..(846): transl_table=11
atgctttcatggtggcaaaatcttccttccgggatggacccgattatttttaccgtaggcggttttcccgtccgctggtatggaatgatgtatatcctcgcattcgcggtggtctatatcctcacccggtaccgcataaaaaatgaacagcttccctactctccagcctttgtcggcgacgctctgacatgggcgatggtcggagtccttctcggcggaaggatcggctaccttctcttctacagctttcctgaattcattgccaatccgctcggctcgatcattcccgtttccttttccggcggatgcagtttttcgggaattgcaggtatgtcctatcatggcggggctatcggggtcatcatcgcgcttatgctgttcacccgcaatcgcaaggtgccgtttctgaaaaccatcgacctgtttatcacggccctgccgcttggctatacctttggcagaataggaaacttcatcaatggagagctctatggaagagtgaccgatgccgctattggcatgtattttccttcagccccgggctttgcgctccgtcacccatctcagctttatgaagcctttttcgaaggaatcgtactcttcgtcattctgtggacgattcgcaaacaatctccatacccgggctttctctcagggatttaccttttcggttacggctttgtgcgatttttcattgaattctatcgtgaaccggacgctcatctcggattcgtgttcatgcagttttcaatggggcagttgctctgccttgccatgatggccgcaggcatcggggtccttctggcctcaaaacaactatcgttagcgggacaaagaaagcagtag

SEQ ID NO: 81779 - protein, 281 aa, Prosthecochloris aestuarii DSM 271
MLSWWQNLPSGMDPIIFTVGGFPVRWYGMMYILAFAVVYILTRYRIKNEQLPYSPAFVGDALTWAMVGVLLGGRIGYLLFYSFPEFIANPLGSIIPVSFSGGCSFSGIAGMSYHGGAIGVIIALMLFTRNRKVPFLKTIDLFITALPLGYTFGRIGNFINGELYGRVTDAAIGMYFPSAPGFALRHPSQLYEAFFEGIVLFVILWTIRKQSPYPGFLSGIYLFGYGFVRFFIEFYREPDAHLGFVFMQFSMGQLLCLAMMAAGIGVLLASKQLSLAGQRKQ

SEQ ID NO: 81780 - DNA, 885 bp, Sulfitobacter sp. EE-36
  CDS (1)..(885): transl_table=11
atgaatgcaatgctccccttccccgacctgtcgcccgagattttctcgttcacgttatttggcatgaccgtcgccctgcgctggtatgcgctggcctatatcgtcggcatcctcgttggctggcgcatcgttgtgcgcgcggttgagcggcccaagctttgggcaggcaatacccccgtcatgaccaaacagcaggtcgaggatctgcttttctgggtcattctcggcgtcattctgggcgggcgtctgggatatgtactattctatcaaccgggctactacctcagcaatcccgcgcagatcctgcggatctgggaggggggcatgtcgttccacggcggggcgcttggggtgatctttgcgggcatcgcctataccaagcgtcatggcattagcacgatctctaccggcgatgtcgtctgtctggggctggcacccggcctgtttctggggcgtctggcgaatttcatcaatgcagagctttggggccgccccaccgatctgccctggggcgtggcctttcccacggtggccgcacaggactgcccggacattgcgacgatctgtgcacggcatccctcgcagctatatgaggcgctgcttgaggggctgatccttggggccctgctgatctatctggcatggcggcgcggcgggctgaaatcagaggggctgatcggcggcgtctttctggccggctacggggccgcgcgtttcatcgtcgaattcgtacgccaacctgatgcgcaatttgtcagcgccaacaacccgctggggctggcgtggcatgtaaacggctgggggctgaccatgggccaactgctgagcctgccgatgattgccatcggggtgttcctgatcttgcgggcgacgcgcaaggcatga

SEQ ID NO: 81781 - protein, 294 aa, Sulfitobacter sp. EE-36
MNAMLPFPDLSPEIFSFTLFGMTVALRWYALAYIVGILVGWRIVVRAVERPKLWAGNTPVMTKQQVEDLLFWVILGVILGGRLGYVLFYQPGYYLSNPAQILRIWEGGMSFHGGALGVIFAGIAYTKRHGISTISTGDVVCLGLAPGLFLGRLANFINAELWGRPTDLPWGVAFPTVAAQDCPDIATICARHPSQLYEALLEGLILGALLIYLAWRRGGLKSEGLIGGVFLAGYGAARFIVEFVRQPDAQFVSANNPLGLAWHVNGWGLTMGQLLSLPMIAIGVFLILRATRKA

SEQ ID NO: 81782 - DNA, 882 bp, Roseovarius nubinhibens ISM
  CDS (1)..(882): transl_table=11
atgatagccgcgatccccttccccgacatctcgcccgagatcttcacgatctcgctcttcggcctcgatttctcgctgcgctggtacgcgctggcctatatcgtgggcatcgttctgggctggcgcctcgtgctcgccacagtgagccgcccgacgctctggcccggcgacacctcccccatgacacggacccaggtggacgacctcctcacctgggtgatccttggcatcatcctcggtggccggctcggatttgtgctgttttatcaacccggttactacctgtcgaaccccggtgacatcctcaagatctggcaaggcggcatggcgtttcacggcggcttcctcggcgttctgatcgccgccacgctctatttccgcaaggaaaacatcccctggctctcggccgcagatgtgctcgccatggtcacgcccatcgggctcttgctgggccggatcgccaatttcatcaatgccgagctctggggccgcccgaccgatctgccctggggcgtgatctttcccggcgcggaggctcagaactgcggcacgctcgccggtctctgcgcccgccatccgtcacagctctacgaagccgctctcgaagggctgatcctcggcgcggtgctgatctggctcgcctatcgtcgcggcgcgttcaaacgccccgggctcatcctcggcctcttcgtggcgggctatggtctcggccggttcctcgttgaattcgtgcgccagcccgacgcccagttcatctcgcccggcaacccgctcggtcttgcgtggcagatgggcggctacggtctcaccatggggcaaatcctgtcgctgccgatgatcgcggtgggtctttacttcgtgctccgcgcccgccgcgcatga

SEQ ID NO: 81783 - protein, 293 aa, Roseovarius nubinhibens ISM
MIAAIPFPDISPEIFTISLFGLDFSLRWYALAYIVGIVLGWRLVLATVSRPTLWPGDTSPMTRTQVDDLLTWVILGIILGGRLGFVLFYQPGYYLSNPGDILKIWQGGMAFHGGFLGVLIAATLYFRKENIPWLSAADVLAMVTPIGLLLGRIANFINAELWGRPTDLPWGVIFPGAEAQNCGTLAGLCARHPSQLYEAALEGLILGAVLIWLAYRRGAFKRPGLILGLFVAGYGLGRFLVEFVRQPDAQFISPGNPLGLAWQMGGYGLTMGQILSLPMIAVGLYFVLRARRA

SEQ ID NO: 81784 - DNA, 882 bp, Oceanicola batsensis HTCC2597
  CDS (1)..(882): transl_table=11
atggtcgccgtcattccgttcccggacatctcgcccgagcttttctccgtctccctcttcgggatggaattcgcgctgcgctggtacgcgctggcttatatcgtcggcatccttctgggatggctgctggcccgcgccgcccttgcccggcccggtctgtggcccgcagacacggcgccgatgacgaaggcgcaactcgaggacctgctgacctggatcatcctcggcatcgttctgggtgggcggctcggcttcgtgctgttctaccagccgggctattacctcgccaatccagccgagatcccgatgatctggcagggcggcatggcgttccatggcggcctgctgggggtcgtgctcgcgacctgggtctactgtgcccgccacggcatatccgtgctgcaggccgcggatctgctgtgcctggccacgccggccggcatcctgctgggccgcatcgccaatttcatcaacggcgagctttgggggcgcccgtccgaagcgccctgggcggtgatctttcccggcccctcggccctgtgcgcggatggaccctgcgcccgccatccatctcaactctacgaggcggggctcgaggggcttctgctcgggctgatcctcgtctacctggcctttgcgcgcggcgcgctgcgcaggcccggactgatcgccgggctcttcttcgcgggctatggcctggcccggttcatcgtcgaattcttccggctggcggatgcgcaattcatcacgcccgaaaatccctacggtcacgtgctgcgcctgaccgagaccatcggcatcaccatgggacaggtcctgtcactcccgatgatcctgatcggcctcgcgctgatcgcgatggggcgccggcaatggcggtga

SEQ ID NO: 81785 - protein, 293 aa, Oceanicola batsensis HTCC2597
MVAVIPFPDISPELFSVSLFGMEFALRWYALAYIVGILLGWLLARAALARPGLWPADTAPMTKAQLEDLLTWIILGIVLGGRLGFVLFYQPGYYLANPAEIPMIWQGGMAFHGGLLGVVLATWVYCARHGISVLQAADLLCLATPAGILLGRIANFINGELWGRPSEAPWAVIFPGPSALCADGPCARHPSQLYEAGLEGLLLGLILVYLAFARGALRRPGLIAGLFFAGYGLARFIVEFFRLADAQFITPENPYGHVLRLTETIGITMGQVLSLPMILIGLALIAMGRRQWR

SEQ ID NO: 81786 - DNA, 876 bp, Erythrobacter sp. NAP1
  CDS (1)..(876): transl_table=11
gtgctgtcactacttgctgcaagcggcggcgctgctgacccgatctactggtccgatttgggtctaagcccctatttgttcgagattggcgggttccagctgcgatattattcgctcgcctacctgctcggcgtggtgttcgcttattggcacctgtcgaagatgatcaaggcacccggcgcgcccatggctcagcggcatgcggacgacctgtttttctactgcacgctcggcgtcatcatcggcggacggctgggatattcgatcttctatcagcccgacctctggtcgaacccgcttgatgttctcaagctgtgggaaggcgggatgagctttcatggcgggctgatcggtgtgctggtcgcgatcgcctgggtgtcgcgcagcggcaacctctccttcttgcgcgtgtgcgactatatcgcggtcaacgtgccgatggggatgctgcttgggcgtcttgcgaacttcaacaatggcgaattgtggggccgggtgagcgatgtcccttgggcgatggtgttcccgcgcgctggcgaagtcgctcgccacccaagtcagctttaccaggcaggtcttgaaggcctcgcgctgctgatcatcctgatgctgctgttctggaagacgaaggcgcggtatcgaccgggtctgctggtgggcatcttcacgctcggaatggggcttgcgcgcttcattaacgaatttttccgcgagcccgatgcacaactggctgactttgccgcgcgaaccgggctatcgatgggtcaatggctaacaatacccctgatactgattggattgattgtcacgatctacgccgtgacgaggaagcccgtgggaaccggagcgacgagcgcggcgaccaatccggcctag

SEQ ID NO: 81787 - protein, 291 aa, Erythrobacter sp. NAP1
MLSLLAASGGAADPIYWSDLGLSPYLFEIGGFQLRYYSLAYLLGVVFAYWHLSKMIKAPGAPMAQRHADDLFFYCTLGVIIGGRLGYSIFYQPDLWSNPLDVLKLWEGGMSFHGGLIGVLVAIAWVSRSGNLSFLRVCDYIAVNVPMGMLLGRLANFNNGELWGRVSDVPWAMVFPRAGEVARHPSQLYQAGLEGLALLIILMLLFWKTKARYRPGLLVGIFTLGMGLARFINEFFREPDAQLADFAARTGLSMGQWLTIPLILIGLIVTIYAVTRKPVGTGATSAATNPA

SEQ ID NO: 81788 - DNA, 792 bp, Oceanospirillum sp. MED92
  CDS (1)..(792): transl_table=11
gtgtgggttcatgaaataaacccgattgctttagagttaggtccgctgaaagtgcattggtacggacttatgtatctggtgggttttgcggctgcctggtggctgggtgttaagcgggcgaggaagcccggttctggctggagtgaagagcaggtctcagattttattttctggggtgcgatgggtgtcgtcctaggtgggcgaatgggttacgtgctcttttacaactttgataagtttctctcggatccgctttggttatttgcggtctgggaaggtggtatgtcattccatggtggtctgcttggggtgattgctgttatgtactggtttggtcgccagcatggcaaaagtctcatggagatggcggactttgttgcgccgctgataccggtgggcttaggagccggacggcttggtaactttattggtggtgagctttgggggcgagttacggatggtacctggggcgtagtgtttcgccatgcgggtgatttaccaagacatccttctcaactttatcagtttgctctcgaaggtgttgttctgtttgttgcgctatggtggttctcatctaaaccaagaccgcgtatggctgtatcggggctgttcttgctgctctatggggtattccgatcggtcgttgagttttatcgtgaaccggatgggcatattggctttgtcgcgatggactggctgacgatggggcaattactatccttaccgatgatcttgttgggggcgctgatgctcggctttgcctatcaacgctcagacctgaaaagggtgtaa

SEQ ID NO: 81789 - protein, 263 aa, Oceanospirillum sp. MED92
MWVHEINPIALELGPLKVHWYGLMYLVGFAAAWWLGVKRARKPGSGWSEEQVSDFIFWGAMGVVLGGRMGYVLFYNFDKFLSDPLWLFAVWEGGMSFHGGLLGVIAVMYWFGRQHGKSLMEMADFVAPLIPVGLGAGRLGNFIGGELWGRVTDGTWGVVFRHAGDLPRHPSQLYQFALEGVVLFVALWWFSSKPRPRMAVSGLFLLLYGVFRSVVEFYREPDGHIGFVAMDWLTMGQLLSLPMILLGALMLGFAYQRSDLKRV

SEQ ID NO: 81790 - DNA, 819 bp, Xanthobacter autotrophicus Py2
  CDS (1)..(819): transl_table=11
atgccgaccttcgccctgcctttcccggccatagacccggtcctggtccagctcggcccgctcgccatccgctggtatgcccttgcctatatcgccggcctcgtcctcggctggttgctggcgcgggcgctggtggcgcgccctgccttgtggggcggcacctcgcccatgacgccgcaggacctcgacgacgctttgttctgggcgacgctcggcgtcatcctgggcgggcggcttggctatgtgctgttctacaacccggcctatttcgccgcgaacccgcaggacatcgtggcggtgtggaagggcggtatgtcctttcacggcgggcttgccggcacgctggtggccctcgtcatgttcgcccggtcgcgcggtatccgggtcatgtcgctgctggacgtgtccggcgtggtggcgcccctcggcctgttcttcggccgccttgccaatttcatcaatggcgagctgtggggccggccggcggacgtgccgtgggccatcgtcttcccccatggcgggcccgaaccgcgccatcccagccagctttacgaggcggcgctggaaggcatcgtgctgttcctcatcatgcttctcgtggtgcgcctcggcgggctgaagcggccgggggtggccgccggcatcttcggcatcggctacggcgtttcccgcatcatcggtgagttcttccgcgagccggacgtgcaactcggctacctcgccttcggcaccaccatgggcatgtggctgtcggtgccgctggtcgtcgccggcgccggccttctgctctacgccctgaagcgcaagccggccgcgtga

SEQ ID NO: 81791 - protein, 272 aa, Xanthobacter autotrophicus Py2
MPTFALPFPAIDPVLVQLGPLAIRWYALAYIAGLVLGWLLARALVARPALWGGTSPMTPQDLDDALFWATLGVILGGRLGYVLFYNPAYFAANPQDIVAVWKGGMSFHGGLAGTLVALVMFARSRGIRVMSLLDVSGVVAPLGLFFGRLANFINGELWGRPADVPWAIVFPHGGPEPRHPSQLYEAALEGIVLFLIMLLVVRLGGLKRPGVAAGIFGIGYGVSRIIGEFFREPDVQLGYLAFGTTMGMWLSVPLVVAGAGLLLYALKRKPAA

SEQ ID NO: 81792 - DNA, 960 bp, Flavobacteria bacterium BBFL7
  CDS (1)..(960): transl_table=11
atgtattcattaaaagttatctggaacccattagaagggattgatctaggattttttaccattcatttttacagtttatcttatgtcattgcctttgtactgggctggtatatcattaaacctatatttaaacgtgatggtgtaggaatggataagttagatcctttgtttatgtataccgttataggctgtcttgctggtgcgcgtataggacattatcttttttatgagacagaagtacttttcaatgatccgttacatgttttactacctttttctttagatccgtttgaatggaccggatttgccggtatggccagtcatggtgctgcgttaggaattattatcgcgatgttcttttacagtagaaagcatttgaaaaaacatatgttttgggtattggatcgtatcgtgattcctacggctataggtggaacttttgtacgattaggaaacctttttaacagtgagattaacggaaaggaaagtggagatttctgggctggatttaaatttgtaagagatacatcagatccacatgtggctgccgctttacaaaaaacgggctataccgatacggataaagcaattgatacagttgtaaataatcctcaatttacagaggttctagagtccataccttttaaacatcctgcgcagttatatgaagccatatgttatgtcggtgtatttgtaattttatatctggtttattggaaaacagagaaacgtcataaactaggttatatccttggccttttctttgtgctcttatttacagtacgtttctttatagagtttatcaaagcttcgcaaacaagtgcagatcaagaactgcttttagaatacggtttaaatactggtcaattcttaagtataccgtttataatgatcggactctttttaatgtttagtcctaaagggctattcaaaaacccagaacctaaagcccatgcgtaa

SEQ ID NO: 81793 - protein, 319 aa, Flavobacteria bacterium BBFL7
MYSLKVIWNPLEGIDLGFFTIHFYSLSYVIAFVLGWYIIKPIFKRDGVGMDKLDPLFMYTVIGCLAGARIGHYLFYETEVLFNDPLHVLLPFSLDPFEWTGFAGMASHGAALGIIIAMFFYSRKHLKKHMFWVLDRIVIPTAIGGTFVRLGNLFNSEINGKESGDFWAGFKFVRDTSDPHVAAALQKTGYTDTDKAIDTVVNNPQFTEVLESIPFKHPAQLYEAICYVGVFVILYLVYWKTEKRHKLGYILGLFFVLLFTVRFFIEFIKASQTSADQELLLEYGLNTGQFLSIPFIMIGLFLMFSPKGLFKNPEPKAHA

SEQ ID NO: 81794 - DNA, 843 bp, marine gamma proteobacterium HTCC2207
  CDS (1)..(843): transl_table=11
atgctaaattatccacagatcgacccggttgcattgtcactggggccgtttgaattggcggacactgttattgggccgctacaggtccactggtacggcattatgtacctgctggcttttacctgtgcctggttattggcaagccgcaacagtcagcgcccctggtcgccgattgttaaaacccaagttgaagacctaatcgtctttggcgcctggggggttattctcggcggccgttttggctatatgctgttttacagcgccgacaaatggctcgccgatcccggtatgattttccgtatctgggagggcggtatgtcctttcatggtggcttgttaggtgttgccctggccctgctgctctatgctcgcaagcataaactcgcctttctcagccttgctgactttgttgtaccgctggtgcctgcgggtctgttttttggccgtctggggaattttatcggtcaagaactctggggccgccccacagaaatgtcctggggcatgctgttccccgccgacccagagcagttggcgcgccatccttcgcaactatatgaggccatgcttgagggcgcggtactgttcttgattatcaactggtacgccagaaagccacgcttgtatggcgaagtctcgggcctatttttaattctctacggcgccttccgatttgctgttgagtttgtccgtcagcccgatcctcagtttgcccttgactccggtgcggctgaattgctcggttggatgactcgcggccagacactctgtatcccgatgattattttcggtctctggttaatgcgcaaatccctgcgcgcacttgtcagccgcaaggcctag

SEQ ID NO: 81795 - protein, 280 aa, marine gamma proteobacterium HTCC2207
MLNYPQIDPVALSLGPFELADTVIGPLQVHWYGIMYLLAFTCAWLLASRNSQRPWSPIVKTQVEDLIVFGAWGVILGGRFGYMLFYSADKWLADPGMIFRIWEGGMSFHGGLLGVALALLLYARKHKLAFLSLADFVVPLVPAGLFFGRLGNFIGQELWGRPTEMSWGMLFPADPEQLARHPSQLYEAMLEGAVLFLIINWYARKPRLYGEVSGLFLILYGAFRFAVEFVRQPDPQFALDSGAAELLGWMTRGQTLCIPMIIFGLWLMRKSLRALVSRKA

SEQ ID NO: 81796 - DNA, 813 bp, delta proteobacterium MLMS-1
  CDS (1)..(813): transl_table=11
atggttacctatccccagatcgatccggttattttttcgctgggcccactggccgtgcgctggtatgggctgatgtatgtgctgggctttgtcgccgcctatttcctggtccgctaccagttccggcggcagccccggacctgggctgccgccttcgaccggcatctggacaatctctttctggccctgatcgtcggcctgatcatcggcagccgcctaggatacgttctgttctataatttctcctactactggcagcaaccgctggagatcttcgccacctggcagggcgggatgtccttccacggcggcctgctggggctgctgctggccggttggctgttctgccgccaccataagctggagttctggcgcggggccgacgccctggcggtggccgcccccattggcctgggactgggccggctgggtaatttcatcaacggcgaactctatggccgggtcagcgaagtgccgtgggccatggtctttcccggcggcggcccgctgccccggcacccctcccagctctaccaggcttcactggaaggattgctgctctttgttataatgtggctggccctgcaccgctactactggccgcgccactggccggcggggcgattgacggcgctgttcctgattggctacggcggcctgcgttttgtggccgagtttttccgccagcccgacgcccatctgggcctttacctgaacttttttaccatgggccagttgctctgcgccctgatgatagccgccggggccctgctctggtggctggtaaacgctcaccaggccgatgagcgctga

SEQ ID NO: 81797 - protein, 270 aa, delta proteobacterium MLMS-1
MVTYPQIDPVIFSLGPLAVRWYGLMYVLGFVAAYFLVRYQFRRQPRTWAAAFDRHLDNLFLALIVGLIIGSRLGYVLFYNFSYYWQQPLEIFATWQGGMSFHGGLLGLLLAGWLFCRHHKLEFWRGADALAVAAPIGLGLGRLGNFINGELYGRVSEVPWAMVFPGGGPLPRHPSQLYQASLEGLLLFVIMWLALHRYYWPRHWPAGRLTALFLIGYGGLRFVAEFFRQPDAHLGLYLNFFTMGQLLCALMIAAGALLWWLVNAHQADER

SEQ ID NO: 81798 - DNA, 783 bp, Rickettsiella grylli
  CDS (1)..(783): transl_table=11
atgttgatctatcctacaataaaccctatcgcatttagcctaggtccactgaaggttcattggtatggcctgatgtatgcctttggatttataggcgcttggttgcttgccatttatcgcgcaaaaaaaccgaatagtggttggactactgatgaagtgagtgatctgcttttttacgtcgcgcttggtgttattctgggtggacgtgtaggttatatgttgttttacgacttaggcaacttcttaagccatccttggattatttttcaaatttggcagggtggaatgtcctttcatggcggtcttttaggtgtgttattcgctttttatttgtttgctcgtaaaaccggaaaacccttttttgatattgctgatttttctgcgccccttgtccctctcggcttaggcgccggtcgcattggtaattttatcaacggcgaattatggggccgaatgacggaagtcccctggggtatggttttcccacatgccggtggattacctagacacccttctcaactttacgaattcttttttgaaggcgtcgttttattcgttatcctctggatctattccagtaaaaaaagacctcggggggctgtttcagcatggtttgctattttatatggcattttccgttttggacttgagttttttcgagaacctgattcacaactaggtttcattgcttggaattggttaaccatggggcaattgctttctattccaatgatcctgtttggtttatttttattatataaaatacgaactaacaacacttaa

SEQ ID NO: 81799 - protein, 260 aa, Rickettsiella grylli
MLIYPTINPIAFSLGPLKVHWYGLMYAFGFIGAWLLAIYRAKKPNSGWTTDEVSDLLFYVALGVILGGRVGYMLFYDLGNFLSHPWIIFQIWQGGMSFHGGLLGVLFAFYLFARKTGKPFFDIADFSAPLVPLGLGAGRIGNFINGELWGRMTEVPWGMVFPHAGGLPRHPSQLYEFFFEGVVLFVILWIYSSKKRPRGAVSAWFAILYGIFRFGLEFFREPDSQLGFIAWNWLTMGQLLSIPMILFGLFLLYKIRTNNT

SEQ ID NO: 81800 - DNA, 792 bp, Oceanobacter sp. RED65
  CDS (1)..(792): transl_table=11
atgctgcaatatccaaatattgacccagttgccattagtattggacctttaagtattcactggtacgggctcatgtatctgctgggttttggcttggcctatgtgctaatgaattatcgcgccaaacaagccaactcaggttggaataaagagcaggtgagcgatcttattttttacagtgctatgggtgttgtattaggcggtcgtgctggatacgttttattttataacttcggcaaatttgtcgatgacccactgtggctcttcgcagtttgggaaggtggaatgagctttcatggcgggctactgggcgttattgcggcgtgtattttgttcgcacgcaaatacggcaagtcgttctacgcggtaacggactttggagcgccgatggttcccattggtctcttctttggtcgcatcgggaactttattggtggagaattgtggggccgcgtaagtgacgcgccttgggcgatggtgtttcctaaaggcggtccattaccacgtcaccccagccaactttatgaagcctttttagaagggttagtactatttttgattttgtggatatacagccgtaaaccgcgcccaacgatggcggttagcggactgttcttagtaggctatggtgtattccgtttcgcggtagagtttgtacgccagcctgacagccacataggtatggatttgtttggttggatgacccgaggccaaattctatgtgtgcctatggttctctttggcctagctatcatttatctagcatataaacgccaatctcagcaggcgtaa

SEQ ID NO: 81801 - protein, 263 aa, Oceanobacter sp. RED65
MLQYPNIDPVAISIGPLSIHWYGLMYLLGFGLAYVLMNYRAKQANSGWNKEQVSDLIFYSAMGVVLGGRAGYVLFYNFGKFVDDPLWLFAVWEGGMSFHGGLLGVIAACILFARKYGKSFYAVTDFGAPMVPIGLFFGRIGNFIGGELWGRVSDAPWAMVFPKGGPLPRHPSQLYEAFLEGLVLFLILWIYSRKPRPTMAVSGLFLVGYGVFRFAVEFVRQPDSHIGMDLFGWMTRGQILCVPMVLFGLAIIYLAYKRQSQQA

SEQ ID NO: 81802 - DNA, 822 bp, Vibrio sp. Ex25
  CDS (1)..(822): transl_table=11
atgtctcagggatatattgaatttcccaatattgatccggttttaatctctattggtcctgtttcggttcgttggtacggtttgatgtaccttgtgggctttatgttcgccctatggttggcgaaccgacgtgcggataagccgggaagtggttggacacgagaacaggtttctgatttgttgttcgcaggcttccttggcgtggtgattggtggccgtgttggctacgtgcttttctacaattttgagcttttcctagctgaccctttgtatttgtttaaagtgtggaccggtggtatgtctttccacgggggcttactgggtgtgattaccgcgatgttctggtatgcacacaaaaacgggcgaacgttcttcggcgttgccgactttatcgcgccgcttgtgccatttggtttgggtatggggcgtttaggtaacttcatgaacagcgaattgtggggccgagtaacggatgtgccttgggcgatcgttttcccaaatggcggtccactgccacgtcatccatcgcagctttatgaaatggcgcttgaaggtatcgtacttttcttcatcttgaattggttcatcaagaaacctcgtcctctaggttctgtttcagggctatttttagctggatatggtacattccgcttcctagttgagtacgtgcgcgaaccagacgctcatttgggtttattcggtggctttatttccatgggacagattttatccctgccaatggtggttatcggtgtcctaatgatggtttgggcatacaaacgtggtcattacaaagacgagttaccacaaaagacgaagtaa

SEQ ID NO: 81803 - protein, 273 aa, Vibrio sp. Ex25
MSQGYIEFPNIDPVLISIGPVSVRWYGLMYLVGFMFALWLANRRADKPGSGWTREQVSDLLFAGFLGVVIGGRVGYVLFYNFELFLADPLYLFKVWTGGMSFHGGLLGVITAMFWYAHKNGRTFFGVADFIAPLVPFGLGMGRLGNFMNSELWGRVTDVPWAIVFPNGGPLPRHPSQLYEMALEGIVLFFILNWFIKKPRPLGSVSGLFLAGYGTFRFLVEYVREPDAHLGLFGGFISMGQILSLPMVVIGVLMMVWAYKRGHYKDELPQKTK

SEQ ID NO: 81804 - DNA, 804 bp, Alteromonadales bacterium TW-7
  CDS (1)..(804): transl_table=11
atggcacttgagtttcctcaaatcgatccaattattttttcgattggaccactgagcgtacgttggtacggattgatgtatttaattggttttgcatttgcgatgtggtttgcaaatcgtcaagcagcaaagcctaattctggctggaccaaagagcaggtaagtgatctattattttatggcatgctaggggtcatacttggtggtcgtattggctatgtattgttttaccaatttagctattttttagaaaacccactttacttattccgcattgatcagggcggtatgtcgttccatggaggtacgctgggcgtaattacagccgttgctattttttcttggacacgaaaaaaatcactgctacaagttggcgattttgtagcgccactggtgccagtggggttattagcagggcgtataggtaattttataaatggtgagttatgggggcgtgtatcagacgtcccttgggctatgctatttccaaccggcgggccgcttgctcgccacccttcgcagttatacgaagctttttttgaagggctcgttttattcttaattatgctatggtttattaaaaagccacgccctgcgggcagtgttggcggtgtatttttattaggttacggtgtgtttaggtttggtattgaatacttccgccaaccagacgcacaactaggcttatttgccgactttatctctatgggacaaatactgtcactgcctatgattataggtggtttaggtttattaatttgggcttataaaaacccgcagcaagtaacagcagcaaaggcataa

SEQ ID NO: 81805 - protein, 267 aa, Alteromonadales bacterium TW-7
MALEFPQIDPIIFSIGPLSVRWYGLMYLIGFAFAMWFANRQAAKPNSGWTKEQVSDLLFYGMLGVILGGRIGYVLFYQFSYFLENPLYLFRIDQGGMSFHGGTLGVITAVAIFSWTRKKSLLQVGDFVAPLVPVGLLAGRIGNFINGELWGRVSDVPWAMLFPTGGPLARHPSQLYEAFFEGLVLFLIMLWFIKKPRPAGSVGGVFLLGYGVFRFGIEYFRQPDAQLGLFADFISMGQILSLPMIIGGLGLLIWAYKNPQQVTAAKA

SEQ ID NO: 81806 - DNA, 852 bp, marine gamma proteobacterium HTCC2143
  CDS (1)..(852): transl_table=11
atgctaacacatcctgatattgacccggttgccgtctcacttggacctatttcgatccattggtatggactgatgtacttggtgggttttgctgcagcttggggtattgctgttcatcgatcgggttttgacaattcgccgataaaacggcggcacgttgatgacttgatcttttacagtgcgcttggtgctgttttgggtggtcgttttggctatgtgatgttttataattttgataagtttctgctcgatccgctgtggttattcaagctttgggaaggtggaatgtcattccatggcggccttctgggcgtatttgtagccatgataatttttgcccgtaaactcaacgtgaaacttggggcgttggtcgattttgtcgcgccgatggcaccggtgggtttggggatggggcgagtcggtaattttatcggtcaagagttgtgggggcggcccgctgatgtgaatttagtgccctgggcgatggtgttccctaacgatccttcaaatctcgcgcgccatccatctcagttgtatcaggccttgcttgagggcggtgttttactgctgatcgtctacagtttttccgcaaggccccgaccgaattggtctgtggcaggactattcctgatgggatatggtgtatttcggtttgccgtcgaattttttcgggcgcccgatagccatatcggcttcgatgcttttgggtggctgactcggggacaagttttatcgttgccgatgatcatcgggggctttgttttaatgatttatgcttatcggtggcagacagcggagcctctaggaactggttcgaagtctggcaaaaaggccgtgaaaaaaaatcgttaa

SEQ ID NO: 81807 - protein, 283 aa, marine gamma proteobacterium HTCC2143
MLTHPDIDPVAVSLGPISIHWYGLMYLVGFAAAWGIAVHRSGFDNSPIKRRHVDDLIFYSALGAVLGGRFGYVMFYNFDKFLLDPLWLFKLWEGGMSFHGGLLGVFVAMIIFARKLNVKLGALVDFVAPMAPVGLGMGRVGNFIGQELWGRPADVNLVPWAMVFPNDPSNLARHPSQLYQALLEGGVLLLIVYSFSARPRPNWSVAGLFLMGYGVFRFAVEFFRAPDSHIGFDAFGWLTRGQVLSLPMIIGGFVLMIYAYRWQTAEPLGTGSKSGKKAVKKNR

SEQ ID NO: 81808 - DNA, 789 bp, marine gamma proteobacterium HTCC2080
  CDS (1)..(789): transl_table=11
atgatcaactaccccagcattgacccggtggcgctcagtctgggtcccctcaaagtgcattggtatggtctgacctatctgggagggttgctcttcgcctggtggctggccagtcgccgtgccgagcgggcagattcacccatagtccgcgcccaagttgatgatcttattttttattctgctgtcggtattattgtcggcgggcgtttaggttacgttttgttctatggccttgaccgttggcttgatgacccgatgtggttgtttcgcgtttgggagggcggaatggcgttccacggcggattgctaggtgttataggagcgctgtgggtgtttgctcgccggcatcgtattgcgtttgccggcgtcgcagattttgtagcgccgcttgcgcctgtgggcctggccttagggcgccttggcaattttattgggcaggaactctgggggcgacccaccgatgtgccctgggccatgatcttccctcgagacccccttgcattagcgcgccacccttctcagctctatcaatttgctctggaggggtgcctgctattttttattgtgtggatcttcagcttgcgaccacgccctcaatggtccgtcgcgggagtgtttttggtgggctatggaacattgaggtttattgctgaattttttcgggaacccgatgcccacttgggctttcaggcctttggctggctcacccgaggccaactgctatgccttcccatgttcctcttaggcttgtggttgctgcactatgcctatcgtggtcgtaagcagtaa

SEQ ID NO: 81809 - protein, 262 aa, marine gamma proteobacterium HTCC2080
MINYPSIDPVALSLGPLKVHWYGLTYLGGLLFAWWLASRRAERADSPIVRAQVDDLIFYSAVGIIVGGRLGYVLFYGLDRWLDDPMWLFRVWEGGMAFHGGLLGVIGALWVFARRHRIAFAGVADFVAPLAPVGLALGRLGNFIGQELWGRPTDVPWAMIFPRDPLALARHPSQLYQFALEGCLLFFIVWIFSLRPRPQWSVAGVFLVGYGTLRFIAEFFREPDAHLGFQAFGWLTRGQLLCLPMFLLGLWLLHYAYRGRKQ

SEQ ID NO: 81810 - DNA, 789 bp, Marinobacter sp. ELB17
  CDS (1)..(789): transl_table=11
atgttgcaacacccgcagatcgacccggtcgccattgccatcgggccactgaaaatacactggtatggcctgacttatctggtcggctttgcggccggctggtggctggggcgcctacgcagccgcaaaccctggtcgccggtcaatgaagagcaggtaggtgacctgctgttctacctggcgctgggagttattctgggtggccgctttggctatgtcatcttttacaactttgacgtgttcctggcggaccctttgtggctgctgcgggtgtgggaaggcggcatgtcgttccacggcggcctgctgggtgtcatgctgggcatgtggtggtacggtcgtaaaataggcgcaggcttctggcgcatgaccgattttgttgcgccactggtgcctgtgggcctgggggcagggcgcatcggcaacttcatcaacggcgaactctggggtaaacccacggatgtgccctggggcatggtatttccgcaagcgccagacgccttggcgcgacacccctcccagctttatcagttcgccctcgaaggcgtgctgttcttcatcatactgtggtggttctcggccaaacccaggccgcgtatggccgtatctggcctgtttctgatctgctacggcgtgtttcgctttgcggtggaattcgtgcgcgagcccgacgcccagctgggctatctggcttttaactggcttaccatggggcaagtgctgtcattacccatggtgatagctggcctgattctgatgactatagcctaccggagaaacgccgtatga

SEQ ID NO: 81811 - protein, 262 aa, Marinobacter sp. ELB17
MLQHPQIDPVAIAIGPLKIHWYGLTYLVGFAAGWWLGRLRSRKPWSPVNEEQVGDLLFYLALGVILGGRFGYVIFYNFDVFLADPLWLLRVWEGGMSFHGGLLGVMLGMWWYGRKIGAGFWRMTDFVAPLVPVGLGAGRIGNFINGELWGKPTDVPWGMVFPQAPDALARHPSQLYQFALEGVLFFIILWWFSAKPRPRMAVSGLFLICYGVFRFAVEFVREPDAQLGYLAFNWLTMGQVLSLPMVIAGLILMTIAYRRNAV

SEQ ID NO: 81812 - DNA, 900 bp, uncultured bacterium
  CDS (1)..(900): transl_table=11
atgagtttgattgaaacgacgatcgccgcagtcgccgcctcgaatcacatcgccttccccgacctgggcctcgatccgatcatcgtacagatcggaccgttcgcactgcgctggtattcgatggcgtatgtcgccggaatcctcatcggctattggtacctcctgaagatgatcacccagcccggtgcgccgatggcccgccgccatgccgacgacctcgttttctatgcagccctgggcatcatgatcggcggccgcctcggctacgtcatcttctacaaccccggctattatctcgaaaatccactggccatcgtgaaactgtgggatggcggaatgagtttccacgggggcgttatcggcaccagtgcgggcatcatatggctggcttggaggcaaaagcttaactggttgagattacacgattatgtcgccagttgcgtaccgttcggactgttcttcggacgacttgcgaactttataaatcaagaattgtggggagcgcggaccgacgtcgcctgggcgatccgcttccaggaggccgggccgttcggaacggtgctcggcccgccgcgccacccgagccagctctatgaggccgcgctcgaaggcctcgtcctgttcgcgatcctttctttcatgttctggaagacaaaggcgcgctacgaaccgggcaaactggtcggcgcgttcctgttcttctacggcatcttccggttcggggtagagttcatccgcgagccggaccagcaacttgccgcctttgcggccgcgaccggcctgcacatgggccagtggctgaccatcccgatgatccttggcgggctgtacctgatggtcaccgccaagggccgccgcgagcgggtcgagccgattgcgggcagcgaaagcgtcgcctga

SEQ ID NO: 81813 - protein, 299 aa, uncultured bacterium
MSLIETTIAAVAASNHIAFPDLGLDPIIVQIGPFALRWYSMAYVAGILIGYWYLLKMITQPGAPMARRHADDLVFYAALGIMIGGRLGYVIFYNPGYYLENPLAIVKLWDGGMSFHGGVIGTSAGIIWLAWRQKLNWLRLHDYVASCVPFGLFFGRLANFINQELWGARTDVAWAIRFQEAGPFGTVLGPPRHPSQLYEAALEGLVLFAILSFMFWKTKARYEPGKLVGAFLFFYGIFRFGVEFIREPDQQLAAFAAATGLHMGQWLTIPMILGGLYLMVTAKGRRERVEPIAGSESVA

SEQ ID NO: 81814 - DNA, 891 bp, Xenorhabdus nematophilus
  CDS (1)..(891): transl_table=11
atgagcactagctatctggcatttcctaatattgaccctgtcatgttttcaattggccctgtatctctccactggtacggttttatgtatctggttggttttgtttttgctatgtggctggcaaaccgccgtgcggcaaagccggacagtggctggaacaaggccgaagttgagaatttactgtacgcagggtttgtcggggttttcgtcggtggacgtctcggctatgtcctgttctataatctcccgatgttccttgataatcctctttatctgttcaaggtttgggacggaggaatgtcttttcacggtggattggtcggtgttgtctgcgctatgtggtggttttcttgccgcactaaacgtcattttttacagactgctgattttgttgcgccgttggtgcctttcggtttgggcatggggcgcataggtaactttatcaatggtgagttgtggggacgtgttacgcttgatacatcgtgggcggtgttgttcccgagttcccgcagcgaagatattacacaggctatgagtcatccttctttatggccggttttggagaaatatggcgtcttgccccgtcatccgtcacagctctatgagatggtgcttgaaggcattgtgctgtttatcattcttaacgtatttatccgtaaatcacgcccgatggggagtgtttcaggattgttcctgattggttacggcgcattccgcatcatagtcgaatttttccgccagcctgatgcccagcttgggctgtttgaagggattagcatggggcagctcctttcggttccaatgattttagcgggaattatcatgatggtatgggcatataaatgtccccgcaataaagcgcgcaacgacaagatacaagaggcaaaatga

SEQ ID NO: 81815 - protein, 296 aa, Xenorhabdus nematophilus
MSTSYLAFPNIDPVMFSIGPVSLHWYGFMYLVGFVFAMWLANRRAAKPDSGWNKAEVENLLYAGFVGVFVGGRLGYVLFYNLPMFLDNPLYLFKVWDGGMSFHGGLVGVVCAMWWFSCRTKRHFLQTADFVAPLVPFGLGMGRIGNFINGELWGRVTLDTSWAVLFPSSRSEDITQAMSHPSLWPVLEKYGVLPRHPSQLYEMVLEGIVLFIILNVFIRKSRPMGSVSGLFLIGYGAFRIIVEFFRQPDAQLGLFEGISMGQLLSVPMILAGIIMMVWAYKCPRNKARNDKIQEAK

SEQ ID NO: 81816 - DNA, 843 bp, Agrobacterium tumefaciens
  CDS (1)..(843): transl_table=11
ttgatagccgctcccactcaactcgccatcatgcctttccccaatatcgatccgatagcgttgtccatcggtcctctggcgatccactggtacggcattgcctatgttgcgggcatcatgctcggctggttttatgcccgccgcctcgcccgcacggatcgcctctggccgaacgacacctcgccgatctcggcgcagcatctcgacgatttcatcctctgggcggccggcggcatcgtgcttggcggccgcatcggctacatcctgttttacgatatggcagctgtcgccgccaatcccatcagggcgatcgaaatctggaatggcggcatgtcgttccatggcggcctgatcggcacgacgatcgccatgattctcttcgcccgccggaacggcattccggtgtggagcatgttcgacatcattgccgccgttgcgcccatcggcctgctgttcggccgcatcgccaacttcatcaatggcgaattgtggggtcgcatcgccgatgtgccatgggcagtcgtcttcccgaccggtggcccctttgcgcggcacccgagccagctttatgaagcaggcttggaaggcctcgtcctcgtcgtcctcctggcaatcgcaatatacgttttcaaggctctgaaaacacccggcaccgtgaccggcatcttcgtctgcggttacgccctgtcgcgaatcttcgtggaattcttccgcgaaccggacgcccagatcggttatctcgcgggtaactggctgaccatgggcatggtgctgtcaacaccgatgttccttttgggcctctgggccgtcctgcgggcacgcagcgcgacgaaaagcgcctga

SEQ ID NO: 81817 - protein, 280 aa, Agrobacterium tumefaciens
MIAAPTQLAIMPFPNIDPIALSIGPLAIHWYGIAYVAGIMLGWFYARRLARTDRLWPNDTSPISAQHLDDFILWAAGGIVLGGRIGYILFYDMAAVAANPIRAIEIWNGGMSFHGGLIGTTIAMILFARRNGIPVWSMFDIIAAVAPIGLLFGRIANFINGELWGRIADVPWAVVFPTGGPFARHPSQLYEAGLEGLVLVVLLAIAIYVFKALKTPGTVTGIFVCGYALSRIFVEFFREPDAQIGYLAGNWLTMGMVLSTPMFLLGLWAVLRARSATKSA

SEQ ID NO: 81818 - DNA, 858 bp, Anaplasma marginale
  CDS (1)..(858): transl_table=11
gtgtcaggaatgtcaatttgttttgccatgcgggaagccgtagagtggatattgcacctggatccggttttcatgcacgttgggcccctggaaattaggtggtatgcgctctcttacgtgtttggaatactgttcgcacactggcacataacaaaagcctcccagtgtctggcgctcgataaaaagttcctagattctcttatgctctgggccgtgataggcatcatccttggcggcagaactgcttacatcttgttgtataacccaagcttttactgggaatatccgtcggaaattctacaaacatggcacgggggcatgtccatgcatggcggatatgtaggatgcataatagcggttagtatcgtgtgtaaaaagcatagggtgcgcgtcatgcccgtcttggacctgtgtgcgtgtgccgcacctctggggcttttcttaggcaggatggccaatcttgttaatggagaactatatggtagggcaacaaccacatgtttgggagtggtgtttccaagtagtggcgaccttgtgccaagacacccaagtcaagtgtatgaagccatgcttgagggcttgttgccattgctgtttatgagcatactcgcgcgatacaccaaggtcaggctgcgctttggcgtgttgtctcacatgtttggcgcatggtacggcattgtaagatgcgcagtcgagttttttcgtgagcccgatccacaggtcggctacatagcattcgggtggttgaccatggggcaagtgctatcagcgcctatagccgttgtgggcatttttatgctggtattaacagtgctacgcgaaaaaccgcgagagggcgttgcagatatttcggcgtga

SEQ ID NO: 81819 - protein, 285 aa, Anaplasma marginale
MSGMSICFAMREAVEWILHLDPVFMHVGPLEIRWYALSYVFGILFAHWHITKASQCLALDKKFLDSLMLWAVIGIILGGRTAYILLYNPSFYWEYPSEILQTWHGGMSMHGGYVGCIIAVSIVCKKHRVRVMPVLDLCACAAPLGLFLGRMANLVNGELYGRATTTCLGVVFPSSGDLVPRHPSQVYEAMLEGLLPLLFMSILARYTKVRLRFGVLSHMFGAWYGIVRCAVEFFREPDPQVGYIAFGWLTMGQVLSAPIAVVGIFMLVLTVLREKPREGVADISA

SEQ ID NO: 81820 - DNA, 807 bp, Azospirillum brasilense
  CDS (1)..(807): transl_table=11
atgctcgccatcgccttccccggcatcgaccccgtggcgttcgaactcgggccgatcgtcatccgctggtacgcgctggcctatctggcgggcttcgtgctcggctggcgttactgcttggcgctggcccgcagcacgccgggccgtccctcggcggaggattacgacgacttcctgacctgggccgtggtcggagtcatcctgggcgggcggatcggctacgtgctgttctacaacctgcccttctacctccagaatccgctcgacgctctgatggtctggcacggcggcatgtccttccacggcgggctgatcggcgtgctgggcgccatcctgctgttctgctggaagcgcgggctgtcgccgctggccttcggcgacctgatcgccgcggcggcccccatcgggctgttcttcggccgcatcgccaacttcatcaacggcgagctgtacggccgcccggcgcccgacgtgtcctgggcggtggtgttcccgcgcgacccgctgcaggtgccgcggcaccccagccagctctacgagtccttccttgagggggcggtgctgttcgtcctgctggccatcctggtgcggatgcccgccgtgcgcgggcgggccggcatgacggcgggcatcttcttcatcggctacggcctgtcgcgaatcattgcggagttcttccgcgagccggacgcccagctcggattcctctacgctggggcgacgatgggacaacttctgtcggtgccgatggttctgttcggtgtgtggctggtcgcccaggcccgccgccgccccgccgccatctga

SEQ ID NO: 81821 - protein, 268 aa, Azospirillum brasilense
MLAIAFPGIDPVAFELGPIVIRWYALAYLAGFVLGWRYCLALARSTPGRPSAEDYDDFLTWAVVGVILGGRIGYVLFYNLPFYLQNPLDALMVWHGGMSFHGGLIGVLGAILLFCWKRGLSPLAFGDLIAAAAPIGLFFGRIANFINGELYGRPAPDVSWAVVFPRDPLQVPRHPSQLYESFLEGAVLFVLLAILVRMPAVRGRAGMTAGIFFIGYGLSRIIAEFFREPDAQLGFLYAGATMGQLLSVPMVLFGVWLVAQARRRPAAI

SEQ ID NO: 81822 - DNA, 795 bp, Azoarcus sp
  CDS (1)..(795): transl_table=11
atgctgatccatccccagttcgaccccatcgcattttccgtcggcccgctgtcggtgcgctggtacggtctcatgtacctgatcgcgttcctgctgttcatgacgctcggccgtgtgcacgcgcgacggcgccccgagctgggctggaacgcgcagcagctcgacgacctgctgctgtacggcatgctcggcgtggtgctcggcgggcggctcggcgaagtgctgtttttccagcccgcgtattacttcagccaccccgcggagatcctcgcgatctggaaggggggcatgagttttcacggcggcttcctcggcgtgctcgtcgcaatgtggctgtatggacgccgcagcggcaagggtttctggcaagtcacggatttcatcgcgccgctcgtgccgaccgggcttgcggcagggcgcctgggcaatttcatcaatggcgaactgtggggccgtccggtccaaaccgacgttccatgggcgatggtgtatccgtgggtggacgctctcccccgccatccgtcgcagctctatcaggtggcgggcgaaggcctgctgctgttcgcgatcctgtgggtctattcggcccgcccgcggccgctgaaggccgtctccgcgatgttcctgatcggttacggggtactgcgcttcgcagccgagttcttccgcacgccggatccgggaatattcggcaccctgtcgctcgggctgtccacggcccagtggttgtgcgtgccgatgatcgccgtcggcgtcgggctgctcgcgtcgactcggacagatccggcgcattga

SEQ ID NO: 81823 - protein, 264 aa, Azoarcus sp
MLIHPQFDPIAFSVGPLSVRWYGLMYLIAFLLFMTLGRVHARRRPELGWNAQQLDDLLLYGMLGVVLGGRLGEVLFFQPAYYFSHPAEILAIWKGGMSFHGGFLGVLVAMWLYGRRSGKGFWQVTDFIAPLVPTGLAAGRLGNFINGELWGRPVQTDVPWAMVYPWVDALPRHPSQLYQVAGEGLLLFAILWVYSARPRPLKAVSAMFLIGYGVLRFAAEFFRTPDPGIFGTLSLGLSTAQWLCVPMIAVGVGLLASTRTDPAH

SEQ ID NO: 81824 - DNA, 813 bp, Bacillus anthracis
  CDS (1)..(813): transl_table=11
atgctgttaggttctgtaccgcagcttgaccgcgtagctgtccaacttggaccgtttcctgtttattggtacgggattattatcggtacaggtgtgctattaggtctttggctagcaactcgtgagggagaaaggctaggtattccaaaagatacatttgttgaccttgtattaattgcagtaccgatcgctattctatttgcgagaatgtactatgttatttttgaatgggaatattacgcacaaaacccgagtcaaattattaatattcgtcaaggtggcttggcgattcatggtggtttaatcggggctgttgttacgggaattctttttgcaaaacgccgcggggtttcgttctggaagttggcagatattgctgcaccaagtattttactaggacaagcaattggccgatggggaaactttatgaaccaagaggcacatggtgatgaggtaacgagacagtttttagaaggtcttcatttaccggattttattattaatcaaatgtatattgatggtgtatactaccatccgacgtttttatatgaatcactatggaattttgcaggtgtcattttactactcgcattacgaaaagtgaacttgcgccgtggggaattattcttcacatatttaatttggtattcaataggacgctttttcgtagaagggttacgtacagatagtttaatgctaggaccgcttcgtattgcacaagtaatgtcaattggacttgttgttatttctattattttcattattgtgagacgaaaaatggggcaagctgataaaagatattcggaaaattag

SEQ ID NO: 81825 - protein, 270 aa, Bacillus anthracis
MLLGSVPQLDRVAVQLGPFPVYWYGIIIGTGVLLGLWLATREGERLGIPKDTFVDLVLIAVPIAILFARMYYVIFEWEYYAQNPSQIINIRQGGLAIHGGLIGAVVTGILFAKRRGVSFWKLADIAAPSILLGQAIGRWGNFMNQEAHGDEVTRQFLEGLHLPDFIINQMYIDGVYYHPTFLYESLWNFAGVILLLALRKVNLRRGELFFTYLIWYSIGRFFVEGLRTDSLMLGPLRIAQVMSIGLVVISIIFIIVRRKMGQADKRYSEN

SEQ ID NO: 81826 - DNA, 879 bp, Bartonella henselae
  CDS (1)..(879): transl_table=11
atgaacgacttttcttgtccagccattgcttttccatcttttctcaatcctgtcattgtccatttaggtcccatagccctctattggtatggccttggctatgttgtgggcattctttttgtttggtggtatgcgcaaaaattattaaaaaaacaatccctatggtatgcaaatcaccctcctatggataaagagaaaataggagattttgtagtctggtctgccatcagtattgttgttggtggacgcttaggacaagtgcttgtatgggatcccatttattatttcagccatccaactgccatcattacaatatggaatggaggaatgtcctttcatggcggtctcattggcatcaccattgcaatgatttggtttgcccgtaaaaataacatcaagatacgagcaatgtttgatatcattgctatcggtgctcctattggtattggcattgtaagaatatgcaactttattaaccaagaactatggggtaatgttaccacacacccttgggctgtttgtttccccctagatccttactatttaccgcgtcatccaagccaactttacgaagcgctgatggaaggatttcttcttttcgttattttattcattcttacttttgctttcaaagcattaaaacgtccaggcactgtgtcaggaatatttattataggctatgcaatagcacgcagtatttcagaaatttatcgtgctcctcaagaagatccagaatggttttctactctttttcattctacgggtttcacctacggcatggctttatctcttcccatgctttttttagggttctatcttctttttcaagccttcaaagacgaatctaccaaaaatggccacactcaaacaaaaaattaa

SEQ ID NO: 81827 - protein, 292 aa, Bartonella henselae
MNDFSCPAIAFPSFLNPVIVHLGPIALYWYGLGYVVGILFVWWYAQKLLKKQSLWYANHPPMDKEKIGDFVVWSAISIVVGGRLGQVLVWDPIYYFSHPTAIITIWNGGMSFHGGLIGITIAMIWFARKNNIKIRAMFDIIAIGAPIGIGIVRICNFINQELWGNVTTHPWAVCFPLDPYYLPRHPSQLYEALMEGFLLFVILFILTFAFKALKRPGTVSGIFIIGYAIARSISEIYRAPQEDPEWFSTLFHSTGFTYGMALSLPMLFLGFYLLFQAFKDESTKNGHTQTKN

SEQ ID NO: 81828 - DNA, 879 bp, Bartonella quintana
  CDS (1)..(879): transl_table=11
atgaacgacctttcttgtccagccattgcttttccattttttctcgatcccgtaattatccgtttaggccctatagctctccattggtacgggcttggttatgttgtaggcattctttttgcttggtggtatgcgcaaaaattattaaaaaaacactccctatggaacacaaatcaccctcctatggataaggaaaagataggggattttgttgtctggtccgcaatcagtgtcgttgttggtggccgcttaggacaagtgcttgtatgggatcttgcttattactttaaccatccaagtgccattatcgcggtatgggatggaggtatgtccttccatggtggattcattggcattatcattgcgatgatctggtttgcccgtaaaaacaacataaacatacgagcaatgtttgatatcgttgctgctggtgcccctattggtatcggcattgtaagaatatgcaacttcattaaccaagaattatggggcaatattaccacactcccctgggccatctgctttcccttagatccttactatctaccgcgccatccaagccaactttacgaagcgttcatggaagggtttctacttttcatcatcttattcattattatttttgctttcaaagcattaaaacgccctggcaccgtggcagggacatttatgataggctatgcaatagcacggagcatttctgaagtttaccgtgctcctcaagaagatccagaatggttttctactctttttcattctactggatttacctatggcatggctttatctcttcccatgcttttttttggtatttatcttcttctccaggctttcaaacacaaatctacagaaaatggacaccctaaaagaaaaaattga

SEQ ID NO: 81829 - protein, 292 aa, Bartonella quintana
MNDLSCPAIAFPFFLDPVIIRLGPIALHWYGLGYVVGILFAWWYAQKLLKKHSLWNTNHPPMDKEKIGDFVVWSAISVVVGGRLGQVLVWDLAYYFNHPSAIIAVWDGGMSFHGGFIGIIIAMIWFARKNNINIRAMFDIVAAGAPIGIGIVRICNFINQELWGNITTLPWAICFPLDPYYLPRHPSQLYEAFMEGFLLFIILFIIIFAFKALKRPGTVAGTFMIGYAIARSISEVYRAPQEDPEWFSTLFHSTGFTYGMALSLPMLFFGIYLLLQAFKHKSTENGHPKRKN

SEQ ID NO: 81830 - DNA, 1059 bp, Bdellovibrio bacteriovorus
  CDS (1)..(1059): transl_table=11
gtggttcatgatttcgatccatttgctttaaggatttccggagatttcggaattcgttggtacggcctgtcttacatgatgggtttcatttgcgcctatatcctgatcacttggttggctaaaaggcaacgtgccggtctgtctgtccaaatggtcggcgattttattacttatgcggccatcggtactttggtgggcggtcgtctgggttacgtgcttttctatggcccggatttgttcctgaaattcaaatctgagttcccttactggggcgtgcttgctgtcaacgaaggcggaatggccagccacgggggcattatcgggatcgtgatcgcgtgcttgctgtatgcgcgcaagtattctgtgaactctttgtacctgctggatctggtggcggtgacgggcccgatcggggtgttctttggtcgtattgccaacttcatcaatggtgagcttgtcggacgtccctgtgacccgacctacccattggcagtgaagttcccgcaagacatcgtttcctggccgggccaggaggctgcgaaactgacggaacttgttccggtggtggaaaaagtcggcgtgggtcgtgaacagtggctggagcttgttgataagttccgcttcgacatggcagcccgtgaacagctgtatgcaactttgaacaaagtgattgaatccatccaagacggcaacaccgcagccaaagaggcgatcgcgccattgttgaccccgcgctatccatcccagctgttcgccgctttcggtgaaggtctgctgatctttatgttcttgttcttcctatggagaaaaccacgcaagccgggctttatcgcggcttgtttcgtgctgatctatgcggtggttcgtgttgttgatgaacacttccgcatgccagatgcacacatcggcttccaggctttgggtctgactcgtggtcagtggctgagccttgctatgtttgttgtcgggttgatcctgatggttgtatggactcgcgctgcttccttgaaaatcccgggatggcagagagggcactccattaagctaaaccgtaaatag

SEQ ID NO: 81831 - protein, 352 aa, Bdellovibrio bacteriovorus
MVHDFDPFALRISGDFGIRWYGLSYMMGFICAYILITWLAKRQRAGLSVQMVGDFITYAAIGTLVGGRLGYVLFYGPDLFLKFKSEFPYWGVLAVNEGGMASHGGIIGIVIACLLYARKYSVNSLYLLDLVAVTGPIGVFFGRIANFINGELVGRPCDPTYPLAVKFPQDIVSWPGQEAAKLTELVPVVEKVGVGREQWLELVDKFRFDMAAREQLYATLNKVIESIQDGNTAAKEAIAPLLTPRYPSQLFAAFGEGLLIFMFLFFLWRKPRKPGFIAACFVLIYAVVRVVDEHFRMPDAHIGFQALGLTRGQWLSLAMFVVGLILMVVWTRAASLKIPGWQRGHSIKLNRK

SEQ ID NO: 81832 - DNA, 855 bp, Blochmannia floridanus
  CDS (1)..(855): transl_table=11
atgcagtttttttatactccaaattttaatccaattattttgaaagtaggttgtatttcattttattggtatggaatgatgtatgtattaagttttatatttgctatgtggtttttaaaatatagaaagagatatattgtaaatgatattttttctagtacatcagaaatagagaatttgttatatttaaattttctaggagttgtaataggaggtagaattgggtatgtattattttatcagtggtctatgttatcgcaagataaattatggttttttaaattgtgggaaggtggaatgtcttttcatggaggtttaataggagtaattatctccataatgtggttttcgtattgtaaaaatcaatcttttttgaaaatatctgattttatagttcctgcagttccagtaggattaggattaggtagattaggaaattttattaatggagaactgtgggggagagtaacttttgatattccttgggctatgttatttaaaaatgctttattgcaagatttattaactttaaaaattcatccagaatggaaatttttttttgattattatggagctttacctcgacatccgtcccaattatatgaaatgattttagaagggatagttttatttgtagtaatttatatattttcatgcaagtcaaggcctgagggtagtatatcaggtttatttttattattgtacggattatttcggattataatagaattttttcgtcaacctgatattcatataggattaattaataatttcattactttagggcaagttttgtcctttcctatggttatatttggttttattattatgtatgtttcttataaatttaagtaa

SEQ ID NO: 81833 - protein, 284 aa, Blochmannia floridanus
MQFFYTPNFNPIILKVGCISFYWYGMMYVLSFIFAMWFLKYRKRYIVNDIFSSTSEIENLLYLNFLGVVIGGRIGYVLFYQWSMLSQDKLWFFKLWEGGMSFHGGLIGVIISIMWFSYCKNQSFLKISDFIVPAVPVGLGLGRLGNFINGELWGRVTFDIPWAMLFKNALLQDLLTLKIHPEWKFFFDYYGALPRHPSQLYEMILEGIVLFVVIYIFSCKSRPEGSISGLFLLLYGLFRIIIEFFRQPDIHIGLINNFITLGQVLSFPMVIFGFIIMYVSYKFK

SEQ ID NO: 81834 - DNA, 789 bp, Bordetella bronchiseptica
  CDS (1)..(789): transl_table=11
atgcttcagtaccctcaaatcgaccccgtagccctgcgtatcggcccgctcgccatccattggtatggattgatgtatctgatcggattcgcgctggtctatgcgctcggccgccgccgcatcacgtcaggccatacgacctcgatgacggtgcgcgacctggaagacctgattttctacagcgtgctgggcgtggtgctgggcgggcggctgggctatgtcctgttctacaagcccgcccactatctggccaacccgctggagattttttatctgtgggaaggcggcatgtcgttccacggcggcctgatcggcgtcatcgtggtaatgctgctgttcgcccacaagaagcggctgggctttttcaccgtgagcgatttcatcgcgccgctgattccgctgggtctggccgccggccgcctgggcaatttcatcaatggcgaattgtggggccggccgaccgacgtaccctgggcgatggtcttcccgcaatcgggcgacgggctgccgcggcacccgtcccagctctacgaactgggcctggaaggcatcgtcctgttcgcgctgctgtggtggtattcgagcaagccccgcgcggcggggcaggtaagcgccatgttcctgatgggttatggcgcattccggttcctggtggagttcacgcgcgaaccggacaacttcctggggctgctggcggccggactcagcatggggcaatggctgtcgatacccatggtgctggccggcgccggcctgtacctgtttactgcaaggccaccgtcccgttga

SEQ ID NO: 81835 - protein, 262 aa, Bordetella bronchiseptica
MLQYPQIDPVALRIGPLAIHWYGLMYLIGFALVYALGRRRITSGHTTSMTVRDLEDLIFYSVLGVVLGGRLGYVLFYKPAHYLANPLEIFYLWEGGMSFHGGLIGVIVVMLLFAHKKRLGFFTVSDFIAPLIPLGLAAGRLGNFINGELWGRPTDVPWAMVFPQSGDGLPRHPSQLYELGLEGIVLFALLWWYSSKPRAAGQVSAMFLMGYGAFRFLVEFTREPDNFLGLLAAGLSMGQWLSIPMVLAGAGLYLFTARPPSR

SEQ ID NO: 81836 - DNA, 987 bp, Borrelia burgdorferi
  CDS (1)..(987): transl_table=11
atgccaaattacataaattacccaagttggttacatcctgaagtaattcaaggtataccaattacatggtatagcctatcttatattttaatcatactaatctcttataagtttatttggtatcaaatacaatcagacaacgttgatattaaaaaagaagattatgaaatattcatgttctcacttgtacttggagcaattttaggaggcagactagcatctaccttagtttacgacaaatcgggaatttattattctaatccctggctaatccttttgccattcgaccagcattggaattttacaggctttagaggtatggccatccatggtggttttttgggggcaataattgctcctttaataacaataaatacaaatctcaaaaatacaaatgttcaaaaatattttctaaaactaacagactatggatcaatagctttttcttctggctacatacttggaagacttgctaatttcgcaaatgcagaactttatggaagagtaatgaaagggggaataatattccctaatgcagaaccatttgacacaaatataccgggtgtaaaagaatttgcatcatcagtagggcttgaaatttcgcctcatgacctgctaatcaaccttccaagaataccttctcaacttattgaaggatttttcgaaggacctgtaacttttctgttactatggtttttatttaaaaaaatcaaaaaatatgatggatttatttttggtgtatatgtaatgctttacgcttttttcagattctttattgaatatttaagagaaccggacaaagaacttggatttataataacctacaagccaattacaagcctgtccgaattttcttttttaaacatatcaatgggacaaattctctcgctaacgctgatgctctcaggattaatctggataatagtcactaaaaaaattgcagataaaaaaataaaaaataacaccaacttggcatacaaaaattaa

SEQ ID NO: 81837 - protein, 328 aa, Borrelia burgdorferi
MPNYINYPSWLHPEVIQGIPITWYSLSYILIILISYKFIWYQIQSDNVDIKKEDYEIFMFSLVLGAILGGRLASTLVYDKSGIYYSNPWLILLPFDQHWNFTGFRGMAIHGGFLGAIIAPLITINTNLKNTNVQKYFLKLTDYGSIAFSSGYILGRLANFANAELYGRVMKGGIIFPNAEPFDTNIPGVKEFASSVGLEISPHDLLINLPRIPSQLIEGFFEGPVTFLLLWFLFKKIKKYDGFIFGVYVMLYAFFRFFIEYLREPDKELGFIITYKPITSLSEFSFLNISMGQILSLTLMLSGLIWIIVTKKIADKKIKNNTNLAYKN

SEQ ID NO: 81838 - DNA, 849 bp, Bradyrhizobium japonicum
  CDS (1)..(849): transl_table=11
gtgatgccctttcttctcatcgactttcccgccttcaagccgatcgcgatcgagatcggtccgtttgcgatccgctggtacgcgctggcctatatctgcggcatcgtgttcggctggctctatgcgcgctcgctcctgaagaacgagcgcttgtggggcgggccggcgccgatctcgctggtgcaggtcgacgacttcatcctgtgggtcacgctcggcatcatcctcggcggccgcaccggctatgtgctgttctacaatctgcccttcttcatcgagcaccccgccgcgatcttccgactgtgggagggcggcatgtcgttccatggcgggttcctcggctgcgtcgtcgcggtgatgtggttcgcctaccgcaacgggatcccgatcctgtcgctcggcgacatcaccaccgcggtcgcgccggtcgggctgctgctcgggcgcatcgccaatttcatcaacggcgaattgtggggccgtgccaccgatgcgagcctgccctgggcgatggtcttccccaacgatcccacccagctgccgcggcatccgagccagctctatgaggccggcatggagggcatcctgctgttcacggtgcttgcgatcatgatccgcctcggcgccctgaagcggcccggaatgatcctcggcgccttcatcctgatctatggtctgacccggatcgccggcgagcatttccgcgagccggacgtccagctcggcttcctctggggcggattaaccatgggcatgctgttgtcgatcccgatgcttattgtaggtctcatacttattgtattggctatcaggcgcggtgcgccgaggccgatcgaggccattcgttaa

SEQ ID NO: 81839 - protein, 282 aa, Bradyrhizobium japonicum
MMPFLLIDFPAFKPIAIEIGPFAIRWYALAYICGIVFGWLYARSLLKNERLWGGPAPISLVQVDDFILWVTLGIILGGRTGYVLFYNLPFFIEHPAAIFRLWEGGMSFHGGFLGCVVAVMWFAYRNGIPILSLGDITTAVAPVGLLLGRIANFINGELWGRATDASLPWAMVFPNDPTQLPRHPSQLYEAGMEGILLFTVLAIMIRLGALKRPGMILGAFILIYGLTRIAGEHFREPDVQLGFLWGGLTMGMLLSIPMLIVGLILIVLAIRRGAPRPIEAIR

SEQ ID NO: 81840 - DNA, 846 bp, Brucella melitensis
  CDS (1)..(846): transl_table=11
atgatcgagacgttgctgcccgcatcggcccttgccttccccgctatcgacccggtgattttccgggtcgggccgctggcagtgcactggtacggcctcggctatgtcgtcggcattctcttcgcgtggtggtatggcaagaaattgctgcgcagccatcgcctctgggccaacaaccagccgccaatggcgcccgaagcactcgacgatttcgtgatctgggcagcactcggcgtcgtgctcggcgggcggatcggttatgtgctcttctataatttctcctattatatctccaacccgctcgccattccggccctgtgggatggcggcatgtcgtttcatggcggcattctcggcaccacgctcgccatgatcctgtttgcccgctcgcgcggcatcctcgtctggagcatgttcgacacgattgccgccggcgtgccgattggcctcggcgtcgtgcgcgtcgccaatttcatcaattcggaactttggggccgggtgagcgatgtgccatgggcggtctatttccccaatggcggcccactgccgcgccatccaagccagctttacgaagcctttcttgaagggcttgttctcttcttcgtactgttcgtgctggtctggggcgcacgcaagctcaagcagccgggctttgtggcaggcgccttcgtcaccggttacgggctgagccgcatcgcggtggaattcttccgcgaaccggatgcccagattggctatctcttcggcggatggcttaccatgggcatggtgctttccgtgccgatggtcctgctcggcctttgggccatgtggcgcgcaaaccgggcagccgccaggaatgcctga

SEQ ID NO: 81841 - protein, 281 aa, Brucella melitensis
MIETLLPASALAFPAIDPVIFRVGPLAVHWYGLGYVVGILFAWWYGKKLLRSHRLWANNQPPMAPEALDDFVIWAALGVVLGGRIGYVLFYNFSYYISNPLAIPALWDGGMSFHGGILGTTLAMILFARSRGILVWSMFDTIAAGVPIGLGVVRVANFINSELWGRVSDVPWAVYFPNGGPLPRHPSQLYEAFLEGLVLFFVLFVLVWGARKLKQPGFVAGAFVTGYGLSRIAVEFFREPDAQIGYLFGGWLTMGMVLSVPMVLLGLWAMWRANRAAARNA

SEQ ID NO: 81842 - DNA, 891 bp, Chlamydophila caviae
  CDS (1)..(891): transl_table=11
atgcgcatctttttatcagcaatatattggaatcattcaaaatttttatggaattcggaaaattggcctatcaaagttccttggtacggtctatgtttttctttaggtattttgttcgcttctttgcttggtatttatctcgcaaagtcttcctataattcagaagatgaaaaaaacttttctaaagaacagcttagtggagctctggaaaattttgctctctattctcttttatttatcattccgggatcgcgcatagcctatattttattttatggtggcgacttttatttcaaacatcctagggagattctaaaagtttggaatgggggattagcaagccatggaggtatgttaggactgattctttgggcgttgattttttcttggagatacagaaaaaaaatctccgtgctaacctttttatttctttgtgatctttgtgcttctgtatttggatgcgcagcttttatgattcgtattggaaattttatgaatcaagaaatcgtaggaaaacctacaagcttgccctggggaatcattttttcatctcccgcacaaggagttttaggcgtgcctgtgcatcctgtgcagctttatgaggggatgagttatctgttgctttctataattttgttttttttaagttataaacgttattttcgtttaggttccggatgggtgacatctttaggattagtaggcatatctttaatacgcttctttgctgaattttttaaaagccatcaaggcaaagttataggtccaaatagcccattaacaatgggacaaatcctgtctttccctttatttgtatttggtttgtgtttagggatagcttgttttcttaaaaataagaagaagagatcccccacttcatctgtaaaatag

SEQ ID NO: 81843 - protein, 296 aa, Chlamydophila caviae
MRIFLSAIYWNHSKFLWNSENWPIKVPWYGLCFSLGILFASLLGIYLAKSSYNSEDEKNFSKEQLSGALENFALYSLLFIIPGSRIAYILFYGGDFYFKHPREILKVWNGGLASHGGMLGLILWALIFSWRYRKKISVLTFLFLCDLCASVFGCAAFMIRIGNFMNQEIVGKPTSLPWGIIFSSPAQGVLGVPVHPVQLYEGMSYLLLSIILFFLSYKRYFRLGSGWVTSLGLVGISLIRFFAEFFKSHQGKVIGPNSPLTMGQILSFPLFVFGLCLGIACFLKNKKKRSPTSSVK

SEQ ID NO: 81844 - DNA, 870 bp, Chlorobium tepidum
  CDS (1)..(870): transl_table=11
atgatcgacttcacgacctggtggcagcacctcccatcgcaaatgaatcccgtcattttttcaatagacggcattgccatccgctggtacggcaccatgtacatcgtggccttcgctattgtctatctgctttcgaaatacagaatttccaacgaaaagcttccattcgacaaaacctttcccggtgacgccctgacctgggcgatgggcggtgtgctgatcggaggccggatcggctatatattattttatggtttcgactggttccttcaggatcctgtcggtacgttgattccaatcaaattcgggaacggctcctgcgctttctccggtatcaacggcatgtcgttccacggtgggctgatcggtgtggccattgccttatggcttttcacccgaacacacaaggttgattttctcaagaccgttgatctttttattcccgccctgccgctcggctacacctttggcagactcggcaacttcatcaacggtgaactctacggccgcgtgaccacctcggccatcggcatgtacttccctgccgctccaaccgtagcgctgcgccatccctcgcagctctacgaagcgttcttcgaaggcatcgtgctctttatcatcctctggacgattcgcaaaaaagccccatggcccggctacctctccggcctctacctcattggctacggcacggtgcgcttcttcatcgaattcttccgcgaacccgacgcgcagctcggctttgtcttcctgaacttctcgatgggccaggtgttatgctttctgatgattgcggcgggaattgggattctagtgtggtctaagcagcgagcggagaacgctgatgttatgatgggtgggaagaggtaa

SEQ ID NO: 81845 - protein, 289 aa, Chlorobium tepidum
MIDFTTWWQHLPSQMNPVIFSIDGIAIRWYGTMYIVAFAIVYLLSKYRISNEKLPFDKTFPGDALTWAMGGVLIGGRIGYILFYGFDWFLQDPVGTLIPIKFGNGSCAFSGINGMSFHGGLIGVAIALWLFTRTHKVDFLKTVDLFIPALPLGYTFGRLGNFINGELYGRVTTSAIGMYFPAAPTVALRHPSQLYEAFFEGIVLFIILWTIRKKAPWPGYLSGLYLIGYGTVRFFIEFFREPDAQLGFVFLNFSMGQVLCFLMIAAGIGILVWSKQRAENADVMMGGKR

SEQ ID NO: 81846 - DNA, 852 bp, Chromobacterium violaceum
  CDS (1)..(852): transl_table=11
atgctgattcatcctcagttcgatccggtggccatccacctgggcccgctggccgttcactggtacggcctgatgtacctgctgggcttcgccctgttcctcaccatgggcaagtaccgcctgaaaaacggcaacgacgtgctcaccgtgccgcagctggacgacatgctgatgtacggcgcggtcggcgtggtggtcggcggccgcctgggcgaggtgctgttctaccagcccggctactatttcagccatccgctggaaatcttcatggtgtggaaaggcggcatgtccttccacggcggcttcctcggcgtgctgatcgcggtggcgatctacggccgcaaggtgggccgcggcttctggcagctgaccgacttcgtcgcgccgctggtgccgctgggcctggcggccggccgcgtcggcaacttcatcaacggcgaactgtggggccgcgtggccagcccggagctgccgtgggcgatgctgttcccgcaggcgcggatggaggacatcgccgaggcccagcaatcggccgacctgatgaatatgctgatgcagtacggcggcctgctgcgccatccgtcgcagctgtacgagttcgcgctggaaggcatcgtgctgttcggcgcgctgtggatctacagcgccaagccgcgcgccaccggcaaggtgtcggcgctgttcctgatcggctacggcctggcccgcttcgtcagcgagtacttccgcaatccggacgccggcatcttcggcaagtccgacgtgatcagcatggggcagtggctgagcctgccgatgatcgtgatcggcgtcgcgctgctggtcttcttcggccggcgcaaacagggctga

SEQ ID NO: 81847 - protein, 283 aa, Chromobacterium violaceum
MLIHPQFDPVAIHLGPLAVHWYGLMYLLGFALFLTMGKYRLKNGNDVLTVPQLDDMLMYGAVGVVVGGRLGEVLFYQPGYYFSHPLEIFMVWKGGMSFHGGFLGVLIAVAIYGRKVGRGFWQLTDFVAPLVPLGLAAGRVGNFINGELWGRVASPELPWAMLFPQARMEDIAEAQQSADLMNMLMQYGGLLRHPSQLYEFALEGIVLFGALWIYSAKPRATGKVSALFLIGYGLARFVSEYFRNPDAGIFGKSDVISMGQWLSLPMIVIGVALLVFFGRRKQG

SEQ ID NO: 81848 - DNA, 951 bp, Corynebacterium glutamicum
  CDS (1)..(951): transl_table=11
atgactttggccacgattccctcaccaccgcagggtgtgtggtacttgggtcccattccgattagggcctatgcgatgtgcatcatcgctggcattattgttgccatttggctgacgagaaagcgctacgccgcccgcggtggaaaccctgaaatcgtccttgatgcagcgatcgtggcagttcctgccggaatcatcggtggacgcatttatcacgtcattaccgacaaccaaaagtacttctgcgatacctgtaaccccgtcgacgccttcaaaatcaccaacggtggtctgggcatctggggtgcagtgatcctcggtggcctggcagtggccgtattcttccggtacaaaaagcttcctcttgcacctttcgcagatgccgtggcacctgcagttatcctggcgcagggaattggtcgtctgggcaactggtttaaccaggagctctacggtgcagaaactaccgttccatgggctttggaaatctactatcgggtagatgaaaatggaaaattcgcaccggtgacaggaacatccaccggtgaagtaatggctactgttcatccaacattcctctatgaactgttgtggaacctactgatcttcgctttgttgatgtgggctgacaagcgattcaagctgggacatggccgagtatttgcactctacgtagctggttataccttgggccgtttctggattgaacaaatgcgcgttgatgaagccacgcttattggcggcatccgaatcaacaccatcgtctccgcagtagtgtttgccggcgcgatcatcgtgttcttcctgttgaagaagggtagggaaactcccgaagaggtagatccgactttcgcagcgtctgttgcagcagatgctgtagcttcgccggatggaaaacccttgccgaaagcaggggagggcattgatggagaaacgccctcaacgcgatag

SEQ ID NO: 81849 - protein, 316 aa, Corynebacterium glutamicum
MTLATIPSPPQGVWYLGPIPIRAYAMCIIAGIIVAIWLTRKRYAARGGNPEIVLDAAIVAVPAGIIGGRIYHVITDNQKYFCDTCNPVDAFKITNGGLGIWGAVILGGLAVAVFFRYKKLPLAPFADAVAPAVILAQGIGRLGNWFNQELYGAETTVPWALEIYYRVDENGKFAPVTGTSTGEVMATVHPTFLYELLWNLLIFALLMWADKRFKLGHGRVFALYVAGYTLGRFWIEQMRVDEATLIGGIRINTIVSAVVFAGAIIVFFLLKKGRETPEEVDPTFAASVAADAVASPDGKPLPKAGEGIDGETPSTR

SEQ ID NO: 81850 - DNA, 786 bp, Coxiella burnetii
  CDS (1)..(786): transl_table=11
atgctttattacccgcacatcgatcccgtggcctttcgacttggcccgcttaaagttcattggtatgggcttatgtacctcgttggatttgcaatggcctggggacttgcgttataccgcgcgcgagatccgaaacgtcattggactgcccagcaagttggcgatttaattttttatggcgctttagggcttatcatcggcgggcggctgggatacatgcttttctatgatttttccaattttatcgccaatccgttaacgctttttcaagtgtggcgtggcggaatgtcgtttcacgggggtctcatcggcgttattgttacgacttggattttcagtcgacgaactcacaaacgctggatggatgttactgattttgtggttcctttagtgccattgggtttggcagcgggtcgtatcggcaattttattaacggtgaattatgggggcgtgtgacgacggttccctggggtatggtatttcccaatgcgggacctttgccgcggcatccttctcaactttatgaatttttgctggaaggggtgcttttatttattgtaatatggtggttttcagctaagcttcggccccggtttgcggtatcgtctttattcttgttatgttacggattattccgctttactgcggaattttttcgacaaccggatccgcaactcggatttgttgcatttggttggctgaccagggggcaagaattatcactgccgatgattatcatcggtggttttgccttatggtgggcttatcgacacaaggagcgttaa

SEQ ID NO: 81851 - protein, 261 aa, Coxiella burnetii
MLYYPHIDPVAFRLGPLKVHWYGLMYLVGFAMAWGLALYRARDPKRHWTAQQVGDLIFYGALGLIIGGRLGYMLFYDFSNFIANPLTLFQVWRGGMSFHGGLIGVIVTTWIFSRRTHKRWMDVTDFVVPLVPLGLAAGRIGNFINGELWGRVTTVPWGMVFPNAGPLPRHPSQLYEFLLEGVLLFIVIWWFSAKLRPRFAVSSLFLLCYGLFRFTAEFFRQPDPQLGFVAFGWLTRGQELSLPMIIIGGFALWWAYRHKER

SEQ ID NO: 81852 - DNA, 1020 bp, Deinococcus radiodurans
  CDS (1)..(1020): transl_table=11
gtgccccggagggggccttttttggcgctgtttgccgggtgtgtttcccgcggcgcttcccgctcacccccagggcatacactgacccgcagacctatggaccccgtttttttacagatcggcaactttacgattgcctggtacggcgtgctgatgatgctgggcatcgcagccggctactggctgggcctcaagctggcgcgcgaacgcggcctgaacgccgacctcttcgagcggatgattctctggatgctgttctggggcttcgtcggggcgcggctggtgttcgtgctgacctcgtggcacatcttcgagggcatcccctttccacgcgtgctgctcgacatcgtcaaccttcgcaacggcggcatttccattcacggtgggctgatcggcggggtacttacgctgatttactttgcccggcgctaccgcctcaacttctaccagtacgccgatctcgcggtgccgggcgtcgccttcggcatcatcggcggacgcctgggcaacatcatgaacggcaccgacacggtgggccgcgtgaccggctggcccatcggctaccactggcccgccagcgcccgcgcctttcacgagggcatgtgccgccccaaccccaaccccgacatggacctttccaagtactgccacgaggtcggcggccagatcatgatgactgcgccggtgcacttcacgcagctctacggcgtcatcatcggcatcatcctcgccgtcgcgtcttacttctggctcaagtccagagtgcccggctgggccttctggcagttctggctgtggtactccatcctgcgcgccgggtgggaagaaaccttccgcctcaacccgctgaccatcaagacctacctcaatcagggtctggacgcccccggcatcggcctgtggaccgacacccagattttcagcgtgccgctcattctggtcagcctgtggatgctgtggcgactgcgccagcgtcggcaggtgacggtgcccaccgtgcccgtccaatcacagagctaa

SEQ ID NO: 81853 - protein, 339 aa, Deinococcus radiodurans
MPRRGPFLALFAGCVSRGASRSPPGHTLTRRPMDPVFLQIGNFTIAWYGVLMMLGIAAGYWLGLKLARERGLNADLFERMILWMLFWGFVGARLVFVLTSWHIFEGIPFPRVLLDIVNLRNGGISIHGGLIGGVLTLIYFARRYRLNFYQYADLAVPGVAFGIIGGRLGNIMNGTDTVGRVTGWPIGYHWPASARAFHEGMCRPNPNPDMDLSKYCHEVGGQIMMTAPVHFTQLYGVIIGIILAVASYFWLKSRVPGWAFWQFWLWYSILRAGWEETFRLNPLTIKTYLNQGLDAPGIGLWTDTQIFSVPLILVSLWMLWRLRQRRQVTVPTVPVQSQS

SEQ ID NO: 81854 - DNA, 792 bp, Desulfovibrio vulgaris
  CDS (1)..(792): transl_table=11
atgctcactttcccgcgcatagaccccgttgccatcactctcggcccgctgcaattccgctggtacggcctcatgtacctgttcggttttctttccggctggtggcttggacgccgccgcgccgcccagcccgggtcgcggtggacgggcgagatggtggacgacatggtcacctatgtcatcctcggcgtggtgctggggggtcgcatcggctatatcctgttctacgacctcgcctattacctgggcaacccgacgcagattttcagtatctggaacgggggcatgtcgttccacggcggtctgctgggggtggtgtttgccatgtggcttctcggcaggcgcaacggactcggcttcatggacgtgtcggatttcgtggcccctctcataccgccggggctgttcttcggccgcatcggcaacttcatcaacggcgagttgtggggcaagcacaccaccctgccgtggggcatggtgttcccggatggaggcccctttccgcgacatccctcgcaactgtatgaatgcgcgcttgaaggcgtcatcctgttccttgcattgtgggttttctcgtcacgcaagcgccccaccgggcatgtctccggcctcttcgccctgttgtacggcgttttccgcttcacggtggaattcgtacgtgaacctgacgtccagctgggctatcttgccttcggctggctgaccatgggacaggtgctgtgcctgccgctcatcatgctggggctgtggctgctgcgtccgggcggggacaaaggcaccaaggcagcctga

SEQ ID NO: 81855 - protein, 263 aa, Desulfovibrio vulgaris
MLTFPRIDPVAITLGPLQFRWYGLMYLFGFLSGWWLGRRRAAQPGSRWTGEMVDDMVTYVILGVVLGGRIGYILFYDLAYYLGNPTQIFSIWNGGMSFHGGLLGVVFAMWLLGRRNGLGFMDVSDFVAPLIPPGLFFGRIGNFINGELWGKHTTLPWGMVFPDGGPFPRHPSQLYECALEGVILFLALWVFSSRKRPTGHVSGLFALLYGVFRFTVEFVREPDVQLGYLAFGWLTMGQVLCLPLIMLGLWLLRPGGDKGTKAA

SEQ ID NO: 81856 - DNA, 807 bp, Francisella tularensis subsp
  CDS (1)..(807): transl_table=11
atgctacaatatcctcatattaatccagttgcattgcagcttggtcctatcaagattcattggtatggtttgatgtacctacttggtatttttgccggctggtacttaactagatatagagcaaaagttaaaccatgggcacctatcaaaccagagcaagttggcgatttaactttttatgttgcactaggtgttatccttggtggtagaatcggctatattatcttctataatcttccttattatttccataatccatcacaaatgtttttcttatgggatggtggaatgtcattccatggtggatttattggggtgcttatagcatttgccctatttgcacgtaaaattggtgcaaatttctttgatttgggtgagtttgttgcaccagttataccaattggtttaggtgctggtagaataggcaactttatcaatggcgagctttggggtaaagttacagactctccattaggtatggttttcccaactggaggtcctttaccaagatatccatcacagctattcgagtttttcttcgagggagttgtcttatttagtgttctatggcttgttaccatcaagaaaagaccccgttatcttgtactaggacttttcatgtttttatatggttgtgctagatttatctgtgaattttttagacagccagacccgcagtatggctatatattctttaattggatgactatggggcaaatattatcaatcccaatgatattactaggagcggtaattttaatcgcagtatttattaaaataaggaagaataaatgcaagaatatctaa

SEQ ID NO: 81857 - protein, 268 aa, Francisella tularensis subsp
MLQYPHINPVALQLGPIKIHWYGLMYLLGIFAGWYLTRYRAKVKPWAPIKPEQVGDLTFYVALGVILGGRIGYIIFYNLPYYFHNPSQMFFLWDGGMSFHGGFIGVLIAFALFARKIGANFFDLGEFVAPVIPIGLGAGRIGNFINGELWGKVTDSPLGMVFPTGGPLPRYPSQLFEFFFEGVVLFSVLWLVTIKKRPRYLVLGLFMFLYGCARFICEFFRQPDPQYGYIFFNWMTMGQILSIPMILLGAVILIAVFIKIRKNKCKNI

SEQ ID NO: 81858 - DNA, 783 bp, Geobacter sulfurreducens
  CDS (1)..(783): transl_table=11
atgcagttcccgcatattgacccggtctttttccgtctcgggcatctggagttccgttggtatggcctgatgtacatcctcgggttcatcgccgcctactttattgtcaggcgcgctgccggccgtcgcggtctcgccctgacccaggacgacgttgccgatgtgatcttctcgctggcgatcggcgttatcctcggcggccgtctgggatacattctcttctataacctgtcctactacctctcccacccgctcaagctgttcgccgtgtgggagggaggcatgtcgtttcacggcggtctcctgggcgtgatcctggcaggtgtgtacgtggcacggcaaaagaaaatcggctttccggtgctggccgacatctgtgcgccggcggcacccgtggggttggggctcggcaggctcggcaatttcatcaacggtgagctttacggcagggtgaccgacgtgccgtggggaattattttccccggtggcggcggagtgccccggcatccgtcgcaactttacgaagcggtgctggaggggccggtgctctttctgatcctgatggctgtggggaggcgggaacgtccggctggcgtggtgttctggaccttcattgcgttctatggcttgttccggttcctggttgagtttttccgggagcccgacgcccagctggggcttcttgccggacccttttccatggggcagttgctaagttttcccatgtttcttctggggttgaccatggccgtccttgtttcacgtagaaaggtcggaccatag

SEQ ID NO: 81859 - protein, 260 aa, Geobacter sulfurreducens
MQFPHIDPVFFRLGHLEFRWYGLMYILGFIAAYFIVRRAAGRRGLALTQDDVADVIFSLAIGVILGGRLGYILFYNLSYYLSHPLKLFAVWEGGMSFHGGLLGVILAGVYVARQKKIGFPVLADICAPAAPVGLGLGRLGNFINGELYGRVTDVPWGIIFPGGGGVPRHPSQLYEAVLEGPVLFLILMAVGRRERPAGVVFWTFIAFYGLFRFLVEFFREPDAQLGLLAGPFSMGQLLSFPMFLLGLTMAVLVSRRKVGP

SEQ ID NO: 81860 - DNA, 822 bp, Gluconobacter oxydans
  CDS (1)..(822): transl_table=11
ttgagccatcccctgatctttccggattttgacccggttgccttccatatcggtccgctggcggtacgctggtatgcgctcgcctatatggtgtcgttcatcatcgcgctgccgattgcgcggcggctgaaccgtctggcgccggaagtggcgacgaacgaacaggtggatgacttcctgttctacgccattctcggcgtgcttctggggggacggctgggctatgtgctgttctaccggccgatggattacctgtcgcacccgctggagatcttcaagacctgggatggcgggatgtcgtttcatggcggtgcgctgggcgtcattctggcgctggcctatttcagctggaagacccggctcagctttctggcctttgcggaccggatcgtgccggttgtgccgatcgggcttggcctgggccgttgtgcgaatttcgtgaacggggagctttgggggcgtccggcgtctccggatctgccctgggcaatgatcttcccgacgggcgggccgattccacggcatccgtccgagctttacgaagccctgaccgaaggtgttctgctgctgtgcgtgatgctgtttgccgccagccgtccgcaggttcgcgagcggttcgggttcctctcggggctgttcctgtttggctatgcctgtgcgcggagcttctgtgagttcttccggcagccggatgcgaatatcggattcctctcgggtgggacgacgatggggcagttgctgtgcattccgatggcgctcgcggggatggggctgatggtttacgcgatgcggcgcccggctcaggtgtcagcgcatgtctga

SEQ ID NO: 81861 - protein, 273 aa, Gluconobacter oxydans
MSHPLIFPDFDPVAFHIGPLAVRWYALAYMVSFIIALPIARRLNRLAPEVATNEQVDDFLFYAILGVLLGGRLGYVLFYRPMDYLSHPLEIFKTWDGGMSFHGGALGVILALAYFSWKTRLSFLAFADRIVPVVPIGLGLGRCANFVNGELWGRPASPDLPWAMIFPTGGPIPRHPSELYEALTEGVLLLCVMLFAASRPQVRERFGFLSGLFLFGYACARSFCEFFRQPDANIGFLSGGTTMGQLLCIPMALAGMGLMVYAMRRPAQVSAHV

SEQ ID NO: 81862 - DNA, 798 bp, Haemophilus ducreyi
  CDS (1)..(798): transl_table=11
atgtccgaacaatttattcaatttccgcaaattgatccgattattttcagtcttgggccgatttcactacgttggtatggcttaatgtatttaattggctttgcttttgcttattggttaggaatgaaaagagcaaaagcatctggtggtgtctggaatggtgaacaagtggatcaactattgtacacgggattttggggtgtagtattgggtggccgtgtcggtgatgtgttgttttatagtttcgaccgcttcttacaggatccgctttttctgtttcgtatttgggaaggcggaatgtcatttcacggtggtttaatcggtgtgattgttgcaatgatttgggtttcttaccgccaacaacgttctttttggcagacggcagattttattgcgccgttaattccctttggtttaggtatgggacgcattggtaattttattaatgatgaactttggggcagagtaacagatgtgccgtgggcggtgttatttccgagtggtggctatttaccgcgtcatccatcacagttgtatgagtttttacttgaaggggttgtgctatttggtattttgaatgcctttattaaaaagccacgtccaatgggatcggtagcgggcttgtttttagttggttatggcgtgtttcgtttcgtagtggaatacgttcgtgatattgatccaaatgtgaatacggcagcggatttaataacccgtggccagttattatcattgccgatgattgttggcggtgttggcgtaatgttatgggcatatagatcaaacaaagccgaataa

SEQ ID NO: 81863 - protein, 265 aa, Haemophilus ducreyi
MSEQFIQFPQIDPIIFSLGPISLRWYGLMYLIGFAFAYWLGMKRAKASGGVWNGEQVDQLLYTGFWGVVLGGRVGDVLFYSFDRFLQDPLFLFRIWEGGMSFHGGLIGVIVAMIWVSYRQQRSFWQTADFIAPLIPFGLGMGRIGNFINDELWGRVTDVPWAVLFPSGGYLPRHPSQLYEFLLEGVVLFGILNAFIKKPRPMGSVAGLFLVGYGVFRFVVEYVRDIDPNVNTAADLITRGQLLSLPMIVGGVGVMLWAYRSNKAE

SEQ ID NO: 81864 - DNA, 852 bp, Helicobacter pylori J99
  CDS (1)..(852): transl_table=11
atgaacgcttggaatacgatttatgaacgatttaaccccatcgcttttagtcttggcggtattgaagtgcattggtatggtttggcgtatgcgtgcgcgattgttgtcgcattttacatggcgttaagaatgatccaaaaagatcccaagcgattccccattgaaaggaaggaatttgagagctattttttatgggcggagcttggcattgtgctaggggcaaggataggatacgttcttatttatgagcctaattccagctattatttgacgcatttttggcaaatctttaacccctttgatagccatgggaattttataggcattcgtgggatgagctatcatggggggttagtggggtttttgatcgcttcgtatctttatagccgtaaggatttgaaaaagcttttgatttatttggatttgattgcgatcagcctgcctttagggtatgtttttgggaggattgggaattttttaaaccaggagctttttgggagaatcgtccccaaagacagccatttagggcaaatcataggcattatggtggataatgagttgcgttatcctagccagttgattgaagcgtttttagagggggttgtcgtgtttttaatggtgatgtgggctaaaaaacacaccaaaacgcatgggttgctcatcgtggtttatggtttggggtattccttgatgcgctttattgcggaattttacagagagccagacagccaattgggggtttattttttgaatttgagcatggggcagattttaagcgtgtttatggtaattgtttcgttagggattttattgtatgctacgaaaaattctaaaaaaataaaggaagaataa

SEQ ID NO: 81865 - protein, 283 aa, Helicobacter pylori J99
MNAWNTIYERFNPIAFSLGGIEVHWYGLAYACAIVVAFYMALRMIQKDPKRFPIERKEFESYFLWAELGIVLGARIGYVLIYEPNSSYYLTHFWQIFNPFDSHGNFIGIRGMSYHGGLVGFLIASYLYSRKDLKKLLIYLDLIAISLPLGYVFGRIGNFLNQELFGRIVPKDSHLGQIIGIMVDNELRYPSQLIEAFLEGVVVFLMVMWAKKHTKTHGLLIVVYGLGYSLMRFIAEFYREPDSQLGVYFLNLSMGQILSVFMVIVSLGILLYATKNSKKIKEE

SEQ ID NO: 81866 - DNA, 843 bp, Lactobacillus acidophilus
  CDS (1)..(843): transl_table=11
atgatgactaaactggtaattaatcctgttgcctttcaattaggaagtttaagtgtgaaatggtacggcataatcatggccgtagctattgtattagccacatggatggcaattagtgaaggtaaaaaaaggcaaattattagtgatgattttgtcgatcttcttttatgggctgttccattggggtatgttggtgctcgtatttattatgtgatttttgagtggggctactattctaaacatcccaatcagataattgctatttggaatggtgggatcgcaatttatggtggcttaatagccggattgattgtcctgctaatcttttgtcataaaagagatctaccaccatttttaatgttagatattattactcccggtgtaatggccgcacaaattttggggcgttggggaaattttgtaaatcaagaagctcatggtggtccaacaacgcttcactttttacaaagcttacatctgcctgaatttgttattcagcaaatgaagataggtggaacatattaccaacctacatttttatatgaatctttttttaatttaattggcttaataataattttgtccttacgccatcgtaaacatgtatttaagcaaggcgaagttttcatgtcgtatcttctttggtatagtgtagtaagattctttgttgagggaatgcgtactgatagtttatacatttttggtataatacgtgtatcacaagcattaagtttggttctctttattgctacaattattctatggatttatcggcgtaaagttgttaaacctaaatggtatttgcaggggagcggattaaaatatccgtacacaagagattaa

SEQ ID NO: 81867 - protein, 280 aa, Lactobacillus acidophilus
MMTKLVINPVAFQLGSLSVKWYGIIMAVAIVLATWMAISEGKKRQIISDDFVDLLLWAVPLGYVGARIYYVIFEWGYYSKHPNQIIAIWNGGIAIYGGLIAGLIVLLIFCHKRDLPPFLMLDIITPGVMAAQILGRWGNFVNQEAHGGPTTLHFLQSLHLPEFVIQQMKIGGTYYQPTFLYESFFNLIGLIIILSLRHRKHVFKQGEVFMSYLLWYSVVRFFVEGMRTDSLYIFGIIRVSQALSLVLFIATIILWIYRRKVVKPKWYLQGSGLKYPYTRD

SEQ ID NO: 81868 - DNA, 771 bp, Legionella pneumophila subsp
  CDS (1)..(771): transl_table=11
atgctcacctatccaaatattaatccaattgctttttctttagggccattaaaagttcattggtatggtttgatgtatttaatcggttttgttggcgcctggctactgggttattggcgcatcaaacattataaattgaactggaataacgaccagttaagtgatttgatcttttatagtgcccttggtgttattcttgggggacgagtaggttacatgttgttttatgactttcaggagtttatccaccacccctgggtattatttaaaatatgggaaggagggatgtctttccatggtggtttgcttggagtggtaattgccgcctggctcttttgccgtaaatacggaaaaactttcttggaggttggagactttgtcgcccctctagttcctttaggtttagcggcaggtcgcctgggaaatttcattaatggggaattatgggggcgtgtcactgatgttccgtggggtatgatatatcctcatgttgatgatcaaccaagacacccctctcaattgtatgaatttggtttggaaggggtcgctttatttattttgatttggtgttacgcatcaaagccgagacaacaagggagagtgagcgctttatttttaatgggatacgcgatttgcaggttaattgctgaaagctttaggcaacctgattcgcaattgggttttgtggcatttggctggctgacaatggggcaggttttatccatccctatgttattaattggaatttggttatggtgggctaagcgatga

SEQ ID NO: 81869 - protein, 256 aa, Legionella pneumophila subsp
MLTYPNINPIAFSLGPLKVHWYGLMYLIGFVGAWLLGYWRIKHYKLNWNNDQLSDLIFYSALGVILGGRVGYMLFYDFQEFIHHPWVLFKIWEGGMSFHGGLLGVVIAAWLFCRKYGKTFLEVGDFVAPLVPLGLAAGRLGNFINGELWGRVTDVPWGMIYPHVDDQPRHPSQLYEFGLEGVALFILIWCYASKPRQQGRVSALFLMGYAICRLIAESFRQPDSQLGFVAFGWLTMGQVLSIPMLLIGIWLWWAKR

SEQ ID NO: 81870 - DNA, 807 bp, Mannheimia succiniciproducens
  CDS (1)..(807): transl_table=11
atggaaaatcagtttttagctttcccgcaatttgatcctattatattttctctcggtccgattagcctacgctggtacggtttgatgtatttaatcggctttatttttgcccgttggttggccgttaaacgcgctaaccgtcccgatagcggttggacggtagaacaagtggataatttgctgtttaacggctttgccggcgttttccttggcggacgtatcggctatgtgctgttttatcaatgggatctgtttgtccaggaaccaagttacttattccgcgtatgggaaggcggtatgtcattccacggcggtttaatcggcgtgatcgttgccatgcttgtcaccgcaaaattgcaaaaacgcaatttctgggtggtcgcagactttgtggcgccgttaattcccttcggtttaggtatggggcgtattggtaattttattaatgacgagctatggggacgcgttaccgatgtaccttgggcggttcttttcccaagcggcggttatttaccgcgacatccttcgcaactctatgaatttgttttagaagggattgtgctgttttgtattctcaactggtttatcagaaagcctcgcccggcaggttcggtagcggggttattcctgttattctacggtttattccgtttcattgtggagtttttccgcgaaccggacgctcaactggggctttatttcggacaacagatttccatgggacaaattctttcaacgccgatgattctgttgggtgctttatttattgtattagcctaccgtcgtcgaagtgcggttaaaaattaa

SEQ ID NO: 81871 - protein, 268 aa, Mannheimia succiniciproducens
MENQFLAFPQFDPIIFSLGPISLRWYGLMYLIGFIFARWLAVKRANRPDSGWTVEQVDNLLFNGFAGVFLGGRIGYVLFYQWDLFVQEPSYLFRVWEGGMSFHGGLIGVIVAMLVTAKLQKRNFWVVADFVAPLIPFGLGMGRIGNFINDELWGRVTDVPWAVLFPSGGYLPRHPSQLYEFVLEGIVLFCILNWFIRKPRPAGSVAGLFLLFYGLFRFIVEFFREPDAQLGLYFGQQISMGQILSTPMILLGALFIVLAYRRRSAVKN

SEQ ID NO: 81872 - DNA, 789 bp, Methylococcus capsulatus
  CDS (1)..(789): transl_table=11
atgctgacctatcccgccatcgatccggttgccgtctcattcgggccgctcaaggtccactggtacggactgatgtacgtcatcggcatcgccgccacctggatattggcgcggcggcgggtgcagcgcagcgcgaatccgttgttcaccccggcccaggtcgaagacctggtgttctatgccgccatcggcgtggtggtcggcggacggctcggctatgcgctgttctacaatttctccggcttccttcacgatccggcgatgctgttccgcatctgggaaggcggcatggcgttccacggcggactcatcggtgtgctgatcgccatgtacgcctacggccggtcgcagggtatccggttcttcgacgtcgccgacttccttgctccttatgtgcccatcggcctcctcgccggacgtatcggcaacttcatcaacggcgaactgtggggcaaacccagtgacctgccttgggcgatgatcttcccccatgccggggacgtaccgcgccatccttcacagctttatgaagcgtttctggaagggctggtccttctgatcattctccaatggttcagccgacgctcgccgccacgtatggcggtgagtggcctgtttctcctgggctatggtgtgttccgcttcgcggtggagttcgtccggctgccggatgtgcagctcggctatctcgctttcggctggctgaccatgggtcagatcctgtgtctgccgatgatcctgttcggtatcgtcctgctggccgccgcctacgcccgtcgatccgcctga

SEQ ID NO: 81873 - protein, 262 aa, Methylococcus capsulatus
MLTYPAIDPVAVSFGPLKVHWYGLMYVIGIAATWILARRRVQRSANPLFTPAQVEDLVFYAAIGVVVGGRLGYALFYNFSGFLHDPAMLFRIWEGGMAFHGGLIGVLIAMYAYGRSQGIRFFDVADFLAPYVPIGLLAGRIGNFINGELWGKPSDLPWAMIFPHAGDVPRHPSQLYEAFLEGLVLLIILQWFSRRSPPRMAVSGLFLLGYGVFRFAVEFVRLPDVQLGYLAFGWLTMGQILCLPMILFGIVLLAAAYARRSA

SEQ ID NO: 81874 - DNA, 852 bp, Neisseria meningitidis serogroup A
  CDS (1)..(852): transl_table=11
atgattacccatccccaattcgaccccgtccttatcagtatcggcccgcttgccgtccgctggtatgccctaagctacatcctcggatttattctttttacctttctcggcagaaggcgcatcgcgcaaggcttgtccgtttttaccaaagaatcgctcgacgacttcctgacatggggcattttgggcgtaattttgggcgggcgtttgggttacgtcctgttttacaagttttccgactacctcgcccatccgcttgatattttcaaggtatgggaaggcggaatgtcgttccacggcggctttttgggtgtagttattgccatatggttgttcggtcgcaaacacggcatcggcttcctcaaactgatggacacggtcgcaccgctcgttccactgggtctcgcttcgggacgtatcggcaacttcatcaacggcgaactttggggacgcgttaccgacatcaacgcattttgggcaatgggcttcccgcaggcgcgttacgaagacctcgaagccgccgcgcacaatccgctttgggcagaatggctgcaacaatacggtatgctgccgcgtcatccctcgcagctttatcagtttgcacttgaaggcatctgcctgttcgccgtcgtttggctgttctctaaaaaacagcggccgaccggacaagtcgcctcactcttcctcggcggctacggcatattccgcttcattgccgaatttgcacgccaacccgacgactatctcgggctgctgaccttggggctgtcgatggggcaatggttgagcgtcccgatgattgttttgggtatcgtcggctttgtccggttcggcatgaaaaaacagcactga

SEQ ID NO: 81875 - protein, 283 aa, Neisseria meningitidis serogroup A
MITHPQFDPVLISIGPLAVRWYALSYILGFILFTFLGRRRIAQGLSVFTKESLDDFLTWGILGVILGGRLGYVLFYKFSDYLAHPLDIFKVWEGGMSFHGGFLGVVIAIWLFGRKHGIGFLKLMDTVAPLVPLGLASGRIGNFINGELWGRVTDINAFWAMGFPQARYEDLEAAAHNPLWAEWLQQYGMLPRHPSQLYQFALEGICLFAVVWLFSKKQRPTGQVASLFLGGYGIFRFIAEFARQPDDYLGLLTLGLSMGQWLSVPMIVLGIVGFVRFGMKKQH

SEQ ID NO: 81876 - DNA, 837 bp, Nitrosomonas europaea
  CDS (1)..(837): transl_table=11
atgctcgttcacccacaattcgatccggttgcaatttccatcggtccgcttgctgttcgctggtacgggttgatgtacctgctcggattttcactgttcattctgctggggcgttatcgcatccgacaacagcccaatggcgtgtttacccgggaaatgctggatgatgcattgttctacggagtgctgggtgtgattctgggtgggcgtctgggtcatgtcctgttttatgaaccgggttactatctgcagcatccgctggagatattggccatctggcaaggtggcatgtccttccacggcgggtttctcggtgttgccatcgccatgctgtgtctggcgcgtaagtaccagctttcatggctggccgtcacggatttcatcgcaccgttggtgccgcttggattgggagcagggcgtatcggtaatttcatcaatggtgaattgtgggggcgccccaccgatgtgccgtgggggatgatttttccgtatgcggataatttgccgcgccatccctcacaactttacgagttcgcattggaaggactggtgcttttcgcgctgatctggctttattctgccaagccaaggccgctgggtgccgttaccggaatgttcatgatcggttatggtgcattccgctcgttctgtgagtttttccgtgagccggatgacggttttctcggcatcatgacgctgggtatcagtatggggcagtggttgtccctgccgatgattgcagccggtatcgcgcttttatactgggcataccgatatgacggcaaaccggaaaaagcggcccggaaactgccgcgcgagcgtaaaaatcgggattga

SEQ ID NO: 81877 - protein, 278 aa, Nitrosomonas europaea
MLVHPQFDPVAISIGPLAVRWYGLMYLLGFSLFILLGRYRIRQQPNGVFTREMLDDALFYGVLGVILGGRLGHVLFYEPGYYLQHPLEILAIWQGGMSFHGGFLGVAIAMLCLARKYQLSWLAVTDFIAPLVPLGLGAGRIGNFINGELWGRPTDVPWGMIFPYADNLPRHPSQLYEFALEGLVLFALIWLYSAKPRPLGAVTGMFMIGYGAFRSFCEFFREPDDGFLGIMTLGISMGQWLSLPMIAAGIALLYWAYRYDGKPEKAARKLPRERKNRD

SEQ ID NO: 81878 - DNA, 813 bp, Pasteurella multocida
  CDS (1)..(813): transl_table=11
atgcaatcgaattatttttcatttccacaatttgatcccgtcatttttgaaatcggtcctatcggtttacgttggtatggcttaatgtatctgctggggtttctctttgcccgttggcttgcggtgaaacgtgctaatcaaacaggcagtggctggacaacagaccaagtggatagcctgttatttaacggttttatgggcgtttttttaggtggacgtattggttacgtgttgttttatcaattcgattatttcttacaagatcctgcgtatttattccgtgtttgggaaggcggtatgtctttccatggtggcttaattggtgtgattttagccatgttaatcacagctaaaatacaaaaacggggtttctggcaaacggcggattttgtggcgccgttgattccatttggcttaggtatgggacgcatcggcaactttatcaatgacgaattgtgggggcgtgtcacggatgtgccatgggcagtcttattcccatcaggcggatatttaccacgccatccatcacagctatacgaagcggtattagaaggcattgtgctattctttattctgaattggtatatcaaaaagcctcgaccaatcggcgcaaccgctggtttattcttactcggttacggtattttccgttttatcgttgagtttttccgtgagcctgatgcccaattaggcttatattttggtcaacatatctccatgggacaaattctctccacaccaatgattctcattggtgcggtaatcatgttagtggcatatcaaagtgcgggtaaaaaaagggaaatattatga

SEQ ID NO: 81879 - protein, 270 aa, Pasteurella multocida
MQSNYFSFPQFDPVIFEIGPIGLRWYGLMYLLGFLFARWLAVKRANQTGSGWTTDQVDSLLFNGFMGVFLGGRIGYVLFYQFDYFLQDPAYLFRVWEGGMSFHGGLIGVILAMLITAKIQKRGFWQTADFVAPLIPFGLGMGRIGNFINDELWGRVTDVPWAVLFPSGGYLPRHPSQLYEAVLEGIVLFFILNWYIKKPRPIGATAGLFLLGYGIFRFIVEFFREPDAQLGLYFGQHISMGQILSTPMILIGAVIMLVAYQSAGKKREIL

SEQ ID NO: 81880 - DNA, 801 bp, Photobacterium profundum
  CDS (1)..(801): transl_table=11
atgagccaaggctttttaacctttccgacaattgatccagttttaattcaactcgggcctctggcgattcgctggtatggcttgatgtatttagtgggtttcctttttgccatgtggttagcgaaccgccgagcagacaaaccaaacagtggatggactcgcgatcaagtgagtgacttgttattcgcgggctttctaggtgtcgtgctaggcggtcgtattggttatgtgttgttttataactttggactattcctcgataatccattgtatttattccaagtatggactggcggcatgtcgttccatggcggtttacttggtgtaatgactgcgatgctttggtatggccatcgtaataaacgtactttcttttctgttgccgactttattgcaccacttgtaccatttggtttaggtatggggcgcatggggaactttatgaatggcgaattgtggggacgagtaaccgacatgccatgggcaatggtattccctactggtggtccttttcctcgtcacccatcgcaactctatgaagcgttccttgaagggtttgtgctacttattatcttgaatatctttattcgtaagccacgcccagccggggcagtatcgggcctattcctgattggttacggtagtttccgctttattattgaatacttccgtgaacctgatgctcagttaggtttgtttggtgattggatcagtatggggcaaatattgtcttctccaatgattatttttggtgcattactgatgttatgggcttacaaggcacagcctaaaacggcataa

SEQ ID NO: 81881 - protein, 266 aa, Photobacterium profundum
MSQGFLTFPTIDPVLIQLGPLAIRWYGLMYLVGFLFAMWLANRRADKPNSGWTRDQVSDLLFAGFLGVVLGGRIGYVLFYNFGLFLDNPLYLFQVWTGGMSFHGGLLGVMTAMLWYGHRNKRTFFSVADFIAPLVPFGLGMGRMGNFMNGELWGRVTDMPWAMVFPTGGPFPRHPSQLYEAFLEGFVLLIILNIFIRKPRPAGAVSGLFLIGYGSFRFIIEYFREPDAQLGLFGDWISMGQILSSPMIIFGALLMLWAYKAQPKTA

SEQ ID NO: 81882 - DNA, 852 bp, Porphyromonas gingivalis
  CDS (1)..(852): transl_table=11
atgacactacctgcattcatcacatgggatttcgatccggttctatttaccctcttcgggcaccctattgtctggtacggtttgctctttgcattggggctgatcattctgggcccttggatagagaaaaaaatgtgggaacacgagaagctggattccaaatggttcgagtccctggccgtctatgtctttgtaggtactatcgtcggagcgcgtttgggacatgtcctattctatgacccggcatactatttggccaatccggccaagatattcgtcacttgggagggtggcttggcaagccacggcggtaccatcgggatcattatagcctgctggctgtactcacgcagggtgacgcgcaaatctattctatgggtattagatcgtttggctgtgcctacaggtatcgtggccgccatgatccgtctgggcaatctgaccaacagtgagattttcggccgcccgacgacattaccttggggcttccgctttattcgttcggaagagtatcgtcacttggtaccgaacatggacatgggatgtcatcctactcagatatacgaagctttatgctatttggcggtctttgccctctgtatgtggctatactggaagcgcgatgctgcccgacgctactccgggctgatcgtgggggttttcctgacaggtatcttcctctctcgctttatcatcgaacgcatcaagatcgttcaggaaccatgggagctaaagctcatcgaatcagtcggcctgaatatgggacagctgctcagcatacctttcgttcttgcaggcatttggcttatcatccgtgccgtaaagaatccgattacgcagaaattatcataa

SEQ ID NO: 81883 - protein, 283 aa, Porphyromonas gingivalis
MTLPAFITWDFDPVLFTLFGHPIVWYGLLFALGLIILGPWIEKKMWEHEKLDSKWFESLAVYVFVGTIVGARLGHVLFYDPAYYLANPAKIFVTWEGGLASHGGTIGIIIACWLYSRRVTRKSILWVLDRLAVPTGIVAAMIRLGNLTNSEIFGRPTTLPWGFRFIRSEEYRHLVPNMDMGCHPTQIYEALCYLAVFALCMWLYWKRDAARRYSGLIVGVFLTGIFLSRFIIERIKIVQEPWELKLIESVGLNMGQLLSIPFVLAGIWLIIRAVKNPITQKLS

SEQ ID NO: 81884 - DNA, 801 bp, Pseudomonas aeruginosa
  CDS (1)..(801): transl_table=11
atgctgacgtatccccagatcgatccggttgcgctggccatcggcccgctgaagatccactggtacgggctgatgtacctgatcgggatcggcggcgcctggctgctggcgtcgcgccggatgaagcgcttcgacccgacctggaccaaggagcgcctttccgacctggtcttctgggtcgcctgcggcgtgatcctcggtggccgcctgggctacgtgctgttctacaacctggacgagtacatcgccaacccgacgctgatcttcgaggtctggaaaggcggcatgtccttccatggcggcctgctcggcgtgatgctggcggtctggtggttcggcaagcgccatggcaagagcttcttccagctgatggacttcatcgccccgctggtgcccatcggcctgggcgccgggcgcatcggcaacttcatcaactcggaactgtggggcaaggtcagcgatgtgccctgggccatggtcttccccaacggcggcccgctgccgcggcatccctcgcagctgtaccagttcgccctggaaggcgtggcgctgttcgtcatcctctggctgttcacccgcaagccacggccgaccgcctcggtctccggcctgttcgtgctgtgctacgggatcttccgcttcgtcgtcgaattcgtccgcgtgccggatgcccagctcggctacctcgcctggggttggctgaccatgggccaggtgctctgcgtaccgatggtgctggccggcattgccctgatggtctgggcctaccgccgcgacgcggcgcagccgaaggcggcctga

SEQ ID NO: 81885 - protein, 266 aa, Pseudomonas aeruginosa
MLTYPQIDPVALAIGPLKIHWYGLMYLIGIGGAWLLASRRMKRFDPTWTKERLSDLVFWVACGVILGGRLGYVLFYNLDEYIANPTLIFEVWKGGMSFHGGLLGVMLAVWWFGKRHGKSFFQLMDFIAPLVPIGLGAGRIGNFINSELWGKVSDVPWAMVFPNGGPLPRHPSQLYQFALEGVALFVILWLFTRKPRPTASVSGLFVLCYGIFRFVVEFVRVPDAQLGYLAWGWLTMGQVLCVPMVLAGIALMVWAYRRDAAQPKAA

SEQ ID NO: 81886 - DNA, 807 bp, Pseudomonas putida
  CDS (1)..(807): transl_table=11
atgctgccttacccgcagatagaccccgtggccttggccatcgggccgctgaaaatccattggtacggcctgatgtacctgatcggcatcggcggtgcctggctgctggcctcacgccggctgaaccgcttcgaccccacctggaaccgcgagaagctgtccgacctggtgttctggctgtcgatgggggtgattgtcggcgggcgcctgggctatgtgctgttctacgacctgcacgcctacctggccaacccgacgctgatcttcgaggtatggaaaggcggtatgtcgttccacggtggcttcatcggcgtgatgctggcggccttgtggttcggcaagcgcaacaacaagtcgttcttcgagctgatggacttcgtcgccccgctggtgccgattggcctgggggccgggcgtatcggcaacttcatcaacgccgaactgtggggcaaacccaccgacgtcccatgggcgatgatcttcccgccgttcagcgacccggcccagttgccgcgccacccatcgcagctctaccagttcgcccttgagggcgtggcgctgttcgtcatcctgtggctgttctcgcgcaagccacggccgaccatggcggtgtcgggaatgttctcgttgtgctatggcatcttccgcttcgccgtggagtttgtccgggtgccggatgcacaactcggttacatcgcgttcggctggctcactcaaggccagttgctgtgcattccgatgatagtcggtggcctcgtcttgatctggtgggcttataatcgcaagcctacggcgaaacccgcctga

SEQ ID NO: 81887 - protein, 268 aa, Pseudomonas putida
MLPYPQIDPVALAIGPLKIHWYGLMYLIGIGGAWLLASRRLNRFDPTWNREKLSDLVFWLSMGVIVGGRLGYVLFYDLHAYLANPTLIFEVWKGGMSFHGGFIGVMLAALWFGKRNNKSFFELMDFVAPLVPIGLGAGRIGNFINAELWGKPTDVPWAMIFPPFSDPAQLPRHPSQLYQFALEGVALFVILWLFSRKPRPTMAVSGMFSLCYGIFRFAVEFVRVPDAQLGYIAFGWLTQGQLLCIPMIVGGLVLIWWAYNRKPTAKPA

SEQ ID NO: 81888 - DNA, 912 bp, Ralstonia solanacearum
  CDS (1)..(912): transl_table=11
atgctcatccatccgcaattcgatcccatcgcgctgcatctcgggccgctcgccatccgttggtacggcctgatgtacctggccgcgttcatcatgttcctgtggttcggccggctgcgcacgcggcagccccacatcgccgcgcaaggctggagcggccgcgatctggacgacatgctgttctacggcgtgctcggtgtgatcctgggcgggcgcctgggctatgtgctgttctacaagcccgactggtatctcgcgcatccgctggacatcttcaaggtctgggagggcggcatggccttccacggtggcttcctcggcgtggtgctggcgatgatgctgtacgcgcgcatgcgccgccgcccgtggatgcaggtcaccgatttcatcgcgccgatggttccgtgcggactggcggccggccgtctgggcaacttcatcaacggcgagctgtggggccgcgtgtcctcgcccgacctgccgtgggcgatgctgttcccgcaggcgcagggcgaagaccgggcctggctggcggcgcacgcgcagcaggcggtgaccagcggcgtgcaggccgtgttcgaccagtaccacatgctgccgcgccatccctcgcagatctaccagttcctcggcgagggcgtgctgttcttcatcctgctgtggctgtatgcgcgcaagccgcggccgatgggcgccgtgtcgggcatgttcctggtcggctacggcgtgttccgctttgcggccgaattcgcgcgcgagcccgacaacttcctcggcctgctggcgctgagtctgtcgatggggcagtggttgtcgctgccgatgatcctggcgggcgtggcgatgttggcgtgggcgtatcggcgcgccgggcgcaacgggaacgacgcgcaagccggcgcacacgcttga

SEQ ID NO: 81889 - protein, 303 aa, Ralstonia solanacearum
MLIHPQFDPIALHLGPLAIRWYGLMYLAAFIMFLWFGRLRTRQPHIAAQGWSGRDLDDMLFYGVLGVILGGRLGYVLFYKPDWYLAHPLDIFKVWEGGMAFHGGFLGVVLAMMLYARMRRRPWMQVTDFIAPMVPCGLAAGRLGNFINGELWGRVSSPDLPWAMLFPQAQGEDRAWLAAHAQQAVTSGVQAVFDQYHMLPRHPSQIYQFLGEGVLFFILLWLYARKPRPMGAVSGMFLVGYGVFRFAAEFAREPDNFLGLLALSLSMGQWLSLPMILAGVAMLAWAYRRAGRNGNDAQAGAHA

SEQ ID NO: 81890 - DNA, 861 bp, Rhizobium loti
  CDS (1)..(861): transl_table=11
ttgaacgaatatttcctgctgccgctggcctcgctgcccttccccaacatcaacccgatcctcatccagatcgggccgctggcggtgcactggtacggcgtcggctacatcgtcggcatcctgtttgcctggtggtatgccaagcggcttgccgccaacccgaagctgtggcccgacggcatcctgccaatgaagctggaggacctcgacgatttcattgtctgggcggccatcggcgtcgtgctcggcggccgcaccggctatgtgctgttctatgatctgccgcgctacatcgcgcatccgctcgacatcttcgccgtctggcaaggcggcatgtcgttccatggcggcctgcttggggtcatccttgccatgacgctgttttccatcaagcgcggtatacgcacctggtcgctgttcgatgtcgtggccgccggcgtgccggttgggctcggcctggtgcgcgtcgccaacttcatcaattccgagctctggggccggccgacggacgtaccctgggcaatagaattccccaatggcggaccgtttacccgccatccgagccagctctacgaggccttgctcgaaggcctggtgctgtttgtcgtgctgcgcatcctcacccattcgcgcctcaaactgaagacgccgcgcttcgtcggcggcgctttcatctgcggctacggcctgtcgcgcatcttcgtcgagttcttccgcgagcccgaccagcagctcggctacctcctcggcaccaactggctgaccatgggcatgatcctgtcgacgccgatggtgctggccggcatctgggcgatggcgacggccaagccggtgaagcaagcgcagccgcaggcgacatga

SEQ ID NO: 81891 - protein, 286 aa, Rhizobium loti
MNEYFLLPLASLPFPNINPILIQIGPLAVHWYGVGYIVGILFAWWYAKRLAANPKLWPDGILPMKLEDLDDFIVWAAIGVVLGGRTGYVLFYDLPRYIAHPLDIFAVWQGGMSFHGGLLGVILAMTLFSIKRGIRTWSLFDVVAAGVPVGLGLVRVANFINSELWGRPTDVPWAIEFPNGGPFTRHPSQLYEALLEGLVLFVVLRILTHSRLKLKTPRFVGGAFICGYGLSRIFVEFFREPDQQLGYLLGTNWLTMGMILSTPMVLAGIWAMATAKPVKQAQPQAT

SEQ ID NO: 81892 - DNA, 843 bp, Rhizobium meliloti
  CDS (1)..(843): transl_table=11
ttggaaacaatcgcgacccgcctcgccatcctacccttccccgaaatcgaccccgtcatcttcacgatagggccgctcgccgtgcgctggtacgggctggcctatgtcgcgggtatactgctcggatggctctatgcgcgccgcataatccagaacgcttcgctctggcgcaacggcaccgcccccttcaacctggcacagctcgacgacttcctgctctgggcggccggcggcatcgtgcttggcgggcgcatcggctacatcctcttctacgatctcggctccatcctcgagaatcccgtccgcgcgatccagatatggaacggcggcatgtccttccatgggggccttctcggcacgaccctggcgataatcatctttgcgcgaaggaacgcgatccccctctggagcctgttcgacgtcgtggcagcagtggtgccgatcgggctcttcttcgggcgcatcgccaatttcatcaatggagaactctggggccgcctgtcctcgatgccctgggcggtcgtcttcccgacgggaggccccttcgcccgtcatccgagtcagctttacgaggcggccctggagggcattgtgcttctcgtcgtgctcgcctggttcgtctatcgccgcagagccctgaaaatgcccggcctcgtcaccggcatcttcgtctgcggctatgctgcgagccgcattttcgtggagttcttccgcgaaccggacgcacagatcggctatcttgccggagactggcttaccatgggcatggtgctttcactgccgatggcactggtcggtatctgggccattgcgcgggcgcgcagcgcggctgccgccgcttga

SEQ ID NO: 81893 - protein, 280 aa, Rhizobium meliloti
METIATRLAILPFPEIDPVIFTIGPLAVRWYGLAYVAGILLGWLYARRIIQNASLWRNGTAPFNLAQLDDFLLWAAGGIVLGGRIGYILFYDLGSILENPVRAIQIWNGGMSFHGGLLGTTLAIIIFARRNAIPLWSLFDVVAAVVPIGLFFGRIANFINGELWGRLSSMPWAVVFPTGGPFARHPSQLYEAALEGIVLLVVLAWFVYRRRALKMPGLVTGIFVCGYAASRIFVEFFREPDAQIGYLAGDWLTMGMVLSLPMALVGIWAIARARSAAAAA

SEQ ID NO: 81894 - DNA, 861 bp, Rhodopseudomonas palustris
  CDS (1)..(861): transl_table=11
atgccattcttcgccgtcgcctttcccgtattcgatccggtggccgtcgcgatcggtccgttcgcgatccgctggtacgcgctggcctatatcgccggcatcgtcatcggctggctgtatgcccggatgctgctgcagcgacagcggctgtggggcggcccatcgccgatctcgctggaagcgttcgacgacttcatcctgtgggtcaccatcggcatcattctcggcggccgcaccggctacgtgctgttctacaatctcgacttcttcatccggcatccggccgagatcttcgaattgtggaagggcggcatgtcgttccacggcggcttcatgggctgcgtggcggcagtggtgctgttcggatggaagcgtaaggtaccgatcctgtcgctcggcgacatcacctgcgcggtcggcccgatcgggctgttcctcggccgcatcgccaacttcatcaacggcgaattgtggggccgcccggccgatgcctcggtgccgtgggcgatggtgtttcccaatgccggcccgctgccgcggcatccgagccaactctatgaagccgggctcgagggcatcgggctgttcgtcatcctggcgctgatgatccgcgccggcgccctgaagcggccgggcctgatcatcggcgcgttcctgaccttctacggccttgcccgcatcaccggcgaattcttccgtgaacccgatccacagctcggcttcctgtggggcgacatgaccatgggcatgctgctttcgatcccgatggtgatcgtcggcatcttggtgatgatcaccacctggcggcgcggacgcggggcgcccgcggcggcgacaccttccagcgaggcagcctcatga

SEQ ID NO: 81895 - protein, 286 aa, Rhodopseudomonas palustris
MPFFAVAFPVFDPVAVAIGPFAIRWYALAYIAGIVIGWLYARMLLQRQRLWGGPSPISLEAFDDFILWVTIGIILGGRTGYVLFYNLDFFIRHPAEIFELWKGGMSFHGGFMGCVAAVVLFGWKRKVPILSLGDITCAVGPIGLFLGRIANFINGELWGRPADASVPWAMVFPNAGPLPRHPSQLYEAGLEGIGLFVILALMIRAGALKRPGLIIGAFLTFYGLARITGEFFREPDPQLGFLWGDMTMGMLLSIPMVIVGILVMITTWRRGRGAPAAATPSSEAAS

SEQ ID NO: 81896 - DNA, 780 bp, Rickettsia conorii
  CDS (1)..(780): transl_table=11
atgacatttcctaatatcaatccaattattttctctataggtccacttgctatctcttggtattctctttcatatgtaataggaattttgctaggctggttctatgcaaataaaattgtagaaaaatttaagcctcaaattaccaaaaaaaatctagaagatttcattacttatgccgttataggcataatagtcggaggcagactagggtttgttttattatataacccttctagatatttttcaaatccaatagatatcttaaaaacttatgaaggcgggatgtctttccatggcggagctttaggggggattattgctgcttatttgttttgccgaaaatataaaattaattttttaagtctcacggatataatagcccctgtagtacctatcggattatttttaggtagaatcgctaattttattaacggcgaactatacggacgtattacaaattcttcttttggtatgatttttccgaatagcgatttgatgccaagacatcctagtcaactatatgaagctttttttgaaggtttagtattatttagtatcttagcatatacaacatttaagcacaaaactcttaaaaagtgcggtttaaactcaggaatatttttcacattttacggtcttttccgaatcactattgaaatatttagagaacccgacatacaaatcgggtttattttagatagcttaactatgggacaaattttatctgtacctatgttacttttaggaagttatttaatatgtcaatcgaatccaaaataa

SEQ ID NO: 81897 - protein, 259 aa, Rickettsia conorii
MTFPNINPIIFSIGPLAISWYSLSYVIGILLGWFYANKIVEKFKPQITKKNLEDFITYAVIGIIVGGRLGFVLLYNPSRYFSNPIDILKTYEGGMSFHGGALGGIIAAYLFCRKYKINFLSLTDIIAPVVPIGLFLGRIANFINGELYGRITNSSFGMIFPNSDLMPRHPSQLYEAFFEGLVLFSILAYTTFKHKTLKKCGLNSGIFFTFYGLFRITIEIFREPDIQIGFILDSLTMGQILSVPMLLLGSYLICQSNPK

SEQ ID NO: 81898 - DNA, 780 bp, Rickettsia felis
  CDS (1)..(780): transl_table=11
atgacatttcctaatatcaatccaattattttctctataggtccacttgctgtctcttggtattctctttcatatgtagtaggaattttgctaggttggttctatgcaaacaaaattatagaaaaatttaagcctcaaattactaaaaaaaatctagaagatttcattacttatgccgttataggcataatagtcggaggcagactaggatttgttttattatataacccttctagatatttttcaaatccaatagatatcttaaaaacttatgaaggcggtatgtctttccatggcggagctttaggggtgattattgctgcttatttgttttgtcgaaaatataaaattaattttttaagtctcacagatataatagcccctgtagtacctatcggattatttttaggtagaatcgctaattttattaacggcgaactatacggacgtattacaaattcttcttttggtatgatttttcctaatagtgatttgatgccaagacatcctagtcaattatatgaagctttttttgaaggtttagtattattttgtatcttagcgtatgcaacatttaagcacaaaactcttaaaaagtacggtttaaactcaggaatatttttaatattttacgctcttttccgaatcgctattgaaatatttagagaaccagacatacaaatcgggtttattttagatagcttaactatgggacaaatcttatctgtacctatgttacttttaggaagttatttaatatgtcaatcgaatccaaaataa

SEQ ID NO: 81899 - protein, 259 aa, Rickettsia felis
MTFPNINPIIFSIGPLAVSWYSLSYVVGILLGWFYANKIIEKFKPQITKKNLEDFITYAVIGIIVGGRLGFVLLYNPSRYFSNPIDILKTYEGGMSFHGGALGVIIAAYLFCRKYKINFLSLTDIIAPVVPIGLFLGRIANFINGELYGRITNSSFGMIFPNSDLMPRHPSQLYEAFFEGLVLFCILAYATFKHKTLKKYGLNSGIFLIFYALFRIAIEIFREPDIQIGFILDSLTMGQILSVPMLLLGSYLICQSNPK

SEQ ID NO: 81900 - DNA, 876 bp, Salmonella paratyphi
  CDS (1)..(876): transl_table=11
atgaccagtagctatctgcattttccggactttgatccggtcattttctcaattgggcccgtcgcgcttcactggtatggcttgatgtatctggtgggattcgttttcgcgatgtggttggcggtgcgtcgtgctaaccgtccgggaagcggttggaccaaaaacgaagttgaaaatttactctatgcaggtttcctgggggtcttcctgggggggcgtattggctatgtcctgttttataacttccctctgtttctggataacccgctctatttattccgcgtctgggacggcggcatgtccttccacggcgggcttatcggcgtgatactggtgatgattatcttcgccaggcgcacgaagcgctcgttctttcaggtgtctgattttattgcgccgttaattccgttcggcctgggcgccgggcgtctgggcaactttatcaacggtgaattgtgggggcgcgtcgatcctaacttccggtttgccatgctctttcctggctcacgcgcggaagatattgcgctgctgccgtcacatccgcaatggcagcctatttttgatacctacggcgtattgccgcgccacccttcccagttgtatgaactggcattagaaggcgtggtgctgtttatcatccttaatctctttattcgcaaaccgcgtccgatgggcgcagtctccggattattcctgattggctatggcgcgtttcgtatcattgttgaattcttccgccagccggacgcgcaatttaccggcgcgtgggtacagtacatcagcatggggcagattctctctatcccgatgattatcgctggcgcgatcatgatggtttgggcatatcgccgccgcccgcagcaacacgtttcctga

SEQ ID NO: 81901 - protein, 291 aa, Salmonella paratyphi
MTSSYLHFPDFDPVIFSIGPVALHWYGLMYLVGFVFAMWLAVRRANRPGSGWTKNEVENLLYAGFLGVFLGGRIGYVLFYNFPLFLDNPLYLFRVWDGGMSFHGGLIGVILVMIIFARRTKRSFFQVSDFIAPLIPFGLGAGRLGNFINGELWGRVDPNFRFAMLFPGSRAEDIALLPSHPQWQPIFDTYGVLPRHPSQLYELALEGVVLFIILNLFIRKPRPMGAVSGLFLIGYGAFRIIVEFFRQPDAQFTGAWVQYISMGQILSIPMIIAGAIMMVWAYRRRPQQHVS

SEQ ID NO: 81902 - DNA, 888 bp, Silicibacter pomeroyi
  CDS (1)..(888): transl_table=11
atgcaggcagtactgaattttcccgatctttcacccgaattgttctcgatctcgctgttcgggatggagttcgcgctgcgctggtatgcgctggcctatatcgccgggatcgtcatcgcctggcggctggcggtgctggcgacccggcgcgcggcgctgtggcccgcgaacaccccgccgatggcacccgcgcggatcgaggatctgctgacctggatcatcctcggggtgatcctgggcgggcggctgggctttgtgctgttctatcagcccgcatactatctggccaatccaaccgagatcctgatggtctggcagggcggcatggcctttcacggcggccttctgggcgtggtgatcgcggcgtggctctattctctgcgccacaatatccccaagctgagcctggccgacctgatcacccatacggtggcgccggggctgctgttgggtcggctggcgaatttcatcaatgccgagctgtgggggcgtccctcggacctgccctgggcggtgatctttcccggaccggcagcgcaagcctgccccggcgtggtcggcctgtgtgcccgtcatccctcgcagctatatgaggctgcgctcgaagggctgttgctgggcacgttgctgttgtggctggtctggcggcgcggggcgctgaaacggccgggcctgattaccggcgtattcctggcgggctatggcctgtcgcgctttgtggtcgagttctttcgccagcccgacgcgcagttcgtcactcccggcaacccgctggggctggcctggcaagtgggggaatacgggctgaccatgggccagctgctgtcgctgccgatgatcgcactggggctgtggttcgtacttcgcgcccgcgcggtaccggcatga

SEQ ID NO: 81903 - protein, 295 aa, Silicibacter pomeroyi
MQAVLNFPDLSPELFSISLFGMEFALRWYALAYIAGIVIAWRLAVLATRRAALWPANTPPMAPARIEDLLTWIILGVILGGRLGFVLFYQPAYYLANPTEILMVWQGGMAFHGGLLGVVIAAWLYSLRHNIPKLSLADLITHTVAPGLLLGRLANFINAELWGRPSDLPWAVIFPGPAAQACPGVVGLCARHPSQLYEAALEGLLLGTLLLWLVWRRGALKRPGLITGVFLAGYGLSRFVVEFFRQPDAQFVTPGNPLGLAWQVGEYGLTMGQLLSLPMIALGLWFVLRARAVPA

SEQ ID NO: 81904 - DNA, 999 bp, Treponema pallidum
  CDS (1)..(999): transl_table=11
atgttgagtattgtctatccgtcgtggattcgtccggaaataattccttcttttccctattttcgctggtacggcttcatgtatgtggttgcattcagtatcgcgtacatactgtttcgctaccaggtgcggcgcggtgagcttgataaatggagtcgggtgagcgagcctgtcacgcaggatgacattatgagtttttttacgtggacgattctgggcattttaataggggcgcgtgttttttccaccatggtgtatgaggtcgatttgctgtatatgcgcaagccatggctgattttttggccgttttctttgcaaacgggtgagtgggttggattgcgaggaatgtcgtaccacggtgggttaattggcgcgctcgtggggggtggcttgtggactcagtcgcatgggagaagctttcttgcatgggccgatgtcgctgcagcgtcaactccacttgggtatacttttggaagaattggtaatttccttaatgctgaattatatgggcgtattactgatatccccatcggcatgattttcccgaatgttcccttatctgacatgtttcctgcctctgaaccttgggtgagggagtttgcacagagggtggggattcacgtgcaagaaggtgcacggctcgtgaatttgcctcgtcaccctagccaaatctatgaagctttttttgaaggaattgtgctgtggtgtattttgtggtgtgcgcgtcgggtaaaaacgtataacggctttttggtgtgtttgtatgtggtggggtacggagtgtttcgtttttttattgagtattttcgtcagcctgatgcgcatttggggtacaggttttccgccacgcaatcgtctccgatttaccttttccagtcatggagtgatgtttccaccgggcagattctgtgtgttctaatgattctcgcaggtttgggtgggatgttcgcactttcggcgtatcacaagcgggatagtgtgcggaaagcgcgtgtatga

SEQ ID NO: 81905 - protein, 332 aa, Treponema pallidum
MLSIVYPSWIRPEIIPSFPYFRWYGFMYVVAFSIAYILFRYQVRRGELDKWSRVSEPVTQDDIMSFFTWTILGILIGARVFSTMVYEVDLLYMRKPWLIFWPFSLQTGEWVGLRGMSYHGGLIGALVGGGLWTQSHGRSFLAWADVAAASTPLGYTFGRIGNFLNAELYGRITDIPIGMIFPNVPLSDMFPASEPWVREFAQRVGIHVQEGARLVNLPRHPSQIYEAFFEGIVLWCILWCARRVKTYNGFLVCLYVVGYGVFRFFIEYFRQPDAHLGYRFSATQSSPIYLFQSWSDVSTGQILCVLMILAGLGGMFALSAYHKRDSVRKARV

SEQ ID NO: 81906 - DNA, 838 bp, Vibrio cholerae
  CDS (14)..(829): transl_table=11
gagaaggtttgttatgcctcagggttatctgcagtttcccaatattgaccccgtattgttttcgatcggccctctagcggtgcgctggtatggcttgatgtatttggtgggtttcctttttgctatgtggttggccaatcgccgagcggatcgcgcgggcagtggttggacgcgtgagcaagtctctgacttgttattcgccggctttttaggtgtagtgatcggtggccgagttggttatgtgatcttctacaattttgatctgttccttgctgaccctctttatttattcaaagtgtggactggcggcatgtccttccacggcggcttattgggtgtgatcaccgccatgttctggtatgcgcgtaaaaaccaacgcaccttctttggtgtggccgattttgttgcccctttagtgccattcggtttggggatgggacgtatcggtaactttatgaatagtgaactttggggacgagtaacggatgtgccttgggcttttgtattccctaatggtggcccactgccgcgccatccttcacagctttatgaattcgccttagaaggcgtggttctgttctttattcttaattggtttattggtaaacctcgtccgctaggcagcgtatccggactgtttttagctggatacggtacattccgcttccttgtggaatacgtccgtgagccagatgctcagttgggtctgtttggtggcttcatttcaatggggcaaatcctctccttacctatggtgatcatcggtattttgatgatggtttggtcttacaagcgcggtttgtatcaagaccgtgtagcagcaaaatagggtagttag

SEQ ID NO: 81907 - protein, 271 aa, Vibrio cholerae
MPQGYLQFPNIDPVLFSIGPLAVRWYGLMYLVGFLFAMWLANRRADRAGSGWTREQVSDLLFAGFLGVVIGGRVGYVIFYNFDLFLADPLYLFKVWTGGMSFHGGLLGVITAMFWYARKNQRTFFGVADFVAPLVPFGLGMGRIGNFMNSELWGRVTDVPWAFVFPNGGPLPRHPSQLYEFALEGVVLFFILNWFIGKPRPLGSVSGLFLAGYGTFRFLVEYVREPDAQLGLFGGFISMGQILSLPMVIIGILMMVWSYKRGLYQDRVAAK

SEQ ID NO: 81908 - DNA, 816 bp, Vibrio vulnificus
  CDS (1)..(816): transl_table=11
atgtctcagggttacctgccttttcctaatatcgaccccgtctttttctcgataggacccatctcagttcgttggtacgggttgatgtatctatttggttttttgtttgcgatgtggctcgccaatcgccgagcagacaaaccgggcagtggctggacgcgagagcaagtttcggacttgctgttcgctggattcctaggcgttgtgctgggtggtcgcattgggtacgtgctgttctataacttcgatctcttcctcgctgatccgatttacctctttaaagtctggacaggtggcatgtctttccatggcggcttgctgggtgtcattacggctatgctctggtacgcgaagaaaaatggccgaaccttttttggcgtggcggacttcgttgctccgttagtgccatttggcttaggggtagggcgcttaggcaactttatgaacggcgagctttggggcagagtgaccgatgtgccttgggcgatggtgttcccaaccggcggaccactaccacgccacccttcgcaattgtatgagatggcattagaaggggtggtgctgttctttatcctcaactggtttatccgcaaaccaagacctttaggatccgtatctggtttattccttgctggttatggtacattccgtttcctcgttgaatacgtgcgtgagccggatgcgcaactgggtctgtttggtggtttcatttcaatgggacagatcttgtcgtcaccgatgattattggtggattggcgctgatggcttgggcttataaacgtggccactatcaagacaaagtaaccgtgaagtaa

SEQ ID NO: 81909 - protein, 271 aa, Vibrio vulnificus
MSQGYLPFPNIDPVFFSIGPISVRWYGLMYLFGFLFAMWLANRRADKPGSGWTREQVSDLLFAGFLGVVLGGRIGYVLFYNFDLFLADPIYLFKVWTGGMSFHGGLLGVITAMLWYAKKNGRTFFGVADFVAPLVPFGLGVGRLGNFMNGELWGRVTDVPWAMVFPTGGPLPRHPSQLYEMALEGVVLFFILNWFIRKPRPLGSVSGLFLAGYGTFRFLVEYVREPDAQLGLFGGFISMGQILSSPMIIGGLALMAWAYKRGHYQDKVTVK

SEQ ID NO: 81910 - DNA, 816 bp, Vibrio vulnificus
  CDS (1)..(816): transl_table=11
atgtctcagggttacctgccttttcctaatatcgaccccgtctttttctcgataggacccatctcagttcgttggtacgggttgatgtatctatttggttttttgtttgcgatgtggctcgccaatcgccgagcagacaaaccgggcagtggctggacgcgagagcaagtttcggatttgctgttcgctggattcctaggcgttgtgctgggtggtcgcattgggtacgtgctgttctataacttcgatctcttcctcgccgatccgatttacctctttaaagtctggacaggtggcatgtctttccatggcggcttgctgggtgtcattacggctatgctctggtacgcgaagaaaaatggccgaaccttttttggcgtggcggacttcgttgctccgttagtgccatttggtttaggggtagggcgcttaggcaactttatgaacggcgaactttggggcagagtgaccgatgtgccttgggcgatggtgttcccaaccggcggaccactaccacgccacccttcgcaattgtatgagatggcattagaaggggtgttgctgttctttatcctcaactggtttattcgcaaaccaagacctttaggatccgtatctggtttattccttgctggttatggtacattccgtttcctcgttgaatacgtgcgtgaaccggatgcgcaactgggtctgtttggtggtttcatttcaatgggacagatcttgtcgtcaccgatgattattggtggattggcgctgatggcttgggcttataaacgtggccactatcaagacaaagtaaccgtgaagtaa

SEQ ID NO: 81911 - protein, 271 aa, Vibrio vulnificus
MSQGYLPFPNIDPVFFSIGPISVRWYGLMYLFGFLFAMWLANRRADKPGSGWTREQVSDLLFAGFLGVVLGGRIGYVLFYNFDLFLADPIYLFKVWTGGMSFHGGLLGVITAMLWYAKKNGRTFFGVADFVAPLVPFGLGVGRLGNFMNGELWGRVTDVPWAMVFPTGGPLPRHPSQLYEMALEGVLLFFILNWFIRKPRPLGSVSGLFLAGYGTFRFLVEYVREPDAQLGLFGGFISMGQILSSPMIIGGLALMAWAYKRGHYQDKVTVK

SEQ ID NO: 81912 - DNA, 840 bp, Wigglesworthia glossinidia brevipalpis
  CDS (1)..(840): transl_table=11
atgttaaattgttatcttgcatttccgaaatatgatccgattattttttctgttggaagattttctgctcattggtatggattgatgtatttaattggtttttattttatcatgtggtcttctataaaaagatataaattaatttctttaaacaaagaaaaaatagaaaatatattatatttttcctttttaaatgctcttataggaggaagaataggatatgttatattttataaaacaaaagaaattttttttaatccatactttatatttaaagtatgggaaggaggaatgtcttttcatggtggattgttaggatctataatttccatatattatttttcaaaaaaatataattgtaaattttttaaaatatctgattttttagttcctttaataccatttggattaggatttggaagaattggaaattttatcaatggagaattatggggccgagtaaatacctctttttgttttactatgttgtttcctggttcttatgatgaagatgttaaatttcttttaaataatcctcatttacaagatgtgtttgataaatatcatttattgcctagacatatttctcaattgtatgaaatgtttttagaaggtattttactgtttattattttaaatattttcgaaaaaaagaaaaaaccaacaggatatatgtcaggtctttttttaattttatatggttcttttagaattatagcagagtttttcagacaaccagatccacaaataggattgatgtttaattatattagtttaggacaaatattatcaattcctatgatattatatggattaatattaataatcaattcaaaataa

SEQ ID NO: 81913 - protein, 279 aa, Wigglesworthia glossinidia brevipalpis
MLNCYLAFPKYDPIIFSVGRFSAHWYGLMYLIGFYFIMWSSIKRYKLISLNKEKIENILYFSFLNALIGGRIGYVIFYKTKEIFFNPYFIFKVWEGGMSFHGGLLGSIISIYYFSKKYNCKFFKISDFLVPLIPFGLGFGRIGNFINGELWGRVNTSFCFTMLFPGSYDEDVKFLLNNPHLQDVFDKYHLLPRHISQLYEMFLEGILLFIILNIFEKKKKPTGYMSGLFLILYGSFRIIAEFFRQPDPQIGLMFNYISLGQILSIPMILYGLILIINSK

SEQ ID NO: 81914 - DNA, 792 bp, Wolbachia pipientis wMel
  CDS (1)..(792): transl_table=11
atgtctttaaatccagtaattttcagcatcggtcctgtttctatatattggtattccttagcctacgttttgggtatagtgtttgcatattggtatttacataagctagatgaccaaaaaatatttactaagaatttttacgattcgttattaacagccactattgtaggtattatccttggaggtagacttggctacgtattgatatatgatccagttctttatataagcaaccctattgagatattgaagacctgggaaggagggatgtcatttcatggtggtgctataggagttttgcttgcagtaataatttcgtgtaaaagacataatatccctacattttatgcactggacctagtttcttgcggagttcccataggtttatttttaggtcgcataggcaattttataaacggagagttatttggcagagttacaactatgccatggggtatggtatttccagagagtggtgataatttgctgcatcatccaagccagctttatgaggcactttttgaaggactgctactttttgcagttgcaaattcactgtttttcttaactagaataagactgtatcacggtgcgttaactggtattgcagttatgtggtatggaatagcacgttttttcgttgagttttttcgcgaaccagactatcaaattggctatttgtggcttgatttaactatggggcagttgctttctatacctatggttttgctaggaatgcttgtatatctaggcgcattaaatttaaaatttaatacgaaatctgtcacatag

SEQ ID NO: 81915 - protein, 263 aa, Wolbachia pipientis wMel
MSLNPVIFSIGPVSIYWYSLAYVLGIVFAYWYLHKLDDQKIFTKNFYDSLLTATIVGIILGGRLGYVLIYDPVLYISNPIEILKTWEGGMSFHGGAIGVLLAVIISCKRHNIPTFYALDLVSCGVPIGLFLGRIGNFINGELFGRVTTMPWGMVFPESGDNLLHHPSQLYEALFEGLLLFAVANSLFFLTRIRLYHGALTGIAVMWYGIARFFVEFFREPDYQIGYLWLDLTMGQLLSIPMVLLGMLVYLGALNLKFNTKSVT

SEQ ID NO: 81916 - DNA, 819 bp, Wolinella succinogenes
  CDS (1)..(819): transl_table=11
atggaatggaactatctctacaatcactttgaccctgtagcgtttgacctttgggggctcaaagtccactggtatggaatcgcctatgttttggcgcttctagtggcgctttgggtggccaaatggatcgccaaaaaagacgcctaccccttgagcaatgagcagctagagagctattttatttgggtggaggttggagtgattttgggcgcgcgactagggtatatcctcttttatgatcccttcactgcctactatctcacgcatccttggcagatcttcaatccctttcaaaatggggaattcatcggcattagaggcatgagctaccatggtgcggtgattggattcttgatcgcttcatttctattcgcccaaagacacggggtgaaattttggatgctgatggacttggtgggaatctctgtcccccttggctatgtttttggacgcatcggtaactttctcaaccaagagctgattggccgagtgactgaagtcccttgggggatctatgtcgcaggcgtgcttcgccacccctcgcagctctatgaggcctttttggagggaatcgtcctttttgtgattctctatgcgtggcgatcaagggtgaaattcacgggacagctaggaatcatgtatcttattctctatgccctagcgcgttttgtggcagagttttggagggagcctgatgctcagattgggtatctagtggggggtgtgacgatggggcagctcctctcgctcgccatggcgattccctgcttagtgctttggggatatttggccaaaaaggagcgaggaaaaatcctctag

SEQ ID NO: 81917 - protein, 272 aa, Wolinella succinogenes
MEWNYLYNHFDPVAFDLWGLKVHWYGIAYVLALLVALWVAKWIAKKDAYPLSNEQLESYFIWVEVGVILGARLGYILFYDPFTAYYLTHPWQIFNPFQNGEFIGIRGMSYHGAVIGFLIASFLFAQRHGVKFWMLMDLVGISVPLGYVFGRIGNFLNQELIGRVTEVPWGIYVAGVLRHPSQLYEAFLEGIVLFVILYAWRSRVKFTGQLGIMYLILYALARFVAEFWREPDAQIGYLVGGVTMGQLLSLAMAIPCLVLWGYLAKKERGKIL

SEQ ID NO: 81918 - DNA, 891 bp, Xanthomonas campestris pv
  CDS (1)..(891): transl_table=11
atgatctatctgcacgccatcgaccccatcgccttctcgcttggcccggtgcaggtgcactggtacgggttgatgtacttggccgcgttcttttccgcctgggccctgggccgctcgcgcatcctgcgcggtcgcctgcccggcgtggacatggacggattttccgacctgttgttctacggcatgctcggcgtggtgctcggcgggcgcatcggctacatgttgttctatgccttcgacaccttcctggccaacccgctgatcctgttcaaggtgtgggaaggcggcatgagcttccacggcgggctgctgggcgtgttgatcgcctgcggcctgtggacgcgccggcaccgcctgcatttcttcgatgtcatggattttgtcgcgcccctggtgccgttgggcctgggcttcgggaggctgggcaattttgtcggcggcgagttgtggggcaagttcacccaggccggctggggcgtgatcttcccgcatgcgccggagctggctgactggccgcccgcgcaactccaggcccagtacgcggccggcgcgctggaccgcttcgcccggcatccgtcgcagctgtatgaagccgcgctcgaaggcgtggtgatgttcgtggtgttgtggaccttctcgatgaagccgcgcgcccgctatgcggtgtcgggactgttcgcgctgctgtatggcgtgttccgcttcatcgtggagttcgtccgcgtcccggatgcaccgctgggctacctggccttcaactggctgacgatggggcagatcctgagcctgccgttgatcggcgtgggcctggtgctgctggcgctgtcgcgccgcgcgccggtcctgcagccggtggtgccggctgcagcaggtgtggaggcggccaagtga

SEQ ID NO: 81919 - protein, 296 aa, Xanthomonas campestris pv
MIYLHAIDPIAFSLGPVQVHWYGLMYLAAFFSAWALGRSRILRGRLPGVDMDGFSDLLFYGMLGVVLGGRIGYMLFYAFDTFLANPLILFKVWEGGMSFHGGLLGVLIACGLWTRRHRLHFFDVMDFVAPLVPLGLGFGRLGNFVGGELWGKFTQAGWGVIFPHAPELADWPPAQLQAQYAAGALDRFARHPSQLYEAALEGVVMFVVLWTFSMKPRARYAVSGLFALLYGVFRFIVEFVRVPDAPLGYLAFNWLTMGQILSLPLIGVGLVLLALSRRAPVLQPVVPAAAGVEAAK

SEQ ID NO: 81920 - DNA, 906 bp, Xylella fastidiosa
  CDS (1)..(906): transl_table=11
atgatttatctccacgctatcgatccgattgctttctcacttggtccggtgaaggtgcattggtatggcttgatgtatttggcaagttttggggcggcgtggtgcttgggacgccaacgcatccaggccgggcgtttgcttggtgtcaacatggatggtttttccgacctgttgttctacgcgatgatgggtgtggtgttgggtggccgtgtgggttacatgctgttctatgcgttccatgacttcttgcaagaaccattgctgctgtttcgagtgtgggaagggggcatgagctttcatggaggtttgattggcgtcctactggcagtcgcttggtggagtcggcgtcatcgcctgcagatgttcgatgtgcttgatttcggcgcaccactggtccccgtgggcttgggttttggtcggcttggcaacttcatcggcggtgagctttggggcaagctcacccacaatggctggggagtaattttcccgcgtgctccgctgagcgatgtgcctgctgggcagcttgcgatgcaggatgtgatgaattttgtgcagatccaagagcattatgccgctggacttctgggtcactatgccaggcatccctcgcagctgtatgaagcgttcctggaggggctggtgatgttcatagtgctatggctattttcgcgcaaaccacgtccacgttatgcggtgtctggattattcgcgctgttgtacggtgtgtttcgtttcttggtcgagtttgtgcgtatgccagacaatggtgtctatgtagcgttcggatggctgactcgcggccagatcttaagcttgccgttgatcgtgattggattgttcctgttctggttgtcgtgccgctcaccagtattacagccagtgcctgcccctgaggtcgctaagtga

SEQ ID NO: 81921 - protein, 301 aa, Xylella fastidiosa
MIYLHAIDPIAFSLGPVKVHWYGLMYLASFGAAWCLGRQRIQAGRLLGVNMDGFSDLLFYAMMGVVLGGRVGYMLFYAFHDFLQEPLLLFRVWEGGMSFHGGLIGVLLAVAWWSRRHRLQMFDVLDFGAPLVPVGLGFGRLGNFIGGELWGKLTHNGWGVIFPRAPLSDVPAGQLAMQDVMNFVQIQEHYAAGLLGHYARHPSQLYEAFLEGLVMFIVLWLFSRKPRPRYAVSGLFALLYGVFRFLVEFVRMPDNGVYVAFGWLTRGQILSLPLIVIGLFLFWLSCRSPVLQPVPAPEVAK

SEQ ID NO: 81922 - DNA, 906 bp, Xylella fastidiosa
  CDS (1)..(906): transl_table=11
atgatttatctccacgctatcgatccgattgctttctcgcttggtccggtgaaggtgcattggtatggcttgatgtatctggcaggttttggtgcggcgtggtgcttgggacgccaacgcatccaggccgggcgtttgcttggtgtcaacatagatggtttttccgacctgttgttctacgcgatgatgggtgtggtgttgggtggccgtgtgggttacatgctgttctatgcgttccatgacttcttgcaagaaccattgctgctgtttcgggtgtgggaagggggcatgagctttcatggaggtttgattggggtcctactggcagtcgcttggtggagccggcgtcagcgcatgcatatgttcgatgtggttgatttttgcgcacccctggtcccagtgggcttgggttttggtcggcttggcaacttcatcggcggtgagctttggggcaagctcacacacaatggctggggagtaattttcccgcgtgctccgctgagcgatgtgcctgctgggcagcttgcgatgcaggatgtgataaattttgtgcagatccaagagcattatgccgctggacttttgggtcactatgccaggcatccctcgcagctgtatgaagcgttcctggaggggctggtgatgttcatagtgctatggctattttcgcgcaaaccacgtccacgttatgcggtgtctggattattcgcgttgttgtacggtgtgtttcgtttcttggtcgagtttgtgcgtatgccagacaatggtgtctatgtagcgttcggatggctgactcgcggccagatcttaagcttgccgttgatcgtgattggattgttcctgttctggttgtcgtgccgctcaccagtattacagccagtgcctgcccctgaggtcgctaagtga

SEQ ID NO: 81923 - protein, 301 aa, Xylella fastidiosa
MIYLHAIDPIAFSLGPVKVHWYGLMYLAGFGAAWCLGRQRIQAGRLLGVNIDGFSDLLFYAMMGVVLGGRVGYMLFYAFHDFLQEPLLLFRVWEGGMSFHGGLIGVLLAVAWWSRRQRMHMFDVVDFCAPLVPVGLGFGRLGNFIGGELWGKLTHNGWGVIFPRAPLSDVPAGQLAMQDVINFVQIQEHYAAGLLGHYARHPSQLYEAFLEGLVMFIVLWLFSRKPRPRYAVSGLFALLYGVFRFLVEFVRMPDNGVYVAFGWLTRGQILSLPLIVIGLFLFWLSCRSPVLQPVPAPEVAK

SEQ ID NO: 81924 - DNA, 873 bp, Yersinia pestis
  CDS (1)..(873): transl_table=11
atgagcaatagctatctggcgtttcctaaatttgatccggtcattttctcaattggtccggtttccctccattggtacggcctaatgtatttggtgggcttcgtgtttgcgatgtggctcgctgtccgtcgtgcgaataagcctggtagtggttggaccaaagaagaagtcgaaaacctgctgtacgctggtttccttggcgtctttatcggtggtcgcgtgggttatgttctgttctataacttgccgatgttccttgataacccactttatttgtttaaagtatgggatggcggtatgtcattccatggcggtttgattggtgtcatttgtgtcatgctatggtttgcccgccgaaccaaacgcaatttcttccaggttgctgattttattgccccgctgatcccttttggtttgggcgcagggcgtctggggaattttatcaatgccgaactttggggccgtgtcactaccgataccccgtgggcgatgttattcccaacttcccgcaataccgatatcgccatcgtggccgctgatcctgctaaatggcaggcgatatttaatcaatacggtgtcttgccgcgtcacccctcgcaactgtacgaaatgatcctcgaaggggtggtgctatttatcatcctgaacgtgtttatccgtaagccacgtcccatgggcagtgtctctgggctgttcttgattggttatggtaccttccgcatcattgtggagtgcttccgccaaccagacgaacaactcggcttgttcgagggcatgatcagcatggggcagatattgtctgtgcctatgattctggccggtattattatgatgatttgggcatatcgccgtcctacgcaaaaactttcgtga

SEQ ID NO: 81925 - protein, 290 aa, Yersinia pestis
MSNSYLAFPKFDPVIFSIGPVSLHWYGLMYLVGFVFAMWLAVRRANKPGSGWTKEEVENLLYAGFLGVFIGGRVGYVLFYNLPMFLDNPLYLFKVWDGGMSFHGGLIGVICVMLWFARRTKRNFFQVADFIAPLIPFGLGAGRLGNFINAELWGRVTTDTPWAMLFPTSRNTDIAIVAADPAKWQAIFNQYGVLPRHPSQLYEMILEGVVLFIILNVFIRKPRPMGSVSGLFLIGYGTFRIIVECFRQPDEQLGLFEGMISMGQILSVPMILAGIIMMIWAYRRPTQKLS

SEQ ID NO: 81926 - DNA, 834 bp, Zymomonas mobilis
  CDS (1)..(834): transl_table=11
atgaaaagcgttatccattttgatgccttgggtttatctccgatcgcttttgatcttggggtatggcatctttttggattaacccttcatcccctgatccactggtatgctctggcctatatcaccggcattcttttggcatggcgttatgtgctattccttttaaaacagcccggtacacccatgaaaccggaacaaacggatgatctggttttctggtcaaccttgggcatacttgtgggcggcaggctcgcctatgtccttttttatcaacccgctattctcgaaaatcctctggaaattttcaaattatgggaaggcggtatgtcctatcacggcggtatgataggcgtttttctggcaatctggtgggtcaaaaccacaaaccacctcagctggcttagaatagctgattatatcggctgcgcagcccccatcggtcttttccttggtcggctggctaatttcgtcaatggggaattatggggacgacccagtacaatgccttgggcggttattttccctcaagccggcgcgctgccccgccatcccagccaactttacgaggcaggattagaaggtattttgcttttcgcttttctgaattaccaattttttgccacaaaagcccgcctacatccggggaaactcgctggattttttctggttggttacgggttatcccgctttattgttgaatggtttagagaacccgatgtccagctaggcaccttatcttggggactcaccatgggacaaacactcaccattccgatggttattgctggtctctggctcatcatcacgtcaaaaaaacgggaaatcagcctataa

SEQ ID NO: 81927 - protein, 277 aa, Zymomonas mobilis
MKSVIHFDALGLSPIAFDLGVWHLFGLTLHPLIHWYALAYITGILLAWRYVLFLLKQPGTPMKPEQTDDLVFWSTLGILVGGRLAYVLFYQPAILENPLEIFKLWEGGMSYHGGMIGVFLAIWWVKTTNHLSWLRIADYIGCAAPIGLFLGRLANFVNGELWGRPSTMPWAVIFPQAGALPRHPSQLYEAGLEGILLFAFLNYQFFATKARLHPGKLAGFFLVGYGLSRFIVEWFREPDVQLGTLSWGLTMGQTLTIPMVIAGLWLIITSKKREISL

SEQ ID NO: 81928 - DNA, 25 bp, Artificial sequence
  primer
atgaccagtagctatctgcattttc

SEQ ID NO: 81929 - DNA, 24 bp, Artificial sequence
  primer
ttaggaaacgtgttgctgtgggct

SEQ ID NO: 81930 - protein, 412 aa, Artificial sequence
  consensus sequence
  Variant (2)..(10): Xaa in position 2 to 10 is any amino acid
  Variant (11)..(22): Xaa in position 11 to 22 is any or no amino acid
  Variant (25)..(25): Xaa in position 25 is any amino acid
  Variant (27)..(27): Xaa in position 27 is any amino acid
  Variant (29)..(59): Xaa in position 29 to 59 is any amino acid
  Variant (60)..(73): Xaa in position 60 to 73 is any or no amino acid
  Variant (75)..(77): Xaa in position 75 to 77 is any amino acid
  Variant (81)..(81): Xaa in position 81 is any amino acid
  Variant (84)..(84): Xaa in position 84 is any amino acid
  Variant (88)..(94): Xaa in position 88 to 94 is any amino acid
  Variant (95)..(107): Xaa in position 95 to 107 is any or no amino acid
  Variant (109)..(112): Xaa in position 109 to 112 is any amino acid
  Variant (113)..(115): Xaa in position 113 to 115 is any or no amino acid
  Variant (117)..(117): Xaa in position 117 is any amino acid
  Variant (118)..(119): Xaa in position 118 to 119 is any or no amino acid
  Variant (121)..(126): Xaa in position 121 to 126 is any amino acid
  Variant (127)..(128): Xaa in position 127 to 128 is any or no amino acid
  Variant (131)..(131): Xaa in position 131 is any amino acid
  Variant (136)..(137): Xaa in position 136 to 137 is any amino acid
  Variant (139)..(158): Xaa in position 139 to 158 is any amino acid
  Variant (159)..(164): Xaa in position 159 to 164 is any or no amino acid
  Variant (166)..(171): Xaa in position 166 to 171 is any amino acid
  Variant (173)..(173): Xaa in position 173 is any amino acid
  Variant (175)..(177): Xaa in position 175 to 177 is any amino acid
  Variant (180)..(181): Xaa in position 180 to 181 is any amino acid
  Variant (184)..(184): Xaa in position 184 is any amino acid
  Variant (186)..(186): Xaa in position 186 is any amino acid
  Variant (187)..(187): Xaa in position 187 is any or no amino acid
  Variant (190)..(190): Xaa in position 190 is any amino acid
  Variant (192)..(197): Xaa in position 192 to 197 is any amino acid
  Variant (198)..(235): Xaa in position 198 to 235 is any or no amino acid
  Variant (238)..(241): Xaa in position 238 to 241 is any amino acid
  Variant (242)..(313): Xaa in position 242 to 313 is any or no amino acid
  Variant (321)..(324): Xaa in position 321 to 324 is any amino acid
  Variant (327)..(347): Xaa in position 327 to 347 is any amino acid
  Variant (348)..(354): Xaa in position 348 to 354 is any or no amino acid
  Variant (356)..(358): Xaa in position 356 to 358 is any amino acid
  Variant (360)..(362): Xaa in position 360 to 362 is any amino acid
  Variant (364)..(366): Xaa in position 364 to 366 is any amino acid
  Variant (367)..(367): Xaa in position 367 is any or no amino acid
  Variant (369)..(370): Xaa in position 369 to 370 is any amino acid
  Variant (372)..(372): Xaa in position 372 is any amino acid
  Variant (375)..(382): Xaa in position 375 to 382 is any amino acid
  Variant (383)..(400): Xaa in position 383 to 400 is any or no amino acid
  Variant (403)..(403): Xaa in position 403 is any amino acid
  Variant (405)..(406): Xaa in position 405 to 406 is any amino acid
  Variant (408)..(411): Xaa in position 408 to 411 is any amino acid
PXXXXXXXXXXXXXXXXXXXXXWYXLXYXXXXXXXXXXXXXXXXXXXXXXXXXXXXXXXXXXXXXXXXXXXXXGXXXGGRXGYXLFYXXXXXXXXXXXXXXXXXXXXPXXXXXXXWXXXGXXXXXXXXGMXFHGGXXGXXXXXXXXXXXXXXXXXXXXXXXXXXDXXXXXXPXGXXXGRXXNFXNXXELXGXXXXXXXXXXXXXXXXXXXXXXXXXXXXXXXXXXXXXXXXXXXXFPXXXXXXXXXXXXXXXXXXXXXXXXXXXXXXXXXXXXXXXXXXXXXXXXXXXXXXXXXXXXXXXXXXXXXXXXXXXXRHPSQLYXXXXEGXXXXXXXXXXXXXXXXXXXXXXXXXXXXFXXXYXXXRXXXXEXXRXPDXXXXXXXXXXXXXXXXXXXXXXXXXXGQXLXXPXXXXG

SEQ ID NO: 81931 - protein, 22 aa, Artificial sequence
  protein pattern
  Variant (2)..(2): Xaa in position 2 is any amino acid
  Variant (3)..(4): Xaa in position 3 to 4 is any or no amino acid
  Variant (6)..(7): Xaa in position 6 to 7 is any or no amino acid
  Variant (9)..(9): Xaa in position 9 is any amino acid
  Variant (10)..(10): Xaa in position 10 is Ala or Gly
  Variant (13)..(13): Xaa in position 13 is Phe, Ile, Leu, Met or Val
  Variant (15)..(15): Xaa in position 15 is Ala, Asp, Gly, Asn, Gln or Ser
  Variant (17)..(17): Xaa in position 17 is Ala, Ile or Leu
  Variant (18)..(18): Xaa in position 18 is any amino acid
  Variant (20)..(21): Xaa in position 20 to 21 is any amino acid
  Variant (22)..(22): Xaa in position 22 is Ala, Cys, Asp, Asn, Ser, Thr or Val
GXXXGXXRXXNFXNXEXXGXXX

SEQ ID NO: 81932 - protein, 12 aa, Artificial sequence
  protein pattern
  Variant (2)..(2): Xaa in position 2 is Ile or Pro
  Variant (5)..(5): Xaa in position 5 is Ile, Leu or Val
  Variant (7)..(10): Xaa in position 7 to 10 is any amino acid
HXSQXYXXXXEG

SEQ ID NO: 81933 - protein, 14 aa, Artificial sequence
  protein pattern
  Variant (3)..(3): Xaa in position 3 is Ala or Ser
  Variant (7)..(7): Xaa in position 7 is Ala or Gly
  Variant (8)..(9): Xaa in position 8 to 9 is any amino acid
  Variant (11)..(13): Xaa in position 11 to 13 is any amino acid
  Variant (14)..(14): Xaa in position 14 is Ala, Gly, Ser, Thr or Val
GMXFHGXXXGXXXX

SEQ ID NO: 81934 - protein, 15 aa, Artificial sequence
  protein pattern
  Variant (2)..(2): Xaa in position 2 is Ala or Gly
  Variant (3)..(4): Xaa in position 3 to 4 is any amino acid
  Variant (6)..(8): Xaa in position 6 to 8 is any amino acid
  Variant (10)..(11): Xaa in position 10 to 11 is any amino acid
  Variant (13)..(13): Xaa in position 13 is any amino acid
YXXXRXXXEXXRXPD

SEQ ID NO: 81935 - DNA, 936 bp, Escherichia coli
  CDS (1)..(936): transl_table=11
atggccgccgttaacttacgtcatattgaaatttttcatgcggtaatgaccgccggaagcctgactgaggcggcacacctgctacacacctcacagccaaccgtcagccgcgaacttgcgcgctttgagaaggtgatcgggctgaaattgtttgagcgcgtacgtgggcgattacatcctaccgtgcaaggactgcgtctgtttgaagaagtgcaacgatcctggtacggactggatcgcattgtcagcgccgcagaaagtctgcgcgagtttcgccagggagaactgtctattgcctgcctgccggtcttttcgcaatcttttttaccgcagctcctgcaaccctttctggcacgttatcccgatgtcagcttaaatatcgtgccccaggaatcaccgctacttgaagagtggctctcggcccagcgtcatgatttaggactcactgaaacgctccatacgcctgcgggaacagaacgtaccgaattactctctttagatgaagtgtgtgtgttacctccgggtcatccgctggcggtaaaaaaggtattaacgccggatgattttcagggtgagaactacatcagcctttcccgtactgacagctatcgccagttgctggatcagctatttactgaacatcaggttaaacgacgcatgatcgtagaaacccacagcgccgcgtcagtctgcgcaatggtacgggcgggggtaggtatttcggtggttaacccgctcaccgcactagattatgcggcaagcggtttagtggtgcggcggttcagtattgcggttccgttcaccgtcagcctgatccgccccctgcaccgcccgtcatcagcgctggttcaggcgtttagtgggcatttacaagcggggttaccgaaactggtcacttctcttgacgctattttgtcgtcagctacgacagcataa

SEQ ID NO: 81936 - protein, 311 aa, Escherichia coli
MAAVNLRHIEIFHAVMTAGSLTEAAHLLHTSQPTVSRELARFEKVIGLKLFERVRGRLHPTVQGLRLFEEVQRSWYGLDRIVSAAESLREFRQGELSIACLPVFSQSFLPQLLQPFLARYPDVSLNIVPQESPLLEEWLSAQRHDLGLTETLHTPAGTERTELLSLDEVCVLPPGHPLAVKKVLTPDDFQGENYISLSRTDSYRQLLDQLFTEHQVKRRMIVETHSAASVCAMVRAGVGISVVNPLTALDYAASGLVVRRFSIAVPFTVSLIRPLHRPSSALVQAFSGHLQAGLPKLVTSLDAILSSATTA

SEQ ID NO: 81937 - DNA, 936 bp, Agrobacterium tumefaciens
  CDS (1)..(936): transl_table=11
atgcgcccatgtgtatttgttatggagaaagcaatgattcaatcgcgtcagttagaagcgttccgggcagtcatgctgacaggaggtatgacgtcagcagcgaatctggtgaggatcacgcagcccgcgatcagccggctgatcagggatctcgaagaggaaattgggatcagcctcttcgaaagaacgggcaaccggttacgtcctacgcgggaggccggtattctgttcaaggaagtgtcgcgacatttcaacgggattcagcacatcgacaaagtcgcggctgaactgaagaagtctcatatggggtccctaagggtcgcctgttatacagcgccggctctgagttttatgtccggcgtcattcagacgttcatcgccgatcggcccgacgtgtcggtctacctcgatacagttccttcccagacggtcctcgaattggtctcgctccagcactacgatctcggaatatcgatattggctggcgactatcctggtctcaccaccgaacctgtcccttcctttcgtgcggtctgcctgctgccgccggggcatcgtctcgaagacaaggaaactgttcatgcgacggaccttgaaggagagtcattgatttgcctctctccagtgagccttctacggatgcaaacggacgccgcactggacagctgcggcgtccactgtaatcgcaggatagaaagtagtctggcgctgaatctctgcgatctggtaagcaggggaatgggggttggtatcgtcgaccccttcactgccgactactacagtgcaaatccggttattcagcgctcctttgatccggttgtcccctaccattttgctatagttcttccgaccgacagcccaccgccgcgcttggttagcgagttccgggcagcgttgcttgatgctttgaaagccttgccctatgaaaccatttga

SEQ ID NO: 81938 - protein, 311 aa, Agrobacterium tumefaciens
MRPCVFVMEKAMIQSRQLEAFRAVMLTGGMTSAANLVRITQPAISRLIRDLEEEIGISLFERTGNRLRPTREAGILFKEVSRHFNGIQHIDKVAAELKKSHMGSLRVACYTAPALSFMSGVIQTFIADRPDVSVYLDTVPSQTVLELVSLQHYDLGISILAGDYPGLTTEPVPSFRAVCLLPPGHRLEDKETVHATDLEGESLICLSPVSLLRMQTDAALDSCGVHCNRRIESSLALNLCDLVSRGMGVGIVDPFTADYYSANPVIQRSFDPVVPYHFAIVLPTDSPPPRLVSEFRAALLDALKALPYETI

SEQ ID NO: 81939 - DNA, 936 bp, Escherichia coli O157:H7 EDL933
  CDS (1)..(936): transl_table=11
  misc_feature (481)..(481): m is a or c
atggccgccgttaacttacgtcatattgaaatttttcatgcggtaatgaccgccggaagcctgactgaggcagcacacctgctacacacctcacagccaaccgtcagccgcgaactggcgcgctttgagaaggtgatcgggctgaaattgtttgagcgcgtacgtggacgattacatcctaccgtgcaaggactgcgtctgtttgaagaagtgcaacgatcctggtacggactggatcgcattgtcagcgccgcagaaagtctgcgcgagtttcgccagggagaactgtctattgcctgcctgccggtcttttcgcaatcttttttaccgcagctcctgcaaccctttctggtacgttatcccgatgtcagcttaaatatcgtgccccaggaatcaccgctacttgaagagtggctctcggcccagcgtcatgatttaggactcactgagacactccatacgcctgcgggaacagaacgtmccgaattactctctttagatgaattgtgtgtgttacctccgggtcatccgctggcggtaaaaaaggtattaacgccggatgattttcagggtgagaactacatcagcctttcccgtactgacagctatcgccagttgctggatcagctatttactgaacatcaggttaaacgacgcatgatcgtagaaacccacagcgccgcgtcagtctgcgcaatggtacgggcgggggtaggtgtttcggtggttaacccgctcaccgcactggattatgcggcaagcggtttagtggtgcggcggttcagtattgcggttccgttcaccgtcagcctgatccgccccctgcaccgcccgtcatcagcgctggtgcaggcgtttagtgagcatttacaagcggggttaccgaaactggtcacttctcttgacgctattttgtcgtcagctacgacagcataa

SEQ ID NO: 81940 - protein, 311 aa, Escherichia coli O157:H7 EDL933
  misc_feature (161)..(161): The Xaa at location 161 stands for Pro, or Thr.
MAAVNLRHIEIFHAVMTAGSLTEAAHLLHTSQPTVSRELARFEKVIGLKLFERVRGRLHPTVQGLRLFEEVQRSWYGLDRIVSAAESLREFRQGELSIACLPVFSQSFLPQLLQPFLVRYPDVSLNIVPQESPLLEEWLSAQRHDLGLTETLHTPAGTERXELLSLDELCVLPPGHPLAVKKVLTPDDFQGENYISLSRTDSYRQLLDQLFTEHQVKRRMIVETHSAASVCAMVRAGVGVSVVNPLTALDYAASGLVVRRFSIAVPFTVSLIRPLHRPSSALVQAFSEHLQAGLPKLVTSLDAILSSATTA

SEQ ID NO: 81941 - DNA, 915 bp, Agrobacterium tumefaciens str. C58
  CDS (1)..(915): transl_table=11
atggagaaagcaatgattcaatcgcgtcagttagaagcgttccgggcagtcatgctgacaggaggtatgacgtcagcagcgaatctggtgaggatcacgcagcccgcgatcagccggctgatcagggatctcgaagaggaaattgggatcagcctcttcgaaagaacgggcaaccggttacgtcctacgcgggaggccggtattctgttcaaggaagtgtcgcgacatttcaacgggattcagcacatcgacaaagtcgcggctgaactgaagaagtctcatatggggtccctaagggtcgcctgttatacagcgccagctctgagttttatgtccggcgtcattcagacgttcatcgccgatcggcccgacgtgtcggtctacctcgacacagttccttcccagacggtcctcgaattggtctcgctccagcactacgatctcggaatatcgatattggctggcgactatcctggtctcaccaccgaacctgtcccttcctttcgtgcggtctgcctgctgccgccggggcatcgtctcgaagacaaggaaactgttcatgcgacggaccttgaaggagagtcattgatttgcctctctccagtgagccttctacggatgcaaacggacgccgcactggacagctgcggcgtccactgtaatcgcaggatagaaagtagtctggcgctgaatctctgcgatctggtaagcaggggaatgggggttggtatcgtcgaccccttcactgccgactactacagtgcaaatccggttattcagcgctcctttgatccggttgtcccctaccattttgctatagttcttccgaccgacagcccaccgccgcgcttggttagcgagttccgggcagcgttgcttgatgctttgaaagccttgccctatgaaaccatttga

SEQ ID NO: 81942 - protein, 304 aa, Agrobacterium tumefaciens str. C58
MEKAMIQSRQLEAFRAVMLTGGMTSAANLVRITQPAISRLIRDLEEEIGISLFERTGNRLRPTREAGILFKEVSRHFNGIQHIDKVAAELKKSHMGSLRVACYTAPALSFMSGVIQTFIADRPDVSVYLDTVPSQTVLELVSLQHYDLGISILAGDYPGLTTEPVPSFRAVCLLPPGHRLEDKETVHATDLEGESLICLSPVSLLRMQTDAALDSCGVHCNRRIESSLALNLCDLVSRGMGVGIVDPFTADYYSANPVIQRSFDPVVPYHFAIVLPTDSPPPRLVSEFRAALLDALKALPYETI

SEQ ID NO: 81943 - DNA, 942 bp, Yersinia pestis CO92
  CDS (1)..(942): transl_table=11
atgcctgcaatttccttacgacaaatcgagatttttcatggcgtcatgaccacgggcaacctgactgaagcggcgttgttactgcaaacatcacaaccgactgtcagccgcgaattggcccgctttgagcaattggtgcaactcacgctttttgaacgggtacgtggccgcctttatcctaccgtgcaagggctacggctattcgaagaggttcagcgttcatattatggtttggatcgtatcaaacaggcggctgaaggtatccgccaatttcaacatgcccaactctccattgcctgcctgcccgtcttttctcaatcgttgctacccgcggtatgtaaaccctttattgaccgctatccagaggtcagcctaaatgtcattccgcaggagtcacctttattggaggagtggttttcagcccagcgtcatgacttaggactcacagaaaatatccaaacaccggcgggcacccagcgccataccctgatgacggtcaatgaagtttgcgtattacctgccgatcatccgttgcgggagaaatcggtgctgacaccacaggattttaacggggaaaattttgtcagcctgtcagtcaccgacagttaccgtcagctattggataacctgtttgcggaggaaaaagtcacccgccgattagtcatggagacccacagtgcggcatcggtttgcgccatggtgcgtgaaggggtgggggtatcgatagtcaacccccttaccgcactggattacctgagtaaaggccgtggttcgggggtttgtgtacggccattcagtgtcgacattccttttacggttagcttaattcagccattacatcgcccatcatccaccttggtcgatacgtttgtcgggcacttaaaacagcagacaacgcttttccaacagcgtctggcaacagtcattgcccctgcgtgctaa

SEQ ID NO: 81944 - protein, 313 aa, Yersinia pestis CO92
MPAISLRQIEIFHGVMTTGNLTEAALLLQTSQPTVSRELARFEQLVQLTLFERVRGRLYPTVQGLRLFEEVQRSYYGLDRIKQAAEGIRQFQHAQLSIACLPVFSQSLLPAVCKPFIDRYPEVSLNVIPQESPLLEEWFSAQRHDLGLTENIQTPAGTQRHTLMTVNEVCVLPADHPLREKSVLTPQDFNGENFVSLSVTDSYRQLLDNLFAEEKVTRRLVMETHSAASVCAMVREGVGVSIVNPLTALDYLSKGRGSGVCVRPFSVDIPFTVSLIQPLHRPSSTLVDTFVGHLKQQTTLFQQRLATVIAPAC

SEQ ID NO: 81945 - DNA, 987 bp, Yersinia pestis KIM
  CDS (1)..(987): transl_table=11
atgatatgggttaaattgatcagttcgcgtttcaggagtgcgagaatgcctgcaatttccttacgacaaatcgagatttttcatggcgtcatgaccacgggcaacctgactgaagcggcgttgttactgcaaacatcacaaccgactgtcagccgcgaattggcccgctttgagcaattggtgcaactcacgctttttgaacgggtacgtggccgcctttatcctaccgtgcaagggctacggctattcgaagaggttcagcgttcatattatggtttggatcgtatcaaacaggcggctgaaggtatccgccaatttcaacatgcccaactctccattgcctgcctgcccgtcttttctcaatcgttgctacccgcggtatgtaaaccctttattgaccgctatccagaggtcagcctaaatgtcattccgcaggagtcacctttattggaggagtggctttcagcccagcgtcatgacttaggactcacagaaaatatccaaacaccggcgggcacccagcgccataccctgatgacggtcaatgaagtttgcgtattacctgccgatcatccgttgcgggagaaatcggtgctgacaccacaggattttaacggggaaaattttgtcagcctgtcagtcaccgacagttaccgtcagctattggataacctgtttgcggaggaaaaagtcacccgccgattagtcatggagacccacagtgcggcatcggtttgcgccatggtgcgtgaaggggtgggggtatcgatagtcaacccccttaccgcactggattacctgagtaaaggccgtggttcgggggtttgtgtacggccattcagtgtcgacattccttttacggttagcttaattcagccattacatcgcccatcatccaccttggtcgatacgtttgtcgggcacttaaaacagcagacaacgcttttccaacagcgtctggcaacagtcattgcccctgcgtgctaa

SEQ ID NO: 81946 - protein, 328 aa, Yersinia pestis KIM
MIWVKLISSRFRSARMPAISLRQIEIFHGVMTTGNLTEAALLLQTSQPTVSRELARFEQLVQLTLFERVRGRLYPTVQGLRLFEEVQRSYYGLDRIKQAAEGIRQFQHAQLSIACLPVFSQSLLPAVCKPFIDRYPEVSLNVIPQESPLLEEWLSAQRHDLGLTENIQTPAGTQRHTLMTVNEVCVLPADHPLREKSVLTPQDFNGENFVSLSVTDSYRQLLDNLFAEEKVTRRLVMETHSAASVCAMVREGVGVSIVNPLTALDYLSKGRGSGVCVRPFSVDIPFTVSLIQPLHRPSSTLVDTFVGHLKQQTTLFQQRLATVIAPAC

SEQ ID NO: 81947 - DNA, 906 bp, Pseudomonas putida KT2440
  CDS (1)..(906): transl_table=11
gtgaaactgtccgtccgccacatcgaagtgttccgcgccatcatggccgctggcagtgtcacgggggcggcgcgcctgctgttcacctcgcagccgaccgtcagccgcgaactggcgcggctggagcaggtgactggcctgaacctgttcgagcgcgagggcgggcgcctggtggcgacggcccaggcgctgctgttgatcgaagaggtcgagcgggcctacgtcgggctggagcggatcgatcgctttgcccaggccatccgcaacttcgagcagggccggctggccatcacctgcctgccgctgttctcgcaaaccttgttgcccaaggcttgccagcgctttcaccagcagcacagtggcgtgagcgtgagcattctggcgcaggagtcgccgttgctggaggagtcactggttgcccagcagcatgaccttggcctgactgaagtcgaacagataccgcgcggcgcgtatggtgaattgctgttcagtgccaacatggtgtgcgtgttgcccgagcatcacccgctgcaggtgaaggctgaactggagctgagtgatttccatgaggtcgatttcattaacctggccagcctggatacctaccgccagcgtctggatcagcactttcgtgcagccggggttaaccgccgcacggtcatcgaaaccaccagtgccgcttcggtgtgcgccatggtcaggcaaggcctgggggtggcgatcatcaacccgctcagcgggctggaggcggcgcaaggcgggttgccgatccgcaggttacgggtatcggtgccctatcaggtgatgctcatacgcccggaccatcggccggcatcggcagcggtggagccgttttgcgaggcgttgcgggtgcaggccaaagaaatgcagcaggcgctggcctga

SEQ ID NO: 81948 - protein, 301 aa, Pseudomonas putida KT2440
MKLSVRHIEVFRAIMAAGSVTGAARLLFTSQPTVSRELARLEQVTGLNLFEREGGRLVATAQALLLIEEVERAYVGLERIDRFAQAIRNFEQGRLAITCLPLFSQTLLPKACQRFHQQHSGVSVSILAQESPLLEESLVAQQHDLGLTEVEQIPRGAYGELLFSANMVCVLPEHHPLQVKAELELSDFHEVDFINLASLDTYRQRLDQHFRAAGVNRRTVIETTSAASVCAMVRQGLGVAIINPLSGLEAAQGGLPIRRLRVSVPYQVMLIRPDHRPASAAVEPFCEALRVQAKEMQQALA

SEQ ID NO: 81949 - DNA, 933 bp, Pseudomonas putida KT2440
  CDS (1)..(933): transl_table=11
atgcaactaaaatttcggcacatagagatattcaaggcgatcatgatcactggaacggtcaccggcgctgcgcagttacttgagacgtcccagccaacgataagccgagagctctccaactttgaaagcagtatcggaatgatgctgttcgaacgccacaagggacgcctcaagcccacggctcaagggatggctttgcattccgagattctcaaggcctatgacggtctggcacgagtgagtgccgccgcgaaaatcataaaacttggactgcgcgagaaggtcagcgtcctcagcctgcctgtcctgtcacaaacgatcttgccggccagcctggcgcggttcatggagatctaccctgatatcaacctcagcctctcgactcacgactcgcccgatatcgaaccgctgatatccagccaagcgtacgacatcggtttgatcgagggcgtgagtgccccgatggggaccaccactgaacacttgacggatgtggatgaagtctgtgttcttccaccgggccatccactgtcagcgtttacccacatcgaccctcggcagttaagccaataccccttcattcacttggcaccgaatgacccttatcgacaccagctggacagtgtattcgcgcagttaggcgtttcgcgcagcagtatcattgaagtggataatgctgccactatctgtcagatggtgctgagcggtatcggcgtatcgatcattaatccgctcgtggccaatacctatgccagtcagggcctcaccatccggcgcctcacggtctcggtgcctttcagtatcagcctggttcgcccgcttcagcgtggggcctcgttagttgtcgaccatcttgtggaatgcatacgcagtacctcgcacgcgctatgtatgcaataccgctcggatatacgtctggctgaatccgtatag

SEQ ID NO: 81950 - protein, 310 aa, Pseudomonas putida KT2440
MQLKFRHIEIFKAIMITGTVTGAAQLLETSQPTISRELSNFESSIGMMLFERHKGRLKPTAQGMALHSEILKAYDGLARVSAAAKIIKLGLREKVSVLSLPVLSQTILPASLARFMEIYPDINLSLSTHDSPDIEPLISSQAYDIGLIEGVSAPMGTTTEHLTDVDEVCVLPPGHPLSAFTHIDPRQLSQYPFIHLAPNDPYRHQLDSVFAQLGVSRSSIIEVDNAATICQMVLSGIGVSIINPLVANTYASQGLTIRRLTVSVPFSISLVRPLQRGASLVVDHLVECIRSTSHALCMQYRSDIRLAESV

SEQ ID NO: 81951 - DNA, 936 bp, Pseudomonas syringae pv. tomato str. DC3000
  CDS (1)..(936): transl_table=11
atgtcagtaacgttgcgccacatagaagtgttccgagccgtcatgacgtcaggcagcgtgacggaagccgccaacatgctgaacacctctcagccgacggtaagccgcgagctggcgcgcttcgaattgctcactcagctcacattgttcgatcgcgtacgcgggcgactaaggcctacggcgcaggcgttgtcactgttcgaggaggtgcagcgggcctacttcgggttggggcgtattctgagcacggcggcgtcactgcgagagttcgagcacggccagttatccatcgcctgcctgccggtgttttcacagtcgttgttgccgaaagcgtgccaacgcttttttgcccagttccccaaagccagcatgagcatcacgccgcaggaatcaccgttgctggaagagtggctgtcggctcagcgctacgacctagggctgaccgaagtggcgagcgcgcctccgggcacagagctggtgccgttgatggttgtggacgaggtgtgtgtattgcccgtcggccatccgcttctggcaaaacaggtgctggcacccgaggactttgcctctaaacccttcatcagcctgtccagcctggacagctaccggcagcagatagacgagattttccgcctggcccaggtagagcggcagatggtgctggacacccacagtgccgcctcggtctgcgccatggtacgcgagcgaatcgggctggccatcgtcaacccgctcactgcgctggactttgtcgggcagggtctggagatccggccgtttacggcgtcgataccgttcacggtcagccttgtcaaaccgctgcaccgacctgcgtccaggctggtcgggctgtttgaagaagcattgcgtgagcaagcctcgatcgtcgaggcacgattggcggcgatcaatgtgccaatcgctgccgggccttga

SEQ ID NO: 81952 - protein, 311 aa, Pseudomonas syringae pv. tomato str. DC3000
MSVTLRHIEVFRAVMTSGSVTEAANMLNTSQPTVSRELARFELLTQLTLFDRVRGRLRPTAQALSLFEEVQRAYFGLGRILSTAASLREFEHGQLSIACLPVFSQSLLPKACQRFFAQFPKASMSITPQESPLLEEWLSAQRYDLGLTEVASAPPGTELVPLMVVDEVCVLPVGHPLLAKQVLAPEDFASKPFISLSSLDSYRQQIDEIFRLAQVERQMVLDTHSAASVCAMVRERIGLAIVNPLTALDFVGQGLEIRPFTASIPFTVSLVKPLHRPASRLVGLFEEALREQASIVEARLAAINVPIAAGP

SEQ ID NO: 81953 - DNA, 885 bp, Bordetella parapertussis 12822
  CDS (1)..(885): transl_table=11
atgaacgtgcgggcactcgaagccttccgcgccgtcatgcgcacgggctcgatgaccggcgcagcgcgcatcatccacacgacccagccgaacatcagccgcctggtttccatgctggaggccgagctcgacctgaagctgttcatccgcgaaggcaacaagctgcacgttaccgacgaaggcgccgccttcttcaaggaggtcgagcagcattacgccgggttgcgcgcgctcaaggacgcggcccgcaccatcaagcagctcggcggcggcaggctgcacatcgccgtcgcgccggcgctcagccacgggttcctggccagcgccgtgaccgcgttcacgcagcgccacccccgcgtcacgctgtccatacgcacctgtaactcgtacatggtcgaacagctggtgaactcccagctgtgcgacctgggcctggccgcgttcatcgggcacgtcaccgagcccggcctggagaccgaacgcatcgccagcatccgcggcgtgtgcctgctgccccaggcccaccggctggcctcgcgcgacgtgatccacgcgcgcgacctggagggcgagccgttcgtctcgatcgcgcgccagaacggcagccgcgaacacgtggacagcctgttcgaaaaggccaaggtcacgcgcaaaatcgaggtcgaggccgagaacgcgtccaccatctgccatctggtggcgcagggcctgggcgtgagcgtgctgaacgccgtcatcgccgaggacttccgctgccacggcctggtggtcagggagttccgcccggccatccatttccccatcaccctgcttcgatccagccaccggccccgcagcctgctggtggccgccttcatcgattgcctgggcgcagtgctcaactag

SEQ ID NO: 81954 - protein, 294 aa, Bordetella parapertussis 12822
MNVRALEAFRAVMRTGSMTGAARIIHTTQPNISRLVSMLEAELDLKLFIREGNKLHVTDEGAAFFKEVEQHYAGLRALKDAARTIKQLGGGRLHIAVAPALSHGFLASAVTAFTQRHPRVTLSIRTCNSYMVEQLVNSQLCDLGLAAFIGHVTEPGLETERIASIRGVCLLPQAHRLASRDVIHARDLEGEPFVSIARQNGSREHVDSLFEKAKVTRKIEVEAENASTICHLVAQGLGVSVLNAVIAEDFRCHGLVVREFRPAIHFPITLLRSSHRPRSLLVAAFIDCLGAVLN

SEQ ID NO: 81955 - DNA, 918 bp, Chromobacterium violaceum ATCC 12472
  CDS (1)..(918): transl_table=11
atgtccatcagcttgcgccatatcgaagtgttccgggcggtgatgacctgcggcagcgtcagcggcgccgcgcgtttgctgcacacgtcccagcctacggtcagccgcgagctggcgcgttgcgagcaattgctgggcatggcgctgttcgagcgcggccatggccgcttgcgtcccacccagcaggcgctgcagctgttcgccgaagtggagcgcagcttcgtcgggctggagcgcatcgtcgccagcgcggatgcgatccggcagttcgccggcggccaactggccgtcgcttgcctgccggtattcgcgcaggcgctgctgccgggggcctgcgccgatttcgtcgccgactttcccgacgtgggcgtggacatcagcccgcaggagtcgccgtggctggaggagtggctggccgcgcagcgcttcgacctgggactgaccgagcagcagcaggcgccggccggctgccagatgcagccgctgtggcagggcgacgagctatgcgtgctgccggcggggcatccgttggcggagaagcgcaggctggaggcgcgcgattttgacggtttgtccttcatcagcctggcggccagcgacagctaccggcagcaggtggacgcctggttggcgcgggagggcgtgtcgcgccgtttgcagctgtcgtgccacagcgcggcttcggtgtgcgaaatggtgaggctgggactgggcgtggccatcgtcaacccgctgacggcgctggccgaggcggagagggggctggcagtgcggccgctggcggagtcgataccgttttccgtgcagctggtgctgccgcaattccgtccggcatcgccgctgccggcgcgcttcatcgccgccttgcggcggcgcgtgtcggaactggatatcaggctgtcggctttgcgaggctga

SEQ ID NO: 81956 - protein, 305 aa, Chromobacterium violaceum ATCC 12472
MSISLRHIEVFRAVMTCGSVSGAARLLHTSQPTVSRELARCEQLLGMALFERGHGRLRPTQQALQLFAEVERSFVGLERIVASADAIRQFAGGQLAVACLPVFAQALLPGACADFVADFPDVGVDISPQESPWLEEWLAAQRFDLGLTEQQQAPAGCQMQPLWQGDELCVLPAGHPLAEKRRLEARDFDGLSFISLAASDSYRQQVDAWLAREGVSRRLQLSCHSAASVCEMVRLGLGVAIVNPLTALAEAERGLAVRPLAESIPFSVQLVLPQFRPASPLPARFIAALRRRVSELDIRLSALRG

SEQ ID NO: 81957 - DNA, 936 bp, Photorhabdus luminescens subsp. laumondii TTO1
  CDS (1)..(936): transl_table=11
atgccttcttgttcatggcgccatattgaaatcttccatgcagtaatgacgacaaaaaatctgacagaagcggctattttattacaaacatcacaaccaaccgtcagtcgtgaattagcacgattcgagcatctaataaaattcaaactatttgaccgagtaaaaggccgcctgcatccgacagcacaaggattacgcctttttgaagaagttcagcgctcttattatggactcgaaagaataatgaatgcggctgacaatatacgtaaatttcaacatgctcagctttccattgcctgcctgccagtattttctcaatcactattaccgaaagtttgccatcacttcatccgtcaatatcctgagactaatttaacaatcattccacaggaatcaccgctactggaagagtggctttcagctcaacgccatgatctgggtttgacagaacatttgcagacaccaccgggtacacagagagaaacactgatcacgctgaatgaaatttgcgtattgcccgctgctcaccctctcagtcataagccgctattgactccagaagatttcagcgaacaaaatttcatcagcctttcaataacggatagctaccgtcagctcattgatggaatattcgcagaacaccatattcgccgtcgcatgattatggaaactcacagtgctgcatcagtatgtgcaatggtgcgcgaaggcattggtatttcgattgtcaacccactgaccgtactcgattatctagagagtcacggcaaatctgaaatatgcgctcgcccatttagtattaacattccttttactgtcagcctgataaaacccattcaccgcccttcttctgccccagttgatacttttattgaacacctaaaagcacaaattgctctgtttcctcagaaactaaagtcagcttttcagcattag

SEQ ID NO: 81958 - protein, 311 aa, Photorhabdus luminescens subsp. laumondii TTO1
MPSCSWRHIEIFHAVMTTKNLTEAAILLQTSQPTVSRELARFEHLIKFKLFDRVKGRLHPTAQGLRLFEEVQRSYYGLERIMNAADNIRKFQHAQLSIACLPVFSQSLLPKVCHHFIRQYPETNLTIIPQESPLLEEWLSAQRHDLGLTEHLQTPPGTQRETLITLNEICVLPAAHPLSHKPLLTPEDFSEQNFISLSITDSYRQLIDGIFAEHHIRRRMIMETHSAASVCAMVREGIGISIVNPLTVLDYLESHGKSEICARPFSINIPFTVSLIKPIHRPSSAPVDTFIEHLKAQIALFPQKLKSAFQH

SEQ ID NO: 81959 - DNA, 924 bp, Erwinia carotovora subsp. atroseptica SCRI1043
  CDS (1)..(924): transl_table=11
atggcagcaatatccttacgacacatcgagattttccatgcggtcatgaccacgggtaatttgacggaagcagccgcgttgctgaacacgtcgcagccgaccgttagccgcgagctggcgcgctttgagaaactgattcagatgacgctgttcgagcggctgcgcggcaggctttacccgacagcacaggggttacagctgtttgaagaagtgcagcgttcttattatggattagatcggatcatcaacgccgccagcgatattcgccgttttcagcaggctcagctttctatcgcctgtctgcccgtgttctcacagtcgctactgcctgatgcctgcaagccgctgctagtgcgctacccactgcttaatctgcacattattccgcaggattcgccactgctggaagagtggctgtccgcgcagcgtcacgatctaggcttaacggaaaatagcctcacgccagccggtacagaacgacaaacattgatgctgttaaatgaagtctgcgtgctgcctgtcgggcatccgctggcgcaaaaatccgtgcttacgccgcaggattttgccaatgaaccttttattagcctgtcgagcgccgacagctatcgccagttgctagacacgctgtttcaggaacagggcgtgtcgcgccggatggtgctggaaacccacagcgcagcgtcggtgtgtgcaatggtacgggcgggtattgggctttcgatcgtcaatccactcactgcgttggattacgcggtgtctggcgtggtcgtgcggccttttagtattgatgtgccttttaccgtcagcctgattcgtcctctgcaccgcccggcttcgtcactggtcgatactgtcattgatcaacttaaacagtacgccgcaggcgtgccttcgcgtctagaacaggttttgcagcagtga

SEQ ID NO: 81960 - protein, 307 aa, Erwinia carotovora subsp. atroseptica SCRI1043
MAAISLRHIEIFHAVMTTGNLTEAAALLNTSQPTVSRELARFEKLIQMTLFERLRGRLYPTAQGLQLFEEVQRSYYGLDRIINAASDIRRFQQAQLSIACLPVFSQSLLPDACKPLLVRYPLLNLHIIPQDSPLLEEWLSAQRHDLGLTENSLTPAGTERQTLMLLNEVCVLPVGHPLAQKSVLTPQDFANEPFISLSSADSYRQLLDTLFQEQGVSRRMVLETHSAASVCAMVRAGIGLSIVNPLTALDYAVSGVVVRPFSIDVPFTVSLIRPLHRPASSLVDTVIDQLKQYAAGVPSRLEQVLQQ

SEQ ID NO: 81961 - DNA, 945 bp, Pseudomonas fluorescens Pf-5
  CDS (1)..(945): transl_table=11
atggacatctccctgcggcacatcgaagtgttccgcgccatcatgcaggccggcagcgtcaccggcgccgcgcgcctgctgtttacttcgcagcccaccgtgagtcgcgagctggcccggctggaaacgctttccggcttgcgcctgttcgatcgtgaaggcgggcgcctgctgcccacggcccaggccctgctgttgctggaggaagtcgagcgggcctatgtggggctggagcggatcaacagcgtggcccagtcgatccgccgtttcgagcatggccagttgagcctgagctgcctgccgctgttctcccagaccctgctgccgccggtgtgcaagcagttccaggcgcagcacccgggcatcggcctgagcatcaccgcccaggaatcgccgctgttggaagaggccctgagcgcccagcgccatgacctgggcctgaccgaaagcgagcacctgccccggggcacccagggcgaactgctgttctgcgccgacatggtctgcatcctcgcggacgaccatccgctgctggccaggccacggctggcgcttgtggattttcgcggccaggacttcatcaacctctcgggcctggatatctaccgccagaccctggatgagcattttcgccaggccggggtggatcgccggatagtggtggaaaccaccaacgcagcttcggtgtgcgccatggtgcgccagcggctcggggtggcgatcatcaatcccttgagtgccatggaagaggccgggcgcggcctggcgatccgaccgttgcagctgtcggtgccctatcgggtgatgctgatccgcccggattaccggccctcgtcgagttttgtcgagggtttcagtgaagccctgcgcacccaggccaaggcactgcaagagcaggtcgggcggatagtgcagggagggcaaggggtgaatcgctcaggctga

SEQ ID NO: 81962 - protein, 314 aa, Pseudomonas fluorescens Pf-5
MDISLRHIEVFRAIMQAGSVTGAARLLFTSQPTVSRELARLETLSGLRLFDREGGRLLPTAQALLLLEEVERAYVGLERINSVAQSIRRFEHGQLSLSCLPLFSQTLLPPVCKQFQAQHPGIGLSITAQESPLLEEALSAQRHDLGLTESEHLPRGTQGELLFCADMVCILADDHPLLARPRLALVDFRGQDFINLSGLDIYRQTLDEHFRQAGVDRRIVVETTNAASVCAMVRQRLGVAIINPLSAMEEAGRGLAIRPLQLSVPYRVMLIRPDYRPSSSFVEGFSEALRTQAKALQEQVGRIVQGGQGVNRSG

SEQ ID NO: 81963 - DNA, 909 bp, Dechloromonas aromatica RCB
  CDS (1)..(909): transl_table=11
atgaatttaactcatcgccagctgacgatttttcgcgccatcatgctgcacggcaacttggggcgtgcggctgccgcgtgcgcgtcaagccagcccactttgagtcgcgagctgggtcgtctggagcagttactggggtttaacctttttgaccgggtgcggggccgattacgacctaccgtgcgggcacttgcgctgatgcaggaagtagaacgctcgtttataggcttggaacagatcgcagcgcgcgccagcgaattgcgcacgcaagcgacaggtcacttgcgcattgcgtgtttgccggcattggcccatgccttggtaccccgcgcactggtatatctctcacatgcacatcctgaactaggagtcagcgtgcatcccttagagtcgccctggctggagcaagccatgagtgaacagcgttttgacctgggactgagtgaaacccaagaggcacctgctggagttgccttgcagcccttactgaaagtcaatgaagtggctgttttgccacgtgatcacagcctgtgccgcaaggcgcgactgcaaccacgcgactttacaggcgagcgcttcatcagtctcgcggttggcgacccgtatcgaaccgccattgatgcgatgttcgaggacgctaaagtacatcgcgcaaccctgcttgaaaccacgagcgcagtggccgtctgcgccatggtgcgtcagggcctgggcgttgccatcgtaaacccgctcaccgcactggaactcagcggaccggacctagtagtgcggccgcttaccgttgccatcggttaccaggtgaatatgcttcttccggacatcgcagctccgcaccccttgcagggcgttctcgcagacgccgtacgcaaggcctgtgccgccttgaacaagcatcactcgctatga

SEQ ID NO: 81964 - protein, 302 aa, Dechloromonas aromatica RCB
MNLTHRQLTIFRAIMLHGNLGRAAAACASSQPTLSRELGRLEQLLGFNLFDRVRGRLRPTVRALALMQEVERSFIGLEQIAARASELRTQATGHLRIACLPALAHALVPRALVYLSHAHPELGVSVHPLESPWLEQAMSEQRFDLGLSETQEAPAGVALQPLLKVNEVAVLPRDHSLCRKARLQPRDFTGERFISLAVGDPYRTAIDAMFEDAKVHRATLLETTSAVAVCAMVRQGLGVAIVNPLTALELSGPDLVVRPLTVAIGYQVNMLLPDIAAPHPLQGVLADAVRKACAALNKHHSL

SEQ ID NO: 81965 - DNA, 915 bp, Burkholderia sp. 383
  CDS (1)..(915): transl_table=11
atgctcacgcaccgccatatcgaggtcttccgcgcgctgatggtcaccggcggcacgacgcgcgcggccgagatgctctatacgtcgcagccgacgatcagccgcgagctcgcgcgcatggagcaggtcgtcggcttcgcgctgttcgagcgcgcgcacggccggctgaggccgacgatggccgcgctcacgctgttcgacgacgtgcggcttgcgtatgtggggcttgaacgcgtcgcggcaaccgccgcgcgcctgcgcgagtttcgcgacggtcagttgtcggtgatcgcgctgccggcgttctcgcacgcgatcctgcctggtgcgtgccggcgttttcacgagaagcacgcgggcgtcagcgtgtcggtggcgacgcaggaatcgccggtgctcgaagagtggctgaccgcgcagcgttacgacctcgggctgaccgagcacgatgtcgcgccggccggcaccgtgctcacgccgctgctcgaagtcgacgaagtgtgcgtgctgcccgacggccacccgctgctcgcgcaggatgcgatcgatctggcggatctcgccgatcgtccgttcgtgagcctgtcgctgaacgatccgtaccgcatcctgatcgacgaggcgttcgcgcagctcggcgtcgcaccgcgctcggtcgtcgaaacaccgtcggccgtgtcggtgtgcgcgttcgtgcggcaggggctcggcgccgcgatcgtcaatccgctgaccgcgctcgatttcgtcgggcgcgacttgcacgtgcggccgctcacgcggtcgtttccgtaccgggtcagcgtgatcgtgcccgagcaccggcccaagagcctgctcgtcgatgcgtttgccgacgcactgcgcggcgaggcgaaggcgattcgccgccggttggccgcagtcctcggctga

SEQ ID NO: 81966 - protein, 304 aa, Burkholderia sp. 383
MLTHRHIEVFRALMVTGGTTRAAEMLYTSQPTISRELARMEQVVGFALFERAHGRLRPTMAALTLFDDVRLAYVGLERVAATAARLREFRDGQLSVIALPAFSHAILPGACRRFHEKHAGVSVSVATQESPVLEEWLTAQRYDLGLTEHDVAPAGTVLTPLLEVDEVCVLPDGHPLLAQDAIDLADLADRPFVSLSLNDPYRILIDEAFAQLGVAPRSVVETPSAVSVCAFVRQGLGAAIVNPLTALDFVGRDLHVRPLTRSFPYRVSVIVPEHRPKSLLVDAFADALRGEAKAIRRRLAAVLG

SEQ ID NO: 81967 - DNA, 915 bp, Mesorhizobium sp. BNC1
  CDS (1)..(915): transl_table=11
atgctgaagcataggcaggtggaggcgttccgcgcggtcatcatcagcggttcagtgtcgactgcggcggacattctcggaatcactcaacctgcggtcagtcggctcgtgaaagatttggaatacgagacgcgcttgaatttgttcgaacgctctggaggtcgacttgttgcaaccggcgacgcgatggcactctatcgcgagatcgaccgctcatttgttggacttgagcgtatcgccggcttggcgcgcgatttgagagaaagacgaggaggttctctgcgcatcgcggcactgccgggactagcaaacgggttcctgccggcctttgccgcaggttttcttgccaaaaggccatcgttaaatatgtcgcttcacggcatgaattctcatttcgtcctcgaatggatcagcaccggccattgtgatctcggagtcgtcgagaacacgcaactcaccaacgtcaccatcgaagaactgccaccctgcgatatggtagcggtgctccctctccaacaccggctcgtggaacgcgagcgaatcgttcccgaggactttgacaatgaggatttcatctcactcatacagccgtcggtaatgcatgtcatggtcgatgccataatgcgcgagcgaggaataatcagacgtattaacgctgaaactccactctccatgattgtttgtggtatggtttcagcaggattcggcgtttcgatcgtcgatccgtttactgccgatagatattcttcatctttggtagttcggccaatcgatccgccaatctctatcaattggacaatcgtgctaccgacgcacataaaagcgtcttcgattacgaacgagtttatagtcgagtttcgaaaaagctttcgaaattttctttcggagcgatcgacttcagcaaagcttgcctag

SEQ ID NO: 81968 - protein, 304 aa, Mesorhizobium sp. BNC1
MLKHRQVEAFRAVIISGSVSTAADILGITQPAVSRLVKDLEYETRLNLFERSGGRLVATGDAMALYREIDRSFVGLERIAGLARDLRERRGGSLRIAALPGLANGFLPAFAAGFLAKRPSLNMSLHGMNSHFVLEWISTGHCDLGVVENTQLTNVTIEELPPCDMVAVLPLQHRLVERERIVPEDFDNEDFISLIQPSVMHVMVDAIMRERGIIRRINAETPLSMIVCGMVSAGFGVSIVDPFTADRYSSSLVVRPIDPPISINWTIVLPTHIKASSITNEFIVEFRKSFRNFLSERSTSAKLA

SEQ ID NO: 81969 - DNA, 1026 bp, Burkholderia vietnamiensis G4
  CDS (1)..(1026): transl_table=11
atggcggtggatctgtcgaatgaacggatagccgcaatgatgcgccggatctattatacagtaaaatgcatgtttatcggtattcgattcattcctgatatatgggcggccatgctgacacaccggcacatcgaggtcttccgcgcgctgatggtcaccggcagcaccacgcgcgcggccgaaatgctttatacgtcgcagccgacgatcagccgcgagctcgcgcggatggagcaggcggtcggcttcgcgctgttcgagcgctcgcacggccggctgcggccgacgatggccgcgctcacgctgttcgacgacgtgcggctcgcgtatgtggggctcgagcgcgtcgcggcgacggccgcgcggttgcgcgagtttcgcgacggccagctgtcggtgatcgcgctgccggcgttcgcgcatgcgattctgccgggcgcgtgccggcgttttcacgacgcgcatgcgggcgtcagcgtgtcggtcgcgacgcaggagtcgccggtgctcgaggagtggctgaccgcgcagcgctacgacctcggcttgaccgagcacgacgtcgcgccggccggcaccgtgctcacgccgctgctcgaggtcgacgaggtctgcgtgctgcccgacggccatccgctgctcgacaagcaggcgatcgatctggcggatctcgccgatcgcccgttcgtgagcttgtcgctgaacgacccataccggatcctgatcgacgaggcgttcgcgcagctcggcgtcgcgccgcgctcggtggtcgagacgccgtcggccgtgtcggtgtgcgcgttcgtgcggcaggggctcggcgccgcgatcgtcaatccgctcaccgcgctcgatttcgtcgggcgcgacctgcatgtgcggccgctcacgcgttcgtttgcgtatcgcgtcagcgtgatcgtgcccgagcatcggccgaagaacctgctggtcgatgcgttcaccgacgcattgcgcggcgaagcgaaggcgatccgcagccggctcgcggccttgccgggttag

SEQ ID NO: 81970 - protein, 341 aa, Burkholderia vietnamiensis G4
MAVDLSNERIAAMMRRIYYTVKCMFIGIRFIPDIWAAMLTHRHIEVFRALMVTGSTTRAAEMLYTSQPTISRELARMEQAVGFALFERSHGRLRPTMAALTLFDDVRLAYVGLERVAATAARLREFRDGQLSVIALPAFAHAILPGACRRFHDAHAGVSVSVATQESPVLEEWLTAQRYDLGLTEHDVAPAGTVLTPLLEVDEVCVLPDGHPLLDKQAIDLADLADRPFVSLSLNDPYRILIDEAFAQLGVAPRSVVETPSAVSVCAFVRQGLGAAIVNPLTALDFVGRDLHVRPLTRSFAYRVSVIVPEHRPKNLLVDAFTDALRGEAKAIRSRLAALPG

SEQ ID NO: 81971 - DNA, 936 bp, Pseudomonas putida GB-1
  CDS (1)..(936): transl_table=11
atgcccattgtcgacccaccgagtgctgccgtgaaactgtccgtccgccatatcgaagtgttccgcgccatcatggccgcaggcagtgtcaccggcgcggcgcggctgctgttcacctcgcagcccactgtcagtcgcgagctggcgcgcctggagcaggtgaccgggctgaatctgttcgagcgcgaaggtgggcgtttggtggcaacggcccaggcattgctgttgatcgaagaggtcgagcgtgcctatgtcgggctggagcgcatcgatcgctttgcccaagccatccgcaatttcgagcaggggcggctggccatcacctgcctgccgctgttttcacagaccttgttgcccaaggcctgtcagcgctttcaccagcagcaccggggcgtgagcgtgagcatcctggcgcaggagtcgcccttgctggaggagtcgctggttgcccagcagcacgaccttggcctgaccgaggtcgagcagataccgcgcggcgcttatggtgaattgctgttcagcgccaacatggtgtgcgtgttacccgagcatcacccgttacaggccaaggccgagctggaactgagcgattttcacgaggtcgatttcatcaacctggccagcctggacacctaccgccagcgcctggaccagcactttcgtgcagcgggggttaaccgccgcaccatcatcgagaccaccagcgccgcgtcggtgtgcgccatggtcaggcaaggcctgggggtggcgatcatcaatccgctgagcgggctggaggcggcccagggcgggctgccgatccgcaggttacgggtgtcggtgccgtaccaggtgatgctgatacgcccggaccaccggccggcctcggcggcggtggagccgttttgcgaggcgttgcgggagcaggcgcaggcgatgcaggcggcgttgcggtag

SEQ ID NO: 81972 - protein, 311 aa, Pseudomonas putida GB-1
MPIVDPPSAAVKLSVRHIEVFRAIMAAGSVTGAARLLFTSQPTVSRELARLEQVTGLNLFEREGGRLVATAQALLLIEEVERAYVGLERIDRFAQAIRNFEQGRLAITCLPLFSQTLLPKACQRFHQQHRGVSVSILAQESPLLEESLVAQQHDLGLTEVEQIPRGAYGELLFSANMVCVLPEHHPLQAKAELELSDFHEVDFINLASLDTYRQRLDQHFRAAGVNRRTIIETTSAASVCAMVRQGLGVAIINPLSGLEAAQGGLPIRRLRVSVPYQVMLIRPDHRPASAAVEPFCEALREQAQAMQAALR

SEQ ID NO: 81973 - DNA, 22 bp, Artificial sequence
  primer
atggccgccgttaacttacgtc

SEQ ID NO: 81974 - DNA, 23 bp, Artificial sequence
  primer
ttatgctgtcgtagctgacgaca

SEQ ID NO: 81975 - protein, 290 aa, Artificial sequence
  consensus sequence
  Variant (2)..(3): Xaa in position 2 to 3 is any amino acid
  Variant (5)..(5): Xaa in position 5 is any amino acid
  Variant (7)..(7): Xaa in position 7 is any amino acid
  Variant (9)..(9): Xaa in position 9 is any amino acid
  Variant (11)..(12): Xaa in position 11 to 12 is any amino acid
  Variant (14)..(15): Xaa in position 14 to 15 is any amino acid
  Variant (17)..(17): Xaa in position 17 is any amino acid
  Variant (20)..(25): Xaa in position 20 to 25 is any amino acid
  Variant (28)..(29): Xaa in position 28 to 29 is any amino acid
  Variant (32)..(36): Xaa in position 32 to 36 is any amino acid
  Variant (38)..(43): Xaa in position 38 to 43 is any amino acid
  Variant (46)..(46): Xaa in position 46 is any amino acid
  Variant (48)..(49): Xaa in position 48 to 49 is any amino acid
  Variant (53)..(54): Xaa in position 53 to 54 is any amino acid
  Variant (56)..(60): Xaa in position 56 to 60 is any amino acid
  Variant (62)..(63): Xaa in position 62 to 63 is any amino acid
  Variant (66)..(70): Xaa in position 66 to 70 is any amino acid
  Variant (73)..(78): Xaa in position 73 to 78 is any amino acid
  Variant (80)..(89): Xaa in position 80 to 89 is any amino acid
  Variant (91)..(94): Xaa in position 91 to 94 is any amino acid
  Variant (97)..(102): Xaa in position 97 to 102 is any amino acid
  Variant (105)..(109): Xaa in position 105 to 109 is any amino acid
  Variant (111)..(125): Xaa in position 111 to 125 is any amino acid
  Variant (127)..(129): Xaa in position 127 to 129 is any amino acid
  Variant (132)..(135): Xaa in position 132 to 135 is any amino acid
  Variant (137)..(138): Xaa in position 137 to 138 is any amino acid
  Variant (143)..(143): Xaa in position 143 is any amino acid
  Variant (145)..(149): Xaa in position 145 to 149 is any amino acid
  Variant (150)..(152): Xaa in position 150 to 152 is any or no amino acid
  Variant (154)..(158): Xaa in position 154 to 158 is any amino acid
  Variant (160)..(164): Xaa in position 160 to 164 is any amino acid
  Variant (167)..(167): Xaa in position 167 is any amino acid
  Variant (170)..(171): Xaa in position 170 to 171 is any amino acid
  Variant (173)..(173): Xaa in position 173 is any amino acid
  Variant (175)..(183): Xaa in position 175 to 183 is any amino acid
  Variant (185)..(192): Xaa in position 185 to 192 is any amino acid
  Variant (194)..(199): Xaa in position 194 to 199 is any amino acid
  Variant (201)..(203): Xaa in position 201 to 203 is any amino acid
  Variant (205)..(211): Xaa in position 205 to 211 is any amino acid
  Variant (213)..(218): Xaa in position 213 to 218 is any amino acid
  Variant (220)..(222): Xaa in position 220 to 222 is any amino acid
  Variant (224)..(226): Xaa in position 224 to 226 is any amino acid
  Variant (228)..(229): Xaa in position 228 to 229 is any amino acid
  Variant (231)..(232): Xaa in position 231 to 232 is any amino acid
  Variant (234)..(234): Xaa in position 234 is any amino acid
  Variant (236)..(237): Xaa in position 236 to 237 is any amino acid
  Variant (239)..(239): Xaa in position 239 is any amino acid
  Variant (242)..(243): Xaa in position 242 to 243 is any amino acid
  Variant (245)..(253): Xaa in position 245 to 253 is any amino acid
  Variant (254)..(258): Xaa in position 254 to 258 is any or no amino acid
  Variant (260)..(273): Xaa in position 260 to 273 is any amino acid
  Variant (275)..(277): Xaa in position 275 to 277 is any amino acid
  Variant (279)..(282): Xaa in position 279 to 282 is any amino acid
  Variant (284)..(285): Xaa in position 284 to 285 is any amino acid
  Variant (287)..(289): Xaa in position 287 to 289 is any amino acid
RXXEXFXAXMXXGXXTXAAXXXXXXQPXXSRXXXXXEXXXXXXLFXRXXGRLXXTXXXXXLXXEVXXXXXGLXXXXXXAXXXXXXXXXXLXXXXLPXXXXXXLPXXXXXFXXXXXXXXXXXXXXXSXXXEEXXXXQXXDLGLXEXXXXXXXXGXXXXXLXXXXXVCXLPXXHXLXXXXXXXXXDXXXXXXXXLXXXXXXRXXXDXXXXXXXVXXXXXXEXXXAXXXCXXVXXGXGXXIXNPXXAXXXXXXXXXXXXXXRXXXXXXXXXXXXXXPXXXPXXXXVXXFXXXL

SEQ ID NO: 81976 - protein, 58 aa, Artificial sequence
  protein pattern
  Variant (2)..(3): Xaa in position 2 to 3 is any or no amino acid
  Variant (5)..(5): Xaa in position 5 is any amino acid
  Variant (7)..(7): Xaa in position 7 is His, Lys or Arg
  Variant (9)..(9): Xaa in position 9 is Ile, Leu or Val
  Variant (10)..(10): Xaa in position 10 is Ile or Met
  Variant (11)..(11): Xaa in position 11 is any amino acid
  Variant (12)..(12): Xaa in position 12 is Ala, Cys, Ser or Thr
  Variant (13)..(13): Xaa in position 13 is any amino acid
  Variant (14)..(14): Xaa in position 14 is Gly, Asn, Ser or Thr
  Variant (15)..(15): Xaa in position 15 is any amino acid
  Variant (16)..(16): Xaa in position 16 is Ser or Thr
  Variant (17)..(17): Xaa in position 17 is any amino acid
  Variant (20)..(20): Xaa in position 20 is any amino acid
  Variant (21)..(21): Xaa in position 21 is Ile, Leu or Met
  Variant (22)..(22): Xaa in position 22 is Ile, Leu or Val
  Variant (23)..(24): Xaa in position 23 to 24 is any amino acid
  Variant (25)..(25): Xaa in position 25 is Ser or Thr
  Variant (28)..(28): Xaa in position 28 is Ala, Asn or Thr
  Variant (29)..(29): Xaa in position 29 is Ile or Val
  Variant (32)..(32): Xaa in position 32 is any amino acid
  Variant (33)..(33): Xaa in position 33 is Ile, Leu or Val
  Variant (34)..(36): Xaa in position 34 to 36 is any amino acid
  Variant (38)..(41): Xaa in position 38 to 41 is any amino acid
  Variant (42)..(42): Xaa in position 42 is Phe, Ile, Leu or Met
  Variant (43)..(43): Xaa in position 43 is any amino acid
  Variant (46)..(46): Xaa in position 46 is any amino acid
  Variant (48)..(49): Xaa in position 48 to 49 is any amino acid
  Variant (50)..(50): Xaa in position 50 is Gly or Asn
  Variant (51)..(51): Xaa in position 51 is Lys or Arg
  Variant (53)..(53): Xaa in position 53 is any amino acid
  Variant (54)..(54): Xaa in position 54 is Ala, Pro or Val
  Variant (56)..(56): Xaa in position 56 is any amino acid
  Variant (57)..(57): Xaa in position 57 is Ala, Asp, Glu or Gln
  Variant (58)..(58): Xaa in position 58 is Ala or Gly
RXXEXFXAXXXXXXXXXAAXXXXXXQPXXSRXXXXXEXXXXXXLFXRXXXXLXXTXXX

SEQ ID NO: 81977 - protein, 23 aa, Artificial sequence
  protein pattern
  Variant (2)..(2): Xaa in position 2 is Ala, Leu or Val
  Variant (3)..(3): Xaa in position 3 is Ala, Asn or Ser
  Variant (4)..(4): Xaa in position 4 is Leu or Val
  Variant (6)..(6): Xaa in position 6 is Ala, Asp or Glu
  Variant (7)..(7): Xaa in position 7 is Phe, Leu or Met
  Variant (9)..(9): Xaa in position 9 is any or no amino acid
  Variant (11)..(11): Xaa in position 11 is any amino acid
  Variant (12)..(13): Xaa in position 12 to 13 is any or no amino acid
  Variant (15)..(15): Xaa in position 15 is Ile, Leu or Val
  Variant (16)..(16): Xaa in position 16 is Ala or Gly
  Variant (17)..(17): Xaa in position 17 is Ala, Ile, Leu or Val
  Variant (18)..(19): Xaa in position 18 to 19 is any amino acid
  Variant (20)..(20): Xaa in position 20 is Pro or Val
  Variant (21)..(21): Xaa in position 21 is any amino acid
  Variant (22)..(22): Xaa in position 22 is Pro, Ser or Thr
  Variant (23)..(23): Xaa in position 23 is Ala, Gly or Leu
AXXXCXXVXRXXXGXXXXXXXXX

SEQ ID NO: 81978 - protein, 51 aa, Artificial sequence
  protein pattern
  Variant (3)..(7): Xaa in position 3 to 7 is any amino acid
  Variant (8)..(8): Xaa in position 8 is any or no amino acid
  Variant (10)..(10): Xaa in position 10 is any or no amino acid
  Variant (12)..(16): Xaa in position 12 to 16 is any amino acid
  Variant (17)..(17): Xaa in position 17 is Phe or Leu
  Variant (18)..(24): Xaa in position 18 to 24 is any amino acid
  Variant (25)..(25): Xaa in position 25 is Gly, Asn or Ser
  Variant (26)..(26): Xaa in position 26 is Leu, Met or Val
  Variant (27)..(27): Xaa in position 27 is any amino acid
  Variant (28)..(28): Xaa in position 28 is Ile, Leu or Val
  Variant (29)..(29): Xaa in position 29 is any amino acid
  Variant (30)..(30): Xaa in position 30 is Ala, Gly, Pro or Thr
  Variant (31)..(31): Xaa in position 31 is any amino acid
  Variant (32)..(32): Xaa in position 32 is Asp, Glu or Asn
  Variant (34)..(35): Xaa in position 34 to 35 is any amino acid
  Variant (36)..(36): Xaa in position 36 is Ile, Leu or Val
  Variant (37)..(37): Xaa in position 37 is any amino acid
  Variant (38)..(38): Xaa in position 38 is Glu, Pro or Gln
  Variant (39)..(39): Xaa in position 39 is any amino acid
  Variant (40)..(40): Xaa in position 40 is Phe, Ile, Leu or Met
  Variant (41)..(41): Xaa in position 41 is Ala, Ser, Thr or Val
  Variant (42)..(42): Xaa in position 42 is Ala, Glu, Ser or Thr
  Variant (43)..(43): Xaa in position 43 is Gly or Gln
  Variant (44)..(45): Xaa in position 44 to 45 is any amino acid
  Variant (47)..(47): Xaa in position 47 is Ile or Leu
  Variant (49)..(49): Xaa in position 49 is Leu or Val
  Variant (50)..(50): Xaa in position 50 is any amino acid
LPXXXXXXLXPXXXXXXXXXXXXXXXXXXXXXSXXXXXXXXXXXXDXGXXE

SEQ ID NO: 81979 - protein, 60 aa, Artificial sequence
  protein pattern
  Variant (2)..(13): Xaa in position 2 to 13 is any amino acid
  Variant (15)..(15): Xaa in position 15 is Leu or Val
  Variant (18)..(19): Xaa in position 18 to 19 is any amino acid
  Variant (21)..(21): Xaa in position 21 is any amino acid
  Variant (23)..(27): Xaa in position 23 to 27 is any amino acid
  Variant (28)..(28): Xaa in position 28 is Ile, Leu or Val
  Variant (29)..(29): Xaa in position 29 is any amino acid
  Variant (30)..(30): Xaa in position 30 is Ala, Leu or Pro
  Variant (31)..(31): Xaa in position 31 is any amino acid
  Variant (32)..(32): Xaa in position 32 is Asp or Gln
  Variant (33)..(33): Xaa in position 33 is Phe or Leu
  Variant (34)..(34): Xaa in position 34 is any amino acid
  Variant (35)..(35): Xaa in position 35 is Asp, Glu, Gly, Asn, Gln or Ser
  Variant (36)..(36): Xaa in position 36 is any amino acid
  Variant (37)..(37): Xaa in position 37 is Asp, Asn, Pro or Ser
  Variant (38)..(38): Xaa in position 38 is any amino acid
  Variant (39)..(39): Xaa in position 39 is Ile or Val
  Variant (40)..(40): Xaa in position 40 is any amino acid
  Variant (41)..(41): Xaa in position 41 is Ile or Leu
  Variant (42)..(42): Xaa in position 42 is Ala or Ser
  Variant (43)..(44): Xaa in position 43 to 44 is any amino acid
  Variant (45)..(45): Xaa in position 45 is Asp, Asn or Ser
  Variant (46)..(47): Xaa in position 46 to 47 is any amino acid
  Variant (49)..(51): Xaa in position 49 to 51 is any amino acid
  Variant (53)..(53): Xaa in position 53 is Ala, Glu, Gly, Asn, Gln, Ser or Thr
  Variant (54)..(54): Xaa in position 54 is any amino acid
  Variant (55)..(55): Xaa in position 55 is Phe or Leu
  Variant (56)..(59): Xaa in position 56 to 59 is any amino acid
  Variant (60)..(60): Xaa in position 60 is Ile or Val
GXXXXXXXXXXXXCXLPXXHXLXXXXXXXXXXXXXXXXXXXXXXXXXRXXXDXXXXXXXX

SEQ ID NO: 81980 - DNA, 438 bp, Escherichia coli
  CDS (1)..(438): transl_table=11
atgaggtatacaatggacattgaattttcgcagattcatgaaatggtctatatgcatgatattgtaaattcggactcgaaaaagaaaccaaggattccgttaaaaaaattccttaatgctgagaatgttctcacgcaaacaacatcatggacattaaattcaagatatgtgaatgttaattctgtcaataaagtcaacgtaaagagtaaagttaaaaacagttatatctcacgatctgtcaatgatgagtttagtttaacagatgatgaaatcaattcttttaaagaaacgttagtcctttcctctattgattcactgagtaaactggttcttaataatcctctttctgtattgtttacatcgactgtacgaaggaataataatcgagctaagatgaatgtcgagttcgactcatggatttgcaccagatgttgttaa

SEQ ID NO: 81981 - protein, 145 aa, Escherichia coli
MRYTMDIEFSQIHEMVYMHDIVNSDSKKKPRIPLKKFLNAENVLTQTTSWTLNSRYVNVNSVNKVNVKSKVKNSYISRSVNDEFSLTDDEINSFKETLVLSSIDSLSKLVLNNPLSVLFTSTVRRNNNRAKMNVEFDSWICTRCC

SEQ ID NO: 81982 - DNA, 438 bp, Escherichia coli O157:H7 EDL933
  CDS (1)..(438): transl_table=11
gtgaggtatataatggacattgagttttcgcagattcatgaaatggtctatatgcatgatattgtaaattcggactcgaaaaagaaaccaaggattccgttaaaaaaattccttaatgctgagaaggttctcacgcaaacaacatcatgggcattaaattcaagatttgtgaatgttaattctgtcaataaagtcaacgtaaagagtaaagttaaaaacagttatatctcacgatctgtcaatgatgagtttagtttaacagatgatgaaatcaattcttttaaagaaacgttagtcctttcctctattgattcactgagtaaactggttcttaataatcctctttctgtattgtttacatcgactgtacgaaggaataataatcgagctaagatgaatgtcgagttcgactcatggatttgcaccagatgttgttga

SEQ ID NO: 81983 - protein, 145 aa, Escherichia coli O157:H7 EDL933
MRYIMDIEFSQIHEMVYMHDIVNSDSKKKPRIPLKKFLNAEKVLTQTTSWALNSRFVNVNSVNKVNVKSKVKNSYISRSVNDEFSLTDDEINSFKETLVLSSIDSLSKLVLNNPLSVLFTSTVRRNNNRAKMNVEFDSWICTRCC

SEQ ID NO: 81984 - DNA, 426 bp, Escherichia coli
  CDS (1)..(426): transl_table=11
atggacattgaattttcgcagattcatgaaatggtctatatgcatgatattgtaaattcggactcgaaaaagaaaccaaggattccgttaaaaaaattccttaatgctgagaatgttctcacgcaaacaacatcatggacattaaattcaagatatgtgaatgttaattctgtcaataaagtcaacgtaaagagtaaagttaaaaacagttatatctcacgatctgtcaatgatgagtttagtttaacagatgatgaaatcaattcttttaaagaaacgttagtcctttcctctattgattcactgagtaaactggttcttaataatcctctttctgtattgtttacatcgactgtacgaaggaataataatcgagctaagatgaatgtcgagttcgactcatggatttgcaccagatgttgttga

SEQ ID NO: 81985 - protein, 141 aa, Escherichia coli
MDIEFSQIHEMVYMHDIVNSDSKKKPRIPLKKFLNAENVLTQTTSWTLNSRYVNVNSVNKVNVKSKVKNSYISRSVNDEFSLTDDEINSFKETLVLSSIDSLSKLVLNNPLSVLFTSTVRRNNNRAKMNVEFDSWICTRCC

SEQ ID NO: 81986 - DNA, 27 bp, Artificial sequence
  primer
atgaggtatacaatggacattgaattt

SEQ ID NO: 81987 - DNA, 26 bp, Artificial sequence
  primer
ttaacaacatctggtgcaaatccatg

SEQ ID NO: 81988 - DNA, 1233 bp, Escherichia coli
  CDS (1)..(1233): transl_table=11
atggcaaaggtatcgctggagaaagacaagattaagtttctgctggtagaaggcgtgcaccaaaaggcgctggaaagccttcgtgcagctggttacaccaacatcgaatttcacaaaggcgcgctggatgatgaacaattaaaagaatccatccgcgatgcccacttcatcggcctgcgatcccgtacccatctgactgaagacgtgatcaacgccgcagaaaaactggtcgctattggctgtttctgtatcggaacaaaccaggttgatctggatgcggcggcaaagcgcgggatcccggtatttaacgcaccgttctcaaatacgcgctctgttgcggagctggtgattggcgaactgctgctgctattgcgcggcgtgccggaagccaatgctaaagcgcaccgtggcgtgtggaacaaactggcggcgggttcttttgaagcgcgcggcaaaaagctgggtatcatcggctacggtcatattggtacgcaattgggcattctggctgaatcgctgggaatgtatgtttacttttatgatattgaaaataaactgccgctgggcaacgccactcaggtacagcatctttctgacctgctgaatatgagcgatgtggtgagtctgcatgtaccagagaatccgtccaccaaaaatatgatgggcgcgaaagaaatttcactaatgaagcccggctcgctgctgattaatgcttcgcgcggtactgtggtggatattccggcgctgtgtgatgcgctggcgagcaaacatctggcgggggcggcaatcgacgtattcccgacggaaccggcgaccaatagcgatccatttacctctccgctgtgtgaattcgacaacgtccttctgacgccacacattggcggttcgactcaggaagcgcaggagaatatcggcctggaagttgcgggtaaattgatcaagtattctgacaatggctcaacgctctctgcggtgaacttcccggaagtctcgctgccactgcacggtgggcgtcgtctgatgcacatccacgaaaaccgtccgggcgtgctaactgcgctgaacaaaatcttcgccgagcagggcgtcaacatcgccgcgcaatatctgcaaacttccgcccagatgggttatgtggttattgatattgaagccgacgaagacgttgccgaaaaagcgctgcaggcaatgaaagctattccgggtaccattcgcgcccgtctgctgtactaa

SEQ ID NO: 81989 - protein, 410 aa, Escherichia coli
MAKVSLEKDKIKFLLVEGVHQKALESLRAAGYTNIEFHKGALDDEQLKESIRDAHFIGLRSRTHLTEDVINAAEKLVAIGCFCIGTNQVDLDAAAKRGIPVFNAPFSNTRSVAELVIGELLLLLRGVPEANAKAHRGVWNKLAAGSFEARGKKLGIIGYGHIGTQLGILAESLGMYVYFYDIENKLPLGNATQVQHLSDLLNMSDVVSLHVPENPSTKNMMGAKEISLMKPGSLLINASRGTVVDIPALCDALASKHLAGAAIDVFPTEPATNSDPFTSPLCEFDNVLLTPHIGGSTQEAQENIGLEVAGKLIKYSDNGSTLSAVNFPEVSLPLHGGRRLMHIHENRPGVLTALNKIFAEQGVNIAAQYLQTSAQMGYVVIDIEADEDVAEKALQAMKAIPGTIRARLLY

SEQ ID NO: 81990 - DNA, 1284 bp, Salmonella typhi
  CDS (1)..(1284): transl_table=11
atgcaaatccacacacaacatcagatggcaaaaaaagacaggatcggggaaatggcaaaggtatcgctggagaaagataaaattaaatttctgctggttgaaggggtgcatcaaaaggcgctggaaagccttcgtgcggcaggttacaccaacattgaatatcacaagggcgcgctggacgctgaacagttgaaagcgtccatccgcgatgcccacttcatcggtctgcgatcccgtactcatctgacagaagaagtgattaacgccgcagagaagctggtggcgattggctgtttttgcatcggcaccaaccaggtggatttaaatgcggcggcaaaacgcggtattccggtctttaacgcgccattctcgaatacccgttccgtggcggagctggtgattggcgagctattgctgctgctgcgcggcgtgccggaagcgaacgccaaagcgcaccgcggcgtatggaataaactggcggcgggatcgttcgaagcacgcggtaaaaagcttggcattatcggttacggccatatcggaacgcagttgggcattctggcggaatcgctggggatgcatatctatttctatgatattgaaaataaactgccgctcggtaatgcaactcaggtgcagcacctgtctgaattgctgaatatgagcgatgtggtcagtctgcacgtacctgaaaacgcctccaccaaaaacatgatgggcgcaaaagagatagccctgatgaagccgggttcgctgctgattaacgccgcgcgcggtacggtagtggatatcccggctttgtgcgacgcgctggcgacgaaacatctggcgggggcggctatcgacgtcttcccgacggaaccggccactaatagcgatccgtttacctctccgctgtgcgaattcgataacgtgatcctgacgccgcatatcggcggctcgacgcaggaggcgcaagaaaacatcggtctggaagtcgcaggaaaactgattaagtactcggataacggctcgacgctgtccgccgtgaacttcccggaagtgtcgctgccgctgcacggcggtcgtcgcctgatgcacatccacgaaaaccgcccgggcgtattgaccgcgcttaaccagatctttgccgagcagggcgttaacattgccgcacagtatctgcaaacctccgcccgaatggggtatgtggtaattgatatagaagccgatggcgatgtggcggagaaagcgctgctggcgatgaaggcgattccgggcaccattcgcgcccgtctgctgtactaa

SEQ ID NO: 81991 - protein, 427 aa, Salmonella typhi
MQIHTQHQMAKKDRIGEMAKVSLEKDKIKFLLVEGVHQKALESLRAAGYTNIEYHKGALDAEQLKASIRDAHFIGLRSRTHLTEEVINAAEKLVAIGCFCIGTNQVDLNAAAKRGIPVFNAPFSNTRSVAELVIGELLLLLRGVPEANAKAHRGVWNKLAAGSFEARGKKLGIIGYGHIGTQLGILAESLGMHIYFYDIENKLPLGNATQVQHLSELLNMSDVVSLHVPENASTKNMMGAKEIALMKPGSLLINAARGTVVDIPALCDALATKHLAGAAIDVFPTEPATNSDPFTSPLCEFDNVILTPHIGGSTQEAQENIGLEVAGKLIKYSDNGSTLSAVNFPEVSLPLHGGRRLMHIHENRPGVLTALNQIFAEQGVNIAAQYLQTSARMGYVVIDIEADGDVAEKALLAMKAIPGTIRARLLY

SEQ ID NO: 81992 - DNA, 1251 bp, Proteus mirabilis
  CDS (1)..(1251): transl_table=11
atggtcaaggtatctttggaaaaagaaaagataaagttcctactattggaaggtgtacaccaaagtgcggtagagaatttaagagcagcaggttataccaacattgaatatcataaaggtgcattatcgggagaagaattaaaacaagctatccgtgatgcacgctttgtggggatccgttcccgcactcacttaacagaagaaatttttgcagccgctgaaaaattagttgctgtaggctgcttctgcattggtactaaccaagttgacttagatgcggctgcccgtcgtgggatccctgtttttaatgcacctttttcaaacactcgttccgtggctgaaatggtgttaggggaattactgttattactgcgtcgtattccagaagctaatgctaaagcgcatcgtggtatttgggataaacaagctaaaggctgttttgaagcgcgaggtaaaaaactggggattattggctatggtcatataggcacccagttagggattttggcggaaagtgttggtttagatgtctatttttacgatattgaaaacaaacttcctttgggaaatgcaacccaagttcgtcacttatctgaactgctgaatatgtgtgacattgttagcttacacgtgccagaaacgccatcaacaaaaaatatgattggtcacgaagagctattacgaatgaagccaggcgctattcttattaatgcctctcgtggaactgtggttgatattccggcattagcacaagcgctagagagtaaacatttatcaggtgcggcggtggacgttttcccaacggagccgggggcaaataacgatccgaacgatccttttgtatcagaattaattaaatttgataatgtgatcttaacgccacatattggtggttcaacccaagaagcccaagaaaatattggttatgaagttgctggtaagttagctaaatattctgataatggttctacattatctgcggttaatttccctgaagtatcattgcctagtcatggtgatgatgtaaaccgtttactgcatattcatgaaaaccgtccgggtattatgaatagtatcaataacgtatttacagaagaaaatattaacgttgctgcgcaatatctgcgtactgctggcaatgtgggttatgtagtaattgacgttactacacaaacgaaagcacaagctgagttagtattgcaaaaactaaaaggactaccgggtaccattcgtgctcgtatgttgtactaa

SEQ ID NO: 81993 - protein, 416 aa, Proteus mirabilis
MVKVSLEKEKIKFLLLEGVHQSAVENLRAAGYTNIEYHKGALSGEELKQAIRDARFVGIRSRTHLTEEIFAAAEKLVAVGCFCIGTNQVDLDAAARRGIPVFNAPFSNTRSVAEMVLGELLLLLRRIPEANAKAHRGIWDKQAKGCFEARGKKLGIIGYGHIGTQLGILAESVGLDVYFYDIENKLPLGNATQVRHLSELLNMCDIVSLHVPETPSTKNMIGHEELLRMKPGAILINASRGTVVDIPALAQALESKHLSGAAVDVFPTEPGANNDPNDPFVSELIKFDNVILTPHIGGSTQEAQENIGYEVAGKLAKYSDNGSTLSAVNFPEVSLPSHGDDVNRLLHIHENRPGIMNSINNVFTEENINVAAQYLRTAGNVGYVVIDVTTQTKAQAELVLQKLKGLPGTIRARMLY

SEQ ID NO: 81994 - DNA, 1233 bp, Enterobacter cloacae
  CDS (1)..(1233): transl_table=11
atggcaaaggtatcactggagaaagacaagattaaattcctgctggttgaaggcgtgcaccagaaagcgctcgatagccttcgcgcagcaggctacaccaacatcgaatttcacaaaggcgcgctggacactgaagagctgaaagcgtccatccgtgatgcccatttcattggcctgcgatcccgtacccaactgactgaagacgttattgctgcggcggaaaagctggtggcgattggctgtttctgcatcggcaccaaccaggttgatctgaatgccgccgcaaaacgcggtatcccggtctttaacgcgccgttctctaacacccgttccgtggcggagctggtaattggcgagctgctgctgctgcttcgcggcattccggaggctaacgccaaagcgcaccgcggcgtgtggaataagctggctgcgggctcctacgaagcccgtgggaaaaagctcgggattatcggttacggccatatcggtacgcagctcggtattctggcggaatctctcggcatgcacgtgtttttctacgatatcgaaagcaagctgccgctgggtaacgcgacgcaggtgcagcatctttctgacctgctgaacatgagcgacgtggtaagcctgcacgtgccggaaaatgcgtccaccaaaaacatgatgggcgcagaagagctggcgctgatgaagccgggctctctgctgatcaacgccgcgcgcggtaccgtggttgacattcctgcactgtgcgacgcgctgaagcgtaaacatctggcgggcgcggcgattgacgtgttcccgacggaaccggccactaacagcgatccgttcacctctccgctgtgcgagttcgacaacgtgattctgacgccgcacattggcggttctactcaggaagcgcaggagaatatcggcctggaagtggcgggtaaactgagcaaatattccgataacggttcaacgctctctgcggtgaacttcccggaggtgtctctgccgctgcacggtgggcgtcgtctgctgcacatccacgaaaaccgtcctggcgtgctgaccgccatcaaccagatctttgccgagcagggcgttaacattgctgcgcagtatctgcaaactaactcgcagatgggttatgtggttattgatattgaagcggatgaagacatcgccgagaaagcattgcagagcatgaaggccattccggggacgattcgcgcgcgtctgctgtactga

SEQ ID NO: 81995 - protein, 410 aa, Enterobacter cloacae
MAKVSLEKDKIKFLLVEGVHQKALDSLRAAGYTNIEFHKGALDTEELKASIRDAHFIGLRSRTQLTEDVIAAAEKLVAIGCFCIGTNQVDLNAAAKRGIPVFNAPFSNTRSVAELVIGELLLLLRGIPEANAKAHRGVWNKLAAGSYEARGKKLGIIGYGHIGTQLGILAESLGMHVFFYDIESKLPLGNATQVQHLSDLLNMSDVVSLHVPENASTKNMMGAEELALMKPGSLLINAARGTVVDIPALCDALKRKHLAGAAIDVFPTEPATNSDPFTSPLCEFDNVILTPHIGGSTQEAQENIGLEVAGKLSKYSDNGSTLSAVNFPEVSLPLHGGRRLLHIHENRPGVLTAINQIFAEQGVNIAAQYLQTNSQMGYVVIDIEADEDIAEKALQSMKAIPGTIRARLLY

SEQ ID NO: 81996 - DNA, 1233 bp, Erwinia chrysanthemi
  CDS (1)..(1233): transl_table=11
atggcaaaggtatcactggaaaaagacaagattaagtttctgctgctggagggtgtacacccgaacgcgctggagaatctgcgcgctgcaggttataccaatattgaataccataagggggcgcttgacccggaagcgctgaaagcatcgattcgtgatgcgcactttgtgggaattcgatcgcgcacgcatctgacggaagagattttcgccgccgccgagaaactggtggccgtcggctgtttctgcatcggtaccaatcaggttgaactgtcggcagcgaccaagcgcggtgtcccagtcttcaacgcgcctttttccaatacccgttccgtggccgaattggtgatcggcgagttgctgctgctgctgcgcggcattccgaccgccaacgccaaagctcaccgtggtatctggcacaagcaggcggttggctgctttgaagcgcgcggcaagaaactgggcatcattggttacggtcacatcggtacccaactgggtattctggccgaaagcctggggatgcacgtctatttctacgatatcgaaagcaaattgccgctgggcaacgcccaacaggtacgtcatttatccgacctgctgaacatgagcgatgtggtcagcctgcatgtgccggaaaccgacagtacccagaatatgatcggcgccgacgaactggcgctgatgaagccgggttctatcctgatcaatgcgtcacgcggcaccgtggtggacattccggcgctgagcaatgcgcttgccagcaagcacctctccggcgcggctatcgacgtgttcccgcaggagccggcaaccaacagcgatccgttcctgtcgccgctgtgtgagttcgataacgtgctcctgacgccgcatatcggcggttctactgaagaagcgcaggagaacatcggtgatgaagtggccggtaaactggtgaagtattccgacaacggttccacactgtctgccgtcaacttcccggaagtgtcgttgccgacgcacagcgaccgcgccagccgtctgctgcacatccatgaaaaccgtccgggtatcatgacgcagattaaccacatttttgccgagcagggcatcaacatcgcggcgcagtacctgcagaccagcccggaaatcggttatgtggtgattgatgtggaaaccgacggtgccgacaccgcgctgcaactgatgaaatccatccccggcaccattcgcgcccgtttgttgtactga

SEQ ID NO: 81997 - protein, 410 aa, Erwinia chrysanthemi
MAKVSLEKDKIKFLLLEGVHPNALENLRAAGYTNIEYHKGALDPEALKASIRDAHFVGIRSRTHLTEEIFAAAEKLVAVGCFCIGTNQVELSAATKRGVPVFNAPFSNTRSVAELVIGELLLLLRGIPTANAKAHRGIWHKQAVGCFEARGKKLGIIGYGHIGTQLGILAESLGMHVYFYDIESKLPLGNAQQVRHLSDLLNMSDVVSLHVPETDSTQNMIGADELALMKPGSILINASRGTVVDIPALSNALASKHLSGAAIDVFPQEPATNSDPFLSPLCEFDNVLLTPHIGGSTEEAQENIGDEVAGKLVKYSDNGSTLSAVNFPEVSLPTHSDRASRLLHIHENRPGIMTQINHIFAEQGINIAAQYLQTSPEIGYVVIDVETDGADTALQLMKSIPGTIRARLLY

SEQ ID NO: 81998 - DNA, 1248 bp, Bradyrhizobium sp. ORS278
  CDS (1)..(1248): transl_table=11
atgccgctctcgctgcccaagcaaaagattcgcgttctgctcctcgagggcgtgaacgactcggccgtccgcatgttcgaggccagcggctataccgaggtcgaacggctgcccaaggcgctcggctcggcggaattgaagcggatgctgtccggcgttcacatgctcggcatccgctcgcggacgaatctgaccgccgacgtgctgcaggcggccgaccggctgatggccgtgggctgcttctcggtcggcaccaaccaggtcgatctcgatgcggcgcggcggctcggcatccccgtcttcaacgcgccctattcgaacacccgcagcgtcgccgagctgaccatcgccgaggtcgtgatgctgatgcggcggatcttcccgcgctcggtgtcggcgcatgccggcggctgggacaagtcggccaatggcagccgcgaggtgcgcggcaagacgctcggcatcatcggctacggcaatatcggctcgcagctgtcgaacctcgccgaagccatgggcatgcgggtgatcttcttcgacctcaccgacaagctccgccacggcaacaccgagccggtcgaaagcctcgacgaactgctggctaatagcgacgtcgtgtcgctgcacgtgccggagacgccggcgaccgccaacatgatcggcgagcgccagatccggcacatgaaggacggcgcctacctcatcaacaattcgcgcggcacggtggtcgacatcgacgcgctggcgagcgcgctgcgcgagggcaagctgtcgggcgccgccgtcgacgtgtttccggtcgaaccggcctcgaacgccgatccgttcgtgtcgccgctgcagggcctgcccaacgtgatcctgaccccgcatgtcggcggctccaccgaggaggcgcaggatcgcatcggcggcgaggtcgcgcgcaagctgatcgattactccgacgtcggctcgactttcggcgcggtcaacttcccgcaggtgcagctgccggcgcgcccgaccggcacgcgcttcatccacgtccaccgcaacgtgccgggcgtgctgcgccaggtcaacgaggcggtgtcacggcacaacatcaacatcctcgcgcaatatctgcagaccgatccggaagtcggctacgtcgtgctggaaaccgacgtggttggcggcgaaggtgaggagctgctgtcggagctgcgcgcggtggacggcacgatccgcgtgcgcgtgctgtacgatcacgacaggccgtga

SEQ ID NO: 81999 - protein, 415 aa, Bradyrhizobium sp. ORS278
MPLSLPKQKIRVLLLEGVNDSAVRMFEASGYTEVERLPKALGSAELKRMLSGVHMLGIRSRTNLTADVLQAADRLMAVGCFSVGTNQVDLDAARRLGIPVFNAPYSNTRSVAELTIAEVVMLMRRIFPRSVSAHAGGWDKSANGSREVRGKTLGIIGYGNIGSQLSNLAEAMGMRVIFFDLTDKLRHGNTEPVESLDELLANSDVVSLHVPETPATANMIGERQIRHMKDGAYLINNSRGTVVDIDALASALREGKLSGAAVDVFPVEPASNADPFVSPLQGLPNVILTPHVGGSTEEAQDRIGGEVARKLIDYSDVGSTFGAVNFPQVQLPARPTGTRFIHVHRNVPGVLRQVNEAVSRHNINILAQYLQTDPEVGYVVLETDVVGGEGEELLSELRAVDGTIRVRVLYDHDRP

SEQ ID NO: 82000 - DNA, 1842 bp, Oryza sativa (japonica cultivar-group)
  CDS (1)..(1842)
atggcggcgccgtcccagaccaccgccaccaccacccaccaccgcgtcctcctcccgtcccaccaccaccaccgagcggtgcctccctcgctcctccgcctcccgctccgcgccgcgcgccggggccgcctctccgccgccgccgcggccgcggcgcccgccgcgtcgaccgcggcgccgtcggagcccgccgcgggtgccgtaccggggaagccgacggtgctcgtggccgagaagctcggcgccgcggggctcgagctgctccgggggttcgccaacgtggactgctcctacggcctctcccccgaggagctccgcgccaagatcccgctctgcgacgcgctcatcgtgcggtcggggaccaaggtggggcgcgacgtgttcgaggcatccgggggaaggctccgcgtcgtggggcgcgccggggtcgggatcgacaacgtcgatctcgccgccgccaccgagcacgggtgcctcgtcgtcaacgcacccacggcgaacaccgtcgccgcggccgagcacggcatcgcgctgctcaccgctatgtccaggaacatcgcccaggccgacgcgtcgctcaaggctggtaaatggcagcgcaacaagtatgtgggtgtatctctcgttggtaaaactattgcaattcttggatttggaaaggttgggtcagaagtcgctcgtcgtgctaaaggtttgggaatgcatgtgattgcacacgatccgtatgcttctgctgatcgtgcccatgcaattggagttgagctagtgagcatggaagacgctttgacaactgctgactttatctcgttgcatatgcctcttacccctgcaacaaacaagatgctcaatgatgaaactttcgctaagatgaagaagggtgttagaattataaatgttgcgcgtggtggtgtaattgatgaagatgctctagtcagggctcttgattcaggaatagttgcacaggctgctcttgatgtgttcactaaagagccaccggcaccagacagcaaattagtgctgcatgagaatgttactgtaacaccacaccttggtgccagcacagttgaagcacaggaaggagtggctattgaaatagctgaagctgttattggagctctgaaaggggaacttgcagcttcagcagtcaacgcaccaatggttcctgctgaggtgctgtcagagcttgcaccttatgttgtgctcgcagagaagcttgggcgcctggctgtgcagctagtggctggtggcggtggtatcaagtccgtgaaagtgacctatgcttctgcaagggctcctgatgatcttgacacgagacttcttcgtgcaatgatcaccaaggggttgatcgaaccaatctccagtgttttcgtcaatctggtcaatgctgacttcactgcgaaacagaggggagttcgtatcactgaggagagaatcttgttggatggctcacccgagacacctattgactacatccaagttcatattgcccatgttgagtccaaatttcccagtgcaatatcggagagtggagagatcactgttgaggggaaggtgaaggatggcatcccccatctgacaaaggttggatcattccaggttgatgtgagcttggaaggaagcctgatcctttgcaggcaggtcgatcaacctggtatgatcggcgcagtaggaagtgtccttggtgaggagaatgttaatgtcagtttcatgagtgttggaagaatcgctcctcgcaagcatgccgtcatggcgattggtgttgatgaggaacctaaaaagagcacactgacaaagattggggagattccggcgattgaagaattcgttttcctcaagctctag

SEQ ID NO: 82001 - protein, 613 aa, Oryza sativa (japonica cultivar-group)
MAAPSQTTATTTHHRVLLPSHHHHRAVPPSLLRLPLRAARRGRLSAAAAAAAPAASTAAPSEPAAGAVPGKPTVLVAEKLGAAGLELLRGFANVDCSYGLSPEELRAKIPLCDALIVRSGTKVGRDVFEASGGRLRVVGRAGVGIDNVDLAAATEHGCLVVNAPTANTVAAAEHGIALLTAMSRNIAQADASLKAGKWQRNKYVGVSLVGKTIAILGFGKVGSEVARRAKGLGMHVIAHDPYASADRAHAIGVELVSMEDALTTADFISLHMPLTPATNKMLNDETFAKMKKGVRIINVARGGVIDEDALVRALDSGIVAQAALDVFTKEPPAPDSKLVLHENVTVTPHLGASTVEAQEGVAIEIAEAVIGALKGELAASAVNAPMVPAEVLSELAPYVVLAEKLGRLAVQLVAGGGGIKSVKVTYASARAPDDLDTRLLRAMITKGLIEPISSVFVNLVNADFTAKQRGVRITEERILLDGSPETPIDYIQVHIAHVESKFPSAISESGEITVEGKVKDGIPHLTKVGSFQVDVSLEGSLILCRQVDQPGMIGAVGSVLGEENVNVSFMSVGRIAPRKHAVMAIGVDEEPKKSTLTKIGEIPAIEEFVFLKL

SEQ ID NO: 82002 - DNA, 924 bp, Pyrococcus horikoshii OT3
  CDS (1)..(924): transl_table=11
gtgaagagaatgaaggttcttgttgctgctcccttgcatgaaaaagctatccaagtgttaaaggatgcagggttggaagttatttacgaggaatatccagatgaagataggctcgttgagctagttaaggatgttgaggcgataatagttaggagtaagcccaaagtcaccaggagggttatagagagtgccccaaagcttaaggttatagccagggcgggtgttggtttagataacatagatgtcgaggccgctaaagagaagggaatagaggtagtcaatgctcctgctgctagctcaagaagcgttgcagagctagctgtaggattaatgttttccgttgccaggaagatagcctttgcagacagaaagatgagagaaggagtatgggcgaaaaaagaggcaatgggaatagagcttgaaggtaaaaccatagggatcatcggatttggaaggataggttaccaagttgccaagatcgctaacgcccttggcatgaatatcctcctttacgatccttatccaaatgaagaaagggccaaagaggtcaatggaaagttcgttgacctagagaccctacttaaggagagcgacgtagtgacgatccacgttcccctcgtggagtctacatatcacttaataaatgaggagaggctcaagctgatgaagaagacggctatactaattaatacctctagaggtcccgtagttgatactaacgctttagttaaggcccttaaggagggctggatagctggggccggattggatgtattcgaggaggaacccttacctaaggatcacccattgacgaaattcgacaacgttgttctaactccacacataggagcttcaactgttgaagcccaggaaagggccggtgttgaggttgcggaaaaagttgtgaagatattaaagggttga

SEQ ID NO: 82003 - protein, 307 aa, Pyrococcus horikoshii OT3
MKRMKVLVAAPLHEKAIQVLKDAGLEVIYEEYPDEDRLVELVKDVEAIIVRSKPKVTRRVIESAPKLKVIARAGVGLDNIDVEAAKEKGIEVVNAPAASSRSVAELAVGLMFSVARKIAFADRKMREGVWAKKEAMGIELEGKTIGIIGFGRIGYQVAKIANALGMNILLYDPYPNEERAKEVNGKFVDLETLLKESDVVTIHVPLVESTYHLINEERLKLMKKTAILINTSRGPVVDTNALVKALKEGWIAGAGLDVFEEEPLPKDHPLTKFDNVVLTPHIGASTVEAQERAGVEVAEKVVKILKG

SEQ ID NO: 82004 - DNA, 1602 bp, Aquifex aeolicus VF5
  CDS (1)..(1602): transl_table=11
ttgtacaaggtactgattactgacccgatagctcccgaagggattgaactgcttcaaaaggacccggaagttgaagtttacaacgagccagacatttcctacgaggaactccttgagattataaaggactttgacgcaataattacgaggagcagaacgcccgtaaccaaggagcttctggaaagggcggaaaaattgaaagtcgtcggaagggcgggcgtaggtgttgacaacgtagacatagaggaggcgacaaagaggggaatactcgtcgtaaacacgcccggggcaaacacgataggtgcaacggaactcacgatgatgcacatgctcacgataatgaggaacggacacaaggcccacgagagtatgctcaactacaagtgggacagaaagaagttcatgggagaagaactctacggaagaatccttgggattatagggctcggaaacataggctctcaggttgcgataagggcaaaggccttcggtatgaaggtgatggcctacgacccttacattcccagagaaaaagcggaaaaactgggagtaaaactcgtggacaacctccacgacatgttaagggaaatagacgtcctcaccattcacgcaccactcacccacgaaacaaagaacatgatagacgagaaagagtttgaaataatgaaggacggcgtttacatagtcaactgcgcgagaggagggataataaacgagaaggctctcataaagtacatggagagcggaaagataaagggagtggctctggacgtttactcaaaggaacccccacctcccgaatttatagacgaactcaagagattagcggacaaggttaacatatccctcagtccccacataggtgcgaacacttacgagtcccagaggaacgttgcggtaatcgtagcacagcaggttttaaaggctttaaaaggtcaaaccgtggagtatgcagtaaacgcacccttccccgacctttcggttctcacactcataaagccctacctagaccttgcggaaaaactcgggaagttcctcgttcagtggacggaagagggaataagggaagttcacatagaggtaaggggagacatagcggaatacttccagcccatatcctccgcggttttaaagggcatactggaagaagtcgtggactttcccgtaaacatcattaacgccttctacgttgccaaggacaggggaataaaagttgaagaactctcctctgaagaaactcccgacttcaagcactacataaaagtagtggtaaaggctgacggaaaagaaaaggttgtagcgggaaccgtcctggaggggcaaatcccaaggataaccgagattgacagatacaaggtagacatagaacccgaaggaatacttctcgtttttgaaaataaagacgttccgggagttataggaaagataggctcaatactcggagaggctaacataaacatagcgggcttcagactcggcagggaaaagaaaggcggtatagccataggaattctcaacttagacgaaccagcttcggaggaagttctcagcagaataaaagaaatacccgaaatactcttcgtcaaacacatcgtcctttga

SEQ ID NO: 82005 - protein, 533 aa, Aquifex aeolicus VF5
MYKVLITDPIAPEGIELLQKDPEVEVYNEPDISYEELLEIIKDFDAIITRSRTPVTKELLERAEKLKVVGRAGVGVDNVDIEEATKRGILVVNTPGANTIGATELTMMHMLTIMRNGHKAHESMLNYKWDRKKFMGEELYGRILGIIGLGNIGSQVAIRAKAFGMKVMAYDPYIPREKAEKLGVKLVDNLHDMLREIDVLTIHAPLTHETKNMIDEKEFEIMKDGVYIVNCARGGIINEKALIKYMESGKIKGVALDVYSKEPPPPEFIDELKRLADKVNISLSPHIGANTYESQRNVAVIVAQQVLKALKGQTVEYAVNAPFPDLSVLTLIKPYLDLAEKLGKFLVQWTEEGIREVHIEVRGDIAEYFQPISSAVLKGILEEVVDFPVNIINAFYVAKDRGIKVEELSSEETPDFKHYIKVVVKADGKEKVVAGTVLEGQIPRITEIDRYKVDIEPEGILLVFENKDVPGVIGKIGSILGEANINIAGFRLGREKKGGIAIGILNLDEPASEEVLSRIKEIPEILFVKHIVL

SEQ ID NO: 82006 - DNA, 1575 bp, Helicobacter pylori J99
  CDS (1)..(1575): transl_table=11
atgtatcaagtagccatttgcgaccccatccatgctaaaggcattcaaattttagaagcccaaaaagacattgtcttgcatgattattccaaatgccctaaaaaggagcttttagaaaaactcatccccatggatgcgctcatcactcgcagcatgacccctatcacaagcgattttttaaagcccttaacccacttaaaatccattgtgagagcgggcgtgggagtggataatattgatttagaaagctgctctcaaaaaggcattgtcgtgatgaatatccctaccgctaacacgattgccgctgtggaattaacgatggcgcatttgatcaatgcggtgcgctcattcccttgcgcgaacgatcaaatcaaacaccaaaggttatggaaaagagaagactggtatggcacggaattgaaaaataaaaagctaggcatcattggttttgggaatattggctctagggtgggcattagggcaaaagcttttgaaatggaagttttagcctatgatccctatatcccttcttcaaaagccactgatttaggggtcatttacacgaaaaattttgaagacattttgcaatgcgacatgatcactatccacacccccaaaaataaagaaacgattaacatgataggcgctaaagagattgaacgcatgaaaaaaggggttattttaattaattgtgctagaggggggctttataatgaagacgccctttatgaagccttagaaaccaaaaaagtgcgttggcttggcattgatgtcttttctaaagagcctggcatccataacaagcttttagacttgcctaatgtgtatgcgaccccccatattggcgcgaacactttagaatcccaagaagaaatttccaaacaagccgctcaaggggttatggaatctttaaggggttcaagccacccgcatgctctaaatttacccatgcaagcttttgatgcaagcgctaaagcctacttgaatttagcgcaaaaactgggttatttttccagtcaaatccataagggcgtgtgccaaaaaattgaactcagtctttgcggggagatcaaccaattcaaagacgcccttgtcgcttttacgctagtaggggtgttaaaacccgttgtaggggataaaatcaattacattaacgccccctttgtggccaaagaaagaggcattgagattaaggttagccttaaagaaagcgcctcaccttataaaaacatgctctctttaactttaaatgcggctaatggcgcaatcagcgtgagcggcacggtgtttgaagaagatattttaaaactcactgagatcgatgggtttcatattgatatagagccaaagggtaaaatgcttttattcaggaatacggatattccaggcgttattgggagcgtggggaatgcgttcgctaggcatggcattaatatcgctgattttcgtttggggcgcaacacgcaaaaagaagccctagcgctcatcattgtagatgaagaagtttctttggaagttttagaagagcttaaaaacattcctgcatgcttaagcgttcattatgtggttatttaa

SEQ ID NO: 82007 - protein, 524 aa, Helicobacter pylori J99
MYQVAICDPIHAKGIQILEAQKDIVLHDYSKCPKKELLEKLIPMDALITRSMTPITSDFLKPLTHLKSIVRAGVGVDNIDLESCSQKGIVVMNIPTANTIAAVELTMAHLINAVRSFPCANDQIKHQRLWKREDWYGTELKNKKLGIIGFGNIGSRVGIRAKAFEMEVLAYDPYIPSSKATDLGVIYTKNFEDILQCDMITIHTPKNKETINMIGAKEIERMKKGVILINCARGGLYNEDALYEALETKKVRWLGIDVFSKEPGIHNKLLDLPNVYATPHIGANTLESQEEISKQAAQGVMESLRGSSHPHALNLPMQAFDASAKAYLNLAQKLGYFSSQIHKGVCQKIELSLCGEINQFKDALVAFTLVGVLKPVVGDKINYINAPFVAKERGIEIKVSLKESASPYKNMLSLTLNAANGAISVSGTVFEEDILKLTEIDGFHIDIEPKGKMLLFRNTDIPGVIGSVGNAFARHGINIADFRLGRNTQKEALALIIVDEEVSLEVLEELKNIPACLSVHYVVI

SEQ ID NO: 82008 - DNA, 921 bp, Thermotoga maritima MSB8
  CDS (1)..(921): transl_table=11
atggcgagatacagagtgcacgtgaacgatcctctcgataaagaggcaacacagcttcttatgaacaaagaggaactcgaagtcacatcggaacacctagaaaaagacgaattgatgaagatcataccggaagtcgatgttcttgtcgtcagaagcgccactaaagtcacagccgacatcatagaggccgggaaaaatctgaagatcatcgccagggcaggcatcgggctggacaacatagacgttcaaaaagccaaggaaaaaggaataaaagtgctcaacacaccaggtgccagcgctccatccgtggcagaactcgcgatgggtttgatgcttgcttgtgctcgccacatagcaagagctactgtatctctcaaagaaggaaaatgggaaaaaaaagcactcaagggcaaagaacttcttggaaaaacactgggactcatcggatttggaaacatcggacaggaagtggcaaaaagagcccttgcctttggaatgaaaatcatcgcttacgatcccgcgaaacctgaaacagatctacctgttgaatacgtggatctggacactcttttcaaagaaagcgacttcatttccctgcatgtgcctctcacagaatcaaccaggcatatcataaacagagagagtatcgcgaagatgaaagacggtgtcatcatagtaaacacggcccgtggaggaacaatcgacgaagaagccctgtacgaagaagttgtgagtggaaaagtctacgctgcagggctcgacgtcttcgaagtggaaccaccaacagatgaaatcagaaggaaacttttgagcttggacaacgttgtcgccactccccacataggtgcttccacagcagaagctcaaagaagagttggaatagaactcgtggagaagattttcaaagaactgggaatttga

SEQ ID NO: 82009 - protein, 306 aa, Thermotoga maritima MSB8
MARYRVHVNDPLDKEATQLLMNKEELEVTSEHLEKDELMKIIPEVDVLVVRSATKVTADIIEAGKNLKIIARAGIGLDNIDVQKAKEKGIKVLNTPGASAPSVAELAMGLMLACARHIARATVSLKEGKWEKKALKGKELLGKTLGLIGFGNIGQEVAKRALAFGMKIIAYDPAKPETDLPVEYVDLDTLFKESDFISLHVPLTESTRHIINRESIAKMKDGVIIVNTARGGTIDEEALYEEVVSGKVYAAGLDVFEVEPPTDEIRRKLLSLDNVVATPHIGASTAEAQRRVGIELVEKIFKELGI

SEQ ID NO: 82010 - DNA, 1233 bp, Pasteurella multocida subsp. multocida str. Pm70; identical to SEQ ID NO: 64569
  CDS (1)..(1233): transl_table=11

SEQ ID NO: 82011 - protein, 410 aa, Pasteurella multocida subsp. multocida str. Pm70; identical to SEQ ID NO: 64570

SEQ ID NO: 82012 - DNA, 1230 bp, Pseudomonas aeruginosa PAO1; identical to SEQ ID NO: 64571
  CDS (1)..(1230): transl_table=11

SEQ ID NO: 82013 - protein, 409 aa, Pseudomonas aeruginosa PAO1; identical to SEQ ID NO: 64572

SEQ ID NO: 82014 - DNA, 1197 bp, Lactococcus lactis subsp. lactis Il1403
  CDS (1)..(1197): transl_table=11
atgacttatcatatcaaaacaattggaaataatatcgaccaaattgcattagatgaaattggcgaaggctttcttgttaatcaagtgtcagaagctgaatctgacgcatttatttgtcgggctcagcctttccacgattatgaattttccaaagcgcttttggcgattggacgtgctggtgctggttttaataatattccgatagaaaagtgtgccagtaaagggattgtagtctttaatgcgcctggtgggaatgccaatgcggttaaagaattagttttgtcaatgatgatttttggaacacgtaatttaaaaccagcaaacaaatggttgactggtcaaaaaggcgatgataataccattgatggggcggttgaacatgggaaaaaggcgttttctggttctgaaatttcaggaaaaactttaggggtaattggccttgggaatattggttcaaaagttgccaatgatgcacagcgtttaggaatgagagttattggttatgacccttatctttcaattgagcacgcttggaacttgtcacatcatgttaaaagagtgaatgatttggctgagatttttgagaaggcagattatatcacggttcatacgccagcgacggatgaaacgacgaaaatgctcaattggaaaaatttatctaagtgtaaaaagggagtgattttgctcaattatgcacgagatgagattacggataaagaagcagtgcttaaagcgattgatgagggaattgtccgcttttttggaacggattttggttctgaaaaattttatcatcatccacaagtttttttaactcctcatttaggtggttcaacggcggaagcgagtttaaattgcacaagaatggctctggattctgttcaaacttatttgaaaactggcgaaattattaattcagtcaattttccacgtgttttgcaagagttgaatacgccttatcgtgtgaccttaatcaataaaaatgtgcctaatgttgtggctcaaatttcacttgcggtggcagcagaaaatattaatattgctaatattgttaatcgtggtcaaggagattatgcctatactttacttgacttggatgaaaaagatgaaggaaagttggcggctttagtttcacgttttgaggctgctgataatattattcgtgttcgcttaattgaaaatcagagtttagtttaa

SEQ ID NO: 82015 - protein, 398 aa, Lactococcus lactis subsp. lactis Il1403
MTYHIKTIGNNIDQIALDEIGEGFLVNQVSEAESDAFICRAQPFHDYEFSKALLAIGRAGAGFNNIPIEKCASKGIVVFNAPGGNANAVKELVLSMMIFGTRNLKPANKWLTGQKGDDNTIDGAVEHGKKAFSGSEISGKTLGVIGLGNIGSKVANDAQRLGMRVIGYDPYLSIEHAWNLSHHVKRVNDLAEIFEKADYITVHTPATDETTKMLNWKNLSKCKKGVILLNYARDEITDKEAVLKAIDEGIVRFFGTDFGSEKFYHHPQVFLTPHLGGSTAEASLNCTRMALDSVQTYLKTGEIINSVNFPRVLQELNTPYRVTLINKNVPNVVAQISLAVAAENINIANIVNRGQGDYAYTLLDLDEKDEGKLAALVSRFEAADNIIRVRLIENQSLV

SEQ ID NO: 82016 - DNA, 1584 bp, Campylobacter jejuni subsp. jejuni NCTC 11168
  CDS (1)..(1584): transl_table=11
atgaaaaaaaagattatagtgtgtgatgctattttggataaaggtgtcgatattctaagaaaagctgaagatattgagcttatagaagctgcaaaatttccaaaagatgaacttatgcaaatgctaagcgatattgaagttgcaattactagaagttctacggatgtagatgtaaattttttaaatcatgccaaaaaattaaaagcgcttgtgcgtgccggggtgggcgtagataatgttgatattccagagtgttctaaacgaggagtgattgtgatgaatgtcccaactgcaaatactattgccgcagttgaactaacaatggcacatcttttaacatcagctagaagctttgtcaatgctcataattttttaaaaattgaaagaaaatgggaaagagaaaaatggtatggcattgaattgatgaataaaacgctaggggttataggttttggaaatataggttcaagagtagctatccgtgctaaagcatttggtatgaaaattttagcctatgatccgtatatttctgcttctaagattacagatttagatatggaacaagcaaaaaatttggatgaaattttagaaaaaagtgattttattaccattcacacaccaaaaaccaaagaaaccaatggtatgataggaaagcaagaaattgcaaaaatgaaagatggaataagattaataaattgtgctcgtggaggattgtacacagaagaggctttatatgaaggtttaaaaagtggtaaaatagcttggcttggtatagatgtgttcgataaagaacccgcgactaatcatcctcttttagactttgaaaatatttcagttacttctcacctaggagcaaatactttagaaagtcaagacaatatcgcaagagaagcttgtgagcaagcattaagcgcagcacgaggcgtggcttatcctaatgccttaaatttaccaattaaaactgaagatttaccaccttttgtagctccttatatagaacttgtttctaaaatggcttttttagctgttcaaattgataaaaatcctataaaaagtattaaattagaggctgaaggaattattggtgagtatgcaaattctatgctaacttttgcagctgttggtgctttgggtggaattttaggagagaaaattaattatgttaatgcagaatttgttgccaaagaaaaaggagttgaattatcttgcgaaactcttccaaatagtggttataataataaacttagcgttaaaattatcaccgaaaattcaaatatcagtgtttcaggaacagtgtttaatgaaaatgaacaacgcatagttggattaaatggctttaaaactgattttaagccaaagggaaaaatgattatttttaaaaacaaagacataccaggagttatagctaaaatcagttccgttttggcagctaaaaatatcaatatagctgattttaggcttggtagagatggttttgggtatgctttggctgttgttttgattgatgaaaaagttcaaaaagaagtattagatgaactaaaacaattagaggcgtgtgtatttgtccaatatgttgaaatttaa

SEQ ID NO: 82017 - protein, 527 aa, Campylobacter jejuni subsp. jejuni NCTC 11168
MKKKIIVCDAILDKGVDILRKAEDIELIEAAKFPKDELMQMLSDIEVAITRSSTDVDVNFLNHAKKLKALVRAGVGVDNVDIPECSKRGVIVMNVPTANTIAAVELTMAHLLTSARSFVNAHNFLKIERKWEREKWYGIELMNKTLGVIGFGNIGSRVAIRAKAFGMKILAYDPYISASKITDLDMEQAKNLDEILEKSDFITIHTPKTKETNGMIGKQEIAKMKDGIRLINCARGGLYTEEALYEGLKSGKIAWLGIDVFDKEPATNHPLLDFENISVTSHLGANTLESQDNIAREACEQALSAARGVAYPNALNLPIKTEDLPPFVAPYIELVSKMAFLAVQIDKNPIKSIKLEAEGIIGEYANSMLTFAAVGALGGILGEKINYVNAEFVAKEKGVELSCETLPNSGYNNKLSVKIITENSNISVSGTVFNENEQRIVGLNGFKTDFKPKGKMIIFKNKDIPGVIAKISSVLAAKNINIADFRLGRDGFGYALAVVLIDEKVQKEVLDELKQLEACVFVQYVEI

SEQ ID NO: 82018 - DNA, 1635 bp, Deinococcus radiodurans R1
  CDS (1)..(1635): transl_table=11
atgactgctcccgctccgaccccggcccagaccgccgcccagacccccactgcgccgctgcgcgtgctgatctgcgacgagatgaaccccggcaacctcgaccacgaggggttccagatcgactaccagggcaacctggagcgcgaggaaacgctgcgccgcctgcccgactacgacgcgctgatcacccgcagccgcaccaaggtggaccgcgaactgctcgacgccgccgggccgcgcctgaaagtcatcgggcgcgggggcgtgggcgtggacaacatcgacctcgagtacgccagccgccggggcctgctcgtcctgaacgcgccggagagcaacaatgtctccgctgccgaactcgcggtgatgcacctgatggccgccgcccgcggcctgacccgcagcgaccgcaagacccgcgccggggagtgggaccgcaagttcctgggtctggaactcaccgacaagacgctgggcatcgtggggctggggcgcatcgggagcatcgtggccgaccgagcgcaggggctgcacatgaacgtcgtggcctacgacccctacgtgcccgagaacaaattcgagcgcctcggcgtgcagcgcgccgccagcctcgacgagctgctggggcaggtggacgccctgaccgtgcacacgccgctcaccgacgagacgcgcggcatgatcggtgaacgcgaactcgccctcctgaaaagagacgccatcgtggtcaacgcggcgcgcggcggcatcatcgaagagcaggcgctggtgaacgcgctgcacgccgggcacctcttcgcagcgggagtggacgtgttcgtggacgagccgcccaccgccgagcacattttcctgggcgctccgaacctgggcatcaccgcgcacctcggtgccaatacccgagaggcacaggagcgggtgggggccgaaatcgtgagccgggtgctcgacgcgctgcacggcgacgtgagtaagggagctgtcaacgccccggcactcgacgccaagacgatggagcagctcggcgggtacctcgacctcggcgagaagctcgggcgcatcctggcgcagctgctgcctggtgcccacgaggtcgaagtcaccttccgcggcgagtttcccaccgacccctcccccgtcgtgaccgccgtgctgatgggttacctgtcgggcagcaccgacgagcaccccaacatgatcaacgcccgcgccctcgcccgcgagcgcggcgtgaccctgagcgtgcgcgaggaagaagacagccccgactaccagaccgaggtgatcgtgcgggtgctcaaccgcagcggcgaaaaggagcgtactcgcaaggtcggcggcaccgtgttcggcaagtcgccgcgcctgacccgtctgcgcgactaccgggtggaactcgaacccgagggctttatcctgatcgcttccaacctcgacaagcctggcgccgtcgccaagctgagcaacctgctcggcacctggggcatcaacatcgcgggcatggccctgggccgctccgagaagggcgggcaggcgctctttaccctcaccctcgacgacagcctgacgcccgagcagcttcaggcgattcgggacctggacgtgattgagtcggccttcctggtgcgggtgtaa

SEQ ID NO: 82019 - protein, 544 aa, Deinococcus radiodurans R1
MTAPAPTPAQTAAQTPTAPLRVLICDEMNPGNLDHEGFQIDYQGNLEREETLRRLPDYDALITRSRTKVDRELLDAAGPRLKVIGRGGVGVDNIDLEYASRRGLLVLNAPESNNVSAAELAVMHLMAAARGLTRSDRKTRAGEWDRKFLGLELTDKTLGIVGLGRIGSIVADRAQGLHMNVVAYDPYVPENKFERLGVQRAASLDELLGQVDALTVHTPLTDETRGMIGERELALLKRDAIVVNAARGGIIEEQALVNALHAGHLFAAGVDVFVDEPPTAEHIFLGAPNLGITAHLGANTREAQERVGAEIVSRVLDALHGDVSKGAVNAPALDAKTMEQLGGYLDLGEKLGRILAQLLPGAHEVEVTFRGEFPTDPSPVVTAVLMGYLSGSTDEHPNMINARALARERGVTLSVREEEDSPDYQTEVIVRVLNRSGEKERTRKVGGTVFGKSPRLTRLRDYRVELEPEGFILIASNLDKPGAVAKLSNLLGTWGINIAGMALGRSEKGGQALFTLTLDDSLTPEQLQAIRDLDVIESAFLVRV

SEQ ID NO: 82020 - DNA, 1242 bp, Xylella fastidiosa 9a5c
  CDS (1)..(1242): transl_table=11
atgccaccgacgaaaacttcttttcccaaacaagacatccgaattttgctgctagaaggggtcagtcacagcgggatcgaaacgttccgcgcggcgggttactcgcagatcaagatccatacaacatcgctgccggaagaggcactgcaagcagagattgcggaagcgcacatcatcggtattcgctcgcgcactcaattgaatgcagaggtgctagggcatgccaaacgtctgatggccataggttgtttctgtatcgggacgaatcaggtggatttggatactgcggaattgagcgggatccccgtgttcaacgcgccatattccaatacgcgtagtgtggctgagctgatcattgcggaagcaattttgttgctgcgggggatcccgcagaaaaatgccgaatgccatcgtgggggctggtccaaatctgccatcaacagtcatgaagcacgcggcaaggtgttgggcatcgtgggatacggtcacatcggtacgcaagtcagtgtgctggcggaggcgatggggatgcaggtgattttctacgatattgaatccaagctctctttgggcaatgcgcgtccagcggcaagcttggatgagttgctcggcattgccgacgtggtgacgctgcatgtaccggaaacggcagcgaccaagaatatgcttggtcatgcagaattggcacgaatgaaaccgggggcgcatttgattaatgcatcgcgcggtacggttgtggagattgacgcgctggatgcggctctggtgtcgggtcatctgggcggggcggcagtggatgtattcccaagcgaacccaagggcaacagtgatccgttcatctcgccattgagcagacacgacaatgtgattttgacgccacatattgggggtagcacgctagaagcgcaggacaatattgggattgaagtggcagccaaattgatccgttatagcgataacggcagcacgctatcggccgtgaatttccctgaagtcagtttgccggagcacgtggggagtatgcgtttgctgcatatccaccgtaatgtgcccggggtgctgtcgcatatcaacgagctgttctcgcgtcacaacgtcaatattgatggtcagttcctgcgtaccgatgccacgttgggctatgtggtcatcgatatcggcgccagtcagacgcaggctctggcattaaaagaggcattgacgcaggttcccgggacgctgcgtacccgtctgctgtactga

SEQ ID NO: 82021 - protein, 413 aa, Xylella fastidiosa 9a5c
MPPTKTSFPKQDIRILLLEGVSHSGIETFRAAGYSQIKIHTTSLPEEALQAEIAEAHIIGIRSRTQLNAEVLGHAKRLMAIGCFCIGTNQVDLDTAELSGIPVFNAPYSNTRSVAELIIAEAILLLRGIPQKNAECHRGGWSKSAINSHEARGKVLGIVGYGHIGTQVSVLAEAMGMQVIFYDIESKLSLGNARPAASLDELLGIADVVTLHVPETAATKNMLGHAELARMKPGAHLINASRGTVVEIDALDAALVSGHLGGAAVDVFPSEPKGNSDPFISPLSRHDNVILTPHIGGSTLEAQDNIGIEVAAKLIRYSDNGSTLSAVNFPEVSLPEHVGSMRLLHIHRNVPGVLSHINELFSRHNVNIDGQFLRTDATLGYVVIDIGASQTQALALKEALTQVPGTLRTRLLY

SEQ ID NO: 82022 - DNA, 981 bp, Sulfolobus solfataricus P2
  CDS (1)..(981): transl_table=11
gtgataagtatggagactatacaaggtgtaaactctataggcaaattagatttcaaagtattaataactgatccagtagatcaatatatgataagaactttacaaaataatggactaattgtcgattataagcccgaaatcacaagagaggaattactaaagataatagaccagtaccaagttttaatagtaagaagcagaactaaggtagacaaggagataatccgttatggtgttaatcttaagattatagccagagctgggataggactagacaatatagatacagaggaggcgtctaagagaaatataaaaattgtgtatgcgcccggggcttctacagattctgcagcagaacttactataggattacttatcgccgcagctagaaaactatatgattccatgaatatggcaaagggtggcatattcaagaagatagagggaattgaattagcagggaagacaataggtattgttggattcggtagaataggtaccaaagtagctaaggtatgtaaggcattagatatgaacgtaattgcatatgacgttattaatataaaggaaaaggcgaatatagttggagtcagagtagctgaaagtttagaagaattactaaagaactcagatgtgataacctttcatgttacagtaggtaaagatgctaagccaatccttaacaaagatacatttaattacattaaagataatgcaatcataatcaacaccagtagagctgtagtgatagatgggaaagcattactagaatatattgataaaaaacacttaacttacgctacagatgttttgtggaatgaaccacctaaagaagattgggagattaaattattaagacacgagagagtgatagtaactactcacattggtgcccaaactaaagaagcacagcatagagttgcggtagttacaacagataatctcattactgctttaaaggaaatcggtgttctcaaatga

SEQ ID NO: 82023 - protein, 326 aa, Sulfolobus solfataricus P2
MISMETIQGVNSIGKLDFKVLITDPVDQYMIRTLQNNGLIVDYKPEITREELLKIIDQYQVLIVRSRTKVDKEIIRYGVNLKIIARAGIGLDNIDTEEASKRNIKIVYAPGASTDSAAELTIGLLIAAARKLYDSMNMAKGGIFKKIEGIELAGKTIGIVGFGRIGTKVAKVCKALDMNVIAYDVINIKEKANIVGVRVAESLEELLKNSDVITFHVTVGKDAKPILNKDTFNYIKDNAIIINTSRAVVIDGKALLEYIDKKHLTYATDVLWNEPPKEDWEIKLLRHERVIVTTHIGAQTKEAQHRVAVVTTDNLITALKEIGVLK

SEQ ID NO: 82024 - DNA, 918 bp, Clostridium acetobutylicum ATCC 824
  CDS (1)..(918): transl_table=11
atgataagaatattagctaatgatggaatgaataaaaatgcagtaaatggattaatagatcttggttatgaagttgtagaggaccattatgataaagacgaattacttgtgaaaataaaagaatttgacgttttagttgtaaggtctgcaacaaaagtaacaaaagaggttattgatgcagcaacagttaaaggggcaaaacttaagcttattataagagctggagttggagtagataatattgatgttacgtacgcaagagataaggggcttacagtaaataatacacctaatgctagcagtgcttcagtagcagaactagccataggacatatgtttgcagtttcaagatttataaatactgcaaatgtaactatgaggcaaggtaagtgggaaaagaaagcatacacaggaactgaaatttttggaaaaacgttggggcttataggatttggaagaattgcaagagaggttgctaaaagagcagaagcactaggtatgaaagtaatctataatgatatatgcggcaaagtagttggttatgatagctatgagttttatgatgatataaatggacttttgagggaggctgattttgtatcacttcatataccgtatgataagaaaaagggatatgtaataggagataatgagtttaatgcaatgaaagatggggcatttcttataaactgtgctaggggtggagttgtttcagaacaagcgcttttaaatgcaattaataatggcaaaataagaggggcagcgcttgatgtgtttgaaaatgaaccaaaaccttgtgcagaaattttagataatcctagagtttcagttactccacatataggagcgtcaactaaggaagctcaagctagaataggtgaagaaatagtaaatatagtagagaacacgtttaaatag

SEQ ID NO: 82025 - protein, 305 aa, Clostridium acetobutylicum ATCC 824
MIRILANDGMNKNAVNGLIDLGYEVVEDHYDKDELLVKIKEFDVLVVRSATKVTKEVIDAATVKGAKLKLIIRAGVGVDNIDVTYARDKGLTVNNTPNASSASVAELAIGHMFAVSRFINTANVTMRQGKWEKKAYTGTEIFGKTLGLIGFGRIAREVAKRAEALGMKVIYNDICGKVVGYDSYEFYDDINGLLREADFVSLHIPYDKKKGYVIGDNEFNAMKDGAFLINCARGGVVSEQALLNAINNGKIRGAALDVFENEPKPCAEILDNPRVSVTPHIGASTKEAQARIGEEIVNIVENTFK

SEQ ID NO: 82026 - DNA, 1596 bp, Agrobacterium tumefaciens str. C58
  CDS (1)..(1596): transl_table=11
atggcacctcgcgtactcgtatccgacgaactgtcggaaaccgccgtccagattttccgtgatcgtggcgtcgaagtcgatttccagccgaagcttggcaaggacaaggacaaacttgccgaaatcatcggcaattatgatggtctggccattcgttccgccaccaaggcgaccgaaaagctgatcgaggctgcgaccaatctgaaggtcatcggccgcgccggcatcggcgtcgacaatgtcgatattccggctgcctcgcgtcgcggcatcatcgtcatgaacacgccgttcggcaactccatcaccactgccgaacatgccatcgccctgatgtttgccgtcgcgcgccagcttccggccgccgatagctccacgcaggccggcaagtgggaaaagtcgaaattcatgggtgtcgaaatcaccggcaagacgctcggcgtcatcggtgccggcaatatcggcggcatcgtctgctcgcgcgctcttggcctcaagatgcacgttctagcctacgatcccttcctgtcgccggagcgcgcgcaggaaatgggcgtcaccaaggttgagctggacgagctgctggcgcaggccgatttcatcaccctgcacgtgccgatgaccgacaagacccgcggcattctcaatgctgaaaatctggccaagaccaagaagggcgtgcgcatcgtcaactgcgcccgtggtggtctggtggatgaagcagcccttgccgaagccatcaagtctggccatgtcgccggcgccggtttcgacgtgttcgaagtcgaacccgccaccgaaagcccgcttttcggtctgccaaacgtcgtctgcacgccgcatcttggcgcttcgaccacggaagcgcaggaaaatgttgccctgcaggttgccgagcagatgtcggattacctcgtcaagggtgccgtttccaacgccatcaacatgccgtcgatcacggctgaagaagcgccgcgcctgaagcccttcatccgtctcgcggatgttctcggctctttcgtcggtcaggtgcaggaaagcgccaccaaggaaatcgaaatcctttatgatggcgcaaccgccaacatgaacaccaaggcattgaccagcgcgttgcttgccggcctcatccgcagccaggttgccgatgtgaacatggtttccgcaccagtcatgatcaaggaaaagggtatcatcctctccgaagtcaagcgtgacaagaccggcgtttatgacggctacatcaagctgacggtgaagacggaaaaccagatccgctcggttgccggcacggtgttctcggatggcaagccgcgcttcatccagatcaagaacatcaacatggatgccgatgtcggatcgcacatgatctacatcaccaacaccgacgttcccggcatgatcggcttcatgggcaccacgctcggcgaggctggcgtcaacatcgccaacttccagcttggccgtgaaaaagaagccggcgacgccatcgcgcttctttatgtcgatggtccggtttccgaagaggtactcgacaagctgcgcgccaactcggcgatccgccaggtcaagccgctgacgtttaacgtcgactga

SEQ ID NO: 82027 - protein, 531 aa, Agrobacterium tumefaciens str. C58
MAPRVLVSDELSETAVQIFRDRGVEVDFQPKLGKDKDKLAEIIGNYDGLAIRSATKATEKLIEAATNLKVIGRAGIGVDNVDIPAASRRGIIVMNTPFGNSITTAEHAIALMFAVARQLPAADSSTQAGKWEKSKFMGVEITGKTLGVIGAGNIGGIVCSRALGLKMHVLAYDPFLSPERAQEMGVTKVELDELLAQADFITLHVPMTDKTRGILNAENLAKTKKGVRIVNCARGGLVDEAALAEAIKSGHVAGAGFDVFEVEPATESPLFGLPNVVCTPHLGASTTEAQENVALQVAEQMSDYLVKGAVSNAINMPSITAEEAPRLKPFIRLADVLGSFVGQVQESATKEIEILYDGATANMNTKALTSALLAGLIRSQVADVNMVSAPVMIKEKGIILSEVKRDKTGVYDGYIKLTVKTENQIRSVAGTVFSDGKPRFIQIKNINMDADVGSHMIYITNTDVPGMIGFMGTTLGEAGVNIANFQLGREKEAGDAIALLYVDGPVSEEVLDKLRANSAIRQVKPLTFNVD

SEQ ID NO: 82028 - DNA, 1596 bp, Sinorhizobium meliloti 1021
  CDS (1)..(1596): transl_table=11
atggcacctcgcgttctcgtatccgatgaactgtcggaaaccgctgtccagatattccgcgaccatggcgtggaagtggatttccagccgaagcttggcaaggacaaggagaagcttgccgagatcatcggcaattacgacggcctcgccatccgctcagccaccaaggtgaccgaaaagctgatcgccgccgcgaccaatctcaaggtcgtcggccgcgccggcatcggcgtcgacaatgtcgacattcccgccgcttcgcgccgcggcatcatcgtcatgaacacgcccttcggcaactcgatcaccaccgccgagcatgcgatcgccttgatgttcgcggttgcccgccagcttcccgctgccgacggctcgacccaggccggcaagtgggaaaagtcgaagttcatgggtgtcgagatcaccggcaaggtgctcggcgtcatcggcgccggcaatatcggctcgatcgtctgcgcccgcgcgatcggtctcaagatgcacgtcatcgcctatgatccgttcctgtcgaaggagcgggcggaggaaatgggggtcgtcaaggtcgagctcgacgaactcctcgcccaggcagacttcatcagcctgcacgtgccgctgacggacaagacccgcaacatcctgaacgcggaggcgatcgcgaaggccaagccgggcgtgcgtatcatcaactgcgcccgcggcggtctcgtcgatgaaaaggcgcttgcggaggccctcaaggccggccacgtcgccggcgcaggcttcgacgtcttcgaggtcgagcccgccaccgagagcccgctcttcggcctgccgaacgtcgtctgcaccccgcatctcggcgcatcgaccaccgaggcgcaggagaacgtcgctctgcaggtcgccgagcagatgtcggagtatctcgtcaagggtgcggtcaccaacgccatcaacatgccgtcgatcacggcggaagaggcgccgatcctaaagcccttcatccgactcgcggacgttctcggggcctttgtcgggcaggtcaccgaaagtgcgatcaaggagatcgagatactctacgacggctcgaccgcggcgatgaacaccaaggcgctgacgagcgcggcgcttgccggcctgatccgcccgcaggtggccgacgtcaacatggtttcggcgccggtcatggtcaaggaaaagggtgtgatcctttccgaggtcaagcgcgacaagaccggcgtcttcgacggctacatcaagttgactgtaaagacggcgaaccagacccgctcggtcgcaggtaccgtcttttccgacggcaagccgcgcttcatccagatcaagggcatcaatctcgatgcggatgtcggcaatcacatggtctacatcaccaacaccgacgttcccggcatgatcggcttcatcggatcgaccctcggcgacgcgggcgtcaacatcgccaacttccagctcggccgtgagaaacagggcggcgatgcaatcgcgctgctttacgtcgatggcccggtttcggagatcgtgctcgacaagctgcgggcgaacgaagcgatccgccaggcaaagccgctggtgttcaatatcgactga

SEQ ID NO: 82029 - protein, 531 aa, Sinorhizobium meliloti 1021
MAPRVLVSDELSETAVQIFRDHGVEVDFQPKLGKDKEKLAEIIGNYDGLAIRSATKVTEKLIAAATNLKVVGRAGIGVDNVDIPAASRRGIIVMNTPFGNSITTAEHAIALMFAVARQLPAADGSTQAGKWEKSKFMGVEITGKVLGVIGAGNIGSIVCARAIGLKMHVIAYDPFLSKERAEEMGVVKVELDELLAQADFISLHVPLTDKTRNILNAEAIAKAKPGVRIINCARGGLVDEKALAEALKAGHVAGAGFDVFEVEPATESPLFGLPNVVCTPHLGASTTEAQENVALQVAEQMSEYLVKGAVTNAINMPSITAEEAPILKPFIRLADVLGAFVGQVTESAIKEIEILYDGSTAAMNTKALTSAALAGLIRPQVADVNMVSAPVMVKEKGVILSEVKRDKTGVFDGYIKLTVKTANQTRSVAGTVFSDGKPRFIQIKGINLDADVGNHMVYITNTDVPGMIGFIGSTLGDAGVNIANFQLGREKQGGDAIALLYVDGPVSEIVLDKLRANEAIRQAKPLVFNID

SEQ ID NO: 82030 - DNA, 1242 bp, Yersinia pestis CO92
  CDS (1)..(1242): transl_table=11
atggcaaaagtatcactggagaaagacagaattaagtttctgttagtggaaggggtgcaccagagcgcggttgataacctgcgtgcagccggatatagcaatattgaataccataaaggtgccttagacgccgaatcactgaaggcatccattcgtgatgctcactttatcggaattagatcgcgcactcatctttccgaagacgtttttgcggcagcagaaaaattggttgctgtggggtgtttctgtatcggtactaaccaggttgatttaaaagcggcgaccaaacgtggtgtgccagtattcaatgcgcctttctccaatacccgttcggtagccgaaatggtattgggtgagttgctgctgatgttccgaggcattccgtctgctaacgcgaaagcgcaccgtggcgagtggaacaagttggcggtaggttccttcgaggcccgaggtaagaagctggggattatcggttacggtcatatcggtactcaactggggattctggctgaaagtatcggtatgaaagtcttcttttacgacatcgaaaataaactgtcgttagggaatgcgcagcaagttcgccaactgtcagatttactgaatatgagtgatgtggtcagcctgcatgtaccggaaaaccacactaccaagaatatgattggcgctgagcaattggcacagatgaagccgggtgcgctgttgattaatgcctctcgcggcaccgtggtcgatattccggccctgtgcgatgcgctgtccagcaatcacttgtcaggtgcggcaattgacgtcttccctgaagagcctgcgaccaataaagacccgttcaattcaccactgtgtgaatttgataatgtgttactgaccccgcatattggcggttctactcaggaagcgcaggagaatatcggtgatgaagtcgcgggtaagctggcgaagtattccgataatggctcaacgctatctgcggtgaatttccccgaagtttctctgccagcacatggtgataatacccgtcgcctgttgcatattcatgaaaaccggccaggcattttgaccagcattaacaccatttttgctgagcagaatgtcaatatcgcggcacagtatctacaaaccagcgctgatattggttatgtcgtgattgatgttgaaaccgatgatgcagataatgcggaaaaagccttgcaggcgatgaaggccattccagggacgatccgcgctcgcttattgtactaa

SEQ ID NO: 82031 - protein, 413 aa, Yersinia pestis CO92
MAKVSLEKDRIKFLLVEGVHQSAVDNLRAAGYSNIEYHKGALDAESLKASIRDAHFIGIRSRTHLSEDVFAAAEKLVAVGCFCIGTNQVDLKAATKRGVPVFNAPFSNTRSVAEMVLGELLLMFRGIPSANAKAHRGEWNKLAVGSFEARGKKLGIIGYGHIGTQLGILAESIGMKVFFYDIENKLSLGNAQQVRQLSDLLNMSDVVSLHVPENHTTKNMIGAEQLAQMKPGALLINASRGTVVDIPALCDALSSNHLSGAAIDVFPEEPATNKDPFNSPLCEFDNVLLTPHIGGSTQEAQENIGDEVAGKLAKYSDNGSTLSAVNFPEVSLPAHGDNTRRLLHIHENRPGILTSINTIFAEQNVNIAAQYLQTSADIGYVVIDVETDDADNAEKALQAMKAIPGTIRARLLY

SEQ ID NO: 82032 - DNA, 1581 bp, Caulobacter crescentus CB15
  CDS (1)..(1581): transl_table=11
atgaccgctccccgcgtcctcatcgctgacaagctcagccccgccgccgtcgagatcttcaagaaccgcggcctagccttcgacatcaagaccggcctgtccaaggacgaactgatcgccgtgatcggcgattatgacggcatcgccatccgctcgggcgccaagctcgacaaggacgtgatcgccgccgcgaacaagctgcgcgtcatcgcccgcgccggcatcggcgtcgacaatgtcgacatcccggccgccacggccaagggcatcgtcgtgatgaacacacccttcggcaactcgatcaccacggccgagcacgccatcgccatgatgttcgccctggctcgccagatccccgccgccgacgtctcgacgcaaggcggcaagtgggaaaagaaccgcttcatgggcgtggagctctacgccaagaccctgggtctgatcggcgccggcaacatcggcggcatcgtcgccgaccgcgctctgggcctgaagatgaaggtcgtggcctacgaccccttcctgtcgcccgagcgcgctgtggaaatgggcgtcgagaaggtcgaactcgatgagctgctggcccgcgccgacgtcatcaccctgcacaccccgctgaccgacaagacccgcaacatcctgtcggccgagaacctggccaagaccaagaagggcgtgatgatcgtcaactgcgcccgcggcggcctggtcgacgaggcggccctgcgcaagctgctggacgagggtcatgtcggcggcgcggcctttgacgtgttcaccgttgagccggccaaggaaaatccgctcttcggttcggacaaggtcgtggccaccccgcacctgggcgccagcaccaatgaagcccaggagaacgtcgccctgcaggtcgccgaacaggtcagcgactacctgctgaccggcgcggtcaccaacgccctgaacagcccctcgatcaccgccgaagaagcccccaagctgaagccgttcgtggccctggccgaaaagatcggcgcttttgcgggccagatggtcgacttcggcgtcaaggcgatcgacatcgcctatgagggcgaggtttcgaacctcaacgtcaagccgatgacctcggccgccctggcgggcgtgctgaagccgatgctggccgagatcaacatggtctccgccccggccatcgccaaggagcgcggcatcaccgtctcggagagccgccaggaagtcagccccacctatgacagcctgatgcgcgtgaccatcaccaccgagaagggcaagcgcgccttcgccggcacggtgatcgccggcgccccgcgcatcgtcgaggtcaagggcatggagctggacgcggccttctcgccagccatgctgtacgtcaacaacctggacaagccgggcttcatcggcgcgctgggcatgctgctgggcgaggcgggcgtcaacatcgccaccttcaacctgggccgcgtctcggccgacgaggacgccatcgcgctggtgggcgttgaccaggcgccggacgctggcctgctggccaagattcaggcgctgccgcacgtcaaggaagcccgcgccctgacgttctga

SEQ ID NO: 82033 - protein, 526 aa, Caulobacter crescentus CB15
MTAPRVLIADKLSPAAVEIFKNRGLAFDIKTGLSKDELIAVIGDYDGIAIRSGAKLDKDVIAAANKLRVIARAGIGVDNVDIPAATAKGIVVMNTPFGNSITTAEHAIAMMFALARQIPAADVSTQGGKWEKNRFMGVELYAKTLGLIGAGNIGGIVADRALGLKMKVVAYDPFLSPERAVEMGVEKVELDELLARADVITLHTPLTDKTRNILSAENLAKTKKGVMIVNCARGGLVDEAALRKLLDEGHVGGAAFDVFTVEPAKENPLFGSDKVVATPHLGASTNEAQENVALQVAEQVSDYLLTGAVTNALNSPSITAEEAPKLKPFVALAEKIGAFAGQMVDFGVKAIDIAYEGEVSNLNVKPMTSAALAGVLKPMLAEINMVSAPAIAKERGITVSESRQEVSPTYDSLMRVTITTEKGKRAFAGTVIAGAPRIVEVKGMELDAAFSPAMLYVNNLDKPGFIGALGMLLGEAGVNIATFNLGRVSADEDAIALVGVDQAPDAGLLAKIQALPHVKEARALTF

SEQ ID NO: 82034 - DNA, 1239 bp, Brucella melitensis 16M; identical to SEQ ID NO: 64573
  CDS (1)..(1239): transl_table=11

SEQ ID NO: 82035 - protein, 412 aa, Brucella melitensis 16M; identical to SEQ ID NO: 64574

SEQ ID NO: 82036 - DNA, 906 bp, Clostridium perfringens str. 13
  CDS (1)..(906): transl_table=11
atgttaagaatacttttaaatgatggattagataaaaaagctattagcaatttggaatttctaggttttgatgttgatactaatcattatgatatagaagatttaaaagaaaagattaaaaaagtagattgtatagttataaggtctgccacaaaaattagaagagaattaatagatgaagcaattaaaggtggaaagttaaaattaattataagaggtggagttggggtagataatatagatgttcaatatgctgaacaaaatggaattaaagtaagaaatactcctaatgcaagttcttcatcagttgcagagattatattagcccatatgttctctttggcaaggtttttaaatcaatctaatataactatgaaagctggtctttggaaaaagaaagattatgttggtgttgagcttgaaggaaaaactcttggaattataggtatgggaagaataggatctgaattagctaagaaatgtacagctttaggtatgaaaataatatactttgatctgatggatattaagaatatagacaataattatagaaaagtagaatttgatgagttattaagagaatcagattttatttctataaatatttctggaactaagagtataattggaagtgaagaattaaaaaaggttaaaaagggagtatttataataaatacttctaggggaaaagcactagatgaggaggcaataataactagtttaaatgatggaactttaggtggcgttggactagatgtattcttagaagagccaagtaaaaatttagaattaataaatcatcctaaagtaagtctaactcctcatattggagcttcaacaaaagaggctcagatgaaaataggggaggaagttataaatataataaaagaagagatgtataattaa

SEQ ID NO: 82037 - protein, 301 aa, Clostridium perfringens str. 13
MLRILLNDGLDKKAISNLEFLGFDVDTNHYDIEDLKEKIKKVDCIVIRSATKIRRELIDEAIKGGKLKLIIRGGVGVDNIDVQYAEQNGIKVRNTPNASSSSVAEIILAHMFSLARFLNQSNITMKAGLWKKKDYVGVELEGKTLGIIGMGRIGSELAKKCTALGMKIIYFDLMDIKNIDNNYRKVEFDELLRESDFISINISGTKSIIGSEELKKVKKGVFIINTSRGKALDEEAIITSLNDGTLGGVGLDVFLEEPSKNLELINHPKVSLTPHIGASTKEAQMKIGEEVINIIKEEMYN

SEQ ID NO: 82038 - DNA, 1767 bp, Arabidopsis thaliana
  CDS (1)..(1767)
atggcgacgtctctgaatctatcatcgatcttctcctcctcctcaaggctcgtcaccactccctcctctgtttttcccatccgtcagaggcgacggatcatcctcgttacgtcttcttcttccggaggtggaggaaaaccgacgattctcgtaacggagaagctaggccaagcggggatcgatctgcttaagaagtacgctaatgtggattgctcttatgatctgagtctcgaggagctttgtacgaagatctctctttgtgatgcgctcatcgtcaggagtggtaccaaggttgggagagatgtgtttgaatcgtcgcgtgggaggcttaaggttgttggacgcgctggtgttgggattgataacgtcgatttggcggcggcgactgagtatgggtgtttggttgttaatgctccgactgcgaacactgtggctgctgctgaacacggaattgcgcttttgaccgccatggctagaaacattgctcaagctgatgcttctatcaaagctggcaaatggacgagaaacaagtatgtaggtgtttcacttgtggggaagactcttgctgttcttggttttggtaaagttggatcagaggttgctagacgagccaggggacttggtatgcatgtcattacacatgatccttatgcaccagcggatcgtgcacgagctattggtgtggagcttgttagttttgaagtagctatttcaactgctgacttcatctctttgcatctgcctcttactgctgctacttcgaagatgatgaatgatgtgacctttgcgatgatgaagaaaggagtccgtattgttaatgttgctcgtggtggagttattgatgaggaagctcttttgagagcgcttgactcgggtattgttgctcaggcagctcttgatgtttttacagtagagccacctgttaaagataataagttggtgttacatgagagtgtcactgccacacctcatcttggtgctagtactatggaggctcaggaaggagtgtctatcgaagtcgcagaagctgttattggagctttgagaggagaacttgctgctaccgcggtcaatgcaccaatggttccactagaggtattgagggagctgaagccgtatgttgtacttgctgagaagcttgggaggctggctgtacaattggtaactggtggaagcggtgtgaatgctgtgaaagtgacttatgcttcttccagagctcctgatgatctcgacactagacttctccgagccatggtcataaaggggatcatcgaacccatttccagcgtattcataaatctggttaactccgattatattgccaaacaacgtggagtcaaaatctcagaagaacgtatggttctagacggctcacctgagaatccaattgaatacataactgttcggatagcaaacgtggaatcaagatttgccagcgctttatcagagtccggtgagatcaaagtagaaggcagagtgaaacaaggggttccaagtcttaccaaagtcggattatttggagtggatgtgagtttagaagggagtgtgattctgtgcaggcaagtagatcagcctgggatgatcggtaaagttgctagcatcttaggagatgaaaacgtcaacgtgagcttcatgagcgtcggtcgaatcgctccaggcaagcaagctgtgatggcaattggagtagatgaacaaccaagcaaagaaactttgaagaaaatcggagacattcctgccattgaagagtttgttttcctcaaactatag

SEQ ID NO: 82039 - protein, 588 aa, Arabidopsis thaliana
MATSLNLSSIFSSSSRLVTTPSSVFPIRQRRRIILVTSSSSGGGGKPTILVTEKLGQAGIDLLKKYANVDCSYDLSLEELCTKISLCDALIVRSGTKVGRDVFESSRGRLKVVGRAGVGIDNVDLAAATEYGCLVVNAPTANTVAAAEHGIALLTAMARNIAQADASIKAGKWTRNKYVGVSLVGKTLAVLGFGKVGSEVARRARGLGMHVITHDPYAPADRARAIGVELVSFEVAISTADFISLHLPLTAATSKMMNDVTFAMMKKGVRIVNVARGGVIDEEALLRALDSGIVAQAALDVFTVEPPVKDNKLVLHESVTATPHLGASTMEAQEGVSIEVAEAVIGALRGELAATAVNAPMVPLEVLRELKPYVVLAEKLGRLAVQLVTGGSGVNAVKVTYASSRAPDDLDTRLLRAMVIKGIIEPISSVFINLVNSDYIAKQRGVKISEERMVLDGSPENPIEYITVRIANVESRFASALSESGEIKVEGRVKQGVPSLTKVGLFGVDVSLEGSVILCRQVDQPGMIGKVASILGDENVNVSFMSVGRIAPGKQAVMAIGVDEQPSKETLKKIGDIPAIEEFVFLKL

SEQ ID NO: 82040 - DNA, 921 bp, Pyrococcus furiosus DSM 3638
  CDS (1)..(921): transl_table=11
gtgaaggtgcttgtagctgcccctcttcatgaaaaggctctaaatatactaaaagatgctggttttgaagttatttacgaggagtatccggaggaaaataggcttttagaattagttagagatgttgaagctattatagttagaagtaagccaaagattacaagaaaggtaatagaaaatgctccaaaattaaaggtaattgcaagagctggagttggattggataacatagatgttgaagctgctaaagagaaaggcattgaagttgttaatgctccagcagccagttctagaagtgttgcagagttggctgttgggttgatgtttgcagttgctaggaagatagcttatgctgatagaaagatgagggaaggaaagtgggcgaagaaggagtgtatgggtatagaacttgaaggaaaaacccttggaataattggatttggaagaattggctatcaagttgcgaagattgcaagagctttaggcatgaaattgttactttatgacccctaccctaacgaagagagagctaaagaagtcggtggaaagtttgtggatctagaaacactgctaaaggagagcgatatagtcacaattcatgttccattaattccggaaacatatcacctcattaacgaagagagacttaggcttatgaagagaacagctattttaataaacacttcgagaggggctgtagtcgatacacaggccctaattaaagctcttgaagagggatggattgcgggtgcagggttagatgtatttgaagaagagcctcttccagaaaaccatccactaacgaaatttgacaatgttgttctaacacctcacataggagcctcaacttacgaagcccaggagagagcgggagtagaagtagcggaaaaaattgtagaaatactaaagaagagctcttaa

SEQ ID NO: 82041 - protein, 306 aa, Pyrococcus furiosus DSM 3638
MKVLVAAPLHEKALNILKDAGFEVIYEEYPEENRLLELVRDVEAIIVRSKPKITRKVIENAPKLKVIARAGVGLDNIDVEAAKEKGIEVVNAPAASSRSVAELAVGLMFAVARKIAYADRKMREGKWAKKECMGIELEGKTLGIIGFGRIGYQVAKIARALGMKLLLYDPYPNEERAKEVGGKFVDLETLLKESDIVTIHVPLIPETYHLINEERLRLMKRTAILINTSRGAVVDTQALIKALEEGWIAGAGLDVFEEEPLPENHPLTKFDNVVLTPHIGASTYEAQERAGVEVAEKIVEILKKSS

SEQ ID NO: 82042 - DNA, 1569 bp, Methanopyrus kandleri AV19
  CDS (1)..(1569): transl_table=11
gtggccaagattctggttacggaccctatccacgaggacgcgctgaggaagctcgaggagctcggagaggtcgtcgtgctggaggacgccgacgaggaggagatccgtgagcacgtgcgggacgcggacgcctgggtggtgaggagcgggacgcgggtgacgagggagctgatcgaggaggctaagaatctcaaggtcatcgcccgggcgggtgtgggcgtcgacaacatcgacgtgaaggccgcgacggaacgcggtatcatcgtcgtcaacgcgcccgagtcgagctcgatctcggtagccgagcacacgatgggtctcatcctggcgttggcccgaaagataccgcaggcggacaggtcggtgcgccgcggggagtgggacaggaagcggttcatgggcgtcgagctggccggaaagacgttgggtctcataggactgggtaggataggtcagcaggtggccaagcgtgcgaaggcgttcgagatggaggtgacagcgtacgacccgtacataccggagaaggtggcggaggagctcggggtggagctcgtcgacgagctcgaggagctgctggagcgcgctgacgtcgtctcgatccacgtgcccctgaccgaggagacggaggggatgatcggcgaggaggagctgaagcggatgaagagctcggcgttcctggtcaactgcgcgcgcggtaagatcgtggacgaggaggcgctgatcaaggcgctgaaggagggctggatcgcgggcgccgccctcgacgtgttcgccgaggagccacccggtgaggaccacccgctgtacgagctggataacgtggtcctcacgccgcacatcggcggttcgaccggcgaggcgcagcgggccgcgggtctgatcgtagcccgcgagatcgagagggtgttgaagggcgagatcccggagaacgtggtcaacctgccgttggccggtgtgccggacgacgtgagggagctgatggaggtcggtgaaaggctggccgacgccgccgcccaggtactcgaggagcgcctgaggtgggtacaggttaaggtgggtggtgagctcgaggaccgtgaaaaggaggcgctgaagcgggccgtcctgaaagggtgtctggaccgagtgttgacggagcccgtcaccatggtcaacgctgtagacgtcgccgagcggagggggatcgagttcgagttcacggtctcggacgagctcgagggaggagaggtggaggtggtcgtccgctcggacgaggacgagatctcgctcaggggcgagctggtcgaggatcgggtgtacctgacgtcggtgaacgggtacgaggtacggttcaagctcagcggtccgacgctcttcgtgtggcacgtggacaggccgggggtcatcggggaggtcgggataatcctgggcgagcaccgcgtgaacgtggccgcgatggaggtaggacgccgggagcgcggcggcgaggcgatcatggtcatacggatggacgaggagccgcccgaggagtgcctgcgggccatcgacgaggtcgaaccggtccgccgggtggagctggtcaggtgctga

SEQ ID NO: 82043 - protein, 522 aa, Methanopyrus kandleri AV19
MAKILVTDPIHEDALRKLEELGEVVVLEDADEEEIREHVRDADAWVVRSGTRVTRELIEEAKNLKVIARAGVGVDNIDVKAATERGIIVVNAPESSSISVAEHTMGLILALARKIPQADRSVRRGEWDRKRFMGVELAGKTLGLIGLGRIGQQVAKRAKAFEMEVTAYDPYIPEKVAEELGVELVDELEELLERADVVSIHVPLTEETEGMIGEEELKRMKSSAFLVNCARGKIVDEEALIKALKEGWIAGAALDVFAEEPPGEDHPLYELDNVVLTPHIGGSTGEAQRAAGLIVAREIERVLKGEIPENVVNLPLAGVPDDVRELMEVGERLADAAAQVLEERLRWVQVKVGGELEDREKEALKRAVLKGCLDRVLTEPVTMVNAVDVAERRGIEFEFTVSDELEGGEVEVVVRSDEDEISLRGELVEDRVYLTSVNGYEVRFKLSGPTLFVWHVDRPGVIGEVGIILGEHRVNVAAMEVGRRERGGEAIMVIRMDEEPPEECLRAIDEVEPVRRVELVRC

SEQ ID NO: 82044 - DNA, 1572 bp, Methanosarcina acetivorans C2A
  CDS (1)..(1572): transl_table=11
atgaaagtattagtcagcgactcactctccaatgaaggtttggagatcctaaaagagcactttactgttgacgttaacaccggtctctccgaagatgagctggtggaaaagatcggggaatacgatgccctcgtaatacgcagcggcacccaggttactcagagagtaatcgaggctgctgacaacctgaagattgtcggaagagcgggagtcggagtcgacaatgtcgatgtggacgcagccacaaagaaaggaattatcgtggccaacgctcccgaaggaaacatgatttcggcagcagaacacacaattggcatgatgatggcgatgtccaggaatatccctcaggccaatgcttccctgaaaggcagggaatggaagcgcaacaagttcatgggcgttgaggtcaagggtaagactctgggaattatagggctcggaagaatcgggtctgaagttgcaaagcgggcttcagggcttgagatgaacctcatgggatacgaccccttcatctccgagaagcgggctatggaactcggagtcaagctggctacggttaatgagatctcaaaagaggctgactacatcactgtgcacactccccttatcaaggagacccgaaacatcctcgatgacgagcagtttgacctcatgaagtcaggagtcaggatactcaactgcgcacgcggcggtattatcaatgaagcagctctggtaagagccctcgaaagcgggaaggtaggcggggcagccctggacgtatttgtcgaagagcctccttttggcagccctcttctcaactttgacaatgttatcgtaactcctcacctcggagcctccacccaggaagctcaggttaatgttgcaatcgatatcgccaaagaagttgtttccgtccttaccggcgggcttgcaaagaatgcaatcaatattccgtccgtaaagcccgaagctatggcagtccttgccccgtatatcaggcttgcagaactcatgggcaagattgcagggcagctcgtggacagcaactacgaaaaagtagaaatcgggtataatggggaaatctcaggaaaagataccaggccccttacggtttccgccctcaaaggcctgcttgagatggctctcggagccggggtaaactatgtcaatgcccctgcccttgcgaagtccagacagatcgcagttgtggaaagcaagtccgaatccgcagaagagtattcttccactgtcagcatcaaactctccagcggagaaaccgcaaagctggttgcaggaaccgttgttggagatgagcccaagattgtttccatcgatgaggacagggtagacattttccctgcaggccgcatgatctttgccaagcacattaacaagccgaacgttatcggaccctgctgcatggtgctcgggaaaaacaacatcaacatttcaggtatgcaggtcggcaggtcagaagtcggtggcgtgaccatgatggtccttaatgtggacaccgatgtctccgatgcgatccttgatgaggtcaggcaggtcccaggcatcctcaatgccaagcttgtgaccctctga

SEQ ID NO: 82045 - protein, 523 aa, Methanosarcina acetivorans C2A
MKVLVSDSLSNEGLEILKEHFTVDVNTGLSEDELVEKIGEYDALVIRSGTQVTQRVIEAADNLKIVGRAGVGVDNVDVDAATKKGIIVANAPEGNMISAAEHTIGMMMAMSRNIPQANASLKGREWKRNKFMGVEVKGKTLGIIGLGRIGSEVAKRASGLEMNLMGYDPFISEKRAMELGVKLATVNEISKEADYITVHTPLIKETRNILDDEQFDLMKSGVRILNCARGGIINEAALVRALESGKVGGAALDVFVEEPPFGSPLLNFDNVIVTPHLGASTQEAQVNVAIDIAKEVVSVLTGGLAKNAINIPSVKPEAMAVLAPYIRLAELMGKIAGQLVDSNYEKVEIGYNGEISGKDTRPLTVSALKGLLEMALGAGVNYVNAPALAKSRQIAVVESKSESAEEYSSTVSIKLSSGETAKLVAGTVVGDEPKIVSIDEDRVDIFPAGRMIFAKHINKPNVIGPCCMVLGKNNINISGMQVGRSEVGGVTMMVLNVDTDVSDAILDEVRQVPGILNAKLVTL

SEQ ID NO: 82046 - DNA, 1602 bp, Thermoanaerobacter tengcongensis MB4
  CDS (1)..(1602): transl_table=11
ttgaagataattgtcacagaaaaaatctcagaaaatggtatcgattatcttaaaaaatacgctgatgttgacgtaaagaccaatatttctagggaagagcttttagaggttataaaagattacgacgccataatagttagaagtgccaccaaagtagacagagaacttatagaaaagggagagaaactgaaagtcataggcagagctggtaatggtgttgacaatattgatgttgaagcggcgactcaaagaggcattctagttgtaaatactcctgcaggaaataccattgccgctgctgagctcactattggccttatgcttgccattgccagaaatataccacaggcataccatgcagctttaaacggcgatttcagaagggataggtttaaaggagtagagctaaacggtaaaacggttggtataataggattaggtagaattggttctttggttgcgtctcgccttgcggctttcaatatgagagtgattgcttatgacccctacatgccagatgagagatttgaaaagtgcggtgtcaagagagttacattggatgagctattagagcaatcggatttcatcactattcacattcccaagactgaagagacaaaaaagatgataggagaaaaagaatttaaaaaaatgaaaaaaggtgtgagaatagtaaatgctgcaagaggtggcattatagacgaaaaagcgctttacaatgctataaaagaaggtatagtggcagctgtagggctggatgttttagaagtagagccaaagtataatgtggagcatcaggattttcacaatcctttgttagaacttcccaatgtggtttttactcctcacttaggagcttctacttatgaggcgcaggaaaatattagcatagcaattgcgcaggaagtcatatcagcgttaaatggcaatctctatggcaacatagtaaatcttcccggacttaaatcagatgaattttctcggttaaaaccttacatgaaattggcagaagtattaggagccctttattaccagataaatgaaacacctgcaaaattaattgaagtcatatacagaggagaagttgcaaagagcaatacagaaattgttaccctgtatgctattaaaggatttttaaagcctatattagaggaagatgtaagtgttgtgaatgcaaagttaagagcaaaagaaatgggcatagaaattgtagaaggaaaaattgaagagatagaccattattccagccttgtcattttaaaaattacagataccaatggcaaaaggacacaatttgctggaacaacatacggagaagaattgagaattgtggagtatatgggacataaagtgaattttgagcctacagagtacatgctttttgtcaagaataaagacgtgccgggagttataggccacataggaaatgtattaggagattttggtataaacatctctactatgcaggtaagccccaataaaaatgacggtacagcccttatgcttgtaagcaccgataaagaaattccagaggaggccgtggaatctttaaacaaactaaatagcataattaaagcaaaagcggtaaaagggttggtgtga

SEQ ID NO: 82047 - protein, 533 aa, Thermoanaerobacter tengcongensis MB4
MKIIVTEKISENGIDYLKKYADVDVKTNISREELLEVIKDYDAIIVRSATKVDRELIEKGEKLKVIGRAGNGVDNIDVEAATQRGILVVNTPAGNTIAAAELTIGLMLAIARNIPQAYHAALNGDFRRDRFKGVELNGKTVGIIGLGRIGSLVASRLAAFNMRVIAYDPYMPDERFEKCGVKRVTLDELLEQSDFITIHIPKTEETKKMIGEKEFKKMKKGVRIVNAARGGIIDEKALYNAIKEGIVAAVGLDVLEVEPKYNVEHQDFHNPLLELPNVVFTPHLGASTYEAQENISIAIAQEVISALNGNLYGNIVNLPGLKSDEFSRLKPYMKLAEVLGALYYQINETPAKLIEVIYRGEVAKSNTEIVTLYAIKGFLKPILEEDVSVVNAKLRAKEMGIEIVEGKIEEIDHYSSLVILKITDTNGKRTQFAGTTYGEELRIVEYMGHKVNFEPTEYMLFVKNKDVPGVIGHIGNVLGDFGINISTMQVSPNKNDGTALMLVSTDKEIPEEAVESLNKLNSIIKAKAVKGLV

SEQ ID NO: 82048 - DNA, 1590 bp, Streptomyces coelicolor A3(2)
  CDS (1)..(1590): transl_table=11
gtgagctcgaaacccgtcgtactcatcgctgaagagctgtcgcccgcgaccgtggacgcactcggccccgacttcgagatccgccactgcaacggcgcggaccgggccgaactgctccccgccatcgccgacgtggacgcgatcctggtccgctccgcgaccaaggtcgacgccgaggccgtggccgccgccaagaagctcaaggtcgtcgcgcgcgccggggtcggcctggacaacgtcgacgtctccgccgccaccaaggccggcgtgatggtggtcaacgccccgacctccaacatcgtcaccgccgccgagctggcctgcggcctgatcgtcgccaccgcccgcaacatcccgcaggccaacgccgcgctgaagaacggcgagtggaagcgcagcaagtacaccggcgtggagctggccgagaagaccctcggcgtcgtcggcctcggccgcatcggcgcgctcgtcgcgcagcgcatgtcggccttcggcatgaaggtcgtcgcctacgacccctacgtgcagcccgcgcgggccgcgcagatgggcgtcaaggtgctgtccctggacgagctgctggaggtctccgacttcatcacggtccacctgcccaagacccccgagaccctcggcctgatcggcgacgaggcgctgcgcaaggtcaagccgagcgtccgcatcgtcaacgccgcgcgcggcggcatcgtcgacgaggaggcgctgtactcggcgctcaaggagggccgcgtcgccggcgccggcctcgacgtgtacgccaaggagccctgcaccgactcgccgctgttcgagttcgaccaggtggtcgccaccccgcacctcggcgcctccaccgacgaggcccaggagaaggccggcatcgccgtcgccaagtcggtccgcctggccctcgccggtgagctggtccccgacgcggtcaacgtccagggcggtgtcatcgccgaggacgtcaagcccggtctgccgctcgccgagcgcctcggccgcatcttcaccgcgctcgcgggtgaggtcgccgtccgcctcgacgtcgaggtctacggcgagatcacccagcacgacgtgaaggtgctggagctgtccgccctcaagggcgtcttcgaggacgtcgtcgacgagacggtgtcgtacgtcaacgccccgctgttcgcccaggagcgcggcgtcgaggtccggctgaccaccagctcggagtccccggagcaccgcaacgtcgtcatcgtgcgcggcaccctctcggacggcgaggaggtgtcggtctccggcacgctggccggcccgaagcacctccagaagatcgtcgccatcggcgagtacgacgtggacctcgccctcgccgaccacatggtcgtcctgcgctacgaggaccgtcccggcgtcgtcggcaccgtcggccggatcatcggcgaggcgggtctcaacatcgccggcatgcaggtcgcccgcgcgacggtcggcggcgaggcgctggccgtcctcaccgtcgacgacacggtgccctccggggttctggcggaggtcgcggcggagatcggcgccacgtccgcccggtccgtcaacctcgtctga

SEQ ID NO: 82049 - protein, 529 aa, Streptomyces coelicolor A3(2)
MSSKPVVLIAEELSPATVDALGPDFEIRHCNGADRAELLPAIADVDAILVRSATKVDAEAVAAAKKLKVVARAGVGLDNVDVSAATKAGVMVVNAPTSNIVTAAELACGLIVATARNIPQANAALKNGEWKRSKYTGVELAEKTLGVVGLGRIGALVAQRMSAFGMKVVAYDPYVQPARAAQMGVKVLSLDELLEVSDFITVHLPKTPETLGLIGDEALRKVKPSVRIVNAARGGIVDEEALYSALKEGRVAGAGLDVYAKEPCTDSPLFEFDQVVATPHLGASTDEAQEKAGIAVAKSVRLALAGELVPDAVNVQGGVIAEDVKPGLPLAERLGRIFTALAGEVAVRLDVEVYGEITQHDVKVLELSALKGVFEDVVDETVSYVNAPLFAQERGVEVRLTTSSESPEHRNVVIVRGTLSDGEEVSVSGTLAGPKHLQKIVAIGEYDVDLALADHMVVLRYEDRPGVVGTVGRIIGEAGLNIAGMQVARATVGGEALAVLTVDDTVPSGVLAEVAAEIGATSARSVNLV

SEQ ID NO: 82050 - DNA, 1623 bp, Methanosarcina mazei Go1; identical to SEQ ID NO: 64575
  CDS (1)..(1623): transl_table=11

SEQ ID NO: 82051 - protein, 540 aa, Methanosarcina mazei Go1; identical to SEQ ID NO: 64576

SEQ ID NO: 82052 - DNA, 1242 bp, Xanthomonas campestris pv. campestris str. ATCC 33913; identical to SEQ ID NO: 64577
  CDS (1)..(1242): transl_table=11

SEQ ID NO: 82053 - protein, 413 aa, Xanthomonas campestris pv. campestris str. ATCC 33913; identical to SEQ ID NO: 64578

SEQ ID NO: 82054 - DNA, 1242 bp, Xanthomonas axonopodis pv. citri str. 306; identical to SEQ ID NO: 64579
  CDS (1)..(1242): transl_table=11

SEQ ID NO: 82055 - protein, 413 aa, Xanthomonas axonopodis pv. citri str. 306; identical to SEQ ID NO: 64580

SEQ ID NO: 82056 - DNA, 1605 bp, Staphylococcus aureus subsp. aureus MW2
  CDS (1)..(1605): transl_table=11
atgaagcaatttaatgtactcgttgcagatcccatatcaaaagatggtatcaaagcattattagatcacgaacaattcaatgtagatattcaaactggcttgtccgaagaagcattaatcaaaattataccttcataccatgctttaatcgttcgtagtcaaactacggttactgaaaatatcataaatgctgctgattctttaaaagtaatcgcacgcgccggtgttggtgtagataatattaatattaatgctgcaacattaaaaggtattttagttattaatgccccagatggtaatacgatttcagctactgaacatacactggcaatgttattatcaatggcacgaaatattccgcaagcacaccaatcacttacaaataaagaatggaatcgaaatgcatttaaaggtactgagctttatcataaaacattaggtgtcattggtgctggtagaattggtttaggtgttgctaaacgtgcgcaaagtttcggaatgaaaatactagcttttgacccttacttaacggatgaaaaagcaaaatctttaagcattacgaaggcaacagttgatgagattgcccaacattctgatttcgttacattacatacaccactaacacctaaaacaaaaggcttaattaatgctgacttttttgccaaagcaaaacctagtttgcaaataatcaatgtggcacgtggtggtattattgatgaaaaggcgctaataaaagcattagacgaaggacaaattagtcgggcagctatcgatgtgtttgaacatgaacctgcaactgactcgcctcttgttgcacatgataaaattattgttacacctcatttgggtgcttcaacagtcgaagctcaagaaaaagtggcaatttctgtttcaaatgaaatcatcgaaattttaattgatggtactgtaacgcatgcagtgaatgcacctaaaatggacttaagcaatatagatgatactgtaaaatcattcatcaatttaagccaaacagttggtgaattagctattcaattaatgtacaatgcaccaagctctattaaaattacgtacggtggcgacttagcctctattgatagtagtttattaacacgtacaattattactcatattttaaaagatgatcttggtcctgaagtcaatattatcaatgctctaatgttgttaaatcaacaacaagtgacattaaatattgaaaataataaagcagagacaggttttagtaactacttagaggtagaactatcaaacgatagcgattccgttaaagttggcgcttctgtctttacaggtttcggtccaagaattgttagaattaataatttttctgtagacttaaagccaaatcaatatcaaattgtgtcatatcataatgatactccaggtatggtaggaaaaactggcgcattgttaggtaaatacaatatcaacattgcatctatgactttaggtagaactgaagcgggcggagatgcgctaatgattttatccgttgatcaacctgtttcaaacaatataattgatgaacttaaacaagttggtgaatacaatcaaattttcacaactgaattgacggtacagtcataa

SEQ ID NO: 82057 - protein, 534 aa, Staphylococcus aureus subsp. aureus MW2
MKQFNVLVADPISKDGIKALLDHEQFNVDIQTGLSEEALIKIIPSYHALIVRSQTTVTENIINAADSLKVIARAGVGVDNININAATLKGILVINAPDGNTISATEHTLAMLLSMARNIPQAHQSLTNKEWNRNAFKGTELYHKTLGVIGAGRIGLGVAKRAQSFGMKILAFDPYLTDEKAKSLSITKATVDEIAQHSDFVTLHTPLTPKTKGLINADFFAKAKPSLQIINVARGGIIDEKALIKALDEGQISRAAIDVFEHEPATDSPLVAHDKIIVTPHLGASTVEAQEKVAISVSNEIIEILIDGTVTHAVNAPKMDLSNIDDTVKSFINLSQTVGELAIQLMYNAPSSIKITYGGDLASIDSSLLTRTIITHILKDDLGPEVNIINALMLLNQQQVTLNIENNKAETGFSNYLEVELSNDSDSVKVGASVFTGFGPRIVRINNFSVDLKPNQYQIVSYHNDTPGMVGKTGALLGKYNINIASMTLGRTEAGGDALMILSVDQPVSNNIIDELKQVGEYNQIFTTELTVQS

SEQ ID NO: 82058 - DNA, 1344 bp, Yersinia pestis KIM; identical to SEQ ID NO: 64581
  CDS (1)..(1344): transl_table=11

SEQ ID NO: 82059 - protein, 447 aa, Yersinia pestis KIM; identical to SEQ ID NO: 64582

SEQ ID NO: 82060 - DNA, 1584 bp, Thermosynechococcus elongatus BP-1; identical to SEQ ID NO: 64583
  CDS (1)..(1584): transl_table=11

SEQ ID NO: 82061 - protein, 527 aa, Thermosynechococcus elongatus BP-1; identical to SEQ ID NO: 64584

SEQ ID NO: 82062 - DNA, 1587 bp, Oceanobacillus iheyensis HTE831
  CDS (1)..(1587): transl_table=11
atgacttttcacgtacttattagtgatccattaagcgaagagggactcaaaccgcttcaagaagctgaaaatattgaggttgtgattaacccaggatggaatgaacaagaattatcagatcaaatagattcatttgatgccattttagttcgaagtcagacccaagtaacacgtgccttaattgaaaaagcaagcaatttaaaaatcattggtcgagctggagttggtgttgataatatagatcttgaagctgctacagaaaatggagttattgttgtcaatgcgccaaatgggaatacaaactctgcagcagagcatacgatggcaatgattatggcattatcaagaaatatcccacaagcttatcacgcgttaaaacaaaaacaatgggatcgaaaacgttttgtaggcgttgagttaaaacaaaagacactgggcattgtcggattaggaaggatcggtgctgaagtagctgctcgagcaaaaggtcaacgtatgaatgtcattgcctacgatcctttcttcacagaagaaaaagcagaacaaatgggtgttcaatatgggacactagaagacgtattacgtgcaggtgattttatcactgtccataccccactgcttaaggaaacaaagcatttaattaacaaagatgcttttgacctgatgaaagatggtgtacaaattgttaattgcgctcggggcggaattattgatgaagatgcattatacgatgcaatacagtctggaaaagtagcaggtgccgcacttgatgtgttcgaacaagaaccttttacagagcataagttgttaacacttcccgaagttgtagccacaccgcacttaggtgcgagtactgtagaagctcaagaagtagtcgctattgatgtgagtcatgatgtcctcaggttctctcaaggagaagcagttcgtaatcctgttaatatgccatcagttccaagcgagatcatgtataaaattgagccgtacttccaccttgctgaaaagctcggtacatttattacagatttaacaaaagaagtggtaagcgaagtaaaaattacgtatgctggtgatttagcagatattgaaattgcaccattaactcggaatgcggttaaaggtctcttaaaacgttacttaggaagtagaatcaatgatgtaaacgcattgtttctagctgaccgcaaaggaattgaggtcagtgaaagtaaaacgtcgtctaaaaaagggttcacaaacttaatcacaattgaggtttcaggaaaatttggaactagaaaagtagcaggaacattattaaatggtttaggtccacgtttagttcgtgtcgatgagtaccgcgtagatataacaccagaaggtcatatggttgtaatccaacatcgtgatcagccaggggttattggtcgaatgggaagtactatcgcaaaacatgatattaatattgctacgatgcaagtggatcgctcagatattggtggagacgctattatgattctaaccatagatcgacacctagcagatgaagcattaaacgaaatcgaaagcctagatgaaattaaatcagttactgcgattgatttataa

SEQ ID NO: 82063 - protein, 528 aa, Oceanobacillus iheyensis HTE831
MTFHVLISDPLSEEGLKPLQEAENIEVVINPGWNEQELSDQIDSFDAILVRSQTQVTRALIEKASNLKIIGRAGVGVDNIDLEAATENGVIVVNAPNGNTNSAAEHTMAMIMALSRNIPQAYHALKQKQWDRKRFVGVELKQKTLGIVGLGRIGAEVAARAKGQRMNVIAYDPFFTEEKAEQMGVQYGTLEDVLRAGDFITVHTPLLKETKHLINKDAFDLMKDGVQIVNCARGGIIDEDALYDAIQSGKVAGAALDVFEQEPFTEHKLLTLPEVVATPHLGASTVEAQEVVAIDVSHDVLRFSQGEAVRNPVNMPSVPSEIMYKIEPYFHLAEKLGTFITDLTKEVVSEVKITYAGDLADIEIAPLTRNAVKGLLKRYLGSRINDVNALFLADRKGIEVSESKTSSKKGFTNLITIEVSGKFGTRKVAGTLLNGLGPRLVRVDEYRVDITPEGHMVVIQHRDQPGVIGRMGSTIAKHDINIATMQVDRSDIGGDAIMILTIDRHLADEALNEIESLDEIKSVTAIDL

SEQ ID NO: 82064 - DNA, 1200 bp, Bifidobacterium longum NCC2705; identical to SEQ ID NO: 64585
  CDS (1)..(1200): transl_table=11

SEQ ID NO: 82065 - protein, 399 aa, Bifidobacterium longum NCC2705; identical to SEQ ID NO: 64586

SEQ ID NO: 82066 - DNA, 1602 bp, Brucella suis 1330
  CDS (1)..(1602): transl_table=11
atggcacctcgcgttctcgtatccgataagctttcgcccactgccgtccagattttcaaggatcgcggcgtggacgtcgattacctgcccgatctcggcaaggacaaggaaaagcttctcgaagtcatcggcgaatatgacggtctggcgattcgttcggccaccaaggtcacggaaaagctgatcgcagccgccaagaagctgaaagtcgttggtcgcgccggtatcggcgtcgacaatgtcgatattccggccgcttcgcgccgcggtatcatcgtcatgaatacgccgttcggcaattcgatcaccaccgccgaacacgctattgcgctgatgttcgctgtcgcccgccaattgccggaggccgacacctccacccgcgctggcaagtgggaaaagaaccgcttcatgggcgtggaaatcaccggcaagacgctgggtgtcgttggctgcggcaatatcggctcaatcgtcgccacacgcggcataggcctgaaaatgcatgtggtggctttcgatccgttcctttcggatgcacgcgcgcaggaactgggcgttgaaaaggtcgagctggatgaattgctggcgcgcgccgatttcatcacgctccacacgccgctcaccgacaagacccgcaatattatcaatgcgcaaacgctggcgaaaatgaaaccgggtgtgcgcattgtcaattgcgcgcgcggtggcctgatcgtggaaaaggatctgattgcggcgctgaaatccggccatgtggcgggtgctggcattgacgtctatgaaaccgagcctgcaacggaaaacgagcttttttctctgcccaatgtggtctgcacgccgcatctgggggcatcgacttcggaagcacaggaaaatgtcgcacttcaggtggccgaacagatgtcggactatcttgtgaagggcgccgtctccaacgccatcaacatgccctcgatcacggcggaagaagcgccgcgcctgaagccgttcgtgaagcttgccgatgtgctgggcgcttttgtcggtcaggtcacggatgagccgatccaggaagtggaagtgcttttcgacggttccaccgcctcgatgaatacgcgtgcactgctcagtgctgctctggccggtctcatccgttcgcaggttgccgacgtcaacatggtttccgcgccaatcatggtgaaggagcgcggcatcatcgtctcggaagtcaagcgcgacaagtccggcatttttgacggctatatcaagctgacggtgaagaccaccgtgcgcgaacgctccattgcgggcacctgtttctccgatggcaagccgcgttttatccagatcaagggaatcaatctcgacgccgaggtcggcccgcatatgctttatgtcaccaacaaggacgttccgggcatgatcggccttcttggcacgatatgcggcaaacatgatgtaaatattgcgaatttcgcgctcgggcgcgaccatccgggtggcgatgcaatcgcaatgctttatgtggatgaacagattccacaggcagcccttgacgaactgatggctcaggaggcaatcagggcggcgacaccgcttgagttcaacgtcggggaagtttga

SEQ ID NO: 82067 - protein, 533 aa, Brucella suis 1330
MAPRVLVSDKLSPTAVQIFKDRGVDVDYLPDLGKDKEKLLEVIGEYDGLAIRSATKVTEKLIAAAKKLKVVGRAGIGVDNVDIPAASRRGIIVMNTPFGNSITTAEHAIALMFAVARQLPEADTSTRAGKWEKNRFMGVEITGKTLGVVGCGNIGSIVATRGIGLKMHVVAFDPFLSDARAQELGVEKVELDELLARADFITLHTPLTDKTRNIINAQTLAKMKPGVRIVNCARGGLIVEKDLIAALKSGHVAGAGIDVYETEPATENELFSLPNVVCTPHLGASTSEAQENVALQVAEQMSDYLVKGAVSNAINMPSITAEEAPRLKPFVKLADVLGAFVGQVTDEPIQEVEVLFDGSTASMNTRALLSAALAGLIRSQVADVNMVSAPIMVKERGIIVSEVKRDKSGIFDGYIKLTVKTTVRERSIAGTCFSDGKPRFIQIKGINLDAEVGPHMLYVTNKDVPGMIGLLGTICGKHDVNIANFALGRDHPGGDAIAMLYVDEQIPQAALDELMAQEAIRAATPLEFNVGEV

SEQ ID NO: 82068 - DNA, 1239 bp, Brucella suis 1330
  CDS (1)..(1239): transl_table=11
atgaccgaacgcctctccctctcccgtgatcgcatcaatgttcttcttctggaaggcatcagccagaccgccgtggaatatttcaaatcctccggctacaccaatgtcacacatctgccgaaagcattggacaaggccgatctgatcaaggcgatttcttctgcgcatatcatcggcattcgctcgcgtacgcaattgaccgaggagattttcgccgctgccaaccgtctgatcgcagtcggctgcttttcggtcggcaccaatcaggtggaactgaaagctgcccgcaagcgcggtatccccgtcttcaatgcgccattctccaacacgcgctcggttgccgaactggtgattggcgagatcatcatgctgatgcgccgcattttcccgcgttccgtttcagcccatgcgggtggctgggaaaagacagccatcggaagccgcgaagtgcgcggcaagacgctcggcatcgtcggctacggcaatatcggctcgcaggtcggcaatctggctgaaagcctcggtatgaccgtgcgttattacgacacgtccgacaagctgcaatatggcaatgtgaagcctgcggcgagccttgatgaacttctgaaaacttccgatgtggtgagtctgcacgtcccgtcgagcaaatccacctcgaagctcatcaccgaagccaagctgcgcaagatgaagaagggcgctttcctcatcaataatgcgcgcggttccgttgtcgatctcgaagccttggccaaggttttgcaggagggtcatcttgcgggcgcggcgatcgatgttttccctgtggagccggcctccaatggcgagaggttctcaaccccgcttcaggggctggagaatgtcattctcacgccgcatatcggcggctcgaccgaggaagcgcaggaacgtatcggtacggaagtcacccgcaagctggtcgaatattccgatgtcggctccactgtgggcgccgtcaattttccgcaggtgcaattgccgccacgcccgaccggcacgcgcttcatgcatgtgcatgaaaaccgtccgggtattctgaacagcctcatgaacgtgttttcgcaccaccatatcaatatcgccagccagtttctccagacggatggcgaggttggctatctcgtgatggaagccgatggcgtgggcgaagcaagcgatgccgtcttgcaggaaatccgcgaaattcccggtacgattcgcgctcgcctgctatactga

SEQ ID NO: 82069 - protein, 412 aa, Brucella suis 1330
MTERLSLSRDRINVLLLEGISQTAVEYFKSSGYTNVTHLPKALDKADLIKAISSAHIIGIRSRTQLTEEIFAAANRLIAVGCFSVGTNQVELKAARKRGIPVFNAPFSNTRSVAELVIGEIIMLMRRIFPRSVSAHAGGWEKTAIGSREVRGKTLGIVGYGNIGSQVGNLAESLGMTVRYYDTSDKLQYGNVKPAASLDELLKTSDVVSLHVPSSKSTSKLITEAKLRKMKKGAFLINNARGSVVDLEALAKVLQEGHLAGAAIDVFPVEPASNGERFSTPLQGLENVILTPHIGGSTEEAQERIGTEVTRKLVEYSDVGSTVGAVNFPQVQLPPRPTGTRFMHVHENRPGILNSLMNVFSHHHINIASQFLQTDGEVGYLVMEADGVGEASDAVLQEIREIPGTIRARLLY

SEQ ID NO: 82070 - DNA, 1236 bp, Leptospira interrogans serovar Lai str. 56601; identical to SEQ ID NO: 64587
  CDS (1)..(1236): transl_table=11

SEQ ID NO: 82071 - protein, 411 aa, Leptospira interrogans serovar Lai str. 56601; identical to SEQ ID NO: 64588

SEQ ID NO: 82072 - DNA, 1593 bp, Corynebacterium efficiens YS-314
  CDS (1)..(1593): transl_table=11
gtgagccagaatggccgtccggttgtacttatcgccgacaagctagcgcagtccaccgttgacgcgctgggtgacgcagttgaggtccgttgggttgacggacccaaccgccccgaactgctcgaagcagtcaaggaggcagacgccctcctcgtgcgttccgccaccaaggtggatgcggaagtcatcgcagcagcgcccaacctgaagatcgtcggccgtgctggcgttggtctggacaacgtcgacatccccgccgccaccgaggccggcgtcatggtcgccaatgccccgacctccaacatccactccgcctgtgagcacgccgtctccctgctcctgtccaccgcacgccagatcccggccgctgacgccaccctgcgtgacggcgagtggaagcgctcctccttcaacggtgtggagatcttcggcaagaccgtcggaatcgtcggcttcggccacatcgggcagctgttcgctcagcgcctcgccgcgttcgagaccaccatcatcgcctacgatccctacgccaacccggcacgtgccgcacagctcggcgtggagctcgtggagctggaagaactgatgggtcgctccgacttcgtcaccatccacctgcccaagaccaaggagaccgccggcatgttcgacgccgagctcctggccaaggccaagaagggccagatcatcatcaacgcggcccgcggtggcctcgtcgatgagcaggcactggcggatgcgatcgagtccggccacatccgtggcgccggtttcgatgtctacgagaccgagccctgcaccgactccccgctgttcaagctgccccaggttgttgtcaccccgcacctgggtgcatccaccgaggaggcacaggaccgcgccggcaccgacgttgccgattccgtgctcaaggcactggccggcgagttcgtcgccgacgccgtgaacgtctccggtggcaaggtcggcgaggaggtcgccctgtggatggagctcgcccgcaagctcggtctgctcgccggcaagcttgtcgacggtgcccccgtctccctcgaggtcaccgcccgcggtgagctctccagcgaggatgtcagcgccctgggtctgtccgccgtccgtggcctgttctccggcatcatcgaggagcctgtcaccttcgtcaacgcaccgcgcatcgccgaggagcgtggcgtgagcgttgacgtcaagaccaactccgagtccgtcacccaccgctccgtcatcgaggtcaaggttgtcaccggcgagggcaacaccgcctccgtcgtgggcgcactgaccggcctggagcgcgttgagaagatcacccgcatcaacggccgtggcctggacatgcgcgcagagggacgcaacctgttcctcgagtacaccgacgcaccgggtgccctgggcaccgtgggcaccaagctgggtgccgccggcatcaacatcgaggccgcagctctcacccaggcagctaagggcgatggtgccgtgctgatcctgcgcgtcgagcgtgaggttccggaggagctggtcgaggagatcaccgccgagctcaacgccgattccttccaggtcaacctgggctaa

SEQ ID NO: 82073 - protein, 530 aa, Corynebacterium efficiens YS-314
MSQNGRPVVLIADKLAQSTVDALGDAVEVRWVDGPNRPELLEAVKEADALLVRSATKVDAEVIAAAPNLKIVGRAGVGLDNVDIPAATEAGVMVANAPTSNIHSACEHAVSLLLSTARQIPAADATLRDGEWKRSSFNGVEIFGKTVGIVGFGHIGQLFAQRLAAFETTIIAYDPYANPARAAQLGVELVELEELMGRSDFVTIHLPKTKETAGMFDAELLAKAKKGQIIINAARGGLVDEQALADAIESGHIRGAGFDVYETEPCTDSPLFKLPQVVVTPHLGASTEEAQDRAGTDVADSVLKALAGEFVADAVNVSGGKVGEEVALWMELARKLGLLAGKLVDGAPVSLEVTARGELSSEDVSALGLSAVRGLFSGIIEEPVTFVNAPRIAEERGVSVDVKTNSESVTHRSVIEVKVVTGEGNTASVVGALTGLERVEKITRINGRGLDMRAEGRNLFLEYTDAPGALGTVGTKLGAAGINIEAAALTQAAKGDGAVLILRVEREVPEELVEEITAELNADSFQVNLG

SEQ ID NO: 82074 - DNA, 1230 bp, Pseudomonas putida KT2440; identical to SEQ ID NO: 64591
  CDS (1)..(1230): transl_table=11

SEQ ID NO: 82075 - protein, 409 aa, Pseudomonas putida KT2440; identical to SEQ ID NO: 64592

SEQ ID NO: 82076 - DNA, 1590 bp, Bradyrhizobium japonicum USDA 110
  CDS (1)..(1590): transl_table=11
atgaccaaacccaaagttctcatttccgacgcgctctcgcccgccgccgtgcagatcttcaaggatcgcggcatcgaggtcgacttccagcccaatctcggcaaggacaaggacaagctcgccgagatcatcggcaattacgacggcctcgcgatccgctccgcgaccaaggcgaccgccaagatcctcgagaaggcaaccaacctcaaggtgatcggccgcgccggcatcggcgtcgacaacgtcgagatccccgccgccacggccaagggcatcatcgtgatgaacacgccgttcggcaattcgatcacgaccgccgagcacgccatcaccctgatgctcgcgctcgcccgcgagatcccgcaggccgacgcctcgacccaggccggcaagtgggagaagaaccgcttcatgggcgtcgagatcaccggcaaggtgttaggggtggtcggctgcggtaatatcggctcgatcgtcgcggaccgcgcgctcggcctgcgcatgaaggtggtcgcgttcgatccgttcctgtcgccggagcgcgccaaggacatcggcgtcgagaaggtcgatctcgacgacctcctcaagcgcgccgacttcatcacgctgcacaccccgctgaccgagaagaccaagaacatcatcgatgctgccgcgatcgccaagatgaagaagggcgtgcgcctgatcaactgcgcccgcggcggtctcgtcgacgagcaggcggtggtcgatgcgctgaattccaagcacatcgcgggcgccgccttcgacgtcttcgtcgaggagcccgcgaataccaacgtgctgttcggccatcccaacgtgatctgcacgccgcatctcggcgcctccaccaccgaagcgcaggagaacgtcgcgctccaggtcgccgagcagatgtcggactatctgctgaccggcgccatctcgaacgcggtcaacttcccctcgatcacggcggaagaagcgccgaagctgaagccgttcatcgcgctcgccgagaagctcggctcgttcgccggccagctcaccgagagcggcatcctcaaggtcgagatcacctatgagggccatgtcgccgagatgaagatcaaggcgatcacctccgccgtgctgtcgggcctgctgcggccgatgctgggcgaggtcaacgtggtgtccgcgcccgtggtcgccaaggagcgtggcatggtggtggacgagatcgtgcgcgccgcccagagcgactatgagagcctgatcaccgtcacggtggcgacggagcgccaggagcgctcggtctccggcaccgtgtatcatgacggcaagccgcgcctcgtcgacgtcaagggcatccgcgtcgacgccgagttcggcaagtcgatgatctacgtgaccaacgaggacaagcccggcttcatcggcgcgttcgcgagcctgcttggcgccgccaagctcaacatcgcgaccttccatctcggccgcgtcaagctgggcggcgacgccatcgcgctggtcgaggtcgacggcgcggtgccggccgacgtgctcgccaaggtgcaggcgctgccgcaggtcaagcaggccaaggcgctgacgttctga

SEQ ID NO: 82077 - protein, 529 aa, Bradyrhizobium japonicum USDA 110
MTKPKVLISDALSPAAVQIFKDRGIEVDFQPNLGKDKDKLAEIIGNYDGLAIRSATKATAKILEKATNLKVIGRAGIGVDNVEIPAATAKGIIVMNTPFGNSITTAEHAITLMLALAREIPQADASTQAGKWEKNRFMGVEITGKVLGVVGCGNIGSIVADRALGLRMKVVAFDPFLSPERAKDIGVEKVDLDDLLKRADFITLHTPLTEKTKNIIDAAAIAKMKKGVRLINCARGGLVDEQAVVDALNSKHIAGAAFDVFVEEPANTNVLFGHPNVICTPHLGASTTEAQENVALQVAEQMSDYLLTGAISNAVNFPSITAEEAPKLKPFIALAEKLGSFAGQLTESGILKVEITYEGHVAEMKIKAITSAVLSGLLRPMLGEVNVVSAPVVAKERGMVVDEIVRAAQSDYESLITVTVATERQERSVSGTVYHDGKPRLVDVKGIRVDAEFGKSMIYVTNEDKPGFIGAFASLLGAAKLNIATFHLGRVKLGGDAIALVEVDGAVPADVLAKVQALPQVKQAKALTF

SEQ ID NO: 82078 - DNA, 1242 bp, Xylella fastidiosa Temecula1; identical to SEQ ID NO: 64597
  CDS (1)..(1242): transl_table=11

SEQ ID NO: 82079 - protein, 413 aa, Xylella fastidiosa Temecula1; identical to SEQ ID NO: 64598

SEQ ID NO: 82080 - DNA, 1602 bp, Clostridium tetani E88
  CDS (1)..(1602): transl_table=11
atggataaagccaaaatattaattgtagataaaatagatactaaaggaatagaacttttggaaagtgaacccaactttgaagtagatataaaaatgggattagaaagagaaaaacttttaaatataatagaaaattatgatggtcttattataagaagtgacacaaatatagatatagaacttatgaatatggctaaaaaacttaaagttgtaggtcgtgctggaaatggtgtagataacattgatataccagaagctactaaaaggggcataatagtagctaatactccagatagtaataccatatcagcatgtgaacttaccataggacttttacttgctcaatcaagaaatatagcaaaaacagataggttcttaaaagaaggaaattgggatagagattcctttatgggaacagagcttttcaataaaactttaggtattattggtcttgggagaattggtagtctagtagctacaagaatgaatgcctttgacatgaaggtcatagcttatgatccttatatatccgatgaaagatttaaaagatttaacgtagaaaagaaggatactttagaagatcttttaaaagaatcagattttataacaattcacaccccaagaacagaggaaaccattaatataatatcagaaaaagaattggaattaatgaaagatggagtaagaattgtaaatgcagctagaggaaaattaataagtgaaaaagctctttgcaaaggtcttaaaaaaggtaaaattgcaagtgttggtatagatgttcatgaacatgaacctagatatagtgcagatctttatgaatatgaaaatgtagtggttactcctcacataggtgcaacaactatagaagctcaacagaatgtaggtgtaaccatagctaaacaagttataaatggaattaaaggagatatagttccaaatgctgttaaccttccaactattcatagagatgaattaaaagaaattaaaccttatattgatttagcagaaaaattaggcaagatatactatcagcttaacaaaggtgcaattaaattagttgatattacctactggggtgatataggttgtcaagatacagaaatggtaactatagcttttataaagggacttttagaacctgtaatggctgataaaataaactatataaatgctatgattaaagccgaagaaggtggaataggcgttaattctaaaaagatctgtaatcatcataacaattattcaaatttgataacaataaaaataactaataacacaggagatacatcatttaccctatcaggaaccatatccaatagaaatgagggaaaattggtagaaattatggaatatgaagtagatgttaaacctacagaatgtatggtattccttcaaaattacgacgttccaggggtaataggtcatgttggtactttcttgggaactaatggtgtcaatgttgcaactatgcaggttggtagaaaactaaaaggtgataaagctctaatgttattgaatgtagatgataaagttacccaagataccttattaggtcttcaaaagcatgatgatatactttgggcaaaatttgttcaactttaa

SEQ ID NO: 82081 - protein, 533 aa, Clostridium tetani E88
MDKAKILIVDKIDTKGIELLESEPNFEVDIKMGLEREKLLNIIENYDGLIIRSDTNIDIELMNMAKKLKVVGRAGNGVDNIDIPEATKRGIIVANTPDSNTISACELTIGLLLAQSRNIAKTDRFLKEGNWDRDSFMGTELFNKTLGIIGLGRIGSLVATRMNAFDMKVIAYDPYISDERFKRFNVEKKDTLEDLLKESDFITIHTPRTEETINIISEKELELMKDGVRIVNAARGKLISEKALCKGLKKGKIASVGIDVHEHEPRYSADLYEYENVVVTPHIGATTIEAQQNVGVTIAKQVINGIKGDIVPNAVNLPTIHRDELKEIKPYIDLAEKLGKIYYQLNKGAIKLVDITYWGDIGCQDTEMVTIAFIKGLLEPVMADKINYINAMIKAEEGGIGVNSKKICNHHNNYSNLITIKITNNTGDTSFTLSGTISNRNEGKLVEIMEYEVDVKPTECMVFLQNYDVPGVIGHVGTFLGTNGVNVATMQVGRKLKGDKALMLLNVDDKVTQDTLLGLQKHDDILWAKFVQL

SEQ ID NO: 82082 - DNA, 1230 bp, Pseudomonas syringae pv. tomato str. DC3000; identical to SEQ ID NO: 64599
  CDS (1)..(1230): transl_table=11

SEQ ID NO: 82083 - protein, 409 aa, Pseudomonas syringae pv. tomato str. DC3000; identical to SEQ ID NO: 64600

SEQ ID NO: 82084 - DNA, 1233 bp, Vibrio parahaemolyticus RIMD 2210633; identical to SEQ ID NO: 64601
  CDS (1)..(1233): transl_table=11

SEQ ID NO: 82085 - protein, 410 aa, Vibrio parahaemolyticus RIMD 2210633; identical to SEQ ID NO: 64602

SEQ ID NO: 82086 - DNA, 1233 bp, Salmonella enterica subsp. enterica serovar Typhi Ty2; identical to SEQ ID NO: 64603
  CDS (1)..(1233): transl_table=11

SEQ ID NO: 82087 - protein, 410 aa, Salmonella enterica subsp. enterica serovar Typhi Ty2; identical to SEQ ID NO: 64604

SEQ ID NO: 82088 - DNA, 1173 bp, Bacillus cereus ATCC 14579
  CDS (1)..(1173): transl_table=11
atgtttcgtgttcaaacgttaaatcaaattgcagaaaaaggtttgcaagtttttactgaagaacgttatgaagtaggagatagaatcaatcatccagatggaattttgcttcgtagctactctttacatcaagaagagttttcaaaagacttaaaggcgattgcaagagctggcgctggtgtaaataatattcctgtcgagcgatgtacagaaaaaggaattgtagtatttaacacgccgggggcaaatgcaaacgctgtaaaggaactcattattgccagtcttattatgtcttcacgtaacattattaatggtgtaagttggacgaaaaacttagagggtgaagaagtaccacagcttgttgaatcaggaaaaaaacaatttgttggatcagaaattgcagggaaacgtctaggtgttatcggacttggcgcaatcggtgctttagttgcgaacgatgcgttagcgttagggatggatgttatcggatatgacccttacatttcagttgaaacagcttggcgtctttctacacatgtgcaaagagcatttagccttgatgaaatttttgcaacatgtgattatattacattgcatattcctcttacgaatcaaacgaaggggattattggggaacacgctgtagagaagatgaaaagagggatgcgtctatttaatttctctagaggagaacttgtagatgaaaaggttcttcaaaaagcattagaagaagatattattacacattacgtaacggacttcccgaatgaaaatgtaataaagatgaaaaatgtaacagcgacgcctcaccttggtgcatctacgtctgaatcagaagaaaattgtgcagtaatggcagcacgtcaattacgtgaatatttagagacaggaaatatacgtaattcagtcaactatccaaatgttgagctgccgtatatcggaaagaaacgcattacaattatgcatcaaaacgtcccgaatatggtagggcaaattacaggatgcttagcggaacatcatattaatattgccgatatgactaatcgtagtaaacattcttgggcatacacaatgattgatatcgataacggaattgatgatataataaaagagaatattgtagaaaatataagcaaaattacaggtgttgtagccgttcgaatgattgtgtaa

SEQ ID NO: 82089 - protein, 390 aa, Bacillus cereus ATCC 14579
MFRVQTLNQIAEKGLQVFTEERYEVGDRINHPDGILLRSYSLHQEEFSKDLKAIARAGAGVNNIPVERCTEKGIVVFNTPGANANAVKELIIASLIMSSRNIINGVSWTKNLEGEEVPQLVESGKKQFVGSEIAGKRLGVIGLGAIGALVANDALALGMDVIGYDPYISVETAWRLSTHVQRAFSLDEIFATCDYITLHIPLTNQTKGIIGEHAVEKMKRGMRLFNFSRGELVDEKVLQKALEEDIITHYVTDFPNENVIKMKNVTATPHLGASTSESEENCAVMAARQLREYLETGNIRNSVNYPNVELPYIGKKRITIMHQNVPNMVGQITGCLAEHHINIADMTNRSKHSWAYTMIDIDNGIDDIIKENIVENISKITGVVAVRMIV

SEQ ID NO: 82090 - DNA, 1173 bp, Bacillus anthracis str. Ames
  CDS (1)..(1173): transl_table=11
atgtttcgtgttcaaacgttaaatcaaatagcagaaaaaggtttgcaagtacttggcggagagcgttatgaagtaggggagagaatcaatcatccagatggtattttacttcgcagttattctttacatcaagaagaattttcaaaagatttaaaggcgattgcgagagctggtgcaggggtaaataatattcctgtcgagcgatgtacagaaaaagggattgtagtctttaatacgccaggggcaaatgccaatgcagtaaaggaacttatcatcgccagtcttattatgtcttcacgtaacattattaacggcgtaagctggacgaaaaatttagaaggtgaggaagtaccacagcttgttgaatcagggaaaaaacaatttgttggatctgaaattgcgggaaaacgtctaggagttatcgggcttggtgcaatcggagctttagttgcgaacgatgcgttagcgttagggatggacgttgtcggatatgatccttacatttcagttgaaacagcttggcgcctttctacacatgtgcaaagagcatttagtttagatgaaatttttgcaacgtgtgattatattacccttcatattcctcttacgaatcaaacgaagggaatgattggtgaacacgctgtagagaagatgaaaaaaggtatgcgtctattcaatttctctagaggagaacttgtagatgaaaaggtgcttcaaaaagcgttagaagaagagattattgcacattacgtaacggacttcccgaatgaaaatgtgataaagatgaaaaatgtaacagcgacgcctcaccttggtgcatctacgtctgaatcagaagaaaattgtgcagtcatggcagcgcgtcaattacgtgaatatttagagacaggaaatattcgtaattcagtcaactatccaaatgttgagctgccgtatatcggaaagaaacgtattacaatcatgcatcaaaacgttccgaacatggtaggacaaattacagggtgtttagcagagcatcatattaatattgcagatatgattaatcgtagtaaacattcttgggcgtacacaatgattgatatcgataacggaattgatgatataataaaagagaacattgtggaaaatataagcaaaattacaggtgttgtagccgttcgaatgattgtgtaa

SEQ ID NO: 82091 - protein, 390 aa, Bacillus anthracis str. Ames
MFRVQTLNQIAEKGLQVLGGERYEVGERINHPDGILLRSYSLHQEEFSKDLKAIARAGAGVNNIPVERCTEKGIVVFNTPGANANAVKELIIASLIMSSRNIINGVSWTKNLEGEEVPQLVESGKKQFVGSEIAGKRLGVIGLGAIGALVANDALALGMDVVGYDPYISVETAWRLSTHVQRAFSLDEIFATCDYITLHIPLTNQTKGMIGEHAVEKMKKGMRLFNFSRGELVDEKVLQKALEEEIIAHYVTDFPNENVIKMKNVTATPHLGASTSESEENCAVMAARQLREYLETGNIRNSVNYPNVELPYIGKKRITIMHQNVPNMVGQITGCLAEHHINIADMINRSKHSWAYTMIDIDNGIDDIIKENIVENISKITGVVAVRMIV

SEQ ID NO: 82092 - DNA, 1581 bp, Helicobacter hepaticus ATCC 51449
  CDS (1)..(1581): transl_table=11
atgaagtataaaatcgttgtgtgcgaccatatccatcaaaaaggactagatttacttacagcccaaagtgatgtgcagatggagaatcttgctagtttgccaaaagatgagctacttactaagattaaagaggctgatgtcgtcattacgaggagttctactgatgttgatgaagcatttttagcatcttcagggcaaatacgtgcggtagtgcgtgcaggtgtgggcgtagataatgttgatattgaaggctgctctcgtaaaggcattgttgtgatgaatgtgcctacagcaaatacaatcgcagctgttgaacttacaatggctcatcttattaatgccgtgcgaaattttcctggagcgaatacgcagcttaagcacgagcgtaagtggaaacgtgaagattggtatggtattgagcttaaaggtaaaaagcttggtattattggatttggtaatattggtagtcgtgtggggataagggcgagagcatttgaaatggaagtattagcctatgacccctacattttgccttcaaaagctactgatttaggcgtggcttatgcaacaaatttcgaagacattctctcttgtgatattattacaattcacacgcctaagaatgcagaaacaaaaaatatgattaccgccaagcaaattgcacaaatgaaagatggagtgatacttattaattgcgctcgcggtggtttatataatgaaaaagatttatatgatgctttaagtgttggtaagattaaatgggcgggaattgatgtatttgataaagaaccagctattaataatgcgctgcttgatttgccaaatgtgtatgtaacgccgcatattggggcaaatactttagaatctcaagagcaaattgctatacaagctgcccaagctgcaatagaggcagcaagaggttcaagctaccctaatgcgcttaatcttcccgttaaggaatctgaattgccctctatggttaagccctatcttgaattgatacaaaaacttgcttttttggcagtgcaggcaaataagggtgtgattacctcaatacacatagaagctcaaggcgagattagtgcttatggagattcattgcagacttttgctcttgtgggagcgcttaatgcgagtttaggtgataaaattaattatgttaatgcaccttttgttgctaaagagcgaggtattgatgtcaaaatgacgcttaaacaagaaagtgaaacttataaaaaccatatttatattactcttagcacacaaaatgagagtattactcttagcggtgcagtatttgaagataggcatttgcgtcttacttcaatcaatcattttcaatttgatattgagccaaagggtaaaatgatatttttcaaaaatacagatgtgccgggtgtaattggactcgtaggaagtattttaggcaatcatcaagtcaatatttctgattttcgtcttgcgcgtcaaaataaagaagcaatggctgttattcttgtagattctgaagtatcaaatgaagttattggacagcttgaaaatatccctgcgtgtttgagtataaagattgttaatgtataa

SEQ ID NO: 82093 - protein, 526 aa, Helicobacter hepaticus ATCC 51449
MKYKIVVCDHIHQKGLDLLTAQSDVQMENLASLPKDELLTKIKEADVVITRSSTDVDEAFLASSGQIRAVVRAGVGVDNVDIEGCSRKGIVVMNVPTANTIAAVELTMAHLINAVRNFPGANTQLKHERKWKREDWYGIELKGKKLGIIGFGNIGSRVGIRARAFEMEVLAYDPYILPSKATDLGVAYATNFEDILSCDIITIHTPKNAETKNMITAKQIAQMKDGVILINCARGGLYNEKDLYDALSVGKIKWAGIDVFDKEPAINNALLDLPNVYVTPHIGANTLESQEQIAIQAAQAAIEAARGSSYPNALNLPVKESELPSMVKPYLELIQKLAFLAVQANKGVITSIHIEAQGEISAYGDSLQTFALVGALNASLGDKINYVNAPFVAKERGIDVKMTLKQESETYKNHIYITLSTQNESITLSGAVFEDRHLRLTSINHFQFDIEPKGKMIFFKNTDVPGVIGLVGSILGNHQVNISDFRLARQNKEAMAVILVDSEVSNEVIGQLENIPACLSIKIVNV

SEQ ID NO: 82094 - DNA, 1587 bp, Prochlorococcus marinus subsp. marinus str. CCMP1375; identical to SEQ ID NO: 64605
  CDS (1)..(1587): transl_table=11

SEQ ID NO: 82095 - protein, 528 aa, Prochlorococcus marinus subsp. marinus str. CCMP1375; identical to SEQ ID NO: 64606

SEQ ID NO: 82096 - DNA, 1221 bp, Bordetella pertussis Tohama I
  CDS (1)..(1221): transl_table=11
ttgttgtacaggcaacccaacatggcccagattgttctgttcgagaatatccaccccagcgcccgcgccgtcttcagcgcggccggctataccgacatcgtcgcccacgcggcggcgctgccttcgggcgagctgcgcgaggccctgcgcggcgccgaggtggtgggtatccgctcgcggacccatctggacgccgacctgctggcggccaaccccgacctgcgcgtggtggggtgcttttgcatcggcaccaaccaggtcgacctggacgccgccatgatgcgcggggtgccggtcttcaacgcgccgttctccaacacccgctcggtggccgagctggtgctgggcgaagccatcctgctgctgcgccggatccccgagaagaacgcccgcgtccacctggggcattgggacaagagcgccgccggcgcctacgaggcccgcggcaagacgctggggatcgtcggctacggcaacatcggttcgcagatcagcaccctggccgaggccatcggcatgcgcgtggtgttcttcgacgtcgaggccaagctgccgctgggcaacgcgcgcgccgccggctcgctggccgagctgctggagcaggccgatgtcgtcaccttgcacgtgcccggcggcaagtccacccagaacatcgtcaacgccgacaccctggcgcgcatgaagcgcggcgcgattctcatcaacgcctcgcgcggcacggtggtggacatccaggcgctgcacgacgccctggccagcggccacctggccggcgcggcgctggacgtgtttccgaccgagcccaagagcgccgacgaaccgctggccagcccgctgatcggcatgcccaacgtcgtgctcacgccgcacatcggcggcagcacccaggaatcccaggaaaacatcggccgcgaagtggccgagaaactggtgcgcttcctgcaagcaggcaccaccaagagcgccgtcaatttccccgagctgtcgtaccaggcgcccgtgggcggctcgcgcatcatccacgtgcaccgcaacgcccccggcgcgctgggcgcgctggacaacctgatggcccagcatggcctgaacatcgtcagccagagcctgcagaccaagggccagatcggctacgccgtcaccgacgtcgacggcgaagtcagcgacaccgtcctggccgacctgcgcagccacccggtcaccgtgaggtgcgaaaagctgtaa

SEQ ID NO: 82097 - protein, 406 aa, Bordetella pertussis Tohama I
MLYRQPNMAQIVLFENIHPSARAVFSAAGYTDIVAHAAALPSGELREALRGAEVVGIRSRTHLDADLLAANPDLRVVGCFCIGTNQVDLDAAMMRGVPVFNAPFSNTRSVAELVLGEAILLLRRIPEKNARVHLGHWDKSAAGAYEARGKTLGIVGYGNIGSQISTLAEAIGMRVVFFDVEAKLPLGNARAAGSLAELLEQADVVTLHVPGGKSTQNIVNADTLARMKRGAILINASRGTVVDIQALHDALASGHLAGAALDVFPTEPKSADEPLASPLIGMPNVVLTPHIGGSTQESQENIGREVAEKLVRFLQAGTTKSAVNFPELSYQAPVGGSRIIHVHRNAPGALGALDNLMAQHGLNIVSQSLQTKGQIGYAVTDVDGEVSDTVLADLRSHPVTVRCEKL

SEQ ID NO: 82098 - DNA, 993 bp, Bordetella parapertussis 12822
  CDS (1)..(993): transl_table=11
gtgagaacctcgaccatgaaatgcctgatcgtccaacccattcatgaagaaggcctggcgctgctgcgcgaggccggcgtcgaatgcatcgcgccggccagcgccgccatggccgacgtcgctgcggccatcgccgactgcgacgcggccatcacccgcaacgccggcctggatacgcgggccatcgaggccggccggcgcctgcgcgtcatcggcaaccatggcaccggcaccaacatgatcgacctggccgcggccgagcggctcggcattccggtggtcaacacgcccggcgccaacgcgcgctcggtggccgaactggcgctggccatggcgatggcgctgctcaagcgcaccgtaccgctgaaccaggcggtgcgccagggcaactggaacatccgctacgaagccgggctgcgcgagctgtccggcatgtcgctgggcatcgtcggctttggccagatcggccgcgccctggcggccatggcaatcggcggcttcggcatgcgggtgcacgtctactcgccctcggtggcgccgcaggacatcgccgcggccggctgccagcgggccgacagcctgcccgcgctggcgcgcgaggccgacatcgtctcgctgcaccggcccgcgcgccccggcgccggccccctggtcgatgacgcgttgctgcaggccatgaagccgggcgcgctgctcatcaacaccgcgcgcgccgacctggtcgacgaagcggcgctggcgcgccacctcgaggcgggccggctcggcggcgccgggctggacgtcttctccagcgaaccgccgccggccgaccatccgctgctgcgcctgccccaggtggtgctggccccgcatgccggcggcagcaccgaccaggcgctggcccgtactgcgcgcgcggtcgccgagcaggtgatcgaagtgctgcgcgatgcgcgcccggcccatctgatcgccccgcacgcctggccgcgccggcgtggcgcgcgataa

SEQ ID NO: 82099 - protein, 330 aa, Bordetella parapertussis 12822
MRTSTMKCLIVQPIHEEGLALLREAGVECIAPASAAMADVAAAIADCDAAITRNAGLDTRAIEAGRRLRVIGNHGTGTNMIDLAAAERLGIPVVNTPGANARSVAELALAMAMALLKRTVPLNQAVRQGNWNIRYEAGLRELSGMSLGIVGFGQIGRALAAMAIGGFGMRVHVYSPSVAPQDIAAAGCQRADSLPALAREADIVSLHRPARPGAGPLVDDALLQAMKPGALLINTARADLVDEAALARHLEAGRLGGAGLDVFSSEPPPADHPLLRLPQVVLAPHAGGSTDQALARTARAVAEQVIEVLRDARPAHLIAPHAWPRRRGAR

SEQ ID NO: 82100 - DNA, 1221 bp, Bordetella bronchiseptica RB50
  CDS (1)..(1221): transl_table=11
ttgttgtacaggcaacccaacatggcccagattgttctgttcgagaatatccaccccagcgcccgcgccgtcttcagcgcggccggctataccgacatcgtcgcccacgcggcggcgctgccttcgggtgagctgcgcgaggccctgcgcggggccgaggtggtgggtatccgctcgcggacccatctggacgccgacctgctggcggccaaccccgacctgcgcgtggtggggtgcttttgcatcggcaccaaccaggtcgacctggacgccgccatgatgcgcggggtaccggtcttcaacgcaccgttctccaatacccgctcggtggccgaactggtgctgggcgaagccatcctgctgctgcgccggatccccgagaagaacgcccgcgtccacctggggcattgggacaagagcgccgccggcgcctacgaggcccgcggcaagacgctggggatcgtcggctacggcaacatcggctcgcagatcagcaccctggccgaggccatcggcatgcgcgtggtgttcttcgacgtggaggccaagctgccgctgggcaacgcgcgcgccgccggctcgctggccgagctgctggagcaggccgatgtcgtcaccctgcacgtgcccggcggcaagtccacccagaacatcgtcaacgccgacaccctggcgcgcatgaagcgcggcgcgattctcatcaacgcctcgcgcggcacggtggtggacatccaggcgctgcacgacgccctggccagcggccacctggccggcgcggcgctggacgtgtttccgaccgagcccaagagcgccgacgaaccgctggccagcccgctgatcggcatgcccaacgtcctgctcacgccgcacatcggcggcagcacccaggaatcccaggaaaacatcggccgcgaagtggccgagaaactggtgcgcttcctgcaagcaggcaccaccaagagcgccgtcaatttccccgagctgtcgtaccaggcgcccgtgggcggctcgcgcatcatccacgtgcaccgcaacgcccccggcgcgctgggcgcgctggacaacctgatggcccagcatggactgaacatcgtcagccagagcctgcagaccaagggccagatcggctacgccgtcaccgacgtcgacggcgaagtcagcgacaccgtcctggccgacctgcgcagccacccggtcaccgtgaggtgcgaaaagctgtaa

SEQ ID NO: 82101 - protein, 406 aa, Bordetella bronchiseptica RB50
MLYRQPNMAQIVLFENIHPSARAVFSAAGYTDIVAHAAALPSGELREALRGAEVVGIRSRTHLDADLLAANPDLRVVGCFCIGTNQVDLDAAMMRGVPVFNAPFSNTRSVAELVLGEAILLLRRIPEKNARVHLGHWDKSAAGAYEARGKTLGIVGYGNIGSQISTLAEAIGMRVVFFDVEAKLPLGNARAAGSLAELLEQADVVTLHVPGGKSTQNIVNADTLARMKRGAILINASRGTVVDIQALHDALASGHLAGAALDVFPTEPKSADEPLASPLIGMPNVLLTPHIGGSTQESQENIGREVAEKLVRFLQAGTTKSAVNFPELSYQAPVGGSRIIHVHRNAPGALGALDNLMAQHGLNIVSQSLQTKGQIGYAVTDVDGEVSDTVLADLRSHPVTVRCEKL

SEQ ID NO: 82102 - DNA, 990 bp, Bordetella bronchiseptica RB50
  CDS (1)..(990): transl_table=11
atgccaacctgcgtaatcgcccaacccgtacacccggtagggccgcaactgctgcgcgccgcgggcatcaccgtgatcgagccggcgggccccggcctggatgccctgcgccaggtcatcgccggcgccgacgcggtgctggtgcgcgaccagctgccggccgagctgatcgacatggcgccgcggctgtgcgtgatcgccaaccatggcaccggcaccgacaagatcgccgtggcgcatgccgacgcgctgggcatcccggtggtctatacgccgcaggccaacgtgcgctcggtggccgagcacgcgctcatgctgatgctggtgaccgcgcgccaggccgtgcaggccgacgccgccacccgcaagggccactggggcttcaagtacgaacagcccatgtactcgctatacggcaagaccctgggcgtcatcggcctgggccgcaccggccgcctgctgtgcgagatggccgcgccggccctgaacatgcaggcgctggtctggtcgcccagcctgccggccggcgaagcgctgccgcccggcgcgcggcgcgtcgacaccttgcaggaactgctgcgcgaagccgacgtggtgtcgctgcaccgcccgctgcgcccggacacgcgccacacgctggatgccgccaccctggcctgcatgaaacccggcgccatcgtcatcaatacctcgcgcggcggcctcatcgacgaggcggccctggccgatgcgctgcgcgagggccgcctggccggcgccggcctggacgtcttcgagaccgagccgctgccggccggctcgcgggtggccggcctgcccaacgcggtgctcacgccgcacgtggccggctccacccaggaggccctgcacgccaccgccagccagtgcgccgaacagatcatcgcggtgctggccggccgccggccgccgcacctggtcaagccttccgtctgggagcgccgccgcgcgcccgtcaccccggagcaatag

SEQ ID NO: 82103 - protein, 329 aa, Bordetella bronchiseptica RB50
MPTCVIAQPVHPVGPQLLRAAGITVIEPAGPGLDALRQVIAGADAVLVRDQLPAELIDMAPRLCVIANHGTGTDKIAVAHADALGIPVVYTPQANVRSVAEHALMLMLVTARQAVQADAATRKGHWGFKYEQPMYSLYGKTLGVIGLGRTGRLLCEMAAPALNMQALVWSPSLPAGEALPPGARRVDTLQELLREADVVSLHRPLRPDTRHTLDAATLACMKPGAIVINTSRGGLIDEAALADALREGRLAGAGLDVFETEPLPAGSRVAGLPNAVLTPHVAGSTQEALHATASQCAEQIIAVLAGRRPPHLVKPSVWERRRAPVTPEQ

SEQ ID NO: 82104 - DNA, 1587 bp, Prochlorococcus marinus subsp. pastoris str. CCMP1986
  CDS (1)..(1587): transl_table=11
atgacaaaagttttaattacagacccaattgatcaaaagggaattgatattctctcccaagtcgctcaagttgatcagaagataggaatctcgaactctgaattggcatctattatccatgattatgatgctcttatgatacgctcaggcactcaagttacaggagatattattaactcttctaagaaactaagaataattggaagagctggggttggtgtagataatgtggatgttaaggcagctactcaaaagggagtactcgttgttaattctccgggagggaataccatagctgctgccgagcatacaattgcaatgatgttggcattatcaagaaatataccaattgcaaatagtagtacttttttgggtaaatgggaaagaaaaaaatttgttggtaatgagttgtttaagaaaaagctaggtgttgtaggtttaggaaaaataggaactcatgtcgcaaaagttgccaatgctcttgaaatggatgtttatggatatgatccatttgtttcctcagaaagagcacaacaattacaggtcagattgtccgaattaaaaacattgtttgaggaatctgattatgtaactttacatttgccgaggacttcagaaacagaaaacctcgtaaatatgaaggtgcttaaaagtatgaaaaaaaatgcaaaattaataaactgtgcacgtgggggaataattgatgaagaagctttagctgaggcacttaataattcattgataggaggagccgcgattgatgtgtttgctaaagagccattagactccaattcaccactacttaaagttgataaaaatttaatccttacacctcatttaggagcatcaactagggaagctcaagagaatgttgctgtagatgttgctgaacaaataagagatgttcttttgggactttctgcacgaacagcagtaaatattccgggtttaagtcctgatattatggatagccttaaacctcatttgcaattagctgaaacaatgggccttttaataagccaactttctggaggacaaattcaaaagttagaggtaaggcttcaaggtgaatttgtgcaacacccttcacagcctttaatcatagccagtttaaaaggtctattaagtaaggctctaggtgatcgaataaattatgttaacgcttctcttgaagcagagtctagaggtatttcagtagttgaaagtaaagacgaggctagaccggaatttgctagcggttcacttcaattaactacatttggagataatggtgagcatagtgttgcaggaagcatttttgctgatggtgaattgagaataattagcattgatcaatatccagttaatgtttctcctagtagatttatgcttataactaggcatagagatatgccgggcattattggaaagttaggttccctcctaggggaccacaatgtcaatattgcctcaatgcaagttggtagaaaaattgtcagaggagaagctgttatggttttaagtattgatgatcctattcctacaaatttgcttgaatcaattcttgaagttgagggaatcactagttctgatccagtaactttataa

SEQ ID NO: 82105 - protein, 528 aa, Prochlorococcus marinus subsp. pastoris str. CCMP1986
MTKVLITDPIDQKGIDILSQVAQVDQKIGISNSELASIIHDYDALMIRSGTQVTGDIINSSKKLRIIGRAGVGVDNVDVKAATQKGVLVVNSPGGNTIAAAEHTIAMMLALSRNIPIANSSTFLGKWERKKFVGNELFKKKLGVVGLGKIGTHVAKVANALEMDVYGYDPFVSSERAQQLQVRLSELKTLFEESDYVTLHLPRTSETENLVNMKVLKSMKKNAKLINCARGGIIDEEALAEALNNSLIGGAAIDVFAKEPLDSNSPLLKVDKNLILTPHLGASTREAQENVAVDVAEQIRDVLLGLSARTAVNIPGLSPDIMDSLKPHLQLAETMGLLISQLSGGQIQKLEVRLQGEFVQHPSQPLIIASLKGLLSKALGDRINYVNASLEAESRGISVVESKDEARPEFASGSLQLTTFGDNGEHSVAGSIFADGELRIISIDQYPVNVSPSRFMLITRHRDMPGIIGKLGSLLGDHNVNIASMQVGRKIVRGEAVMVLSIDDPIPTNLLESILEVEGITSSDPVTL

SEQ ID NO: 82106 - DNA, 1599 bp, Prochlorococcus marinus str. MIT 9313
  CDS (1)..(1599): transl_table=11
ttgcgccggttgatgacgaaagttctggtttcagaccctatcgaccaagcgggaattgacatcctcgctcaggttgcacaggtggatcagcgtgtgggcctgtcagaggatgacctcaaggcgatgatcggcgactacgacgcgctgatgattcgttctggcacgcaggtcacggcggatgtgatcaaagccggcgcacgtttgcgcatcattggtcgggcgggtgttggcgtcgataatgttgatgtgccgacggccacccaacagggtgttttggtggtgaattcgccggaaggcaacacgattgctgctgccgaacaagcgttggctttaatgctttcgctctctcggcatgtgcctcaggcccatgccagcacgatggctgggggttgggatcgcaagaaatatgtagggaacgagctctataagaaagttcttggcgtggttgggctcggcaagattggctcccatgtggcccgagtctgcaatgccatgggtatggaggtcatcgcttacgaccccttcatctctgcggaccgtgctcaacagatgcaggtgcgactctcaagcttggagaatctttttgagcaggccgactacatcaccttgcatctccctcgtactcccgataccgagaatttggtcaatgcggaattgctgggcaagatgaagtccacagcaaggctcgtgaactgtgctcgcggtggcatcatcgatgagtcagcccttgctgatgccttgacggctggagtgattggtggggctgccttggatgtttatgcccaggagccattggctaccgattcgccgctgcgctctgtacaggagcgcttgatccttacgccccaccttggagcttcgacgactgaggcgcaggagaacgtggctgtggatgtggcggaacagatccgagacgtcctgcttggccttcctgcccgcagtgctgtgaacatccctggcctcagtgcagagatcatggagcggctcaagcctcatttgcaattagccgagaccctggggctgttggtgagccagctctccggaggacagttgcaggagcttgaagttcgtcttcagggggagttcgctcagcatccctctcagcctctggtgattgctgctctcaagggggtgctgagcagtgcccttggcgatcggatcaattacgtgaatgcgtccttagaagccaagggccgtggcattcgtgtcttggaggtcaaggacgagacaagtaaggattttgccggagggtccttgcaactgacgactcgtggtgaccagggcggtcacagcgtgacgggtgcggtgtttgccaatggcgatctgcgcatcaccaccattgatgaattcccggtcaacgtgtcgcctagtcgacacatgctgttgaccaggcaccgcgatatgcctgggatcatcggtcagttgggctccgtgcttggtgaacacaacgtcaacattgcatcgatgcaggtggggcgtcgcattgtgcgcggtgatgcggtgatggttttgagcattgatgatccaattccgcccagcttgctggtcaccatccatgcgatcaatggcattaaggaagcccatccggtcaccctctga

SEQ ID NO: 82107 - protein, 532 aa, Prochlorococcus marinus str. MIT 9313
MRRLMTKVLVSDPIDQAGIDILAQVAQVDQRVGLSEDDLKAMIGDYDALMIRSGTQVTADVIKAGARLRIIGRAGVGVDNVDVPTATQQGVLVVNSPEGNTIAAAEQALALMLSLSRHVPQAHASTMAGGWDRKKYVGNELYKKVLGVVGLGKIGSHVARVCNAMGMEVIAYDPFISADRAQQMQVRLSSLENLFEQADYITLHLPRTPDTENLVNAELLGKMKSTARLVNCARGGIIDESALADALTAGVIGGAALDVYAQEPLATDSPLRSVQERLILTPHLGASTTEAQENVAVDVAEQIRDVLLGLPARSAVNIPGLSAEIMERLKPHLQLAETLGLLVSQLSGGQLQELEVRLQGEFAQHPSQPLVIAALKGVLSSALGDRINYVNASLEAKGRGIRVLEVKDETSKDFAGGSLQLTTRGDQGGHSVTGAVFANGDLRITTIDEFPVNVSPSRHMLLTRHRDMPGIIGQLGSVLGEHNVNIASMQVGRRIVRGDAVMVLSIDDPIPPSLLVTIHAINGIKEAHPVTL

SEQ ID NO: 82108 - DNA, 1587 bp, Synechococcus sp. WH 8102
  CDS (1)..(1587): transl_table=11
atgtccaaagttctggtttccgacccgattgatcaggccggggtcgacattctcagccaagtggctcaggtggaccagcgtcctggtctctcccccgaggaactggtcagcgtgatcggtgattacgacggattgatgatccgttccggcacgcaggtgaccgccgaggtgatcgcggctgcatccaagctcaagatcatcggccgcgccggggtcggtgtggacaacgtcgatgtgccggctgccacccagcgcggggtgctggtggtgaattcccctgagggcaacaccatcgcggcggcggagcatgccctggcgatgatgctgtccctgtcgcggcacgtgccccaggcccatgcgggcatgcgggtcggcaagtgggaccgcaagaaatacgtcggcaacgagctttataagaagacacttggcgtggtgggtctgggcaagatcggctcccatgtcgcccgcgtcgcccgggccatgggcatggaggtgatcgcctatgaccccttcattgctgctgatcgcgcccagcagatgcaggtgcggctcaccgaactggatgagttgttccgcacggcggattacgtgaccttgcacatcccccgtaccaaggataccgagaacctggtgaatgcggagctgctgcgcacgatgaaacccacggcgcggatcgtgaactgcgcccggggtggggtggtggatgaagcggccatcgctgaggccatcaacggcggcgtgatcgctggtgccggtctggatgtgtacgccagcgagccactggcggaggactcacccctgcgggcggtggagcgcgggttggtgctgacccctcacctcggcgcttcgacggaggaggctcaggagaatgtggcgatcgatgtggcggagcagatccgggatgtgttgctggggctgccggcacgcagtgccgtcaacatccccggcctgagtgccgagatcatggagcggctgaagccgcacctgcagctggcggagaccgtcggcggcctggtgagtcagctgtccggtggtcaggttcaggagttggaattgcggttgcagggggatttcgccagccatccctcccagccgctggtgatcgcctccctgaagggtctgctgggggcggtgctgggggacagcatcaactttgtgaatgcttcgttggaggccaaggcccgaggcatccgcgtgctggaggtgaaggatgaggccagccgtgattacgccggcggctcgctgcagctgatcagccgcggtgatcagggcagccgcagcgtcaccggggctgtgttcgccgatggggagctgcggatcaccagcattgatgaattcccggtgaacgtgacccccagcagtcacatgctgttcacccgtcaccgggacatgcccggcatcatcggtcagctgggatcgatgctcggcgagcacaacgtgaacatcgcggcgatgcaggtgggacgcaagatcgtccgcggcgatgcggtgatggtgctcagcatcgatgaccccatcccggcagccttgttgcagacgatcaccgcgattgagggaatccaggaagcccatccggtcagcctctga

SEQ ID NO: 82109 - protein, 528 aa, Synechococcus sp. WH 8102
MSKVLVSDPIDQAGVDILSQVAQVDQRPGLSPEELVSVIGDYDGLMIRSGTQVTAEVIAAASKLKIIGRAGVGVDNVDVPAATQRGVLVVNSPEGNTIAAAEHALAMMLSLSRHVPQAHAGMRVGKWDRKKYVGNELYKKTLGVVGLGKIGSHVARVARAMGMEVIAYDPFIAADRAQQMQVRLTELDELFRTADYVTLHIPRTKDTENLVNAELLRTMKPTARIVNCARGGVVDEAAIAEAINGGVIAGAGLDVYASEPLAEDSPLRAVERGLVLTPHLGASTEEAQENVAIDVAEQIRDVLLGLPARSAVNIPGLSAEIMERLKPHLQLAETVGGLVSQLSGGQVQELELRLQGDFASHPSQPLVIASLKGLLGAVLGDSINFVNASLEAKARGIRVLEVKDEASRDYAGGSLQLISRGDQGSRSVTGAVFADGELRITSIDEFPVNVTPSSHMLFTRHRDMPGIIGQLGSMLGEHNVNIAAMQVGRKIVRGDAVMVLSIDDPIPAALLQTITAIEGIQEAHPVSL

SEQ ID NO: 82110 - DNA, 1587 bp, Wolinella succinogenes DSM 1740
  CDS (1)..(1587): transl_table=11
atggctaaacataaaatcgttgtatgtgaccatattcaccaaaagggattagaccttttagctaaagaggctgatattgaacttctcaatgcttcttctgttcccaaaagcgagcttttgcccctattgcaagatgctgatatcgccatcacccgaagctccacagatgtggattctgcttttttagaggcgaccaaaaagattcgagctgtggttcgagcaggtgtgggcgtggacaatgtggatattgatggttgcagtcgtaaggggattgtcgtcatgaacgttcccaccgctaataccattgccgcggtggagctgacacttgcccatatgctaagcgcttgccgcaacttccctggggcgaacgaccaactcaaaaacgctcgcctttggaagcgcgaagattggtatggaacagaactcaaggataaaaaactaggcgtgatcggctttggaaacatcggaagtcgtgtagcgcttagagctaaagcctttgagatgaacgtcattgcttatgacccttacatcaagccctccaaagcaacggatctaggcattgcttacacctctaattttgatgatattttagcgtgcgacatgatcaccatccacacccctaaaaacaaagagaccatcaacctaattggcaaagaagagatcgccaagatgaaggatggggtgattcttatcaactgtgccagaggaaatctctataacgaagaggctctttatgaggggcttcaaagcggcaagattcgatgggcggggctagatgtattcaataaagaacccgccaccaacaaccctttacttgaccttcccaatgtctatgtcacgccccatattggcgcgaacactctagaatctcaagaaaagattgccattcaagccgctgaggctgccattgaggccgcgagaggctctaactatcccaacgccctcaatcttcctatcaaagagagcgagctaccactttttgtgaagccctatctcgagttggttcaaaagatgggattctttgccactcaagccaacaaagcccccattcactcctttaaaatcatcgccgagggcgagattagccaatacatcgattctctctccacctttggactcgttggcgcgctcaatgcaagcctaggagacaaggtcaactatgtcaacgctccctatgtcgcaaccgagagagggattgagctaaagagcgaatccaaaagtgctcaagggggctacaaaaacaagatcaccgtgaagctcaccaccgaaaaagatattatgacgcttagcggaaccgtctttgatgaaaacgtccaaagaatcgttgaaatcaatggctttggactagatattgagcccaaaggacgaatgattctctttaaaaacaccgatgttcccggtgtcattggcatgattggcaccacgctagccaagcatcaaatcaacatcgctgacttcagactcggacgcaacaaccacaatcaagcacttgcggtgattatcgtggacgatgatgtcaaaaaagaggtgatcgaagaacttcgagccatcaaggcttgcttgggtattgagaacgttgttctctaa

SEQ ID NO: 82111 - protein, 528 aa, Wolinella succinogenes DSM 1740
MAKHKIVVCDHIHQKGLDLLAKEADIELLNASSVPKSELLPLLQDADIAITRSSTDVDSAFLEATKKIRAVVRAGVGVDNVDIDGCSRKGIVVMNVPTANTIAAVELTLAHMLSACRNFPGANDQLKNARLWKREDWYGTELKDKKLGVIGFGNIGSRVALRAKAFEMNVIAYDPYIKPSKATDLGIAYTSNFDDILACDMITIHTPKNKETINLIGKEEIAKMKDGVILINCARGNLYNEEALYEGLQSGKIRWAGLDVFNKEPATNNPLLDLPNVYVTPHIGANTLESQEKIAIQAAEAAIEAARGSNYPNALNLPIKESELPLFVKPYLELVQKMGFFATQANKAPIHSFKIIAEGEISQYIDSLSTFGLVGALNASLGDKVNYVNAPYVATERGIELKSESKSAQGGYKNKITVKLTTEKDIMTLSGTVFDENVQRIVEINGFGLDIEPKGRMILFKNTDVPGVIGMIGTTLAKHQINIADFRLGRNNHNQALAVIIVDDDVKKEVIEELRAIKACLGIENVVL

SEQ ID NO: 82112 - DNA, 1581 bp, Gloeobacter violaceus PCC 7421
  CDS (1)..(1581): transl_table=11
atgcccaaggtgcttgtcagtgacgcgatcgaccaggctggtatcgaaattctcacccaggtcgctcaagtaacttacgagccggatctcagcccggcgacgttgcttgagaccattccccagtacgacgctttgatgatccgctcgggcaccaaggtgaccgccctggtgatcgaagcggcccagcgcctgcggatcatcggccgcgccggggtgggtgtcgacaatgtcgatctgcaggctgccacccgcaaggggatcgtcgtggtcaactcccccgagggcaacacgatcgccgccgccgagcacgccatcgccttgatgatgagcctgtcgcgccacgtgggcgaagcgaacgcctcactaaaagccggccagtggaagcgctcgcaatttatcggcgtcgaagtctacaaaaagacgatcggcgtggtgggcctgggccgcatcggctcgcatgtgacgcgggtggcgcgggcactcggcatgcagatcgtcgccttcgacccgtatatttccgccgagcgcgcccagcagctgggggcacgcctggtcgatctggaacaactgtttcacgaggccgactacatcacgctgcatgtgccgcgcacgccggagaccacccacctcatcaacgagaagaccctcgcctcgatgaagcccacggcccggatcatcaactgtgcccgcggcggcctcatcgacgagcaggcgctttatgtcgccctcaaggaaggccgcatcgccggggccgccctcgatgtcttcgagaacgaaccgctcggcgaatcgcccctgtgcgccctcgggcgcgaggtgatcctcacgccccacctgggtgcttcgaccgaagaggcccagaccaacgtcgccattgatgtggccgagcagattcgcgatgtgcttctgggtctacccgcccgcacggcggtcaacatcccaggcctgcgagccgaggtgctgcaggaactgaagccctatctggaactggccgacaccctgggcaaccttgtgggccaactggccggcggccgagtggatgcccttgacattcgcctgcagggcattctcgcggctaaagacgcccagcccattgtcgtggccgccctcaagggcctgctcaccccggcgctgcgcgagcgggtcaacttcgtcaacgcgctgcttgaggccaaggagcggggcattcgggtgaccgagacgcgcgattcggccttcgccgattacgcgggctcgatccgcctggaggcgcgcggcccggagggcgagcgctccgtcacaggcgcacttttggctgaggacgaactgcgcatcaccaacatcgacgaatttccgatcagcgtcgccccgagccgctacatgctcatcaccctgcaccgcgacatgccggggatcatcggcaaggtgggttcgtttctgggctcctacaacgtcaacatcgccggcatgcaggtgggtcgcaaactggtgcgcggcgacgcggtgatgatggtctccctcgacgacccgctgccggaagggttgttaggggagattgagtcggtccccggtatccgcaaggcgtatacggtcaatctttga

SEQ ID NO: 82113 - protein, 526 aa, Gloeobacter violaceus PCC 7421
MPKVLVSDAIDQAGIEILTQVAQVTYEPDLSPATLLETIPQYDALMIRSGTKVTALVIEAAQRLRIIGRAGVGVDNVDLQAATRKGIVVVNSPEGNTIAAAEHAIALMMSLSRHVGEANASLKAGQWKRSQFIGVEVYKKTIGVVGLGRIGSHVTRVARALGMQIVAFDPYISAERAQQLGARLVDLEQLFHEADYITLHVPRTPETTHLINEKTLASMKPTARIINCARGGLIDEQALYVALKEGRIAGAALDVFENEPLGESPLCALGREVILTPHLGASTEEAQTNVAIDVAEQIRDVLLGLPARTAVNIPGLRAEVLQELKPYLELADTLGNLVGQLAGGRVDALDIRLQGILAAKDAQPIVVAALKGLLTPALRERVNFVNALLEAKERGIRVTETRDSAFADYAGSIRLEARGPEGERSVTGALLAEDELRITNIDEFPISVAPSRYMLITLHRDMPGIIGKVGSFLGSYNVNIAGMQVGRKLVRGDAVMMVSLDDPLPEGLLGEIESVPGIRKAYTVNL

SEQ ID NO: 82114 - DNA, 1242 bp, Photorhabdus luminescens subsp. laumondii TTO1; identical to SEQ ID NO: 64607
  CDS (1)..(1242): transl_table=11

SEQ ID NO: 82115 - protein, 413 aa, Photorhabdus luminescens subsp. laumondii TTO1; identical to SEQ ID NO: 64608

SEQ ID NO: 82116 - DNA, 1230 bp, Vibrio vulnificus YJ016; identical to SEQ ID NO: 64609
  CDS (1)..(1230): transl_table=11

SEQ ID NO: 82117 - protein, 409 aa, Vibrio vulnificus YJ016; identical to SEQ ID NO: 64610

SEQ ID NO: 82118 - DNA, 1596 bp, Corynebacterium diphtheriae NCTC 13129
  CDS (1)..(1596): transl_table=11
gtgagccagaatggccgtcctgtcgtcctaattgcagacaaactcgcgcagtcaactgttgatgcgctcggagatgccgtggaggtgcgctgggtcgatggtccaaatcgcgcagagctgcttgcagcggttccagaggctgacgcacttcttgttcgttccgctaccaccgtagatgaagaagtcctcaatgcggcgaccaaccttaagattgtcggtcgcgctggtgttggcttggacaatgttgatattgccaccgcgactgataagggggtgatggtggcaaatgccccaacctccaatattcattctgcgtgtgagcatgctatttcgttgttgctttctactgcacgtcagattcctgcagcagataaaacgcttcgtgttggcgaatggaagcgttcttcgttcaaaggtgtggaaatttttggcaagaccgttggtattgtcggatttggccatattggtcagctttttgcgcaacgcctcgcagcatttgaggcgactatcattgcgtacgatccttacgctaatccagcgcgtgctgcgcagttgggtgtagagcttgtggatctagaatcgctcatgcagcgtgcggattttgtcaccatccacttgcctaagactgcagaaactgctggcatgttcaatgccgagttgttggctaagtccaaacaggggcagattattatcaatgcggcacgtggcgggcttgtcgacgagcaagcgctcgccgatgctattgacgctggccggattcgtggcgctggtttcgatgtttttgcaactgagccatgcacagattcgccactgtttaaccgtccagaggttgtggttactccgcatttgggtgcttcaactgtagaagcgcaggatcgtgccggtacggatgttgccgcatctgttctcaaggccttggcaggcgagtttgtcccagatgcagtgaatgtttcgggcggacgcgttggcgaagaagttgctttgtggcttgatttggctcgcaagcttggcgtggttgctggcaagcttttggataaggctccagtagctgttgaagttgaggctcgcggcgagctatcgacggaaaacatcgatgtcctaggtctgtcggcattgcgtggcgtcttctcttcgtttattgaagaaccagttacgtttgtcaatgccccgcgtattgcagaagagcgtggcgtaaagctggatgttactactgcgtccgaatcccttacacaccgttctgtgcttgaggtctgtgtgattggagccgatggttctaaagaatccgtcattggtgctttgaccggcctcaatcatgtggaaaagattgttcgcattaacaagcgtggtttggatcttcgtgctcaaggattcaatgtgtacttccagtacaccgacactcctggtgctctaggcaaggttggcacagcattgggtgctcaggggttcaatattgacgcggctgctttgtctcaggattctgaaggcgatggcgccacgttggtgcttcgtgttgacaagcctattccagatgcattggtcgaagagatcgctgccggaattggtgcagaagccttcgctgtcgactttgatgcctaa

SEQ ID NO: 82119 - protein, 531 aa, Corynebacterium diphtheriae NCTC 13129
MSQNGRPVVLIADKLAQSTVDALGDAVEVRWVDGPNRAELLAAVPEADALLVRSATTVDEEVLNAATNLKIVGRAGVGLDNVDIATATDKGVMVANAPTSNIHSACEHAISLLLSTARQIPAADKTLRVGEWKRSSFKGVEIFGKTVGIVGFGHIGQLFAQRLAAFEATIIAYDPYANPARAAQLGVELVDLESLMQRADFVTIHLPKTAETAGMFNAELLAKSKQGQIIINAARGGLVDEQALADAIDAGRIRGAGFDVFATEPCTDSPLFNRPEVVVTPHLGASTVEAQDRAGTDVAASVLKALAGEFVPDAVNVSGGRVGEEVALWLDLARKLGVVAGKLLDKAPVAVEVEARGELSTENIDVLGLSALRGVFSSFIEEPVTFVNAPRIAEERGVKLDVTTASESLTHRSVLEVCVIGADGSKESVIGALTGLNHVEKIVRINKRGLDLRAQGFNVYFQYTDTPGALGKVGTALGAQGFNIDAAALSQDSEGDGATLVLRVDKPIPDALVEEIAAGIGAEAFAVDFDA

SEQ ID NO: 82120 - DNA, 1590 bp, Rhodopseudomonas palustris CGA009
  CDS (1)..(1590): transl_table=11
atgaccgctcccaaagtcctcatttccgacgcgctgtcggaagccgccgtgcagatcttcaaggatcgcggcattgacgtcgatttccagccgaacctcggcaaggacaaagacaagctcgccgagatcatcggcaattacgacggcctcgcgatccgctccgccaccaaggcgacggcgaagatcctggagaaggccaaccgtctcaaggtgatcggccgcgccggcatcggcgtcgacaacgtcgagattcccgcggcgaccgccaagggcatcatcgtgatgaacaccccgttcggcaattcgatcaccaccgccgagcacgccatcaccatgatgctgtcgctggcccgcgagatccccgccgccgacgcctcgacccaggccggcaagtgggaaaagaaccgcttcatgggcgtcgaaatcaccgccaagacgctcggcgtgatcggctgcggcaacatcggctcgatcgtcgccgaccgcgcgctcggcctgaagatgaaggtgatcgcgttcgatccgttcctgtcgccggagcgcgccaaggatctgggcgtcgagaaggtcgagctcgaagacatcttcaagcgcgccgacttcatcaccctgcacaccccgctcaccgacaagaccaagaacatcatcgacgcggccgcgatcgccaagatgaagaagggcgtccgcatcatcaattgcgcccgcggcggtctggtcgacgagaacgcgctcgccgaagcgctgaagtccggccacgtcgccggcgcggcgttcgacgtgttctctgaagagccggccaccaagaacgtgctgttcggcctgccgaatgtgatctgcaccccgcatctcggcgcctcgacgactgaagcgcaggagaacgtcgccctgcaggtcgccgagcagatgagcgactatctgctgaccggcgcgatcaccaacgcgatcaacttcccgtcgatcaccgccgaagaagccccgaagctgaagccgttcatcgaactggccgaaaagctcggctcgttcgccggccagctcaccgagaccggcatcaccaaggtcaccatcacctatgagggtgaagtggccgagatgaagatcaaggcgctgacctcggcggtgctgtcgggcctgctgcgcccgatgctgggcgacatcaatgtcgtgtcggcgccggtgatcgccaaggagcgcggcatggtggtggatgaagtcgtccgcgccgccgagagcgactacgagagcctgatcaccctgacggtgaccaccgagaagcaggagcgctcggtgtccggcaccgtctatgccgacggcaagccgcgcctggtcgacatcaagggcatccgcgtcgacgccgagttcggttcttcgatgatctacgtcaccaacgaggacaagccgggcttcatcggcaagttcgccagcctgctcggcgacgccaaggtcaacatcgcgaccttcaacctcggccgtcacaccgaaggcggcgacgccatcgcgttggtgacgatcgacggtccggccccgactgaggtgctggagaaggtccaggccctgccgcaggtcaagcaggtcaaggcgctgacgttctga

SEQ ID NO: 82121 - protein, 529 aa, Rhodopseudomonas palustris CGA009
MTAPKVLISDALSEAAVQIFKDRGIDVDFQPNLGKDKDKLAEIIGNYDGLAIRSATKATAKILEKANRLKVIGRAGIGVDNVEIPAATAKGIIVMNTPFGNSITTAEHAITMMLSLAREIPAADASTQAGKWEKNRFMGVEITAKTLGVIGCGNIGSIVADRALGLKMKVIAFDPFLSPERAKDLGVEKVELEDIFKRADFITLHTPLTDKTKNIIDAAAIAKMKKGVRIINCARGGLVDENALAEALKSGHVAGAAFDVFSEEPATKNVLFGLPNVICTPHLGASTTEAQENVALQVAEQMSDYLLTGAITNAINFPSITAEEAPKLKPFIELAEKLGSFAGQLTETGITKVTITYEGEVAEMKIKALTSAVLSGLLRPMLGDINVVSAPVIAKERGMVVDEVVRAAESDYESLITLTVTTEKQERSVSGTVYADGKPRLVDIKGIRVDAEFGSSMIYVTNEDKPGFIGKFASLLGDAKVNIATFNLGRHTEGGDAIALVTIDGPAPTEVLEKVQALPQVKQVKALTF

SEQ ID NO: 82122 - DNA, 1629 bp, Geobacter sulfurreducens PCA
  CDS (1)..(1629): transl_table=11
atgaaaatcatcgttactgacgaggtggctcaagaaggattggcacttcttgcccaggatccgcgtgttgagctcgatgtgaagctcggcctcaagaaggaggaactcctcgcaataatcggcgattacgacgtcatcatcacccgcagcggcaccaccgtgaatcgggagcttctggacgcggggaaaaagctgaggctcgtggcccgggcgggcgtgggcatcgacaacgttgacgttgactacgcaagttcccgcggcgtcatcgtggtgaacgctcctttcggcaataccaacagcgcggccgagcatgccatggcgctgctgctctccttctgccgcaacgtgacccgcgccaacggcagcctgaagagcggcgagtggaagcgggctccgttcaccggctacgagctcaagggtaagacggccggcgtcatcggcctcggcaaggtcggcggccgggtagccacgcggctcaaggccttcgagtgcgacgtgctcgcctgcgatccctacatcgccgtgaagcgggcccatgacctgggggtcaagctggtctcccacgacgagatttacaagaactgcgacatcatcaccgtccacacccctctcaccgacgagactcgcaacatgatcggcgagcgtgagctggctatgatgaaggacggcgtcatcatcgtgaacgccgcccggggcggcatcatcgaagaggcggccctgctgaagtatctggagtcgggcaaggtggccggagccgctgtggacgtgttcagcgaggagccccccaagagcgagtatctgaagaagctcatcggccacgagagggtcgtggtgacgccgcatctgggggcaaatacctttgaggcccaggtgaacgtggctgtggacgtatcccgcgagattctcaactacctggacgaccagcccctggagaacgccgtgaacattccgcgcttcgacttggcactcatggaccagatgcggccgttcctcaacctcatgaacaccctgtgcgaattcggcattcagttgctggacgccaatatctcgaagatcgtcttcggcttctcgggctccatcgcccactacgactgcaccccgcttaccgtctgcggcctggcgtcgatccttaaccggatggtcgaccaggacgtgaacatggtgaacgcttctctcatcgccgaagggatgggcattgtggtggaggagtccaagacgactcatgccgacgccttctccaacctcatcacgatcgtggtggaaggagaggggggcaagcgccgcaccatctcgggcacccttttcgaggggctgccccgcatcgtacggctgcgcgactactccatggactttgcgcccgaggagcacatgctgctgctccactacgccgaccggccgggtatgatcggcaagatcggcacaatcatgggacaacatgagatcaatattgcctccatgaacctgggacgcagcgaaaagaaaggggaagccatggtcatcctttcccttgattcggctgtacctccccaagtgcttgaggaggtgcgcgccgcaaccgacgccaccttcatcaaggccattcacatgccgggtgcccggtgcagccggagctgcggctgcaccgcctga

SEQ ID NO: 82123 - protein, 542 aa, Geobacter sulfurreducens PCA
MKIIVTDEVAQEGLALLAQDPRVELDVKLGLKKEELLAIIGDYDVIITRSGTTVNRELLDAGKKLRLVARAGVGIDNVDVDYASSRGVIVVNAPFGNTNSAAEHAMALLLSFCRNVTRANGSLKSGEWKRAPFTGYELKGKTAGVIGLGKVGGRVATRLKAFECDVLACDPYIAVKRAHDLGVKLVSHDEIYKNCDIITVHTPLTDETRNMIGERELAMMKDGVIIVNAARGGIIEEAALLKYLESGKVAGAAVDVFSEEPPKSEYLKKLIGHERVVVTPHLGANTFEAQVNVAVDVSREILNYLDDQPLENAVNIPRFDLALMDQMRPFLNLMNTLCEFGIQLLDANISKIVFGFSGSIAHYDCTPLTVCGLASILNRMVDQDVNMVNASLIAEGMGIVVEESKTTHADAFSNLITIVVEGEGGKRRTISGTLFEGLPRIVRLRDYSMDFAPEEHMLLLHYADRPGMIGKIGTIMGQHEINIASMNLGRSEKKGEAMVILSLDSAVPPQVLEEVRAATDATFIKAIHMPGARCSRSCGCTA

SEQ ID NO: 82124 - DNA, 1206 bp, Bdellovibrio bacteriovorus HD100; identical to SEQ ID NO: 64611
  CDS (1)..(1206): transl_table=11

SEQ ID NO: 82125 - protein, 401 aa, Bdellovibrio bacteriovorus HD100; identical to SEQ ID NO: 64612

SEQ ID NO: 82126 - DNA, 1572 bp, Methanococcus maripaludis S2
  CDS (1)..(1572): transl_table=11
atgtcaaaaatacttataactgacccgctgcatgaaagtgccgttgaaatattaaaacaggcaggcgaagttgaagttgcaaccgggttaactgttgaagagctaaaattaaaaattaaagatgtagatgcgctggtaattagaagtggaacaactgctacaagagaaattatcgaagcatcagaaaatttaaaagttattgcaagagctggagttggtgtagataacgtagatttagatgcagcaacagaaaaaggaatagttgtggtaaatgcaccagatgcatcgtcaatttcagttgcagaacttttatttggtatgatgctcgcagcagcaagaaatatccctcaagctactgcatcaattaaaagcggtaaatgggacaggaaatcatttaaaggaatggaaatttacggaaaaacgctaggaattgttggtcttggtagaattggacagcaagttgcaaaaagagctcaagcttttggaatgacaattgttgcgtatgatccatatattccagaagatgttgcatcagaacttggaataaaattgttaactgtagatgaactgtgcaccgtaagtgactttataacacttcacgttccattaactcccaaaacaaaacatatgattggaaaagagcagattgcacttatgaaaagcaacatggttatcatgaactgtgcaagagggggattaattgatgaagctgcactttatgatgcattaaacagcggaaaaattaaagcagctgcattggatgtatttgaacaagaacctccaaaagaaagtcctcttttaacacttaataatttaattggaactccacaccagggagcttcaacagaagaagcacaattgagtgcaggaacaattgttgcagaacaaaccgttaaaatattgaaaggagagtctgcagaaaatgttgtaaacctcccaatggttccaactgaaaaaatgaaaaaattaaaaccttacatggttttagcggaaaaaatgggttcaatggcaatacagtaccttgataactcgatagaacttttagaaatcacttacatgggcggccttgcaaaagaaaagactgaaatactaaaaagatcatttttgaaaggtattttggcaccaatattacttgcaggcgttaatttagtgaacgctccagtgattgcgaaaagcagaaacataaaaattgcagaaggcacaatgtctgaaagcgactatggaaattcaataaaaatttctgcaaaaggtgaaaacgacgaaatttcaataattggaagcattgaacataacgaagtcgtttttagagaaattaatggatacagaatggatataaaacctgaaggaacaatctgcatcataaaacacatcgacagacccggaatggttggaaaagttggagttcttcttggtgaacacggaataaatattgcaggaatgcaagttggaagaagagagcctggaggacacagcataatgtttttagatattgaccacatgatttcagatgaagtactcgatgaaatcaggaaaatggaaaacgtaagagctgcaaaatcaataaacatctaa

SEQ ID NO: 82127 - protein, 523 aa, Methanococcus maripaludis S2
MSKILITDPLHESAVEILKQAGEVEVATGLTVEELKLKIKDVDALVIRSGTTATREIIEASENLKVIARAGVGVDNVDLDAATEKGIVVVNAPDASSISVAELLFGMMLAAARNIPQATASIKSGKWDRKSFKGMEIYGKTLGIVGLGRIGQQVAKRAQAFGMTIVAYDPYIPEDVASELGIKLLTVDELCTVSDFITLHVPLTPKTKHMIGKEQIALMKSNMVIMNCARGGLIDEAALYDALNSGKIKAAALDVFEQEPPKESPLLTLNNLIGTPHQGASTEEAQLSAGTIVAEQTVKILKGESAENVVNLPMVPTEKMKKLKPYMVLAEKMGSMAIQYLDNSIELLEITYMGGLAKEKTEILKRSFLKGILAPILLAGVNLVNAPVIAKSRNIKIAEGTMSESDYGNSIKISAKGENDEISIIGSIEHNEVVFREINGYRMDIKPEGTICIIKHIDRPGMVGKVGVLLGEHGINIAGMQVGRREPGGHSIMFLDIDHMISDEVLDEIRKMENVRAAKSINI

SEQ ID NO: 82128 - DNA, 1437 bp, Apis mellifera
  CDS (1)..(1437)
atgtcaaccacacttagaagcgttctcataagcgatcctgtagacgcatgttgcggtgagttacttgttcgtcacggtattccagttaccaccaaatataaattatcaaaggaaaaattgataaaagaactacagaatcacgaaggattgattgttcgatcagaaacaaaagtaactgccgatgtgttcgcttgttgtccaaaccttcgcgtcgttggccgagctggtactggtgttgataacatcgatcttgaagctgccacacgaaaaggagtcattgtattgaatactcccggtggaaacagcattagcgcttgcgaattaacatgcgctctaatctctaatttggcgcgtaatgttactcaagcagttcaatcattgaaagacggaagatgggacagaaaattgtattccggtttcgaattatccggaaaaactcttgccgtacttggaatgggtcgtattggacgcgaagtgacacgaaggatgcaagcatatggaatgcgagtgatcgccttcgatcctctactcacatctgaagacgcaaactatctcaatgtcgagaaattttctttggatgagatatggccaatggctgattatattactgtacatacaccacttattcctcaaacgaaaaatttaatcaatgctacaacattggcgaaatgtaaaaagggagtacgtatcataaacgtggctcgtggtggcattgtagatgaagaggcattattgaatgcattaaaatcgggccactgtgctggtgctgctttggatgtatttacagaagaaccgccaaaaaactctgttattctagaattgatcgcacatcctaaagttatctctactcctcatctaggagcaagtactgaggaagctcagcaacgagttgccgaagaaatagcccaacaatttttggtgttagccggtagatcaacggaatatgtaattaccggaattgtaaacgctccaatgttgagcgctgctatatcagatgaaaacgcatcatggattgaattatcgaaaaaactagctgttcttgttggaatcttatcaggacaaacaaaaaatggcttaaatttgatcaatgcaccgacattagcacaagaaataggtatcgatatcaaaagaagctacgaagaatcaacgaatatcgaagcaattgttattcaagctgagggtcattggattaaaggaaccgttcgtaacaacaaaccgatgttactctcactagatgacgcattgttttctgatggaataattttaggagattttatctctttatatcaaacaagtaatatacaagatttagcacaaattgtaaatgttttttctttgaaaaacatcaatatttgcaacttaaataccaatggaaattggatgattattcaaactgatcgggaagtttctatacctgtcaatgcatttattggctaa

SEQ ID NO: 82129 - protein, 478 aa, Apis mellifera
MSTTLRSVLISDPVDACCGELLVRHGIPVTTKYKLSKEKLIKELQNHEGLIVRSETKVTADVFACCPNLRVVGRAGTGVDNIDLEAATRKGVIVLNTPGGNSISACELTCALISNLARNVTQAVQSLKDGRWDRKLYSGFELSGKTLAVLGMGRIGREVTRRMQAYGMRVIAFDPLLTSEDANYLNVEKFSLDEIWPMADYITVHTPLIPQTKNLINATTLAKCKKGVRIINVARGGIVDEEALLNALKSGHCAGAALDVFTEEPPKNSVILELIAHPKVISTPHLGASTEEAQQRVAEEIAQQFLVLAGRSTEYVITGIVNAPMLSAAISDENASWIELSKKLAVLVGILSGQTKNGLNLINAPTLAQEIGIDIKRSYEESTNIEAIVIQAEGHWIKGTVRNNKPMLLSLDDALFSDGIILGDFISLYQTSNIQDLAQIVNVFSLKNINICNLNTNGNWMIIQTDREVSIPVNAFIG

SEQ ID NO: 82130 - DNA, 1266 bp, Magnaporthe grisea 70-15
  CDS (1)..(1266)
atggcgacacctcaggatattttaaatcctaacaggattcaagaatacgccgtggccgtctcaacgtcaccttccgcaactttctcgccaccaccgagcagtactagcatcagctttggtgctttggctcatggacaggcgcctagagggacagcaaaaccgctgaagcccttcaacacaaccgacatcaagattctgctgcttgagaatgtgaaccagagcggtcaggacatcttgagggaacagggctaccaggtcgaagcacacaagacttcattaccagaagaccagctgatcgagaagatccgcagtgtgcacgtcattggtatccggtcaaaaactagactctcagaaaaggtgctccgtgaggccaagaacctgctcgtcgtgggctgcttctgcattggaaccaatcaggtagacctcgagtacgcggcgcgtcatggaattgctgtcttcaactcccccttcgccaactcacgcagtgtggcagagctggtcatagccgagatcatcaccctggcccggcagctgggtgatcggtccaatgagatgcaccgtggaacttggaacaagtcatatactacgacgtcgtcgacgctcatggccctgggcaaggcagtccaggtgtccaagctagaggacctgctgcgcgagtccgactttgttacgctgcacgttcccgccacccctgagaccaaaaacatgatctcaaacgctcagctgaaccagatgaagaccggctcatatctgatcaacgcttcccgagggacggtggtggacattcctgcgctgataaacgccatgcgcgctggcaagattgcgggtgcggcgctggacgtgtacccgaacgagccggcggccaacggagactacttcaacaaccagctcaacacctggggcgaggaccttcgtaccctgaacaacatcatcctgaccccacacatcggcggcagcaccgaggaggcccagcgggcgattggtgtcgaggtcgccgacgcgctggtgcggtacatcaaccagggagtgacgctcggtagcgtcaacctgcccgaatgcaacctccggtcgctgacgctcgaggagcccgaccacgcccgcatccatctatgttcatcggcaaacgttgccctgatttccgacagcaagggcgatgtcgcctatctgatggcggatatcagcgacgtcaagcagggcgacatcaagcagatccacgatgccctggagtcactgagctcacgtataattacccgtgttttgttttga

SEQ ID NO: 82131 - protein, 421 aa, Magnaporthe grisea 70-15
MATPQDILNPNRIQEYAVAVSTSPSATFSPPPSSTSISFGALAHGQAPRGTAKPLKPFNTTDIKILLLENVNQSGQDILREQGYQVEAHKTSLPEDQLIEKIRSVHVIGIRSKTRLSEKVLREAKNLLVVGCFCIGTNQVDLEYAARHGIAVFNSPFANSRSVAELVIAEIITLARQLGDRSNEMHRGTWNKSYTTTSSTLMALGKAVQVSKLEDLLRESDFVTLHVPATPETKNMISNAQLNQMKTGSYLINASRGTVVDIPALINAMRAGKIAGAALDVYPNEPAANGDYFNNQLNTWGEDLRTLNNIILTPHIGGSTEEAQRAIGVEVADALVRYINQGVTLGSVNLPECNLRSLTLEEPDHARIHLCSSANVALISDSKGDVAYLMADISDVKQGDIKQIHDALESLSSRIITRVLF

SEQ ID NO: 82132 - DNA, 1425 bp, Gibberella zeae PH-1; identical to SEQ ID NO: 64613
  CDS (1)..(1425)

SEQ ID NO: 82133 - protein, 474 aa, Gibberella zeae PH-1; identical to SEQ ID NO: 64614

SEQ ID NO: 82134 - DNA, 1401 bp, Candida glabrata CBS 138; identical to SEQ ID NO: 64615
  CDS (1)..(1401)

SEQ ID NO: 82135 - protein, 466 aa, Candida glabrata CBS 138; identical to SEQ ID NO: 64616

SEQ ID NO: 82136 - DNA, 1413 bp, Kluyveromyces lactis NRRL Y-1140; identical to SEQ ID NO: 64617
  CDS (1)..(1413)

SEQ ID NO: 82137 - protein, 470 aa, Kluyveromyces lactis NRRL Y-1140; identical to SEQ ID NO: 64618

SEQ ID NO: 82138 - DNA, 1398 bp, Debaryomyces hansenii CBS767; identical to SEQ ID NO: 64619
  CDS (1)..(1398)

SEQ ID NO: 82139 - protein, 465 aa, Debaryomyces hansenii CBS767; identical to SEQ ID NO: 64620

SEQ ID NO: 82140 - DNA, 1536 bp, Yarrowia lipolytica CLIB122; identical to SEQ ID NO: 64621
  CDS (1)..(1536)

SEQ ID NO: 82141 - protein, 511 aa, Yarrowia lipolytica CLIB122; identical to SEQ ID NO: 64622

SEQ ID NO: 82142 - DNA, 1647 bp, Aspergillus nidulans FGSC A4; identical to SEQ ID NO: 64623
  CDS (1)..(1647)

SEQ ID NO: 82143 - protein, 548 aa, Aspergillus nidulans FGSC A4; identical to SEQ ID NO: 64624

SEQ ID NO: 82144 - DNA, 1392 bp, Candida albicans SC5314; identical to SEQ ID NO: 64625
  CDS (1)..(1392): transl_table=12

SEQ ID NO: 82145 - protein, 463 aa, Candida albicans SC5314; identical to SEQ ID NO: 64626

SEQ ID NO: 82146 - DNA, 1479 bp, Ustilago maydis 521; identical to SEQ ID NO: 64627
  CDS (1)..(1479)

SEQ ID NO: 82147 - protein, 492 aa, Ustilago maydis 521; identical to SEQ ID NO: 64628

SEQ ID NO: 82148 - DNA, 1533 bp, Cryptococcus neoformans var. neoformans B-3501A; identical to SEQ ID NO: 64743
  CDS (1)..(1533)

SEQ ID NO: 82149 - protein, 510 aa, Cryptococcus neoformans var. neoformans B-3501A; identical to SEQ ID NO: 64744

SEQ ID NO: 82150 - DNA, 1587 bp, Prochlorococcus marinus str. AS9601
  CDS (1)..(1587): transl_table=11
atgacaaaagttctcattacagatccaattgatcaaacaggaatcgatattctttcacaagttgctcaggttgatcagaagataggaatatcagactctgagttagcgtctattattaaagattatgatgctttaatgattcgttctgggacccaagtgactgaagagattattaactcttcaagtaaacttagaattattggaagagccggagttggagtcgataatgtagatgttaaggctgctacacaaaaaggagttcttgttgttaattctccagggggtaacacaatagctgctgctgaacatactatagctatgatgttggccttatctagacatattccagtcgctaatagtagtactctttcaggtaaatgggaaagaaagaaatttgttgggaatgagctttataacaaaaaattaggtgtagtaggtttaggaaaaattggtgctcatgtagcgaaagttgctaatgcattaggaatggaagtttacggatacgatccctttgtctcaactgaaagagctcaacaaatccaagttaaactatctgaaataaaggatttattccaacaatctgattacgtaactttgcatttgcctcgtacaccagagacagagaatttagtaaatatgaaggtgcttaaaagtatgaaaagtagcgcaaaattaattaattgtgcccgaggaggcttaattgacgaagaagcattagcagaagctttaaatgaatcattgattggaggtgctgcgatagatgtcttttctaaagagccattggaatctaattcaccacttttaaaggttgaaaagaatcttattcttactcctcacctaggagcatctactcgagaagcgcaagaaaatgtagctgttgatgttgcagaacaaatcagagatgtcttgcttggtttgtctgctagaactgccgtaaatattccaggtttgagccctgatattatggatagcctaaaacctcatttgcagttggctgaaacaatgggtctgcttataagccagctttcaggaggacagattcaaaaactagaggtgaagcttcaaggcgaatttgttcaacatccttcccagccattaataatagctagtcttaaaggtcttctaagtaaagctttgggagataggatcaattacgtaaatgcttctctagaggcagattcaagaggtatttcagtagtcgagagtaaagatgaggcaagacctgaatttgctagtggatctttgcaattaaccacttatggagataatggcgaccatagcgtagcaggaagcatttttgctgatggggaattaagaattattagtattgatcaatatcctgttaatgtatcgccaagtagatacatgttggttactaggcacagggatatgcctggtattattggcaagcttggttctttattgggtagtaacaatgtaaatattgcttcaatgcaagttgggcgcaaaattgttagaggtgaagcagttatggttctaagtattgatgatccaattcctaataagttgcttgacaccattattgaagtagagggaattaccaatgctaatccagttactctataa

SEQ ID NO: 82151 - protein, 528 aa, Prochlorococcus marinus str. AS9601
MTKVLITDPIDQTGIDILSQVAQVDQKIGISDSELASIIKDYDALMIRSGTQVTEEIINSSSKLRIIGRAGVGVDNVDVKAATQKGVLVVNSPGGNTIAAAEHTIAMMLALSRHIPVANSSTLSGKWERKKFVGNELYNKKLGVVGLGKIGAHVAKVANALGMEVYGYDPFVSTERAQQIQVKLSEIKDLFQQSDYVTLHLPRTPETENLVNMKVLKSMKSSAKLINCARGGLIDEEALAEALNESLIGGAAIDVFSKEPLESNSPLLKVEKNLILTPHLGASTREAQENVAVDVAEQIRDVLLGLSARTAVNIPGLSPDIMDSLKPHLQLAETMGLLISQLSGGQIQKLEVKLQGEFVQHPSQPLIIASLKGLLSKALGDRINYVNASLEADSRGISVVESKDEARPEFASGSLQLTTYGDNGDHSVAGSIFADGELRIISIDQYPVNVSPSRYMLVTRHRDMPGIIGKLGSLLGSNNVNIASMQVGRKIVRGEAVMVLSIDDPIPNKLLDTIIEVEGITNANPVTL

SEQ ID NO: 82152 - DNA, 1587 bp, Prochlorococcus marinus str. MIT 9515
  CDS (1)..(1587): transl_table=11
atgacaaaagttctaattaccgatccaattgatcaaactggaattgatattctttcccaagtcgctcaagttgatcagagaataggaatctccaaccttgaattggcatctattatccaagactatgatgctcttatgatacgttctgggactcaagttacaggagatattattaattcttctaaaaaactaagaataattggcagggctggggttggtgtagataatgttgatgttaaggctgctactcagaagggtgtattggttgttaattctccaggaggaaatacaatagctgctgccgagcatacaattgcaatgatgttggcattatctagaaatataccgattgctaacagtagtacttttttaggtaaatgggaaaggaaaaagtttgttggtaatgaactctttaagaaaaagctaggtgttgtgggtttgggaaaaataggtactcatgtcgcaaaagttgctaatgcgcttggaatggatgtttatggatatgatccttttgtttcctcagagagagcacaacaattacaggtcaaattgtccgaattgaaaacattgtttgctgaatctgattatgtaagtttacatttgccgaggacttcagaaacagaaaacttggtagatatgaaagtgttaaaaagtatgaaagataatgcgaaattaataaactgtgctcgagggggaataattgatgaagaagctttagctgaggcgcttaataagtcattgattggaggagcagctattgatgtgtttgctgaagagccattagattctaattcaccattacttaaagttgataaaaatttaatccttactcctcatttaggagcctcaacaagggaggctcaagagaatgttgcagtagatgttgcggaacaaataagagatgttcttttgggcctttctgcaagaacagcagtaaatattcctggtttaagtcctgatattatggatagccttaaacctcatttacaattagctgaaacaatgggtcttttaataagccaactttctggaggaaaaattcaaaagttagacctaaggcttcaaggcgaatttgtacagcacccttctcagcccttaattatagcaagtttaaaaggcctattaagtaaagcgcttggagatcgaattaattatgttaacgcgtctcttgaggcggaatcaaggggtatttcagtggttgaaagtaaagatgaggctagacctgaatttgctagcggctcactccaattaactacattcggagataatggagagcatagtgttgcaggaagtatttttgccgatggtgaattaagaataattagcattgatcagtatccagttaatgtttctccaagtagatttatgcttataactaggcatagagatatgcctggcattattggaaagttaggttccctcttgggggaccacaatgtcaatattgcttcaatgcaagttggtagaaaaattgtcagaggagaagctgttatggttttaagtattgatgatccgatccccacaaatttgcttgaatcgattcttgaagttgagggtattactagttccgatccagtaactttgtaa

SEQ ID NO: 82153 - protein, 528 aa, Prochlorococcus marinus str. MIT 9515
MTKVLITDPIDQTGIDILSQVAQVDQRIGISNLELASIIQDYDALMIRSGTQVTGDIINSSKKLRIIGRAGVGVDNVDVKAATQKGVLVVNSPGGNTIAAAEHTIAMMLALSRNIPIANSSTFLGKWERKKFVGNELFKKKLGVVGLGKIGTHVAKVANALGMDVYGYDPFVSSERAQQLQVKLSELKTLFAESDYVSLHLPRTSETENLVDMKVLKSMKDNAKLINCARGGIIDEEALAEALNKSLIGGAAIDVFAEEPLDSNSPLLKVDKNLILTPHLGASTREAQENVAVDVAEQIRDVLLGLSARTAVNIPGLSPDIMDSLKPHLQLAETMGLLISQLSGGKIQKLDLRLQGEFVQHPSQPLIIASLKGLLSKALGDRINYVNASLEAESRGISVVESKDEARPEFASGSLQLTTFGDNGEHSVAGSIFADGELRIISIDQYPVNVSPSRFMLITRHRDMPGIIGKLGSLLGDHNVNIASMQVGRKIVRGEAVMVLSIDDPIPTNLLESILEVEGITSSDPVTL

SEQ ID NO: 82154 - DNA, 1587 bp, Prochlorococcus marinus str. MIT 9303
  CDS (1)..(1587): transl_table=11
atgacgaaagttctggtttcagaccctatcgaccaagcgggaattgacatcctcgctcaggttgcacaggtggatcagcgtgtgggcctgtcagaggatgacctcaaggcgatgatcggcgactacgacgcgctgatgatccgttctggcacgcaggtcacggcggatgtgatcaaagccggcggacgtttgcgcatcattggtcgggcgggtgttggcgtcgataatgttgatgtgccgacggccacccaacagggtgttctggtggtgaattcgccggaaggcaacactattgctgctgctgaacaggcgttggctttaatgctttcgctctctcggcatgtgcctcaggcccatgccagcacgatggctgggggttgggatcgcaagaaatatgtagggaacgagctctataagaaagttcttggcgtggttgggctcggcaagatcggctcccatgtggcccgcgtctgcaatgccatgggtatggaggtcatcgcttacgaccccttcatctctgcggaccgtgctcaacagatgcaggtgcgactctcaagcttggagaatctttttgagcaagccgactacatcaccttgcatctccctcgtactcccgataccgagaatttggtcaatgaggaattgctgggcaagatgaagtccacagcaaggctcgtgaactgtgctcgcggtggcatcatcgatgagtcagctctggctgatgccttgaaggctggagtgattggcggggctgcgttggatgtttatgcccaggagccattggctaccgattcgccgctgcgctctgtgcaggagcgcttgatccttacgccccatctcggtgcctcgacgacggaggcgcaagagaacgtggctgttgatgtggcggaacagatccgagatgtcctgcttggcctgcctgcccgtagtgccgtgaacatccctggcctcagtgcagagatcatggagcggcttaagcctcatttgcaattagccgagacccttgggctgttggtgagccagctctccggaggacagttgcaggagcttgaagttcgtcttcagggggagttcgctcagcatccctctcagcctctggtgattgctgctctcaagggcgtgctgaccagtgcccttggcgatcggatcaattacgtgaatgcgtccttagaagccaagggccgtggcattcgtgtcttggaggtcaaggacgagacaagtaaggattttgccggggggtccttgcaactaacgactcgtggtgaccagggcggtcacagcgtgacgggtgcagtgtttgccaatggcgatctgcgcatcaccaccattgatgaattcccggtcaacgtgtcgcctagtcgacacatgctgttgaccaggcacagggatatgccagggatcatcggtcagttgggctccgtgcttggtgaacacaacgtcaacatcgcatcaatgcaggtggggcgtcgcattgttcgcggtgatgcggtgatggtgctgagcattgatgatccaatcccaccaagtttgctggtcaccatccatgcgatcaatggcattaaggaagctcatccggtcaccctctga

SEQ ID NO: 82155 - protein, 528 aa, Prochlorococcus marinus str. MIT 9303
MTKVLVSDPIDQAGIDILAQVAQVDQRVGLSEDDLKAMIGDYDALMIRSGTQVTADVIKAGGRLRIIGRAGVGVDNVDVPTATQQGVLVVNSPEGNTIAAAEQALALMLSLSRHVPQAHASTMAGGWDRKKYVGNELYKKVLGVVGLGKIGSHVARVCNAMGMEVIAYDPFISADRAQQMQVRLSSLENLFEQADYITLHLPRTPDTENLVNEELLGKMKSTARLVNCARGGIIDESALADALKAGVIGGAALDVYAQEPLATDSPLRSVQERLILTPHLGASTTEAQENVAVDVAEQIRDVLLGLPARSAVNIPGLSAEIMERLKPHLQLAETLGLLVSQLSGGQLQELEVRLQGEFAQHPSQPLVIAALKGVLTSALGDRINYVNASLEAKGRGIRVLEVKDETSKDFAGGSLQLTTRGDQGGHSVTGAVFANGDLRITTIDEFPVNVSPSRHMLLTRHRDMPGIIGQLGSVLGEHNVNIASMQVGRRIVRGDAVMVLSIDDPIPPSLLVTIHAINGIKEAHPVTL

SEQ ID NO: 82156 - DNA, 1587 bp, Mycobacterium sp. JLS
  CDS (1)..(1587): transl_table=11
gtgagtctccccgttgtactgattgccgacaagcttgccgcaagcaccgtcgccgccctcggtgaccaggtcgaaatccgctgggtcgacggtcccgaccgcgagaaactgctggccgccgtacccgaagccgacgccctgctcgtccgctcggccacgaccgtggacgccgaagtcctcgccgccgcccccaaactcaagatcgtcgcccgcgcgggtgtcggactcgacaacgtcgacgtcgacgccgccaccgcgcgcggggtgctggtcgtcaacgcgccgacgtcgaacatccacagcgccgccgaacacgcgctggcgctgctgctgtccgccgcgcggcagatcccggccgccgactcgacgctgcgcgagcgcacctggaagcggtcgtcgttcaacggcaccgagatctacggcaagaccgccggcgtcgtggggctgggccgcatcggtcagctggtggccgcgaggctggcggcgttcggcacccacgtggtggcctacgacccgtacgtctcacatgcccgcgccgcgcaactcggtatcgaactgctgtccctcgaggatctgctggcccgttccgacttcatctcggtgcacctgcccaagacgccggagaccgcgggtctgatcggcagggaggcgctggccaagaccaagaagggcgtgatcatcgtcaacgccgcgcgcggcgggctgatcgacgagcaggccctggccgacgccgtcaccggcggccacgtccgggcggccggactcgacgtgttcgcgaccgaaccctgcaccgacagcccgctgttcgagctgccgcaggtggtcgtcacgccgcacctcggcgcctcgaccgccgaagcgcaggaccgggccggcaccgacgtggcggcaagcgtgcgcctggcgctggccggggaattcgtccccgacgcggtcaacgtcggcggcggggtcgtcggcgaggaggtcgcgccgtggctggacctggtgcgcaagctcgggctgctggccggaacgctggcgaccgagccgacgaccaccctgtcggtgcgggtgtgcggtgaactggccgccgaagaggtcgaggtgctccggctgtcggcgctccgcgggctgttctcgacggtgaccgaccagcaggtcacgttcgtcaacgcgccggcactggccgccgaacgcggtgtgcagtccgaactgaccaccgcctcggagagccccaaccaccgcagcgtggtcgacgtgcgggcggttggctccgacggatcggtgaccaacgtcgcaggcaccctgtccgggccccagcaggtggagaagatcgtccagatcaacgggcgcaacttcgatctgcgcgccgagggcgtcaacctgatcgtgaactacatcgaccagccgggcgcactcggcaagatcgggacgctgctcggcacggcggaggtcaacatccacgccgcccaactcagcgaggacgccgaggggccgggggcgacgatcctgctccgcctcgaccgcgacgtgcccgccgaactgcgatcggcgctcgccgaggccgtcgacgccaagacactggaagtggtggacctgtcgtga

SEQ ID NO: 82157 - protein, 528 aa, Mycobacterium sp. JLS
MSLPVVLIADKLAASTVAALGDQVEIRWVDGPDREKLLAAVPEADALLVRSATTVDAEVLAAAPKLKIVARAGVGLDNVDVDAATARGVLVVNAPTSNIHSAAEHALALLLSAARQIPAADSTLRERTWKRSSFNGTEIYGKTAGVVGLGRIGQLVAARLAAFGTHVVAYDPYVSHARAAQLGIELLSLEDLLARSDFISVHLPKTPETAGLIGREALAKTKKGVIIVNAARGGLIDEQALADAVTGGHVRAAGLDVFATEPCTDSPLFELPQVVVTPHLGASTAEAQDRAGTDVAASVRLALAGEFVPDAVNVGGGVVGEEVAPWLDLVRKLGLLAGTLATEPTTTLSVRVCGELAAEEVEVLRLSALRGLFSTVTDQQVTFVNAPALAAERGVQSELTTASESPNHRSVVDVRAVGSDGSVTNVAGTLSGPQQVEKIVQINGRNFDLRAEGVNLIVNYIDQPGALGKIGTLLGTAEVNIHAAQLSEDAEGPGATILLRLDRDVPAELRSALAEAVDAKTLEVVDLS

SEQ ID NO: 82158 - DNA, 942 bp, Clostridium difficile 630
  CDS (1)..(942): transl_table=11
atgtataatatattagttactgatggaatagagaaagaagcagcgagaaaattgagagagttagattttaatgtgatagagcagttttatgaaaaagatgttttaggagataaacttaaagatgttgatgtacttgtagtacgttcagctactaaagttactaaagatgtaatagataaagcattagagggtaaaaagttgaagttgatagtaagaggtggagtaggtctggataatatagatgttaaatatgctcaagctaatggcataaaagttatgaatactccaaatgcaagcagtatatctgttgcagagcttacaataggtcaattatttgttcttgcaagattcataaatactgcaaatgtaactatgagagatggaaaatgggagaagaaaaagtataaaggtacagaaattaatggaaagacacttggacttataggttttggaagaattgcaaaagaagttgcaaagagagcagaattattaggtatgaatgttatatatactgacataatgggtgaggcgcaaggctttaacaattataaattctgtgatatggaagaagttttagaaaatgcagatttcttatctttacacataccatttgataagaataagggggcagtaataactgaaaaagaaataaataagatgaagaaaggggcttatttaataaactgtgcaagaggcggtttagttgatgaaaaagatttactaaaagcattagatgaaggtaaattatcagcagctgctatagatgtttatgaacaagaacctacattaaatttagacttagtaaatcatccaagagtttctcctacacctcatattggggcatctacagtagaagctcaagaaagaataggagacgaaatagtaaatgtgattcaagatttctttcttgacttcaacaatctaataggggtagcattataa

SEQ ID NO: 82159 - protein, 313 aa, Clostridium difficile 630
MYNILVTDGIEKEAARKLRELDFNVIEQFYEKDVLGDKLKDVDVLVVRSATKVTKDVIDKALEGKKLKLIVRGGVGLDNIDVKYAQANGIKVMNTPNASSISVAELTIGQLFVLARFINTANVTMRDGKWEKKKYKGTEINGKTLGLIGFGRIAKEVAKRAELLGMNVIYTDIMGEAQGFNNYKFCDMEEVLENADFLSLHIPFDKNKGAVITEKEINKMKKGAYLINCARGGLVDEKDLLKALDEGKLSAAAIDVYEQEPTLNLDLVNHPRVSPTPHIGASTVEAQERIGDEIVNVIQDFFLDFNNLIGVAL

SEQ ID NO: 82160 - DNA, 1587 bp, Prochlorococcus marinus str. MIT 9301
  CDS (1)..(1587): transl_table=11
atgacaaaagttctcattacagatccaattgatcaaaaaggaatcgatattctttcacaagttgctcaggttgatcacaagatagggatctcagactctgagttagcttccattattggagattatgatgccttaatgattcgctctggtactcaagtgaccgaagaaattattaactcttcaagtaaactgagaatcattgggagagcaggagttggagtcgataatgtagatgttaaggctgctacgcaaaaaggagtccttgttgttaattctccagggggtaacacaatagcagcggctgaacatactatagctatgatgttggccttatctaggcatattccaattgctaatagtagtactttgttaggtaaatgggagagaaagaaattcgttgggaatgagctttataagaaaaaattaggtgtagtaggtttagggaaaattggtgctcatgtagcaaaagttgctaatgcattagggatggaagtttgcggatatgatccatttgtttcaactgaaagagctcaacaaatccaagttaaactatctgatctagaagatttattccaacaatccgattatgtaactttgcatttacctcgcacaccagagacagagaatttagtcaatatggatgtgcttaaaaatatgaaaagtagcgcaaaattaattaattgtgctcgaggaggcttgattgatgaagaggcattagcacaagctttaaatcaatcattgattgcaggtgctgcaatagatgttttttctaaagaacctttggaatctaattcaccacttttgaaggttgaaaagaatcttattcttaccccccacttaggagcatctactcgggaagcacaagaaaatgtagctgttgatgttgcggaacaaataagggatgtcttgcttggtttatctgctagaactgcagtaaatattccaggtttgagccctgatattatggatagtctgaaacctcatttgcagttagctgaaaccatgggtctgcttataagccagctttcaggtggacagatacagaaactagaagtaaagcttcaaggtgaatttgttcaacatccttctcagccattaataatagctagtctaaaaggccttctaagtaaagctttgggagataggattaattatgtaaatgcttcgctagaagcagattcaagaggtatttcagtagtcgagaataaagatgaggcaagacctgaatttgctagtggttcgcttcagttaaccacttatggagataacggcgaccatagcgtagcgggaagcatttttgctgatggggaattaagaattattagtattgatcaatacccagttaatgtatcaccaagcagatatatgttggttactaggcacagggatatgcctggtattattggcaagctggggtctttattaggtagcaataatgtaaatattgcctcaatgcaagttgggcgcaaaattgtaagaggggaagctgttatggttctaagtattgatgatccaatacctaataagttacttgataccattattgaagtggatgggattaccaacgctaatccagttactctatga

SEQ ID NO: 82161 - protein, 528 aa, Prochlorococcus marinus str. MIT 9301
MTKVLITDPIDQKGIDILSQVAQVDHKIGISDSELASIIGDYDALMIRSGTQVTEEIINSSSKLRIIGRAGVGVDNVDVKAATQKGVLVVNSPGGNTIAAAEHTIAMMLALSRHIPIANSSTLLGKWERKKFVGNELYKKKLGVVGLGKIGAHVAKVANALGMEVCGYDPFVSTERAQQIQVKLSDLEDLFQQSDYVTLHLPRTPETENLVNMDVLKNMKSSAKLINCARGGLIDEEALAQALNQSLIAGAAIDVFSKEPLESNSPLLKVEKNLILTPHLGASTREAQENVAVDVAEQIRDVLLGLSARTAVNIPGLSPDIMDSLKPHLQLAETMGLLISQLSGGQIQKLEVKLQGEFVQHPSQPLIIASLKGLLSKALGDRINYVNASLEADSRGISVVENKDEARPEFASGSLQLTTYGDNGDHSVAGSIFADGELRIISIDQYPVNVSPSRYMLVTRHRDMPGIIGKLGSLLGSNNVNIASMQVGRKIVRGEAVMVLSIDDPIPNKLLDTIIEVDGITNANPVTL

SEQ ID NO: 82162 - DNA, 1590 bp, Bradyrhizobium sp. ORS278
  CDS (1)..(1590): transl_table=11
atgaccaagcccaaagttctcatttccgacgctctctccccggccgccgtgcagatctttcgggatcgcggcgtcgaggtcgacttccagcccaacctaggcaaggacaaggataagctcgccgacatcatcggcgactatgacggcctcgccattcgctccgcgacgaaggcgaccgcgaagatcatcgagcgcgccaagcggctcaaggtgatcggccgcgccggcatcggcgtcgacaatgtcgagattcccgcggcgaccgccaagggcatcatcgtgatgaacacgccgttcggcaactcgatcacgaccgccgagcatgcgatcaccatgatgctgtcgctggcgcgcgaaatcccgcaggcggatgcctcgacgcaggccggcaagtgggagaaaaaccgcttcatgggcgtcgagatcaccggcaagacgctgggcgtcgtcggctgcggcaatatcggctcgatcgtctgcgaccgcgcgcaaggactgcgcatgaaggtgatcggcttcgatccgttcctgaccgaggagcgcgcccgtgacctcggcgtcgagaaggtcgagctcgacgagttgctcaagcgcgccgacttcatcaccttgcacacgccgctgaccgacaagacccgcaacatcatcgatgcccaggcgatcgccaagatgaaacagggcgtgcgcatcatcaattgcgcgcgcggcggcctgatcgacgaggcggcgctgctcgaggcgctaaactccaagcaggttgcgggtgccgccctcgacgtgttcgccgaggagccggcgaccagcaatccgctgttcggtcatcccggcgtgatctgcacgccgcatctcggcgcctccacgaccgaagcgcaggagaacgtcgcgttgcagatcgccgagcagatgtcggactatctgctgacgggcgcgatctcgaacgccatcaactttccctcgatcacggcggaagaggcgccgaagctgaaacctttcatcgcgctggccgagaagctcggctcgttcgcgggccagctgaccgagagcagcatcaccaaggtccagatcacctatgagggccaggtcgcggagatgaagaccaaggcgctgacctccgccgtgctggcggggctgctgcggccgatgctgggcgaggtcaacgtggtgtccgcgccggtcatcgccaaggagcgcggcatgatcgtcgacgaggtgctgcgcgcgggcgagagcgactacgagagcctgatctcggtcgcggtcaccaccgggcagcaggaacgcgcggtgtccggcacggtctatgccgacggcaagccgcggctggtcgacatcaagggcatccgcgtcgacgccgagttcggcaaatcgatgatttacgtgacgaacgaggacaagccgggtttcatcggcaagttcgcgagcctgctcggcgacgccaagatcaacatcgcgaccttccacctcggccgcgtcgcgccgggaagcgacgcaatcgcgctggtcgaggtcgacggcgccgtgccggccgaactgcttgcgaagatccaggcgctgccccaggtcaagcaggccaaggcgctggcgttctga

SEQ ID NO: 82163 - protein, 529 aa, Bradyrhizobium sp. ORS278
MTKPKVLISDALSPAAVQIFRDRGVEVDFQPNLGKDKDKLADIIGDYDGLAIRSATKATAKIIERAKRLKVIGRAGIGVDNVEIPAATAKGIIVMNTPFGNSITTAEHAITMMLSLAREIPQADASTQAGKWEKNRFMGVEITGKTLGVVGCGNIGSIVCDRAQGLRMKVIGFDPFLTEERARDLGVEKVELDELLKRADFITLHTPLTDKTRNIIDAQAIAKMKQGVRIINCARGGLIDEAALLEALNSKQVAGAALDVFAEEPATSNPLFGHPGVICTPHLGASTTEAQENVALQIAEQMSDYLLTGAISNAINFPSITAEEAPKLKPFIALAEKLGSFAGQLTESSITKVQITYEGQVAEMKTKALTSAVLAGLLRPMLGEVNVVSAPVIAKERGMIVDEVLRAGESDYESLISVAVTTGQQERAVSGTVYADGKPRLVDIKGIRVDAEFGKSMIYVTNEDKPGFIGKFASLLGDAKINIATFHLGRVAPGSDAIALVEVDGAVPAELLAKIQALPQVKQAKALAF

SEQ ID NO: 82164 - DNA, 1581 bp, Dehalococcoides sp. BAV1
  CDS (1)..(1581): transl_table=11
atgaaaaaagtactggtaagcgatgcactctccgcaacagggttagcccctcttaaggagattgcacaggtagatgtaaagaccggccttaaaccggaagaattgataagcattatcggtgagtatgacgccctgctggtacgcagccagactcaggtcaccgctgatattatcaacgccggtaaaaaacttcaggttatcggccgggccggcgtgggcgtagataacattgacctcaaagccgccaccggtaatggtattatcgtggtgaatgcccccaccggcaacactatctccgctaccgaacatacactggcccttatgctggctatggcccgccatattcccagagccaacgccagtttaaaatccggccagtggaaacgcaatgaatttgtgggctctgaactgaagggtaaaactctgggtattgtaggcttgggtaatatcggttctgaaatagccaaacgcgccctggcccttgaaatgcgggttataggttatgacccgtttatatctatggaacgtgccaaaaaactgcaggtggaactgctgccttttgaagacctgctgaagcaggctgactttatcaccctgcatgttcccatgaccggtcagaccaagggccttatcggacccaaggaactggaaatgatgaaacccaccgtccgccttatcaatacctcccgcggcggcattatagatgaagaagcactagccaaggccgttaaggaaaagcgcatcggcggtgccgctattgacgtattctccaaagagccatgcaccgagagctgcctctttgagtgtgataatattatcgttacccctcatctgggggcttccactgccgaagctcaggaactggccacctctgacgtggtcaaacaggtaatagatgtatttgaaggccgccccgcccgttatgccgtaaatgcaccctatatttcggctgaaagcctgccggtagtcggccccttcatgccggttgcccgcacagtgggcagtctggtaagccagctgactgatggccatatgaagaatgttaccatcaagtactgcggtgaactggccgcttatgataccactgccctgaaagctctggttctgggcggtatacttgaacatatcagcgaagaacgggtgaacgtggttaatgctgatatcgtagcctcccagcgagggctgggtgtaaccgaacaaaaagaatccacctgccagaatttctccagcctgattaccgttactatagataccgacaacggcaaatccaatactgtcgccggcagtctggtacggggtgatgttcatattgtaaagctgaatgattactggatagatattgtacccaccggcggttactttctgtttgcagaccatatagaccgccccggacttatcggctctgccggtaagataaccggtgatgcggatataaatataagctatatgcacctcagccgccagaaagcccgcgggcaagcccttatgatactggctctggacgaacctctgccggaaaaacagcgtcagcagctgctatccctgccggatgttcaaatggttcaggtagtaaaaatctag

SEQ ID NO: 82165 - protein, 526 aa, Dehalococcoides sp. BAV1
MKKVLVSDALSATGLAPLKEIAQVDVKTGLKPEELISIIGEYDALLVRSQTQVTADIINAGKKLQVIGRAGVGVDNIDLKAATGNGIIVVNAPTGNTISATEHTLALMLAMARHIPRANASLKSGQWKRNEFVGSELKGKTLGIVGLGNIGSEIAKRALALEMRVIGYDPFISMERAKKLQVELLPFEDLLKQADFITLHVPMTGQTKGLIGPKELEMMKPTVRLINTSRGGIIDEEALAKAVKEKRIGGAAIDVFSKEPCTESCLFECDNIIVTPHLGASTAEAQELATSDVVKQVIDVFEGRPARYAVNAPYISAESLPVVGPFMPVARTVGSLVSQLTDGHMKNVTIKYCGELAAYDTTALKALVLGGILEHISEERVNVVNADIVASQRGLGVTEQKESTCQNFSSLITVTIDTDNGKSNTVAGSLVRGDVHIVKLNDYWIDIVPTGGYFLFADHIDRPGLIGSAGKITGDADINISYMHLSRQKARGQALMILALDEPLPEKQRQQLLSLPDVQMVQVVKI

SEQ ID NO: 82166 - DNA, 1587 bp, Synechococcus sp. WH 7803
  CDS (1)..(1587): transl_table=11
atgaccaaagttctcgtttcagaccccattgatcaggcggggatcgacatcctcgggcaggtggctcaggtggatcagcgcacgggcctttcggccgaggagctgaagtccatcatcggtgactacgacgctttgatgatccgctcaggcactcaggtgacggcggatgtgatcgctgcggctgatcgcctgcgcatcatcggccgggctggtgtgggtgttgacaacgtcgatgttcccgcggcgacccagcgcggcgtgctggtggtgaactcgccggaaggcaacacgatcgcggccgctgagcacgcgctcgcgctgcttctgtcactgtcgcgccacgtgccccaggcccacggttccatgcgcgccggtgcttgggaccgcaagaagtacgtgggaaatgagctctacaagaaagtgctcggtgtggtcggtctgggcaagatcggttcccatgtggcccgggtggccaaagcgatgggcatggaggtgattgcgttcgatcccttcatttctgccgatcgcgcccagcagatgcaggtgcgcctcaccacgctcgaggatctgttccgccaagcggactacatcacgctgcacattccccgcacgccggataccgaaaatcttgtgaatgccgagctgctgcgctcgatgaagtccacagctcgcatcgtgaactgcgctcgcggcggaatcgtggatgaggcggcgctggccgaagcgatcgagaacggtgtgatcgctggagcagggctggacgtgtatgcctcagagccactgtcggaggattctcccttgcgggcggtcgagcgcggtttggtactgacaccccacctcggcgcctccacggaggaagcccaggagaatgtggccacggacgtggctgagcaaattcgggatgtgctgctcggtcttcccgcccgcagtgcggtgaatatccctggtctcagcgcggagatcatggagcgtctcaagccccaccttcagcttgccgaaacccttggattgctggtgagtcagctcagtggcggtcaggttcaggagctcgaggtgaggcttcagggcgaatttgctcttcatccttcccagcctttgatggtggcagcgctgaagggtctgctcaccaatgctcttggtgatcgcatcaactatgtgaatgcctccttggaagccaagggacggggcattcacgtgctggaggtgaaggatgacgccagccgcgacttcgccggtggctcgctccagttgaccacccgcggcggccagggagggcacagcgtgaccggtgcggtgtttgctgatggggagctgcgggtcaccaacatcgatgagtttcctgtgaatgtgccccccagccgtcacatgctcttcacccgccaccgggatatgcccgggatcattggccacctcggctctcttctgggtgaacacaacgtgaacatcgcctccatgcaagtggggcgccggatcgtgcgcggggatgccgtgatggtgttgagcatcgacgatccgattcccccggcgttgctggccacgatccacgggatcaacgggatccaggaagcgcatcccgtcacgctgtga

SEQ ID NO: 82167 - protein, 528 aa, Synechococcus sp. WH 7803
MTKVLVSDPIDQAGIDILGQVAQVDQRTGLSAEELKSIIGDYDALMIRSGTQVTADVIAAADRLRIIGRAGVGVDNVDVPAATQRGVLVVNSPEGNTIAAAEHALALLLSLSRHVPQAHGSMRAGAWDRKKYVGNELYKKVLGVVGLGKIGSHVARVAKAMGMEVIAFDPFISADRAQQMQVRLTTLEDLFRQADYITLHIPRTPDTENLVNAELLRSMKSTARIVNCARGGIVDEAALAEAIENGVIAGAGLDVYASEPLSEDSPLRAVERGLVLTPHLGASTEEAQENVATDVAEQIRDVLLGLPARSAVNIPGLSAEIMERLKPHLQLAETLGLLVSQLSGGQVQELEVRLQGEFALHPSQPLMVAALKGLLTNALGDRINYVNASLEAKGRGIHVLEVKDDASRDFAGGSLQLTTRGGQGGHSVTGAVFADGELRVTNIDEFPVNVPPSRHMLFTRHRDMPGIIGHLGSLLGEHNVNIASMQVGRRIVRGDAVMVLSIDDPIPPALLATIHGINGIQEAHPVTL

SEQ ID NO: 82168 - DNA, 1155 bp, Leptospira interrogans serovar Copenhageni str. Fiocruz L1-130; identical to SEQ ID NO: 64629
  CDS (1)..(1155): transl_table=11

SEQ ID NO: 82169 - protein, 384 aa, Leptospira interrogans serovar Copenhageni str. Fiocruz L1-130; identical to SEQ ID NO: 64630

SEQ ID NO: 82170 - DNA, 1566 bp, Thermus thermophilus HB27
  CDS (1)..(1566): transl_table=11
atgtggagggtcctggtctcggacgacatgcgcctgggggaggtgcggtacccgggggtgatcctggactaccgcccggggatcggccgggaggagcttttggagatcatccccgcttacgatgccctcatcacccgaagccgcacccgggtggacgcggagcttctccagagggggaagcgccttaaggtggtgggccggggcggggttggggtggacaacgtggacctcgaggcggcaagccgcctcgggatcctggtggtgaacgtccccgaggccaacacccgctccgccgccgagctcgccttcggcctcctcctcgccgccgcccggggcatcgccctttccgaccggaagctgcgccagggggagtgggaccggaagttcctgggcctggagctcaagggaaagaccctggggatcgtgggcctgggccgcatcggaagccaggtggcccgcttcgccaaggcctttgagatgcgggttctggcctacgacccctacatccccaaggcccgggcggaaagcctcggggtggagcttttggagaacctcgaggacctcctccggcagagccacttcctcaccgtccacacccccctcaccgaggagacccgggggatgatcggccggagggagctctacctgcttccccggggggcggtggtggtgaacgccgcccggggcgggatcatagacgagaaggccctcctcgaggttctggaggagggccacctcttcgccgcgggcctggacgtcttcgccgaggagccgcctcccaaggaccaccccctcatccaccaccccagggtggtccacaccgcccacctgggggcgaacaccctcgaggcccaggaaagggtgggggaggccatcttggaaagggtggtgcgcaccctggagggggacctctcctacgccctgaacaccgggtttgaccccgaggccctggaggccttgaagggcttcctccccctgggggaggccttgggcaagctcctcgcccagatcacccggggccgccccgaggccctggaggtgcgtttcctgggccagtttgaaaaggaccccgagcccatcgccagcgccgtggccaagggcctcctcgcccgggtcctgggggagggggcggtgaacctggtctcggcgaggcccctcctcaaggaccggggcatccacctcaccaccctgcgttccgaggaggcgggggagtacacccggctcgtggaggccaggctctccaccgaccaggaggagcgccgggcccggggggtggtgatcgggggaaggccccgcctcgtgggcattgacgactacgccctggaggtggtgcccgaggggtacatgctggtctgcgtcaactacgaccgccccggggtggtgggccaggtggggaccctcttgggggaggcgggggtgaacatcgctgggatgcagctcgggcgggacgtgccgggcggccgggccctcttcgtgctcaccgtggaccagaagccctcccccgaggtcctggaggccttgagggcccttcccgtcttggagcgggtggacctggtggagctgtag

SEQ ID NO: 82171 - protein, 521 aa, Thermus thermophilus HB27
MWRVLVSDDMRLGEVRYPGVILDYRPGIGREELLEIIPAYDALITRSRTRVDAELLQRGKRLKVVGRGGVGVDNVDLEAASRLGILVVNVPEANTRSAAELAFGLLLAAARGIALSDRKLRQGEWDRKFLGLELKGKTLGIVGLGRIGSQVARFAKAFEMRVLAYDPYIPKARAESLGVELLENLEDLLRQSHFLTVHTPLTEETRGMIGRRELYLLPRGAVVVNAARGGIIDEKALLEVLEEGHLFAAGLDVFAEEPPPKDHPLIHHPRVVHTAHLGANTLEAQERVGEAILERVVRTLEGDLSYALNTGFDPEALEALKGFLPLGEALGKLLAQITRGRPEALEVRFLGQFEKDPEPIASAVAKGLLARVLGEGAVNLVSARPLLKDRGIHLTTLRSEEAGEYTRLVEARLSTDQEERRARGVVIGGRPRLVGIDDYALEVVPEGYMLVCVNYDRPGVVGQVGTLLGEAGVNIAGMQLGRDVPGGRALFVLTVDQKPSPEVLEALRALPVLERVDLVEL

SEQ ID NO: 82172 - DNA, 1173 bp, Bacillus thuringiensis serovar konkukian str. 97-27
  CDS (1)..(1173): transl_table=11
atgtttcgtgttcaaacgttaaatcaaattgcagaaaaaggtttgcaagtgcttggcggagagcgctatgaagtaggggagagaatggaccacccagacggcattttacttcgcagttattctttacatcaagaagaattttcaaaagacttaaaggccattgcaagagctggtgcaggggtaaataatattcctgtcgagcgatgtacagaaaaagggattgtagtatttaatacgccaggagcgaatgccaatgcagtaaaggaacttattatcgccagtcttattatgtcttcacgtaacattattaatggcgtaagctggacgaaaaatttagagggtgaggaagtaccgcagcttgttgaatcaggaaaaaaacaatttgttggatctgaaattgcgggaaaacgtctaggagttatcggacttggtgcgattggagctttagttgcgaacgatgcgttagctttagggatggacgttgtcggatatgacccttacatttcagttgaaacagcttggcgcctttctacacatgtgcaaagagcatttagtttagatgaaatttttgcaacgtgtgattatattacccttcatattcctcttacgaatcaaacgaagggaatgattggtgaacacgctgtagagaagatgaaaaaaggtatgcgtctattcaatttctctagaggagaacttgtagatgaaaaggttcttcaaaaagcgttagaagaagagattattgcacattacgtaacggacttcccgaatgaaaatgtgataaagatgaaaaatgtaacagcgacgcctcaccttggtgcatctacgtctgaatcagaagaaaattgtgcagtcatggcagcgcgccaattacgtgaatatttagagacaggaaatattcgtaattcagtcaactatccaaatgttgagctgccgtatatcggaaagaaacgtattacaatcatgcatcaaaacgtaccgaacatggtaggacaaattacagggtgtttagcagagcatcatattaatattgcagatatgattaatcgtagtaaacattcttgggcgtacacaatgattgatatcgataacggaattgatgatataataaaagagaacattgtggaaaatataagcaaaattacaggtgttgtagccgttcgaatgattgtgtaa

SEQ ID NO: 82173 - protein, 390 aa, Bacillus thuringiensis serovar konkukian str. 97-27
MFRVQTLNQIAEKGLQVLGGERYEVGERMDHPDGILLRSYSLHQEEFSKDLKAIARAGAGVNNIPVERCTEKGIVVFNTPGANANAVKELIIASLIMSSRNIINGVSWTKNLEGEEVPQLVESGKKQFVGSEIAGKRLGVIGLGAIGALVANDALALGMDVVGYDPYISVETAWRLSTHVQRAFSLDEIFATCDYITLHIPLTNQTKGMIGEHAVEKMKKGMRLFNFSRGELVDEKVLQKALEEEIIAHYVTDFPNENVIKMKNVTATPHLGASTSESEENCAVMAARQLREYLETGNIRNSVNYPNVELPYIGKKRITIMHQNVPNMVGQITGCLAEHHINIADMINRSKHSWAYTMIDIDNGIDDIIKENIVENISKITGVVAVRMIV

SEQ ID NO: 82174 - DNA, 1605 bp, Staphylococcus aureus subsp. aureus MRSA252
  CDS (1)..(1605): transl_table=11
atgaagcaatttaatgtactcgttgcagatcccatatcaaaagatggtatcaaagcattattagatcacgaacaattcaatgtagatattcaaactggtttgtccgaagaagcattaatcaaaattataccttcataccatgctttaatcgttcgtagtcaaactacagttactgaaaatatcataaatgctgctgattctttaaaagtaatcgcacgcgccggtgttggtgtagataatattaatattgatgctgcaacattaaaaggtattttagttattaatgccccagatggtaatacgatttcagctactgaacattcactagcaatgttattatcaatggctcgaaatattccgcaagcacaccaatcacttacaaataaagaatggaatcgaaatgcatttaaaggtactgagctttatcataaaacattaggtgtcattggtgctggtagaattggtttaggtgttgctaaacgtgcacaaagcttcggtatgaaaatactagcttttgacccttacttaacggatgaaaaagcaaaatctttaagcattacgaaggcaacagttgatgagattgcccaacattctgatttcgttacattgcatacaccactaacacctaaaacaaaaggcttaattaatgctgacttttttgccaaagcaaaacctagtttgcaaataatcaatgtggcacgtggtggtattattgatgaaaaggcactaataaaagcattagacgaaggacaaattagtcgagcagctatcgatgtgtttgaacatgaacctgcaactgattcgcctcttgttgcacatgataaaattattgttacacctcatttgggtgcttcaacagtcgaagctcaagaaaaagtggcaatttctgtttcaaatgaaatcatcgaaattttaattgatggtactgtaacgcatgcagtgaatgcacctaaaatggacttaagcaatattgatgatactgtaaaatcattcatcaatttaagccaaacagttggtgaattagctattcaattaatgtacaatgcaccaagctctattaaaattacctacggtggcgacttagcctctattgatagtagtttattaacacgtacaattattactcatattttaaaagatgatcttggtcctgaagtcaatattatcaatgctctaatgttgttaaatcaacaacaagtgacattaaatattgaaaataataaagcagagacaggttttagtaactacttagaggtagaattatcaaacgatagcgattccgttaaagttggtgcttctgtctttacaggtttcggtccaagaattgttagaattaataatttttctgtagacttaaagccaaatcaatatcaaattgtgtcatatcataatgatacaccaggcatggtaggtaaaactggcgcattgttaggtaaatacaatatcaacattgcatctatgactttaggtagaactgaagcgggcggagatgcgctaatgattttatccgttgatcaacctgtttcaaacaatataattgatgaacttaaacaagttggtgaatacaatcaaattttcacaactgaattgacggtacagtcataa

SEQ ID NO: 82175 - protein, 534 aa, Staphylococcus aureus subsp. aureus MRSA252
MKQFNVLVADPISKDGIKALLDHEQFNVDIQTGLSEEALIKIIPSYHALIVRSQTTVTENIINAADSLKVIARAGVGVDNINIDAATLKGILVINAPDGNTISATEHSLAMLLSMARNIPQAHQSLTNKEWNRNAFKGTELYHKTLGVIGAGRIGLGVAKRAQSFGMKILAFDPYLTDEKAKSLSITKATVDEIAQHSDFVTLHTPLTPKTKGLINADFFAKAKPSLQIINVARGGIIDEKALIKALDEGQISRAAIDVFEHEPATDSPLVAHDKIIVTPHLGASTVEAQEKVAISVSNEIIEILIDGTVTHAVNAPKMDLSNIDDTVKSFINLSQTVGELAIQLMYNAPSSIKITYGGDLASIDSSLLTRTIITHILKDDLGPEVNIINALMLLNQQQVTLNIENNKAETGFSNYLEVELSNDSDSVKVGASVFTGFGPRIVRINNFSVDLKPNQYQIVSYHNDTPGMVGKTGALLGKYNINIASMTLGRTEAGGDALMILSVDQPVSNNIIDELKQVGEYNQIFTTELTVQS

SEQ ID NO: 82176 - DNA, 1233 bp, Acinetobacter sp. ADP1; identical to SEQ ID NO: 64631
  CDS (1)..(1233): transl_table=11

SEQ ID NO: 82177 - protein, 410 aa, Acinetobacter sp. ADP1; identical to SEQ ID NO: 64632

SEQ ID NO: 82178 - DNA, 1233 bp, Erwinia carotovora subsp. atroseptica SCRI1043; identical to SEQ ID NO: 64633
  CDS (1)..(1233): transl_table=11

SEQ ID NO: 82179 - protein, 410 aa, Erwinia carotovora subsp. atroseptica SCRI1043; identical to SEQ ID NO: 64634

SEQ ID NO: 82180 - DNA, 1254 bp, Propionibacterium acnes KPA171202; identical to SEQ ID NO: 64635
  CDS (1)..(1254): transl_table=11

SEQ ID NO: 82181 - protein, 417 aa, Propionibacterium acnes KPA171202; identical to SEQ ID NO: 64636

SEQ ID NO: 82182 - DNA, 1593 bp, Leifsonia xyli subsp. xyli str. CTCB07
  CDS (1)..(1593): transl_table=11
gtgacaaagccggtcgtgctgatcgccgaagaactctcgcccgccaccgttgacgccctcgggccagacttcgagatccgcgacgtcgacgggacagaccggtccgcgctgctctccgccgtggtcgacgccgacgcgattctggtgcggtcggcgacgaaggtggacgcggaggtcatcggcgctgcgccgaagctcagggtcatcgcgcgcgcgggggtcggcctcgacaacgtcgacatcaagaccgcgactagcgctggtgtgatggtcgtcaacgcgccgacctcgaacatcatctcggcggcggagctgacggtcgggcacatcctgagtctcgcgcgccacatcccggccgcgcacagcgcactggcgcaggggcagtggaagcgctcgaagtacaccggcgtggagctgtacgagaagacagtcggcatcatcgggctcggccggatcggttccctcatcactgctcgactgcaagcgttcggggtcaaggtgatcgcgttcgacccctacgtgacgagcgcgcgggcacagcagctcggcgtccagctggtgagtctggacgagttgctcgccgagtcggatttcgtcaccatccacatgccgaagacgccggagacgaccggcatgatctcggacgatcagctcgcgcagatgaagccgaccgcgttcctcgtcaatgtcgcgcgcggcggcctgatcgacgaggacgcgctgcaccgcgccctcgcctcgcagagcatcgcgggcgccggcctcgacgtgttcgtgagcgagccgccgacggactcgccgctgctcggtctcgagaacgtgatcgtcacgccgcatctcggggcgtcgacgggcgaggcgcaggagaaggcgggcgtctcggtcgcgaagtcggtgcgccttgcgctctcgggcgagctggtgccggacgcggtcaacgtcgcgggcgggatcatcgacccgtacgtgcgtccgggcatcccgctcgtggagaagctcggccaggtgttctcggggctggcgcacagcccggtcacgagtgtcgacgtcgaggtccgcggcgaaatcgtggaattcgacgtcagtgtgctgaagctcgccgcgctcaagggcatcttcacgaacgtcgtctccgagacggtctcctatgtgaacgcacccctcctcgccgaccagcgcggcatcgaggtgcgcctcctcaccgactcggtgagcgaggagtaccgcaacctgatcacgatccgcggggcgctgagcgacggcacgcagctctcggtctccggcaccttgaccggaaccaagcaaatcgagaaggtcgttgagatcaacggctatgacgtggaggtgccgatcgccgagcacctgatcgtcatggtctacgacgaccgccccggcatcgtcgcggtgtacggccgcgagttcggcgaggcgaagatcaacatcgccggcatgcagatcgcccggacctcggccggcggaaaggcgctcagcgtgctgaccgtcgattcgtccgtccccgaggggctgctcgagaaggtgcgcgtcgcgatcgacgccgacctgctccaggagatcgacatcaccgagtcgtga

SEQ ID NO: 82183 - protein, 530 aa, Leifsonia xyli subsp. xyli str. CTCB07
MTKPVVLIAEELSPATVDALGPDFEIRDVDGTDRSALLSAVVDADAILVRSATKVDAEVIGAAPKLRVIARAGVGLDNVDIKTATSAGVMVVNAPTSNIISAAELTVGHILSLARHIPAAHSALAQGQWKRSKYTGVELYEKTVGIIGLGRIGSLITARLQAFGVKVIAFDPYVTSARAQQLGVQLVSLDELLAESDFVTIHMPKTPETTGMISDDQLAQMKPTAFLVNVARGGLIDEDALHRALASQSIAGAGLDVFVSEPPTDSPLLGLENVIVTPHLGASTGEAQEKAGVSVAKSVRLALSGELVPDAVNVAGGIIDPYVRPGIPLVEKLGQVFSGLAHSPVTSVDVEVRGEIVEFDVSVLKLAALKGIFTNVVSETVSYVNAPLLADQRGIEVRLLTDSVSEEYRNLITIRGALSDGTQLSVSGTLTGTKQIEKVVEINGYDVEVPIAEHLIVMVYDDRPGIVAVYGREFGEAKINIAGMQIARTSAGGKALSVLTVDSSVPEGLLEKVRVAIDADLLQEIDITES

SEQ ID NO: 82184 - DNA, 1182 bp, Desulfotalea psychrophila LSv54
  CDS (1)..(1182): transl_table=11
atgacagtttatagagtaaagaaaattaataagatagctcctgaaggccttgagctttttactgataagtttatcgtaaatgaagatgaaaacgatcctcaggggattattttacgtagttctcctgttgacgttgatgattatccatccttgcttgctgttgcccgggcaggtgccggaacaaataatgttaatgtagaaagagctaccaagaagggtatttgcgtatttaatacccccggcgccaatgctaatgccgttgtagaccttgtttttcctatgttaggtgtgtggaagcgtaatatctttaacggtattaacttttgtaaatctcttaccgcagtagatcccgataaggtagatagcgttgttgaagcgcaaaaatctgcctataagggagaggagatagcgggtaaaaatttgacggttgtggggcttggtcaaattggtgttcgtttggcaaatggtggtattcagcgtcttatgaatgtaaagggctttgatcctgccccggctcttgaaaatattcatcagctctctcctcaggtacgtgtctgtcgagctttaaaagatgcggtgagtgacgctgatgtgataagtttgcatcttcccctgaacgatcgaactagaaatctggttaatgcagagtttttggcgaaggtgaaaaggggagcaatccttattaactattcaagggctccaatcgtagatgagcaggctgttctcgatgcccttgacagcggtcagcttggcgcttttctttctgatttccccactgctaaaaccattggccatgagaagattttgacgacgccacatcttggggcgtctacttctcaatccgagggtaactgctctaccatggcggtaaaggagctttcaagttatcttaaatatggaaatgtcgttcacagtgtaaactttcctaatatagagtctactcctgctgatactgttaaaaacagacttattgttattaataaggatgttcctggtatgattgccaatgtttccaatatattcagtggttttaacgtgaatattgtaagctatctcaaccagtcaaacggtgccattggttataatattattgatatggaagagacgattccggaagaacttgtggcaaaaattgttgaactgcccgatgttatcagaactcgagtaattgaatttgcttag

SEQ ID NO: 82185 - protein, 393 aa, Desulfotalea psychrophila LSv54
MTVYRVKKINKIAPEGLELFTDKFIVNEDENDPQGIILRSSPVDVDDYPSLLAVARAGAGTNNVNVERATKKGICVFNTPGANANAVVDLVFPMLGVWKRNIFNGINFCKSLTAVDPDKVDSVVEAQKSAYKGEEIAGKNLTVVGLGQIGVRLANGGIQRLMNVKGFDPAPALENIHQLSPQVRVCRALKDAVSDADVISLHLPLNDRTRNLVNAEFLAKVKRGAILINYSRAPIVDEQAVLDALDSGQLGAFLSDFPTAKTIGHEKILTTPHLGASTSQSEGNCSTMAVKELSSYLKYGNVVHSVNFPNIESTPADTVKNRLIVINKDVPGMIANVSNIFSGFNVNIVSYLNQSNGAIGYNIIDMEETIPEELVAKIVELPDVIRTRVIEFA

SEQ ID NO: 82186 - DNA, 1623 bp, Symbiobacterium thermophilum IAM 14863
  CDS (1)..(1623): transl_table=11
atgaagatcctggtgacggaagcgatatcggagacgggcatcagcctcctgagggatgaacacgaggttgatgtccggaaggtgacctcggaggagctgctcgagatcatccccgagtacgacgccctcatcacccgctcggagacgaaggtcaccgcggaggtgctggcccggggcacgcggctgaaggtcgtcggccgggccggcgtgggcgtggacaacatcgacgtcgccgcggccaccgagaggggcgtcgtggtggtcaacgttcccggtgccaacacctactccaccgccgagcacgccttcggcctcctcatcgccgtggcccgcaacatcccccaggctcaccacgccctggcccgcgagggccgctgggaccggatgagcttcgtgggcaccgaactccacggcaagacgctgggcatcattggcctggggcgcatcggctccgaggtggccgtgcgggcgcgggccttcggcatgcgggtgctggcctacgacccctacgtgccccacagccgggccgagcacctgggggtcaccctggttccaagcctcaggggactcctgccggaagtcgatttcctgacgatccatgcggccaagaccccggagtcggcccggctcatcggggccgcggagctggcgctcatgaagcccaccgcacgcatcgtcaactgcgcccgcggcggcatggtggacgaggaggcgctgtaccgtgcgctgaaggagggccgcctggccggcgccgcgctggacgtcttcgccgcggagccgtgtaccgacagcccgctcttcggcctgcccaacgtcgtggtcacgccccacctgtccgcctccacggccgaggcgcaggacgccaacggccggtacatcgcccagtacgtgctccgggccctcaggggcgagctggtccccgaggcggtcaacctgccccagatcccgcgggacggcgtccaggtcgtcaccgaccacctgccgctggccgaaacgctgggctccttcctggcccaggccttcccggggcacgccgaccgcatcaccgtcgcctacagcggcgagctggccaagcacccgaccgccctgctcaccaacacggtgctgaagggctacctggcgacccagctgggtgagcacgtaaattacatcaacgcgcccgccctggcccgccggcgggggattgcggtcaacgagtccaagtcgctgacccacgcgccgctgggcgaaaacggcacgctgtcgcccgcgtccagcctgatcacggtccggtccgaggggccgcagggcgctcatgaggtgaccggcatgctccgccgggacggcgggatgcgcttcgtcgccgtggacgggctgcacatcgacatggccccttcccgccacatgctggtcagccagcaccgggaccagcccggcatggtcggccgcttcggcatggccctggcggcccgggacatcaacatcgcggggctgcacctggggcggcaccagccccggggcatggccctgatgctgctgcagatcgacgagcccgcgccgcccgatctggtggcggaactgcgggaggcgatggcggtggacaccgtccaggcggtgaccctgccgctggggaggcagccgtga

SEQ ID NO: 82187 - protein, 540 aa, Symbiobacterium thermophilum IAM 14863
MKILVTEAISETGISLLRDEHEVDVRKVTSEELLEIIPEYDALITRSETKVTAEVLARGTRLKVVGRAGVGVDNIDVAAATERGVVVVNVPGANTYSTAEHAFGLLIAVARNIPQAHHALAREGRWDRMSFVGTELHGKTLGIIGLGRIGSEVAVRARAFGMRVLAYDPYVPHSRAEHLGVTLVPSLRGLLPEVDFLTIHAAKTPESARLIGAAELALMKPTARIVNCARGGMVDEEALYRALKEGRLAGAALDVFAAEPCTDSPLFGLPNVVVTPHLSASTAEAQDANGRYIAQYVLRALRGELVPEAVNLPQIPRDGVQVVTDHLPLAETLGSFLAQAFPGHADRITVAYSGELAKHPTALLTNTVLKGYLATQLGEHVNYINAPALARRRGIAVNESKSLTHAPLGENGTLSPASSLITVRSEGPQGAHEVTGMLRRDGGMRFVAVDGLHIDMAPSRHMLVSQHRDQPGMVGRFGMALAARDINIAGLHLGRHQPRGMALMLLQIDEPAPPDLVAELREAMAVDTVQAVTLPLGRQP

SEQ ID NO: 82188 - DNA, 1233 bp, Mannheimia succiniciproducens MBEL55E
  CDS (1)..(1233): transl_table=11
atgactaataaagtatctttggataaatctaagatcaaatttttacttcttgaaggtgttcaccaaaacgcattagatgtgttacatgcggccggttacactaatattgaatatcataaaaaagcgttagagccggatgaacttaaagaagcaattaaagaagcgcactttattggtttacgttcccgcacaaatttaacggcggatattcttgaacatgcgaataaattaatcgctatcggttgtttttgtatcggcaccaatcaagtggcattggaagcggcggaagaaaagggtattcccgtatttaatgcgccgttctctaatacccgttccgtagcggaattggttctcggtgagattttgttattaatgcgcaatattccggcggcaaacgcgcaggttcaccgcggtgaatggaacaagtcggcggcgggttctcatgaagttcgcggtaagaaattaggtatcgtcggctacggtcatatcggttcgcaattaagtattatcgccgagtctttaggtatgaatgtatttttctacgatgttgaaaccaagctgcctttaggtaatgcgcagcaagtttccactttagaggaattattaagttcctgcgatattatttcattacacgtacccgaactgccttcaacaaagaatttaatgagcgcggaacgtatcgctcagttaaaaccgggcagtattttaattaatgcggcgcgcggtacggttgttgatattgatgcgttagccgaagcgttagaacaggggaaaatacatggcgccgcaatcgacgtattccctaaagagccggcttctgcggcggaagcgtttgagtcaccgttgcgtaaattcgataatgtgattttaaccccgcatatcggcggttcaacggcggaagcgcaagaaaatatcggcactgaagtggcaagtaaattcgttaaatattcggataacggttcaactctaagtgcggtgaattttccggaagtttcgttaccggaacatcgtacggcaaaacgtattttgcacattcaccataaccgcccgggtattttgaataaaatcaaccaggtttttgttgatgaaaatatcaacatcgccgcgcaatatctgcaaaccgacgctaaaatcggttatgtggttattgatgtagaaacggatgacagtacggatttactgcaaaaacttaaatcaatcgagggtacgattcgcgccagagtattgttttaa

SEQ ID NO: 82189 - protein, 410 aa, Mannheimia succiniciproducens MBEL55E
MTNKVSLDKSKIKFLLLEGVHQNALDVLHAAGYTNIEYHKKALEPDELKEAIKEAHFIGLRSRTNLTADILEHANKLIAIGCFCIGTNQVALEAAEEKGIPVFNAPFSNTRSVAELVLGEILLLMRNIPAANAQVHRGEWNKSAAGSHEVRGKKLGIVGYGHIGSQLSIIAESLGMNVFFYDVETKLPLGNAQQVSTLEELLSSCDIISLHVPELPSTKNLMSAERIAQLKPGSILINAARGTVVDIDALAEALEQGKIHGAAIDVFPKEPASAAEAFESPLRKFDNVILTPHIGGSTAEAQENIGTEVASKFVKYSDNGSTLSAVNFPEVSLPEHRTAKRILHIHHNRPGILNKINQVFVDENINIAAQYLQTDAKIGYVVIDVETDDSTDLLQKLKSIEGTIRARVLF

SEQ ID NO: 82190 - DNA, 1230 bp, Azoarcus sp. EbN1; identical to SEQ ID NO: 64639
  CDS (1)..(1230): transl_table=11

SEQ ID NO: 82191 - protein, 409 aa, Azoarcus sp. EbN1; identical to SEQ ID NO: 64640

SEQ ID NO: 82192 - DNA, 1602 bp, Bacillus clausii KSM-K16
  CDS (1)..(1602): transl_table=11
atgaaccaagttgcagagccaaaaacagcccaatttcatattctcgtagccgataccatgagcgaagaaggcctattgcctttgcttgaggctgaccatgtcgaggttacacaagcaagcgtcgacaacgctgggccattggagcaatacgacgccctgttaatccgcagtgccactacagtcaccgaggagctcctcagccgtatgccgcgcttgaaaatcgttgctcgtgccggcgtcggtgttgacaatgtagacatacaagcggcaaccaaacatggcgttgtcgtcattaacgcacctgacggcaacacgatttcaacggcggagcacacatttgcgatgatgtgcgccctgttgcgcaacattccacaagctaacgctagtgtcaaatcaggaaaatgggaccgcaaagcgtaccaagggactgaacttcggggaaaaacactcggcattgttggctttggccgtattggtacgcaattagccaaacgggccaaagcgtttgaaatgggcgtgcttgtgtatgatccatttttaacggctgaacgagcagaaaaacttgggattgcccaaggcgagttggaccatgtcttatcagttgctgatatcattactgtgcatacgccattaacgaaagacacaaaagggcttttgaatatggaaacaatcgcgaaaacaaagccaggagtgtttttaatcaattgcgcccgtggtggcattattgatgaacaggcattaaaacactacttaaacaacggccatgttgccggggctgctttggatgtgtttacagaagaaccagcgacagacaaagaattgattggccatcctagcgtagtggcaacgcctcacattgctgcttctacgaaagaagcgcagctaaacgtggctgcccaagtttctcaggaagtgctacaatttttaaacggtgagccggcattaaactcgattaatttgccagctatgccaaaagacgtttacgaaaaaatcaagccctattacgaccttgctaggacaatgggctccgtattatcacaattgatgcgtatccctgtccaagaaattgaagtgttctacagcggcacaacggccgaacaaaatacgagcgtgctaacgagaagccttatttccggttttcttcaaccacgcgttgatgcggctgtcaatgatgtcaacgcatcccttattgccaaagaacgtggcatttcctttggcgaaaagcatgtgacgaaaacattcggctactctaacctcatccaagcggttgtccacggcgaaggcagacagtttgaaatgaaggcgacttacatccatgaatacggtccacggattgtatcaatcaacggtttttcagtcgacgtcgtcgcagaagggcatattttatacattcaacattttgatcgtcctggcgttatcggcaaaatgggccaacttctcgctaagcatgacgtcaatatcgcaacgatgcaagtaggccggaaatcagccggcggcgaagcgattatgattgtccaagtcgataaacatgtcgatcaaactgtgatcgacggtttgttaacgtttgacgaaatcgctattgctaacgtcattgatttataa

SEQ ID NO: 82193 - protein, 533 aa, Bacillus clausii KSM-K16
MNQVAEPKTAQFHILVADTMSEEGLLPLLEADHVEVTQASVDNAGPLEQYDALLIRSATTVTEELLSRMPRLKIVARAGVGVDNVDIQAATKHGVVVINAPDGNTISTAEHTFAMMCALLRNIPQANASVKSGKWDRKAYQGTELRGKTLGIVGFGRIGTQLAKRAKAFEMGVLVYDPFLTAERAEKLGIAQGELDHVLSVADIITVHTPLTKDTKGLLNMETIAKTKPGVFLINCARGGIIDEQALKHYLNNGHVAGAALDVFTEEPATDKELIGHPSVVATPHIAASTKEAQLNVAAQVSQEVLQFLNGEPALNSINLPAMPKDVYEKIKPYYDLARTMGSVLSQLMRIPVQEIEVFYSGTTAEQNTSVLTRSLISGFLQPRVDAAVNDVNASLIAKERGISFGEKHVTKTFGYSNLIQAVVHGEGRQFEMKATYIHEYGPRIVSINGFSVDVVAEGHILYIQHFDRPGVIGKMGQLLAKHDVNIATMQVGRKSAGGEAIMIVQVDKHVDQTVIDGLLTFDEIAIANVIDL

SEQ ID NO: 82194 - DNA, 1581 bp, Dehalococcoides ethenogenes 195
  CDS (1)..(1581): transl_table=11
atgaaaaaagtactggtaagcgatgcactctccgcaaccgggttatccccccttaaggagattgcacaggtagatgtaaagaccggcctaaaaccggaggaattggtaagcattatcggtgaatatgacgccctgctggtacgcagccagacccaggtcaccgctgatattatcaatgccggtaaaaaactgcaggttatcggccgggccggagtgggcgtagataatattgacttaaaagctgccaccggtaacggtattatcgtggtaaatgcccccaccggcaacactatctccgctaccgaacataccctggcccttatgctgtctatggcccgccatattcccagagccaacgccagcctgaaatccggccagtggaaacgcaatgaatttgtaggctctgaacttaagggcaaaactctgggcattgtaggtttgggcaatatcggctctgagatagccaaaagggctttagctttggaaatgcgggttataggttatgatccctttatatctatggaacgtgccaaaaaactgcaggtagaactggtaccctttgaagacctgctgaaacaggctgactttatcaccctgcatgttcccatgaccggtcagaccaagggacttatcggccccaaggaactggaaatgatgaaacccactgtccgccttatcaatacctcccgcggcggcatcatagacgaagaagctctggcagcagccatcagagaaaagcgtatcggcggtgccgctattgacgttttctccaaagaaccctgtaccgaaagctgcctctttgagtgtgacaatattattgttaccccccacctgggtgcttccactgccgaagctcaggagctggccacctctgacgtggtcaaacaggtaatagatgtatttgaaggccgccccgcccgctatgccgtaaatgcaccctatatctcggctgaaagcctgccggtagtcggtccctttatgccagttgcccgcacagtgggcagcctggtaagccagctgactgacgggcacatgaaaaatgtgaccatcaaatactgcggcgaactggccgcttatgataccaccgccctgaaggccctggtgctgggcggtatacttgagcatatcagcgaagaacgggtgaacgtggtcaatgctgatatcgtagccgcgcagcgcgggcttggtgtaaccgaacaaaaggaatccgcctgccagaatttttccagcctgattactgtcaccatagataccgataacggcaaatccaatacggttgccggcagtctggtgcggggtgacgtgcatattgtaaggctgaatgattactggatagatattgtacctaccggcggttatttcctgtttgcagaccatatagaccgccccggactgataggtgcggccggtaagattaccggtgatgcagatatcaacataagctacatgcacctcagccgccagaaagccagagggcaggccctgatgatactggctctggatgaacccctgccggaaaaacagcgccagcagctgctgtccctgccggacgttcaaacagtccaagttgtaaaaatctag

SEQ ID NO: 82195 - protein, 526 aa, Dehalococcoides ethenogenes 195
MKKVLVSDALSATGLSPLKEIAQVDVKTGLKPEELVSIIGEYDALLVRSQTQVTADIINAGKKLQVIGRAGVGVDNIDLKAATGNGIIVVNAPTGNTISATEHTLALMLSMARHIPRANASLKSGQWKRNEFVGSELKGKTLGIVGLGNIGSEIAKRALALEMRVIGYDPFISMERAKKLQVELVPFEDLLKQADFITLHVPMTGQTKGLIGPKELEMMKPTVRLINTSRGGIIDEEALAAAIREKRIGGAAIDVFSKEPCTESCLFECDNIIVTPHLGASTAEAQELATSDVVKQVIDVFEGRPARYAVNAPYISAESLPVVGPFMPVARTVGSLVSQLTDGHMKNVTIKYCGELAAYDTTALKALVLGGILEHISEERVNVVNADIVAAQRGLGVTEQKESACQNFSSLITVTIDTDNGKSNTVAGSLVRGDVHIVRLNDYWIDIVPTGGYFLFADHIDRPGLIGAAGKITGDADINISYMHLSRQKARGQALMILALDEPLPEKQRQQLLSLPDVQTVQVVKI

SEQ ID NO: 82196 - DNA, 915 bp, Thermococcus kodakarensis KOD1
  CDS (1)..(915): transl_table=11
atgaaggttctcgttgccgctccgcttcacgagaaggcgatagaggttttgaagaacgccggctttgaggtcgtttacgaggagtatcccgatgaggacaggctcgttgaactcgttaaagacgtcgatgcgataatcgttaggagcaagccgaaggtaaccaggaaggtcatcgaggccgctcccaagctcaaggtcataggaagggctggcgttggcctcgacaacattgacctcaaggccgccgaggagaggggaattaaggtcgtaaacagtcctggggctagctccaggagcgtcgccgaactggccatcggccttatcttcgccgtcgcgaggaagatagccttcgccgacaggaagatgagggaaggcgtctgggccaagaagcagtgcatgggaatagagcttgagggcaagaccattggagtcgtcggcttcggaagaataggctaccaggttgcaaagatagcgaacgccctcggcatgaaggttctcttctacgacccgtatccaaacgaggaaagggcaaaggaggtcggaggaaagtttgctgaccttgagacgctcctgaaggagagcgacgtcgttacgctccacgtcccgctggttgatgcaacctaccacctcataaacgaggagaggctcaagctcatgaagccgaccgccatactcatcaacgccgcaaggggtgcggtagttgacaccgatgccctcgtcaaggcccttcaggagggctggatcgcgggagcaggccttgatgtcttcgaggaggagccccttccagcagaccacccgctcacaaagcttgacaacgttgttctaacgccgcacatcggcgcctcgactgttgaggcccagatgagggcaggcgtcgaggtcgccgagaagatagtggaagccctcaagggctga

SEQ ID NO: 82197 - protein, 304 aa, Thermococcus kodakarensis KOD1
MKVLVAAPLHEKAIEVLKNAGFEVVYEEYPDEDRLVELVKDVDAIIVRSKPKVTRKVIEAAPKLKVIGRAGVGLDNIDLKAAEERGIKVVNSPGASSRSVAELAIGLIFAVARKIAFADRKMREGVWAKKQCMGIELEGKTIGVVGFGRIGYQVAKIANALGMKVLFYDPYPNEERAKEVGGKFADLETLLKESDVVTLHVPLVDATYHLINEERLKLMKPTAILINAARGAVVDTDALVKALQEGWIAGAGLDVFEEEPLPADHPLTKLDNVVLTPHIGASTVEAQMRAGVEVAEKIVEALKG

SEQ ID NO: 82198 - DNA, 1596 bp, Staphylococcus epidermidis RP62A
  CDS (1)..(1596): transl_table=11
atgagtcataagatattagtatcagacccaatttctgaggatggtttacaaagtattttaaaacatccagaatttgacgtagatatacaaacagatttatctgaaaatgatttagtaaatatgatttcaacttatgatgctcttatcgtacgaagtcaaacccaagtaacagagcgaattattaatgctgcaacaaatttgaaggtcattgcaagagctggtgtaggtgtggataatattaatatagaagcagcgactttaaaaggtattttagtaattaatgctcctgatggtaatacaatttctgctacagaacattcagtagctatgttgcttgcaatggcacgaaatattcctcaagcacaccaatctttacgtaacaaagaatggaatcgtaaagcatttagaggggttgaactttatggcaaaaccttaggtgttatcggtgctggtaggattggtttgggcgtcgctaaacgtgcgcagagtttcggtatgaaaattttagcgttcgatccttatttaacagaagataaagcgaagtcattagatattcaaattgcaactgttgatgaaattgccgaaaaatccgactttgtaacagttcacacaccattaacacctaaaactcgaggaattgttggttcatctttctttaacaaagctaaacaaaacttacaaatcataaatgttgccagagggggtattatagatgaaactgcacttattgaagcattagataataacttaatagatcgtgcagctattgacgtatttgaacatgaacctcctactgattcccctctcattcaacatgataaaattattgtcacaccacatcttggcgcctctactgtagaagcgcaagagaaggttgcagtctctgtatctgaagaaataattgaaattctaactaaagggaatgttgagcatgctgtgaatgctccaaaaatggatttaagcaaagttgataaaacaactcaaagctttataggtttaagtacaactattggtgagtttgctattcagcttctcgatggtgctccgagtgaaattaaagttaaatatgctggtgacttagcgcaaaatgacactagtttaattacaagaacaattataacgaacatcttgaaagaagatttaggtaatgaagtcaatattattaatgcattagcaatacttaaccaacaaggtgtcacgtataatatagaaaaacaaaagaaacattctggctttagtagttacattgagctagaactagttaatgatcaagataaaatcaaaattggcgcaacggtattcgcaggttttggcccaagaatagtacgtattaatgattactcacttgattttaaacctaaccaatatcaattagtaacatgtcataaagataaacctggtatagtaggacaaacaggcaacctattgggaagtcacggaattaatattgcgtcaatgactttaggacgtaacgatgctggtggagatgctttaatgattctttctattgatcaacaagcaagtgaggaagttataaaaattttaaatgaaacaagcggattcaacaaaattattagcactaagttaacaatttga

SEQ ID NO: 82199 - protein, 531 aa, Staphylococcus epidermidis RP62A
MSHKILVSDPISEDGLQSILKHPEFDVDIQTDLSENDLVNMISTYDALIVRSQTQVTERIINAATNLKVIARAGVGVDNINIEAATLKGILVINAPDGNTISATEHSVAMLLAMARNIPQAHQSLRNKEWNRKAFRGVELYGKTLGVIGAGRIGLGVAKRAQSFGMKILAFDPYLTEDKAKSLDIQIATVDEIAEKSDFVTVHTPLTPKTRGIVGSSFFNKAKQNLQIINVARGGIIDETALIEALDNNLIDRAAIDVFEHEPPTDSPLIQHDKIIVTPHLGASTVEAQEKVAVSVSEEIIEILTKGNVEHAVNAPKMDLSKVDKTTQSFIGLSTTIGEFAIQLLDGAPSEIKVKYAGDLAQNDTSLITRTIITNILKEDLGNEVNIINALAILNQQGVTYNIEKQKKHSGFSSYIELELVNDQDKIKIGATVFAGFGPRIVRINDYSLDFKPNQYQLVTCHKDKPGIVGQTGNLLGSHGINIASMTLGRNDAGGDALMILSIDQQASEEVIKILNETSGFNKIISTKLTI

SEQ ID NO: 82200 - DNA, 1230 bp, Pseudomonas syringae pv. syringae B728a; identical to SEQ ID NO: 64641
  CDS (1)..(1230): transl_table=11

SEQ ID NO: 82201 - protein, 409 aa, Pseudomonas syringae pv. syringae B728a; identical to SEQ ID NO: 64642

SEQ ID NO: 82202 - DNA, 1233 bp, Haemophilus influenzae 86-028NP; identical to SEQ ID NO: 64643
  CDS (1)..(1233): transl_table=11

SEQ ID NO: 82203 - protein, 410 aa, Haemophilus influenzae 86-028NP; identical to SEQ ID NO: 64644

SEQ ID NO: 82204 - DNA, 1230 bp, Pseudomonas fluorescens Pf-5
  CDS (1)..(1230): transl_table=11
atgagcaagacttctctcgataagagcaagatcaagttccttctcctcgaaggcgtccaccaatccgctgtcgacgtcctcaaggccgccggctacaccagcatcgagtacctcaccggttctctgccggaagcccagctcaaggaaaagatcgccgatgcacacttcatcggcattcgctcccgcactcaactgaccgaagagatcttcgaccacgcgaagaaactggtcgcagtgggctgcttctgcatcggcaccaaccaggttgacctgtccgccgctcgtgagcgcggcatcgcggtgttcaacgcgccgtactccaacacccgttcggttgccgagctggtgctggccgaggccatcctgctgctgcgcggcatccccgagaaaaacgcttcctgccaccgtggcggctggatcaagagcgcggccaactccttcgaaatccgtggcaagaagctgggtatcgtcggctacggctccattggtacgcagttgtcggtcctggccgaaggcttagggatgcaggtgtttttctacgacaccgtgaccaagctgccactgggcaacgccacccaggtgggcaacctgcacgaactgctgggcatgtccgacatcgtcaccctgcacgtgccggaaaccgcggccacccagtggatgatcggcgagaaggaaatccgcgccatcaagaagggcggcatcctgatcaacgccgcccgcggcaccgtggtcgagctggacgccctggcggacgcgatcaaggacaagcacctgatcggcgcggccatcgacgtattcccggtggagccgcgctccaacgacgaagagttcgaaagcccgctgcgcggcctggacaacgtgatcctgaccccgcacatcggcggttccaccgctgaagcccaggccaacatcggcctggaagtggcagaaaaactggtcaagtacagcgacaacggtacctcggtgtcctcggtcaacttccctgaagtggcgctgccggcccacccgggcaagcaccgtctgctgcacatccacgagaacattccgggcgtgatgagcgagatcaacaaggtcttcgccgaaaacggcatcaacatctccggtcagttcctgcagaccaacgagaaggtcggctacgtggtgatcgacgtcgacgccgagtactcggacctggcgcaagagaagctgcagcacatcaacggcaccatccgttgccgcgtgctgttctaa

SEQ ID NO: 82205 - protein, 409 aa, Pseudomonas fluorescens Pf-5
MSKTSLDKSKIKFLLLEGVHQSAVDVLKAAGYTSIEYLTGSLPEAQLKEKIADAHFIGIRSRTQLTEEIFDHAKKLVAVGCFCIGTNQVDLSAARERGIAVFNAPYSNTRSVAELVLAEAILLLRGIPEKNASCHRGGWIKSAANSFEIRGKKLGIVGYGSIGTQLSVLAEGLGMQVFFYDTVTKLPLGNATQVGNLHELLGMSDIVTLHVPETAATQWMIGEKEIRAIKKGGILINAARGTVVELDALADAIKDKHLIGAAIDVFPVEPRSNDEEFESPLRGLDNVILTPHIGGSTAEAQANIGLEVAEKLVKYSDNGTSVSSVNFPEVALPAHPGKHRLLHIHENIPGVMSEINKVFAENGINISGQFLQTNEKVGYVVIDVDAEYSDLAQEKLQHINGTIRCRVLF

SEQ ID NO: 82206 - DNA, 1227 bp, Psychrobacter arcticus 273-4; identical to SEQ ID NO: 64645
  CDS (1)..(1227): transl_table=11

SEQ ID NO: 82207 - protein, 408 aa, Psychrobacter arcticus 273-4; identical to SEQ ID NO: 64646

SEQ ID NO: 82208 - DNA, 1254 bp, Colwellia psychrerythraea 34H; identical to SEQ ID NO: 64647
  CDS (1)..(1254): transl_table=11

SEQ ID NO: 82209 - protein, 417 aa, Colwellia psychrerythraea 34H; identical to SEQ ID NO: 64648

SEQ ID NO: 82210 - DNA, 1290 bp, Pseudomonas syringae pv. phaseolicola 1448A; identical to SEQ ID NO: 64649
  CDS (1)..(1290): transl_table=11

SEQ ID NO: 82211 - protein, 429 aa, Pseudomonas syringae pv. phaseolicola 1448A; identical to SEQ ID NO: 64650

SEQ ID NO: 82212 - DNA, 1587 bp, Prochlorococcus marinus str. NATL2A
  CDS (1)..(1587): transl_table=11
atgacgaaagttcttgtttctgatcccattgatcaagcaggtattgatattcttactcaggttgcccaggttgaccaaaaagtaggtctttcaccagatcagttgaagaatattattggtgagtatgacggattaatgatccgttcaggaacccaagtcacatcagatgttatatctgaggctaagaaattgagaatcattggtagagctggagttggagtggataatgttgatgtaccaactgctactagaaagggtgtcttagtcgttaattctccaggtgggaacacgattgctgcagctgagcatgctttagcaatgatgcttgcattatctagaaatattccccaagcaaacggaagtatgtttgctggaggttgggaccgaaagaaatatgtaggaaatgagctttataagaaaaccttaggagttgttggacttggcaagattggatctcatgtcgcaaaggttgcaaatgcaatgggtatggaagtcattggatttgatccttttgtttctaatgaaagagctcagcaaatgcaggttcgattaagcgatattgaggagttatttaaagaatctgattatgtaacccttcatcttccaaggacacctgaaacagagaatttagttgatattgatcttctaagaaaaatgaaaccaactgccagattggttaactgtgcaaggggtggaattattaatgaaaatgatttagctaatgccttagcagaaaatgttattcaaggtgctgcaatcgatgtatatgcaaaagaacctctagctgaaaactcgcctttacgcgctgtaaaaaaaggcttggtacttacgcctcatctaggcgcttcaactgttgaggcacaacagaatgtagcaattgatgttgcagaacaaattagagatgtccttttaggcttgccagcacgtagcgctgtaaatattcctggtcttagcgcagagataatggatagtcttaaaccacatttaaaacttgcggagacattaggattattagttagtcaaatttcagggggacagattcaaaaactagaagtgcgtttgcaaggggaattcgctcaacatccatctcaacctctagttattgcaactttgaagggattactcaccagtgcattgggcgataaaattaactatgtaaatgcttcattggaagctaaaggacgtggtattgatgtcgtagaaattaaggatgagttgtgcccagagtttgctcgaggctctttgcagttggatagttttagtgacaaaggcggtcacagcgtctctggaactgtttttggtgatggcgatcttggtattacaagtattgatgagtacccgataaatttcgtgccaagtagacatatgctttttacaaggcatagggatatgccgggaatcattggtcaaataggttcacttcttgggaaatacaatgtgaatattgcatcaatgcaagtaggaagaaggattgtaagaggtgaggcagtaatggttttaagtatcgatgaccctatcccttctgagttgttgggctcaattctttcaatgcaaggaattaacgaagctcattcagtgactctgtaa

SEQ ID NO: 82213 - protein, 528 aa, Prochlorococcus marinus str. NATL2A
MTKVLVSDPIDQAGIDILTQVAQVDQKVGLSPDQLKNIIGEYDGLMIRSGTQVTSDVISEAKKLRIIGRAGVGVDNVDVPTATRKGVLVVNSPGGNTIAAAEHALAMMLALSRNIPQANGSMFAGGWDRKKYVGNELYKKTLGVVGLGKIGSHVAKVANAMGMEVIGFDPFVSNERAQQMQVRLSDIEELFKESDYVTLHLPRTPETENLVDIDLLRKMKPTARLVNCARGGIINENDLANALAENVIQGAAIDVYAKEPLAENSPLRAVKKGLVLTPHLGASTVEAQQNVAIDVAEQIRDVLLGLPARSAVNIPGLSAEIMDSLKPHLKLAETLGLLVSQISGGQIQKLEVRLQGEFAQHPSQPLVIATLKGLLTSALGDKINYVNASLEAKGRGIDVVEIKDELCPEFARGSLQLDSFSDKGGHSVSGTVFGDGDLGITSIDEYPINFVPSRHMLFTRHRDMPGIIGQIGSLLGKYNVNIASMQVGRRIVRGEAVMVLSIDDPIPSELLGSILSMQGINEAHSVTL

SEQ ID NO: 82214 - DNA, 1278 bp, Ralstonia eutropha JMP134
  CDS (1)..(1278): transl_table=11
ttgccgcgccgcagcagaggctgccggcgcgcaccttgttctctccgagtcctattcttgcgcggaaaactgaacgtgacgactgcgatcctgctcgaaaacatccatgcaagcgccacggcgcgccttggcgaggccggcctgacggtcgagcgccgcaccggcgcgctggccggcgacgaactgcgccaggtgctggcaagccatgacctcgtcggcatccgctctgccacgcacctgcgcggcgacgatatccgcagcgcgcccgcgctgctcagcatcggctgcttctgcatcggcacctcgcaggtcgatctggacgccgcgaccgcggctggcatcccggtcttcaatgcgccgttttcgaacacgcggtcggtggccgagctggtcgtgtccgaggccgtgatgctgctgcgcaagatcccggagaagaatgcgctagctcatgccggcaagtgggccaagggcgccagcggcgcgttcgaggcgcgcggcaagaccatcgccatcgtcggctacggcaatatcggctctcaggtcggcgtattggcggagtcgatgggcatgcgggtggtgtactacgacgtgctggcccggctgtcgctcggctcggcgcgtgccgccggtacgctcgaagaagccgtgtcgcaggcggacgtggtcactctgcacgtgcccgctacggcccgcacgcgcaacatgatcgatgcccacgtgctcgcctgcttcaagccgggcgcgatcctgatcaacgcatcgcgcggcaccgtggtggatatcgatgcgcttgcggcggcactgcgcgacaagcgcctgggcggcgcggcaatcgacgtgttcccggaagagccgaagacgaacaacgatccattcgtcagtccgctgcagcagcttccgaatgtcctgctgacgccccacatcggcggcagcactgaagaggcgcaggagaacatcggcacagaggtagccgccaagctgctgaactacctgaacaccggcggcaccattggcgccgtcaactttcccgaagtcgatcccggtccgctgcacgcgccggcacgcctgctcaacatccacagcaatgctccgggcgcgctagccgcactgaacacgctgctggcccaggatggcgtcaacatcaacggccagcacctgcagacgcgcggccataccggctacgtcgtcacggatctcgaccgcgtgccgtccgacgtgctgatggaatcgctgcgcacgcatgccggattcgtacgttcgcggctgctggtgcgctaa

SEQ ID NO: 82215 - protein, 425 aa, Ralstonia eutropha JMP134
MPRRSRGCRRAPCSLRVLFLRGKLNVTTAILLENIHASATARLGEAGLTVERRTGALAGDELRQVLASHDLVGIRSATHLRGDDIRSAPALLSIGCFCIGTSQVDLDAATAAGIPVFNAPFSNTRSVAELVVSEAVMLLRKIPEKNALAHAGKWAKGASGAFEARGKTIAIVGYGNIGSQVGVLAESMGMRVVYYDVLARLSLGSARAAGTLEEAVSQADVVTLHVPATARTRNMIDAHVLACFKPGAILINASRGTVVDIDALAAALRDKRLGGAAIDVFPEEPKTNNDPFVSPLQQLPNVLLTPHIGGSTEEAQENIGTEVAAKLLNYLNTGGTIGAVNFPEVDPGPLHAPARLLNIHSNAPGALAALNTLLAQDGVNINGQHLQTRGHTGYVVTDLDRVPSDVLMESLRTHAGFVRSRLLVR

SEQ ID NO: 82216 - DNA, 1572 bp, Methanosarcina barkeri str. Fusaro
  CDS (1)..(1572): transl_table=11
atgaaagtattagtcagcgactcactctccaatgaaggtttggagattctaaaagaacactttaaggttgatgtttccaccgggctttccgaagatgagctggtgaaaaaaattaaggattacgatgctcttgtaatacgcagcggtacccatgttactcagaaaataatcgaagctgccgacaacctgaaaattatcgggagagccggagtcggaattgacaatgttgatgtggatgcagctacaaagaaaggcattattgtggctaactctcccgaaggcaatatgatttcggcagcagagcacacaattgctatgatgatggcaatgtccaggaacatcccccaggcaaatgcctcccttaaaggcaaggaatggaaacgtagtaaattcacaggtgtcgaggtcaaaggtaagaccctaggaatcataggtctcggaagaatcggttccgaagtcgcaaaaagggcttccggacttgaaatgaacctgatggggtatgatccatttgtttctgaaaagcgggctattgagcttggtgtcaagctggcaacagttaacgaaatcgcaaaagaagccgattacatcacagtgcacactcctcttataaaagaaaccagaaacattcttgatgaagagcagtttgccctgatgaagcctacaaccagaattctcaactgtgcccgcggcggcattatcaacgaagaagctctggcaaaagctcttgaaagcggaaaaatagccggtgcagcaatagacgttttcattgaggagcctccttttaacagccctcttctgagctttgacaatgttgtagtaacccctcaccttggtgcttctacaaaggaagctcaggtcaatgtggcagtagatattgcaaaggaagtagcgtctgtccttacaggtggacctgcaaagaacgcaatcaatatcccctcggtaaagccggaagctatggcagtccttgccccttacatcaggctctcagaaattatgggtaagattgcagggcagctcgtagacggaaactacgaaaaagtcgaaatcggatataacggagagatttccggaaaggatacaaggcctcttacagtctcggctctcaaaggactgcttgaaatggccctcggttccggagtaaactatgtcaatgctcccactcttgcaaagtccagaatgattgcagtcgtggaaagtaaatccgaatcttctgaggaatactcttcaactatcagtatcaaacttagcagcaacggcaaggaaaagctggttgcaggtactgttgtcggagacgatccaaagatcgtcgcagtcgatgatgacagagtagatatcttccctgcaggccgtatgatttttgccaaacatatcaacaggcccaacgttatcggaccttgctgcatggtactcggtaaaaacaatatcaatatctcaggcatgcaggttggcagatcagaaataggaggcgtgaccatgatggttcttaacatagactccgaagtttctgacccaatccttgaggaagtccggaaagtcgatggaatcctggatgccaaacttgtgacactctaa

SEQ ID NO: 82217 - protein, 523 aa, Methanosarcina barkeri str. Fusaro
MKVLVSDSLSNEGLEILKEHFKVDVSTGLSEDELVKKIKDYDALVIRSGTHVTQKIIEAADNLKIIGRAGVGIDNVDVDAATKKGIIVANSPEGNMISAAEHTIAMMMAMSRNIPQANASLKGKEWKRSKFTGVEVKGKTLGIIGLGRIGSEVAKRASGLEMNLMGYDPFVSEKRAIELGVKLATVNEIAKEADYITVHTPLIKETRNILDEEQFALMKPTTRILNCARGGIINEEALAKALESGKIAGAAIDVFIEEPPFNSPLLSFDNVVVTPHLGASTKEAQVNVAVDIAKEVASVLTGGPAKNAINIPSVKPEAMAVLAPYIRLSEIMGKIAGQLVDGNYEKVEIGYNGEISGKDTRPLTVSALKGLLEMALGSGVNYVNAPTLAKSRMIAVVESKSESSEEYSSTISIKLSSNGKEKLVAGTVVGDDPKIVAVDDDRVDIFPAGRMIFAKHINRPNVIGPCCMVLGKNNINISGMQVGRSEIGGVTMMVLNIDSEVSDPILEEVRKVDGILDAKLVTL

SEQ ID NO: 82218 - DNA, 1581 bp, Dehalococcoides sp. CBDB1
  CDS (1)..(1581): transl_table=11
atgaaaaaagtactggtaagcgatgcactctccgcaacagggttagcccctcttaaggagattgcacaggtagatgtaaagaccggccttaaaccggaagaattgataagcattatcggtgagtatgacgccctgctggtacgcagccagactcaggtcaccgctgatattatcaacgcaggcaaaaaacttcaggttatcggccgggccggcgtgggcgtagataacattgacctcaaaaccgccaccggtaatggtattatcgtggtgaatgcccccaccggcaacactatctccgctaccgaacatacactggcccttatgctggctatggcccgccatattcccagagccaacgccagtttaaaatccggccagtggaaacgcaatgaatttgtgggctctgaactgaagggtaaaactctgggtattgtaggcttgggtaatatcggctctgaaatagccaaacgcgccctagcccttgaaatgcgggttataggttatgacccgtttatatctatggaacgtgccaaaaaactgcaggtggaactgctgccttttgaagacctgctgaagcgggctgactttatcaccctgcatgttcccatgaccggtcagaccaagggccttatcggacccaaggaactggaaatgatgaaacccaccgtccgccttatcaatacctcccgcggcggcattatagatgaagaagcactagccaaggccgttaaggaaaagcgcatcggcggtgccgctattgacgtattctccaaagagccatgcaccgagagctgcctctttgagtgtgataatattatcgttacccctcatctgggggcttccactgccgaagctcaggaactggccacctctgacgtggtcaaacaggtaatagatgtatttgaaggccgccccgcccgttatgccgtaaatgcaccctatatttcggctgaaagcctgccagtagtcggccccttcatgccggttgcccgcacagtgggcagtctggtaagccagctgactgatggccatatgaagaatgttaccatcaagtactgcggtgaactggccgcttatgataccactgccctgaaagctctggttctgggcggtatacttgaacatatcagcgaagaacgggtgaacgtggttaatgctgatatcgtagcctcccagcgagggctgggtgtaaccgaacaaaaagaatccacctgccagaatttctccagcctgattaccgttactatagataccgacaacggcaaatccaatactgtcgccggcagtctggtacggggtgatgttcatattgtaaagctgaatgattactggatagatattgtacccaccggcggttactttctgtttgcagaccatatagaccgccccggacttatcggctctgccggtaagataaccggtgatgcggatataaatataagctatatgcacctcagccgccagaaagcccgcgggcaagcccttatgatactggctctggacgaacctctgccggaaaaacagcgtcagcagctgctatccctgccggatgttcaaatggttcaggtagtaaaaatctag

SEQ ID NO: 82219 - protein, 526 aa, Dehalococcoides sp. CBDB1
MKKVLVSDALSATGLAPLKEIAQVDVKTGLKPEELISIIGEYDALLVRSQTQVTADIINAGKKLQVIGRAGVGVDNIDLKTATGNGIIVVNAPTGNTISATEHTLALMLAMARHIPRANASLKSGQWKRNEFVGSELKGKTLGIVGLGNIGSEIAKRALALEMRVIGYDPFISMERAKKLQVELLPFEDLLKRADFITLHVPMTGQTKGLIGPKELEMMKPTVRLINTSRGGIIDEEALAKAVKEKRIGGAAIDVFSKEPCTESCLFECDNIIVTPHLGASTAEAQELATSDVVKQVIDVFEGRPARYAVNAPYISAESLPVVGPFMPVARTVGSLVSQLTDGHMKNVTIKYCGELAAYDTTALKALVLGGILEHISEERVNVVNADIVASQRGLGVTEQKESTCQNFSSLITVTIDTDNGKSNTVAGSLVRGDVHIVKLNDYWIDIVPTGGYFLFADHIDRPGLIGSAGKITGDADINISYMHLSRQKARGQALMILALDEPLPEKQRQQLLSLPDVQMVQVVKI

SEQ ID NO: 82220 - DNA, 1581 bp, Anabaena variabilis ATCC 29413; identical to SEQ ID NO: 64651
  CDS (1)..(1581): transl_table=11

SEQ ID NO: 82221 - protein, 526 aa, Anabaena variabilis ATCC 29413; identical to SEQ ID NO: 64652

SEQ ID NO: 82222 - DNA, 1182 bp, Streptococcus agalactiae A909
  CDS (1)..(1182): transl_table=11
atggtttttagtgtcaaaacatttaataatattaatcaaattggtttacaagagttagggaatcgtttccagattgatggggatatgtcagaaaatcctgatgcctatattattcgtagtcaaaatttgcataatcaggatttcccaagtaacctcaaagctattgctagggcgggtgcaggaacaaataatattcctattgaagaggcaagtgcacagggaatagtcgtgtttaataccccaggtgcaaatgctaatgctgtaaaagaagcggtcattgctgccttattactttcagctcgtgattatttaggagctaaccgatgggttaatactctaactggaacagatattcccaaacaaattgaagcaggaaagaaagcttttgctggtaatgaaattgcaggaaaaaaattgggagttatcggccttggtgccattggagctagaattgcgaatgatgctagacgcttaggaatgacagttcttggttatgatccctatgtttcaattgaaacagcttggaatatttcaagccatgttcaaagggttaaagagattaaggatatttttgaaacttgtgactatatcacaattcatgttcccttaacaaatgaaactaagcatacttttgatgcgaaagctttttcaatcatgaaaaaaggaactacgattatcaactttgctcgtgcagaattagtcaataaccaagagctatttgaagcgatagaaactggtgttgtcaagcgctatattactgattttggagacaaagaattattaaaccaaaaaggaattacagtctttcctcatgtaggcggatcaacagatgaggcagagctaaattgtgctattatggcaagtcaaaccattcgttgttttatggagacaggagaaatcactaattcagttaatttccccaatgtacatcaaattcaaaccgcaccatttcgtattactttaattaacaagaatgttcctaacattgtggctaaaatttcaactgctgtatcagagttaggtataaatattgataacattattaaccgttcaaagggtgactacgcctacacactaatagatttagatgaaacggataataacaagatttctactttaattgaagaatttgaaggtgatgagaatatcgtccgtgtacgtttaattgcaaaacaacaataa

SEQ ID NO: 82223 - protein, 393 aa, Streptococcus agalactiae A909
MVFSVKTFNNINQIGLQELGNRFQIDGDMSENPDAYIIRSQNLHNQDFPSNLKAIARAGAGTNNIPIEEASAQGIVVFNTPGANANAVKEAVIAALLLSARDYLGANRWVNTLTGTDIPKQIEAGKKAFAGNEIAGKKLGVIGLGAIGARIANDARRLGMTVLGYDPYVSIETAWNISSHVQRVKEIKDIFETCDYITIHVPLTNETKHTFDAKAFSIMKKGTTIINFARAELVNNQELFEAIETGVVKRYITDFGDKELLNQKGITVFPHVGGSTDEAELNCAIMASQTIRCFMETGEITNSVNFPNVHQIQTAPFRITLINKNVPNIVAKISTAVSELGINIDNIINRSKGDYAYTLIDLDETDNNKISTLIEEFEGDENIVRVRLIAKQQ

SEQ ID NO: 82224 - DNA, 1230 bp, Pseudomonas fluorescens PfO-1
  CDS (1)..(1230): transl_table=11
atgagcaagacttctctcgataagagcaagatcaagttccttcttctcgaaggcgtccaccaatcggctgtcgacgtcctcaaggcggcgggctacaccagcatcgaatacctgacaggctccctgccggaagcccagctcaaggaaaagatcgctgacgctcacttcatcggcattcgctcacgcacccagctgaccgaagagatcttcgatcacgcgaagaagctggtcgctgtcggctgtttctgcatcggcaccaaccaggtcgacctggaagcggcccgcgagcgcggcatcgccgtgttcaacgcaccgtactccaacacccgctccgtggccgagctggtgctggccgaagcgatcctgctgctgcgcggcatccctgagaaaaacgcttcctgccaccgtggcggctggatcaagtccgcagccaactccttcgagatccgtggcaagaaactgggcatcgtcggctacggctcgatcggtactcagctgtcggtcctggcggaaggtctgggcatgcaggtgttcttctacgacaccgtgaccaagctgccactgggcaacgcgacccaggtcggcaacctgcacgagctgctgggcatgtccgacatcgtcaccctgcacgttccggaaaccgctgcgacccagtggatgatcggcgagaaggaaatccgcgccatcaagaagggcggcatcctgatcaacgctgcacgcggcaccgtggtcgaactggatcacctggccgctgcgatcaaggacaagcacctgatcggcgccgccatcgacgtgttcccggtcgagccgcgctccaacgacgaagagttcgaaagcccgctgcgtggcctggataacgtgatcctgaccccgcacatcggcggctccaccgctgaagcgcaggccaacatcggtctggaagtggcagaaaaactggtcaagtacagcgacaacggtacttcggtatcgtcggtgaacttcccggaagtggccctgccggcgcaccctggcaagcaccgcctgctgcacatccacgagaacatcccgggtgtgatgagcgagatcaacaaggtcttcgccgaaaacggcatcaacatctccggtcagttcctgcagaccaacgaaaaggtcggctacgtcgtgatcgacgtcgacgccgagtactcggaactggcgcaagagaagctgcaacacgtcaacggcaccatccgaagccgtgtgttgttctga

SEQ ID NO: 82225 - protein, 409 aa, Pseudomonas fluorescens PfO-1
MSKTSLDKSKIKFLLLEGVHQSAVDVLKAAGYTSIEYLTGSLPEAQLKEKIADAHFIGIRSRTQLTEEIFDHAKKLVAVGCFCIGTNQVDLEAARERGIAVFNAPYSNTRSVAELVLAEAILLLRGIPEKNASCHRGGWIKSAANSFEIRGKKLGIVGYGSIGTQLSVLAEGLGMQVFFYDTVTKLPLGNATQVGNLHELLGMSDIVTLHVPETAATQWMIGEKEIRAIKKGGILINAARGTVVELDHLAAAIKDKHLIGAAIDVFPVEPRSNDEEFESPLRGLDNVILTPHIGGSTAEAQANIGLEVAEKLVKYSDNGTSVSSVNFPEVALPAHPGKHRLLHIHENIPGVMSEINKVFAENGINISGQFLQTNEKVGYVVIDVDAEYSELAQEKLQHVNGTIRSRVLF

SEQ ID NO: 82226 - DNA, 1605 bp, Rhodobacter sphaeroides 2.4.1; identical to SEQ ID NO: 64653
  CDS (1)..(1605): transl_table=11

SEQ ID NO: 82227 - protein, 534 aa, Rhodobacter sphaeroides 2.4.1; identical to SEQ ID NO: 64654

SEQ ID NO: 82228 - DNA, 1578 bp, Carboxydothermus hydrogenoformans Z-2901; identical to SEQ ID NO: 64655
  CDS (1)..(1578): transl_table=11

SEQ ID NO: 82229 - protein, 525 aa, Carboxydothermus hydrogenoformans Z-2901; identical to SEQ ID NO: 64656

SEQ ID NO: 82230 - DNA, 1587 bp, Synechococcus sp. CC9605; identical to SEQ ID NO: 64657
  CDS (1)..(1587): transl_table=11

SEQ ID NO: 82231 - protein, 528 aa, Synechococcus sp. CC9605; identical to SEQ ID NO: 64658

SEQ ID NO: 82232 - DNA, 1626 bp, Geobacter metallireducens GS-15
  CDS (1)..(1626): transl_table=11
atgaagatcatcgttaccgacgaggtggctcaggaagggttggcgcttttggcccaggacccgcgtgtggagatcaacatcaagctggggctcaagaaggaggagctgctggcgatcatcggcaactacgacgccattatcacccgcagtggcaccaccgttgacaagaatctcctcgacgccggcacaaagcttcggctcatcgctagggccggggtcggcatcgacaacgtggatgtggactacgccagttcccgtggcgtaatcgtggtgaacgcccccttcggcaacaccaacagtgccgccgagcacgccatggcgctgcttctttcattttgccgcaacgtaccccgcgccaacggcagcctcaagagcggtgaatggaaacgggcccccttcaccggctacgagctcaaggggaaaaccgccggcgtcatcggcctcggcaaggttggtggacgggtcgccacccggctcaaggccttcgagtgcgaggttctagcctgtgacccctacatcgccgtgaagcgcgcccatgacctgggggtcaagctcgtctcccacgacgagatataccgcaactgcgatatcatcaccgtccacacccccctcaccgatgaaacccgcaacatgatcggcgagcgggagttggccatgatgaaggacggcgtcatcatcgtgaacgccgcccggggggggatcatcgaagaagaggctctcctgaaatatctggaatcgggaaaaattaccggtgccgccatcgacgtcttcagcgttgagccgccgaagaccgacgtgctgcaaaaactcattgcccacgagcgggtaattgttactccgcacctgggggccaataccttcgaggcccaggtcaacgtggcggtggacgtctccaaagagatcctcaactacctggacgacctccccctggagaacgccgtgaacatcccgcgcttcgacctggctctcatggaccagatgcggccgttcctgaacctcatgagtgtcatgagcgacttcgtcattcagcttgtggacgccaatatcgacaccgtgacgttctcctatgcgggaaacatcgctcactatgactgcactcctctgagtgtctgcgggctgtcgtcgatccttaaccggctggtggagcaggacgtgaatatggtaaacgccactctcattgccgaccagatggggattaccgtggaggagaacaagtccacccaatctccctccttctccaacatgataaccctcaccatcgagggtaaaggtgaaaagcggactattgccggcacactcttcgaagggagcccccgcatcgtcaagctccgtgactaccaggtggacttcgctccggacgaacacatgctcagccttacctatgaggaccggccggggatgatcggcaagatcggtaccatcatgggtgcccacgatatcaacatcgcctccatgaacctggggcgccgcgagaagcggggcgaggccatggtcattctttctctcgactcggcggttcccccctttgtcgtggaggaagttcgcaaggcgaccgacgccactttcatcaaaccgatccacatgccgggcgtcaagtgcagccgtgggtgcgggtgcggcatctga

SEQ ID NO: 82233 - protein, 541 aa, Geobacter metallireducens GS-15
MKIIVTDEVAQEGLALLAQDPRVEINIKLGLKKEELLAIIGNYDAIITRSGTTVDKNLLDAGTKLRLIARAGVGIDNVDVDYASSRGVIVVNAPFGNTNSAAEHAMALLLSFCRNVPRANGSLKSGEWKRAPFTGYELKGKTAGVIGLGKVGGRVATRLKAFECEVLACDPYIAVKRAHDLGVKLVSHDEIYRNCDIITVHTPLTDETRNMIGERELAMMKDGVIIVNAARGGIIEEEALLKYLESGKITGAAIDVFSVEPPKTDVLQKLIAHERVIVTPHLGANTFEAQVNVAVDVSKEILNYLDDLPLENAVNIPRFDLALMDQMRPFLNLMSVMSDFVIQLVDANIDTVTFSYAGNIAHYDCTPLSVCGLSSILNRLVEQDVNMVNATLIADQMGITVEENKSTQSPSFSNMITLTIEGKGEKRTIAGTLFEGSPRIVKLRDYQVDFAPDEHMLSLTYEDRPGMIGKIGTIMGAHDINIASMNLGRREKRGEAMVILSLDSAVPPFVVEEVRKATDATFIKPIHMPGVKCSRGCGCGI

SEQ ID NO: 82234 - DNA, 1587 bp, Prochlorococcus marinus str. MIT 9312
  CDS (1)..(1587): transl_table=11
atgacaaaagttctcattacagatccaattgatcaaacaggaattgatattctttcacaggtagcgcaagtagatcagcgaataggaatctcaaactctgaattggcatcaattatcaaagaatatgatgccctaatgatacgatctggcactcaagtgactgaagaaattattaactcttcaaataaactgaggattattggaagagcaggagtaggagttgataatgtagatgttaaagctgctacacaaaaaggggttcttgttgttaattcgccaggaggaaatactattgctgctgctgaacacaccatagctatgatgttggccttatctagaaatattccaatagctaatagtagtactttgttaggtaaatgggagagaaagaaatttgttggtaatgagctttataagaaaaagttaggagtcgtaggtttagggaaaattggtgctcatgtagctaaagttgccaatgcattaggaatggaagtttacggatatgatccctttgtttcaactgaaagagctcaacaaataaaagttaaactatctgaattagatgacctattccaacaatcagattatgtaactttgcatttacctcgcacaccagagacagagaatttagtaaatatgaaggtgcttaaaagtatgaaaagtagcgcaaagttaattaattgtgctcgaggaggtttaattgacgaagaagcattagcagaagctttaaatcaatccttcattggaggagcagcaatagatgtcttttctaaagaacctttggaatctgattcaccacttctgcaagttgaaaagaatcttattcttacacctcatttaggagcatctactcgggaagcacaagaaaatgtagctgttgatgttgccgaacaaataagagatgtattgcttggtttatcggctagaactgccgttaatattcctggtttaagtcctgatattatggatagccttaagcctcatttacagttagcagaaacgatgggacttcttgtaagtcagcttgcaggaggacagattcaaaaattagaggtaaagcttcaaggtgaatttgttcaacatccttcccagccattaataattgccagtctaaaaggccttctaagtaaagctttgggagataggatcaattatgtgaatgcttctctagaagcagattctaggggcatttcagtcgttgagagtaaagatgaggcaagacctgaatttgctagtggatcgcttcagttaactacttatggagataatggagaccatagcgtagcgggaagcatttttgctgatggagaattaagaattattagtattgatcaatacccagtaaacgtatcaccaagcagatatatgttggttactaggcatagagatatgcctggtattattggcaagctgggttctttattgggtagcaacaatgtaaatattgcctccatgcaagttgggcgcaaaattgttagaggagaagctgttatggttttaagtattgatgatccaatacctaataagttgcttgacaccattattgaagtagagggaattactagcgctaatccagttactttataa

SEQ ID NO: 82235 - protein, 528 aa, Prochlorococcus marinus str. MIT 9312
MTKVLITDPIDQTGIDILSQVAQVDQRIGISNSELASIIKEYDALMIRSGTQVTEEIINSSNKLRIIGRAGVGVDNVDVKAATQKGVLVVNSPGGNTIAAAEHTIAMMLALSRNIPIANSSTLLGKWERKKFVGNELYKKKLGVVGLGKIGAHVAKVANALGMEVYGYDPFVSTERAQQIKVKLSELDDLFQQSDYVTLHLPRTPETENLVNMKVLKSMKSSAKLINCARGGLIDEEALAEALNQSFIGGAAIDVFSKEPLESDSPLLQVEKNLILTPHLGASTREAQENVAVDVAEQIRDVLLGLSARTAVNIPGLSPDIMDSLKPHLQLAETMGLLVSQLAGGQIQKLEVKLQGEFVQHPSQPLIIASLKGLLSKALGDRINYVNASLEADSRGISVVESKDEARPEFASGSLQLTTYGDNGDHSVAGSIFADGELRIISIDQYPVNVSPSRYMLVTRHRDMPGIIGKLGSLLGSNNVNIASMQVGRKIVRGEAVMVLSIDDPIPNKLLDTIIEVEGITSANPVTL

SEQ ID NO: 82236 - DNA, 1641 bp, Synechococcus elongatus PCC 7942
  CDS (1)..(1641): transl_table=11
atgatcgggcgaatctgcggatcgtccattcctgtcgctcgttggctcaccatgcccaaggttctggtctccgaccccatcgatcaggtcggtctcgacattctctcgcaagtcgctcaggtagacgtcaagacgggattgtcgccgtccgaactggcgcaaatcattggcgaatacgatgcgctgatgctgcgatcgggcactcgtgtcaccgcagaagtgattgaggccggtcaaaagctacggatcattggtcgggctggagttggggtcgataacgtcgatgttccagcggcaacgcggcgcggcatcgttgtggtcaactcgccggaaggcaacacgattgcagcagccgaacatacgctggcgatgatgctgtcgctgtcgcggcatattcccgatgccaacgcttcgactaaatcgggcggctgggatcgcaagagctttgtcggcactgaagtctacaagaaaaccctcggtgtcgttggcttgggtaaaatcggctcccacgtcgccacggtcgccaaggcgatgggcatgaaattgctcgcctacgatcccttcatttcagctgagcgagctgagcaaattggtgctcggttggtggaactggacatcctcttccaagaagcggactacatcaccctccacattcccaaaacgccagaaactgccaatctgatcaatgccgagactttggcgaagatgaagccgacgactcggatcatcaactgtgctcgcggcggcgtgattaatgagcaggccttggctgacgcgatcgctgctggcaaaattggcggggcagccctcgatgtttacgaccaagaaccgctccaagccgattcccccctgcgggccttgggcaaaaacctgatcctgacgccgcacctcggcgcttcgacgacggaagcccaggtcaacgttgcggttgatgtggctgaacaaatccgggacgtcttgctggggctaccagcgcgctcggcagtcaacattcccgggctctacccagacattctggaaaaactacggccctacttgcagctggcggaaaccctcggcaacctgctcagccaagtcgccggtggccgcttggaacagctgacggtgcgactgcaaggggaattagccgcgcaacagagccagccgatcgtggttgccgccctcaaaggcttactgacccaagcgctgcgcgagcgggtcaactacgttaacgccatgatcgaagccaaagagcggggcattcggatcatcgaaacgcgggatgaatccgtccgcgatgactacgctggcggttcgctgcaactggtggcgaccggctccaatggcgaacaccgcgtcatgggtgctctgctcggtgatggcgaaattcgaatcaccaatgtcgatgagtttccggtcaacgtgccgcccagccgctacatgctgttcacacgccaccgcgatatgcccggcatcatcggcaagatcggctcgctcttggggagctttaacgtcaatatcgccagcatgcaggtcggacgccggattgtgcgcggcgacgcggtgatggtactgagcttggatgatccgctgccggaaggcatcttggcggaaatcaccaaggtagctggcatcagtgacgcctacacggtggtgctctag

SEQ ID NO: 82237 - protein, 546 aa, Synechococcus elongatus PCC 7942
MIGRICGSSIPVARWLTMPKVLVSDPIDQVGLDILSQVAQVDVKTGLSPSELAQIIGEYDALMLRSGTRVTAEVIEAGQKLRIIGRAGVGVDNVDVPAATRRGIVVVNSPEGNTIAAAEHTLAMMLSLSRHIPDANASTKSGGWDRKSFVGTEVYKKTLGVVGLGKIGSHVATVAKAMGMKLLAYDPFISAERAEQIGARLVELDILFQEADYITLHIPKTPETANLINAETLAKMKPTTRIINCARGGVINEQALADAIAAGKIGGAALDVYDQEPLQADSPLRALGKNLILTPHLGASTTEAQVNVAVDVAEQIRDVLLGLPARSAVNIPGLYPDILEKLRPYLQLAETLGNLLSQVAGGRLEQLTVRLQGELAAQQSQPIVVAALKGLLTQALRERVNYVNAMIEAKERGIRIIETRDESVRDDYAGGSLQLVATGSNGEHRVMGALLGDGEIRITNVDEFPVNVPPSRYMLFTRHRDMPGIIGKIGSLLGSFNVNIASMQVGRRIVRGDAVMVLSLDDPLPEGILAEITKVAGISDAYTVVL

SEQ ID NO: 82238 - DNA, 1236 bp, Rhodospirillum rubrum ATCC 11170; identical to SEQ ID NO: 64659
  CDS (1)..(1236): transl_table=11

SEQ ID NO: 82239 - protein, 411 aa, Rhodospirillum rubrum ATCC 11170; identical to SEQ ID NO: 64660

SEQ ID NO: 82240 - DNA, 1578 bp, Moorella thermoacetica ATCC 39073; identical to SEQ ID NO: 64661
  CDS (1)..(1578): transl_table=11

SEQ ID NO: 82241 - protein, 525 aa, Moorella thermoacetica ATCC 39073; identical to SEQ ID NO: 64662

SEQ ID NO: 82242 - DNA, 1275 bp, Burkholderia thailandensis E264; identical to SEQ ID NO: 64663
  CDS (1)..(1275): transl_table=11

SEQ ID NO: 82243 - protein, 424 aa, Burkholderia thailandensis E264; identical to SEQ ID NO: 64664

SEQ ID NO: 82244 - DNA, 1584 bp, Syntrophus aciditrophicus SB
  CDS (1)..(1584): transl_table=11
atgatacgagttctcgtaagcgacagcatggcctctgaaggcattgaagtattcaggaagacaccggggatcgaagtggatgtcatcacgaaacacacccctgaagagttgaaggaactggtcgccagctacgatggtcttgtcgttcgcagcgccagtaagatcacaaaggaaatccttgattcggcagacaagcttaccgtcatcggccgtgccggagccggtgttgacaacattgatgtcgaagccgccagcaagaagggcatcgtggtcatgaacacccccggcggaaacacggtaactaccggagagcatgccattgccatgatgttgtcgctggcacggaaaattcctcaggctacggcatccatgaaggccggcaaatgggaaaagagccggtttatgggcaatgaatactgtaacaaaaccctgggaatcatcggcataggccgtatcggcagcgttgtggccgatcgtgcgaagggattgaagatgaatgtcatcgcctatgatccattcatctcacaggaagccgcggaaaagatggggatcacgctggcttccctggatgagatctatgggagcgccgatttcatctccgttcataccccgaagaacaaagaaaccacgggaatgatcaatgccgcggccttcgccaaaatgaagaaaggcgttttcgtcatcaactgcgcccgtggcggaatcgtcaatgaaaaagatctttacgacgccctcgtatctggccaggtcgccggagcggcccttgacgttttcgaagaggaaccgacaaagaatatagatttgatctcactggacaacgttatctgcacgccccaccttggcgcctccacggatgaagctcagaccactgtcgccgtcgccattgcagaacagatggtggactatctcctgaagggtgaaatccgctatgccgtcaacttcccggctgtcagtgcggatctaatggcagcgatcaccccctatctcgctctggccgaaaagctgggaaaatttcaggcccaaattgtttccggcggaatcgaggaaatcaatatcgaatacagtggcgaaattctgaaatatgatgtcgccccgattacgattgctctgcttaaaggtcttcttacccccatcctgaatgagaatgtcaattatatcaatgcgccggtcattgcaaaggaacggggcatcaatgtgaaggaatccagaagcagtgcggaaggggattaccgaagcatgatcaccctgaccctgaaaacgtccgagggagaatccataacggcaggcgcgttgttcggacgccgggatccgaggatcgtccggatcaatcagtttaccgtcgatgtcatccccgaaggacatctgctgatgctgtacaaccatgacaaaccgggagtgatcggcaatatcggcacagcgatcggatcggcgaatatcaacatcgccagaatgcactggagtcggctgcaggccgaacagaaggccatggtcgttttcagcaccgatacgccggttgacgcacaactgctgaaaaagctgaaagagacgccgaacgttatttccgtccaggaactggatatgtaa

SEQ ID NO: 82245 - protein, 527 aa, Syntrophus aciditrophicus SB
MIRVLVSDSMASEGIEVFRKTPGIEVDVITKHTPEELKELVASYDGLVVRSASKITKEILDSADKLTVIGRAGAGVDNIDVEAASKKGIVVMNTPGGNTVTTGEHAIAMMLSLARKIPQATASMKAGKWEKSRFMGNEYCNKTLGIIGIGRIGSVVADRAKGLKMNVIAYDPFISQEAAEKMGITLASLDEIYGSADFISVHTPKNKETTGMINAAAFAKMKKGVFVINCARGGIVNEKDLYDALVSGQVAGAALDVFEEEPTKNIDLISLDNVICTPHLGASTDEAQTTVAVAIAEQMVDYLLKGEIRYAVNFPAVSADLMAAITPYLALAEKLGKFQAQIVSGGIEEINIEYSGEILKYDVAPITIALLKGLLTPILNENVNYINAPVIAKERGINVKESRSSAEGDYRSMITLTLKTSEGESITAGALFGRRDPRIVRINQFTVDVIPEGHLLMLYNHDKPGVIGNIGTAIGSANINIARMHWSRLQAEQKAMVVFSTDTPVDAQLLKKLKETPNVISVQELDM

SEQ ID NO: 82246 - DNA, 1590 bp, Frankia sp. CcI3
  CDS (1)..(1590): transl_table=11
gtgcctgtcgtactcgttgccgaggagctctcaccggccgggctggaggtgctgtccggggacttcgaggttcgtcacgttgacggtgccgaccggtccgcgttgctgcccgccatcgccgacgtcgatgccgtgatcgtccggtcggccaccaagatcgacgccgaggtgctcgccaccgcgggaaagctcaaggtcgtcgcccgggccggcatcgggctggacaacgtcgacgtcgccgccgccacccagcgcggtgtcatggtggtcaacgcgccgcagtcgaacatcgtcagtgcggccgagcatgcgatcgcgctgctgctcgccgtcgcccggcgggttcccgcggccagcgaggcactgcgcggcggcgagtggaagcgctcgaagtacgtcggtgtcgaactcgtggagaagacggccggcgtcgtcggcctcgggcggatcggcgtgctcgtggcgcagcggctcgccggcttcgggatgaaggtcatcgcctacgacccgtacgtgtcggtggcccgtgccgcgcagcacggcgtgaccctcgtcgacctcgacgagctgcttcggcagagtgacgtgatcacgatccatctgcccaagacgccggagacgctcggtctgatcggcaccgacgagctggcccggaccaggcccggtgtcatcatcgtcaacgcggcgcgcggcggcctcgttgacgaggcggcgctcgccgaggcggtccgctccggtcaggtcggcggtgcgggcatcgacgtcttcgccaaggagcccacgacggcctccccgctgttcgggctcgacaacgtcgtcgtcaccccccaccttggcgcgtccacccaggaggcgcaggacaaggccgggctcgccgtcgcccgctcggtgcggctggcgctgcagggcgagttcgtgcccgacgcggtcaacgtgcaggccggtggcgtcgtggccgaggacctccggccgggtcttccgctcgcggagaaactcgggcagctcttctccggcctcgcgggcagcctggccgccgcgatcactgtcgaggtgcgtggcgagatcgccgtgcacgacgtctcggtgttgcagctcgcggtgctcaagggtgtgttcaccgacgtgaccgaggagcaggtcacctacgtcaacgcgccgctgctggccaaggagcgcggggtcgacgtggccttggagaccgccgaggacagccccgactatcacaacctcgtgactgtgcgaggagtcctcgccgacggcacgcccgtgtcggtgagcggcacgcttgtcggctcgcggcaggtcgagaagatcaccgcgatcgacgggttcgaggtcgacatccggcccgaggcgcatctggcgttcttccgctacgaggaccggccggggatcgtcggcgcggtcggtgccctgctcggcgaggcgcacatcaacatcgccagtgcgcaggtcagccgcctgcaggccggcggcgaggcgttgatgtcgctgtcgctcgacgacgcggtcgcccccgacatcctggccgagatcgcgaagatcatcggcgcttcctacgccagggccgtaagcatcagcagcgactga

SEQ ID NO: 82247 - protein, 529 aa, Frankia sp. CcI3
MPVVLVAEELSPAGLEVLSGDFEVRHVDGADRSALLPAIADVDAVIVRSATKIDAEVLATAGKLKVVARAGIGLDNVDVAAATQRGVMVVNAPQSNIVSAAEHAIALLLAVARRVPAASEALRGGEWKRSKYVGVELVEKTAGVVGLGRIGVLVAQRLAGFGMKVIAYDPYVSVARAAQHGVTLVDLDELLRQSDVITIHLPKTPETLGLIGTDELARTRPGVIIVNAARGGLVDEAALAEAVRSGQVGGAGIDVFAKEPTTASPLFGLDNVVVTPHLGASTQEAQDKAGLAVARSVRLALQGEFVPDAVNVQAGGVVAEDLRPGLPLAEKLGQLFSGLAGSLAAAITVEVRGEIAVHDVSVLQLAVLKGVFTDVTEEQVTYVNAPLLAKERGVDVALETAEDSPDYHNLVTVRGVLADGTPVSVSGTLVGSRQVEKITAIDGFEVDIRPEAHLAFFRYEDRPGIVGAVGALLGEAHINIASAQVSRLQAGGEALMSLSLDDAVAPDILAEIAKIIGASYARAVSISSD

SEQ ID NO: 82248 - DNA, 1623 bp, Novosphingobium aromaticivorans DSM 12444; identical to SEQ ID NO: 64665
  CDS (1)..(1623): transl_table=11

SEQ ID NO: 82249 - protein, 540 aa, Novosphingobium aromaticivorans DSM 12444; identical to SEQ ID NO: 64666

SEQ ID NO: 82250 - DNA, 1605 bp, Staphylococcus aureus subsp. aureus NCTC 8325
  CDS (1)..(1605): transl_table=11
atgaagcaatttaatgtactcgttgcagatcccatatcaaaagatggtatcaaagcattattagatcacgaacaattcaatgtagatattcaaactggcttgtccgaagaagcattaatcaaaattataccttcataccatgctttaatcgttcgtagtcaaactacggttactgaaaatatcataaatgctgctgattctttaaaagtaatcgcacgcgccggtgttggtgtagataatattaatattgatgctgcaacattaaaaggtattttagttattaatgccccagatggtaatacgatttcagctactgaacatacactggcaatgttattatcaatggcacgaaatattccgcaagcacaccaatcacttacaaataaagaatggaatcgaaatgcatttaaaggtactgagctttatcataaaacattaggtgtcattggtgctggtagaattggtttaggtgttgctaaacgtgcgcaaagtttcggaatgaaaatactagcttttgacccttacttaacggatgaaaaagcaaaatctttaagcattacgaaggcaacagttgatgagattgcccaacattctgatttcgttacattacatacaccactaacacctaaaacaaaaggcttaattaatgctgtcttttttgccaaagcaaaacctagtttgcaaataatcaatgtggcacgtggtggtattattgatgaaaaggcgctaataaaagcattagacgaaggacaaattagtcgggcagctatcgatgtgtttgaacatgaacctgcaactgactcgcctcttgttgcacatgataaaattattgttacacctcatttgggtgcttcaacagtcgaagctcaagaaaaagtggcaatttctgtttcaaatgaaatcatcgaaattttaattgatggtactgtaacgcatgcagtgaatgcacctaaaatggacttaagcaatatagatgatactgtaaaatcattcatcaatttaagccaaacagttggtgaattagctattcaattaatgtacaatgcaccaagctctattaaaattacgtacggtggcgacttagcctctattgatagtagtttattaacacgtacaattattactcatattttaaaagatgatcttggtcctgaagtcaatattatcaatgctctaatgttgttaaatcaacaacaagtgacattaaatattgaaaataataaagcagagacaggttttagtaactacttagaggtagaactatcaaacgatagcgattccgttaaagttggcgcttctgtctttacaggtttcggtccaagaattgttagaattaataatttttctgtagacttaaagccaaatcaatatcaaattgtgtcatatcataatgatactccaggtatggtaggaaaaactggcgcattgttaggtaaatacaatatcaacattgcatctatgactttaggtagaactgaagcgggcggagatgcgctaatgattttatccgttgatcaacctgtttcaaacaatataattgatgaacttaaacaagttggtgaatacaatcaaattttcacaactgaattgacggtacagtcataa

SEQ ID NO: 82251 - protein, 534 aa, Staphylococcus aureus subsp. aureus NCTC 8325
MKQFNVLVADPISKDGIKALLDHEQFNVDIQTGLSEEALIKIIPSYHALIVRSQTTVTENIINAADSLKVIARAGVGVDNINIDAATLKGILVINAPDGNTISATEHTLAMLLSMARNIPQAHQSLTNKEWNRNAFKGTELYHKTLGVIGAGRIGLGVAKRAQSFGMKILAFDPYLTDEKAKSLSITKATVDEIAQHSDFVTLHTPLTPKTKGLINAVFFAKAKPSLQIINVARGGIIDEKALIKALDEGQISRAAIDVFEHEPATDSPLVAHDKIIVTPHLGASTVEAQEKVAISVSNEIIEILIDGTVTHAVNAPKMDLSNIDDTVKSFINLSQTVGELAIQLMYNAPSSIKITYGGDLASIDSSLLTRTIITHILKDDLGPEVNIINALMLLNQQQVTLNIENNKAETGFSNYLEVELSNDSDSVKVGASVFTGFGPRIVRINNFSVDLKPNQYQIVSYHNDTPGMVGKTGALLGKYNINIASMTLGRTEAGGDALMILSVDQPVSNNIIDELKQVGEYNQIFTTELTVQS

SEQ ID NO: 82252 - DNA, 1236 bp, Francisella tularensis subsp. holarctica; identical to SEQ ID NO: 64667
  CDS (1)..(1236): transl_table=11

SEQ ID NO: 82253 - protein, 411 aa, Francisella tularensis subsp. holarctica; identical to SEQ ID NO: 64668

SEQ ID NO: 82254 - DNA, 1236 bp, Saccharophagus degradans 2-40; identical to SEQ ID NO: 64669
  CDS (1)..(1236): transl_table=11

SEQ ID NO: 82255 - protein, 411 aa, Saccharophagus degradans 2-40; identical to SEQ ID NO: 64670

SEQ ID NO: 82256 - DNA, 1233 bp, Methylobacillus flagellatus KT; identical to SEQ ID NO: 64671
  CDS (1)..(1233): transl_table=11

SEQ ID NO: 82257 - protein, 410 aa, Methylobacillus flagellatus KT; identical to SEQ ID NO: 64672

SEQ ID NO: 82258 - DNA, 1572 bp, Methanococcoides burtonii DSM 6242; identical to SEQ ID NO: 64673
  CDS (1)..(1572): transl_table=11

SEQ ID NO: 82259 - protein, 523 aa, Methanococcoides burtonii DSM 6242; identical to SEQ ID NO: 64674

SEQ ID NO: 82260 - DNA, 1299 bp, Ralstonia metallidurans CH34; identical to SEQ ID NO: 64675
  CDS (1)..(1299): transl_table=11

SEQ ID NO: 82261 - protein, 432 aa, Ralstonia metallidurans CH34; identical to SEQ ID NO: 64676

SEQ ID NO: 82262 - DNA, 1596 bp, Acidobacteria bacterium Ellin345
  CDS (1)..(1596): transl_table=11
ttgaaaatcgttgtcgccgaaaaaattgccaaagccgccattgatctgttcaagcaggatcccacgtggaacgtggtgactcccgaccaggtcgcccagaaagaacaacttctcgaacagctcaagggcgccgatgccctcatcgtccgctcggccgtcttcgtggacgccgccatgcttgagcacgccgaccagctccgcgtcatcggacgcgccggcgttggcgtcgacaacatcgagcttgaagccgctacccgcaagggcatcgccgtgatgaacacccccggcgccaatgccatcgccgtcgctgagcacaccatcggcctcatgctcgcgctcgcccgcttcatcccccgcgccaccgaaaccatgcacgccggaaagtgggaaaagaagtcgttgcaaggcaccgagctgcgcggcaaaaccctcggtatcgtcggtctcggacgcatcggcctggaagttgcgcggcgcgcagcatcgtttggcatgacgctcgtcgcccacgatccctacgtctctcccgcaattgcgcacgatgcgaagatccgcctcgctgatcgcgacgaagtgcttgcagttgcggattacatcacgctgcacgttgggttgacgccgcagacggcgaacatgatcaacgcgacaacgctcgccacgatgaagaagggtgtgcgcattgtgaactgcgcgcgcggcgaactcattgacgacgccgccctcgcggaagccgtgaagtccggccacgtcggcggagcggcactcgatgtctttaccgaagagccgttgaaggcatcgccctaccatggcgtgcccaacgtcatcctcaccccgcacatcggcggctccactgccgaagcgcaagatgcggtaggcgtgcagatcgcgcatcaagtccgcgattacctgcaacgcggcgtcgtgcagaacgcagtcaacatgccgtcgctcaccgagcaggagtacgtcgcgctggagccattcatcaccctaggcgaacgcctcggcagcctgctcgcgcagctcgcggaatcgcgcttcgaagaaatcggcatccgctacaccggcccgctcgccgactggaagaccgagctcatccgcaatgccagcatcaagggcatcctgcagcacaccaccgacgagagcgtgaacgtcatcaacgccaactccgtggctgagacgcgcggcatccgtgtgcacgagtcgaagaaggagcacccgtcgagcggcgccgccgccaatgtgctcggcctaacggtcacgacgccgaagggaacgctctctgtacgaggcacggtgctgcatggcaattcgccgcgcctgctttcgttcgacaacattgatgtggaagccccgctcgaagggacgttgctggtcattcgcaaccgcgatatccccggcgtagtaggacgcgtcggcaccatcctcggcgagcacgaagtcaacatcgcaaacttcgcgctaggccgtcccagcggcaacagcggcggcaacgccatcgcagcggtgcaggtcgacggcccgctgaaagagccagtcctgcaacagctacgccagcagaaagcgatcctggctgcgaatgtagtgcagttctag

SEQ ID NO: 82263 - protein, 531 aa, Acidobacteria bacterium Ellin345
MKIVVAEKIAKAAIDLFKQDPTWNVVTPDQVAQKEQLLEQLKGADALIVRSAVFVDAAMLEHADQLRVIGRAGVGVDNIELEAATRKGIAVMNTPGANAIAVAEHTIGLMLALARFIPRATETMHAGKWEKKSLQGTELRGKTLGIVGLGRIGLEVARRAASFGMTLVAHDPYVSPAIAHDAKIRLADRDEVLAVADYITLHVGLTPQTANMINATTLATMKKGVRIVNCARGELIDDAALAEAVKSGHVGGAALDVFTEEPLKASPYHGVPNVILTPHIGGSTAEAQDAVGVQIAHQVRDYLQRGVVQNAVNMPSLTEQEYVALEPFITLGERLGSLLAQLAESRFEEIGIRYTGPLADWKTELIRNASIKGILQHTTDESVNVINANSVAETRGIRVHESKKEHPSSGAAANVLGLTVTTPKGTLSVRGTVLHGNSPRLLSFDNIDVEAPLEGTLLVIRNRDIPGVVGRVGTILGEHEVNIANFALGRPSGNSGGNAIAAVQVDGPLKEPVLQQLRQQKAILAANVVQF

SEQ ID NO: 82264 - DNA, 1596 bp, Silicibacter sp. TM1040; identical to SEQ ID NO: 64677
  CDS (1)..(1596): transl_table=11

SEQ ID NO: 82265 - protein, 531 aa, Silicibacter sp. TM1040; identical to SEQ ID NO: 64678

SEQ ID NO: 82266 - DNA, 1254 bp, Myxococcus xanthus DK 1622; identical to SEQ ID NO: 64679
  CDS (1)..(1254): transl_table=11

SEQ ID NO: 82267 - protein, 417 aa, Myxococcus xanthus DK 1622; identical to SEQ ID NO: 64680

SEQ ID NO: 82268 - DNA, 1584 bp, Rubrobacter xylanophilus DSM 9941
  CDS (1)..(1584): transl_table=11
ttgagggtgctcgtaaccgagaagctcgccgagcgcggcgtagagctcctgcggagggagttcgaggtcgacgtgctcctcggcctctcgcccggcgagctgctggagaggatcggggagtacgacgggctgatcgtccggagcgccaccaaggtgactgcggaggtcatagaggccgccgggaggctcaaggccatcgggcgcgcggggatcggggtggacaacatagacatcgaggcggccaccaagcggggcatcctggtggccaacgccccggagagcaacacggtggccgccgccgagcacaccctggggctgatgctcgccgtcgcccggcgcatcccggccgccgacgcctccctgcggcgcggggagtggaaccgcgccgccttcaagggcgtggaggtcgccgagaagacgctcggcctggtcggcctggggcacgtgggctccatcgtcgcccgcggcgccctggggatggggatgcgcgtcctcgcctacgacccctacgtctccgaggagaggatgcgctcgatgaacgtggagcgggcgggctcgctggaggagatcttcgaggaggccgacttcgtctcgctgcacgtcccccgcactccccagaccacgggcatggtgggcgaggaggagctggcgcggatgaagcccaccgcctacctgataaacgtggcccgcggcgggatagtggacgagaccgccctctacaacgccctcaagcagggcgagatagcgggggccgcgctcgacgtcttcgcggaggagccgaccaccgactcccccctcttcgccctcccgaacgtggtcgtcaccccccacctgggggcgagcaccgccgaggcccaggaccgggcgggcgtgacggcggccgagcaggtggcggcggccctcaggggagaggtgccgatacacgctataaacgccccggtgcccgcgggggagggggcggagttcgtctcccagttcgccgggctctgcgagacgctggggaggctgctctaccagctcacggaccggcccggcagccgcctcaagatagagtaccgcggcgagatcggggcctacgacacccggctgctggacgtctcggtgcagaaggggctcctgtcccggatggtgcacgagcccctgaactacgttaacacccccatcctggcgaaggagcgggggctgaaggtcgagacctcgaagacctcggagagctcggactacaccaacctggtggtggtccgcatcgagagcaacggcggcgagagcgtggtgagcggcaccctcaccggcccccggatgcagccccggctggtcgaggccctcggctacacgctggatatcgtcccggagcggcacatgctgtttatccgcaacgaggacgtgccgggcatgatcgggaaggtcggcacgatcctcggcgagcacgggataaacatcggcaacatggccgtggggcgcggcgagccgggaagccgggcggcgatggcggtgaccgtggacgagccggtgcccccggaggtcgtcgagagcctcctgaatatcccgggcttcaacgacgcccgggccgtcaccctctactaa

SEQ ID NO: 82269 - protein, 527 aa, Rubrobacter xylanophilus DSM 9941
MRVLVTEKLAERGVELLRREFEVDVLLGLSPGELLERIGEYDGLIVRSATKVTAEVIEAAGRLKAIGRAGIGVDNIDIEAATKRGILVANAPESNTVAAAEHTLGLMLAVARRIPAADASLRRGEWNRAAFKGVEVAEKTLGLVGLGHVGSIVARGALGMGMRVLAYDPYVSEERMRSMNVERAGSLEEIFEEADFVSLHVPRTPQTTGMVGEEELARMKPTAYLINVARGGIVDETALYNALKQGEIAGAALDVFAEEPTTDSPLFALPNVVVTPHLGASTAEAQDRAGVTAAEQVAAALRGEVPIHAINAPVPAGEGAEFVSQFAGLCETLGRLLYQLTDRPGSRLKIEYRGEIGAYDTRLLDVSVQKGLLSRMVHEPLNYVNTPILAKERGLKVETSKTSESSDYTNLVVVRIESNGGESVVSGTLTGPRMQPRLVEALGYTLDIVPERHMLFIRNEDVPGMIGKVGTILGEHGINIGNMAVGRGEPGSRAAMAVTVDEPVPPEVVESLLNIPGFNDARAVTLY

SEQ ID NO: 82270 - DNA, 1902 bp, Cytophaga hutchinsonii ATCC 33406; identical to SEQ ID NO: 64683
  CDS (1)..(1902): transl_table=11

SEQ ID NO: 82271 - protein, 633 aa, Cytophaga hutchinsonii ATCC 33406; identical to SEQ ID NO: 64684

SEQ ID NO: 82272 - DNA, 906 bp, Clostridium perfringens ATCC 13124
  CDS (1)..(906): transl_table=11
atgttaagaatacttttaaatgatggattagataaaaaagctattagcaatttggaattgctaggttttgatgttgatactaatcattatgatatagaggatttaaaagaaaaaataaaagaagtagactgtatagttataaggtctgccacaaaaattacaagagaattaatagatgaagcgattaaaggtggaaagttaaaattaattataagaggtggagtaggacttgataatatagatgttcaatatgctgaacaaaatggaattaaagtaagaaatactcctaatgcaagttcttcatcagttgcagagattatattagcccatatgttctctttagcaagatttttaaatcaatctaatataactatgaaagatggtctttggaaaaagaaagattatgttggtgttgagcttgaaggaaaaactcttggaattataggtatgggaagaataggatctgaattagctaagaaatgtacagctttaggtatgaaaataatatactttgatctaattgatattaagaatatagacaataattatagaaaagtagaatttgatgagttattaagaaaatcagattttatttctataaatatttctggaactaagagtataattggaagtgaagaattaaagaaggttaaaaagggagtatttataataaatacttctaggggaaaagcactagatgaagacgcaataataactagtttaaatgatggaactttaggtggcgttggactagatgtattcttagaagagccaagtaaaaatttagaattaataaatcatcctaaagtaagtttaacacctcatattggagcttcaacaaaagaggctcagatgaaaataggtgaggaagttataaatataataaaagaagagatttataagtaa

SEQ ID NO: 82273 - protein, 301 aa, Clostridium perfringens ATCC 13124
MLRILLNDGLDKKAISNLELLGFDVDTNHYDIEDLKEKIKEVDCIVIRSATKITRELIDEAIKGGKLKLIIRGGVGLDNIDVQYAEQNGIKVRNTPNASSSSVAEIILAHMFSLARFLNQSNITMKDGLWKKKDYVGVELEGKTLGIIGMGRIGSELAKKCTALGMKIIYFDLIDIKNIDNNYRKVEFDELLRKSDFISINISGTKSIIGSEELKKVKKGVFIINTSRGKALDEDAIITSLNDGTLGGVGLDVFLEEPSKNLELINHPKVSLTPHIGASTKEAQMKIGEEVINIIKEEIYK

SEQ ID NO: 82274 - DNA, 1596 bp, Rhodococcus sp. RHA1
  CDS (1)..(1596): transl_table=11
gtgagccagccaggccgtcctgtagttctgatcgccgacaagctcgcgccgtccaccgtcgaggcattgggcgacggtgtggaggtgcgatgggtcgacggacctgatcgcccggccctgctcgcggcggtgcccgaggccgacgcgatcctcgtccgttccgccaccaccgtggacgccgaggtcctggcggccggtaccaagctcaagatcgtcgcccgggccggcgtcggcctcgacaacgtcgacgtggccgccgccaccgagcgtggtgtcatggtcgtcaacgcgccgacctccaacatccacacggcagccgagcacgccgtcgcactgatgctcgccaccgcgcgccagatccccgcggccgacgccaccctgcgcgaccgtgaatggaagcgcagcaagttcaacggtgtcgagatcttcggcaagaccgtcggcgtcgtcggcctcggccgcatcggccagctgttcgcgcagcggctcgccgcgttcgagacgcacgtcatcgcgtacgacccctacgtgtcggccgcccgtgccgcgcagctcggcatcgagctcgtcaccctcgacgaactgctcgagcgggccgacctcatctctgtgcacctccccaagactcccgagaccaagggactgctcggcacggagaacctggcgaagaccaagaagggcgtcgtcatcgtcaacgccgcccgtggcggtctgatcgacgaggcagcgctggccgaggccatcaagtcgggtcacgtgcgcgccgcgggcctcgacgtgttcgagaccgagccctgcaccgacagcccgttgttcgacctgcccgaggtcgtcgtgacgccgcacctcggtgcctccacgaccgaggctcaggaccgcgccggaaccgacgtcgcgaagtccgtactgctcgctctcgcaggcgatttcgttcccgacgccgtcaacgtgtcgggtggcgccgtgggcgaggaagttgccccgtggctcgagatcgtccgcaagcagggtgtgctcatcggggccctgtcgggtgaactgcccgtcaacctctcggtcgacgtacgcggcgagctggcctccgaggacgtcgaggtgctcgcgctctcggctctgcgcggtgtgttctccgccgtcatcgaggacgcggtcacgttcgtcaatgctcccgcactcgcggaagagcgcggcgtcacggccgaggtcaccaaagccgccgaaagccccaaccaccgcagcgtggtggacctgcgcgccgtgttcggcgacggcagcgtcatcaacgtctcgggcacgctgaccggcccgcagcaggtcgagaagatcgtcaacatcaacggccgcaacttcgaactgcgcgccgagggtctcaacctggtggtgaactacaccgatcagcccggcgcgctgggcaagatcggcacgcagctcggcaacgccggcatcgacatccaggctgcgcagctcagccaggacgccgagggcgagggcgcgaccatcctcctccgcgtcgaccgggaggtgccgagcgaggtgcgggacgcgatctccaccgccgtcggcgccaccaagatcgagctcgtcaacctggcctaa

SEQ ID NO: 82275 - protein, 531 aa, Rhodococcus sp. RHA1
MSQPGRPVVLIADKLAPSTVEALGDGVEVRWVDGPDRPALLAAVPEADAILVRSATTVDAEVLAAGTKLKIVARAGVGLDNVDVAAATERGVMVVNAPTSNIHTAAEHAVALMLATARQIPAADATLRDREWKRSKFNGVEIFGKTVGVVGLGRIGQLFAQRLAAFETHVIAYDPYVSAARAAQLGIELVTLDELLERADLISVHLPKTPETKGLLGTENLAKTKKGVVIVNAARGGLIDEAALAEAIKSGHVRAAGLDVFETEPCTDSPLFDLPEVVVTPHLGASTTEAQDRAGTDVAKSVLLALAGDFVPDAVNVSGGAVGEEVAPWLEIVRKQGVLIGALSGELPVNLSVDVRGELASEDVEVLALSALRGVFSAVIEDAVTFVNAPALAEERGVTAEVTKAAESPNHRSVVDLRAVFGDGSVINVSGTLTGPQQVEKIVNINGRNFELRAEGLNLVVNYTDQPGALGKIGTQLGNAGIDIQAAQLSQDAEGEGATILLRVDREVPSEVRDAISTAVGATKIELVNLA

SEQ ID NO: 82276 - DNA, 1233 bp, Haemophilus somnus 129PT
  CDS (1)..(1233): transl_table=11
atgacaacaaaagtatcactagataaatcaaaaattaagtttttgcttttggagggaatacaccaaaatgcactggaggtgttaaaagcagcaggatataccaatatcgaatatcatcgaaaggccttagaacctgatgaattaaaaattgctatcaaagatgcacattttatcggtattcgttctcgaacgtctttaacggaggatatattagcagaagcaacaaaattaattgcaattggttgtttttgtatcggcacaaatcaagtggatttagaggcggcaaaagcacgtggtattcctgttttcaatgcaccgtttgccaataccagatctgtggctgaattagtgcttggtgagatcttattattaatgcgtaatatcccgcaagccaatgccgatgtgcatcgaggtttatggaataaatccatggtgggatcttatgaggttcgtggaaaacgcttgggtattattggttatggtcatattggatctcaactaagtattattgcagaagcgttaggcatgaatgtgtatttctatgatatagaaacaaaattacctttaggtaatgcacaacaaatgaatagcttagaagaacttttgagtacctgtgatgtggtttcattacatttgccggaaaattcctcaacaaaaaatttaatgaatgcggaacgcattgcacaattaaaggcgaactgtatttttatcaatgctgcccgtggcacagtggttgatattgacgctttagctcaggcgttagaaagcaaaaaaattcgtggtgccgcaattgatgtattcccgaaagaacctgcctcgattgaagaggaatttatctcgccattgcgtgctttcgataatgttatcctaacaccacacattggtggctcaactgttgaagcacaagaaaatattggagttgaagtcgcaaataaatttgtcaaatattccgataatggttcaacactgtcggcagtaaatttcccagaagtatctctaccggaacatagtaatgcaaaacgcttattacatattcaccataaccgtccggggattttaaataaaatcaatcaaatatttgtggagcaaaatatcaatattgcggctgaatatttacaaaccgaggcaaaaattggttatgtggtaatcgatgttgaaacagaagataccgctcaattattggctaaacttaagcaaattgaaggcactattcgtgcgagagtattattttaa

SEQ ID NO: 82277 - protein, 410 aa, Haemophilus somnus 129PT
MTTKVSLDKSKIKFLLLEGIHQNALEVLKAAGYTNIEYHRKALEPDELKIAIKDAHFIGIRSRTSLTEDILAEATKLIAIGCFCIGTNQVDLEAAKARGIPVFNAPFANTRSVAELVLGEILLLMRNIPQANADVHRGLWNKSMVGSYEVRGKRLGIIGYGHIGSQLSIIAEALGMNVYFYDIETKLPLGNAQQMNSLEELLSTCDVVSLHLPENSSTKNLMNAERIAQLKANCIFINAARGTVVDIDALAQALESKKIRGAAIDVFPKEPASIEEEFISPLRAFDNVILTPHIGGSTVEAQENIGVEVANKFVKYSDNGSTLSAVNFPEVSLPEHSNAKRLLHIHHNRPGILNKINQIFVEQNINIAAEYLQTEAKIGYVVIDVETEDTAQLLAKLKQIEGTIRARVLF

SEQ ID NO: 82278 - DNA, 1587 bp, Synechococcus sp. CC9311
  CDS (1)..(1587): transl_table=11
atgacaaaagttctcgtttcagaccccattgatcaggcggggctcgacatccttggccaagtggctcaagtggatgagcgcattggattgtcatcggaagagctcaaatcgatcattggtgattacgacgccctaatgatccgttcagggacccaggtcacagcggatgtgattgaggctgctgatcggttgcggatcatcggtcgtgccggcgtgggggtcgacaacgtggatgtgccagcggctacgcaacgcggggtgttggtggtgaattcacccgagggcaacacgatcgcagcggcagagcatgcgcttgcgatgttgctatcggtgtctcgtcacgtgcctcaagcccatggctcgatgcgttcaggggcttgggatcgcaaaaaatatgtcgggaatgagctctataaaaaacttctcggcgtggtggggttaggcaagattgggtcacacgttgctcgcgtcgcaaaagcgatgggcatggaggtgatcgcatttgatccattcatctctgcagagcgtgcgcagcagatgcaagtgcggctcaccactctggaagcgctgttccagcaggccgattacatcactctgcacattcctcgaacacccgataccgaaaatctggtgaatgccgagctgctgcgcacgatgaaaagtacggcacggattgtgaattgtgcacgtggtggaattgttgatgagcctgcgatcgcggaagccattgaatccggggtgatcgccggggcaggtttggatgtgtttgcgtctgaaccgctagctcaggactcacccctgcgcgccgtggagcgaggacttgtcttgactcctcatctcggagcatccaccgaagaggctcaagaaaatgtggcggtggatgtcgccgaacaaattcgtgatgtcttgctggggctgcctgcccgtagcgccgtgaatatccctgggctcagtgccgagatcatggagcgcctcaagccccatctccaactagcggagaccctcggtttgctggtgagccaactcagtggtggtcagattcaggagttggaggtgcgcttgcaaggtgaattcgccagccacccctcacaacctcttgtggttgctgctcttaagggcttgctgagcacggcgttgggagatcggatcaactatgtgaatgcatcgctggaggccaaaggccgcggcattcacgtgcttgaaattaaggacgatgccagtcgcgattttgcaggtgggtcgctgcagctcaccacgcgcggtggtcagggaggtcacagcgtgaccggtgcggtgttcgcagacggtgatttgcgtgtgaccagtattgatgaattccccgtgaatgttccgcctagtcgtcacatgctgttcactaggcaccgcgacatgccaggcatcattggccaccttggctctcttcttggagagcacaacgtcaacattgcctccatgcaggttgggcgtcgaatcgtccgtggtgatgccgtgatggttctcagtattgatgacccgattccgcctgctctcttaactaccatccacggcattaacggcattcaggaagctcaccccgtcacgttgtga

SEQ ID NO: 82279 - protein, 528 aa, Synechococcus sp. CC9311
MTKVLVSDPIDQAGLDILGQVAQVDERIGLSSEELKSIIGDYDALMIRSGTQVTADVIEAADRLRIIGRAGVGVDNVDVPAATQRGVLVVNSPEGNTIAAAEHALAMLLSVSRHVPQAHGSMRSGAWDRKKYVGNELYKKLLGVVGLGKIGSHVARVAKAMGMEVIAFDPFISAERAQQMQVRLTTLEALFQQADYITLHIPRTPDTENLVNAELLRTMKSTARIVNCARGGIVDEPAIAEAIESGVIAGAGLDVFASEPLAQDSPLRAVERGLVLTPHLGASTEEAQENVAVDVAEQIRDVLLGLPARSAVNIPGLSAEIMERLKPHLQLAETLGLLVSQLSGGQIQELEVRLQGEFASHPSQPLVVAALKGLLSTALGDRINYVNASLEAKGRGIHVLEIKDDASRDFAGGSLQLTTRGGQGGHSVTGAVFADGDLRVTSIDEFPVNVPPSRHMLFTRHRDMPGIIGHLGSLLGEHNVNIASMQVGRRIVRGDAVMVLSIDDPIPPALLTTIHGINGIQEAHPVTL

SEQ ID NO: 82280 - DNA, 1230 bp, Shewanella sp. MR-4; identical to SEQ ID NO: 64687
  CDS (1)..(1230): transl_table=11

SEQ ID NO: 82281 - protein, 409 aa, Shewanella sp. MR-4; identical to SEQ ID NO: 64688

SEQ ID NO: 82282 - DNA, 1230 bp, Shewanella sp. MR-7
  CDS (1)..(1230): transl_table=11
atggcgaaacattcgctggacaaggataagatcaagatcctgttgttggaaggcgtccaccaatctgcggtcgatgtatttgaacgtgctggatacaccaatatcgagtatcacaaagcctccttaggtgatgaagccctgctcgagtccatcaaagatgctcactttgttggtattcgttcccgtacccaattgaccgctgacgtgttaaaacgtgccgaaaaactgattgcgattggttgtttttgtatcggcactaaccaggtggatctggcgaccgccgaattgctcggtatcccggtatttaacgcaccgttttctaatacccgcagcgtagctgaactggtattaggcgaaatcatcatgttgatgcgcggcattcctgagcgtaatgcgattgcccaccgtggtggctggatgaagacagccgctggcagttacgaagtccgtggcaaaaccttaggtgtgataggttatggccatattggtactcagctagggatcttggctgaaaccttaggtatgcgcgtggtgtttttcgatatcgaagacaaactgccattaggtaacgctcagcaaatccattcgatggaacaattactggcacagtccgatgtggtgagcttacacgtccctgagacagcgcaaactaaagatatgatcagcacagcagaatttgcagccatgcgtaaaggctgcatcttcatcaacgcctcacgcggcactgtggttgatatcgatgccctgacggttgcccttaaagagcgtcaccttgcgggcgcggcaatcgacgtattccctgtagagccacaatcgaatgatgatgaatttatcagcccattacgtggcttagacaatgtgctattgaccccgcacgtgggcggcagtactgctgaagcccaggaaaatatcggtatcgaagtggctggtaagttagccaaatactcagataacggttcgaccgtttctgcggttaatttccctgaagtgtcgctgccaatgcacaaaggcatttcgcgcttgctacacattcaccaaaaccgtcctggcgtgctgatcaaaatcaacaaagctttctctgaaaaaggcatcaacattgccgctcagtatctgcaaaccacagctgaaatcggttatgtggtgatggaagtcgatactcaccaagccgaggaagcactggtcgaacttaaggccattgaaggcacactgcgcacccgcgtattgttctaa

SEQ ID NO: 82283 - protein, 409 aa, Shewanella sp. MR-7
MAKHSLDKDKIKILLLEGVHQSAVDVFERAGYTNIEYHKASLGDEALLESIKDAHFVGIRSRTQLTADVLKRAEKLIAIGCFCIGTNQVDLATAELLGIPVFNAPFSNTRSVAELVLGEIIMLMRGIPERNAIAHRGGWMKTAAGSYEVRGKTLGVIGYGHIGTQLGILAETLGMRVVFFDIEDKLPLGNAQQIHSMEQLLAQSDVVSLHVPETAQTKDMISTAEFAAMRKGCIFINASRGTVVDIDALTVALKERHLAGAAIDVFPVEPQSNDDEFISPLRGLDNVLLTPHVGGSTAEAQENIGIEVAGKLAKYSDNGSTVSAVNFPEVSLPMHKGISRLLHIHQNRPGVLIKINKAFSEKGINIAAQYLQTTAEIGYVVMEVDTHQAEEALVELKAIEGTLRTRVLF

SEQ ID NO: 82284 - DNA, 1596 bp, Hyphomonas neptunium ATCC 15444
  CDS (1)..(1596): transl_table=11
atgcctaaagtccttatcggagatacgctctcccccgccgccgtcgagattttcaaggcgcgcggtatcgaaaccgacatcaaggtcggtctgtccaaggaagatctgatcaagatcattccggactatgacggcctcgctgtgcgctcggcctgcaagccggacgcagacgtcatcgccgctgcgaccaacctgaaagtcatcggccgggccggtatcggcgtcgacaatatcgacatcaaagcggcaaccgccaagggtgtcgtggtcatgaacacgccgttcggaaacgccatcaccacggcagaacacgccatcgccatgttgtttgccgccgcccgccagatccccgccgccaatgcggatacgcaggcgggcaaatggcccaaatccggctatatgggcgtcgagctttcctacaagacgctcggcctcatcggttgcggcaatatcggcagccgcgtggccgagcgcgccatcggcctcaagatgaaggttgtggcctatgaccccttcctgaccgaggagcgcgccattgagttgggcgttgaaaaggttgatctcgacacgcttctggcccgcgcggacttcatcacactgcacgttccgcttacggatcagaccaagaatgtcctctctcgcgaagcgctggagaaaaccaagaagggcctcatcctcgtcaactgcgcgcggggcggccttgtcgatgaagaagccgtgcgcgatctgctcgaaagtggccatctggccggcgcggcgtttgacgtgtttgctgtcgagcccgcgaaagaaaacgtcctgttcggcgcgaagaatttcgttgccaccccccaccttggcgcggcaaccgccgaggcgcaggaaaatgtcgccttgcaggtggccgagcagatggcggactatatcctcaccggcgcggtcaccaacgccctcaacatgccgtctgtcaccgccgaggaagctccgcgcctgaaaccctttgcgacactcgctgagaaactcggcagctttgcgggccagatctccgactatggctatgaagaagtcgtcatcgaatatgaaggcgaagtttcggagctcaaccgcaagccgatcacggcagcgcttctggctggcctcctgcgcgcctcgcgcggtgacgtgaatatggtatcggcgcctgccatcttggccgatagcggcgtgaaactgaccgagaccaaaactgagaccagccccgtctatgacagcctgatccgcatcaaggtgaagaccaaggcgacgaagaattcgcccgaaggcggctggcgcacccttgccggggctctcattgccggcaagccgcggatcgttgaagtgaagggcatggcgctggaaggcgatttctcgccggtgacgctctatgtgaataacatcgacaagccgggcttcatcggcgcgcttggccagatgctgggcgaggcaaaggtcaacattgcgaccttccaccttggccgccaggaagccggcggagaggcgattgcactgatcgggatcgactcgaccccgcccgcctcgctcgtcgagaagctcgatgcgctgccgcaggtgcgctacgtcaaggtgttgtctttctga

SEQ ID NO: 82285 - protein, 531 aa, Hyphomonas neptunium ATCC 15444
MPKVLIGDTLSPAAVEIFKARGIETDIKVGLSKEDLIKIIPDYDGLAVRSACKPDADVIAAATNLKVIGRAGIGVDNIDIKAATAKGVVVMNTPFGNAITTAEHAIAMLFAAARQIPAANADTQAGKWPKSGYMGVELSYKTLGLIGCGNIGSRVAERAIGLKMKVVAYDPFLTEERAIELGVEKVDLDTLLARADFITLHVPLTDQTKNVLSREALEKTKKGLILVNCARGGLVDEEAVRDLLESGHLAGAAFDVFAVEPAKENVLFGAKNFVATPHLGAATAEAQENVALQVAEQMADYILTGAVTNALNMPSVTAEEAPRLKPFATLAEKLGSFAGQISDYGYEEVVIEYEGEVSELNRKPITAALLAGLLRASRGDVNMVSAPAILADSGVKLTETKTETSPVYDSLIRIKVKTKATKNSPEGGWRTLAGALIAGKPRIVEVKGMALEGDFSPVTLYVNNIDKPGFIGALGQMLGEAKVNIATFHLGRQEAGGEAIALIGIDSTPPASLVEKLDALPQVRYVKVLSF

SEQ ID NO: 82286 - DNA, 1596 bp, Rhizobium leguminosarum bv. viciae 3841; identical to SEQ ID NO: 64689
  CDS (1)..(1596): transl_table=11

SEQ ID NO: 82287 - protein, 531 aa, Rhizobium leguminosarum bv. viciae 3841; identical to SEQ ID NO: 64690

SEQ ID NO: 82288 - DNA, 1578 bp, Solibacter usitatus Ellin6076; identical to SEQ ID NO: 64693
  CDS (1)..(1578): transl_table=11

SEQ ID NO: 82289 - protein, 525 aa, Solibacter usitatus Ellin6076; identical to SEQ ID NO: 64694

SEQ ID NO: 82290 - DNA, 1239 bp, Solibacter usitatus Ellin6076; identical to SEQ ID NO: 64695
  CDS (1)..(1239): transl_table=11

SEQ ID NO: 82291 - protein, 412 aa, Solibacter usitatus Ellin6076; identical to SEQ ID NO: 64696

SEQ ID NO: 82292 - DNA, 1584 bp, Magnetococcus sp. MC-1
  CDS (1)..(1584): transl_table=11
atggctaaagtattgatcgccgataagatgtcccccatggcggaggaggtgtttcgtgcgcgtgggttggaggtcgatgttaaggtgggcatgagccccgatgaactgttggcctgcatagaccagtacgatggcattgccattcgttcggccacccgtttgcccgcccaggcgattgccgcagcatcgcgtttaaaggtgatcgggcgggcgggcattggggtggataatgtggacaccccggcggcctcgcaaaagggtattattgtcatgaacaccccttttgggaacgccattaccacggcggagttgggggttaccttggccatggccgcagcccggcacattccggcggctaccgcttcgaccaaggcgggtaagtgggagaaaagccgctttatggggcgggagttggcgggtaaaaccgcaggggtgatcgggctgggcaatgtggggcgcttggtggcccagcgtttggcgggtttggatatgaaggtggtggcgtatgacccctttatcaacaaggatcgggccatctcattgggtttggagatggtggataagttggaggatctgtggcctcgggtggacctgctgacggtgcacacccccctgaacgatcatacccgtaatttggtggatgccaaggtagtcgcccagatgaaagagggggtgatcctggtcaactgtgcccgtggtggcatctataatgaagatgccctgtatgacgggctggtttccggcaaaatctatgcggcagggctggatgtctatgtgcaggagcctgcctattcccacaaactgtttgagctggataatgtggtggcaacgccgcacctggggggctctaccaaggaggcgcagacccgggtggcgatccagattgccgagcagatcagtgattatctggtctctggggtggttaaaaatgccctgaatatcccctcggtcactgaggccgaactgccaaccttacgcccctatctggcgttggtggaaaagctgggcaccaccctggggcagattgtggagaccggtgtgctcaagctggaggtgatctatcaaggggaggtggctaggattaagcgggctcccatcaccacggcgctgctcaagagctttttaagccccatgatggatggggtggtgaatatggtgaatgccaatttggtagcggagcaacgggggattcaagtggtggagtccagcaccagtggcaccggctcgtttacttcgctggtgcgggtggtggtgaccacggaacgccgtagccgctgtgtgaccggaaccctgtttaatggtaccgaaccccgcttgatctcgatggatgagatccctattgaggcgcaacccgaggggctgctgctgtttgttgccaatgatgatacgccgggtttaattgggcgagtgggtaccctattgggcgaggccggggtgaatatctccagctttcacctagggcgagagcaggctggagggcgggccatcgcctttattaatgtggattctgaagtacccgcaccgctcatgcagcagttgcatgaaaccgcgaatgtgcgcgaggtaaaattgatccgctattaa

SEQ ID NO: 82293 - protein, 527 aa, Magnetococcus sp. MC-1
MAKVLIADKMSPMAEEVFRARGLEVDVKVGMSPDELLACIDQYDGIAIRSATRLPAQAIAAASRLKVIGRAGIGVDNVDTPAASQKGIIVMNTPFGNAITTAELGVTLAMAAARHIPAATASTKAGKWEKSRFMGRELAGKTAGVIGLGNVGRLVAQRLAGLDMKVVAYDPFINKDRAISLGLEMVDKLEDLWPRVDLLTVHTPLNDHTRNLVDAKVVAQMKEGVILVNCARGGIYNEDALYDGLVSGKIYAAGLDVYVQEPAYSHKLFELDNVVATPHLGGSTKEAQTRVAIQIAEQISDYLVSGVVKNALNIPSVTEAELPTLRPYLALVEKLGTTLGQIVETGVLKLEVIYQGEVARIKRAPITTALLKSFLSPMMDGVVNMVNANLVAEQRGIQVVESSTSGTGSFTSLVRVVVTTERRSRCVTGTLFNGTEPRLISMDEIPIEAQPEGLLLFVANDDTPGLIGRVGTLLGEAGVNISSFHLGREQAGGRAIAFINVDSEVPAPLMQQLHETANVREVKLIRY

SEQ ID NO: 82294 - DNA, 1230 bp, Shewanella sp. ANA-3
  CDS (1)..(1230): transl_table=11
atggcgaaacattcgctggacaaggataagatcaagatcctgttgttggaaggcgtccaccaatctgcggtcgatgtatttgaacgtgctggatacaccaatatcgagtatcacaaagcctccttaggtgatgaagccctgctcgagtccatcaaagatgctcactttgttggtattcgttcccgtacccaattaacggctgaggtattgaagcgtgccgaaaaactgattgcgattggttgtttctgtatcggtactaaccaagtggatctggcgaccgccgaattactcggtatcccagtatttaacgcaccattctctaatacccgcagcgtggctgaactggtattaggcgaaatcatcatgctgatgcgcggcattcctgaacgtaatgctatcgcccaccgtggtggctggatgaagacggccgccggcagttacgaagtccgtggcaaaaccttaggtgtgataggttatggtcatatcggtacacagctcgggatcctagctgaaaccttaggcatgcgcgtggtgtttttcgatatcgaagacaaactgccattaggcaatgcccagcaaatccattcgatggaacaattactggcacagtccgatgtgatcagtttgcacgtccctgagacggcgcaaaccaaagatatgatcagcaccgccgaatttgccgccatgcgtaaaggcagcatctttatcaacgcctcacgcggcactgtggtcgatatcgatgccctaacggttgcccttaaagagcgtcaccttgcgggcgcggccatcgacgtattccccgtcgagccacaatcgaatgatgatgaatttatcagcccattacgtggtttagataacgtactgctgactccgcacgtgggtggcagtactgccgaagcccaagaaaacatcggtatcgaagttgccggtaagttagctaaatactctgacaacggttcgaccgtatctgcggttaacttccctgaagtgtcgctgccaatgcacaaaggcatttcgcgcttactgcacattcaccaaaaccgtcctggcgtgctaatcaaaatcaacaaagccttctctgaaaaaggcatcaacattgccgctcagtacctgcaaaccactgcagaaatcggttatgtggtgatggaagtcgatactcaccaagccgaagaggcactggttgaacttaaggccattgaaggcacactgcgcacccgcgtattgttctaa

SEQ ID NO: 82295 - protein, 409 aa, Shewanella sp. ANA-3
MAKHSLDKDKIKILLLEGVHQSAVDVFERAGYTNIEYHKASLGDEALLESIKDAHFVGIRSRTQLTAEVLKRAEKLIAIGCFCIGTNQVDLATAELLGIPVFNAPFSNTRSVAELVLGEIIMLMRGIPERNAIAHRGGWMKTAAGSYEVRGKTLGVIGYGHIGTQLGILAETLGMRVVFFDIEDKLPLGNAQQIHSMEQLLAQSDVISLHVPETAQTKDMISTAEFAAMRKGSIFINASRGTVVDIDALTVALKERHLAGAAIDVFPVEPQSNDDEFISPLRGLDNVLLTPHVGGSTAEAQENIGIEVAGKLAKYSDNGSTVSAVNFPEVSLPMHKGISRLLHIHQNRPGVLIKINKAFSEKGINIAAQYLQTTAEIGYVVMEVDTHQAEEALVELKAIEGTLRTRVLF

SEQ ID NO: 82296 - DNA, 1587 bp, Mycobacterium smegmatis str. MC2 155
  CDS (1)..(1587): transl_table=11
gtgagtcttcccgttgtactgatagccgacaagctcgcggagtccactgtcgccgccctcggtgacgaggtggaggtcaggtgggtcgacggtcccgaccgggcgaagctgctggccgcggtccccgaggccgacgccctgctggtgcgctccgccaccaccgtggacgccgaggtcatcgccgcggcccccaaactcaagatcgtcgcgcgcgcgggtgtcggtctggacaacgtcgacgtcgacgcggccaccgcacgtggcgtgctcgtggtcaacgccccgacctccaacatccacagcgccgccgaacacgccatcgcgctgctgctcgcaacggcccggcagatcccggccgccgacgcgacgctgcgtgagcgctcctggaagcggtcgtcgttctcgggcaccgagatcttcggcaagaccgtcggcgtcgtgggcctcggacgcatcggccagctggtcgcgcagcggctggcggcgttcggcgcgcacatcgtggcctacgacccctacgtgtcgcaggcccgcgccgcgcagctcggtatcgaactgctcccgctcgacgacctcctcgcgcgcgccgacttcatctcggtgcacctgcccaagaccaaggagaccgcgggtctgctcggcaaggaggcgctcgccaagaccaagaagggcgtgatcatcgtcaacgccgcgcgcggcggcctgatcgacgagcaggcgctggccgacgcgatcaccagcgggcatgtccgcggtgcgggtctcgacgtgtacgccaccgaaccctgcacggacagcccgctgttcgaccttccgcaggtcgtcgtcacgccgcacctcggcgcgtcgaccgccgaggcgcaggaccgcgcgggcaccgacgtggcggccagcgtgaagctcgccctggccggcgagttcgtgcccgacgcggtcaacgtcggcggcggcgtggtcggcgaagaggtcgcgccgtggctcgagctcgtgcgcaagctcggtctgctggtcggggcactcgcggatgcgccgccggtgtcgctgcaggttcaggtgcgcggtgaactggcgtccgaggacgtcgagatcctcaagctctcggcgctgcgcggactgttctcggccgtggtcgacgagcaggtcacattcgtcaacgccccggcgctggccgccgatcgtggtgtgacggcggagatctccaccgcgaccgagagccccaaccaccgcagcgtcgtcgatgtgcgcgcggtgcacgccgacgggtcgtcgatcaacgtcgccggcacgctgtccgggccacagctggtcgagaagatcgtccagatcaacgggcgcaacttcgatctgcgggccgagggccacaacctgatcgtgaactactccgacaagccgggtgcgctcggcaagatcggcacactgctcggcggcgcgaacgtcaacatccttgcggcccagctgagccaggacgccagcggcgaccatgccacggtcatgctgcgcgtcgacaccgatgtccccgacgatgtgcgtgccgcgatcgccgatgcggtcggcgccagcacgctggaagtggttgatctgtcatga

SEQ ID NO: 82297 - protein, 528 aa, Mycobacterium smegmatis str. MC2 155
MSLPVVLIADKLAESTVAALGDEVEVRWVDGPDRAKLLAAVPEADALLVRSATTVDAEVIAAAPKLKIVARAGVGLDNVDVDAATARGVLVVNAPTSNIHSAAEHAIALLLATARQIPAADATLRERSWKRSSFSGTEIFGKTVGVVGLGRIGQLVAQRLAAFGAHIVAYDPYVSQARAAQLGIELLPLDDLLARADFISVHLPKTKETAGLLGKEALAKTKKGVIIVNAARGGLIDEQALADAITSGHVRGAGLDVYATEPCTDSPLFDLPQVVVTPHLGASTAEAQDRAGTDVAASVKLALAGEFVPDAVNVGGGVVGEEVAPWLELVRKLGLLVGALADAPPVSLQVQVRGELASEDVEILKLSALRGLFSAVVDEQVTFVNAPALAADRGVTAEISTATESPNHRSVVDVRAVHADGSSINVAGTLSGPQLVEKIVQINGRNFDLRAEGHNLIVNYSDKPGALGKIGTLLGGANVNILAAQLSQDASGDHATVMLRVDTDVPDDVRAAIADAVGASTLEVVDLS

SEQ ID NO: 82298 - DNA, 1611 bp, Nocardioides sp. JS614
  CDS (1)..(1611): transl_table=11
gtgaccatgcccgccgccacgcccgccgaccggcccgtcgtactcatcgccgaggagctcagtccggcgaccgtcgaggcactcggaccggacttcgagatccggtactgcgacggcgcggatcgcggcgagctgctggccgcgctccccgaggcggacgcgatcctggtgcggtccgcgaccaaggtcgacgccgaggcgctcgccgcggcccgccggctcaaggtcatcgcccgggccggtgtgggcctggacaacgtcgacgtgcgcgcggcgacccaggcgggcgtgatggtcgtcaacgccccgacctccaacatcgtctccgccgccgagctcgcggtcgcgctgatgctcgccgccgcccggcacatctcgccggcccacgccgcgctgaagaacggcgagtggaagcgggcccgctacaccggcaccgagctctacgagaagaccgtcggcatcgtcggcctgggtcggatcggcgtcctggtcgcgcagcggctgagcgccttcggcatgaagatcgtggcgtacgacccgtacgtgcaggctggccgggccgcgcagatgggcgtgcggctggtcgacctcgacacgctgctggccgaggccgacttcatgtccgtgcacctgcccaagacccccgagaccgtcggcctgatcggcgccgaccagctcgcgaaggtcaagccctcgctggtgctggtcaacgccgcgcgcggcggcatcgtcgaggaggccgccctctatgccgccctcaaggagggccgggtcgcggcggccgggctcgacgtgttcgcgcaggagccgtgcaccgacagcccgctgttcgagctcgagaacgtcgtcgccacgccgcacctcggcgcctccaccgacgaggcgcaggagaaggccggcatcgcggtcgcgaagtcggtgcggctcgcgctgtccggcgagctggtccccgacgcggtcaacgtgcagggcggtgtgatcgccgaggacgtgcgccctggcatcccgctcaccgagaagctcggccgggtgttcaccgccgtggccggcgaggtcgcgctgtcgatcgacgtcgaggtgcgcggcgagatcaccgactacgacgtcaaggtgctcgagctggcggccctcaaggggatcttcaccgacatcgtcgaggaccaggtctcctacgtgaacgcgccgctgctcgccgccgagcgcggcaccgccgtacgcctggtcgccgacccggagagccccgaccaccgcaacctgatcacgatccgcggcaccctcgccgacggcgagcaggtctcggtcagcggcaccctgatcgggatcaaccagaaggagcggctggtcgaggtcaacggcttcgacgtcgacctcgagcccaccgagcacctcgcgttcctcacctacgaggaccggcccggcatggtcggcaccgtcggcgtgatcatcggggacgccggcatcaacatcgccggcatgcaggtcgcccgcgacgccaagggcggccgggccctggtcgcgctgtcggtcgacaccgccatccccgccgaggtgctcgccgagatgcagcacgcgatcgatgcgatctcggtgcgcgcggtcgacctggtctga

SEQ ID NO: 82299 - protein, 536 aa, Nocardioides sp. JS614
MTMPAATPADRPVVLIAEELSPATVEALGPDFEIRYCDGADRGELLAALPEADAILVRSATKVDAEALAAARRLKVIARAGVGLDNVDVRAATQAGVMVVNAPTSNIVSAAELAVALMLAAARHISPAHAALKNGEWKRARYTGTELYEKTVGIVGLGRIGVLVAQRLSAFGMKIVAYDPYVQAGRAAQMGVRLVDLDTLLAEADFMSVHLPKTPETVGLIGADQLAKVKPSLVLVNAARGGIVEEAALYAALKEGRVAAAGLDVFAQEPCTDSPLFELENVVATPHLGASTDEAQEKAGIAVAKSVRLALSGELVPDAVNVQGGVIAEDVRPGIPLTEKLGRVFTAVAGEVALSIDVEVRGEITDYDVKVLELAALKGIFTDIVEDQVSYVNAPLLAAERGTAVRLVADPESPDHRNLITIRGTLADGEQVSVSGTLIGINQKERLVEVNGFDVDLEPTEHLAFLTYEDRPGMVGTVGVIIGDAGINIAGMQVARDAKGGRALVALSVDTAIPAEVLAEMQHAIDAISVRAVDLV

SEQ ID NO: 82300 - DNA, 1194 bp, Nocardioides sp. JS614; identical to SEQ ID NO: 64697
  CDS (1)..(1194): transl_table=11

SEQ ID NO: 82301 - protein, 397 aa, Nocardioides sp. JS614; identical to SEQ ID NO: 64698

SEQ ID NO: 82302 - DNA, 1233 bp, Azoarcus sp. BH72; identical to SEQ ID NO: 64699
  CDS (1)..(1233): transl_table=11

SEQ ID NO: 82303 - protein, 410 aa, Azoarcus sp. BH72; identical to SEQ ID NO: 64700

SEQ ID NO: 82304 - DNA, 1305 bp, Acidovorax sp. JS42
  CDS (1)..(1305): transl_table=11
ttgcacaatgatcccctctcctgtccagcggcgcgcgccgcctgggtgttttcatctcctctcaatttgcacgccatggccaagacttccctggataaaagcaagatcaagttcctgttgctggagggcatccatccctctgcggtggaagtgttgcggtccgcggggtatacgcaggtcgaggtgctggccggggcgctggagggcgaggaactgcgccgcaagatcgccgacgtgcacttcattggcatccgctcgcgcacgcagctcacggcggacgtgttcgcgcatgcgcacaagctcgtggccgtggggtgcttttgcatcggcaccaaccaggtagacctgaacgctgcgcgcgagcgcggcatcgccgtgttcaatgcgccgtattccaacacccgctccgtggccgagctggtgctggccgaggccatcctgctgctgcgcggcgtgcccgagaagaacgctgcggcccaccgcggcggctggctcaagagcgccacgaacgcctacgagatccgcggcaagacgctgggcatcgtgggctacggctccatcggcacccagctgtcggtgctggccgaggcgctgggcatgcacgtgatcttccacgacgtggtgcacaagctgccgctgggcaatgcgcgccaggtgggttcgctgcacgagctgctgggccaggccgacatcgtgaccctgcacgtgcctgagctgccttccacccagtggatgattggcgccgccgagatcgcggccatgaagccgggcggcatcctcatcaacgcctcgcgcggcacggtggtggagatcgaccccctggcccaggcgctgaagggcggcaacttgctgggcgcggccgtggacgtgttcccggtggagcccaagagcaacaaggacgagttcgtctcgccgctgcgcgggctggacaacgccctcctcacgccccacatcggcggctccaccatggaggcgcaggccaacatcggcctggaggtggcggaaaagctcgtcaggtacagcgacaacggcaccagcacttcgtcggtcaacttccccgaggtggcgctgcccgagcatgcgggcaagcaccgcctgctgcacgtgcaccacaacgtgccgggcgtgctctcgcagatcaacagcatcctgtcggacaaccacatcaacatcgcggcgcagtacctgcagaccaacgagaagatcggctatgtggtgatcgacctcgacgcgcgctcgtccgacctggcgctggagaagctggcccaggtgcccggcaccatccgcagccgcgtgctgtattaa

SEQ ID NO: 82305 - protein, 434 aa, Acidovorax sp. JS42
MHNDPLSCPAARAAWVFSSPLNLHAMAKTSLDKSKIKFLLLEGIHPSAVEVLRSAGYTQVEVLAGALEGEELRRKIADVHFIGIRSRTQLTADVFAHAHKLVAVGCFCIGTNQVDLNAARERGIAVFNAPYSNTRSVAELVLAEAILLLRGVPEKNAAAHRGGWLKSATNAYEIRGKTLGIVGYGSIGTQLSVLAEALGMHVIFHDVVHKLPLGNARQVGSLHELLGQADIVTLHVPELPSTQWMIGAAEIAAMKPGGILINASRGTVVEIDPLAQALKGGNLLGAAVDVFPVEPKSNKDEFVSPLRGLDNALLTPHIGGSTMEAQANIGLEVAEKLVRYSDNGTSTSSVNFPEVALPEHAGKHRLLHVHHNVPGVLSQINSILSDNHINIAAQYLQTNEKIGYVVIDLDARSSDLALEKLAQVPGTIRSRVLY

SEQ ID NO: 82306 - DNA, 1200 bp, Bifidobacterium longum DJO10A; identical to SEQ ID NO: 64701
  CDS (1)..(1200): transl_table=11

SEQ ID NO: 82307 - protein, 399 aa, Bifidobacterium longum DJO10A; identical to SEQ ID NO: 64702

SEQ ID NO: 82308 - DNA, 1581 bp, Magnetospirillum magnetotacticum MS-1
  CDS (1)..(1581): transl_table=11
atgcccaaggttctcatcagcgacaagttgagccccgccgccgttcagatcttcaaggatcgcggcatcgaaaccgacgtgaagaccggccttgctcccgacgagctgaaggccatcatcggccagtatgacggtctggctatccgctccaacaccaaggtcaccaccgagatcctggccgccgccaccaacctcaaggttgtcggccgcgccggtattggcgtcgacaatgtggacgtccccgccgccacggcgcgcggcatcgtggtgatgaacacgccgtttggcaattccatcaccaccgccgaacacgccatcgccatgatgttcgccctggcccgcgagatccccgaggccaatgccagcacccatgcgggcaagtgggagaagaaccgcttcatgggcgtcgagctcaccggcaaggtgctgggcatcgtcggctgcggcaatatcggcgccatcgtcgccgaccgggcccaaggcctgcgcatgcgcgtcatcgcctatgaccccttcttgtcccatgagcgcgccaaggaactgaacgtcgagaagatggagctggaggaattgttcccccgcgccgacttcatcacgctgcacaccccgctcaccgacgccacccgcaacatcatcgattccaaggccatggccaagatgaagaagggcgtgcgcatcatcaactgcgcccgcggcggtctggtggtcgaggaagatctgctggcggccctggaatccggccaggtggccggtgcggcgctggacgtgttcaagaccgagcccgccaaggaaaatcccctgttcggcaattcgaaagtggtctgcaccccccatctgggcgcgtccacctccgaggcgcaggagaacgtcgccctgcaggtggccgagcagatggccgattacctgctgaccggcgccgttaccaatgcgctgaacatcccctcggtctcggccgaggatgcgcccaagctcaagccctatatgacgctggccaaccagctgggcagctttgccggtcaactgaccgagaccggcattagggaagtgaagatcgagtatatgggccatgtggcctcgctcaacaccaagccgctgaccgccgtggttctcgaagggctgttgaagcccatgaacgaggcggtcaacatggtcaatgcccccgtcgtggccaaggaacgcaatatcaaggtctccgaggtcaagaccgagaccgagggcgattaccacaccctggtgcgcctgaccgtcaccaccgacaagcgcgagcgttcggtggctggcaccctgttcggcggcgacaaggcccgcgtggtggagatcaagggtatctccattgaggccgagctgggcagccacatgctctatgtcaccaaccaggataagccgggctttatcggcgctctgggcaccctgctgggtgctaacggcgtcaacatcgccaccttccatctcggccgctccgaggcgggcggcgacgccattctgctgacccaggtggaccagccggtctccaacgaactgctggaaaaggtccgggccctgccccaggtggtgcaggccaagttcctcaccttcgcctga

SEQ ID NO: 82309 - protein, 526 aa, Magnetospirillum magnetotacticum MS-1
MPKVLISDKLSPAAVQIFKDRGIETDVKTGLAPDELKAIIGQYDGLAIRSNTKVTTEILAAATNLKVVGRAGIGVDNVDVPAATARGIVVMNTPFGNSITTAEHAIAMMFALAREIPEANASTHAGKWEKNRFMGVELTGKVLGIVGCGNIGAIVADRAQGLRMRVIAYDPFLSHERAKELNVEKMELEELFPRADFITLHTPLTDATRNIIDSKAMAKMKKGVRIINCARGGLVVEEDLLAALESGQVAGAALDVFKTEPAKENPLFGNSKVVCTPHLGASTSEAQENVALQVAEQMADYLLTGAVTNALNIPSVSAEDAPKLKPYMTLANQLGSFAGQLTETGIREVKIEYMGHVASLNTKPLTAVVLEGLLKPMNEAVNMVNAPVVAKERNIKVSEVKTETEGDYHTLVRLTVTTDKRERSVAGTLFGGDKARVVEIKGISIEAELGSHMLYVTNQDKPGFIGALGTLLGANGVNIATFHLGRSEAGGDAILLTQVDQPVSNELLEKVRALPQVVQAKFLTFA

SEQ ID NO: 82310 - DNA, 1578 bp, Crocosphaera watsonii WH 8501; identical to SEQ ID NO: 64709
  CDS (1)..(1578): transl_table=11

SEQ ID NO: 82311 - protein, 525 aa, Crocosphaera watsonii WH 8501; identical to SEQ ID NO: 64710

SEQ ID NO: 82312 - DNA, 1278 bp, Kineococcus radiotolerans SRS30216
  CDS (1)..(1278): transl_table=11
gtgcgggagactggacccccgcgcacccgcacgaagcaggaggaacccgtgtccgcccccgacctcgctcccgtccgtcccggacgtgcgctgctgctggagaacatccacgccgacgcccggacgctgctgtccgaggccgggtgggaggtcgagaccgcctccggcgccctcgacgaggccgagctcgccgagcggctggacggggtgtcgctgctgggcatccgctcgcagacccaggtcaccgccaaggtcctggaggccgcgaccgacctgcgcgcggtcggcgccttctgcatcggcaccaaccagatcgacctcttcgccgcggccgcccacggcgtcgccgtcttcaacgccccctacagcaacacccgcagcgtggtggagctcgccctcgccgagatcatcgccctcacccgccggctcaccgtcaaggaccgggccatgcacgagggggtctgggacaagtccgccgccggctcccacgaggtccgcgggcgccgcctcggcatcgtcggctacggcaacatcggctcgcagctgtcggtggtggccgaggcgctgggcctgagcgtgttcttctacgacaccaccgacaagctcgcgctgggcaacgcccgccgctgcggcagcctgcacgagctgctggagatcgtcgacgtcgtcaccctgcacgtcgacggccgcagctccaacctcggcttcttcggcgaggcggagttctcccggatgcgcccggggtcgatcttcctcaacctctcccgcggcttcgtcgtcgaccacgaggccctcagccggcacatccgctccggccacatcgccggtgcggccatcgacgtcttccccaccgagcccaagggcagcgggcagggcttcgagtccgagctgcgggggctgcccaacgtcatcctcaccccccacgtgggcgggtccaccgaggaggcgcaggaggacatcggccgcttcgtcgcggccaagctgcgcgactacgccctgcacggggcgacgaccctgtcggtgaacctgccgacgctgggcaccgagaccacccccggcacggtgcgcctggcccacctgcaccgcaacgtccccggcgtgctggccaacatcaacaaggtgctggccgaggccggggtgaacatcgaggggcagcagctcgccacccgcggcgacctcggctacgtcgtcaccgacatcgccgcgcacgcctccgaggacgtcgggcggcggctgcgggagctgcccgagaccgtccgggtccgccagctcggctga

SEQ ID NO: 82313 - protein, 425 aa, Kineococcus radiotolerans SRS30216
MRETGPPRTRTKQEEPVSAPDLAPVRPGRALLLENIHADARTLLSEAGWEVETASGALDEAELAERLDGVSLLGIRSQTQVTAKVLEAATDLRAVGAFCIGTNQIDLFAAAAHGVAVFNAPYSNTRSVVELALAEIIALTRRLTVKDRAMHEGVWDKSAAGSHEVRGRRLGIVGYGNIGSQLSVVAEALGLSVFFYDTTDKLALGNARRCGSLHELLEIVDVVTLHVDGRSSNLGFFGEAEFSRMRPGSIFLNLSRGFVVDHEALSRHIRSGHIAGAAIDVFPTEPKGSGQGFESELRGLPNVILTPHVGGSTEEAQEDIGRFVAAKLRDYALHGATTLSVNLPTLGTETTPGTVRLAHLHRNVPGVLANINKVLAEAGVNIEGQQLATRGDLGYVVTDIAAHASEDVGRRLRELPETVRVRQLG

SEQ ID NO: 82314 - DNA, 957 bp, Croceibacter atlanticus HTCC2559
  CDS (1)..(957): transl_table=11
atgaaaattttagcaaatgatggtgtttctcaaagcggtgtagacgctatggaaaaagctggttttgaagttataactactaacgtagctcaagatcaacttaaagactatataaataaaaacgacatttctgtactattggtaagaagtgccacaactgtaagaaaagaattaatcgatgcgtgccctagcttaaaaataataggtcgtggcggtgttggtatggataatatagatgttagctatgcaaaagaaaaaggcttgcacgttattaatacacctgcagcatcatccagtagcgttgcagagctcgtatttgctcacctatatggtggcgttagatacttgtacgactctaatagagcaatgccactagaaggcgatacaaattttaaggctttaaaaaaatcttatgctaaaggaagagaactaagaggtaaaaccataggtattattggttttggtcgtattggtcgtgaggtagctaagattgccttaggtatcggtatgaaagtagtagcaagtgataactatgtaggtgaagcagaaatagaattagaattttacaatcaccaaaccataaagattcctattaaaacagaacccgtttcagatttaatacagcattcagattttataaccttacacgttcctgctcaaaaggattatgtaattggtaaagaagaaatttcaaaaatgaaagaaggtgttggtattattaatgctgcacgtggtggtgtattagatgaagtggcattggttgatgctctaaatgatggaaaagtatcttttgcagctttagatgtttttgaaaaagagcctaagccagagatacagttattaatgaatgaaaaactttcattaagtcctcatattggcgcagctactctagaagcgcaagacagaattggtgttgagttagcagagcagattgcagatatactacaacctgcataa

SEQ ID NO: 82315 - protein, 318 aa, Croceibacter atlanticus HTCC2559
MKILANDGVSQSGVDAMEKAGFEVITTNVAQDQLKDYINKNDISVLLVRSATTVRKELIDACPSLKIIGRGGVGMDNIDVSYAKEKGLHVINTPAASSSSVAELVFAHLYGGVRYLYDSNRAMPLEGDTNFKALKKSYAKGRELRGKTIGIIGFGRIGREVAKIALGIGMKVVASDNYVGEAEIELEFYNHQTIKIPIKTEPVSDLIQHSDFITLHVPAQKDYVIGKEEISKMKEGVGIINAARGGVLDEVALVDALNDGKVSFAALDVFEKEPKPEIQLLMNEKLSLSPHIGAATLEAQDRIGVELAEQIADILQPA

SEQ ID NO: 82316 - DNA, 1596 bp, Sulfitobacter sp. EE-36
  CDS (1)..(1596): transl_table=11
atggcccccaaagtgcttatttccgacaaactctcggacgccgccgttcaaatcttcaaagaccgcggcattgacgtcgacttccaacccgatcttggcaaagacaaggacaagcttgccgccgtgatcggcgattacgacgggctcgccatccggtccgcgacgaaagtgaccgaaaagatcctcgccaatgcgaccaacctcaaggtgatcgcccgcgccggtatcggcaccgataacatcgacaaggatgcggcctcgaaaaagggtgtcatcgtcatgaacacccccttcggcaacatgatcaccacggcagaacacgcgattgcgatgatgttcgccgttgcccgtcaaatccccgaggcatcggcctccacccatgccggcaaatgggaaaagtccaaattcatgggggtcgagcttacgggtaaaacccttggcgtaatcggtgccggcaacatcggcggcatcgtctgcgatcgcgcccgcgggctgaagatgaaagtcgcggcctatgaccccttcctgagcgaagaaaaagccaagaagatgggtgtcgagaaagtcgagctggacgatctcctggcgcgcgcggacttcataacgttgcacgtgccttacacggatcaaaccgcaaatatcctgtccaaggaagccttggcgaaaaccaaaaaaggtgtgcggatcatcaactgtgcccgcggcggtctggtcgacgaagaagcattggccgaagcgctgaaatccggccatgtcgctggcgcagccttcgacgttttcaaggaagagcccgcgaccgaaaacccgctgttcggcctacccaacgtcgtctgcaccccccaccttggggccgccacgacggaagcacaggaaaacgtggcacttcaggtcgctgaacagatgtccgactacctgctgaccggtgccgtcacaaacgccctgaacatgccgtccgtcaccgccgaagaggcaaaggtcatgggcccgtggatcactttggcgggtcaccttggggccttcattggccagatgacggatgaagccgtgaaggcgatcaacatcctttacgacggtcaggtgtccgagatgaacctgaacgcgctgaactgcgcggtcgtggcgggcatcatgaaacgtgccaaccccgacgtgaacatggtcagcgcccccgttgttgcgcgcgaaaaaggcatccagatcagcaccaccaatcaggacaaatccggtgtcttcaacggctatgtgaaagtgaccgttgtcaccgagaaacgtgagcggtcgatcgcgggcaccgtgttctcggatggcaaaccacgcttcatccagatcaaaggcatcaatatcgaagccgaagttggtgcgcatatgctttacaccaccaacaacgacgtgcccggcatcatcgggacgctgggtcagaccctgggggcaaacgacgtaaacatcgcgaacttcaccctcggccggtccaccgccaaaggggaagcgattgccttgctctatattgacggccctctgcccgagaaagcgctgaaagacctgcgtgatacaggtctgttcaaacaggtcaaagagctcgaattcgaagtcgcctaa

SEQ ID NO: 82317 - protein, 531 aa, Sulfitobacter sp. EE-36
MAPKVLISDKLSDAAVQIFKDRGIDVDFQPDLGKDKDKLAAVIGDYDGLAIRSATKVTEKILANATNLKVIARAGIGTDNIDKDAASKKGVIVMNTPFGNMITTAEHAIAMMFAVARQIPEASASTHAGKWEKSKFMGVELTGKTLGVIGAGNIGGIVCDRARGLKMKVAAYDPFLSEEKAKKMGVEKVELDDLLARADFITLHVPYTDQTANILSKEALAKTKKGVRIINCARGGLVDEEALAEALKSGHVAGAAFDVFKEEPATENPLFGLPNVVCTPHLGAATTEAQENVALQVAEQMSDYLLTGAVTNALNMPSVTAEEAKVMGPWITLAGHLGAFIGQMTDEAVKAINILYDGQVSEMNLNALNCAVVAGIMKRANPDVNMVSAPVVAREKGIQISTTNQDKSGVFNGYVKVTVVTEKRERSIAGTVFSDGKPRFIQIKGINIEAEVGAHMLYTTNNDVPGIIGTLGQTLGANDVNIANFTLGRSTAKGEAIALLYIDGPLPEKALKDLRDTGLFKQVKELEFEVA

SEQ ID NO: 82318 - DNA, 1596 bp, Roseovarius nubinhibens ISM; identical to SEQ ID NO: 64715
  CDS (1)..(1596): transl_table=11

SEQ ID NO: 82319 - protein, 531 aa, Roseovarius nubinhibens ISM; identical to SEQ ID NO: 64716

SEQ ID NO: 82320 - DNA, 1596 bp, Oceanicola batsensis HTCC2597; identical to SEQ ID NO: 64717
  CDS (1)..(1596): transl_table=11

SEQ ID NO: 82321 - protein, 531 aa, Oceanicola batsensis HTCC2597; identical to SEQ ID NO: 64718

SEQ ID NO: 82322 - DNA, 1587 bp, Prochlorococcus marinus str. MIT 9211
  CDS (1)..(1587): transl_table=11
atgacgaaagttttggtttctgatcccatagatcaggcaggcatcgagatccttagtcaggtagctcaagttgatcaacgtatagatctttcaaatgaacaattgaaggaggttatcagtgaatatgaagcactgatgattcgatctggcacacaagtcacctctgaggttatagaagctagtgatcgattacgcattattggtagagctggtgttggagtggacaatgttgatgtccctgcggcaactaagcgaggggttttagtagtaaattctcctggtggaaatacgattgctgctgcagagcatgcacttgccttgcttctagctctttcccgaaatattcctcaagctcactcgagtacttttggcggcctatgggaaagaaagaaatatgttggtaatgaactttataaaaaaatcttaggagtagttgggcttggaaagatcggctctcatgtcgcaaaagtagctaatgcaatggggatggaggttattgcttttgatccttttgtatctgctgatcgagcccagcaaatgcaagtcaggcttagttcaattgacaaccttttcgaagaagccgactacataacacttcatctgccaagaacaccggaaaccgaaaacttagttaatgctcaattgctctcaactatgaagagcactgcaagattggtgaattgcgcaagaggcggaattattgatgaagcagctttggcagatgcattgaattctgaagtcatagcgggtgctgcattggatgtatatgcagaagaaccactgaaaaaagattcccctttgctttctgttaataaaggcctaattctcacacctcatttgggtgcttctactgctgaggctcaagagaatgttgctatagatgttgcggagcagattcgtgatgttttattaggtttgcctgctcgcagcgctgtaaatattcctggattaagtgctgaaatcatggatagcctaaagcctcatttacagcttgccgaaacgcttggattattagccagccagatctctggagggcatatacagaaattagaagttcgtttgcagggagaatttgctcaacatccttctcaacctttagtagtagccactttaaagggacttctttctacagccttaggtgacaggatcaattatgtaaatgcttctttagaagctaaaggtaggggaatcaatgtcttagaagtgaaagatgagagttgtcctgatttctctgggggatcacttcagttaactacggtcgcagatgacgggagtcatagcttggctggaacagtcttcgctgatggtgatttacgtataacttgtatagatgaattccctgtcaatgtagctccaagtaggcatatgctttttacgaggcatcgggatatgcctggcataattggaaagattggatctttgcttggtgttcataatgtgaatattgcgtcaatgcaagttggaagacgcatagttaggggagaagcagtaatggtgctgagtattgatgatccaattccatcagaacttttgaagtctattcttcaaatccaaggtattaatgaggcacatccagtaactttatag

SEQ ID NO: 82323 - protein, 528 aa, Prochlorococcus marinus str. MIT 9211
MTKVLVSDPIDQAGIEILSQVAQVDQRIDLSNEQLKEVISEYEALMIRSGTQVTSEVIEASDRLRIIGRAGVGVDNVDVPAATKRGVLVVNSPGGNTIAAAEHALALLLALSRNIPQAHSSTFGGLWERKKYVGNELYKKILGVVGLGKIGSHVAKVANAMGMEVIAFDPFVSADRAQQMQVRLSSIDNLFEEADYITLHLPRTPETENLVNAQLLSTMKSTARLVNCARGGIIDEAALADALNSEVIAGAALDVYAEEPLKKDSPLLSVNKGLILTPHLGASTAEAQENVAIDVAEQIRDVLLGLPARSAVNIPGLSAEIMDSLKPHLQLAETLGLLASQISGGHIQKLEVRLQGEFAQHPSQPLVVATLKGLLSTALGDRINYVNASLEAKGRGINVLEVKDESCPDFSGGSLQLTTVADDGSHSLAGTVFADGDLRITCIDEFPVNVAPSRHMLFTRHRDMPGIIGKIGSLLGVHNVNIASMQVGRRIVRGEAVMVLSIDDPIPSELLKSILQIQGINEAHPVTL

SEQ ID NO: 82324 - DNA, 1605 bp, Erythrobacter sp. NAP1
  CDS (1)..(1605): transl_table=11
atgacgattggagtgcttccaatgacaaaacccaaagtcctcatttccgacaagatggaccccaatgcagcgcgcatttttgaagagcgcggctgcgaggtcgacgtcatcaccggcgaaacgccagaagagttgaaagcgcgtattggcgagtatcacggcctcgccatccggtcctcgaccaaggtgacggccgaaattctggatgctgcgacgaaccttaaggtcatcggccgcgccgggatcggtgtcgacaacgtcgatatcccttatgcgagcggcaagggcgtggtggtgatgaacaccccgttcggcaactcgatcaccacagccgaacacgccattgcgatgatcatggcgcttgcccggatgatcccggcggcagatgcacgcacccagaatggcgagtggcccaagaaagacttcatgggcatcgaagtgacgggcaagacgcttggcctgatcggggccggcaatatcggctcgatcgtcgccagccgcgctctgggccttcgcatgaaggtcatcgcgtatgatccgttcctgaccgaagaccgtgctgtcgaaatcggggtggagaaggtcgatctcgacaacctgctctcgcgcgccgatttcgtgagcctgcacacaccgctcaccgatgaaacccgcaacattctcagccgcgaacggcttgagaatgcgaagcccggcatccgcatcgtcaattgcgcgcgcggcgggctgatcgacgaggtcgcgctcaagaactgcctcgaaagcggtcaggtcgcaggcgccgcgctcgatgtgtttgccgaggaaccggcgaaggaaaatccgctgttcggcgcgcccaactttatctgcaccccgcaccttggagcatcgacgaccgaagcgcaggtgaacgttgcgctgcaggtggccgagcagatgagcgactacctcgtcaatggaggcgtcacgaacgcgctcaacatgccttcgctctccgccgaggaagcgccgaagctcaagccctacatgtcgctcgccgaaaagctcggcagcctcgtgggacagctcgcccatggcaacctcaccaagatcagcatcgagcgtgaaggtgcagcggcagagctcaacggcaagccgatcaccggcgcggtgctggcgggcttcatgcgccgctattccgacacggtgaacatggtcaacgcgccgtaccttgcgaaggaacgcggcctggatgtgagcgagatccgccaccagcgcgaaggtgcgttcaacacgctcatccgcgtctcggtcgaaaccgatgcgggcacgcgctcggtcgccggtaccttgttcggcaaggacgcaccgcgcctcgtcgagattttcggcatcgggatcgaagccgacctcgacggcaacatgctttacgtcgtcaacgacgataagccgggcttcattgggcgcatcggtacgctgctgggttcacagggcatcaatatcggcaccttcaacctcggtcgccgcgatgcgggcggggaagcggtgctgcttttgagcctggacgatgagcccagcgcggacgtgatggccgaggccgagaaggtcgaaggcgtgaaaatggtcaaggcgctcagcttttag

SEQ ID NO: 82325 - protein, 534 aa, Erythrobacter sp. NAP1
MTIGVLPMTKPKVLISDKMDPNAARIFEERGCEVDVITGETPEELKARIGEYHGLAIRSSTKVTAEILDAATNLKVIGRAGIGVDNVDIPYASGKGVVVMNTPFGNSITTAEHAIAMIMALARMIPAADARTQNGEWPKKDFMGIEVTGKTLGLIGAGNIGSIVASRALGLRMKVIAYDPFLTEDRAVEIGVEKVDLDNLLSRADFVSLHTPLTDETRNILSRERLENAKPGIRIVNCARGGLIDEVALKNCLESGQVAGAALDVFAEEPAKENPLFGAPNFICTPHLGASTTEAQVNVALQVAEQMSDYLVNGGVTNALNMPSLSAEEAPKLKPYMSLAEKLGSLVGQLAHGNLTKISIEREGAAAELNGKPITGAVLAGFMRRYSDTVNMVNAPYLAKERGLDVSEIRHQREGAFNTLIRVSVETDAGTRSVAGTLFGKDAPRLVEIFGIGIEADLDGNMLYVVNDDKPGFIGRIGTLLGSQGINIGTFNLGRRDAGGEAVLLLSLDDEPSADVMAEAEKVEGVKMVKALSF

SEQ ID NO: 82326 - DNA, 1587 bp, Synechococcus sp. RS9917
  CDS (1)..(1587): transl_table=11
atgacgaaagttctggtttccgatcccattgatcaggcggggatcgacatccttggccaggtggcacaggtggatcagcgcaccggtctcagccccgatgaactcaaggcgatcatcggtgactacgacgccctgatgatccgttccggcacgcaggtcaccgccgatgtgatcgctgccggcgatcgactgcgcatcatcggccgcgccggcgttggtgtcgacaatgtcgacgtgccggcggccacccaacggggggtgctggtggtgaattcaccggagggcaacacgattgcggcggcggagcatgccctggccttgctgctgtctctgtcccgccatgtgcctcaggcccatgcctcgatgcggcagggcgcctgggatcgcaagaaatatgtggggaacgagctctacaagaaaactctcggggtggtggggctcggcaagatcggctcccatgtggcccgggtggccaaggcgatgggcatggatgtgatcgcctttgatccgttcatttccgctgatcgggctcagcagatgcaggtgcgactcacccagctcaacgagctgtttcgcacggccgattacatcacccttcacattccgcgcacgccagataccgaaaatctggtgaatgcggagttgctgcgcagcatgaagcccaccgcccgcctcgtgaactgcgcccggggcggcatcgtcgatgaggcggcgatcgcagaggccatcaacaccggtgtgatcgccggggctggtctcgatgtgttcgccagcgaacccctggcggtggagtctccgcttcgtgcggtggagcggggtctggtgctcacgccccacctcggtgcctccaccgaggaggctcaggagaatgtggcgatcgatgtggccgagcagatccgcgacgtcttgctcggtctgcccgcccgcagcgccgtcaatattcccggtctcagcgctgagatcatggagcggctcaagccccatctccagctggcggaaaccctcggtttgctggtgagtcagctctcgggcggtcaggtgcaggagctggaggtgcgactccagggcgaattcgccgagcatccctcccaacccctggtggtggcggctctcaaggggctcctctccagtgcccttggtgagcgcatcaattatgtgaatgccgctctggaggccaaggggcggggaatccatgtgctggagatcaaagacgatgccagccgcgatttcgctggcggatccctccagctcaccacccgtggcggccaggggggacacagcgtcaccggtgccgtgttcgccgacggcgatctgcgggtcacgagcatcgacgagtttccggtgaatgtgccccccagtcggcacatgctgttcacccgtcaccgcgacatgcccgggatcattggccaccttggctccctgctcggtgagcacaacgtcaacatcgcctccatgcaggtcggccgaaggatcgtgcggggtgatgcggtgatggtcctgagcatcgatgatccgatcccccccagcctgctggccaccatccatgccatcaacggcatccaggaagcccatcccgtcaccctctga

SEQ ID NO: 82327 - protein, 528 aa, Synechococcus sp. RS9917
MTKVLVSDPIDQAGIDILGQVAQVDQRTGLSPDELKAIIGDYDALMIRSGTQVTADVIAAGDRLRIIGRAGVGVDNVDVPAATQRGVLVVNSPEGNTIAAAEHALALLLSLSRHVPQAHASMRQGAWDRKKYVGNELYKKTLGVVGLGKIGSHVARVAKAMGMDVIAFDPFISADRAQQMQVRLTQLNELFRTADYITLHIPRTPDTENLVNAELLRSMKPTARLVNCARGGIVDEAAIAEAINTGVIAGAGLDVFASEPLAVESPLRAVERGLVLTPHLGASTEEAQENVAIDVAEQIRDVLLGLPARSAVNIPGLSAEIMERLKPHLQLAETLGLLVSQLSGGQVQELEVRLQGEFAEHPSQPLVVAALKGLLSSALGERINYVNAALEAKGRGIHVLEIKDDASRDFAGGSLQLTTRGGQGGHSVTGAVFADGDLRVTSIDEFPVNVPPSRHMLFTRHRDMPGIIGHLGSLLGEHNVNIASMQVGRRIVRGDAVMVLSIDDPIPPSLLATIHAINGIQEAHPVTL

SEQ ID NO: 82328 - DNA, 1587 bp, Synechococcus sp. WH 5701
  CDS (1)..(1587): transl_table=11
atgacaaaggttctggtttctgatcccatcgaccagacgggaatcgacatcctctcccaggtggcgcaggtggatgtgcgaaccgggttgcccccggagcagttgcagcagatcatcggtgactacgacgccctgatgatccgctccggcacccaggtcaccgctgccatcatcgaggccgccacccgtttgaagatcatcggccgcgcgggtgtcggcgtcgacaacgtcgatgtggaggccgccacccagcggggtgtgctggtggtgaactccccggagggcaacacgatcgcggccgctgaacatgcgctggcgatgatgctggccctctccaggcatgtgccccaggcccacgtcagcaccatggccggaggctgggagcgcaagaagtacgtcggcaacgagctctacaagaagaagctcggcgtggtggggctgggcaagatcggctcccacgtggctcgcgtcgccaaggccatgggcatggaggtgctggcctacgacccttacatctccgccgagcgcgcccaggtgctgcaggtgcgcctgatggcgatcggtcccctgttcgccgaagcggatttcatcagcctgcacctgcctcgcacccccgacaccgagaacctggtgaacgcggagctgctggccacgatgaagccgacggcacggctggtgaactgtgcccggggcggcatcgtcgatgagaaggccctggccgaggccgtcagctccggcaccatcgccggcgccgccctcgatgtctacggcaacgaacccctggaggtcgactcaccgctgcgcaaggtgggcgaccgtctgatcctcacgccccacctgggcgcctccaccgaagaagcccaggagaatgtgtcggtcgatgtggccgagcagatccgcgacgtgctgctggggcttcccgcccgcagtgccgtgaacatccccggcctgaccccggaggtgatggagcggctcaagccccacctgcagctggccgaaacgctcgggctgctgctcagccagctggctggaggctcgatccaggacctcgaagtgcggctccagggtgaattcgcccaccatccctcgcagccgctggtggtggccgccctcaagggcctgctctcgagcgctctcggcgatcgcatcaactatgtgaatgccggcatcgaagcccgcagtcgtggcatccacgtgctcgaggtcaaagacgatgccagccgcgacttcgccggcggctcccttcagctcacctgccgcggcggcaacggcagccacagcgtcaccggggcggtgttcgccgacggcgacctgcgcatcaccaccatcgatgagtttccggtcaacgtgatgcccacgcggcacatgctgatcacgcgccaccgcgacatgcccgggatcatcggcaacatcggctcgctgctgggcgagcacaacgtcaacatcgcctcgatgcaggtgggccgccgcatcgtccgcggcgacgcggtgatggtgctcagcctcgacgatccgatcccccccagcctgctgatctcgattcacgggatcaacgggattcaggaagcccatccggtcacgctctga

SEQ ID NO: 82329 - protein, 528 aa, Synechococcus sp. WH 5701
MTKVLVSDPIDQTGIDILSQVAQVDVRTGLPPEQLQQIIGDYDALMIRSGTQVTAAIIEAATRLKIIGRAGVGVDNVDVEAATQRGVLVVNSPEGNTIAAAEHALAMMLALSRHVPQAHVSTMAGGWERKKYVGNELYKKKLGVVGLGKIGSHVARVAKAMGMEVLAYDPYISAERAQVLQVRLMAIGPLFAEADFISLHLPRTPDTENLVNAELLATMKPTARLVNCARGGIVDEKALAEAVSSGTIAGAALDVYGNEPLEVDSPLRKVGDRLILTPHLGASTEEAQENVSVDVAEQIRDVLLGLPARSAVNIPGLTPEVMERLKPHLQLAETLGLLLSQLAGGSIQDLEVRLQGEFAHHPSQPLVVAALKGLLSSALGDRINYVNAGIEARSRGIHVLEVKDDASRDFAGGSLQLTCRGGNGSHSVTGAVFADGDLRITTIDEFPVNVMPTRHMLITRHRDMPGIIGNIGSLLGEHNVNIASMQVGRRIVRGDAVMVLSLDDPIPPSLLISIHGINGIQEAHPVTL

SEQ ID NO: 82330 - DNA, 1587 bp, Synechococcus sp. WH 7805
  CDS (1)..(1587): transl_table=11
atgaccaaagttctcgtttcagaccccattgatcaggcggggatcgacatcctcgggcaggtggctcaggtggatcagcgaacgggcctgtcggccgaggagctgaaggccgtgatcggtgaatacgacgccctgatgatccgctctggcacacaggtgactgcggatgtgatcgctgctgctgatcgtctgcgcattatcggccgggctggcgtgggtgttgacaacgtggatgttcccgctgcgacccagcgcggcgtgcttgttgttaactcacccgaaggcaacacaatcgcggcggctgagcatgccctcgcgctgcttctgtcactgtcgcgccatgtgccccaggcccatggctccatgcgctctggtgcctgggaccgcaagaagtacgtgggaaatgagctttacaagaaggtcctcggcgttgtcggtcttggaaagattggctcccatgtggctcgggtcgccaaggcgatgggaatggaggtgatcgccttcgatcccttcatttctgccgatcgcgcccagcagatgcaggtgcgactcaccacgctcgaggatctgttccgtcaggccgactacatcacgctgcatatcccccgcacgccggataccgaaaacctcgtcaatgccgagctgctccgctcgatgaagtccacgtcccgcatcgtgaactgcgccagaggcggaattgtggatgaggcggctttggccgaagcgatcgagaacggagtcatcgccggagcaggactggatgtgtatgcctcagagccgctggcagaggattctccgttgaggaccgtggaacgcggattggtcctgactcctcacctcggcgcttccactgaggaagcccaggaaaatgtggcgacggatgtggcagagcagattcgtgatgtgctgctcggtcttccggcgcgcagcgctgtgaatatccccgggcttagcgcggagatcatggagcggctcaagccccatctccagctcgctgagacgcttggactgctagtgagtcagctcagtggcgggcaggttcaagagcttgaggtgaggcttcagggtgaatttgcgctccatccctcacagcctctggtggtggcagcgctgaagggtctgctgaccagtgctctcggcgatcgcatcaactacgtgaatgcctctctggaggccaaagggcgcggcattcacgtgctggaggtcaaggatgacgccagccgcgatttcgccggtggttcgctccagctgtccacccgaggcggtcagggagggcacagcgtgaccggggctgtgttcgcggatggtgagctgcgggtgaccaacattgatgagttccctgtgaacgtgcccccaagccgtcacatgttgtttacccgccaccgagatatgcctgggatcatcgggcacctgggttcattgctgggtgagcacaacgtgaacattgcgtccatgcaagtggggcgtcggatcgtgcgcggtgatgccgtgatggttctgagcatcgacgatccaattccgcccgccttgctggccacgatccacggcatcaatgggatccaggaagctcaccccgtcacgctgtga

SEQ ID NO: 82331 - protein, 528 aa, Synechococcus sp. WH 7805
MTKVLVSDPIDQAGIDILGQVAQVDQRTGLSAEELKAVIGEYDALMIRSGTQVTADVIAAADRLRIIGRAGVGVDNVDVPAATQRGVLVVNSPEGNTIAAAEHALALLLSLSRHVPQAHGSMRSGAWDRKKYVGNELYKKVLGVVGLGKIGSHVARVAKAMGMEVIAFDPFISADRAQQMQVRLTTLEDLFRQADYITLHIPRTPDTENLVNAELLRSMKSTSRIVNCARGGIVDEAALAEAIENGVIAGAGLDVYASEPLAEDSPLRTVERGLVLTPHLGASTEEAQENVATDVAEQIRDVLLGLPARSAVNIPGLSAEIMERLKPHLQLAETLGLLVSQLSGGQVQELEVRLQGEFALHPSQPLVVAALKGLLTSALGDRINYVNASLEAKGRGIHVLEVKDDASRDFAGGSLQLSTRGGQGGHSVTGAVFADGELRVTNIDEFPVNVPPSRHMLFTRHRDMPGIIGHLGSLLGEHNVNIASMQVGRRIVRGDAVMVLSIDDPIPPALLATIHGINGIQEAHPVTL

SEQ ID NO: 82332 - DNA, 1233 bp, Pseudoalteromonas tunicata D2; identical to SEQ ID NO: 64719
  CDS (1)..(1233): transl_table=11

SEQ ID NO: 82333 - protein, 410 aa, Pseudoalteromonas tunicata D2; identical to SEQ ID NO: 64720

SEQ ID NO: 82334 - DNA, 1230 bp, Photobacterium sp. SKA34; identical to SEQ ID NO: 64721
  CDS (1)..(1230): transl_table=11

SEQ ID NO: 82335 - protein, 409 aa, Photobacterium sp. SKA34; identical to SEQ ID NO: 64722

SEQ ID NO: 82336 - DNA, 1233 bp, Oceanospirillum sp. MED92; identical to SEQ ID NO: 64723
  CDS (1)..(1233): transl_table=11

SEQ ID NO: 82337 - protein, 410 aa, Oceanospirillum sp. MED92; identical to SEQ ID NO: 64724

SEQ ID NO: 82338 - DNA, 1290 bp, Xanthobacter autotrophicus Py2; identical to SEQ ID NO: 64725
  CDS (1)..(1290): transl_table=11

SEQ ID NO: 82339 - protein, 429 aa, Xanthobacter autotrophicus Py2; identical to SEQ ID NO: 64726

SEQ ID NO: 82340 - DNA, 960 bp, Flavobacteria bacterium BBFL7
  CDS (1)..(960): transl_table=11
atgagcaaaaaagtattagcaaacgatggtgtttcacaaagtggtatagataaattaacggccgcaggttatgaagtaatcactacaaatgttgcacaagcacaattagaaaattacatcaataaaaatgatatttctgtgctgttagtgcgatctgcaacgactgctcgtcaggatttaattgataattgtcctggtcttaaaataataggtcgtggtggcgtgggaatggataatattgatgtagaatatgcacgtgagaaaggcttaaaggttattaatacacctgcagcaagtagcgctagtgttgccgagttggtctttgcgcacctatatggtggtgtgagattcttgtatgatagtaatcgtaatatgccattagaaggtgatactaattttaaaggattgaaaaagcaatatgcaaaaggatctgaacttagaggaaaaactttaggtattataggaataggtagaataggtcaagaagttgctaaaattgcagctggtgtaggaatgaatgtactagcacatgatgcatttgcgagcactgctcctactatttcttgggatttatttgatggacaaacggttactgttgaaattccattagttagtaaagaggatttactttcaaaatctgattttgtgagtttacatgtacctgcacaaaaagactatgtcattagcgagcacgagttcaatcaaatgaaaaaaggcgctgcaattatcaatgctgctcgtggtggtgttattgatgaagtagcccttgttaacgcactcgaatctgagcatatctcatttgcggcacttgatacctttgaaaaagaaccacagcctgaaatggtcttacttatgaattcaaatctatctttaagtccgcacatcggtgcagcgactaatgaggcacaagatcgtataggaactgaacttgctgatcagattattgagataatgggctag

SEQ ID NO: 82341 - protein, 319 aa, Flavobacteria bacterium BBFL7
MSKKVLANDGVSQSGIDKLTAAGYEVITTNVAQAQLENYINKNDISVLLVRSATTARQDLIDNCPGLKIIGRGGVGMDNIDVEYAREKGLKVINTPAASSASVAELVFAHLYGGVRFLYDSNRNMPLEGDTNFKGLKKQYAKGSELRGKTLGIIGIGRIGQEVAKIAAGVGMNVLAHDAFASTAPTISWDLFDGQTVTVEIPLVSKEDLLSKSDFVSLHVPAQKDYVISEHEFNQMKKGAAIINAARGGVIDEVALVNALESEHISFAALDTFEKEPQPEMVLLMNSNLSLSPHIGAATNEAQDRIGTELADQIIEIMG

SEQ ID NO: 82342 - DNA, 1230 bp, Oceanobacter sp. RED65; identical to SEQ ID NO: 64727
  CDS (1)..(1230): transl_table=11

SEQ ID NO: 82343 - protein, 409 aa, Oceanobacter sp. RED65; identical to SEQ ID NO: 64728

SEQ ID NO: 82344 - DNA, 1587 bp, Synechococcus sp. RS9916
  CDS (1)..(1587): transl_table=11
atgacaaaagttctggtttccgaccccattgatcaggccggcatcgacatcctgagccaggtggcccaggtcgatcagcgcaccggtctcagcccagaagagctgaaatcgatcatcggtgaatacgacgccttgatgatccgctccggcacgcaagtgaccgccgatgtgatcgcggccgccgacaagctccgcatcgtggggcgggccggagtcggcgtcgacaacgtggacgtccccgctgcgacgcagcgaggcgtgcttgtggtgaattccccagagggcaacaccattgcggcggctgagcatgcccttgctttgctgctctccctctcccgccatgtcccccaggcccatgcctccatgcgtgagggcgcctgggatcgcaagaaatacgtcggaaacgagctttataaaaaggttttaggggtggtcggcctcggcaagatcggctcccatgtggccaaggtggccaaggccatgggcatggaggtcatcgcctatgacccgtttgtctcgcttgagcgcgcccagcaaatgcaggtgcgcctcacccagctgccggatctgttcagctcagcggactacatcacgctgcatatcccccgcactcccgacaccgaaaacctggtgaatgctgagctgctgcgcagcatgaaatccacggcgcgtctggtgaactgtgcccggggcggaatcatcgatgaagcggccctggctgaagcgatcgaaaacggggtgatcgccggtgctggtgtggatgtgtttgccagcgagcctctggcggaagattccccgctgcggaaggtgcaacggggcctcgtgctcacgccgcacctaggcgcttccaccgaagaagcccaagagaatgtcgccaccgatgtggcggagcagattcgcgacgtgttgttggggctgccggcccgcagtgcggtcaacatcccaggcctcagtgccgagatcatggagcgcttgaagccccatctgcagctcgcggaaacgttgggtctgctgatcagccaattggccggcggtcaggtggaggagcttgaagtgcgtcttcagggtgaattctccgagcatccctcccagcctctggtgatcgcagcgctgaagggtttgctgtccaatgcgctcggggaacggatcaactatgtgaacgcagcccttgaggccaaagcccgcggcattcacgtcttggaagtgaaggatgaggcaagccgcgatttcgctggtggttcgcttcagctcaccacacgtgggtcccagggggggcacagtgtcaccggtgcggtgtttgccgatggtgagctgcgggtcaccacgattgatgaattcccagtgaatgtgccgcccagccgtcacatgctcttcacccgtcaccgggatatgccgggaatcattggtcagttggggtctgtgctcggcgagcacaatgtcaatatcgcctcgatgcaggtgggacgccggatcgtgcgtggtgatgcggtgatggtgctgagcatcgacgatccgattcctcccaccttgttggccaacatcaatgccattgacggcattcaggaagcccaccctgtgactctctga

SEQ ID NO: 82345 - protein, 528 aa, Synechococcus sp. RS9916
MTKVLVSDPIDQAGIDILSQVAQVDQRTGLSPEELKSIIGEYDALMIRSGTQVTADVIAAADKLRIVGRAGVGVDNVDVPAATQRGVLVVNSPEGNTIAAAEHALALLLSLSRHVPQAHASMREGAWDRKKYVGNELYKKVLGVVGLGKIGSHVAKVAKAMGMEVIAYDPFVSLERAQQMQVRLTQLPDLFSSADYITLHIPRTPDTENLVNAELLRSMKSTARLVNCARGGIIDEAALAEAIENGVIAGAGVDVFASEPLAEDSPLRKVQRGLVLTPHLGASTEEAQENVATDVAEQIRDVLLGLPARSAVNIPGLSAEIMERLKPHLQLAETLGLLISQLAGGQVEELEVRLQGEFSEHPSQPLVIAALKGLLSNALGERINYVNAALEAKARGIHVLEVKDEASRDFAGGSLQLTTRGSQGGHSVTGAVFADGELRVTTIDEFPVNVPPSRHMLFTRHRDMPGIIGQLGSVLGEHNVNIASMQVGRRIVRGDAVMVLSIDDPIPPTLLANINAIDGIQEAHPVTL

SEQ ID NO: 82346 - DNA, 1233 bp, Vibrio sp. Ex25; identical to SEQ ID NO: 64729
  CDS (1)..(1233): transl_table=11

SEQ ID NO: 82347 - protein, 410 aa, Vibrio sp. Ex25; identical to SEQ ID NO: 64730

SEQ ID NO: 82348 - DNA, 1230 bp, Alteromonadales bacterium TW-7; identical to SEQ ID NO: 64731
  CDS (1)..(1230): transl_table=11

SEQ ID NO: 82349 - protein, 409 aa, Alteromonadales bacterium TW-7; identical to SEQ ID NO: 64732

SEQ ID NO: 82350 - DNA, 1230 bp, marine gamma proteobacterium HTCC2143; identical to SEQ ID NO: 64733
  CDS (1)..(1230): transl_table=11

SEQ ID NO: 82351 - protein, 409 aa, marine gamma proteobacterium HTCC2143; identical to SEQ ID NO: 64734

SEQ ID NO: 82352 - DNA, 1584 bp, Candidatus Desulfococcus oleovorans Hxd3
  CDS (1)..(1584): transl_table=11
atgaaggtcctggtgagtgacaaactgggagaggcaggcattgaactgtttaaaaatgagcccggcattgaggtggacgtaaaaaccgacctgacgccagaagctctcattcagcagatcgggacttacgacgccctgataatccgcagcgccaccaaggtgaccgccgaggtcattacggcggccaccaacctcaaggtgatcggccgggccggcatcggcctggacaacgtcaacgtgccggccgccacccagaagggcatcgtggtaatgaacacgcccacgggcaacaccatcaccaccgccgaacacgccattgccatgatgatggctctgtcccgcaacattccccaggccaccatctccctgaaggccggccggtgggaaaagaaaaaacttcagggccaggagatgatgaacaaaaccctgggcctgctgggcttcggcaagatcggttccatcgtggcggaccgggcacggggcctgcgcatgaacgtgatcgtgttcgaccccaacgtgaacccggaaaaaattcaggaagccggttacgaaagcgtctccctggatgaactgtatgcccggtccgactacatcaccattcatgtacccaaaatggaaaaaaccatcggcctgctcaatgccgacgccttttccaggatgaaggacgggatcatgatcatcaactgcgcccggggcggcatcatcgacgaagcagccctctacgatgccttacaatcgggaaaggtggcgggcgcggccctggacgtgtttgccaaggagccgcccggtgaacatcccctgctgacctgcgaaaacgtgatctgcacgccccacctgggcgcctccacccaggaggcccagaccaacgtagccgtggacgtggcccggcagatcatcgcttatctgaaagagggaaccatcatcaacgcggtcaacacgccctcggtgaccggtgaccgcctggcccggctcaaaccctacctggaactgggccgaaagctggggctgctgctggcccagattcatcgcggcaaactgcaggaagtagccattgaatacagtggcgagtaccacgacctggagctggggcccatttccacggccctgatcaacgggctgctggagcctctggtgcgtgagggcgtcaacgcggtcaacgccccggccattgcccaggagatgggcatcaaggtgacggaaaccctgcgggccgagccttttgactacctcaacctgatgacggtgcgggtgaccaccacagagcagaccgacacggtatccggcaccctgttcggtaaaatctatccccgtatcgtggagatcaacgatttccgcgtggatgtcagcccggaaggccacatgctgatcattctcagcgagaacaagccgggcgtgatcggcagaatcggcaccaccttcggcgaagggggcgtcaacatcgttcgctttatggtgggcaatgaagcgattgagggccagaagaacatggtgatcatcaaaaccgacgagccggtgcccgccgatatccttgagacgctgaagagcaaaaaagtcatctttgaggccacatcggtcaacttttaa

SEQ ID NO: 82353 - protein, 527 aa, Candidatus Desulfococcus oleovorans Hxd3
MKVLVSDKLGEAGIELFKNEPGIEVDVKTDLTPEALIQQIGTYDALIIRSATKVTAEVITAATNLKVIGRAGIGLDNVNVPAATQKGIVVMNTPTGNTITTAEHAIAMMMALSRNIPQATISLKAGRWEKKKLQGQEMMNKTLGLLGFGKIGSIVADRARGLRMNVIVFDPNVNPEKIQEAGYESVSLDELYARSDYITIHVPKMEKTIGLLNADAFSRMKDGIMIINCARGGIIDEAALYDALQSGKVAGAALDVFAKEPPGEHPLLTCENVICTPHLGASTQEAQTNVAVDVARQIIAYLKEGTIINAVNTPSVTGDRLARLKPYLELGRKLGLLLAQIHRGKLQEVAIEYSGEYHDLELGPISTALINGLLEPLVREGVNAVNAPAIAQEMGIKVTETLRAEPFDYLNLMTVRVTTTEQTDTVSGTLFGKIYPRIVEINDFRVDVSPEGHMLIILSENKPGVIGRIGTTFGEGGVNIVRFMVGNEAIEGQKNMVIIKTDEPVPADILETLKSKKVIFEATSVNF

SEQ ID NO: 82354 - DNA, 1599 bp, Candidatus Desulfococcus oleovorans Hxd3
  CDS (1)..(1599): transl_table=11
atgacgatgaaagtgcttgtatccgacaccattgacgcgtccggcgtatcccgcctggagaacgaatccggctttgccgttgacgttaaaaccgggcttcccccggaggaactgaaatccattattggacagtacgacgccctgatcattcgcagcgccaccaaggtgaccgccgatattctcgaagcgggtgccccgaagctcaaggccgtggcccgggccggcatcggcctggacaacgtggatattcccgcggctaccaagcacggcgtggccgtgatgaacacgccggaaggcaacgtggtgacaacggcggagcacaccattgccatgatgatggccctgacccgcaacattccccaggggaccctctccctgcggtccggccagtgggaaaagaaaaaactccagggccgggaggtgttcaacaagaccctgggcgtgatcggtttcggcaaaatcggttccatcgtggccgaccgggcccgccagctcaagatgaacgttattgtctttgaccccaacatcgcccggaccaccattgaaaatgaagggttcgagtatgtctctttagacgacctttttgcccgggccgactacatcaccgtccatgtacccaagctcaagcagaccgtggggcttttaaacaaggccgcctttgaaaagatgaaaaccggcgtgatggttctcaactgcgcccggggcggcattgtggatgaggccgacctgtacgacgccctgatgtcgggcagggtggcggccgcggccctggacgtgtttgtgacagaaccgcccggtgagcaccccctgctcaagctggacaacgtgatcgccacgccccatctgggcgcctctaccaaggaggcccaggtcaacgtggccgaggccgcggcccaccagatcattgagttcctcaaaaacaacacggtgatcaacgccgtcaacctgccggccgtgtccggcgacctgctggaaaaactgtcgcccttcactaccctggccgaccgcatgggccgcctgctggcccaattttcaggggccaacatcaccgaaatcaagattgaatacaacggtgactttcagggcctggacctggcgccggtcaccaccgccgcggtcaagggcctgctcacgcccctggtggcctaccaggtcaactcggtaaacgccgcctccctggccggagagatgggcattgccatcaccacccgcagcgaaacccttcccatcgactacaccagcctgatcaccatcagcgtgacctccggcgccggcacccacaccgtggccggcaccatctttggcaaaaaggaggcgcgggtggtccggatcaacgacttccggctggagatgattcctacaaaaggccattttgccatcattcacaacctggacaagcccggcgccatcggcagcatcggcaccaccctgggcaccttcggcgtcaacatcgagcgcatgcaggtgggccagcagggcgacaccctgcgcaacatcatcttcctgagaaccggatcgcgcattcccgacgatgccctggcggccgtaaaagagctgcccctggtcaaggatgtgacggtttttgagcttgacgaatag

SEQ ID NO: 82355 - protein, 532 aa, Candidatus Desulfococcus oleovorans Hxd3
MTMKVLVSDTIDASGVSRLENESGFAVDVKTGLPPEELKSIIGQYDALIIRSATKVTADILEAGAPKLKAVARAGIGLDNVDIPAATKHGVAVMNTPEGNVVTTAEHTIAMMMALTRNIPQGTLSLRSGQWEKKKLQGREVFNKTLGVIGFGKIGSIVADRARQLKMNVIVFDPNIARTTIENEGFEYVSLDDLFARADYITVHVPKLKQTVGLLNKAAFEKMKTGVMVLNCARGGIVDEADLYDALMSGRVAAAALDVFVTEPPGEHPLLKLDNVIATPHLGASTKEAQVNVAEAAAHQIIEFLKNNTVINAVNLPAVSGDLLEKLSPFTTLADRMGRLLAQFSGANITEIKIEYNGDFQGLDLAPVTTAAVKGLLTPLVAYQVNSVNAASLAGEMGIAITTRSETLPIDYTSLITISVTSGAGTHTVAGTIFGKKEARVVRINDFRLEMIPTKGHFAIIHNLDKPGAIGSIGTTLGTFGVNIERMQVGQQGDTLRNIIFLRTGSRIPDDALAAVKELPLVKDVTVFELDE

SEQ ID NO: 82356 - DNA, 1230 bp, Pseudomonas putida GB-1; identical to SEQ ID NO: 64735
  CDS (1)..(1230): transl_table=11

SEQ ID NO: 82357 - protein, 409 aa, Pseudomonas putida GB-1; identical to SEQ ID NO: 64736

SEQ ID NO: 82358 - DNA, 1230 bp, Marinobacter sp. ELB17
  CDS (1)..(1230): transl_table=11
atgtccaatacgtctctgcaaaaaagaaaaattcgaattctgttgctggaaggcgtgcaccagtctgcactcgattctctgcacgccgccggttacaccaacattgagtccctgtcgcactcgttggctgaagacgagctgatcaagaaaattgccgacgcgcattttgtcggccttcggtcgcgcacacagctgacagaggccgtattcgaagcggccaagaaattggtggcggtgggttgcttctgtattggcaccaaccaagtagacctgcaggctgccacgcgccgcggtgtggcggtgtttaatgcgcccttctccaacactcgctcagtagccgagctggtgttggcgcaagccattttgttgctgcgcggcgtgccggaaaagaacgccaaggcccaccgtggcgagtggattaagtcggccaaaaacagctatgaaatccgcggcaagaagctgggcattattggctatggcaacattggtacccagttcagtgtgctggccgaaggcttgggcatggaagtgtacttttacgatgtggtatccaaactctccatcggtaacgccacgcaagtgggttccatgcaggaactgctaaacctgtgtgatgtggtgagcctgcacgtaccggagaccgcagccaccaaatacatgttcaaagccgagcagctcgcgcaaatgaagccgggttctattctgatgaacgcctcgcgcggcaccgtggtcgatattgaggccctggctgactccttgcgcagcggaaagttgctgggcgctgccgttgacgttttcccggttgaaccaaaatccaacagcgaagagtttgtctcaccgctgcgcgaattcgataacgtcatcctgaccccacacgtgggtggctccaccatcgaagcccaggaaaatatcggccgtgaagtcgctgaaaaactgtccatgtacagcgacaacggtacatctgtatcgtcagtgaacttccccgaagtggccctgccctcgcacccgaaccagcatcggctgctgcacattcacgaaaacgtgccgggcgtgatgtcagagatcaaccaagtcttttccgctaacggtatcaacgtctgcggtcagtacctgcaaaccaaggacgacattggctacgtggtaatcgacgtcgacaaggcctacggtgagctggcgctggaaaaattgctggaagtgaaaggcaccattcgctgccgcgtgctgttttaa

SEQ ID NO: 82359 - protein, 409 aa, Marinobacter sp. ELB17
MSNTSLQKRKIRILLLEGVHQSALDSLHAAGYTNIESLSHSLAEDELIKKIADAHFVGLRSRTQLTEAVFEAAKKLVAVGCFCIGTNQVDLQAATRRGVAVFNAPFSNTRSVAELVLAQAILLLRGVPEKNAKAHRGEWIKSAKNSYEIRGKKLGIIGYGNIGTQFSVLAEGLGMEVYFYDVVSKLSIGNATQVGSMQELLNLCDVVSLHVPETAATKYMFKAEQLAQMKPGSILMNASRGTVVDIEALADSLRSGKLLGAAVDVFPVEPKSNSEEFVSPLREFDNVILTPHVGGSTIEAQENIGREVAEKLSMYSDNGTSVSSVNFPEVALPSHPNQHRLLHIHENVPGVMSEINQVFSANGINVCGQYLQTKDDIGYVVIDVDKAYGELALEKLLEVKGTIRCRVLF

SEQ ID NO: 82360 - DNA, 1410 bp, Saccharomyces cerevisiae
  CDS (1)..(1410)
atgtcttattcagctgccgataatttacaagattcattccaacgtgccatgaacttttctggctctcctggtgcagtctcaacctcaccaactcagtcatttatgaacacactacctcgtcgtgtaagcattacaaagcaaccaaaggctttaaaacctttttctactggtgacatgaaaattctactgttggaaaatgtcaatgcaactgcaatcaaaatcttcaaggatcagggttaccaagtagagttccacaagtcttctctacctgaggatgaattgattgaaaaaatcaaagacgtacacgctatcggtataagatccaaaactagattgactgaaaaaatactacagcatgccaggaatctagtttgtattggttgtttttgcataggtaccaatcaagtagacctaaaatatgccgctagtaaaggtattgctgttttcaattcgccattctccaattcaagatccgtagcagaattggtaattggtgagatcattagtttagcaagacaattaggtgatagatccattgaactgcatacaggtacatggaataaagtcgctgctaggtgttgggaagtaagaggaaaaactctcggtattattgggtatggtcacattggttcgcaattatcagttcttgcagaagctatgggcctgcatgtgctatactatgatatcgtgacaattatggccttaggtactgccagacaagtttctacattagatgaattgttgaataaatctgattttgtaacactacatgtaccagctactccagaaactgaaaaaatgttatctgctccacaattcgctgctatgaaggacggggcttatgttattaatgcctcaagaggtactgtcgtggacattccatctctgatccaagccgtcaaggccaacaaaattgcaggtgctgctttagatgtttatccacatgaaccagctaagaacggtgaaggttcatttaacgatgaacttaacagctggacttctgagttggtttcattaccaaatataatcctgacaccacatattggtggctctacagaagaagctcaaagttcaatcggtattgaggtggctactgcattgtccaaatacatcaatgaaggtaactctgtcggttctgtgaacttcccagaagtcagtttgaagtctttggactacgatcaagagaacacagtacgtgtcttgtatattcatcgtaacgttcctggtgttttgaagaccgttaatgatatcttatccgatcataatatcgagaaacagttttctgattctcacggcgagatcgcttatctaatggcagacatctcttctgttaatcaaagtgaaatcaaggatatatatgaaaagttgaaccaaacttctgccaaagtttccatcaggttattatactaa

SEQ ID NO: 82361 - protein, 469 aa, Saccharomyces cerevisiae; identical to SEQ ID NO: 64738

SEQ ID NO: 82362 - DNA, 1239 bp, Rhizobium meliloti
  CDS (1)..(1239): transl_table=11
atgactcgtcaactctccctcccacgcgaccgaatttccctacttctgctagaagggatcagccagaccgccgtggattatttcttgtcgaccggctacaccaaccttattcatctgccgaaggcgctcgatgacaaggatctcaaaagccatatcgccgatgctcacattatcggtattcgttcccggacacagctgacggaagagattttcgagtccgccaagaagctgatcgccgttggctgcttttccgtcggtacgaaccaggtcgacttggacgcggcgcggcggcgcggcattccggtgttcaacgcaccttattcgaatacacggtcagtggcggaactggtgattggcgagatcatcatgctgacacggcaaatcttcccgcgttcggcttccgcgcatcaaggtgggtgggagaagtccgctgtcggcagccgcgaagtccgcggcaaaacgctcggcattgtcggctacggcaatattggatcgcagctcagcgcgctcgccgaaagcatgggcatggtagtacgttatttcgatctttccgacaggttgcggcggggcaattcggaatcgatggttacgctcggtgagctcctcgagatttcagattatgtgacgatgcatgtgcccgaaacgccttcgacgcataacatgatcaccgaaactgagctccgccgcatgaagaagggagccatcttcatcaacaattcccgtggcacggtggtcgatctcgatgcgctggcgaaagtcctgaacgaaggccatcttgcgggcgccgccgtcgacgtgttccccaaagagccggcatcgaacaacgagcgttttgtgacgccgttgcagggcttgagcaatgtcatcctgacgccgcatatcggcggttcaacggaggaagcgcaggagcgcattggcggagaagtctctagaaagctggtcgaatattccgacatcggatcgaccattggcgccgtcaactttcctcaggttcagttgcccgagcgcccgaacggcactcgtttcatccacgtgcatgaaaaccgccctggcatgctcatccaacttaacgagatcttctcgtcgcgcgggctgaacatcgtcgcggagttccttcaaacccatggcgatacgggttatgtggtggtcgaggccgaagggatttccgctaatgctgacgagattcttcagtcactacgcaaaattccgggaacgatacgcacgcgattggtctactga

SEQ ID NO: 82363 - protein, 412 aa, Rhizobium meliloti
MTRQLSLPRDRISLLLLEGISQTAVDYFLSTGYTNLIHLPKALDDKDLKSHIADAHIIGIRSRTQLTEEIFESAKKLIAVGCFSVGTNQVDLDAARRRGIPVFNAPYSNTRSVAELVIGEIIMLTRQIFPRSASAHQGGWEKSAVGSREVRGKTLGIVGYGNIGSQLSALAESMGMVVRYFDLSDRLRRGNSESMVTLGELLEISDYVTMHVPETPSTHNMITETELRRMKKGAIFINNSRGTVVDLDALAKVLNEGHLAGAAVDVFPKEPASNNERFVTPLQGLSNVILTPHIGGSTEEAQERIGGEVSRKLVEYSDIGSTIGAVNFPQVQLPERPNGTRFIHVHENRPGMLIQLNEIFSSRGLNIVAEFLQTHGDTGYVVVEAEGISANADEILQSLRKIPGTIRTRLVY

SEQ ID NO: 82364 - DNA, 1578 bp, Magnetospirillum gryphiswaldense
  CDS (1)..(1578): transl_table=11
atgcccaaggttctgattagcgacaggttcagccaggctgcccagcaggccttcatcctgcgcggcatcgaagtggacgtgcgtcccggcctgtccaccgacgagttgaaggcgatcatcggcgggtacgacggtttggcggtgcgttccggcaccaaggtcagcgccgatttgctggctgccgccacccgcctgaaggtgatcggtcgtgccggtatcggcaccgagaacatcgatctggccgccgccaccgaccaaggggtggtggtgatgaacacgccgttcggcaattcggtgaccaccgccgaacacgccatcgccctgatgttttccctggctcggcaaatccccgccgccaatgcctcgacccatctgggcaagtgggagaaatcccgcttcatgggggtcgagctgaccggcaagaccctgggcatcatcggcagcggcaatatcggtgccgtcgtcgccgaccgcgccttgggcctgaacatgcgcgtggtcgccttcgaccccttcttgtcggaagagcgggccaaggacatgtgcatcgaaaaggtcgatctgccgaccctgttcgctcgggccgatttcatcagcctgcacacgcccctgaccgaagccacccgtaatctgatctgcaccgattccatcgccttgatgaaggatggggtgcgcatcatcaactgcgcgcgcggcggcttgatcaacgaagccgatttgcgcgccgccatcgtctcgggcaaggtggcgggggcagcgctagacgtctatcagaccgaaccggccacggaaaactgcctgttcgggctggagcaggtggtgtgcaccccgcatctgggcgcctccaccgccgaggcccaggaaaaccaggccttgcaggtggccgagcagatgtccgacttcctgctgtcgggcatcgtcgccaacgccctcaacatggtgccggtatcggccgaggacgcgcccaagctcaagccctacatgaagctggccggccagttgggcagcttcgccgggcaattgaccgagcacgccatcaaggcggtccggatcgaatacgaaggccatgtggccggcctcaataccaagccgctcaccgctattgtgctggaaagcctgctcaggccgatgatggtgtcggtcaacatggtcaacgcccccctggtggccaaggcccgcggcatcgaggtgtccgaggtgacctgtgagcgcaagggggattacaacaccttgctgcgggtcatcgtcaccaccgagcaacgcacccgcgaagtggccggcaccttgttcggcggcgacaagccgcgcgtggtcgccatcaagggtattcccatcgaggcggaactgggcagccacatgctgtatgtcaccaaccaggacaagcccggcttcatcggcgccctgggcagtctgctgggggccaggggggtcaatatcgccaccttccatctgggccggtcggaagctggcggcgacgccatcttgctgacccaggtggatcaacccttgaccgatgccatcctggacgaggtgaaggcgttgccccatgtggttcaggccaaggccctgaatttctga

SEQ ID NO: 82365 - protein, 525 aa, Magnetospirillum gryphiswaldense
MPKVLISDRFSQAAQQAFILRGIEVDVRPGLSTDELKAIIGGYDGLAVRSGTKVSADLLAAATRLKVIGRAGIGTENIDLAAATDQGVVVMNTPFGNSVTTAEHAIALMFSLARQIPAANASTHLGKWEKSRFMGVELTGKTLGIIGSGNIGAVVADRALGLNMRVVAFDPFLSEERAKDMCIEKVDLPTLFARADFISLHTPLTEATRNLICTDSIALMKDGVRIINCARGGLINEADLRAAIVSGKVAGAALDVYQTEPATENCLFGLEQVVCTPHLGASTAEAQENQALQVAEQMSDFLLSGIVANALNMVPVSAEDAPKLKPYMKLAGQLGSFAGQLTEHAIKAVRIEYEGHVAGLNTKPLTAIVLESLLRPMMVSVNMVNAPLVAKARGIEVSEVTCERKGDYNTLLRVIVTTEQRTREVAGTLFGGDKPRVVAIKGIPIEAELGSHMLYVTNQDKPGFIGALGSLLGARGVNIATFHLGRSEAGGDAILLTQVDQPLTDAILDEVKALPHVVQAKALNF

SEQ ID NO: 82366 - DNA, 1200 bp, Bordetella pertussis; identical to SEQ ID NO: 64741
  CDS (1)..(1200): transl_table=11

SEQ ID NO: 82367 - protein, 399 aa, Bordetella pertussis; identical to SEQ ID NO: 64742

SEQ ID NO: 82368 - DNA, 1842 bp, Oryza sativa
  CDS (1)..(1842)
atggcggcgccgtcccagaccaccgccaccaccacccaccaccgcgtcctcctcccgtcccaccaccaccaccgagcggtgcctccctcgctcctccgcctcccgctccgcgccgcgcgccggggccgcctctccgccgccgccgcggccgcggcgcccgccgcgtcgaccgcggcgccgtcggagcccgccgcgggtgccgtaccggggaagccgacggtgctcgtggccgagaagctcggcgccgcggggctcgagctgctccgggggttcgccaacgtggactgctcctacggcctctcccccgaggagctccgcgccaagatcccgctctgcgacgcgctcatcgtgcggtcggggaccaaggtggggcgcgacgtgttcgaggcatccgggggaaggctccgcgtcgtggggcgcgccggggtcgggatcgacaacgtcgatctcgccgccgccaccgagcacgggtgcctcgtcgtcaacgcgcccacggcgaacaccgtcgccgcggccgagcacggcatcgcgctgctcaccgctatgtccaggaacatcgcccaggccgacgcgtcgctcaaggctggtaaatggcagcgcaacaagtatgtgggtgtatctctcgttggtaaaactcttgcaattcttggatttggaaaggttgggtcagaagtcgctcgtcgtgctaaaggtttgggaatgcatgtgattgcacacgatccatatgcttctgctgatcgtgcccatgcaattggagttgagctagtgagcatggaagacgctttgacaactgctgactttatctcgttgcatatgcctcttacccctgcaacaaacaagatgctcaatgatgaaactttcgctaagatgaagaagggtgttagaattataaatgttgcgcgtggtggtgtaattgatgaagatgctctagtcagggctcttgattcaggaatagttgcacaggctgctcttgatgtgttcactaaagagccaccggcaccagacagcaaattagtgctgcatgagaatgttactgtaacaccacaccttggtgccagcacagttgaagcacaggaaggagtggctattgaaatagctgaagctgttattggagctctgaaaggggaacttgcagcttcagcagtcaacgcaccaatggttcctgctgaggtgctgtcagagcttgcaccttatgttgtgctcgcagagaagcttgggcgcctggctgtgcagctagtggctggtggcggtggtatcaagtccgtgaaagtgacctatgcttctgcaagggctcctgatgatcttgacacgagacttcttcgtgcaatgatcaccaaggggttgatcgaaccaatctccagtgttttcgtcaatctggtcaatgctgacttcactgcgaaacagaggggagttcgtatcactgaggagagaatcttgttggatggctcacccgagacacctattgactacatccaagttcatattgcccatgttgagtccaaatttcccagtgcaatatcggagagtggagagatcactgttgaggggaaggtgaaagatggcatcccccatctgacaaaggttggatcattccaggttgatgtaagcttggaaggaagcctgatcctttgcaggcaggtcgatcaacctggtatgatcggcgcagtaggaagtgtccttggtgaggagaatgttaatgtcagtttcatgagtgttggaagaatcgctcctcgcaagcatgccgtcatggcgattggtgttgatgaggaacctaaaaagagcacactgacaaagattggggagattccggcgattgaagaattcgttttcctcaagctctag

SEQ ID NO: 82369 - protein, 613 aa, Oryza sativa
MAAPSQTTATTTHHRVLLPSHHHHRAVPPSLLRLPLRAARRGRLSAAAAAAAPAASTAAPSEPAAGAVPGKPTVLVAEKLGAAGLELLRGFANVDCSYGLSPEELRAKIPLCDALIVRSGTKVGRDVFEASGGRLRVVGRAGVGIDNVDLAAATEHGCLVVNAPTANTVAAAEHGIALLTAMSRNIAQADASLKAGKWQRNKYVGVSLVGKTLAILGFGKVGSEVARRAKGLGMHVIAHDPYASADRAHAIGVELVSMEDALTTADFISLHMPLTPATNKMLNDETFAKMKKGVRIINVARGGVIDEDALVRALDSGIVAQAALDVFTKEPPAPDSKLVLHENVTVTPHLGASTVEAQEGVAIEIAEAVIGALKGELAASAVNAPMVPAEVLSELAPYVVLAEKLGRLAVQLVAGGGGIKSVKVTYASARAPDDLDTRLLRAMITKGLIEPISSVFVNLVNADFTAKQRGVRITEERILLDGSPETPIDYIQVHIAHVESKFPSAISESGEITVEGKVKDGIPHLTKVGSFQVDVSLEGSLILCRQVDQPGMIGAVGSVLGEENVNVSFMSVGRIAPRKHAVMAIGVDEEPKKSTLTKIGEIPAIEEFVFLKL

SEQ ID NO: 82370 - DNA, 1602 bp, Mesorhizobium ciceri
  CDS (1)..(1602): transl_table=11
atggcgccccgcgttctcgtctcagacaaactctcccccaccgccgtgcaaatcttcaaggatcgtggcgtcgaggtcgactatctgcccgatctcggcaaggacaaggataagctcgccgaagtgatcggccagtatgatggcctcgccatccgctcggcgaccaaggtcaccgaaaagctgatcaacgccgctaccaatctcaaagtcatcggccgcgccggcatcggcgtcgacaatgtcgatatcccggcggcaagccgcaagggcatcatcgtgatgaacacgcccttcggcaactcgatcaccacagccgaacatgcggtggcgatgatctttgcgctggcgcgccagatccctgaagccaacgcctcgacccatgccggcaaatgggaaaagaaccgcttcatgggcgtcgagatcaccggcaagacgctgggcgtcatcggctgcggcaacatcggttcgatcgtcgcgacgcgcggcgttggcctcaagatgcacgtcatcgccttcgatccgttcctgtcggacagccgtgccgaggagcttggcgtcgacaaggtcgagctcgacgagctgttcgcccgcgccgatttcatcaccctgcacacgccgctgaccgacaagacgcgcaacatcatcgatgccgcggcgatcgccaagatgaagaagggcgtgcgcatcatcaattgcgcacgcggcggtctgatcgtcgaggccgatctggtcgcagcgctgaagagtggcaaggtggccggcgctggcgtcgacgtcttcgaggtcgaaccggccgagaacaacgaactgttcggcatggagaatgtggtggcgacgccgcatctcggcgcctcgacgacggaggcccaggagaatgtcgcgctgcaggttgccgagcagatggccgactatctgatcaagggcgccgtctccaacgccatcaacatgccgtcgatcaccgccgaggaggcgccgcggctgaagccgttcgtcaagctcgccgaggtgctcggcgcctttgtcggccaggtcaccgaggatccgatcaaggaggtggagatcctgttcgacggctcgaccgcgacgatgaacacgcgcgcgctgatcagtgcagcactcgccgggctgatccggcctcaggtctcggacgtcaacatggtgtcggcgccgatcatggtgaaggagcgcggcatcatcgtggccgaggtcaagcgcgacaagtcgggcgtgttcgacggctatatcaagctgacggtgaagaccgagcacatgacgcgctcgatcgccggcacatgcttctcggatggcaagccacgcttcatccagatcaagggcatcaacctcgatgccgaggtcggccagcacatgctctacaccaccaatgcggacgcgccgggcatcatcggcctgctcggcaccgtctgcggcgagaatggcgtcaacatcgccaacttccagctcggccgcaaccggccgggcggcgatgccatagcgctgctctatctcgacgcgccgttcccggaagccgtgctggaaaaggtcaaggcgcacaagtcgatcgactcggccaagcggctgcagttcgacgtcaacgcgatgtga

SEQ ID NO: 82371 - protein, 533 aa, Mesorhizobium ciceri
MAPRVLVSDKLSPTAVQIFKDRGVEVDYLPDLGKDKDKLAEVIGQYDGLAIRSATKVTEKLINAATNLKVIGRAGIGVDNVDIPAASRKGIIVMNTPFGNSITTAEHAVAMIFALARQIPEANASTHAGKWEKNRFMGVEITGKTLGVIGCGNIGSIVATRGVGLKMHVIAFDPFLSDSRAEELGVDKVELDELFARADFITLHTPLTDKTRNIIDAAAIAKMKKGVRIINCARGGLIVEADLVAALKSGKVAGAGVDVFEVEPAENNELFGMENVVATPHLGASTTEAQENVALQVAEQMADYLIKGAVSNAINMPSITAEEAPRLKPFVKLAEVLGAFVGQVTEDPIKEVEILFDGSTATMNTRALISAALAGLIRPQVSDVNMVSAPIMVKERGIIVAEVKRDKSGVFDGYIKLTVKTEHMTRSIAGTCFSDGKPRFIQIKGINLDAEVGQHMLYTTNADAPGIIGLLGTVCGENGVNIANFQLGRNRPGGDAIALLYLDAPFPEAVLEKVKAHKSIDSAKRLQFDVNAM

SEQ ID NO: 82372 - DNA, 975 bp, Aspergillus oryzae
  CDS (1)..(975)
atggcccccggaatcacggaaccctcatcctcagcaggtccttcgaccgctgaaagcaagcctaccgtctatgttcttgacaccttccctcccaaggccatcgagtacgccaagactctgttcaacattatccaacctcaggatgaagaattcaagaactggcggcaaaatgcccgagcgctgctaattcgaggctcatatgttacggctgatgacatcgcgagctgcccgaatttaatcgccatcggcaagcatggcgtgggaattgacaagatcaatcaggatgcctgcgcacagaggggtatcaagatcctcaacacccccggtgccaatgcgcgggacgttgccgagctggtcgttgcactggccttgtcggttgctcggggaattcggtccatcacaacccggcaaatgttgaagcccgtaccgaaggagacctgcaatggattgactctgtatcagaagacgatcggcatcattggtatggggaatatcggacgtacagtggcggaaatattccgcggtggcttcgacgccaacattgttgcttatgacgcctacatgcccgaggatgtgtggtcccatatcccacataccagggcaaagagtgtcgatgaggtgcttgtccaggcagacgtgctctctgtccacgtccccctcaccgcagagacccgagacatgatttcctatgagcaaattcgcgcaatgaagcccgacgcaattctgatcaatgctgctcgtggtggtattatcaacgaggccgacctcaccaaggcgttatcggaagggtatctttggggtgcagggttggattgtcatgagcaagagccaccgagccatgagaagtatgaggccctctggaagaatttgaacgttattagcacaccacacattggcgctgccacctcaagggcgcaactggccagtgctacagcagcggtggataacctgtaccaatatctctcgaaactgtga

SEQ ID NO: 82373 - protein, 324 aa, Aspergillus oryzae
MAPGITEPSSSAGPSTAESKPTVYVLDTFPPKAIEYAKTLFNIIQPQDEEFKNWRQNARALLIRGSYVTADDIASCPNLIAIGKHGVGIDKINQDACAQRGIKILNTPGANARDVAELVVALALSVARGIRSITTRQMLKPVPKETCNGLTLYQKTIGIIGMGNIGRTVAEIFRGGFDANIVAYDAYMPEDVWSHIPHTRAKSVDEVLVQADVLSVHVPLTAETRDMISYEQIRAMKPDAILINAARGGIINEADLTKALSEGYLWGAGLDCHEQEPPSHEKYEALWKNLNVISTPHIGAATSRAQLASATAAVDNLYQYLSKL

SEQ ID NO: 82374 - DNA, 1488 bp, Xanthomonas oryzae pv
  CDS (1)..(1488): transl_table=11
atggcgtgttgcaacgaaaggatgcggggatcggtcatggcacgcgacgctgcagtagggaccgcacagcgtgccagcgacagcctgccccgtctagccggcgcactcacagccgacgcagcgttggattcagctgaaaccgttgcgccgcaagggctttgccggtgcgaacacagcgttgcggccacccaatcgcacaccccatctggcatagttgccgacccgatcgcagcgttgcattgccccatgtcgccgaagagaacctcgtttcccaagcaggacatccgcgtactgttgctggaaggcatcagcccaaccgccgtggatgtgttccgcgccgctggctactcgcagatcgaactgcacgccaaatcgctgccggaagacgagttgatcgcccgcatcgccgacgcgcatatcgtgggcatccgctcgcgcacccagttgagcgccgaggtgctggcgcacgccaagcgcctgatcgcggtgggctgcttctgcatcggcaccaaccaggtggatctggatgcggccgaagtcgccggcattccggtgttcaacgcaccctactccaatacccgcagcgtggccgaactggtcatcgccgaagcgatcctgctgctgcgtggtatcccgcaaaagaatgccgaatgccaccgcggcggttggtccaaatcggccgcgggcagccatgaaacgcgcggcaaagtgctgggcatcgttggctacggccatatcggcacccaggtgggcgtgctggccgaatcgttgggcatgcaagtgatattccacgacatcgaaaccaagctgtcgctcggcaacgcgcgcgcggcgatcgatctggacgacctgctggcacgcgcggacgtggtgaccttgcacgtaccggaaacgccgtccaccaaggacatgatcggcgctgcagagatcgcccgcatgaagcacggcgcgcacctgatcaacgcctcgcgcggcaccgttatcgacatcgacgcactggatgcagcgctcacctccggccagatcggcggcgcagcggtggacgtgttcccgatcgagccaaagggcaatggcgatgcattcgcatcgccgctcaccgcgcacgacaacgtcatcctgaccccgcacgtgggcggcagcacgctggaagcgcaggacaatatcggcatcgaagtggcggccaaactggtgcgctacagcgacaacggcagcaccttgtcggcggtgaacttccccgaggtcaccctgcccgagcaccccgacagcctgcgtctgctgcacatccatcgcaacgtgcctggcgtgctatcgcagatcaacgaactgttctcgcgccacaacctcaacatcgacggccagtttttgcgcaccgaccccaaggtgggctacgtggtgatcgacgtcagcgccagcgaggaacttgcggcaatactgaaagacgggctggctcagatcaccggcacgttgcggacgcgggtgctttattga

SEQ ID NO: 82375 - protein, 495 aa, Xanthomonas oryzae pv
MACCNERMRGSVMARDAAVGTAQRASDSLPRLAGALTADAALDSAETVAPQGLCRCEHSVAATQSHTPSGIVADPIAALHCPMSPKRTSFPKQDIRVLLLEGISPTAVDVFRAAGYSQIELHAKSLPEDELIARIADAHIVGIRSRTQLSAEVLAHAKRLIAVGCFCIGTNQVDLDAAEVAGIPVFNAPYSNTRSVAELVIAEAILLLRGIPQKNAECHRGGWSKSAAGSHETRGKVLGIVGYGHIGTQVGVLAESLGMQVIFHDIETKLSLGNARAAIDLDDLLARADVVTLHVPETPSTKDMIGAAEIARMKHGAHLINASRGTVIDIDALDAALTSGQIGGAAVDVFPIEPKGNGDAFASPLTAHDNVILTPHVGGSTLEAQDNIGIEVAAKLVRYSDNGSTLSAVNFPEVTLPEHPDSLRLLHIHRNVPGVLSQINELFSRHNLNIDGQFLRTDPKVGYVVIDVSASEELAAILKDGLAQITGTLRTRVLY

SEQ ID NO: 82376 - DNA, 1878 bp, Oryza sativa subsp
  CDS (1)..(1878)
atggcgttggcgccgccgctctgccacctactcgccgcaccgccgccgtccacgtccgccgcagccgacgcggctcacgaccacgcgggagccctggccccacaccgccgcgcctccccgctccgccgccgcggccgcctcttcctcgcctgcagggtccccgctgctgcgccctccgcccgtggggtcgcggcggaggcggcggcgggaaggccgacggtgcttgtgacggagaagctgggcgacgcggggctggagctgctgcggaggttcgcgaacgtggactgcgcgtacgagctcacggcggaggagctccgcgccaaggtgtcgctcgtggacgcgctcgtggtgcgcagcgccacgcgggtgacgcgggaggtgttcgaggccgcgcgcggccgcctccgcgtcgtcggccgcgccggggtcggcatcgacaacgtcgacctccaggccgccaccgaggccgggtgcctcgtcgtcaacgcccccaccgccaacaccgtcgccgccgccgagcacgccatcgccctcctcgccgccatggcgcgcaatgtcgcccaggccgacgcctccctcaaggccgaatcatgtttctctttggttctatgcacatactcaggcaaatggcaacgtaacaaatatgttggtgtttctttggtgggaaagacgctagctattatgggctttgggaaggttggctcagaagtagcacgacgcgcgaaaggacttggaatggatatcatttctcatgatccctatgctcctgttgatagagcccgggcaattggtgtagaccttgtatcgtttgatgaggccatctccactgcagacttcatatcactgcatatgccacttacaccatcaacagcaaagcttttcgatgatgaaacttttgcaaacatgaaaaaaggtgtgaggattattaacgttgcaaggggtggggtagttgatgaagacgcgttgctgagagcactcgataatggaacagtttcacaggcagcacttgatgtattcactgaggagccaccaccaaaagacagcaagttagtacaccatgaacatgtgactgtcactccacaccttggagctagtacatcagaagcacaggaaggtgtagcccttgaaattgcagaggctgttcttggagcactgaaaggggaattagctgctactgctgttaatgccccgatggtccctgctgaggttttatcggagttatctccgtatgttatccttgctgagaaactaggtcggcttgtcgtgcaacttgtagctgggggaagtgggattaagggagtgaagattggatattcatcatctcgagaccctgatgatctggacacaagggtactccgtgctatggtcaccaaaggcatcatcgagcccatttcaagtgcatttgttaacattgtcaatgctgactatgtggccaagcaaagaggccttcgcatcagcgaagagagaatcctccttgatggatcaccggagattcctatagattctatccaggtgcatctcgccaatgtagagtccaagttcgccggtgccctctctgacgaaggtgacatcagagtggagggagaggtgaaggatgggaaaccacatctcacacttgttgggccattcagtgtggatgttagtcttgagggcaacctaatactctgccgtcaagttgatcagccaggtatcattggaaaggtaggatcaattttggggaagatgaatgtgaatgtgaatttcatgagcgttggaaggactgctcctggaaagcaggcgataatggccattggggttgatgaggagcctgagaaggaagctctcaagttgatcggcgacataccatcagttgaggagtttgtctttattaagctttag

SEQ ID NO: 82377 - protein, 625 aa, Oryza sativa subsp
MALAPPLCHLLAAPPPSTSAAADAAHDHAGALAPHRRASPLRRRGRLFLACRVPAAAPSARGVAAEAAAGRPTVLVTEKLGDAGLELLRRFANVDCAYELTAEELRAKVSLVDALVVRSATRVTREVFEAARGRLRVVGRAGVGIDNVDLQAATEAGCLVVNAPTANTVAAAEHAIALLAAMARNVAQADASLKAESCFSLVLCTYSGKWQRNKYVGVSLVGKTLAIMGFGKVGSEVARRAKGLGMDIISHDPYAPVDRARAIGVDLVSFDEAISTADFISLHMPLTPSTAKLFDDETFANMKKGVRIINVARGGVVDEDALLRALDNGTVSQAALDVFTEEPPPKDSKLVHHEHVTVTPHLGASTSEAQEGVALEIAEAVLGALKGELAATAVNAPMVPAEVLSELSPYVILAEKLGRLVVQLVAGGSGIKGVKIGYSSSRDPDDLDTRVLRAMVTKGIIEPISSAFVNIVNADYVAKQRGLRISEERILLDGSPEIPIDSIQVHLANVESKFAGALSDEGDIRVEGEVKDGKPHLTLVGPFSVDVSLEGNLILCRQVDQPGIIGKVGSILGKMNVNVNFMSVGRTAPGKQAIMAIGVDEEPEKEALKLIGDIPSVEEFVFIKL

SEQ ID NO: 82378 - DNA, 1590 bp, Alvinella pompejana epibiont 7G3
  CDS (1)..(1590): transl_table=11
atgtctaaatttacagttgtagtgtgtgaccatatccatcagagtggattagatattctatcaaatgagccaaaaataaatctaatagttgcagctgatgagccaaaggataaattagtaaaagacattatacctcaagcaaatgtagctataactcgctcatctaccgatgtagatgaattttttttagaacatgcaaaagagttaaaagcgatagttagagcaggggttggtgtagataatgtagatatagatgggtgtagtaaaagaggaattgtcgttatgaatgtcccaacggcaaatacaattgcagctgtagagcttactatggctcatatgctctcttgcgttagaaaattcccatacgcccataataatctaaagcaagatagaatctggagaagacaagattggtatggcacagagttaaaaaataaaaagcttggaattattgggtttggaaatatcggttcaagagttggaataagagcaaaagcttttgagatggatgttatagcatacgacccatatatagatccaaaaagggcaacagacctagatattacctatacaaaaaattttgatgatatactatcttgtgatattattacaattcataccccaaagactaaagagacaattggaatggttggggaaaaagagatagaaaaaatgagagatggggtaattttaataaactgtgctagagggggtctatatgatgaaaaagctctatataatggtttaaaatctggaaaaattgccatggcaggtatagatgtttttgaaaaagagcctgcaacaaataaccctcttttagacttagataatataacagtcacccctcatcttggagcaaatacaaaagagtcacaaagaaacattgcagttcaatctgcagagagtgcaattttaagtgccaaagggatatcatatccaaatgcactcaatcttcctataaaagagaatgatattccagatagtataaaaccttattttgagctaatacagaaaatgggcaatattttagctcaagctactagagaaaaagttgaaaaaataaaggttatcacagaaggagaggtatccaaatatatagacagtattaccacatttggggttgtgggaatattaaaagagtctttagaggatggagttaattatgtaaatgccgaatttatagcaaaagaggttggcattacaatagaaaaggaaaaaagtcttaaaaattctgggttagccaatagagttacagttattctaacaaccacaaatcagacagttcaaattagtggaacaatatttggagaaaatacccaaagaattatagagataaatggatataaacttgacctagagccaaaagggaagatgatactctttagaaatacagatgtgcctggtgtaattggggatgttggtagaattattgcaagttataatgtcaatatctccgattttagattaggtagagactccaattctcaagcgttagctgttgttaaagttgatgataatgtaaataaatctctgctacaagagctatcatctcttgagacatgtattagtgtagcttatgtagttatataa

SEQ ID NO: 82379 - protein, 529 aa, Alvinella pompejana epibiont 7G3
MSKFTVVVCDHIHQSGLDILSNEPKINLIVAADEPKDKLVKDIIPQANVAITRSSTDVDEFFLEHAKELKAIVRAGVGVDNVDIDGCSKRGIVVMNVPTANTIAAVELTMAHMLSCVRKFPYAHNNLKQDRIWRRQDWYGTELKNKKLGIIGFGNIGSRVGIRAKAFEMDVIAYDPYIDPKRATDLDITYTKNFDDILSCDIITIHTPKTKETIGMVGEKEIEKMRDGVILINCARGGLYDEKALYNGLKSGKIAMAGIDVFEKEPATNNPLLDLDNITVTPHLGANTKESQRNIAVQSAESAILSAKGISYPNALNLPIKENDIPDSIKPYFELIQKMGNILAQATREKVEKIKVITEGEVSKYIDSITTFGVVGILKESLEDGVNYVNAEFIAKEVGITIEKEKSLKNSGLANRVTVILTTTNQTVQISGTIFGENTQRIIEINGYKLDLEPKGKMILFRNTDVPGVIGDVGRIIASYNVNISDFRLGRDSNSQALAVVKVDDNVNKSLLQELSSLETCISVAYVVI

SEQ ID NO: 82380 - DNA, 1866 bp, Oryza sativa subsp
  CDS (1)..(1866)
atggcaaccgccgccgccgcctcacgcgccgccctctcaaggcctcacgccgccgccgccgcggcgcgcgcgagccccgccgcgggggcgcgggtgacgctcccgcggcgccgaagcgtccgatccgcggtgatctcgtcgtcggcgtccgcggcggcggtggcggcgtcggagccggcggcggggagggtgacgctgggcgcggggacggacggggcgctgtggccgaagccggcggtgctggtggcggagaagctgagcgaggccgggctggcggtgctgcgcgggttcgcggacgtggagtgcgcgtacgggatgtcccccgcggagctcctcgccaaggtggcgcagttcgacgcgctcatcgtgcgcagcggcaccaaggtgacgagggaggtgctggaggccgggcgcgggcggctgcgcgtggtgggccgcgccggcgtcgggatcgacaacgtcgacctccaggccgccaccgaggccggctgcctcgtcgtcaacgcccccaccgccaacaccgtcgccgccgccgagcacggcatcgcgctcctcgcctccatggcgcgcaacgtctcccaggccgacgccgccctcaaggccgggaaatggcaaagaaccaagtacgttggagtttctctggtcgggaagacacttgcggtaatgggctttggcaaggttggttcagaggtagccaggcgggcgaaagggctcggtatgcatgtgattgctcatgatccgtacgcccctgccgatagggctcgtgccattggagctgaactggtctctttcgatgaggccattggcagagccgacttcatctcccttcacatgcctctcaccccagcaacatccaaggtcttcaacgacgaatccttttctaggatgaagaatggagttcggatcatcaatgtggccaggggtggagtgatcgacgaagatgctcttgtcagagcccttgactctggcaaagttgctcaggcagcccttgatgtcttcactgaggagcccccagccaaggacagcaagctagtcctccatgagaatgttactgttacaccccatcttggagcaagtacagtggaggcccaggagggcgtcgctatcgagatagccgaagctgtcgtcggtgcactgagaggtgagctcgcagcaacagccgtgaatgctcccatggtcccagctgaggtcatgtcagagcttgccccgtatgtttcactggcagagaagctgggcaagctggcggtgcagctcgtcgcaggcgagagcggcggcatcaagggcgtcaaggtggtgtacaccacggcccgtggcccggacgacctcgacacgaggctcctccgcgccatggtgaccaagggcatcgtggagcccgtgtcgagcacgttcgtcaacctggtgaacgccgactacacggcgaagcagcgcggcctgcgcatcaccgaggagcgggtctcccacgagagccccgccgcggaggcgccgctggagtccatccaggtgaggctctcacacgtccagtccaagttcgccggcgccatcagcgacggcggcgacatcgtcctcgaggggagggtcaagtacggcgtgccgcacctcaccgtcgtcgggccctacgaggtggacgtcagcctggagggcaacctgatcctgtgccggcagatcgaccagcccggcatgatcggcaaggtcggcaacatcctcggccagacgaacgtcaacatcagcttcatgagcgtcggccggaccttccgcggcaagcaggccatcatggccatcggcgtcgacgaggagcccgacaaggagaccctcgagcacatcggccacatcccggcgatcgaggagttcgtcttcctcgagctatga

SEQ ID NO: 82381 - protein, 621 aa, Oryza sativa subsp
MATAAAASRAALSRPHAAAAAARASPAAGARVTLPRRRSVRSAVISSSASAAAVAASEPAAGRVTLGAGTDGALWPKPAVLVAEKLSEAGLAVLRGFADVECAYGMSPAELLAKVAQFDALIVRSGTKVTREVLEAGRGRLRVVGRAGVGIDNVDLQAATEAGCLVVNAPTANTVAAAEHGIALLASMARNVSQADAALKAGKWQRTKYVGVSLVGKTLAVMGFGKVGSEVARRAKGLGMHVIAHDPYAPADRARAIGAELVSFDEAIGRADFISLHMPLTPATSKVFNDESFSRMKNGVRIINVARGGVIDEDALVRALDSGKVAQAALDVFTEEPPAKDSKLVLHENVTVTPHLGASTVEAQEGVAIEIAEAVVGALRGELAATAVNAPMVPAEVMSELAPYVSLAEKLGKLAVQLVAGESGGIKGVKVVYTTARGPDDLDTRLLRAMVTKGIVEPVSSTFVNLVNADYTAKQRGLRITEERVSHESPAAEAPLESIQVRLSHVQSKFAGAISDGGDIVLEGRVKYGVPHLTVVGPYEVDVSLEGNLILCRQIDQPGMIGKVGNILGQTNVNISFMSVGRTFRGKQAIMAIGVDEEPDKETLEHIGHIPAIEEFVFLEL

SEQ ID NO: 82382 - DNA, 1014 bp, Microcystis aeruginosa
  CDS (1)..(1014): transl_table=11
atgactactacttcaccaaaaactctgactatggatattcaaaaacccagggttcttttaatcggaaaaatgtatgatgaagcggggcaaaaacttcttgaagaatctactaatatagaaattttgtccaaccctacactggaggaaattaatgaggccattcaagaagtatctggcgtatttgtgcgttatcctaataagttagaggcttcatcaatccgattagcaaaacaattaaaagtaattagtacctctggatttggcacagattctattgatattatggcagcaacagaacagggggttatcgttgttaataatcccggaatgtcaactacatctgtagcagaacacaccttatctatgattttagcccttgctaaaaagctcccttttttagatcattgtgtgaaaaagggtaactatttaattcgcaatcagatgcaaccgattcaactcgaaaacaagacccttggtattgtaggtttaggaagaattggtactctggtggctcacaaatgtaacctagcactggggatgagagtattagcttatgatccctatgttccagccagcaaagcggagacagtaggagcaacttgggtcaaagatttagatgttcttctggctgaatcggactttgtttctttgcatactgaactaacaagtgaaacgcgggaaatgtttaatatatcagtttttaaaaagatgaaaccaacagcttttttaattaatacctcccggggaaaagtcgtttgtgaaaaggatttagggatcgcccttaatcaaaaattgatagctggatgcgccctcgatgtctttgaaccagaaccgccggctttagataatcctttatataattttgagaatgtcattctctcacctcatttagccggagtaacccctgaagcgagtctagcggctgctgtttcggcggcgaatcaaatattacaagtgcttcagggagagaagcctccttatatgattaatccagaggtgtggaatcttttttaa

SEQ ID NO: 82383 - protein, 337 aa, Microcystis aeruginosa
MTTTSPKTLTMDIQKPRVLLIGKMYDEAGQKLLEESTNIEILSNPTLEEINEAIQEVSGVFVRYPNKLEASSIRLAKQLKVISTSGFGTDSIDIMAATEQGVIVVNNPGMSTTSVAEHTLSMILALAKKLPFLDHCVKKGNYLIRNQMQPIQLENKTLGIVGLGRIGTLVAHKCNLALGMRVLAYDPYVPASKAETVGATWVKDLDVLLAESDFVSLHTELTSETREMFNISVFKKMKPTAFLINTSRGKVVCEKDLGIALNQKLIAGCALDVFEPEPPALDNPLYNFENVILSPHLAGVTPEASLAAAVSAANQILQVLQGEKPPYMINPEVWNLF

SEQ ID NO: 82384 - DNA, 1410 bp, Saccharomyces cerevisiae; identical to SEQ ID NO: 64563
  CDS (1)..(1410)

SEQ ID NO: 82385 - protein, 469 aa, Saccharomyces cerevisiae; identical to SEQ ID NO: 64564

SEQ ID NO: 82386 - DNA, 1875 bp, Arabidopsis thaliana; identical to SEQ ID NO: 64747
  CDS (1)..(1875)

SEQ ID NO: 82387 - protein, 624 aa, Arabidopsis thaliana; identical to SEQ ID NO: 64748

SEQ ID NO: 82388 - DNA, 1584 bp, Archaeoglobus fulgidus; identical to SEQ ID NO: 64749
  CDS (1)..(1584): transl_table=11

SEQ ID NO: 82389 - protein, 527 aa, Archaeoglobus fulgidus; identical to SEQ ID NO: 64750

SEQ ID NO: 82390 - DNA, 1575 bp, Methanococcus jannaschii
  CDS (1)..(1575): transl_table=11
atggttaagatattagttacagacccattgcatgaagatgcaataaagatattagaggaagttggagaggttgaagtagctactggattaacaaaagaagaattgttagaaaaaattaaagatgcagatgttttagttgttagaagtgggacaaaggtcacaagggatgttattgagaaggctgaaaaattaaaggttattggtagagctggagttggagtggataacatagacgttgaagcagcaacagaaaaagggattatagtagttaatgcccctgatgcttcatcaatctctgtagctgagctaactatgggattaatgcttgctgctgcaagaaacattcctcaagcaacagcatcattaaaaagaggagaatgggatagaaagagatttaaaggtattgaattgtatggaaaaacacttggagttattggtttgggaaggataggacagcaagttgttaagagagctaaggcatttggaatgaacataattggttacgacccttacatcccaaaggaagttgctgaaagtatgggagttgagttggttgatgatataaatgagctatgtaagagggctgattttataactctgcatgttccattaacaccaaaaacaagacatattattggtagagaacaaatagccctaatgaaaaagaatgccataattgttaattgtgcaagaggaggacttattgatgaaaaggctttatatgaagcattaaaagagggtaaaattagagcagcagccttggatgtgtttgaggaagagccacctaaggacaatccattattaacgttagataatgttataggaactccacaccaaggagcttcaactgaagaggcacagaaagcagctggaactattgtggcagagcagataaagaaggttttgagaggagagttagctgaaaatgttgtaaatatgcccaatattccccaagaaaagttaggaaaactaaaaccatacatgttgttggcagagatgcttggaaacattgttatgcaggtattagatggttctgttaatagggttgaacttatatattcaggagaattagccaaagaaaaaactgatttaataaaaagagctttcttaaaagggcttttgtcaccaatattattggctggaatcaatttggttaatgcccctattatagcaaaaaatagaaatatcaatgtggttgaaagctcaacctctgaagagaaatatggaaatgctataaaaataactgctgaaagtgataagaaaaaattctcaatagttggggcaataataaacaataaaccagttatcttagaagttgatggatatgaagttagcttcattccagagggagttttagcaattattaaacatattgatagacctggcacaattggtagggtgtgcataacattgggtgattatggaataaatattgcaagtatgcaagtaggaagaaaagagcctggaggagaaagtgtaatgctattaaacttagaccatacagtccctgaggaagttattgaaaaaataaaagagattccaaatattaaagatgttgctgtgataaatttataa

SEQ ID NO: 82391 - protein, 524 aa, Methanococcus jannaschii
MVKILVTDPLHEDAIKILEEVGEVEVATGLTKEELLEKIKDADVLVVRSGTKVTRDVIEKAEKLKVIGRAGVGVDNIDVEAATEKGIIVVNAPDASSISVAELTMGLMLAAARNIPQATASLKRGEWDRKRFKGIELYGKTLGVIGLGRIGQQVVKRAKAFGMNIIGYDPYIPKEVAESMGVELVDDINELCKRADFITLHVPLTPKTRHIIGREQIALMKKNAIIVNCARGGLIDEKALYEALKEGKIRAAALDVFEEEPPKDNPLLTLDNVIGTPHQGASTEEAQKAAGTIVAEQIKKVLRGELAENVVNMPNIPQEKLGKLKPYMLLAEMLGNIVMQVLDGSVNRVELIYSGELAKEKTDLIKRAFLKGLLSPILLAGINLVNAPIIAKNRNINVVESSTSEEKYGNAIKITAESDKKKFSIVGAIINNKPVILEVDGYEVSFIPEGVLAIIKHIDRPGTIGRVCITLGDYGINIASMQVGRKEPGGESVMLLNLDHTVPEEVIEKIKEIPNIKDVAVINL

SEQ ID NO: 82392 - DNA, 1578 bp, Methanobacterium thermoautotrophicum; identical to SEQ ID NO: 64751
  CDS (1)..(1578): transl_table=11

SEQ ID NO: 82393 - protein, 525 aa, Methanobacterium thermoautotrophicum; identical to SEQ ID NO: 64752

SEQ ID NO: 82394 - DNA, 1587 bp, Mycobacterium bovis
  CDS (1)..(1587): transl_table=11
gtgagcctgcctgttgtgttgatcgccgacaaacttgccccatcaacggttgccgccttgggagatcaggtcgaggtgcgctgggttgacggtccggaccgagacaagctgctggccgcggtgcccgaagcggacgcgctgctggtgcgatcggccaccacggttgacgccgaggtgctggccgccgcccccaagctcaagatcgtcgcgcgcgccggcgtcgggctggacaacgtcgacgtggacgccgcgacggcccgcggcgtgctggtggtcaacgccccgacgtcgaacatccacagcgccgcggagcatgcgctggcgctgctgctggccgcctcacgccagattccggcggccgacgcgtcgctgcgcgagcacacctggaagcgttcgtcgttttccggtaccgagatcttcggcaaaaccgtcggcgtggtgggtctgggccgcatcgggcagttggtcgcccagcggatcgctgcgttcggcgcttacgtcgtcgcctatgacccgtacgtttcgccggcccgtgcggcgcagctgggcatcgaactgctgtccctggacgacctgctggcccgcgccgatttcatctcggtgcacctaccgaaaacaccggagacggcgggactgatcgacaaggaggcgctggcgaagaccaagccgggcgtcatcatcgtcaacgccgcgcgcggcggcctggtggacgaggcggcactggccgacgcgatcaccggcggccacgtgcgggcggccggtctggacgtgttcgccaccgaaccgtgcaccgacagcccgctgttcgagctggcacaggtggtggtcacaccgcatctgggtgcgtccaccgcggaggcgcaggaccgggcgggcaccgacgtcgccgagagcgtgcggctggccctggcaggggaattcgtgcccgacgcggtcaacgtcggcggcggagtggtcaacgaggaggtggcgccctggctggatctggtgcgtaagctcggcgtgctggcgggtgtgttgtccgacgaactgccggtgtcgttgtcggtgcaggtgcgcggtgagctggccgccgaagaggttgaggtgctgcgcctttcggcgctgcgcggcctgttctcggcggtgatcgaggatgcggtgacatttgtcaacgcaccggcattggccgccgaacgtggcgtcaccgccgagatctgtaaggcctcggaaagccccaaccaccgcagcgtcgtcgacgttcgcgcggtcggcgcggacggttcggtggtgaccgtctcgggcacgctgtatggcccacagctgtcgcagaagatcgtgcagatcaacggccgccactttgatctgcgcgcccaggggatcaacctgatcatccactacgtcgaccggccgggagcgctgggcaagatcggcacgttgctggggacggccggggtgaatatccaggccgcgcagctctccgaagacgccgaaggcccgggcgcgacgattctgctgcggctggaccaagacgtgcccgacgacgtgcggacggcgatcgcggcggcggtggacgcctacaagctcgaggttgtcgatctgtcgtga

SEQ ID NO: 82395 - protein, 528 aa, Mycobacterium bovis
MSLPVVLIADKLAPSTVAALGDQVEVRWVDGPDRDKLLAAVPEADALLVRSATTVDAEVLAAAPKLKIVARAGVGLDNVDVDAATARGVLVVNAPTSNIHSAAEHALALLLAASRQIPAADASLREHTWKRSSFSGTEIFGKTVGVVGLGRIGQLVAQRIAAFGAYVVAYDPYVSPARAAQLGIELLSLDDLLARADFISVHLPKTPETAGLIDKEALAKTKPGVIIVNAARGGLVDEAALADAITGGHVRAAGLDVFATEPCTDSPLFELAQVVVTPHLGASTAEAQDRAGTDVAESVRLALAGEFVPDAVNVGGGVVNEEVAPWLDLVRKLGVLAGVLSDELPVSLSVQVRGELAAEEVEVLRLSALRGLFSAVIEDAVTFVNAPALAAERGVTAEICKASESPNHRSVVDVRAVGADGSVVTVSGTLYGPQLSQKIVQINGRHFDLRAQGINLIIHYVDRPGALGKIGTLLGTAGVNIQAAQLSEDAEGPGATILLRLDQDVPDDVRTAIAAAVDAYKLEVVDLS

SEQ ID NO: 82396 - DNA, 1587 bp, Mycobacterium leprae
  CDS (1)..(1587): transl_table=11
gtggacctgcctgttgtgttaattgccgacaaactcgcccaatcaaccgtggctgccctgggagaccaagtcgaggtgcggtgggtggacggtccagaccggacgaagctgttagctgcagtacccgaggccgacgcgttgttggtgcggtcggccactactgtcgacgccgaggtgctggcagccgctcctaagctcaagatcgtcgcccgtgccggggtagggctagacaacgttgatgtcgatgccgccaccgcgcgcggtgtcctggtagtcaacgccccaacgtcgaacattcacagcgccgctgagcacgcgttggcgctgctattggcagcttctcggcagatcgcggaggccgacgcctcactgcgtgcacacatctggaaacggtcgtcgttctccggcaccgaaattttcggcaagaccgtcggcgtggtggggctgggtcggattgggcagttggttgccgcacggatagcagcgttcggggctcacgttatcgcttacgacccgtatgtggcgccggcacgggccgcgcagcttggtatcgagctgatgtcttttgacgatctcctagcccgggccgattttatctcagtgcatttgccgaagacgcccgagacggcgggcctgatcgacaaggaggcgctggccaaaaccaagcccggtgtcatcattgtcaatgccgcacgcggcggcttagtggacgaggtggcgctagccgatgcggtgcgcagcggacatgttcgggcggccggtctagatgtgtttgccaccgaaccgtgcaccgatagcccgctgtttgaactatcgcaggtggtggtgacaccgcatctgggggcgtctaccgccgaagcccaggatcgagcaggtactgatgtggccgaaagcgtgcggctggcgctggcgggggagtttgtgcctgacgcggtcaacgtggacgggggcgtggtcaacgaagaggtggctccctggctggacttggtgtgcaagcttggggtgctggtagccgcgttatccgatgaactgccggcgtcgttgtcggtgcacgtgcgtggcgagttggcttctgaagacgttgaaatattgcggctttcggccctacgtgggcttttctcgacggtcatagaggatgctgtgacgttcgtcaacgcaccggcactggccgccgaacgaggtgtgtccgctgaaatcactacgggctcggagagccccaaccatcgcagtgtggtcgacgtgcgggcggtcgcctccgacggctcggtggtcaacatagccggtacgttgtctgggccgcaactggtgcagaagatcgtgcaggtcaatggtcgtaactttgatttgcgtgcgcagggcatgaacttggtgatcaggtatgtcgaccaacctggcgctctgggcaagattggcactttgctgggcgcggccggggtgaatatccaagctgctcagctgtctgaggacaccgaggggccaggtgcgacgattctgttgaggctggatcaagacgtgccgggtgatgtgcggtcggcgatcgtggcagcggtgagtgccaacaagcttgaggtagtcaatctgtcatga

SEQ ID NO: 82397 - protein, 528 aa, Mycobacterium leprae
MDLPVVLIADKLAQSTVAALGDQVEVRWVDGPDRTKLLAAVPEADALLVRSATTVDAEVLAAAPKLKIVARAGVGLDNVDVDAATARGVLVVNAPTSNIHSAAEHALALLLAASRQIAEADASLRAHIWKRSSFSGTEIFGKTVGVVGLGRIGQLVAARIAAFGAHVIAYDPYVAPARAAQLGIELMSFDDLLARADFISVHLPKTPETAGLIDKEALAKTKPGVIIVNAARGGLVDEVALADAVRSGHVRAAGLDVFATEPCTDSPLFELSQVVVTPHLGASTAEAQDRAGTDVAESVRLALAGEFVPDAVNVDGGVVNEEVAPWLDLVCKLGVLVAALSDELPASLSVHVRGELASEDVEILRLSALRGLFSTVIEDAVTFVNAPALAAERGVSAEITTGSESPNHRSVVDVRAVASDGSVVNIAGTLSGPQLVQKIVQVNGRNFDLRAQGMNLVIRYVDQPGALGKIGTLLGAAGVNIQAAQLSEDTEGPGATILLRLDQDVPGDVRSAIVAAVSANKLEVVNLS

SEQ ID NO: 82398 - DNA, 1401 bp, Schizosaccharomyces pombe; identical to SEQ ID NO: 64753
  CDS (1)..(1401)

SEQ ID NO: 82399 - protein, 466 aa, Schizosaccharomyces pombe; identical to SEQ ID NO: 64754

SEQ ID NO: 82400 - DNA, 1665 bp, Synechocystis sp; identical to SEQ ID NO: 64755
  CDS (1)..(1665): transl_table=11

SEQ ID NO: 82401 - protein, 554 aa, Synechocystis sp; identical to SEQ ID NO: 64756

SEQ ID NO: 82402 - DNA, 1410 bp, Saccharomyces cerevisiae; identical to SEQ ID NO: 64757
  CDS (1)..(1410)

SEQ ID NO: 82403 - protein, 469 aa, Saccharomyces cerevisiae; identical to SEQ ID NO: 64758

SEQ ID NO: 82404 - DNA, 1803 bp, Brassica napus; identical to SEQ ID NO: 64759
  CDS (1)..(1803)

SEQ ID NO: 82405 - protein, 600 aa, Brassica napus; identical to SEQ ID NO: 64760

SEQ ID NO: 82406 - DNA, 1785 bp, Glycine max
  CDS (1)..(1785)
atggccaccgccacatcccaaacccttcgattccaatctccgtcactctctctctcctccaaaatccctctctccgcattctccgtctcgctccgcccgcaacgccgcgcctcccgccacctcgtgctggtcgtctccgccggcctcgacgcaaagcccacggtgctcgtcgcggagaagctcggcgacgcggggctgaagctgctcaaggacttcgccaacgtcgactgctcctacaacctcagcaccgaggagctctgcaccaagatctcgctctgcgacgccctcatcgtgcgcagcggcaccaaggtctcgcgcgaggtcttcgagtcctctgccggcaggttgaaggtcgtcggaagagccggcgtcggaatcgataatgtggatctggctgccgccaccgagcacgggtgcttggtcgtcaatgcgcccaccgccaacaccgtcgccgccgctgagcacggaatcgcgctccttgcagccatggccaggaacgtcgctcaggccgatgcgtccgtcaaagccgggaaatggcagaggaataaatatgttggagtttccttggttgggaaaacacttgcggtgttgggatttgggaaggttggttctgaagttgctcgtcgtgccaagggacttggtatgaatgtcattgcgcatgacccgtatgctcctgcagaccgtgctagggccattggtgtggagcttgtgaactttgatgaggccattgccactgcggatttcatctctctacatatgcctcttacggctgctacatcaaagatactcaatgacgagacatttgccaagatgaagaaaggagttcgcatagtcaatgttgctcgtggaggggtcattgatgaggatgcgcttgttagggcactggattctggaattgtagctcaggcggctcttgatgttttcactgaggagccaccacccaaagacagcaagttgattctgcatgagctcgttactgcaacacctcatcttggtgccagtaccatggaagctcaagaaggtgtggctattgaaatagcagaagctgttgttggggcattgaaaggggagcttgctgctactgcagtcaatgcaccaatggttccctcagaggtgttaacagaattgaaaccattcattgatcttgcagagaaattgggtaggctagctgtccagctggtagcaggaggaagcggtgtgaaaacagtgaaggtcacttatgccacctctaggggccctgatgatctggacactcgtcttctccgtgccatgataaccaagggtctgattgagcccatatctagtgtttttgtgaacttggttaatgctgatttcactgccaagcaaagagggatcaggataactgaggagaaggttattcttgatggttcacctgagaatccactggaattcgttcaggtgcagattgctaatgtggaatctcgatttgctagtgccatatcagattctggggagattaaagttgagggtcgggtgaaagatggcatcccccatctaacaaaggttgggtcttttgatgttgatgtgagtttggaaggtagtatcatactgtgtaggcaggtagatcaaccaggcatgatcggaaaggttgggagcgttttgggtgaggagaacgtgaatgtcagcttcatgagtgtgggaaggatcgctccacgcaagcaagctgttatggcaattggagtggacgaacaacctagcaaggaatctttgaagaagattggagacattcctgctgtggaagagttcgttttccttaaattgtaa

SEQ ID NO: 82407 - protein, 594 aa, Glycine max
MATATSQTLRFQSPSLSLSSKIPLSAFSVSLRPQRRASRHLVLVVSAGLDAKPTVLVAEKLGDAGLKLLKDFANVDCSYNLSTEELCTKISLCDALIVRSGTKVSREVFESSAGRLKVVGRAGVGIDNVDLAAATEHGCLVVNAPTANTVAAAEHGIALLAAMARNVAQADASVKAGKWQRNKYVGVSLVGKTLAVLGFGKVGSEVARRAKGLGMNVIAHDPYAPADRARAIGVELVNFDEAIATADFISLHMPLTAATSKILNDETFAKMKKGVRIVNVARGGVIDEDALVRALDSGIVAQAALDVFTEEPPPKDSKLILHELVTATPHLGASTMEAQEGVAIEIAEAVVGALKGELAATAVNAPMVPSEVLTELKPFIDLAEKLGRLAVQLVAGGSGVKTVKVTYATSRGPDDLDTRLLRAMITKGLIEPISSVFVNLVNADFTAKQRGIRITEEKVILDGSPENPLEFVQVQIANVESRFASAISDSGEIKVEGRVKDGIPHLTKVGSFDVDVSLEGSIILCRQVDQPGMIGKVGSVLGEENVNVSFMSVGRIAPRKQAVMAIGVDEQPSKESLKKIGDIPAVEEFVFLKL

SEQ ID NO: 82408 - DNA, 1818 bp, Triticum aestivum; identical to SEQ ID NO: 64761
  CDS (1)..(1818)

SEQ ID NO: 82409 - protein, 605 aa, Triticum aestivum; identical to SEQ ID NO: 64762

SEQ ID NO: 82410 - DNA, 1158 bp, Zea mays
  CDS (1)..(1158)
atggccatgaggggagcggcgcagcaggtggcacggttcgccatggggccacacgtccctcacgttattgcgcccgctgagaggagccttcatgcgtccgccgggagcaagaagatcgtgggcgtgttctacaagggcggcgagtacgccgacaggaaccccagcttcgtcggctgcgccgagcacgccctcggcatccgcggctggctcgagtcgcagggccaccagtacgtcgtcaccgacgacaaggacggccccaactgcgagctggagaagcacatcgcggacgcgcacgtgctcatcaccacgccgttccacccggcgtacgtgaccgcggaccgcatcgcgcgggccaagaacctggagctgctcctcacggcggggatcggctccgaccacgtggacctggccgccgccgccgccgcggggctcaccgtcgccgaggtcacgggcagcaacacggtgtcggtggcggaggaccagctcatgcgcgtcctcgtcctcacgcgcaacttcctgccgggccaccgccaggccgtcggcgtggggtgggacgtggccgccgtcgcgcaccgggcgtacgacctggagggcaagacggtgggcaccgtcggcgccggccggatcggccgcctgctgctgcagcgcctcaagcccttcaactgcaggctgctctaccacgacaggctccgcatagacccggcgctggaagcggagatcggcgcccagttcgaggcggacctcgacgccatgctgcccaagtgcgacgtcgtcgtgatcaacatgccgctcaccgagaaaacaagaggcatgttcgacaaggagaggatcgcgaggatgaagaaaggcgtgatcatcgtgaacaacgctcgaggcgcgatcatggacacgcaagccgtggcggacgcttgcgccaccggacacatcgcgggatacggcggcgatgtgtggcaccctcagcctgcgcccaaggaccacccgtggcgctacatgcccaacaacgccatgacccctcacatctccggcaccaccattgatggccagttgaggtatgcggccggggtgaaggacatgctagagaggtacttcaagggccaggatttcccagtgcagaattacatcgtcaaggaaggcaagctcgcgggccagtaccagtga

SEQ ID NO: 82411 - protein, 385 aa, Zea mays
MAMRGAAQQVARFAMGPHVPHVIAPAERSLHASAGSKKIVGVFYKGGEYADRNPSFVGCAEHALGIRGWLESQGHQYVVTDDKDGPNCELEKHIADAHVLITTPFHPAYVTADRIARAKNLELLLTAGIGSDHVDLAAAAAAGLTVAEVTGSNTVSVAEDQLMRVLVLTRNFLPGHRQAVGVGWDVAAVAHRAYDLEGKTVGTVGAGRIGRLLLQRLKPFNCRLLYHDRLRIDPALEAEIGAQFEADLDAMLPKCDVVVINMPLTEKTRGMFDKERIARMKKGVIIVNNARGAIMDTQAVADACATGHIAGYGGDVWHPQPAPKDHPWRYMPNNAMTPHISGTTIDGQLRYAAGVKDMLERYFKGQDFPVQNYIVKEGKLAGQYQ

SEQ ID NO: 82412 - DNA, 1875 bp, Zea mays; identical to SEQ ID NO: 64763
  CDS (1)..(1875)

SEQ ID NO: 82413 - protein, 624 aa, Zea mays; identical to SEQ ID NO: 64764

SEQ ID NO: 82414 - DNA, 1131 bp, Zea mays
  CDS (1)..(1131)
atggcgatgtggagggccgccgctaggcagctggtcgaccgggcgctcggctcaagggccgcgcacacgtctacaggcagcaaaaagatagtcggggtgttctacaaggccggggagtatgccgacaagaaccccaacttcgtcggctgcgtcgagggtgcactcggcatccgcggctggctcgagtcgcagggccatcaatacattgtcaccgatgacaaggaaggccccaactgtgaactggagaagcacattgaagacatgcatgtcctgattaccaccccattccacccagcttatgtcactgcagagaggataaagaaggcgaagaatcttgagcttcttctcacggcaggaatcggctccgatcatattgatcttccagcagctgctgctgcgggcttaactgtggctgaggtcactggaagcaacactgtctctgtggcagaagatgagctcttgcgcattctgattctgctcaggaacttcttgcctgggtaccaacaggtagttcaaggcgaatggaacgtagcaggcattgcccatagagcttatgatcttgaaggaaaaactgttgggactgttggggctggtcgtattggcaggctcttgcttcagcgtcttaagccctttaactgcaacctgctttaccatgacagacttcagattgacccagagcttgagaaagaaattggggccaaatttgaggaggacctggatgctatgcttccaaagtgtgatgtgattgtgatcaacacacctcttacggagaaaacaagaggcatgtttaacaaagagaggattgcaaagatgaagaaaggtgtaattgttgtgaataatgctcgaggagcaatcatggatgctcaagcagtcgcagatgcatgttctagcggtcacattgctggatacggtggtgatgtgtggttcccacagccagcaccaaaggatcacccctggcgctacatgccaaaccatgccatgacccctcacatctctgggactacaattgatgcgcagctgcggtatgcggatggtgtgagggacatgctggataggtatttcaagggcgaggacttcccggtgcagaactacatcgtcaaggaaggccagcttgccagtcagtaccagtga

SEQ ID NO: 82415 - protein, 376 aa, Zea mays
MAMWRAAARQLVDRALGSRAAHTSTGSKKIVGVFYKAGEYADKNPNFVGCVEGALGIRGWLESQGHQYIVTDDKEGPNCELEKHIEDMHVLITTPFHPAYVTAERIKKAKNLELLLTAGIGSDHIDLPAAAAAGLTVAEVTGSNTVSVAEDELLRILILLRNFLPGYQQVVQGEWNVAGIAHRAYDLEGKTVGTVGAGRIGRLLLQRLKPFNCNLLYHDRLQIDPELEKEIGAKFEEDLDAMLPKCDVIVINTPLTEKTRGMFNKERIAKMKKGVIVVNNARGAIMDAQAVADACSSGHIAGYGGDVWFPQPAPKDHPWRYMPNHAMTPHISGTTIDAQLRYADGVRDMLDRYFKGEDFPVQNYIVKEGQLASQYQ

SEQ ID NO: 82416 - DNA, 1875 bp, Zea mays; identical to SEQ ID NO: 64765
  CDS (1)..(1875)

SEQ ID NO: 82417 - protein, 624 aa, Zea mays; identical to SEQ ID NO: 64766

SEQ ID NO: 82418 - DNA, 23 bp, Artificial sequence
  primer
atggcaaaggtatcgctggagaa

SEQ ID NO: 82419 - DNA, 21 bp, Artificial sequence
  primer
ttagtacagcagacgggcgcg

SEQ ID NO: 82420 - protein, 552 aa, Artificial sequence
  consensus sequence
  Variant (2)..(31): Xaa in position 2 to 31 is any amino acid
  Variant (32)..(59): Xaa in position 32 to 59 is any or no amino acid
  Variant (62)..(62): Xaa in position 62 is any amino acid
  Variant (64)..(71): Xaa in position 64 to 71 is any amino acid
  Variant (72)..(79): Xaa in position 72 to 79 is any or no amino acid
  Variant (81)..(88): Xaa in position 81 to 88 is any amino acid
  Variant (90)..(93): Xaa in position 90 to 93 is any amino acid
  Variant (95)..(97): Xaa in position 95 to 97 is any amino acid
  Variant (99)..(101): Xaa in position 99 to 101 is any amino acid
  Variant (103)..(104): Xaa in position 103 to 104 is any amino acid
  Variant (106)..(106): Xaa in position 106 is any amino acid
  Variant (108)..(108): Xaa in position 108 is any amino acid
  Variant (110)..(111): Xaa in position 110 to 111 is any amino acid
  Variant (113)..(116): Xaa in position 113 to 116 is any amino acid
  Variant (119)..(128): Xaa in position 119 to 128 is any amino acid
  Variant (130)..(140): Xaa in position 130 to 140 is any amino acid
  Variant (141)..(154): Xaa in position 141 to 154 is any or no amino acid
  Variant (156)..(158): Xaa in position 156 to 158 is any amino acid
  Variant (159)..(165): Xaa in position 159 to 165 is any or no amino acid
  Variant (167)..(169): Xaa in position 167 to 169 is any amino acid
  Variant (171)..(171): Xaa in position 171 is any amino acid
  Variant (174)..(175): Xaa in position 174 to 175 is any amino acid
  Variant (176)..(176): Xaa in position 176 is any or no amino acid
  Variant (178)..(178): Xaa in position 178 is any amino acid
  Variant (180)..(180): Xaa in position 180 is any amino acid
  Variant (183)..(183): Xaa in position 183 is any amino acid
  Variant (184)..(188): Xaa in position 184 to 188 is any or no amino acid
  Variant (190)..(193): Xaa in position 190 to 193 is any amino acid
  Variant (194)..(194): Xaa in position 194 is any or no amino acid
  Variant (196)..(196): Xaa in position 196 is any amino acid
  Variant (198)..(200): Xaa in position 198 to 200 is any amino acid
  Variant (202)..(222): Xaa in position 202 to 222 is any amino acid
  Variant (223)..(236): Xaa in position 223 to 236 is any or no amino acid
  Variant (238)..(241): Xaa in position 238 to 241 is any amino acid
  Variant (243)..(243): Xaa in position 243 is any amino acid
  Variant (245)..(248): Xaa in position 245 to 248 is any amino acid
  Variant (250)..(259): Xaa in position 250 to 259 is any amino acid
  Variant (260)..(261): Xaa in position 260 to 261 is any or no amino acid
  Variant (263)..(268): Xaa in position 263 to 268 is any amino acid
  Variant (270)..(271): Xaa in position 270 to 271 is any amino acid
  Variant (274)..(276): Xaa in position 274 to 276 is any amino acid
  Variant (278)..(279): Xaa in position 278 to 279 is any amino acid
  Variant (282)..(283): Xaa in position 282 to 283 is any amino acid
  Variant (285)..(291): Xaa in position 285 to 291 is any amino acid
  Variant (292)..(292): Xaa in position 292 is any or no amino acid
  Variant (294)..(295): Xaa in position 294 to 295 is any amino acid
  Variant (298)..(300): Xaa in position 298 to 300 is any amino acid
  Variant (303)..(310): Xaa in position 303 to 310 is any amino acid
  Variant (311)..(329): Xaa in position 311 to 329 is any or no amino acid
  Variant (333)..(333): Xaa in position 333 is any amino acid
  Variant (335)..(335): Xaa in position 335 is any amino acid
  Variant (338)..(338): Xaa in position 338 is any amino acid
  Variant (342)..(348): Xaa in position 342 to 348 is any amino acid
  Variant (349)..(365): Xaa in position 349 to 365 is any or no amino acid
  Variant (367)..(367): Xaa in position 367 is any amino acid
  Variant (369)..(373): Xaa in position 369 to 373 is any amino acid
  Variant (374)..(534): Xaa in position 374 to 534 is any or no amino acid
  Variant (537)..(541): Xaa in position 537 to 541 is any amino acid
  Variant (542)..(550): Xaa in position 542 to 550 is any or no amino acid
LXXXXXXXXXXXXXXXXXXXXXXXXXXXXXXXXXXXXXXXXXXXXXXXXXXXXXXXXXXRSXTXXXXXXXXXXXXXXXXLXXXXXXXXGXXXXDXXXAXXXGXXVXNXPXXNXXXXAEXXXXXXXXXXRXXXXXXXXXXXXXXXXXXXXXXXXXWXXXXXXXXXXEXXXKXLGXXXGXGXIGXXXXXXAXXXXXMXVXXXDXXXXXXXXXXXXXXXXXXXXXXXXXXXXXXXXXXXDXXXXHXPXXXXTXXXXXXXXXXXXKXXXXXXNXXRGXXXDXXALXXAXXXXXXXXAXXDVXXXEPXXXXXXXXXXXXXXXXXXXXXXXXXXXTPHXGXSTXEAQXXXXXXXXXXXXXXXXXXXXXXXXNXPXXXXXXXXXXXXXXXXXXXXXXXXXXXXXXXXXXXXXXXXXXXXXXXXXXXXXXXXXXXXXXXXXXXXXXXXXXXXXXXXXXXXXXXXXXXXXXXXXXXXXXXXXXXXXXXXXXXXXXXXXXXXXXXXXXXXXXXXXXXXXXXXXXXXXXXXXXXXXXXXXXXXXXPGXXXXXXXXXXXXXXNI

SEQ ID NO: 82421 - protein, 39 aa, Artificial sequence
  protein pattern
  Variant (2)..(3): Xaa in position 2 to 3 is any amino acid
  Variant (4)..(4): Xaa in position 4 is Ile or Val
  Variant (5)..(5): Xaa in position 5 is Ala, Gly or Ile
  Variant (6)..(7): Xaa in position 6 to 7 is any amino acid
  Variant (8)..(8): Xaa in position 8 is Cys or Gly
  Variant (9)..(9): Xaa in position 9 is any amino acid
  Variant (10)..(10): Xaa in position 10 is Asp or Gly
  Variant (11)..(11): Xaa in position 11 is any amino acid
  Variant (12)..(12): Xaa in position 12 is Asp, Glu, Asn or Ser
  Variant (13)..(13): Xaa in position 13 is any amino acid
  Variant (14)..(14): Xaa in position 14 is Ile or Val
  Variant (16)..(18): Xaa in position 16 to 18 is any amino acid
  Variant (20)..(22): Xaa in position 20 to 22 is any amino acid
  Variant (24)..(25): Xaa in position 24 to 25 is any amino acid
  Variant (27)..(27): Xaa in position 27 is any amino acid
  Variant (29)..(29): Xaa in position 29 is Ala, Ser, Thr or Val
  Variant (31)..(31): Xaa in position 31 is any amino acid
  Variant (32)..(32): Xaa in position 32 is Ala, Gly or Ser
  Variant (33)..(33): Xaa in position 33 is Asn, Ser or Thr
  Variant (34)..(35): Xaa in position 34 to 35 is any amino acid
  Variant (36)..(36): Xaa in position 36 is Ala, Gly, Ser or Thr
  Variant (37)..(37): Xaa in position 37 is Ala, Thr or Val
  Variant (38)..(38): Xaa in position 38 is Ala, Cys, Gly, Thr or Val
LXXXXXXXXXXXXXDXXXAXXXGXXVXNXPXXXXXXXXE

SEQ ID NO: 82422 - protein, 24 aa, Artificial sequence
  protein pattern
  Variant (4)..(4): Xaa in position 4 is Ile, Leu or Val
  Variant (6)..(6): Xaa in position 6 is Ala or Gly
  Variant (9)..(9): Xaa in position 9 is any or no amino acid
  Variant (11)..(11): Xaa in position 11 is any or no amino acid
  Variant (14)..(15): Xaa in position 14 to 15 is any amino acid
  Variant (16)..(16): Xaa in position 16 is Ala, Ile or Val
  Variant (17)..(17): Xaa in position 17 is Ala, Gly, Ser or Thr
  Variant (18)..(19): Xaa in position 18 to 19 is any amino acid
  Variant (20)..(20): Xaa in position 20 is Ala, Ile, Leu or Val
  Variant (21)..(23): Xaa in position 21 to 23 is any amino acid
  Variant (24)..(24): Xaa in position 24 is Phe, Ile, Leu, Met or Val
TPHXGXSTXEXAQXXXXXXXXXXX

SEQ ID NO: 82423 - protein, 18 aa, Artificial sequence
  protein pattern
  Variant (2)..(2): Xaa in position 2 is any amino acid
  Variant (3)..(4): Xaa in position 3 to 4 is any or no amino acid
  Variant (6)..(6): Xaa in position 6 is Ala or Gly
  Variant (7)..(7): Xaa in position 7 is Ile, Leu or Val
  Variant (8)..(8): Xaa in position 8 is Ile, Leu, Met or Val
  Variant (10)..(10): Xaa in position 10 is any amino acid
  Variant (12)..(12): Xaa in position 12 is any amino acid
  Variant (13)..(13): Xaa in position 13 is Ile or Val
  Variant (15)..(16): Xaa in position 15 to 16 is any amino acid
  Variant (17)..(17): Xaa in position 17 is Ile, Leu, Met or Val
  Variant (18)..(18): Xaa in position 18 is Ala, Cys, Gly, Ser, Thr or Val
KXXXLXXXGXGXXGXXXX

SEQ ID NO: 82424 - DNA, 315 bp, Escherichia coli
  CDS (1)..(315): transl_table=11
atgcacctgataactcaaaaagcattgaaagatgctgcggaaaaatacccgcaacataaaacggagttggtggctctggggaacacgattgctaagggatatttcaaaaaacctgagtcattaaaagcagtattcccatctctggataacttcaaatatctggataagcattatgttttcaatgttgggggcaatgaattacgtgttgtagcaatggtcttttttgaatcgcaaaagtgctacatacgtgaagttatgacgcataaagaatacgatttctttaccgctgttcatcgtactaaggggaaaaaataa

SEQ ID NO: 82425 - protein, 104 aa, Escherichia coli
MHLITQKALKDAAEKYPQHKTELVALGNTIAKGYFKKPESLKAVFPSLDNFKYLDKHYVFNVGGNELRVVAMVFFESQKCYIREVMTHKEYDFFTAVHRTKGKK

SEQ ID NO: 82426 - DNA, 297 bp, Mesorhizobium loti MAFF303099
  CDS (1)..(297): transl_table=11
gtgcagatcatcgccaagaaagcgctgaaggttttttgggccaaacacaatcacgccgaagctcctttgacggcttggtatgtggctgtcagcaatgctgattggaagaccccggccgacatcaaggatgcgtttggagcgacagtcgatttcgtgggcgacaatcgcgtcattttcgacattggcggcaataaataccgtttgattgtccacgtcgcctacaagtttcaccgcgttctgatcaaattcgtcgggacgcataaagagtatgacaaggttgatccggagaaggtgtga

SEQ ID NO: 82427 - protein, 98 aa, Mesorhizobium loti MAFF303099
MQIIAKKALKVFWAKHNHAEAPLTAWYVAVSNADWKTPADIKDAFGATVDFVGDNRVIFDIGGNKYRLIVHVAYKFHRVLIKFVGTHKEYDKVDPEKV

SEQ ID NO: 82428 - DNA, 312 bp, Salmonella typhimurium LT2
  CDS (1)..(312): transl_table=11
gtgcatgttatcagccgaaaaccgttcaatgaagcgatgctcatgtatccaaaccatgagcttgctctcactgagttgctgaatgttctggagaaaaaaacattcactcagcctgaagagatgaagcggtatattccttcactggataattttaagtacagagataaatggtgggtgattgatgtttctggtaacagcctgagactcatttcctacatagatttcaggttacataagatatttgtgaaacatatcgtttcccatgccgaatatgacaaactgaccgcatactatcggggtaataaagaatga

SEQ ID NO: 82429 - protein, 103 aa, Salmonella typhimurium LT2
MHVISRKPFNEAMLMYPNHELALTELLNVLEKKTFTQPEEMKRYIPSLDNFKYRDKWWVIDVSGNSLRLISYIDFRLHKIFVKHIVSHAEYDKLTAYYRGNKE

SEQ ID NO: 82430 - DNA, 312 bp, Shewanella oneidensis MR-1
  CDS (1)..(312): transl_table=11
gtgcacgttatttcaagaaaaccatttaatgatgccgcccaaaagtatcctaacgataaggacgctttggtgcagatatacagcaccttacgcagtggcacattcaccaatcctgatgatttacgacaagtatttccgtctttagataactttaaatatcgagataaatggtgggtaattgatgtgggaggtaacaatctacgcattatcgctttcatcgagttccgagataacaggatgtatgtgaagcacgtggttagccatgcagactatagcaagctgactgataagtaccgtcgaacaaaggagtaa

SEQ ID NO: 82431 - protein, 103 aa, Shewanella oneidensis MR-1
MHVISRKPFNDAAQKYPNDKDALVQIYSTLRSGTFTNPDDLRQVFPSLDNFKYRDKWWVIDVGGNNLRIIAFIEFRDNRMYVKHVVSHADYSKLTDKYRRTKE

SEQ ID NO: 82432 - DNA, 312 bp, Escherichia coli CFT073
  CDS (1)..(312): transl_table=11
atgcacatcatttctaaagcgccatttgaagagtgtgcgcgcaaatatcctaacgacgctctggctctacactcattgtatcgggttattaaggaaacggatttttctacgccagaagaaatgcgaacggcttttcccaacctcgacaattttaaatatcgcaacaaatggtacgttctggatgtcggcgggaacaatcttagggttattgcctacataaactttgttaataagcggttctttgtgaagcacatcacgaatcacgcagagtatgacaaactgacacgttactacagagagaacaaagaatga

SEQ ID NO: 82433 - protein, 103 aa, Escherichia coli CFT073
MHIISKAPFEECARKYPNDALALHSLYRVIKETDFSTPEEMRTAFPNLDNFKYRNKWYVLDVGGNNLRVIAYINFVNKRFFVKHITNHAEYDKLTRYYRENKE

SEQ ID NO: 82434 - DNA, 312 bp, Salmonella enterica subsp. enterica serovar Typhi Ty2
  CDS (1)..(312): transl_table=11
gtgcatgttatcagccgaaaactgttcaatgaagcgatgctcatgtatccaaaccatgagcttgctctcactgagttgctgaatgttctggagaaaaaaacattcactcagcctgaagagatgaagcggtatattccttcgctggataattttaagtacagagataaatggtgggtgattgatgtttctggtaacagcctgagactcatttcctacatagatttcaggttacataagatatttgtgaaacatatcgtttcccatgccgaatatgacaaactgaccgcatattatcggggtaatgaagaatga

SEQ ID NO: 82435 - protein, 103 aa, Salmonella enterica subsp. enterica serovar Typhi Ty2
MHVISRKLFNEAMLMYPNHELALTELLNVLEKKTFTQPEEMKRYIPSLDNFKYRDKWWVIDVSGNSLRLISYIDFRLHKIFVKHIVSHAEYDKLTAYYRGNEE

SEQ ID NO: 82436 - DNA, 303 bp, Bordetella bronchiseptica RB50
  CDS (1)..(303): transl_table=11
atgcgagtcatagccctcagcaccctccgtcagttctgggaaaagcacccagcggctgagcagcccctcaaggcttgggtggacgaggcgagcaaggcccgatgggccccgcccgcggacatcaaggcccaataccggagcgccagcgttctcaagaaccggcgcgtggtattcaacatcaagggcaatgactaccgtctgattgtcgctgtcgccttcaagctaggcatcgtctacgtgaaattcgtcggcacccatgtggagtacgacagggtcgatgccgagacagtcgaaatggagtga

SEQ ID NO: 82437 - protein, 100 aa, Bordetella bronchiseptica RB50
MRVIALSTLRQFWEKHPAAEQPLKAWVDEASKARWAPPADIKAQYRSASVLKNRRVVFNIKGNDYRLIVAVAFKLGIVYVKFVGTHVEYDRVDAETVEME

SEQ ID NO: 82438 - DNA, 321 bp, Synechocystis sp. PCC 6803
  CDS (1)..(321): transl_table=11
atgcacatcatctcgaaaactgccctgaagcaattctgggaaaagcatccgaatgccaaagcgagcttaacggcttggtacaaaattgccagccatagccagtggaaacatttagatgatgttcgtcaaacctttccccatgcagatccagttgggcaactaactgtatttaatattggtggaaataattataggctcatcaccaaaattgtctttcccacaaacgagagcaatattgggcgagtttatatcagagacgtgttaacccacgcagactatagcaaaggtaattggaaaaaggattcatggtttaaatcataa

SEQ ID NO: 82439 - protein, 106 aa, Synechocystis sp. PCC 6803
MHIISKTALKQFWEKHPNAKASLTAWYKIASHSQWKHLDDVRQTFPHADPVGQLTVFNIGGNNYRLITKIVFPTNESNIGRVYIRDVLTHADYSKGNWKKDSWFKS

SEQ ID NO: 82440 - DNA, 312 bp, Erwinia carotovora subsp. atroseptica SCRI1043
  CDS (1)..(312): transl_table=11
atgcatgtgatttcgcgcgcaccttttgatgctgcaaccaaccagtttccgaatcaggcggtagcactcgctgacctatatcgggttataaaacgcgaaatgtatgcaacgccggaggatatgaaaaaacgctttcccagcttagataggatgaaatatcgagaaaagtggtgggttattgatatcggtggtgggcatcttcgagtgatgttttttgctgattttgagcgagggaaaatcttcatcaagcacataacatcccatgcagagtacgacaggctgacagagtattaccggaggaataaagaatga

SEQ ID NO: 82441 - protein, 103 aa, Erwinia carotovora subsp. atroseptica SCRI1043
MHVISRAPFDAATNQFPNQAVALADLYRVIKREMYATPEDMKKRFPSLDRMKYREKWWVIDIGGGHLRVMFFADFERGKIFIKHITSHAEYDRLTEYYRRNKE

SEQ ID NO: 82442 - DNA, 303 bp, Azoarcus sp. EbN1
  CDS (1)..(303): transl_table=11
ttgctatataatattttcatgaagctgagctcaaacaaggcgctgcgtgagttcgcaaccctccacccagacgcggaagcgccgctgcaggctttccggcatctggtcgaaaaggggcgttacgacagtttctcggcgcttcgcgcgaccttcgggagtctcgataaggtcggagaccgcttcgtgttcaacatcggcggcaacaagtaccgcttgatcgcatcaatcgccttcgctgcacagttgctgtgggtgaaggcggtgctgacgcatgccgagtacgacaaaggagagtggaaatga

SEQ ID NO: 82443 - protein, 100 aa, Azoarcus sp. EbN1
MLYNIFMKLSSNKALREFATLHPDAEAPLQAFRHLVEKGRYDSFSALRATFGSLDKVGDRFVFNIGGNKYRLIASIAFAAQLLWVKAVLTHAEYDKGEWK

SEQ ID NO: 82444 - DNA, 312 bp, Pseudomonas fluorescens Pf-5
  CDS (1)..(312): transl_table=11
atgagaattattgcagtcagtcagttgaaggccttctgggcaaagcacccggaagcagaacagcccttgctggcctggatcgatgaagcaaggaaagccgagtggtccaaccctgcgcaaatcaaggaccaatatcgcaacgcgagcattctcaaaagccgcagggtggtcttcaacatcaagggcaacgagtatcgactgatcgctgtcgtggcctaccgctttggtgcgctgcacatcaagttcgtgggcactcaccaagagtacgacgccattgatgccgacagcgtagacatggagcaacccgcatga

SEQ ID NO: 82445 - protein, 103 aa, Pseudomonas fluorescens Pf-5
MRIIAVSQLKAFWAKHPEAEQPLLAWIDEARKAEWSNPAQIKDQYRNASILKSRRVVFNIKGNEYRLIAVVAYRFGALHIKFVGTHQEYDAIDADSVDMEQPA

SEQ ID NO: 82446 - DNA, 300 bp, Burkholderia xenovorans LB400
  CDS (1)..(300): transl_table=11
atgcgggtcatttcaaagaaagcgttgctggacttcataaacagacatccgggggcgcgcagtgcgctattgacatggtattcactggcgcaggcatgcctcgcgtatggctataacgacctgaagcagacgttcgccggcgtggactacgtgccgcctcaatacaccgttttcgatgtaggcggcaaccggttccggatcgttgcggcgattcactacaacaggcagtcgttattcgttcgtcatgtattgacgcatgcggagtacgacctttggacgaggaagaatctaaactcatga

SEQ ID NO: 82447 - protein, 99 aa, Burkholderia xenovorans LB400
MRVISKKALLDFINRHPGARSALLTWYSLAQACLAYGYNDLKQTFAGVDYVPPQYTVFDVGGNRFRIVAAIHYNRQSLFVRHVLTHAEYDLWTRKNLNS

SEQ ID NO: 82448 - DNA, 276 bp, Nostoc punctiforme PCC 73102
  CDS (1)..(276): transl_table=11
atgcacgttattagtcgcaaaattctacgagaattttgtgaggcacatgcagatataaaggaagcactttatgattggtataggatagcaactaaagctgaatggaaaaatctgcttgaagttcaggctatttatccaaaagcagaagcagttggtaacttcactgtgtttaatattaaaggaaacagttaccgtttgattactgatattgtttacgaaactcaaagaatctatattaaatatgtcctgaatcacgctgaatatgataaggattaa

SEQ ID NO: 82449 - protein, 91 aa, Nostoc punctiforme PCC 73102
MHVISRKILREFCEAHADIKEALYDWYRIATKAEWKNLLEVQAIYPKAEAVGNFTVFNIKGNSYRLITDIVYETQRIYIKYVLNHAEYDKD

SEQ ID NO: 82450 - DNA, 303 bp, Crocosphaera watsonii WH 8501
  CDS (1)..(303): transl_table=11
atgcacttaatttcagcaggtaaactcaaacaagtagcatccaaatatcctgatgtaactaaaaccataaaagccttttgtcaaactattaaaaaagctcaatggaaaaatttgattgaacttcaacaagtttatcgagaagccgaagcagttggtaactttacagttttaaatcttaaagggaataaatatcgtctaattctcgatattgactatgaagaacaagttgcttatttcaaatactttttaactcatgctgaatatgataaggagaaatggaaaaatgacccttactttaaataa

SEQ ID NO: 82451 - protein, 100 aa, Crocosphaera watsonii WH 8501
MHLISAGKLKQVASKYPDVTKTIKAFCQTIKKAQWKNLIELQQVYREAEAVGNFTVLNLKGNKYRLILDIDYEEQVAYFKYFLTHAEYDKEKWKNDPYFK

SEQ ID NO: 82452 - DNA, 312 bp, delta proteobacterium MLMS-1
  CDS (1)..(312): transl_table=11
gtgcacattatttcaagaaaaccgtttaacgacgcgagtcggctctatccccgtcacgcggcggccatcgccaggacttacagagttttgcgcaacggtaccttcaataacccggatgagctgagaaaactttttccctccttggataattttcgccccagggacaagtggtgggtcattgacatcggcggcaacagcctgcgcctgatcgcttttattgaattcagggataatcgcatgtatgtgaagcacattgtcagccatgccgaatacgataaattatgtcaacgatatacaacggaggcggactga

SEQ ID NO: 82453 - protein, 103 aa, delta proteobacterium MLMS-1
MHIISRKPFNDASRLYPRHAAAIARTYRVLRNGTFNNPDELRKLFPSLDNFRPRDKWWVIDIGGNSLRLIAFIEFRDNRMYVKHIVSHAEYDKLCQRYTTEAD

SEQ ID NO: 82454 - DNA, 25 bp, Artificial sequence
  primer
atgcacctgataactcaaaaagcat

SEQ ID NO: 82455 - DNA, 27 bp, Artificial sequence
  primer
ttattttttccccttagtacgatgaac

SEQ ID NO: 82456 - protein, 97 aa, Artificial sequence
  consensus sequence
  Variant (2)..(3): Xaa in position 2 to 3 is any amino acid
  Variant (5)..(16): Xaa in position 5 to 16 is any amino acid
  Variant (18)..(22): Xaa in position 18 to 22 is any amino acid
  Variant (24)..(55): Xaa in position 24 to 55 is any amino acid
  Variant (56)..(58): Xaa in position 56 to 58 is any or no amino acid
  Variant (60)..(63): Xaa in position 60 to 63 is any amino acid
  Variant (66)..(67): Xaa in position 66 to 67 is any amino acid
  Variant (69)..(69): Xaa in position 69 is any amino acid
  Variant (71)..(82): Xaa in position 71 to 82 is any amino acid
  Variant (83)..(87): Xaa in position 83 to 87 is any or no amino acid
  Variant (89)..(92): Xaa in position 89 to 92 is any amino acid
  Variant (94)..(94): Xaa in position 94 is any amino acid
MXXIXXXXXXXXXXXXPXXXXXLXXXXXXXXXXXXXXXXXXXXXXXXXXXXXXXXXXXVXXXXGNXXRXIXXXXXXXXXXXXXXXXXKXXXXHXEYD

SEQ ID NO: 82457 - protein, 34 aa, Artificial sequence
  protein pattern
  Variant (2)..(2): Xaa in position 2 is Phe, Ile or Leu
  Variant (3)..(3): Xaa in position 3 is Asp or Asn
  Variant (4)..(4): Xaa in position 4 is Ile, Leu or Val
  Variant (5)..(5): Xaa in position 5 is any amino acid
  Variant (7)..(7): Xaa in position 7 is Gly or Asn
  Variant (8)..(9): Xaa in position 8 to 9 is any amino acid
  Variant (11)..(11): Xaa in position 11 is Ile, Leu or Val
  Variant (12)..(12): Xaa in position 12 is Ile, Met or Val
  Variant (13)..(14): Xaa in position 13 to 14 is any amino acid
  Variant (15)..(15): Xaa in position 15 is Ala, Ile or Val
  Variant (16)..(16): Xaa in position 16 is any amino acid
  Variant (17)..(17): Xaa in position 17 is Phe or Tyr
  Variant (18)..(22): Xaa in position 18 to 22 is any amino acid
  Variant (23)..(23): Xaa in position 23 is Phe, His, Trp or Tyr
  Variant (24)..(24): Xaa in position 24 is Phe, Ile or Val
  Variant (25)..(25): Xaa in position 25 is Lys or Arg
  Variant (26)..(26): Xaa in position 26 is any amino acid
  Variant (27)..(27): Xaa in position 27 is Phe, Ile or Val
  Variant (28)..(28): Xaa in position 28 is any amino acid
  Variant (29)..(29): Xaa in position 29 is Asn, Ser or Thr
  Variant (31)..(31): Xaa in position 31 is any amino acid
VXXXXGXXXRXXXXXXXXXXXXXXXXXXXHXEYD

SEQ ID NO: 82458 - protein, 29 aa, Artificial sequence
  protein pattern
  Variant (3)..(4): Xaa in position 3 to 4 is any amino acid
  Variant (6)..(6): Xaa in position 6 is Ile, Leu or Val
  Variant (7)..(7): Xaa in position 7 is Ile or Val
  Variant (8)..(9): Xaa in position 8 to 9 is any amino acid
  Variant (10)..(10): Xaa in position 10 is Ile or Val
  Variant (11)..(11): Xaa in position 11 is any amino acid
  Variant (12)..(12): Xaa in position 12 is Phe or Tyr
  Variant (13)..(18): Xaa in position 13 to 18 is any amino acid
  Variant (19)..(19): Xaa in position 19 is Phe, Ile or Val
  Variant (20)..(20): Xaa in position 20 is Lys or Arg
  Variant (21)..(21): Xaa in position 21 is any amino acid
  Variant (22)..(22): Xaa in position 22 is Phe, Ile or Val
  Variant (23)..(23): Xaa in position 23 is any amino acid
  Variant (24)..(24): Xaa in position 24 is Asn, Ser or Thr
  Variant (26)..(26): Xaa in position 26 is any amino acid
GNXXRXXXXXXXXXXXXXXXXXXXHXEYD

SEQ ID NO: 82459 - DNA, 306 bp, Escherichia coli
  CDS (1)..(306): transl_table=11
atgtcgaaagaacacactacggaacatctgcgtgctgagttgaaatccctttccgatacgctggaagaggtgcttagctcatctggcgagaagtcgaaagaagagttgagtaagattcgtagcaaagcggagcaggcactgaaacagagccgttatcgcctgggtgaaaccggtgatgccattgccaaacaaacccgtgtcgcggcggcgcgtgccgatgagtatgtgcgcgaaaatccgtggacgggcgtgggcattggcgctgcaatcggtgtagtgctcggcgttctgctgtcgcgtcgttaa

SEQ ID NO: 82460 - protein, 101 aa, Escherichia coli
MSKEHTTEHLRAELKSLSDTLEEVLSSSGEKSKEELSKIRSKAEQALKQSRYRLGETGDAIAKQTRVAAARADEYVRENPWTGVGIGAAIGVVLGVLLSRR

SEQ ID NO: 82461 - DNA, 306 bp, Salmomella typhi
  CDS (1)..(306)
atgtcgaaagataacactacggaacatctgcgcgctgagttgaaatccctgaccgatacgctcgaagaagtgctgagctcttcgggcgaaaagtcgaaagaagagttgagtaagattcgtagcaaagccgagcgcgcgctgaaagagagccgttaccgcctgggcgaaacgggtgatgtgattgccaaacagactcgcgtcgccgccgcccgtgccgatgattatgtgcgcgaaaacccctggacaggcgtaggcattggcgccgctgtcggtctggtgttgggcgtactgctgacgcgtcgttaa

SEQ ID NO: 82462 - protein, 101 aa, Salmomella typhi
MSKDNTTEHLRAELKSLTDTLEEVLSSSGEKSKEELSKIRSKAERALKESRYRLGETGDVIAKQTRVAAARADDYVRENPWTGVGIGAAVGLVLGVLLTRR

SEQ ID NO: 82463 - DNA, 330 bp, Pseudomonas aeruginosa PAO1
  CDS (1)..(330): transl_table=11
atgactctgaaaacccgctccgctcgcgccaagcaggctatccaggaccaggccatggccgaactgcaggacctgatcgccgaggtggaccagttgatgagcggcaccggcagcctggccggcaaggagggcgcgaacctgcgtgaacagatcaattccgtgctgcatcgtggtcgcgacgccatcgagcgcacccgccgcggcgtggtgcaacgcagccaggcggccgccgaagcgaccgaggaatacgtcgaggaccatccctggcagaccatcgccgtctcggccggcgccggcttcctcctcggcttgctgatgggccgccgctag

SEQ ID NO: 82464 - protein, 109 aa, Pseudomonas aeruginosa PAO1
MTLKTRSARAKQAIQDQAMAELQDLIAEVDQLMSGTGSLAGKEGANLREQINSVLHRGRDAIERTRRGVVQRSQAAAEATEEYVEDHPWQTIAVSAGAGFLLGLLMGRR

SEQ ID NO: 82465 - DNA, 339 bp, Salmonella typhimurium LT2
  CDS (1)..(339): transl_table=11
atggaggatcatatgcttaacaaaccgaaccgaaacgacgtcgatgatggtgttcaggatattcagaatgatgtcaatcgattagccgacagtctggaagatgtccttaaatcctggggaagcgatgcgaaagacgaagccgaggctgcgcgacgtaaagcacaggcgttgctgaaagagacccgggcgcggatgcagggtcgtactcgcgtaaaacaagccgcctgtgatgcgatggggtgcgcggatacgtttgtgcgtgaaaaaccctggtgtagcgtaggaaccgccgcagcggtggggatttttatcggggcgctgcttagcctgcgtcgctaa

SEQ ID NO: 82466 - protein, 112 aa, Salmonella typhimurium LT2
MEDHMLNKPNRNDVDDGVQDIQNDVNRLADSLEDVLKSWGSDAKDEAEAARRKAQALLKETRARMQGRTRVKQAACDAMGCADTFVREKPWCSVGTAAAVGIFIGALLSLRR

SEQ ID NO: 82467 - DNA, 348 bp, Yersinia pestis KIM
  CDS (1)..(348): transl_table=11
ttgggtataagatgcctttttcacgcatggagaatgcacatgaaccgagataatgaaccaccaacctcgttagaggatgacctggctatgttgaccgataccctggaagaggtactgcgctattccggaacgttggctgatgaaagctatcaagaaattaaagcgcgtgcagagaaagcactaaaggaggttcaaagccgcttgagtgaccacggtggatgtcatatcaagcagataaaagccatggcatgttgtactgatgattatgttcgtcagaacccatggtgtagcgtgggtattggcgcgactattggactgattgttgggctattggtggctcgtcgctaa

SEQ ID NO: 82468 - protein, 115 aa, Yersinia pestis KIM
MGIRCLFHAWRMHMNRDNEPPTSLEDDLAMLTDTLEEVLRYSGTLADESYQEIKARAEKALKEVQSRLSDHGGCHIKQIKAMACCTDDYVRQNPWCSVGIGATIGLIVGLLVARR

SEQ ID NO: 82469 - DNA, 315 bp, Pseudomonas putida KT2440
  CDS (1)..(315): transl_table=11
atggccagcaaatcggcaaagaatgcacaagagatattgatggctgacttccaggccttggtgcgcgacaccgagaagctgctggccgacaccgccaacctggccggcgaccaggccgacgaattgcgcgagcagattcacgagcgcctggcccaggcccgcgaaaccctgcaactgacccaggactcggtacgtgaacgcggtcaggcagcgcttggcagcgccgagcagtacgtgcaggaaaacccgtggcgggcaatcggcatcgccgccggcgtcggcctgttgatcggtctgctggccaaccggcgctaa

SEQ ID NO: 82470 - protein, 104 aa, Pseudomonas putida KT2440
MASKSAKNAQEILMADFQALVRDTEKLLADTANLAGDQADELREQIHERLAQARETLQLTQDSVRERGQAALGSAEQYVQENPWRAIGIAAGVGLLIGLLANRR

SEQ ID NO: 82471 - DNA, 327 bp, Salmonella enterica subsp. enterica serovar Typhi Ty2
  CDS (1)..(327): transl_table=11
atgcttaacaaaccgaaccgaaacgacgtcgatgatggtgttcaggatattcagaatgatgtcaatcgattagccgacagtctggaagatgtccttaaatcctggggaagcgatgcgaaagacgaagccgaggctgcgcgacgtaaagcacaggcgttgctgaaagagacccgggcgcggatgcagggtcgtactcgcgtaaaacaagccgcctgtgatgcgatggggtgcgcggatacgtttgtgcgtgaaaaaccctggtgtagcgtaggaaccgccgcagcggtggggatttttatcggggcgctgcttagcctgcgtcgctaa

SEQ ID NO: 82472 - protein, 108 aa, Salmonella enterica subsp. enterica serovar Typhi Ty2
MLNKPNRNDVDDGVQDIQNDVNRLADSLEDVLKSWGSDAKDEAEAARRKAQALLKETRARMQGRTRVKQAACDAMGCADTFVREKPWCSVGTAAAVGIFIGALLSLRR

SEQ ID NO: 82473 - DNA, 318 bp, Bordetella bronchiseptica RB50
  CDS (1)..(318): transl_table=11
atggccgcgagaagatccgacgaagcaacgaaagagaaactcatcgacagcgtcaagaccagcctcaatgatgccgagaccttgctgcgcgaagccgccagcaccacgggcgacaaggcgaccgaattgcgcgagcgcgcgctggcatcggtgcgccgcacccgcgaggcgctgtacgacgcgcaggacgcggtgctcgaacgcggccgccgcgcggcccgcgccactgacgattacgtgcacgacaatccctggcaggccatcagcatcgcaggcgtgaccggcctgctgctcggcctgctgatcagccgtcgctga

SEQ ID NO: 82474 - protein, 105 aa, Bordetella bronchiseptica RB50
MAARRSDEATKEKLIDSVKTSLNDAETLLREAASTTGDKATELRERALASVRRTREALYDAQDAVLERGRRAARATDDYVHDNPWQAISIAGVTGLLLGLLISRR

SEQ ID NO: 82475 - DNA, 306 bp, Photorhabdus luminescens subsp. laumondii TTO1
  CDS (1)..(306): transl_table=11
atgtcaaagatcaaaactaatgaagatctacacgttgaactaaaatcactcgcagatacactggaagaagtgatcaaaagctctggtgataaatccaaagtcgagctggaagaacttcgcggcaaagtagaggaagtcatcaaagatactcgttctaaactcagcaatgccagtgatatggttgttaagaaaacaaaagatatggcgggccgtgctgatgtctacgttcacgataaaccttgggtaagcatcggtattggtactgttgtcggtgccgtattaggtgtagtgttagctaaacgctaa

SEQ ID NO: 82476 - protein, 101 aa, Photorhabdus luminescens subsp. laumondii TTO1
MSKIKTNEDLHVELKSLADTLEEVIKSSGDKSKVELEELRGKVEEVIKDTRSKLSNASDMVVKKTKDMAGRADVYVHDKPWVSIGIGTVVGAVLGVVLAKR

SEQ ID NO: 82477 - DNA, 306 bp, Erwinia carotovora subsp. atroseptica SCRI1043
  CDS (1)..(306): transl_table=11
atggctaaagatcaaaattccgagtacctacgcgccgaattgaaatcactggcggacacgctggaagaagtattaagcacctccagcgacaaatctaaagcggaactcgacaaactgcgcaataaggcagaaagcgcgctgaaagaaactcgcagccgcctgagcgataccggtgagcgcatcgcttcgcaaaccaaagaagcggttgaatctgccgacgattatgtacgtcagaacccgtggaccggtgtcggcattggcgcagcagtcggtgtcgtgcttggcgtcctactgtctcgtcgctaa

SEQ ID NO: 82478 - protein, 101 aa, Erwinia carotovora subsp. atroseptica SCRI1043
MAKDQNSEYLRAELKSLADTLEEVLSTSSDKSKAELDKLRNKAESALKETRSRLSDTGERIASQTKEAVESADDYVRQNPWTGVGIGAAVGVVLGVLLSRR

SEQ ID NO: 82479 - DNA, 312 bp, Erwinia carotovora subsp. atroseptica SCRI1043
  CDS (1)..(312): transl_table=11
atggcggcgacaaaaaaacagcctgaagaaattcgtgtcgatgatgatttaaaacttctgtctgaaacgctagacgaagtactacgctatacgggcgatcaggcagaccaaacctatcttgatttgaagaagggagcggaaaaagcgctgctggaagttaaagcccgcattggcgtgactgacggctattatgcgcgcgcgaagcaggtagccgataaagccgatgtttatgtgcacgacaaaccgtggcacggcatcggtattggcgccacggtcggtctggtgctgggattactgctggctaagcgctag

SEQ ID NO: 82480 - protein, 103 aa, Erwinia carotovora subsp. atroseptica SCRI1043
MAATKKQPEEIRVDDDLKLLSETLDEVLRYTGDQADQTYLDLKKGAEKALLEVKARIGVTDGYYARAKQVADKADVYVHDKPWHGIGIGATVGLVLGLLLAKR

SEQ ID NO: 82481 - DNA, 306 bp, Yersinia pseudotuberculosis IP 32953
  CDS (1)..(306): transl_table=11
atgccacaagataaaacctctgaacatttacgtgctgaacttaaatcattggcagatacgttggaagaagtgttgcagtcttcaaccgataaaccaaaagctgagttggataagctccgtgctaaggcagaaagcgcattgaaagatacccgagttcgtctgagcgaaacgagtgataaaattgcagcccaaaccaaagagatcgcagataaagcggataactacgtacatgacaatccatggactggcgtaggtatcggtgctgctgttggcgtggtgttaggcgttctgttgtctcgccgttaa

SEQ ID NO: 82482 - protein, 101 aa, Yersinia pseudotuberculosis IP 32953
MPQDKTSEHLRAELKSLADTLEEVLQSSTDKPKAELDKLRAKAESALKDTRVRLSETSDKIAAQTKEIADKADNYVHDNPWTGVGIGAAVGVVLGVLLSRR

SEQ ID NO: 82483 - DNA, 303 bp, Burkholderia mallei ATCC 23344
  CDS (1)..(303): transl_table=11
atgtctgaagtcaacaaggagaaactgatgtcggatatcaaaactgttctcgcggacgcggaagatctgctgaagcaggccgcgagcagcacgggcgaccgtgcgaccgagctgcgcgagaaggcgctcgcacgcctgaaacaggcgaaggagaaggcgaccgatgtccagatggtcgtggtcgaaaaaggcaagaaggcggcgcgcgccaccgacgactacgtgcacgagcatccgtggacgtcgatcggcatcgcggccggcgtcggcgtattgatcggcctgctgatcaaccgcaagtaa

SEQ ID NO: 82484 - protein, 100 aa, Burkholderia mallei ATCC 23344
MSEVNKEKLMSDIKTVLADAEDLLKQAASSTGDRATELREKALARLKQAKEKATDVQMVVVEKGKKAARATDDYVHEHPWTSIGIAAGVGVLIGLLINRK

SEQ ID NO: 82485 - DNA, 327 bp, Pseudomonas fluorescens Pf-5
  CDS (1)..(327): transl_table=11
atggccaacacctcgttacgcaaagcctcactggaaagtatggaagccgagatctccagcctgctcaaatcgctggaaagcctgaaggacgatgcgtccgacgagtcgcgcaagaccctcaaggcgctcaagagcaatgccgaaagcgcgctgaagcattcgcgcagcctgctcagcgatgcctatgaagaagtcaaagtgaaaacccgtgaaaccgggatcgcgacccgcgactatgcccaggaacacccctggaccaccgccggggttgccgtgggtgccatcggcctgctggccgcctatctgctgtgcaagcgcggcgactaa

SEQ ID NO: 82486 - protein, 108 aa, Pseudomonas fluorescens Pf-5
MANTSLRKASLESMEAEISSLLKSLESLKDDASDESRKTLKALKSNAESALKHSRSLLSDAYEEVKVKTRETGIATRDYAQEHPWTTAGVAVGAIGLLAAYLLCKRGD

SEQ ID NO: 82487 - DNA, 351 bp, Dechloromonas aromatica RCB
  CDS (1)..(351): transl_table=11
atgtcagaggaatggaatggccatccagtcggatggtccgtccttccctacaaccacgcattgcagacaccaggagaaatcatgagtacagaaatcactaccaccccgggatcgaccgaaaacccgaaggaaagcctgttcaaagggatggtcggcaaggccgaccatctgctcaaggacgccagccattccgtggccgaagagttctccgcaacgcgccatgcggtgtcggaaaaggcttgtggcgccgccaatttaacccacgaatacgtgcgggcgaatccctggaaagtcgccggcatcgccgcggccgccggtgtcttcatcggcgccttgatcatccgccgctga

SEQ ID NO: 82488 - protein, 116 aa, Dechloromonas aromatica RCB
MSEEWNGHPVGWSVLPYNHALQTPGEIMSTEITTTPGSTENPKESLFKGMVGKADHLLKDASHSVAEEFSATRHAVSEKACGAANLTHEYVRANPWKVAGIAAAAGVFIGALIIRR

SEQ ID NO: 82489 - DNA, 327 bp, Ralstonia eutropha JMP134
  CDS (1)..(327): transl_table=11
atgtcagaaaacgcacaaaccgaactaaccgcccgcaaacaggagaaactgatgagcgatgtcaagaccgttctgtccgacgctgaagaactgctgaaacaagcagcgtcgaccaccggcgaaaaggctgccgaactgcgcgagcgtggcatgggcctgctgaagcaagccaaggaaaaggcccaggacctgcaagacgctgtggtcaccaagagcaaggccgccgcgcgcgcaactgatgactatgtgcacgaccatccgtggcgtgccgtcggcgtggctgccggtgtaggtctgctggtcggtctgctgctgaaccgcaagtaa

SEQ ID NO: 82490 - protein, 108 aa, Ralstonia eutropha JMP134
MSENAQTELTARKQEKLMSDVKTVLSDAEELLKQAASTTGEKAAELRERGMGLLKQAKEKAQDLQDAVVTKSKAAARATDDYVHDHPWRAVGVAAGVGLLVGLLLNRK

SEQ ID NO: 82491 - DNA, 303 bp, Burkholderia sp. 383
  CDS (1)..(303): transl_table=11
atgtcggaaatcaacaaggagaaactgatgtcggatatcaaaaccgttctctcggacgccgaagacctgctcaagcaagctgcgagcagcacgggcgaccgtgcggccgagctgcgcgagaaagccatgtcgcgcctgaagcaggccaaggaaaaggcagccgacgtccaggtcgtggtggtcgagaaaggcaagaaggccgcacgcgcgaccgacgactacgtgcacgagcatccgtggacgtcgatcggcgtcgctgctggcgtcggcgtgctgatcggcctgctgatcaaccgcaagtaa

SEQ ID NO: 82492 - protein, 100 aa, Burkholderia sp. 383
MSEINKEKLMSDIKTVLSDAEDLLKQAASSTGDRAAELREKAMSRLKQAKEKAADVQVVVVEKGKKAARATDDYVHEHPWTSIGVAAGVGVLIGLLINRK

SEQ ID NO: 82493 - DNA, 303 bp, Burkholderia xenovorans LB400
  CDS (1)..(303): transl_table=11
atgtcggaaatcaacaaggagagattgatgtcggatatcaaaaccgtcctcgcggacgctgaagatctgctgaaacaggccgcgagcgccaccggcgagcgcgcttcggaacttcgtgaaacagcgctgacgcgcctgaaacaggccagggaaaaggcggctgacgttcaggtcgtcgtggtcgaaaaaggcaagaaagcggcccgcgctaccgacgattacgtgcacgagcatccgtgggcatccatcggcattgcagcgggcgccggtgtgctgcttggattgttgatcaaccgcaagtaa

SEQ ID NO: 82494 - protein, 100 aa, Burkholderia xenovorans LB400
MSEINKERLMSDIKTVLADAEDLLKQAASATGERASELRETALTRLKQAREKAADVQVVVVEKGKKAARATDDYVHEHPWASIGIAAGAGVLLGLLINRK

SEQ ID NO: 82495 - DNA, 381 bp, Burkholderia xenovorans LB400
  CDS (1)..(381): transl_table=11
atgactgcacttccgaatacgcgagacgccctcggcgaatcgtggaccagcaccagccgccgtgcgcggcgtatcgctcgccacagccgccatgcggccgaagatatcgcaggcgaactgcgcacgctaatgtcggaactcgaatccacattggcggacggcacccaggctgacgcggtggcgctgcgcagcaaacttcgcaagcaactcgaagtggcgcgcgcccgcttgaacgacacgcgcgaagccgtgcgcgaacgcgccgaagtcgcgatctccgacgccgacgactacgtccacgaaaatccgtggcagacaatcgcgatcgtcggcggcgtggcattgattgccggcgcgctgttcgcctcgcggctgcgttaa

SEQ ID NO: 82496 - protein, 126 aa, Burkholderia xenovorans LB400
MTALPNTRDALGESWTSTSRRARRIARHSRHAAEDIAGELRTLMSELESTLADGTQADAVALRSKLRKQLEVARARLNDTREAVRERAEVAISDADDYVHENPWQTIAIVGGVALIAGALFASRLR

SEQ ID NO: 82497 - DNA, 309 bp, Azoarcus sp. BH72
  CDS (1)..(309): transl_table=11
atgaacgacaccgccccttcgaaagacaagctgatgtccgacctcaaggtcgtggtatcggatgcggaagaactcctcaagctcaccgcgggccaggccggcgacaagctcggcgacgtgcgcgtccgcctcggcgaacgccttgcgatcgcgaaggaacgcctgatcgaagccgaggccgcgctggtcgacaagacgcggcgcgccgctcacgccaccgacgactatgtgcacgagcacccgtggcagtcggtgggcgtcgcggcaggcgtgggtttcctgctcggactgctcgtcagccgccgctga

SEQ ID NO: 82498 - protein, 102 aa, Azoarcus sp. BH72
MNDTAPSKDKLMSDLKVVVSDAEELLKLTAGQAGDKLGDVRVRLGERLAIAKERLIEAEAALVDKTRRAAHATDDYVHEHPWQSVGVAAGVGFLLGLLVSRR

SEQ ID NO: 82499 - DNA, 303 bp, Burkholderia vietnamiensis G4
  CDS (1)..(303): transl_table=11
atgtcggaaatcaacaaggagaaactgatgtcggatatcaaaaccgttctggcggacgccgaggacctgctgaagcaggctgcgagcagcacgggcgaccgggctaccgagctgcgcgaaaaggccatgtcgcgcctgaagcaggccaaggaaaaggcaaccgacgtccaggtcgtggtggtcgagaaaggcaagaaggcggcgcgcgcaaccgacgactacgtgcacgagcatccgtggacgtcgatcggcgtcgctgccggcgtcggcgtgctgatcggcctgctgatcaaccgcaagtaa

SEQ ID NO: 82500 - protein, 100 aa, Burkholderia vietnamiensis G4
MSEINKEKLMSDIKTVLADAEDLLKQAASSTGDRATELREKAMSRLKQAKEKATDVQVVVVEKGKKAARATDDYVHEHPWTSIGVAAGVGVLIGLLINRK

SEQ ID NO: 82501 - DNA, 330 bp, Escherichia coli B
  CDS (1)..(330): transl_table=11
atgtttaaccgaccgaaccgcaacgacgttgatgatggcgtgcaggatatccagaatgatgtcaatcaattagctgacagcctcgaatctgtattgaagtcctggggcagcgacgccaaaggggaagctgaagccgcacgcagtaaagctcaggcattgctgaaagaaaccagggcgcgaatgcatggtcgtactcgcgtccagcaagccgcacgcgatgccgttggctgcgcggattcttttgttcgtgaaagaccttggtgtagcgtgggtacagcagctgcggtaggtatttttatcggcgcactgttaagcatgcgcaaatcgtag

SEQ ID NO: 82502 - protein, 109 aa, Escherichia coli B
MFNRPNRNDVDDGVQDIQNDVNQLADSLESVLKSWGSDAKGEAEAARSKAQALLKETRARMHGRTRVQQAARDAVGCADSFVRERPWCSVGTAAAVGIFIGALLSMRKS

SEQ ID NO: 82503 - DNA, 324 bp, Pseudomonas putida GB-1
  CDS (1)..(324): transl_table=11
atgcaccgcaactcgctgcgtaaaacgtccctggaaagcatggaagcggagatcgagagccttctgaaaagcctggagaacctcaagcacgatgcgtcggaagaatcccagaagtcggtgaaggcaatccgcagcaacgccgaaagcgcgctgaaacactcgcgcagcctgctcagcgatgcttatgaggaagtgaagacccgcacccgccagaccggcatcgccacccgtgattacgcccaggaacacccgattacaacggcaggcgtagccattggtgccctcggtctgctggcggcctatctgttgtcgcgtcgcaactaa

SEQ ID NO: 82504 - protein, 107 aa, Pseudomonas putida GB-1
MHRNSLRKTSLESMEAEIESLLKSLENLKHDASEESQKSVKAIRSNAESALKHSRSLLSDAYEEVKTRTRQTGIATRDYAQEHPITTAGVAIGALGLLAAYLLSRRN

SEQ ID NO: 82505 - DNA, 24 bp, Artificial sequence
  primer
atgtcgaaagaacacactacggaa

SEQ ID NO: 82506 - DNA, 22 bp, Artificial sequence
  primer
ttaacgacgcgacagcagaacg

SEQ ID NO: 82507 - protein, 81 aa, Artificial sequence
  consensus sequence
  Variant (2)..(18): Xaa in position 2 to 18 is any amino acid
  Variant (20)..(25): Xaa in position 20 to 25 is any amino acid
  Variant (27)..(52): Xaa in position 27 to 52 is any amino acid
  Variant (53)..(57): Xaa in position 53 to 57 is any or no amino acid
  Variant (60)..(62): Xaa in position 60 to 62 is any amino acid
  Variant (65)..(67): Xaa in position 65 to 67 is any amino acid
  Variant (69)..(73): Xaa in position 69 to 73 is any amino acid
  Variant (74)..(74): Xaa in position 74 is any or no amino acid
  Variant (76)..(78): Xaa in position 76 to 78 is any amino acid
  Variant (80)..(80): Xaa in position 80 is any amino acid
EXXXXXXXXXXXXXXXXXRXXXXXXLXXXXXXXXXXXXXXXXXXXXXXXXXXXXXXXYVXXXPWXXXGXXXXXXGXXXGXL

SEQ ID NO: 82508 - protein, 12 aa, Artificial sequence
  protein pattern
  Variant (2)..(2): Xaa in position 2 is Ala or Val
  Variant (3)..(3): Xaa in position 3 is any amino acid
  Variant (4)..(4): Xaa in position 4 is Ala, Asp, Glu or Gln
  Variant (5)..(5): Xaa in position 5 is any amino acid
  Variant (8)..(8): Xaa in position 8 is any amino acid
  Variant (9)..(9): Xaa in position 9 is Ala, Gly, Ser, Thr or Val
  Variant (10)..(10): Xaa in position 10 is Ala, Ile or Val
  Variant (11)..(11): Xaa in position 11 is Ala, Gly or Ser
  Variant (12)..(12): Xaa in position 12 is Ile or Val
YXXXXPWXXXXX

SEQ ID NO: 82509 - protein, 15 aa, Artificial sequence
  protein pattern
  Variant (2)..(3): Xaa in position 2 to 3 is any amino acid
  Variant (4)..(4): Xaa in position 4 is any or no amino acid
  Variant (6)..(7): Xaa in position 6 to 7 is Phe, Ile, Leu or Val
  Variant (8)..(8): Xaa in position 8 is Ile, Leu or Val
  Variant (10)..(10): Xaa in position 10 is Ala, Leu or Val
  Variant (12)..(13): Xaa in position 12 to 13 is any amino acid
  Variant (14)..(14): Xaa in position 14 is any or no amino acid
AXXXGXXXGXLXXXR

SEQ ID NO: 82510 - DNA, 465 bp, Escherichia coli
  CDS (1)..(465): transl_table=11
atgatgatgggtgaagtacagtcattaccgtctgctgggttacatcctgcgttacaggacgcgttaacgctggcattagctgccagaccgcaagaaaaagcgccgggtcgttacgaattacagggcgacaatatctttatgaatgtcatgacgtttaacactcaatcgcccgtcgagaaaaaagcggaattgcacgagcaatacattgatatccagctgttattaaacggtgaggaacggattctgtttggcatggcaggcactgcgcgtcagtgtgaagagttccaccatgaggatgattatcagctttgcagcaccattgataacgagcaagccatcatcttaaaaccgggaatgttcgccgtgtttatgccaggtgaaccgcataaaccaggatgcgttgtcggcgagcctggagagattaaaaaggttgtggtgaaggttaaggctgatttaatggcttaa

SEQ ID NO: 82511 - protein, 154 aa, Escherichia coli
MMMGEVQSLPSAGLHPALQDALTLALAARPQEKAPGRYELQGDNIFMNVMTFNTQSPVEKKAELHEQYIDIQLLLNGEERILFGMAGTARQCEEFHHEDDYQLCSTIDNEQAIILKPGMFAVFMPGEPHKPGCVVGEPGEIKKVVVKVKADLMA

SEQ ID NO: 82512 - DNA, 513 bp, Vibrio cholerae O1 biovar eltor str. N16961
  CDS (1)..(513): transl_table=11
ttgtggcggcttcgggcgagcagtatcaataaggaaacgccgatgtttattggtcatatcacgcagcgccagttttgcgctgcattgtcacctcagttgcaacggctgattaatgaagtattacagcgtgtagcggcaccactaccaacaggtaaacacgagttgcagggtgattcggcgttttttctggtgatggaagatcatacccaaccgctcgctctgcgtcgtagcgagtgccatgctcggtatctcgatgtgcagattttactgcaagggcgtgagcgctttggttacagtctcgcgccgttcagtggcttggacgaagatttgctggcaacacgcgatgtggcgttcagtgcacaactggtcgaagagcgctttgtcgatttggcggcgggagatttcattgtgttctatcccggtcaaccgcatcgccctttgattgcggtagaaggtgagggtgagcctgtacgtaaagtggtgatcaaggttgataaagctttttttgagtaa

SEQ ID NO: 82513 - protein, 170 aa, Vibrio cholerae O1 biovar eltor str. N16961
MWRLRASSINKETPMFIGHITQRQFCAALSPQLQRLINEVLQRVAAPLPTGKHELQGDSAFFLVMEDHTQPLALRRSECHARYLDVQILLQGRERFGYSLAPFSGLDEDLLATRDVAFSAQLVEERFVDLAAGDFIVFYPGQPHRPLIAVEGEGEPVRKVVIKVDKAFFE

SEQ ID NO: 82514 - DNA, 477 bp, Pasteurella multocida subsp. multocida str. Pm70
  CDS (1)..(477): transl_table=11
atgttttttggtcatctctctcaggttgacaaaaagcagtatcctgaagcaatcaatattgctttagattatttgtcaaacactgactttaaccagttagcggcgggacgttatcctatacgcggtgatcgtatctatgcccaagttttagatttagaaacccaagaaccgtcgatgctttatcccgaagtccatcgccattatattgatgtgcaatatttgcattctggtttcgaacgtattggcgtcgccattgatttaggtaacaacgacattgcaaagccgtatgatgcaacgcgagatatcctgttttatcagaatgtcgaaaatgaagtacagctcattatgcgtccaggtcattttgctatcttctttccaagtgatgtacaccgcccggcttgtattgatggtcattccacgtcgatccgtaaagttgtggtgaaaattgcggtcagtgaattagaggtgtcaccatga

SEQ ID NO: 82515 - protein, 158 aa, Pasteurella multocida subsp. multocida str. Pm70
MFFGHLSQVDKKQYPEAINIALDYLSNTDFNQLAAGRYPIRGDRIYAQVLDLETQEPSMLYPEVHRHYIDVQYLHSGFERIGVAIDLGNNDIAKPYDATRDILFYQNVENEVQLIMRPGHFAIFFPSDVHRPACIDGHSTSIRKVVVKIAVSELEVSP

SEQ ID NO: 82516 - DNA, 468 bp, Pasteurella multocida subsp. multocida str. Pm70
  CDS (1)..(468): transl_table=11
atgtttattggggacttaacaagaaacgatttcaaattaggcttacctcctgttattgctgaggtatgtgactatttaaatacattagatttagctgctttagaaactgggcgtcatgacattactgagcaaatttatatgaatgtcatggcatttgataccgcggcggcagaaagtaaacaagctgagttacatcgtcaatatattgatgtacaagtgttgatctcaggacaggaaaatatcgaatatagtgtcgcttatcctacattagccaactataccgaatacgatgaaaaagacgattatcaactgaccccagaaatcgagtataaaagtacactcacattaaaaccgaaaatgtttgtggtgttcttgccttatgaaccacataaacctggctgtaatgtggataaccaagtgataagtttgaaaaaacttgtcgtaaaagtgccggttgaattgctgtga

SEQ ID NO: 82517 - protein, 155 aa, Pasteurella multocida subsp. multocida str. Pm70
MFIGDLTRNDFKLGLPPVIAEVCDYLNTLDLAALETGRHDITEQIYMNVMAFDTAAAESKQAELHRQYIDVQVLISGQENIEYSVAYPTLANYTEYDEKDDYQLTPEIEYKSTLTLKPKMFVVFLPYEPHKPGCNVDNQVISLKKLVVKVPVELL

SEQ ID NO: 82518 - DNA, 456 bp, Yersinia pestis CO92
  CDS (1)..(456): transl_table=11
ttggcacaaccggcgttttttagtggcttacctgaacgtcttcaatgggtattagcttatctggcggatatgcctttagcgcagttaagctgcgggcggcatgagatagacggtgagttgatgtttatgaatgtcatggcgtttgacactcaacccgcagagagtaagaaagcagagctgcatcgtacctacgccgatgtgcaattgctgatcagcggcattgaggggattgagtattcgaccctgacaccgacagaacatctggagccttatcaccctgatgatgattatcagctcatcgccgatattccagataaaagccagttacgtatgttgcccggcatgtttgcggtatttttaccgggagagccacataaaccaggctgccagatagccggttctggtgctatcaaaaaggtggtcgtgaaggttcattatagtcttttgaatagctag

SEQ ID NO: 82519 - protein, 151 aa, Yersinia pestis CO92
MAQPAFFSGLPERLQWVLAYLADMPLAQLSCGRHEIDGELMFMNVMAFDTQPAESKKAELHRTYADVQLLISGIEGIEYSTLTPTEHLEPYHPDDDYQLIADIPDKSQLRMLPGMFAVFLPGEPHKPGCQIAGSGAIKKVVVKVHYSLLNS

SEQ ID NO: 82520 - DNA, 468 bp, Salmonella typhimurium LT2
  CDS (1)..(468): transl_table=11
atgatgatgggggaagtacagtcgttgccttcttgcgggttgcatccgcgattgttggatgccttgactctcgcgctggcggcaaggccgcaggagaaagcgccggggcgctatgaattgcagggcgacaatgtctttatgaatgtaatgcagttaacgacgcaaatgccggccgagaagaaagcggaattgcatgaacaatacattgatattcagctactactaaccggcgtcgagcgtattgcgtttgggatgtccggtgccgctcgccagtgcgaggagatgcacgttgaagaggattaccagctttgtagtcaaattgtcgacgagcagactattacgctgcaagcggggatgtttgctgtgtttatgccgggagaaccgcataaaccgggatgtgcagtgggtgagccggatgacatcaagaaagtggtagtgaaagtacgcgccagtctgctggcggcctga

SEQ ID NO: 82521 - protein, 155 aa, Salmonella typhimurium LT2
MMMGEVQSLPSCGLHPRLLDALTLALAARPQEKAPGRYELQGDNVFMNVMQLTTQMPAEKKAELHEQYIDIQLLLTGVERIAFGMSGAARQCEEMHVEEDYQLCSQIVDEQTITLQAGMFAVFMPGEPHKPGCAVGEPDDIKKVVVKVRASLLAA

SEQ ID NO: 82522 - DNA, 465 bp, Salmonella typhimurium LT2
  CDS (1)..(465): transl_table=11
atgatttttggacatatcgcgcagcctgatccgtgccggttaccgtcggccatagagcaggcgctcgatttcctgcgtaatacggactttcgcacgctggaacctggcgtagtggaaatcgacggcaaaaatatcttcgcgcagattatcgatatgaccacccgcgatgctgctgaaaatcgtccggaagtccatcgccgctatctggatattcagtttctggcatggggtgaagagaaaattggggttgccattgataccggtaataatcaaatcagcgagtcattattagaacagcgcgatattattttttatcacgacagtgaacatgaatcattcattgaaatgataccgggaagttatgccctgtttttcccgcaggatgttcatcgtccaggttgtaataaaagcattgctacgccgatacggaaaatagtcgtaaaagtcgccatagacgttttataa

SEQ ID NO: 82523 - protein, 154 aa, Salmonella typhimurium LT2
MIFGHIAQPDPCRLPSAIEQALDFLRNTDFRTLEPGVVEIDGKNIFAQIIDMTTRDAAENRPEVHRRYLDIQFLAWGEEKIGVAIDTGNNQISESLLEQRDIIFYHDSEHESFIEMIPGSYALFFPQDVHRPGCNKSIATPIRKIVVKVAIDVL

SEQ ID NO: 82524 - DNA, 453 bp, Salmonella typhimurium LT2
  CDS (1)..(453): transl_table=11
atgattattggcaatattgaacatctggaggtctggctgccgacggcgttacggcaggcgattgagcacgtcaatgcgcatgtcacgacaacgaccgcgccaggtaagtatgacattgacggcgacaggctgttttatatgatttctgaaaatatgacggagccgggcgaatcgcgcagcgcagagtatcacgctcgttatcttgatattcagattgtgctacaaggtcaggaagggatggcattcagtacccggcctgcgggaacgccgcacacggactggctggcggataaagacattgcatttttaccgacgagcgtcgacgagaaaaccgtcgtcctgaacgaaggcgactttgtggtgttttatcccggcgaagtgcataagcccctgtgcgcggtgggagaaccggcgcgggtacgtaaagcggttgtgaaaatgctgatggcgtaa

SEQ ID NO: 82525 - protein, 150 aa, Salmonella typhimurium LT2
MIIGNIEHLEVWLPTALRQAIEHVNAHVTTTTAPGKYDIDGDRLFYMISENMTEPGESRSAEYHARYLDIQIVLQGQEGMAFSTRPAGTPHTDWLADKDIAFLPTSVDEKTVVLNEGDFVVFYPGEVHKPLCAVGEPARVRKAVVKMLMA

SEQ ID NO: 82526 - DNA, 453 bp, Clostridium perfringens str. 13
  CDS (1)..(453): transl_table=11
atgatattcggcaatttaataaacttagaaagttatgattatctaccaaaacttgttaaggaagctttactacatgcaaaaaataataatgtaatagagtttgaaccaggtactcatgaaataaaaggcgaagagttgttctttaatagagttaattacactacaaaaaataaggaagatcgtttttgggaaggtcataagaaatatatagatgttcatgtggtttttagtggaagagaaagaatagatcttaactttaaagaaaatttagagtttaaagagttcgttgaaaaagatgacttcttatcttttgatggcaaagaaaattctacagttattttagaagagggagatttccttatctgttatccagaagatatacacatgacttgtttaaaggctgataatgagccttcagatgtaaagaaagctatttataaagtaattttatag

SEQ ID NO: 82527 - protein, 150 aa, Clostridium perfringens str. 13
MIFGNLINLESYDYLPKLVKEALLHAKNNNVIEFEPGTHEIKGEELFFNRVNYTTKNKEDRFWEGHKKYIDVHVVFSGRERIDLNFKENLEFKEFVEKDDFLSFDGKENSTVILEEGDFLICYPEDIHMTCLKADNEPSDVKKAIYKVIL

SEQ ID NO: 82528 - DNA, 462 bp, Shewanella oneidensis MR-1
  CDS (1)..(462): transl_table=11
atgattgtcgatactttagctaatcgccatatttatcaatcactcagcccacgtattgccacagcattagcacacttagccacaacggattttagccaactgcccgttggaaattaccctctcgatggcgataatattttcgtgatcgtcaatgattaccaaaccaagccacaatcgaccgaaccctttgaagtacatcaaaaatatattgatgtacagtatgtggtcagtggtgaagaagagtttggttatctgccattagctgaccaaaccccatcaaagccttatttcgataaacacgactacgccgaatttgattacgagtccaacaaaaaaaatgcctcttatattcagcttaaagcaggcatgtttgcgctctttttcccaggggacatgcatatgcctggcacaagcgactccccagtggccgtgcgtaaagtcgtgataaaagtgaaaatctaa

SEQ ID NO: 82529 - protein, 153 aa, Shewanella oneidensis MR-1
MIVDTLANRHIYQSLSPRIATALAHLATTDFSQLPVGNYPLDGDNIFVIVNDYQTKPQSTEPFEVHQKYIDVQYVVSGEEEFGYLPLADQTPSKPYFDKHDYAEFDYESNKKNASYIQLKAGMFALFFPGDMHMPGTSDSPVAVRKVVIKVKI

SEQ ID NO: 82530 - DNA, 468 bp, Salmonella enterica subsp. enterica serovar Typhi Ty2
  CDS (1)..(468): transl_table=11
atgatgatgggggaagtacagtcgttgccttcttgcgggttgcatccgcgactgctggatgccttgactctcgcgctggcggcaaggccgcaggagaaagcaccggggcgctatgaattgcagggcgacaatatctttatgaatgtaatgcagttaacgacgcaaatgcctgccgggaagaaagcggaattgcatgaacaatacattgatattcagctactactaaccggcgtcgagcgtattgcgtttgggatgtccggtgccgctcgccagtgcgaggagatgcacgttgaagaggattaccagctttgtagtcaaattgccgacgagcagactattacgctgcaagcggggatgtttgctgtgtttatgccgggagaaccgcataaaccgggatgtgcagtgggtgaaccggatgacatcaagaaagtggtagtgaaagtacgcgccagtttgctggcggcctga

SEQ ID NO: 82531 - protein, 155 aa, Salmonella enterica subsp. enterica serovar Typhi Ty2
MMMGEVQSLPSCGLHPRLLDALTLALAARPQEKAPGRYELQGDNIFMNVMQLTTQMPAGKKAELHEQYIDIQLLLTGVERIAFGMSGAARQCEEMHVEEDYQLCSQIADEQTITLQAGMFAVFMPGEPHKPGCAVGEPDDIKKVVVKVRASLLAA

SEQ ID NO: 82532 - DNA, 453 bp, Salmonella enterica subsp. enterica serovar Typhi Ty2
  CDS (1)..(453): transl_table=11
atgattgttggcaatattgaacatctggaggcctggctgccgacggcgttacggcaggcgattgagcacgtcaacgcgcatgtcacggcaacgaccgcgccaggtaagtatgacattgacggcgacaggctgttttatatgatttctgaaaatatgacggagccgggcgaatcgcgcagcgcagagtatcacgcccgttatcttgatattcagattgtgctacaaggtcaggaagggatggcattcagtacccggcctgcgggaacgccgcacacggactggttggcggataaagacattgcatttttaccgacgagcgtcgacgagaaaaccgtcgtcctgaacgaaggtgactttgtggtgttttatcccggcgaagtgcataagcccctgtgcgcggtgggagaaccggcgcgggtacgtaaagcggttgtgaaaatgctgatggcgtaa

SEQ ID NO: 82533 - protein, 150 aa, Salmonella enterica subsp. enterica serovar Typhi Ty2
MIVGNIEHLEAWLPTALRQAIEHVNAHVTATTAPGKYDIDGDRLFYMISENMTEPGESRSAEYHARYLDIQIVLQGQEGMAFSTRPAGTPHTDWLADKDIAFLPTSVDEKTVVLNEGDFVVFYPGEVHKPLCAVGEPARVRKAVVKMLMA

SEQ ID NO: 82534 - DNA, 468 bp, Haemophilus ducreyi 35000HP
  CDS (1)..(468): transl_table=11
atgctattaggtgacttatctcgctcagattgtataacatcattaccgcctattttcgctaaactttgtcgcaaattacaaacccttgatttgttaacgcttccgttaggttggcaagaattgatggacggcattcgtatgaatgttatggagtttgaaacaagttcagcagaagataaaaaagcagaaatacatcgtaaatttattgatattcaattgttaattgatggacaagaaatgattgaatatggcttaagacagcctgatttaacagaatatgatgaatatcacgaagaaggggactatcagttaacgaatacaattgagcataaaaatagcgtcgtattacagccaaatatgttcgcgatttttttgccttatgagccacataagccgggtaatagtcttgatggtaaatctttaccaataagaaaattagtggtgaaagtgccaactagttatttatag

SEQ ID NO: 82535 - protein, 155 aa, Haemophilus ducreyi 35000HP
MLLGDLSRSDCITSLPPIFAKLCRKLQTLDLLTLPLGWQELMDGIRMNVMEFETSSAEDKKAEIHRKFIDIQLLIDGQEMIEYGLRQPDLTEYDEYHEEGDYQLTNTIEHKNSVVLQPNMFAIFLPYEPHKPGNSLDGKSLPIRKLVVKVPTSYL

SEQ ID NO: 82536 - DNA, 468 bp, Vibrio vulnificus YJ016
  CDS (1)..(468): transl_table=11
gtgtttgtcggtaaaacaacagagctcgcctttacatcttgtctctcttcaaatctcaagcaaatcattacgcaggtagtggctaaactggctgagcccattgaagatgggcgtcatgagttggacggcgacaacgcgttctttctggtcatgagtgaccatactcagccactcgcgttaagaaaatcagaatgccaccagcgctacctcgacgtacaaattctgttaagcgggaaagagacgtttggctacagcttgctaccgtttgcagcattggatgaagactatctcgcagagcgcgacttggcatttagtcaccatgttgtagatgaaaagtttgtgacactcggcgaaaacgagttcattattttcccgccagggcagccccatcgtccgcttatcgcaccagaaggcgaaggctcatccgtgcgtaaagtggtcattaaggtggatggcgcaacactttaa

SEQ ID NO: 82537 - protein, 155 aa, Vibrio vulnificus YJ016
MFVGKTTELAFTSCLSSNLKQIITQVVAKLAEPIEDGRHELDGDNAFFLVMSDHTQPLALRKSECHQRYLDVQILLSGKETFGYSLLPFAALDEDYLAERDLAFSHHVVDEKFVTLGENEFIIFPPGQPHRPLIAPEGEGSSVRKVVIKVDGATL

SEQ ID NO: 82538 - DNA, 468 bp, Erwinia carotovora subsp. atroseptica SCRI1043
  CDS (1)..(468): transl_table=11
atgattactggcaatgtccaccaccttgacttggttccttatcttccagccaaactgcgtgaagcgattgaatacgtgaagcaaaacatcacggcagacacgccgttgggtaagcatgatatcgagggcaatagcgtgtttgtgctgatctccaacgacagcacggacctgctggaaaaacgtcgtgccgaatatcacgccaagtatctggacattcagattgtgttgtccggtgtggaagggatgacgttcagcaacctgcctgcgggcaagccagatactgattggttggcggataaagatattgcttttctgcctgcaggcgaacaggaaaagctgtttgtgatgcaggaaggggattttgtcgtcttcttcccaggagaagtgcacaagccgctgtgtgccgttggtgaacccgcgcacgtgcgcaaagctgtggtgaaaatcgacgcgtcgctggtggtgtaa

SEQ ID NO: 82539 - protein, 155 aa, Erwinia carotovora subsp. atroseptica SCRI1043
MITGNVHHLDLVPYLPAKLREAIEYVKQNITADTPLGKHDIEGNSVFVLISNDSTDLLEKRRAEYHAKYLDIQIVLSGVEGMTFSNLPAGKPDTDWLADKDIAFLPAGEQEKLFVMQEGDFVVFFPGEVHKPLCAVGEPAHVRKAVVKIDASLVV

SEQ ID NO: 82540 - DNA, 468 bp, Erwinia carotovora subsp. atroseptica SCRI1043
  CDS (1)..(468): transl_table=11
atgattgcaggaaacctcgacaccctcaaactcgccacgcttcccgatgcgctgtgggccattctgtccgcgccgggcatgtcgttggctgaactgaatgcgctacccgaaggccgttatcagcctgaaggggccgaatggttttacaacatcggcaccgtgaataccgcgccgcgcgccacacgacataccgaattccatagcaactatctcgatatccaactgattctggaaggcgaggagattatcggttacggtctgaatgatgtgcatggtcagcccgcgactgaacgtaagccagatctctatattctggataacccagaggtgccgcatcagatccacctacgggcaggcgacttcgtcaccttctatccgggagaagcccatcaggcactgtgtgccatcaacgacaaccctgcaccggtcaaaaaagccgtgtttaaaatccccgtcacgttgttgtga

SEQ ID NO: 82541 - protein, 155 aa, Erwinia carotovora subsp. atroseptica SCRI1043
MIAGNLDTLKLATLPDALWAILSAPGMSLAELNALPEGRYQPEGAEWFYNIGTVNTAPRATRHTEFHSNYLDIQLILEGEEIIGYGLNDVHGQPATERKPDLYILDNPEVPHQIHLRAGDFVTFYPGEAHQALCAINDNPAPVKKAVFKIPVTLL

SEQ ID NO: 82542 - DNA, 459 bp, Yersinia pseudotuberculosis IP 32953
  CDS (1)..(459): transl_table=11
atgattatcggaaatattcatcatttggcactgctgccttatctgccagcccaattgcgggacgccatcgagtatgtgaaaagccatatcaacgcagataccccattgggtaagcatgatattgatggcaataatgtgttcgtgttggtttccaatgacagcactgacttattagagaatcgccgtgcggaatatcacgccaagtatttggatatccaaattattttggcagggcaggaagggatggctttcagtaatctacccgcaggaaagccagataccgattggttggcagacaaagatattgccttcttacccgcaggcacagatgaaaaacacgtcgtgctgcaaaccggtgattttgtcgtatttttcccaggtgaagtgcataagccattatgtgccgtgggcgagccggcgaatgtgcgtaaagcggttgttaaaatagcggtgaaatag

SEQ ID NO: 82543 - protein, 152 aa, Yersinia pseudotuberculosis IP 32953
MIIGNIHHLALLPYLPAQLRDAIEYVKSHINADTPLGKHDIDGNNVFVLVSNDSTDLLENRRAEYHAKYLDIQIILAGQEGMAFSNLPAGKPDTDWLADKDIAFLPAGTDEKHVVLQTGDFVVFFPGEVHKPLCAVGEPANVRKAVVKIAVK

SEQ ID NO: 82544 - DNA, 468 bp, Yersinia pseudotuberculosis IP 32953
  CDS (1)..(468): transl_table=11
atgatacttgatgaactaaaaaaagcggtgaataaccccatctatccagaagtgatccgtcggacactggcggcaatcagccaaatggatttagcggccctccccgccggtgaacttgagattgaagggcgcgaaatctacctgaaccatatgatcgccacgacgaaaccactgtatgagcaacgccctgaattacaccgctattacattgatattcatattctcttagaaggcagtgaagtgatcggggcttcgccatcaacccaaggccaacgcccgacgatggattttgatagtgagaaagattacggtttgtttgaggggatgagtaccgagaccttgctgacgttagcaccgggtgatattgccctactgttccctggggaattgcatcgcccgatggggacattaacagacccggcccccatccgtaagctagtggtgaaggtggctaatcatcttttatga

SEQ ID NO: 82545 - protein, 155 aa, Yersinia pseudotuberculosis IP 32953
MILDELKKAVNNPIYPEVIRRTLAAISQMDLAALPAGELEIEGREIYLNHMIATTKPLYEQRPELHRYYIDIHILLEGSEVIGASPSTQGQRPTMDFDSEKDYGLFEGMSTETLLTLAPGDIALLFPGELHRPMGTLTDPAPIRKLVVKVANHLL

SEQ ID NO: 82546 - DNA, 471 bp, Yersinia pseudotuberculosis IP 32953
  CDS (1)..(471): transl_table=11
atgatcagtggatccttggcacaaccggcgttttttagtggcttacctgaacgtcttcaatgggtattagcttatctggcggatatgcctttagcgcagttaagctgcgggcggcatgagatagacggtgagttgatgtttatgaatgtcatggcgtttgacactcaacccgcagagagtaagaaagcagagctgcatcgtacctacgccgatgtgcaattactgatcagcggcattgaggggattgagtattcgaccctgacaccgacagaacatctggagccttatcaccctgatgatgattatcagctcatcgccgatattccagataaaagccagttacgtatgttgcccggcatgtttgcggtatttttaccgggagagccacataagccaggctgccagataaccggttctggtgctatcaaaaaggtggtcgtgaaggttcattatagtcttttgaatagctag

SEQ ID NO: 82547 - protein, 156 aa, Yersinia pseudotuberculosis IP 32953
MISGSLAQPAFFSGLPERLQWVLAYLADMPLAQLSCGRHEIDGELMFMNVMAFDTQPAESKKAELHRTYADVQLLISGIEGIEYSTLTPTEHLEPYHPDDDYQLIADIPDKSQLRMLPGMFAVFLPGEPHKPGCQITGSGAIKKVVVKVHYSLLNS

SEQ ID NO: 82548 - DNA, 468 bp, Mannheimia succiniciproducens MBEL55E
  CDS (1)..(468): transl_table=11
atgtatattggtgatcttaaccgaaatgactatcaacgggatttacctaaagtgttagcggatgtctgcgattatttaaaaacgctggatttatccgcattggaaaatggtcgtcatgaaattaatgaaaatatttttatgaatgtgatgacaccaaccagtgatgcggcggaaaataaaaaatccgaactacaccacagatatattgatatccagctggttatttccggtttggacggcatggaatacagtgtgacagagcctgctctggagaaatacgaggaatatcaccaagaagaggattatcaactaaccgcagctgaaattgcagataaaaactggattgttgtgcgcccgaatcaatttgtagtgttctatccgtacgaacagcacaaaccgtgttgcaatgtgaacggtcaggctgaacttaaaaaattagtggttaaagtacccgtggcgttactgtaa

SEQ ID NO: 82549 - protein, 155 aa, Mannheimia succiniciproducens MBEL55E
MYIGDLNRNDYQRDLPKVLADVCDYLKTLDLSALENGRHEINENIFMNVMTPTSDAAENKKSELHHRYIDIQLVISGLDGMEYSVTEPALEKYEEYHQEEDYQLTAAEIADKNWIVVRPNQFVVFYPYEQHKPCCNVNGQAELKKLVVKVPVALL

SEQ ID NO: 82550 - DNA, 471 bp, Haemophilus somnus 129PT
  CDS (1)..(471): transl_table=11
atgatttttggtgatttaacaagagatgattttaagcgtaacttaccacaagtaatggccgatatttgcaatcgtcttaatacactagatttagaaaatttgaccacaggtcgacatgatttaaccgatcaaatttatatgaatgtcatggagtcgacgactgtggcttctgaagataaaaaagcagaattgcatcatcaatatattgatattcaagtgttaatttccggtgcggaaacaattgaatatggcgttgaatatccgaatttagcagactgtaccgcttataatgagcaagacgattatcagttaattgatgatattccgcataaaagtgcggtaacattacgtccgaaaatgtttgcgatattttttccttatgagccgcacaaaccttgctgtaatgttcatggtcaagttacccacttaaaaaaactggtagttaaaataccgatatcattaatcgattaa

SEQ ID NO: 82551 - protein, 156 aa, Haemophilus somnus 129PT
MIFGDLTRDDFKRNLPQVMADICNRLNTLDLENLTTGRHDLTDQIYMNVMESTTVASEDKKAELHHQYIDIQVLISGAETIEYGVEYPNLADCTAYNEQDDYQLIDDIPHKSAVTLRPKMFAIFFPYEPHKPCCNVHGQVTHLKKLVVKIPISLID

SEQ ID NO: 82552 - DNA, 462 bp, Shewanella sp. MR-4
  CDS (1)..(462): transl_table=11
atgattgtcgataccttagctaatcgccatatttatcaatcactcagtccacgcattgccacggcattagcgcatcttgccagcactgactttagccaactgcccgttggcaattatcccctcgatggcgaggatattttcgtaatagtcaacgattaccacactaagccacaatccaccgaaccctttgaagtacatcaaaaatacatcgatgtgcagtatgtggtcagtggcgaagaagagtttggctatctaccattgtccgaccagacaccctcaaaaccttatttcgaaaagcacgattacgccgagttcgattacgagtcgaataaagccaacgcctcctacattcaactaaaggcggggatgttcgcgctcttcttccctggcgacatgcatatgcccggcacgagtgatacaccgacagcggtgcgtaaagtcgtgataaaagtgaagatctaa

SEQ ID NO: 82553 - protein, 153 aa, Shewanella sp. MR-4
MIVDTLANRHIYQSLSPRIATALAHLASTDFSQLPVGNYPLDGEDIFVIVNDYHTKPQSTEPFEVHQKYIDVQYVVSGEEEFGYLPLSDQTPSKPYFEKHDYAEFDYESNKANASYIQLKAGMFALFFPGDMHMPGTSDTPTAVRKVVIKVKI

SEQ ID NO: 82554 - DNA, 462 bp, Shewanella sp. ANA-3
  CDS (1)..(462): transl_table=11
atgattgtcgataccttagctaatcgccatatttatcaatcactcagcccacgcattgccacggcattagcgcatctcgccagcactgactttagccaattgcccgttggcaattatcccctcgatggcgaggatattttcgtaatagtcaacgattaccacaccaagccacaatcgaccgaaccctttgaagtacatcaaaaatacatcgatgtgcagtatgtggtcagtggcgaagaagagtttggctatctaccattggcaggccaaaccccatcaaaaccttatttcgaaaagcacgattacgccgagttcgattacgagtcgaataaagccaacgcctcctacatacaactaaaggcggggatgttcgcactctttttccccggcgatatgcatatgcccggcacgagtgatacaccgacagcggtgcgtaaagtcgtgataaaagtgaagatctaa

SEQ ID NO: 82555 - protein, 153 aa, Shewanella sp. ANA-3
MIVDTLANRHIYQSLSPRIATALAHLASTDFSQLPVGNYPLDGEDIFVIVNDYHTKPQSTEPFEVHQKYIDVQYVVSGEEEFGYLPLAGQTPSKPYFEKHDYAEFDYESNKANASYIQLKAGMFALFFPGDMHMPGTSDTPTAVRKVVIKVKI

SEQ ID NO: 82556 - DNA, 456 bp, Fusobacterium nucleatum subsp. vincentii ATCC 49256
  CDS (1)..(456): transl_table=11
atgatatatgctgaattaaaaaatatcaaaacttacaaagggattagtaaaaacttagataaagcaatagattttattgttggaaaaaagtatttgaatgcaaattttggaaaaaatattatagatggtgatgcagtatattttaactgtcctgaaaaacctataacaagagaaaatacaaacttagacctagaatatcataaaaaatatatagatattcatattgttcttgaaggtgaagaagtcattgcatatactccacttgaagattgtttagaaactcaaagttataatgatgaagaagattatgctcttgtaaaaggaaaagcacaagtcgaattaatattaaatgctaaaaactttcttcttttttttccagaagaacctcatttagcacttttaaaaattgatacaccaaaagaaataaaaaaagtaatatttaaagtagagatataa

SEQ ID NO: 82557 - protein, 151 aa, Fusobacterium nucleatum subsp. vincentii ATCC 49256
MIYAELKNIKTYKGISKNLDKAIDFIVGKKYLNANFGKNIIDGDAVYFNCPEKPITRENTNLDLEYHKKYIDIHIVLEGEEVIAYTPLEDCLETQSYNDEEDYALVKGKAQVELILNAKNFLLFFPEEPHLALLKIDTPKEIKKVIFKVEI

SEQ ID NO: 82558 - DNA, 468 bp, Haemophilus influenzae R2846
  CDS (1)..(468): transl_table=11
atgattattagcagtttaaccagcccgaattttaaagttggtttaccaaaagtgattgctgaagtatgtgattatttgaatacgttagatttgaatgcgttagaaaatggtcgccatgatattaacgatcaaatttatatgaacgtaatggaaccagaaactgcagaatcaagcagtaaaaaagcagaattacatcatgaatacttagatgtacaagtgcttattcgtggcacggaaaatatcgaagtgggcgcaacctatccgaatttatctaagtatgaagattacaacgaagcggatgattatcaactttgtgcagatattgatgataaattcaccgtcacaatgaaaccaaaaatgttcgctgtattctatccttatgaaccgcacaagccttgctgtgtagtgaatggaaaaacagaaaaaattaaaaaattggtcgtaaaagtacctgttaaattaatttga

SEQ ID NO: 82559 - protein, 155 aa, Haemophilus influenzae R2846
MIISSLTSPNFKVGLPKVIAEVCDYLNTLDLNALENGRHDINDQIYMNVMEPETAESSSKKAELHHEYLDVQVLIRGTENIEVGATYPNLSKYEDYNEADDYQLCADIDDKFTVTMKPKMFAVFYPYEPHKPCCVVNGKTEKIKKLVVKVPVKLI

SEQ ID NO: 82560 - DNA, 468 bp, Escherichia coli B
  CDS (1)..(468): transl_table=11
atgatttttggacatatcgcgcagcccaatccgtgccgtttgcccgccgccattgaaaaggcgctcgattttctgcgcgctaccgatttcaacgccctggagccgggcgttgtcgaaatcgacggcaaaaatatttatacgcaaattatcgatttaaccacacgcgaagcggtggtaaaccgtccggaagtgcatcgtcggtatatcgatattcagtttctggcgtggggcgaagagaaaatcggcattgctattgatacgggaaataataaagtcagcgaatcactattagagcagcgcgatattattttttatcacgacagtgaacatgaatcatttatagaaatgataccgggcagctacgcaattttctttccgcaggatgttcaccgaccaggttgtattatgcaaacagcctctgagatacgaaaaattgtggttaaagtcgcattaacggcgctgaattaa

SEQ ID NO: 82561 - protein, 155 aa, Escherichia coli B
MIFGHIAQPNPCRLPAAIEKALDFLRATDFNALEPGVVEIDGKNIYTQIIDLTTREAVVNRPEVHRRYIDIQFLAWGEEKIGIAIDTGNNKVSESLLEQRDIIFYHDSEHESFIEMIPGSYAIFFPQDVHRPGCIMQTASEIRKIVVKVALTALN

SEQ ID NO: 82562 - DNA, 465 bp, Escherichia coli B
  CDS (1)..(465): transl_table=11
atgatgatgggtgaagtacagtcattaccgtctgctgggttacatcctgcgttacaggacgcgttaacgctggccttagctgccagaccgcaagaaaaagcgccgggtcgttacgaattacagggcgacaatatttttatgaatgtcatgacgtttaacactcaatcgcccgtcgagaaaaaagcggaattgcacgagcaatacattgatatccagctgttattaaacggtgaggaacggattctgtttggcatggcaggcactgcgcgccaatgtgaagagttccaccatgaagatgattaccagctttgcagcgccattgaaaacgagcaaaccatcaacttaaaaccgggaatgttcgccgtgtttatgccgggagaaccgcataaaccaggatgcgttgtcggcgagccgggtgagattaaaaaggtggtggtgaaggttaaggctgatttaatggcttaa

SEQ ID NO: 82563 - protein, 154 aa, Escherichia coli B
MMMGEVQSLPSAGLHPALQDALTLALAARPQEKAPGRYELQGDNIFMNVMTFNTQSPVEKKAELHEQYIDIQLLLNGEERILFGMAGTARQCEEFHHEDDYQLCSAIENEQTINLKPGMFAVFMPGEPHKPGCVVGEPGEIKKVVVKVKADLMA

SEQ ID NO: 82564 - DNA, 465 bp, Klebsiella oxytoca
  CDS (1)..(465): transl_table=11
atgatttttggtcatattgctcaacctaatccgtgtcgtctgcccgcggccattgagcgggcgcttgatttcctgcgcacgacggatttccacgcgctggcacccggcgtcgtggaaatcgacggccaaaacatcttcgcgcaggttatcgacttaaccactcgcgatgccgctgaaaatcgtccggaggtccaccgtcgctatctggatatccagtttctggcatcgggcgaagaaaaaatcggtatcgccattgataccggcaataatcaaatcagcgaatctttattagaacagcgcgatattattttttatcacgacagcgaacatgaatcgttctttgaaatgacgccaggcaactatgcgatatttttcccgcaagatgttcatcgtcctggatgtaataaaactgtagccacgccgatccgcaaaatagtcgttaaagtcgctatttcagttttataa

SEQ ID NO: 82565 - protein, 154 aa, Klebsiella oxytoca
MIFGHIAQPNPCRLPAAIERALDFLRTTDFHALAPGVVEIDGQNIFAQVIDLTTRDAAENRPEVHRRYLDIQFLASGEEKIGIAIDTGNNQISESLLEQRDIIFYHDSEHESFFEMTPGNYAIFFPQDVHRPGCNKTVATPIRKIVVKVAISVL

SEQ ID NO: 82566 - DNA, 468 bp, Escherichia coli
  CDS (1)..(468): transl_table=11
atgatttttggacatatcgcgcagcccaatccgtgccgtttgcccgccgccattgaaaaggcgctcgattttctgcgcgctaccgatttcaacgccctggagccgggcgttgtcgaaatcgacggcaaaaatatttatacgcaaattatcgatttaaccacacgcgaagcggtggtaaaccgtccggaagtgcatcgtcggtatatcgatattcagtttctggcgtggggcgaagagaaaatcggcattgctattgatacgggaaataataaagtcagcgaatcactattagagcagcgcaatattattttttatcacgacagtgaacatgaatcatttatagaaatgataccgggcagctacgcaattttctttccgcaggatgttcaccgaccaggttgtattatgcaaacagcctctgagatacgaaaaattgtggttaaagtcgcattaacggcgctgaattaa

SEQ ID NO: 82567 - protein, 155 aa, Escherichia coli
MIFGHIAQPNPCRLPAAIEKALDFLRATDFNALEPGVVEIDGKNIYTQIIDLTTREAVVNRPEVHRRYIDIQFLAWGEEKIGIAIDTGNNKVSESLLEQRNIIFYHDSEHESFIEMIPGSYAIFFPQDVHRPGCIMQTASEIRKIVVKVALTALN

SEQ ID NO: 82568 - DNA, 24 bp, Artificial sequence
  primer
atgatgatgggtgaagtacagtca

SEQ ID NO: 82569 - DNA, 25 bp, Artificial sequence
  primer
ttaagccattaaatcagccttaacc

SEQ ID NO: 82570 - protein, 155 aa, Artificial sequence
  consensus sequence
  Variant (2)..(12): Xaa in position 2 to 12 is any amino acid
  Variant (13)..(14): Xaa in position 13 to 14 is any or no amino acid
  Variant (16)..(36): Xaa in position 16 to 36 is any amino acid
  Variant (37)..(37): Xaa in position 37 is any or no amino acid
  Variant (39)..(43): Xaa in position 39 to 43 is any amino acid
  Variant (45)..(55): Xaa in position 45 to 55 is any amino acid
  Variant (56)..(56): Xaa in position 56 is any or no amino acid
  Variant (58)..(65): Xaa in position 58 to 65 is any amino acid
  Variant (67)..(67): Xaa in position 67 is any amino acid
  Variant (69)..(70): Xaa in position 69 to 70 is any amino acid
  Variant (72)..(72): Xaa in position 72 is any amino acid
  Variant (74)..(74): Xaa in position 74 is any amino acid
  Variant (76)..(79): Xaa in position 76 to 79 is any amino acid
  Variant (81)..(81): Xaa in position 81 is any amino acid
  Variant (83)..(101): Xaa in position 83 to 101 is any amino acid
  Variant (102)..(103): Xaa in position 102 to 103 is any or no amino acid
  Variant (105)..(122): Xaa in position 105 to 122 is any amino acid
  Variant (123)..(126): Xaa in position 123 to 126 is any or no amino acid
  Variant (128)..(129): Xaa in position 128 to 129 is any amino acid
  Variant (131)..(131): Xaa in position 131 is any amino acid
  Variant (133)..(135): Xaa in position 133 to 135 is any amino acid
  Variant (137)..(137): Xaa in position 137 is any amino acid
  Variant (139)..(148): Xaa in position 139 to 148 is any amino acid
  Variant (149)..(150): Xaa in position 149 to 150 is any or no amino acid
  Variant (152)..(152): Xaa in position 152 is any amino acid
  Variant (154)..(154): Xaa in position 154 is any amino acid
MXXXXXXXXXXXXXLXXXXXXXXXXXXXXXXXXXXXXGXXXXXGXXXXXXXXXXXXTXXXXXXXXEXHXXYXDXQXXXXGXEXXXXXXXXXXXXXXXXXXXXXDXXXXXXXXXXXXXXXXXXXXXXFXXFXPXXXHXPXXXXXXXXXXXXKXVXK

SEQ ID NO: 82571 - protein, 28 aa, Artificial sequence
  protein pattern
  Variant (2)..(9): Xaa in position 2 to 9 is any amino acid
  Variant (11)..(11): Xaa in position 11 is any amino acid
  Variant (13)..(14): Xaa in position 13 to 14 is any amino acid
  Variant (16)..(16): Xaa in position 16 is Ala, Ile or Leu
  Variant (18)..(18): Xaa in position 18 is Ile or Val
  Variant (20)..(20): Xaa in position 20 is any amino acid
  Variant (21)..(21): Xaa in position 21 is Ile, Leu or Val
  Variant (22)..(23): Xaa in position 22 to 23 is any amino acid
  Variant (25)..(25): Xaa in position 25 is any amino acid
  Variant (27)..(27): Xaa in position 27 is any amino acid
  Variant (28)..(28): Xaa in position 28 is Phe, Ile or Met
TXXXXXXXXEXHXXYXDXQXXXXGXEXX

SEQ ID NO: 82572 - DNA, 1914 bp, Escherichia coli
  CDS (1)..(1914): transl_table=11
atgattgttttctcctcgttacaaattcgtcgcggcgtgcgcgtcctgctggataatgccaccgccaccatcaaccctgggcagaaagtcggcctggtgggtaaaaacggctgtggtaaatctaccctgctggcattgctgaaaaatgaaatcagcgccgacggcggcagctacacctttccgggaagctggcaactggcgtgggtgaatcaggaaacgccggcgttaccgcaagcggcgctggaatatgtcattgacggcgaccgtgaatatcgtcaactagaagcgcagctacacgacgccaacgaacgtaacgacgggcacgccattgcgaccattcatggcaagctggatgctattgacgcatggagtattcgctcccgtgctgccagcctgctgcacggcctcggtttcagcaatgaacaactggagcgcccggtaagtgatttttccgggggctggcgtatgcgtcttaaccttgcccaggcgctgatttgccgttcagacttgctgctgctcgacgaaccgactaaccacctcgatctcgatgccgttatctggctggaaaaatggctgaagagctatcagggcacgctgatcctgatctctcacgaccgcgacttcctcgatccgatcgtcgataaaattattcatatcgaacaacaaagcatgttcgagtacaccggcaactacagttcgtttgaagtacagcgcgccacccgtctggcgcagcaacaagcgatgtacgaaagccagcaggaacgcgtagcgcatctgcaaagttatatcgaccgtttccgtgccaaagccaccaaagcgaagcaggcccagagccgcattaagatgctcgagcgtatggagctaattgcccccgcgcacgtcgacaacccgttccgctttagcttccgcgcgccggaaagcctgccaaatccgttactgaagatggaaaaagtcagcgcgggctatggcgatcgcattattctcgactcgattaaactgaacctggtgcccggctcgcgtattggtctgttaggccgcaatggcgcgggtaaatcgacattaatcaaactgttagccggtgaacttgcgccagtcagcggtgaaattggtctggcgaaagggatcaaactcggctacttcgcccagcatcaacttgaatacctgcgcgccgacgaatcacctattcaacatctggcacgtttagcgccgcaggagctggaacaaaaactgcgtgactacctcggcggctttggtttccagggcgataaagtaaccgaagaaacgcgccgcttctccggtggggaaaaagcccgcctggtgctggcattaattgtctggcagcggccgaatctgctgctgctcgacgaaccgactaaccaccttgacctcgacatgcgtcaggcactcaccgaagcattaatcgagtttgaaggcgcgctggttgtcgtttcgcacgaccgtcatttgctgcgttccaccactgacgatctctacctggttcacgatcgtaaagtcgaaccgttcgacggcgatctggaagattatcaacagtggttgagcgacgtacaaaagcaggaaaaccagaccgacgaagcgccaaaagagaatgcgaacagcgcccaggcacgtaaagatcagaagcgtcgggaagctgagctgcgtgcgcaaacccagccactgcgtaaagagattgcccgtctggaaaaagagatggagaagctgaacgcgcaactggcgcaggcggaagagaaactcggcgacagcgaactgtatgaccagagccgtaaagcggagttgaccgcctgcctgcaacagcaagccagcgccaaatccggcctggaagagtgcgaaatggcatggctggaagcccaggagcagcttgagcagatgctgctggaaggccaaagcaactaa

SEQ ID NO: 82573 - protein, 637 aa, Escherichia coli
MIVFSSLQIRRGVRVLLDNATATINPGQKVGLVGKNGCGKSTLLALLKNEISADGGSYTFPGSWQLAWVNQETPALPQAALEYVIDGDREYRQLEAQLHDANERNDGHAIATIHGKLDAIDAWSIRSRAASLLHGLGFSNEQLERPVSDFSGGWRMRLNLAQALICRSDLLLLDEPTNHLDLDAVIWLEKWLKSYQGTLILISHDRDFLDPIVDKIIHIEQQSMFEYTGNYSSFEVQRATRLAQQQAMYESQQERVAHLQSYIDRFRAKATKAKQAQSRIKMLERMELIAPAHVDNPFRFSFRAPESLPNPLLKMEKVSAGYGDRIILDSIKLNLVPGSRIGLLGRNGAGKSTLIKLLAGELAPVSGEIGLAKGIKLGYFAQHQLEYLRADESPIQHLARLAPQELEQKLRDYLGGFGFQGDKVTEETRRFSGGEKARLVLALIVWQRPNLLLLDEPTNHLDLDMRQALTEALIEFEGALVVVSHDRHLLRSTTDDLYLVHDRKVEPFDGDLEDYQQWLSDVQKQENQTDEAPKENANSAQARKDQKRREAELRAQTQPLRKEIARLEKEMEKLNAQLAQAEEKLGDSELYDQSRKAELTACLQQQASAKSGLEECEMAWLEAQEQLEQMLLEGQSN

SEQ ID NO: 82574 - DNA, 2427 bp, Oryza sativa
  CDS (73)..(1800)
tttctctctctctcattcttgtgtttcttctcgatcgatctctcgatttctctctgtgcaccagcatcagctatggtgtccgacgccagcaagaagaaggcggcgcagaagaaggccgccgccgctgccaagaggggtgacaaggccaaggccgccattactctctccgagcgcacctgcaccgccgtcctcacctcccatcccctctcccgcgacatccacatcgagtccctctccctcacattccacggccatgacctgcttcttgacaccgacctggagctcaactacggcaggcgatatggtttgcttggcttaaacggctgtggaaagtcctgtctcctcaaagctataggatgccgggagcttcctatccctccacacatggacatctatcatctcacccatgagatcgaggcttccgacatgtctgcgctacaagctgtcatcagctgtgacgaacagagactccagctcgagaaggaggctgaaatcttggccgctcaagatgacggtggcggcgaagccctggaccgcgtttatgaacgcttagaagccatcgacgcatccaccgctgaaaagcgtgctgcagagattttgtttggcttgggttttaacaagcacatgcaggcaaagaaaacctgtgatttctctggcggttggcgcatgaggatcgctttggctagggcgctcttcatgaatccaactatccttttgcttgatgagcccaccaatcatctagatcttgaggcctgtgtctggctggaggaaaccttgaagaaatttgaccgtatacttgtcgtcatatcacactcccaggacttcctaaatggagtatgtacaaatatcatccacatgcaaaacaggaagctcaagctatacactggcaactatgaccagtatgtccaaacacgagccgagcttgaagaaaatcaaatgaaacaatacagatgggagcaggaccagattgcctcgatgaaggagtacattgcacggtttggtcacggatctgccaagctggcccgacaggctcaaagtaaagagaaaactcttgctaagatggagcgtggtgggctcacggagaaggttgtaagggataaggtattgacgttccgcttcactgatgttggcacgctaccacctccagtgctgcagtttgtggaggtcacatttgggtacacaccagacaacctgatctacaagaacctagattttggtgttgaccttgactcaagggtggcgctggttggtcctaatggggctgggaagagtacgctccttaaactcatgacaggtgatctcataccgctggacggcatggtgaggcgacacaaccatctcaggatcgcacaattccaccagcaccttgcagagaagctggacctggacatgtcagctctgcagtacatgatgaaggaatacccagggaacgaggaggagaggatgagggcagccatcggcaagtttgggttgtcagggaaggcacaggtaatgccaatgaggaacctgtcggacgggcagaggagcagagtgatatttgcatggttggcgtggagggagccacacatgctgctgctggatgagccaacgaaccatctggacattgaaacaatcgactctcttgcagaggcgctgaatgaatgggatggagggcttgtgctggtgagccatgacttcaggctgatcaaccaagtggcgcaggaggtatgggtgtgcgaaaagcaggcggtgaccaggtgggaaggtgacatcatggagttcaaggagcacctgaggagcaaggccggagtggacgattgagttgagttgagttgagtagttttgatcttgctgcctggcccggagaggagataccatcactctgctagttactagtatttcttcggctgttactaaactatactgcccagcctaacggggacgacgactgcatcatcatctcttgatctctctctcttagttaagttggatgcttgtcacggatgtttgtacctgatctccatcaactacatctgatgctatagcccatatgatgtaccgtcctcttcttggggtctctggagaatgaggaaacagcaagatccagccagcatagcatgtatgtatagtgtaattagctggtttgttggcggtgcacatgcataagatatacttcctccgtttcatattataatactatctattattgcccacattcatatatatgtctagattcattagcatctatatgaatgtgggcaatgatagaaagtcttataatatgaaacggagggagtattatcttggtttgcacttgcatgatcacctgctgtagttattattatcagtgaccaagttcccctagctagcagtagcactccatgaaaagatatctacatgaaactgtaccacccccacgatattatatatgagattggattttaaact

SEQ ID NO: 82575 - protein, 575 aa, Oryza sativa
MVSDASKKKAAQKKAAAAAKRGDKAKAAITLSERTCTAVLTSHPLSRDIHIESLSLTFHGHDLLLDTDLELNYGRRYGLLGLNGCGKSCLLKAIGCRELPIPPHMDIYHLTHEIEASDMSALQAVISCDEQRLQLEKEAEILAAQDDGGGEALDRVYERLEAIDASTAEKRAAEILFGLGFNKHMQAKKTCDFSGGWRMRIALARALFMNPTILLLDEPTNHLDLEACVWLEETLKKFDRILVVISHSQDFLNGVCTNIIHMQNRKLKLYTGNYDQYVQTRAELEENQMKQYRWEQDQIASMKEYIARFGHGSAKLARQAQSKEKTLAKMERGGLTEKVVRDKVLTFRFTDVGTLPPPVLQFVEVTFGYTPDNLIYKNLDFGVDLDSRVALVGPNGAGKSTLLKLMTGDLIPLDGMVRRHNHLRIAQFHQHLAEKLDLDMSALQYMMKEYPGNEEERMRAAIGKFGLSGKAQVMPMRNLSDGQRSRVIFAWLAWREPHMLLLDEPTNHLDIETIDSLAEALNEWDGGLVLVSHDFRLINQVAQEVWVCEKQAVTRWEGDIMEFKEHLRSKAGVDD

SEQ ID NO: 82576 - DNA, 2264 bp, Sorghum bicolor
  CDS (117)..(1904)
tctggggagcacgaggcttgagttccccttctcctacccttcacctccctagcgccgccgccagcaccgcgtccccaaccccaagcactccagcgcccccgaaccggatcgacgccatggtgtcggaggccagcaagaagaaggccgctcagaagaaggccgccgcggccgcgaagaggggaggcaaggccgcggtggcgtcctcatcgtcttcatctgcggccgcggccgccgataaggcggcgaacggcgtcgcggcgctcaaactatcagaccgcacctgcaccggggtcctcgcgtctcacccgctctcccgcgatatccacatagagtctctttctttaacattccatgggcatgaccttattgtggattctgagttggagctgaactatggaaggcgatacggtttgcttgggttgaatggctgtgggaaatctactcttctcacagcaataggctgcagagaacttcctatccctgaacacatggacatataccatctaagccatgagattgaagcttctgacatgtctgcactgcaagccgttgttacttgtgacgaagaaagagtaaagttggaaaaggaagctgaaattttggctgcacaggatgatggtggtggcgaagcactggatcgtgtttatgagcgtctagatgcaatggatgctggaactgcagaaaagcgagctgctgaaatattattcggtctgggttttaacaaagaaatgcaggcaaagaaaactaaagatttctctggaggttggcgtatgaggattgctttggcgagagcactgtttatgaatccaacaatccttttgcttgatgagccaacaaaccatctagatcttgaagcttgtgtctggttggaagagacactaaagaaatttgaccgcatacttgttgtcatatcacactctcaagattttctaaacggagtgtgcactaacattatccatatgcaaagcaagaagctcaagttatacaccggtaactacgatcagtatgttcaaactcgctccgagcttgaagagaatcaaatgaagcagtacaaatgggagcaggaacagattgcatcaatgaaggagtacattgctcgtttcggtcatggttctgcaaagcttgctcgccaggctcagagcaaagagaaaactcttgcaaagatggagcgaggtggtctcactgagaaggttgttagggacagagttctagtgttccggtttacagatgttggcaagcttcctccgcccgtgctgcagtttgttgaagtcaagtttgggtatacaccagataatctcatatacaagagtctggactttggtgttgatcttgactctagaatcgcattggttggtcccaatggggcagggaagagcactcttctgaagcttatgactggtgatcttgttccattagatggcatggttcggcgccataatcacctgcgcattgcacagtaccatcagcatctggcggagaagctggatctggacatgccagccctggcttacatgatgaaggaataccctgggactgaagaagagaagatgcgagctgctgttggcaggtttggcctgtcaggaaaggcgcaggtgatgccgatgaagaatctttctgatgggcaaaggagccgtgtcatctttgcatggctggcatataggcagccgcaactgctactgctcgatgagccgacaaaccatctggatattgagaccattgactccctggccgaggcactgaatgagtgggatggtggtttggttctagtgagccatgatttcaggctgatcaaccaggttgctcaagagatctgggtgtgtgagaatcaggcggtgacaaggtgggaaggtgatatcatggatttcaaggcacacttgaagagcaaggctggtttatctgattagaaggcttgtctagcaaccatgagctttttaactctgtatcacgaagtcctatttttccagtagcaaactatcggagatactgctattgtatcggattccttaagacatccatagcagccaccagccagagtaccttatactacctggaatgtttatttatatatttttttgaaatgctattatgtgttctgtaagttttgtagattttggaagtttggatttgtcaaagttactggattctatgatccttgtgaacatacaaacataaatttagtttcaaattcaactgaaaaataaaaaaaaaaagggcggccctcgtcgaaccccattttcatcgacatgaagtactgccctaacaaa

SEQ ID NO: 82577 - protein, 595 aa, Sorghum bicolor
MVSEASKKKAAQKKAAAAAKRGGKAAVASSSSSSAAAAADKAANGVAALKLSDRTCTGVLASHPLSRDIHIESLSLTFHGHDLIVDSELELNYGRRYGLLGLNGCGKSTLLTAIGCRELPIPEHMDIYHLSHEIEASDMSALQAVVTCDEERVKLEKEAEILAAQDDGGGEALDRVYERLDAMDAGTAEKRAAEILFGLGFNKEMQAKKTKDFSGGWRMRIALARALFMNPTILLLDEPTNHLDLEACVWLEETLKKFDRILVVISHSQDFLNGVCTNIIHMQSKKLKLYTGNYDQYVQTRSELEENQMKQYKWEQEQIASMKEYIARFGHGSAKLARQAQSKEKTLAKMERGGLTEKVVRDRVLVFRFTDVGKLPPPVLQFVEVKFGYTPDNLIYKSLDFGVDLDSRIALVGPNGAGKSTLLKLMTGDLVPLDGMVRRHNHLRIAQYHQHLAEKLDLDMPALAYMMKEYPGTEEEKMRAAVGRFGLSGKAQVMPMKNLSDGQRSRVIFAWLAYRQPQLLLLDEPTNHLDIETIDSLAEALNEWDGGLVLVSHDFRLINQVAQEIWVCENQAVTRWEGDIMDFKAHLKSKAGLSD

SEQ ID NO: 82578 - DNA, 2092 bp, Triticum aestivum
  CDS (146)..(1924)
ctctctccacaccacaagccgccgccaccgcccgctgggaggggaatagaaatcgtgtgtatcgtagggttgcgcgaatcgccgtctccagcaaccaatccccaaccctcgagctatctaactatcccgatcccgatctcctaccatggtgtccgatgccagcaagaagaaagccgcgcagaagaaggccgccgccgccgcaaagaggggagccaagtccagcgccgctgcctcgtcctcgtcggcgtcgtcagcggccgataaggccgccaatggcatagcggcccttaacttatccgatcggacatgtaccggggtcctggcttcgcatccgctctcccgtgatatccacattgagtccctttcattaacatttcatggacatgaccttattgtggattcagaattggagcttaactacgggaggcggtatggtttgctcggcttaaatggttgtgggaaatctacccttctcaccgcaataggctgcagggaactccccattcctgaacacatggacatacatcatcttactcgtgagattgaggcttctgacatgtctgcgctgcaagctgttatctgttgtgatgaagaaagagtgaagttggaaaaggaagctgaaattttggctgcacaggatgatggtggcggtgaagctttggatcttgtatatgagcggttagaagcaatggatgcatcaactgctgaaaagcgtgctgctgagatattgtttggtctaggttttgacaagcaaatgcaagcaaagccaacacgagatttttctgggggttggcgtatgaggattgcattggcaagggcgctgttcatgaacccgaccatccttttgcttgatgagccaaccaaccatcttgatctcgaggcttgtgtctggctggaagagaaattaaagaattttgagcgtatacttgttgttatctcgcattcccaagattttctaaatggagtgtgcactaacatcatccacatgcagaacaagaccctcaagttatatactggaaattatgaccagtatgttcaaactcgctctgagcttgaagagaatcaaatgaagcagtacaaatgggaacaggaacagatagctaatatgaaggagtacattgcacgatttggtcatggatctgcgaagcttgctcgtcaggctcagagcaaagagaagactcttgcaaagatggagcgtggtggtcttgctgagaaggttgtcaatgacaggattcttgtattccgctttacagatgttggcaaactcccaccaccagtgctgcagtttgctgatgtcacatttggttacactccggataatctcatctacaagaaccttgacttcggtgttgaccttgactcgagagttgcactggtcggtcccaatggggctggtaagagcacacttctgaagctcatgacaggtgacctatctccgttggatggcatggtcagacgccacaaccacctacgcattgcacaattccatcaacatctcactgagaagctggacctggacatgccggccctgcagtacatgatgagggagtaccctgggaatgaagaggagaagatgagagctgcaattggcaagtttggcctgtcaggaaaggcacaggtgatgccaatgaaaaacctgtctgatgggcagaaggcccgtgtcatttttgcttggctagcatttaggcagccacagatgctgttgcttgatgagccgacaaatcatcttgacattgagaccattgactcacttgctgaggcactgaaggaatgggacggggggttggtcctggtgagccatgacttcaggctgatcaatcaggttgctcaagagatctgggtctgtgagaaccaggcggtgactaggtgggaaggcgatatcatggatttcaagcaacacttgaagaaaagggctggtctctagattttctgtcttttcattctctcggctctttggagatctagacaaccccaaagttttgcctgtatcagaaaagtttccatcatttagcgtgacaagtatgagtactattgtatcgcttaaaacatatcttctctacactattttaccagacgatccgtgtttaattcc

SEQ ID NO: 82579 - protein, 592 aa, Triticum aestivum
MVSDASKKKAAQKKAAAAAKRGAKSSAAASSSSASSAADKAANGIAALNLSDRTCTGVLASHPLSRDIHIESLSLTFHGHDLIVDSELELNYGRRYGLLGLNGCGKSTLLTAIGCRELPIPEHMDIHHLTREIEASDMSALQAVICCDEERVKLEKEAEILAAQDDGGGEALDLVYERLEAMDASTAEKRAAEILFGLGFDKQMQAKPTRDFSGGWRMRIALARALFMNPTILLLDEPTNHLDLEACVWLEEKLKNFERILVVISHSQDFLNGVCTNIIHMQNKTLKLYTGNYDQYVQTRSELEENQMKQYKWEQEQIANMKEYIARFGHGSAKLARQAQSKEKTLAKMERGGLAEKVVNDRILVFRFTDVGKLPPPVLQFADVTFGYTPDNLIYKNLDFGVDLDSRVALVGPNGAGKSTLLKLMTGDLSPLDGMVRRHNHLRIAQFHQHLTEKLDLDMPALQYMMREYPGNEEEKMRAAIGKFGLSGKAQVMPMKNLSDGQKARVIFAWLAFRQPQMLLLDEPTNHLDIETIDSLAEALKEWDGGLVLVSHDFRLINQVAQEIWVCENQAVTRWEGDIMDFKQHLKKRAGL

SEQ ID NO: 82580 - DNA, 1869 bp, Bombyx mori
  CDS (1)..(1869)
atgccgtcggacgcgaagaaaagggctcagcagaagaagaaggagcaagctagcggcagaaacaagaagccggtggttcgtgtgacgaacgaagacgaaaatggtatcggaactaatggtatatccagggaagaccgtgagctgacggcagaagaggcattgtgccttaagctagaagctgaagcgaaaatgaattctgaagctcgttcttgtactgggtcactggctgtgcaccctcgttctagagatatcaagatagctaacttttcaattactttctatgggagtgagctacttcaagatactctcctggagttgaattgtgggcgaagatatgggctagtcggacttaatgggtgtggaaaatcatcattgcttgctgccttaggacgccgtgaggttcctattccggaacacattgacatattccatctgactcgagaaatgcctgcttcagataagactgcacttcagtgcgtcatggaggttgacgaggagagagtcaaactcgagaagctcgcagaaatgctagcccactgtgaagatgatgaatcacaggagcaattgatggatgtatacgatcgtctggacgatttgagcgccgacacggcagaagcgcgtgctgctaatatcctgcatggtcttggcttcaccaaggaaatgcagcagaaggcaacgaaagacttctccggaggttggcgtatgcgtatagctctggcacgagcgctatatgttaagccgcacttactgctgctggacgagccaacaaaccatctcgatttggacacctgtgtgtggcttgaagaagaacttaaacactacaaaagaattttagtgttgatctcgcattcgcaagacttcttgaacggtgtatgcacgaatatcgttcatatgagtaagcgccgtttgaagtattacactggtaactatgaagccttcgttaggacgcgcatggaattgctagagaatcagatgaaacagtacaactgggaacaagaccagattgcacatatgaaaaactacatagcgagattcggtcatggttccgccaaattggcgcgtcaagcacagtccaaagaaaagacgttagccaaaatggtggcacagggtctcaccgagaaggtggttgatgacaagatactcaatttctactttccgtcttgtgggaaagtaccgccacccgtcatcatggtgcagaatgtatcattcagatacactgattctgggccgtggatatacaagaatttggaatttggcattgaccttgatacaagacttgctttggttggacccaatggagcaggcaagtcaacgctactcaagctgctttatggagatttagtgccttcgactggtatgatccgtaaaaactcacatcttcgtattggtcgttaccaccaacacttgcacgagttgttggatctcgatctgtctccacttgattacatgatgaaagagtttcccgaggttcgtgagcgcgaagaaatgagaaaaatcatcggtcggtatggtctcactgggaggcagcaggtgtgtcccatgcgtcagttatccgacgggcagcgttgtcgtgttgtattcgcgtggttggcctggcagactccgcacctgctgttattggacgagcccactaaccatcttgatatggaaaccatcgatgcactcgcagacgccattaacgactttgacggtggcatggtgctcgttagtcacgactttagacttattaatcaggtggcgaatgaaatttggatctgtgagaacggtactaccacaaaatgggagggtggtatcctcaaatacaaagatcacctgaaatctaagatattgaaggataatgcggatagcgccgctaaaatacgcaaatag

SEQ ID NO: 82581 - protein, 622 aa, Bombyx mori
MPSDAKKRAQQKKKEQASGRNKKPVVRVTNEDENGIGTNGISREDRELTAEEALCLKLEAEAKMNSEARSCTGSLAVHPRSRDIKIANFSITFYGSELLQDTLLELNCGRRYGLVGLNGCGKSSLLAALGRREVPIPEHIDIFHLTREMPASDKTALQCVMEVDEERVKLEKLAEMLAHCEDDESQEQLMDVYDRLDDLSADTAEARAANILHGLGFTKEMQQKATKDFSGGWRMRIALARALYVKPHLLLLDEPTNHLDLDTCVWLEEELKHYKRILVLISHSQDFLNGVCTNIVHMSKRRLKYYTGNYEAFVRTRMELLENQMKQYNWEQDQIAHMKNYIARFGHGSAKLARQAQSKEKTLAKMVAQGLTEKVVDDKILNFYFPSCGKVPPPVIMVQNVSFRYTDSGPWIYKNLEFGIDLDTRLALVGPNGAGKSTLLKLLYGDLVPSTGMIRKNSHLRIGRYHQHLHELLDLDLSPLDYMMKEFPEVREREEMRKIIGRYGLTGRQQVCPMRQLSDGQRCRVVFAWLAWQTPHLLLLDEPTNHLDMETIDALADAINDFDGGMVLVSHDFRLINQVANEIWICENGTTTKWEGGILKYKDHLKSKILKDNADSAAKIRK

SEQ ID NO: 82582 - DNA, 2474 bp, Oryza sativa (japonica cultivar-group)
  CDS (72)..(2204)
gatctaatcgaccgagcccaaaactaaccctaaattccccagctccccaccacgccgccgccgccgcctccatgggccgcaaagatacttcctcgtcgtcctccgccgccggcggcaagaaggacaagccgatgtcggtctccgccattctggcctccatggacgcgccggcgtccaaggccaagccatccaaggcggcgtccaagcccaagccctccaaggcgcccgcgtcgtcttacatgggcgacatcgacctgcccccctccgatgaggaggaggacgacgccgacctcgttgccatggccacgaagcccaaggcggcccgcgccaccgtcgacctcaacgccatcgcgccctcgcagaaggacgcgaagaagaaggacaagcgcgaggcgatggcggccgcgcaagccgaggcggccaagcaggaggcgctccgcgacgaccgcgacgcattctctgtcgttattggcgcgcgcgtcgctggatccgccggggcctccgagggtgactccgccgccgccgatgacaacatcaaggatattgtgctcgagaacttctctgtttctgcccgcgggaaggagctactcaagaacgcctcgctccggatctcgcacggccggcgctatggcctcgtcgggcccaacggcatgggcaagtccacccttctgaagctgctgtcatggcggcaggtcccggtgccccggagcattgatgtcctgcttgtggagcaggaaattattggagacaatcgttcagcgctcgaggctgttgttgctgctgatgaagagctcgcagcgcttcgtgccgagcaggcaaagctcgaggcctctaacgatgctgatgacaatgagcggcttgctgaggtttatgagaagctcaacctccgggattctgatgctgcccgggctcgtgcatccaagatccttgctgggctggggtttgatcaggctatgcaggccaggtccactaaatcgttcagtggtggctggaggatgcgcatctcgcttgctcgtgcgctgttcatgcagccaacattgttgctgcttgatgaaccgactaatcatcttgacctccgagctgttctttggttggagcaatacttgtgctcacagtggaagaaaacactgattgttgtgtcccatgatcgcgacttcctgaacacagtttgcaatgagatcattcatttgcatgataagaatctgcatgtttatcgtggaaattttgacgactttgagagtgggtatgaacagaagaggaaggagatgaataggaagtttgaggtgtttgaaaagcagatgaaggcagcaaagaagactgggagcaaggcagcgcaagacaaggtcaaaggtcaggcactatcaaaggctaataaggaggctgccaagagcaaggggaagggaaagaatgtagcaaatgatgacgacgacatgaagccagctgatcttccacagaaatggcttgactacaaggttgagttccacttcccagagccaactttgctcacaccaccgctccttcagctcattgaggtgggcttcagctaccctaataggccagatttcaagctgtctggtgttgatgttggcattgacatgggaacacgtgttgcaattgttggtcccaatggggcaggaaaatctacacttcttaatttacttgctggtgatcttaccccaaccaaaggagaggtaaggaggagtcagaagctgaggattgggcgatactcacagcattttgttgacttactgacaatggaggaaaatgcagttcagtatttgctcaggctccatcctgatcaggagggaatgagcaaagcagaggctgtacgtgcgaagctcggaaaatttggtttaccagggcacaaccatctcactccaatagttaaattatctggtggacagaaggcccgtgttgtgttcacttcaatatcaatgtcacatccccacattctcctgctggatgagccaacaaatcacctagacatgcaaagtatcgatgcattggcagatgcactggatgaattcactggtggtgtggtcttggttagccatgactcgagattgatctctagagtgtgtgacgatgagcagaggagtgagatatgggttgtagaagatggcactgtgaacaaatttgatggaacatttgaggactacaaggatgaacttttggaagaaatcaaaaaggaagttgaagagtaatgtgtttttatagttgcaggatactgcttattctttatagactgggctggtaaacttaatgtactagtacttattttctttggtttgcagagtatttgtatggttgagtccgaaacacctattcgagctgttcttgctttttgcatgatctaagaggttccaggatgagtctgataaatatgttttctatgattttgctgccaattactctgtactaagacttccatgatatacatccataataattcagtatgatttcatgttattggc

SEQ ID NO: 82583 - protein, 710 aa, Oryza sativa (japonica cultivar-group)
MGRKDTSSSSSAAGGKKDKPMSVSAILASMDAPASKAKPSKAASKPKPSKAPASSYMGDIDLPPSDEEEDDADLVAMATKPKAARATVDLNAIAPSQKDAKKKDKREAMAAAQAEAAKQEALRDDRDAFSVVIGARVAGSAGASEGDSAAADDNIKDIVLENFSVSARGKELLKNASLRISHGRRYGLVGPNGMGKSTLLKLLSWRQVPVPRSIDVLLVEQEIIGDNRSALEAVVAADEELAALRAEQAKLEASNDADDNERLAEVYEKLNLRDSDAARARASKILAGLGFDQAMQARSTKSFSGGWRMRISLARALFMQPTLLLLDEPTNHLDLRAVLWLEQYLCSQWKKTLIVVSHDRDFLNTVCNEIIHLHDKNLHVYRGNFDDFESGYEQKRKEMNRKFEVFEKQMKAAKKTGSKAAQDKVKGQALSKANKEAAKSKGKGKNVANDDDDMKPADLPQKWLDYKVEFHFPEPTLLTPPLLQLIEVGFSYPNRPDFKLSGVDVGIDMGTRVAIVGPNGAGKSTLLNLLAGDLTPTKGEVRRSQKLRIGRYSQHFVDLLTMEENAVQYLLRLHPDQEGMSKAEAVRAKLGKFGLPGHNHLTPIVKLSGGQKARVVFTSISMSHPHILLLDEPTNHLDMQSIDALADALDEFTGGVVLVSHDSRLISRVCDDEQRSEIWVVEDGTVNKFDGTFEDYKDELLEEIKKEVEE

SEQ ID NO: 82584 - DNA, 1728 bp, Oryza sativa (japonica cultivar-group)
  CDS (1)..(1728)
atggtgtccgacgccagcaagaagaaggcggcgcagaagaaggccgccgccgctgccaagaggggtgacaaggccaaggccgccattactctctccgagcgcacctgcaccgccgtcctcacctcccatcccctctcccgcgacatccacatcgagtccctctccctcacattccacggccatgacctgcttcttgacaccgacctggagctcaactacggcaggcgatatggtttgcttggcttaaacggctgtggaaagtcctgtctcctcaaagctataggatgccgggagcttcctatccctccacacatggacatctatcatctcacccatgagatcgaggcttccgacatgtctgcgctacaagctgtcatcagctgtgacgaacagagactccagctcgagaaggaggctgaaatcttggccgctcaagatgacggtggcggcgaagccctggaccgcgtttatgaacgcttagaagccatcgacgcatccaccgctgaaaagcgtgctgcagagattttgtttggcttgggttttaacaagcacatgcaggcaaagaaaacctgtgatttctctggcggttggcgcatgaggatcgctttggctagggcgctcttcatgaatccaactatccttttgcttgatgagcccaccaatcatctagatcttgaggcctgtgtctggctggaggaaaccttgaagaaatttgaccgtatacttgtcgtcatatcacactcccaggacttcctaaatggagtatgtacaaatatcatccacatgcaaaacaggaagctcaagctatacactggcaactatgaccagtatgtccaaacacgagccgagcttgaagaaaatcaaatgaaacaatacagatgggagcaggaccagattgcctcgatgaaggagtacattgcacggtttggtcacggatctgccaagctggcccgacaggctcaaagtaaagagaaaactcttgctaagatggagcgtggtgggctcacggagaaggttgtaagggataaggtattgacgttccgcttcactgatgttggcacgctaccacctccagtgctgcagtttgtggaggtcacatttgggtacacaccagacaacctgatctacaagaacctagattttggtgttgaccttgactcaagggtggcgctggttggtcctaatggggctgggaagagtacgctccttaaactcatgacaggtgatctcataccgctggacggcatggtgaggcgacacaaccatctcaggatcgcacaattccaccagcaccttgcagagaagctggacctggacatgtcagctctgcagtacatgatgaaggaatacccagggaacgaggaggagaggatgagggcagccatcggcaagtttgggttgtcagggaaggcacaggtaatgccaatgaggaacctgtcggacgggcagaggagcagagtgatatttgcatggttggcgtggagggagccacacatgctgctgctggatgagccaacgaaccatctggacattgaaacaatcgactctcttgcagaggcgctgaatgaatgggatggagggcttgtgctggtgagccatgacttcaggctgatcaaccaagtggcgcaggagatatgggtgtgcgaaaagcaggcggtgaccaggtgggaaggtgacatcatggagttcaaggagcacctgaggagcaaggccggagtggacgattga

SEQ ID NO: 82585 - protein, 575 aa, Oryza sativa (japonica cultivar-group)
MVSDASKKKAAQKKAAAAAKRGDKAKAAITLSERTCTAVLTSHPLSRDIHIESLSLTFHGHDLLLDTDLELNYGRRYGLLGLNGCGKSCLLKAIGCRELPIPPHMDIYHLTHEIEASDMSALQAVISCDEQRLQLEKEAEILAAQDDGGGEALDRVYERLEAIDASTAEKRAAEILFGLGFNKHMQAKKTCDFSGGWRMRIALARALFMNPTILLLDEPTNHLDLEACVWLEETLKKFDRILVVISHSQDFLNGVCTNIIHMQNRKLKLYTGNYDQYVQTRAELEENQMKQYRWEQDQIASMKEYIARFGHGSAKLARQAQSKEKTLAKMERGGLTEKVVRDKVLTFRFTDVGTLPPPVLQFVEVTFGYTPDNLIYKNLDFGVDLDSRVALVGPNGAGKSTLLKLMTGDLIPLDGMVRRHNHLRIAQFHQHLAEKLDLDMSALQYMMKEYPGNEEERMRAAIGKFGLSGKAQVMPMRNLSDGQRSRVIFAWLAWREPHMLLLDEPTNHLDIETIDSLAEALNEWDGGLVLVSHDFRLINQVAQEIWVCEKQAVTRWEGDIMEFKEHLRSKAGVDD

SEQ ID NO: 82586 - DNA, 1788 bp, Arabidopsis thaliana
  CDS (1)..(1788)
atggtgtctgacgctagcaagaagaaggcagctcagaagaaagctgctgccgccgctaaaagaggtggtaaagctgctgctccatccaaatccgccgctacttcttccaacggtgttgatagcttgtcaagcggtgtcgatgctcttcaaatttctgatcggacttgtaccggagttctctgttctcatcctcaatctagagatatccgaatagaatctctgtctgtgacgtttcatggttatgaccttattgttgattcaatgttggagcttaactatggaaggcgttatggtctccttgggttgaatggttgtggaaagtccactcttttaactgcaatcggacgcagagagataccgattccggatcaaatggatatctaccatttgtctcacgagattgaagctactgacatgtcttccctggaggctgttgttagctgtgatgaggagaggttgaggttagagaaagaagttgaaattcttgtacagcaggatgatggaggcggagagcgtcttcaatctatctatgagaggttagacgccatggatgcagaaaccgctgagaaacgtgctgctgaaattctgtttggacttggtttcgacaaggaaatgcaggcgaagaagacaaaagatttctctggtggttggaggatgagaattgcattggcaagagcactcttcattatgccgacaatccttttgcttgatgagccgactaatcatttagatttggaagcttgtgtgtggctagaagagagcctgaagaattttgatcgcatccttgttgtggtatcccactcacaggatttcttgaatggagtgtgtacaaacatcatccacatgcagagcaaacagctcaagtactacactggtaactttgatcagtattgccagactcgttctgaacttgaagagaaccagatgaaacaatacagatgggagcaggagcagatttctcacatgaaggagtacattgctcggtttggtcacggttcagccaaacttgctcgtcaagcacagagtaaggagaaaacattggcaaagatggagagaggtgggctcactgaaaaggttgctagagacagtgttctcgttttccgttttgctgatgttgggaagcttccaccgccagtgcttcagtttgttgaagtgtcttttggttacacaccggactatcttatttacaagaacattgactttggtgtcgacttggactcgagggttgcccttgtgggacctaatggagctggaaagagtacacttttgaagctcatgactggtgaattgcacccaactgaaggaatggtgcgacgtcacaaccacttgaagattgctcagtaccatcagcatctggctgagaagctagacttggaattgcctgcacttctctacatgatgagggagttcccgggtactgaagaggagaaaatgagagctgcgattggtaggtttggtctaactggtaaggctcaagtgatgccaatgaagaatctatctgacggacaaaggagcagagtgatctttgcgtggttagcttataagcagcctaacatgcttcttcttgatgagcctactaaccatttggatatcgagacaatcgactcgcttgctgaggcattgaatgagtgggatggtggtttggttctggttagtcacgacttcaggttgatcaaccaagtggctcatgagatatgggtttgcgagaaacaatgcatcactaaatggaatggtgacattatggacttcaagaggcaccttaaggctaaagccggacttgaagattga

SEQ ID NO: 82587 - protein, 595 aa, Arabidopsis thaliana
MVSDASKKKAAQKKAAAAAKRGGKAAAPSKSAATSSNGVDSLSSGVDALQISDRTCTGVLCSHPQSRDIRIESLSVTFHGYDLIVDSMLELNYGRRYGLLGLNGCGKSTLLTAIGRREIPIPDQMDIYHLSHEIEATDMSSLEAVVSCDEERLRLEKEVEILVQQDDGGGERLQSIYERLDAMDAETAEKRAAEILFGLGFDKEMQAKKTKDFSGGWRMRIALARALFIMPTILLLDEPTNHLDLEACVWLEESLKNFDRILVVVSHSQDFLNGVCTNIIHMQSKQLKYYTGNFDQYCQTRSELEENQMKQYRWEQEQISHMKEYIARFGHGSAKLARQAQSKEKTLAKMERGGLTEKVARDSVLVFRFADVGKLPPPVLQFVEVSFGYTPDYLIYKNIDFGVDLDSRVALVGPNGAGKSTLLKLMTGELHPTEGMVRRHNHLKIAQYHQHLAEKLDLELPALLYMMREFPGTEEEKMRAAIGRFGLTGKAQVMPMKNLSDGQRSRVIFAWLAYKQPNMLLLDEPTNHLDIETIDSLAEALNEWDGGLVLVSHDFRLINQVAHEIWVCEKQCITKWNGDIMDFKRHLKAKAGLED

SEQ ID NO: 82588 - DNA, 1995 bp, Vibrio cholerae O1 biovar eltor str. N16961
  CDS (1)..(1995): transl_table=11
ttgtataatgatcgacatttatccttattccacctactattccgagcgaaaattcaacgggcgataaactatttttttatgattaccttttctgagattcagctactgcgtggcggcaaaccactccttgagcaagcttcagccaccattcatcccggcgataaagtcggcttagtgggcaaaaacggctgcggcaaatccactctctttgcactgctgaaagatgaactcaccattgatgcgggctccttcagcaaaccagcgcactgggagctggcttgggtagcacaggaaaccccggcgctggatcgcacagcattggaatacgttatcgatggcgatcgcgaatatcgcgaacttgagcgccaattaatggacgcagaagcggccgacaacggcaccaaagtggccgatttgcatggcaaaatcgagatggtcggtggttacagcattcgcgctcgcgcctcagaactgcttgacggcttaggctttactcaagagcagatgagctggagcctgacccaattttctggtggctggcggatgcgtttaaacctcgcgcaagcgctgatttgccgctcagatttactgctgctcgacgaaccgaccaaccacttggatttggatgcggtgatgtggctagagcgttggctgcaaagctaccccggcacgctgatcctgatttcccatgaccgcgatttcctcgacccaatcgtcaatcgcattgtgcatattgaaaatcagacgctgaatgaatacacgggcaactactcgtcgtttgaaactcagcgcgcgcagaaaatgcttcagcaacaagccatctatcaaaagcaacaaaagcagatggcgcacatgcaaagctatattgatcgcttccgctataaagcgtcgaaagctcgccaagcccaaagccggattaaagcgctggagcggatggaaaaagtgctgcccgcccagtttgataacccgttcagctttgagtttcgtgaacctgccgcgctgccgaacccgatcctgatgatggatcaggtcgcagcgggctacggcgatcacctcatcctcgagaagatccgcctcaatctggtgccgggcagtcgcatcggtctgcttggtcgtaacggcgcaggtaaatccaccttgatcaaactgctctcgggtgagctcaaaccgcaatcgggtgactgcacatactcgcaaggggtgaaaattggttactttgcgcagcatcagttggaaacactgcatccagaagagacgccgctgcaacacatgatgcaaatcgcgccagacaaaaatgagctagagctgcgtaactacttaggcagctttggtttccatggtgagaaagcgctcgaaaaagtcgcgcctttctcgggtggtgaaaaggcccgtttagtgctggcgttgattgtgtggcaaaagcccaacttactgctgcttgacgaacccaccaaccatttggatttggatatgcgtcaggcgctaacccttgcgctacaaagctatgaaggcgcaatggtcattgtcagccatgatcgctacttgctgcgtgctaccaccgatgatctctatttagtgcatgatcaccaagtcggcccgtttgatggtgacttgaatgactactacaaatggcttaccgatcagcaaaaagccgagcgtaaagaaacccaaccgaccaatactgcgaatagcgcgaacagtgccgcggcgaaaaaagagcaaaagcgccgtgaagccgattttcgtaagctcactgcgccaattcgcaaaaagttgacacagttagaagagaaactcgataagttgaaccacgttgtcagtgagatggaagcacaattgtcggacacctcactgtacgaagcacagaataaagcgacactgactgaggtgttggctaaacaagccgccgccaaatccgagcttgagcaagtcgagctagaatggatggccgagcaagaaaccttagaagagatggaacggaagttcaacggataa

SEQ ID NO: 82589 - protein, 664 aa, Vibrio cholerae O1 biovar eltor str. N16961
MYNDRHLSLFHLLFRAKIQRAINYFFMITFSEIQLLRGGKPLLEQASATIHPGDKVGLVGKNGCGKSTLFALLKDELTIDAGSFSKPAHWELAWVAQETPALDRTALEYVIDGDREYRELERQLMDAEAADNGTKVADLHGKIEMVGGYSIRARASELLDGLGFTQEQMSWSLTQFSGGWRMRLNLAQALICRSDLLLLDEPTNHLDLDAVMWLERWLQSYPGTLILISHDRDFLDPIVNRIVHIENQTLNEYTGNYSSFETQRAQKMLQQQAIYQKQQKQMAHMQSYIDRFRYKASKARQAQSRIKALERMEKVLPAQFDNPFSFEFREPAALPNPILMMDQVAAGYGDHLILEKIRLNLVPGSRIGLLGRNGAGKSTLIKLLSGELKPQSGDCTYSQGVKIGYFAQHQLETLHPEETPLQHMMQIAPDKNELELRNYLGSFGFHGEKALEKVAPFSGGEKARLVLALIVWQKPNLLLLDEPTNHLDLDMRQALTLALQSYEGAMVIVSHDRYLLRATTDDLYLVHDHQVGPFDGDLNDYYKWLTDQQKAERKETQPTNTANSANSAAAKKEQKRREADFRKLTAPIRKKLTQLEEKLDKLNHVVSEMEAQLSDTSLYEAQNKATLTEVLAKQAAAKSELEQVELEWMAEQETLEEMERKFNG

SEQ ID NO: 82590 - DNA, 1923 bp, Pasteurella multocida subsp. multocida str. Pm70
  CDS (1)..(1923): transl_table=11
atgcttttttttacaaatttaacattaaagcgcgggcaatccgtgttgctcgaaaatacatcggttgcaattaaccccggacaaaaagtgggcttagtcggaaaaaatgggtgtggcaagtcatctttattggcattattaaaaaaagagattagcgcagaaggcggtgacgtcagttttccttccaattggacgttatcttgggtcaatcaagaaacgcctgccttaatgacctctgcaatcgattatgtgatcgaaggtgatcgggaatattgccgcttacaacgtgagttagtattagccaatgaacaaggcgatggacataaaattgctcatctgcatgcgcaattagatgcgattgatgcatggacaattcaagcacgcgctgccgcactattgcacggtttgggctttagtcaaagcgaattacagcagccagtcaaagccttttcaggtggttggcgtatgcgcttaaatttagcacaagcattactctgtccttctgatttattattattggatgagccgactaaccacttagatttagatacggtcatgtggttagagcgttggctggtacaatacaaaggcaccttagtgttaatttcacacgatcgtgattttctggatcctatcgtcaataaaattatccatattgaacatcagaagttgaatgaatataccggtgattattcttcctttgaagttcaacgcgccacgaaactggcacagcagaatgcactttatcgtcaacagcaacaaaaagtcgcacatttacaaaaatatattgatcgtttcaaggcaaaagcttccaaagctaaacaggcgcaaagtcgggtgaaagccttggaacggatggaattaatcgccccagcttatgtggataatccgtttcattttacctttcgtgaacccttgtctttaccgaatccgttgttagctatgcagcaagtaagcgcaggctatccgagcgcagagggacaaagtgcggtcgaaattttagaaaaaatcaaattgaacttggtaccaggatctcggattggactattagggaaaaatggcgcggggaaatcgacactgattaaattattggcaggtgaattaacaccgctttcgggtcaggttcagttggcgaaaggtgtccagcttggctattttgctcaacatcaattagaaacgttacgtctcgatgaaagcccactttggcatttacaaaagctagcaccacaacatacagaacagcagttacgggattatttgggcggttttgcgttcaaaggcgataaggtgaatgaggcggtgaagtccttttctggtggggagaaagcccgtttagtgttagccttgattgtgtggcaacgtccaaacttattgttactcgatgagccgactaaccacttagatttagatatgcgccaagcgctgacggaagccttggtagattatcaagggtcgttggtcgtggtatcgcatgatcgccatttattacgtaatacagtggaagaattttatctggtacatgataaaaaggttgagcctttcagtggcgatttagaggattaccagaaatggttaactgatgttaatcgcaatacggaagaaaaagcggataccaatgcaccggttgataatgccaatagcagtgcgaatcgcaaagaacaaaaacgccgtgaggcagaattgcgacaacaaaccgccccgttacgcaaaaaattgcagcaacttgaacaaaaaatggaaaccgtatcgagccacttagggcaaatcgaagcgcaactggtcgaatcggatttgtatttggcggaaaataaagaaaaattgaccgcacttttaaatgagcaagtgagcaataaaaaacacttagaaacgcttgaaatggattggctcgcgttacaagaggaactcgaaggactactggagtaa

SEQ ID NO: 82591 - protein, 640 aa, Pasteurella multocida subsp. multocida str. Pm70
MLFFTNLTLKRGQSVLLENTSVAINPGQKVGLVGKNGCGKSSLLALLKKEISAEGGDVSFPSNWTLSWVNQETPALMTSAIDYVIEGDREYCRLQRELVLANEQGDGHKIAHLHAQLDAIDAWTIQARAAALLHGLGFSQSELQQPVKAFSGGWRMRLNLAQALLCPSDLLLLDEPTNHLDLDTVMWLERWLVQYKGTLVLISHDRDFLDPIVNKIIHIEHQKLNEYTGDYSSFEVQRATKLAQQNALYRQQQQKVAHLQKYIDRFKAKASKAKQAQSRVKALERMELIAPAYVDNPFHFTFREPLSLPNPLLAMQQVSAGYPSAEGQSAVEILEKIKLNLVPGSRIGLLGKNGAGKSTLIKLLAGELTPLSGQVQLAKGVQLGYFAQHQLETLRLDESPLWHLQKLAPQHTEQQLRDYLGGFAFKGDKVNEAVKSFSGGEKARLVLALIVWQRPNLLLLDEPTNHLDLDMRQALTEALVDYQGSLVVVSHDRHLLRNTVEEFYLVHDKKVEPFSGDLEDYQKWLTDVNRNTEEKADTNAPVDNANSSANRKEQKRREAELRQQTAPLRKKLQQLEQKMETVSSHLGQIEAQLVESDLYLAENKEKLTALLNEQVSNKKHLETLEMDWLALQEELEGLLE

SEQ ID NO: 82592 - DNA, 1917 bp, Pseudomonas aeruginosa PAO1
  CDS (1)..(1917): transl_table=11
atgatccgactcctcaatcttacgctacagcgcgggccgcagcgcctcctggaagctgctgaactgaccctgcacgccggccagaaagccggtctcatcggggccaatggcgctggcaagtccagcttgttcgcgctgttgcgcggccagctcgggcaggatgccggcgactgcctgttgcccgccgactggcgcatcgcgcacatgcgccaggaggtcgataccctggatcgcctggcggtggattacgtgctcgacggcgacagtcgcctgcgcgagatccaggcggcgctggccgtcgccgaagcggcgcacgacggttctgccctggcgcgcctgcataccgagctggacaacgccgacggttataccgccgatgcacgggcgcgcaagctgctggccgggctcggcttcagcagcgagcagatggagcgccgggtcggtgatttctccggtggttggaggatgcgcctgaacctggcgcaggcgctgatgtgcccgtccgacctgctgttgctcgacgaaccgaccaaccacctcgacctggacgccatcctctggctggaagagtggctcaagggttatcccggcactctggtgctgatctcccacgaccgcgacttcctcgatgcggtggtggaccacgtggtgcatctggaaaaccgcaagctgaccctctaccgcggcggctattccgctttcgagcggacccgcgccgagcggctggctcagcaacagcaggcctacgagaaacagcaggcgcagcgtgcgcacatggaaagcttcatcgcccgcttcaaggccaaggccaccaaggcgcgccaggcgcagagccggatcaaggcgctggagcgtctagaggaactggcgccggcacatgtcgattcgccgttcaatttcagtttccgcgagtcggacaagatctcccggccgttgctggatctcggcgaaggccgtctcggctatggcgacaaggcggtgctggagaaggtcaagctgcaactggtgcccggtgcgcggatcggcctgctcggtcccaacggcgccggcaagtcgacgctgatcaagaccctggccggggacctgcccgagctgggcggccgcctgctgcgcggcgagaacctggccatcgggtacttcgcccagcaccagctcgattcgctggatccacaggccagcccgttgctacatctgcagcgtatcgcccccggcgagcgcgaacagaccctcaaggacttcctcggcggcttcgacttccgcggcgttcgggtggacgagccggtattgaacttctccggtggcgagaaagcgcgcctggccctggcgctgatcgcctggcagaagcccaacctgctgctgctcgacgagccgaccaaccacctcgacctggaaatgcgcctggccttgaccatggctctacaggagttttccggggcggtcctggtggtttcccacgaccggcacctgctcaaaagcaccaccgatgaattcctcctggtcgccgatgggcgcgtggtgccgttcgatggcgatctcgacgattacgcccgttggctggtcgactatcgcgcgcgcaaggcgccgcaggccgagaccgcgccgggtgcgccgaccgaacgcaccgacaagcgcgcccagcgccaggcagcggccgcgctgcgccagcagctggcgccgcacaagcgcgaggccgacaagctggagcgcgaactcggcggcctgcacgaaaagctagccgctatcgaggcgcggctgggcgacagcgccctgtacgacgtatcgcgaaaggacgaattgcgcgagttgctgtccgaacaatcgagcctgaaggttcgcgaaggcgagctggaggaacgttggctggaggccctggaaaccctcgaagccctgcagaaagaactagaggccagtgagtga

SEQ ID NO: 82593 - protein, 638 aa, Pseudomonas aeruginosa PAO1
MIRLLNLTLQRGPQRLLEAAELTLHAGQKAGLIGANGAGKSSLFALLRGQLGQDAGDCLLPADWRIAHMRQEVDTLDRLAVDYVLDGDSRLREIQAALAVAEAAHDGSALARLHTELDNADGYTADARARKLLAGLGFSSEQMERRVGDFSGGWRMRLNLAQALMCPSDLLLLDEPTNHLDLDAILWLEEWLKGYPGTLVLISHDRDFLDAVVDHVVHLENRKLTLYRGGYSAFERTRAERLAQQQQAYEKQQAQRAHMESFIARFKAKATKARQAQSRIKALERLEELAPAHVDSPFNFSFRESDKISRPLLDLGEGRLGYGDKAVLEKVKLQLVPGARIGLLGPNGAGKSTLIKTLAGDLPELGGRLLRGENLAIGYFAQHQLDSLDPQASPLLHLQRIAPGEREQTLKDFLGGFDFRGVRVDEPVLNFSGGEKARLALALIAWQKPNLLLLDEPTNHLDLEMRLALTMALQEFSGAVLVVSHDRHLLKSTTDEFLLVADGRVVPFDGDLDDYARWLVDYRARKAPQAETAPGAPTERTDKRAQRQAAAALRQQLAPHKREADKLERELGGLHEKLAAIEARLGDSALYDVSRKDELRELLSEQSSLKVREGELEERWLEALETLEALQKELEASE

SEQ ID NO: 82594 - DNA, 1908 bp, Lactococcus lactis subsp. lactis Il1403
  CDS (1)..(1908): transl_table=11
atgattttactgcaagggaatggaattgcacgcacttttggtgacgatgttttatttgaaaatatcaattttagtttacaagaccattcaagaattgccctagttggccgaaatggagctggtaagtcaaccttgcttaaaattattgctggagttgaagaagcgagtcgcggaactgtatccaagaccaaagatttgacaatgaattatttagcgcaagatactgggctgaattcctcaaggacaatatttgccgaaatgctctctgtttttgattcgcttcgccaaatggaaaaacaattgcgccagatggaattgcaaatgggagaacttgctggggatgaattgacagctttgatgaaacgttacgatgctttatcagaagaatttcggatgaaaaatggatttacttatgaatctgaaattaagtctgtcttaaatggttttcgttttgatgatgcaatgtgggaaagagaaatttcaagtttatcagggggacaaaaaacacgtttggctcttgctaagatgttgcttgaaagaccacaacttttgattttggatgaaccaactaaccacttggatattgaaactttagcttggcttgaaaattaccttaaaaattacgaaggtagtttattaattgtcagtcatgaccgctactttttggataaagtggttaatgaagtcttagaattatctagaggagaattgactcgtttttctggaaattattctcgctatgttgaacaaagagagcaaaaactcttgttagaactcaaaaattttgaaaaacaacaaaaagaaattgctaaattagaggactatgttgccagaaatttagttcgggcttcgacgactaaaatggcgcaatcgcgtcgtaaaaagttggagaaaatggagcgtttagacgcaccaacaagtgatgataaatcggccaatgttacttttactcctgaaaaaacgtctggaaatgttgttttaaccgtttcagaagcaacggtaggttatgaagataatcgtctctctggtccgattaacattgacgagcgtaaaggtgagtcccttgctattgttggaccaaatggagtaggtaagacaacattgattaagtcaattgttggacagattccatttttagcaggtcaagcaaaattgggtgccaatgttactttgggatattatgaccaagaacaaggaagattgacagcttccaatactgtcttagacgaattatggaatgagcatcgcttacttaatgaagttgaaattcgcaatatgcttggagcttttctttttagtggagatgatgtaaagaaaacggttgggatgctttctggtggtgaaaaagcccgtcttttacttgctaaattagcaatggatcacgataactttttagttttagatgaaccaacaaatcacttggatattgattcacgtgaggtcttggagaatgctttgattgattttccaggaacaatcttgtttgtttctcatgaccgctatttcatcaatagagtagctaccaaagttttagaaattgctcccgaaggaagtacagaatttttgggagattatgattattatgtcgagaaaaaagaagaagtacaagctgagagtaattcttcagaaaatggggagccgatagaaagtttagctcaacaagattttacagctcagaaagaagctcaaaagaatcgacgtaaagtagagcgcgaaatcaaggcttgtgaagagaaactagccgatttggaagcaaaaattgcagctctattattggaaatgcaagaaaataccgctgattttgttaaattaggagaattaccagctgaaattgacctctttaatgatgaaaaagatgagatagaaatgactcttttggaagcgatggaagaattggaaaatttgtaa

SEQ ID NO: 82595 - protein, 635 aa, Lactococcus lactis subsp. lactis Il1403
MILLQGNGIARTFGDDVLFENINFSLQDHSRIALVGRNGAGKSTLLKIIAGVEEASRGTVSKTKDLTMNYLAQDTGLNSSRTIFAEMLSVFDSLRQMEKQLRQMELQMGELAGDELTALMKRYDALSEEFRMKNGFTYESEIKSVLNGFRFDDAMWEREISSLSGGQKTRLALAKMLLERPQLLILDEPTNHLDIETLAWLENYLKNYEGSLLIVSHDRYFLDKVVNEVLELSRGELTRFSGNYSRYVEQREQKLLLELKNFEKQQKEIAKLEDYVARNLVRASTTKMAQSRRKKLEKMERLDAPTSDDKSANVTFTPEKTSGNVVLTVSEATVGYEDNRLSGPINIDERKGESLAIVGPNGVGKTTLIKSIVGQIPFLAGQAKLGANVTLGYYDQEQGRLTASNTVLDELWNEHRLLNEVEIRNMLGAFLFSGDDVKKTVGMLSGGEKARLLLAKLAMDHDNFLVLDEPTNHLDIDSREVLENALIDFPGTILFVSHDRYFINRVATKVLEIAPEGSTEFLGDYDYYVEKKEEVQAESNSSENGEPIESLAQQDFTAQKEAQKNRRKVEREIKACEEKLADLEAKIAALLLEMQENTADFVKLGELPAEIDLFNDEKDEIEMTLLEAMEELENL

SEQ ID NO: 82596 - DNA, 1923 bp, Neisseria meningitidis MC58
  CDS (1)..(1923): transl_table=11
atgattgaaatcaaaaacctcaccctgcaacgcggtttgaaagtcctgctcgacaaagccaacgctaccgtcaatcccggtcagcgcgtcggtttgatcggcaaaaacggaacgggcaaatcgagcctgtttgccttaatcaagggtgaaatcactcaggacggcggcgatgtctcgattccgaaaaactggcggctcgcttccgtttcccaagaaacgcccgatttggatatttccgctttggattacgttttgcagggcgatgccgagttgcaggcttttcagacggcattgaggcaggcagaagcgcaaaatgacggcatgaagcaggcggaatatcatgctaaattggaagaaatcgacgcttataccgcgccggcgcgtgcggcaaaattgttgaacgggctgggtttttcgcaagaagaacacagccgccccgtcaaatccttttccggcggctggcgtatgcgcctgaatcttgcgcaagccctgatttgccgcgccgatttgctcttgcttgacgaaccgaccaaccacttggatttggaaaccgtcttgtggctggaaaaccaccttgcttctttaccctgcacgcaaatcatcatttcccatgaccgcgattttctcaacgcggaaactacccaaaccattgaattatcgcagcaaaaactcacgcaatacggcggcaattacgatttttaccaaaacgaacgtgcgcagcgtctcgcgcaacaacaagctgcctatgtcaaacagcaggcgcaaatcaaacatttgcaatcctttatcgaccgcttcaaagccaaagccaccaaagccgttcaagcgcaaagccgcatgaaggctttggcgaagctcgaacgcatcgctcccgcgcatctggacagcgagttttcctttgagttttaccatcccgaccatctgcccaatcctttgttaaagctagaacacgcagatttgggttacgaaggcaaaactgttttgcacgacattaccctgtcgctggaaagcggcgcgcgctatggtttattgggtgtcaacggcagcggtaaatctacctttatcaaagctttggcaggcacaatcgatttactctccggcagcatcgtccgttccgaaaaactcaatatcggctattttgcccaacaccaactcgataccatccgctccgaccaaaaccctgtttggcatattcagcagctttctcccgaagtacgcgaacaagaaatccgaaatttcctcggaggcttcaattttgtcggcgatatggcgttgcagaaaaccgaaccattttccggcggagaaaaagcccgactcgctcttgccatgattatctggcaaaagccgaacctgctgctgcttgacgagccgaccaaccatttggatttggatatgcgccacgccttgacgctcgctctgcaaagtttccaaggcgccttaatcgtcgtatcgcacgatcgcagcctgcttgaagccacgaccgacagcttcctcctgatcgataaaggccgtctgaagaacttcgacggcgatttgaacgactaccgccaatggcgtttggcacaggaaaacgccgccgtcgcgcccgcagcatccgcacaaagccaaagccgcaaagacaccaagcgcatcgaagcgcaaatccgtcaggaaaaagcccgacgcggcaagccgatacagcagaaaatagaccgtgccgaaaaagaaatggcgcagctttccgaaattcagacggcatgtgaagcatttttagcacaagaagaagcttacttcgaggaaaacaaagaaaaattgcaggacaccttatccgagctggcaaaagtcaaaacacaacttgcccaaatcgaagaggtttggctggcttgccaagaagaattggaacagattgaaactgaaatcgagaaacagtttgccgagcgataa

SEQ ID NO: 82597 - protein, 640 aa, Neisseria meningitidis MC58
MIEIKNLTLQRGLKVLLDKANATVNPGQRVGLIGKNGTGKSSLFALIKGEITQDGGDVSIPKNWRLASVSQETPDLDISALDYVLQGDAELQAFQTALRQAEAQNDGMKQAEYHAKLEEIDAYTAPARAAKLLNGLGFSQEEHSRPVKSFSGGWRMRLNLAQALICRADLLLLDEPTNHLDLETVLWLENHLASLPCTQIIISHDRDFLNAETTQTIELSQQKLTQYGGNYDFYQNERAQRLAQQQAAYVKQQAQIKHLQSFIDRFKAKATKAVQAQSRMKALAKLERIAPAHLDSEFSFEFYHPDHLPNPLLKLEHADLGYEGKTVLHDITLSLESGARYGLLGVNGSGKSTFIKALAGTIDLLSGSIVRSEKLNIGYFAQHQLDTIRSDQNPVWHIQQLSPEVREQEIRNFLGGFNFVGDMALQKTEPFSGGEKARLALAMIIWQKPNLLLLDEPTNHLDLDMRHALTLALQSFQGALIVVSHDRSLLEATTDSFLLIDKGRLKNFDGDLNDYRQWRLAQENAAVAPAASAQSQSRKDTKRIEAQIRQEKARRGKPIQQKIDRAEKEMAQLSEIQTACEAFLAQEEAYFEENKEKLQDTLSELAKVKTQLAQIEEVWLACQEELEQIETEIEKQFAER

SEQ ID NO: 82598 - DNA, 1938 bp, Xylella fastidiosa 9a5c
  CDS (1)..(1938): transl_table=11
atgatctctctacgtcatttcgcaatgcgccgcggtgggcggttgttgctgtccaatgttgatatcaccttgcatgcgggtgatcgtgttggcgtggttggtcgcaatggtgttggaaagtccagtctgtttgcagcgatccgtggcgaattggaagcggacaaaggcaatgttgagttacctggaaaattacgtattgccagtgttgcgcaggaaacaccctccttgtcggatctggccctggactttgtactcagtggtgatgatgtagtggccgaggtcctgcgtgtcgaggcagaggcgaatgcacgcgaagattgggaggcggtagccgctgcgcatcagcgcttagccgagatcggcggttacgacgccgaagcacgtgcaggcaaattgctgcatggcctgggtttcctcacacagacgcagcggcgtgccgtctcgaccttctctggtggctggcgcgtccgcttgaacctggcacgtgcactgatgatgcccagtgatctgttattactggacgaaccaaccaaccatctggatatggatgcggtgttctggttagaacaatggttgcagaagtaccctggtacgttgctgctgattagtcatgaccgtgagtttttggataacgttgccacgcatatcctgcatttgcatgatggcaacgccaaactatacgtgggcggctacaccgacttcgagcgtcaacgtgccgagcaactacgtcagcaacagattgcttttgagaaagagcaggccgagcgtgttcacttgcagagcttcattgatcgtttcaaggccaaagcatcaaaagccaagcaggcacaaagccggatcaaacgcttagaaaagttggctgggacggaggctgtccgtatggagcgtgaattccgtatcacgtttgcaccgccaaccaaactaccgcattccttgattacgctgcgccaggtgaattgcggttattcggtattgtccccgtctgcaccctcggatcctccacctgttgatactcatgcggcagcaccttcgcagcaggccgtgattcttcatcgtgttgattttggtcttgaggcgggagaccgtattgggttgcttggtcccaatggtgccggaaaatcaaccctggtcaaaacattggtgagtgacctggcccctttgacaggggagcgcatcgctcatccggatgtgcgtattggttatttcgcacagcacacggttgaatcactgcacgagggacaatcgccgattgatcatttccgtacccttgcgccgcaagcaccaatccaatccatacgcgactttttgggtaaatggaattttcctggagatcgtgcctttgaacctgtggatggtttttccggaggtgagcgtgcgcgcttggcattgtcgttgattgcttggcggcagccgaatgtcttgttacttgatgaacccaccaaccacctggatctagagatgcgcgaagccttggctgaggcgctgagtgattttgatggagcgattgtgatggtctcgcacgaccgtcacttgattggcttggtgtgcgacacgttttggcgtgttgctgatggtgtggtcgagccgtttgctggtgatcttgaccaatacgctgcttggctgcggacacgtcccgcggcacgtggtgtgcgtgccaagacagaggaggccaatcagccacaggctgcggtgactgccaaatcgcctgcttctcaactcccagtgaaaaagccggtcaaccaacaaaagctattggctgcggaaaagcatgtgagcgaattagagacgctcttagccgaattggatcgcaaacttgccgatccggccaattatgccaatggcgaagtgatgatgcgtcttggcgatgagcgcgagcaggctgccagacggttagctgaagcagaacaggcttggttgctgttgatggatgggggatga

SEQ ID NO: 82599 - protein, 645 aa, Xylella fastidiosa 9a5c
MISLRHFAMRRGGRLLLSNVDITLHAGDRVGVVGRNGVGKSSLFAAIRGELEADKGNVELPGKLRIASVAQETPSLSDLALDFVLSGDDVVAEVLRVEAEANAREDWEAVAAAHQRLAEIGGYDAEARAGKLLHGLGFLTQTQRRAVSTFSGGWRVRLNLARALMMPSDLLLLDEPTNHLDMDAVFWLEQWLQKYPGTLLLISHDREFLDNVATHILHLHDGNAKLYVGGYTDFERQRAEQLRQQQIAFEKEQAERVHLQSFIDRFKAKASKAKQAQSRIKRLEKLAGTEAVRMEREFRITFAPPTKLPHSLITLRQVNCGYSVLSPSAPSDPPPVDTHAAAPSQQAVILHRVDFGLEAGDRIGLLGPNGAGKSTLVKTLVSDLAPLTGERIAHPDVRIGYFAQHTVESLHEGQSPIDHFRTLAPQAPIQSIRDFLGKWNFPGDRAFEPVDGFSGGERARLALSLIAWRQPNVLLLDEPTNHLDLEMREALAEALSDFDGAIVMVSHDRHLIGLVCDTFWRVADGVVEPFAGDLDQYAAWLRTRPAARGVRAKTEEANQPQAAVTAKSPASQLPVKKPVNQQKLLAAEKHVSELETLLAELDRKLADPANYANGEVMMRLGDEREQAARRLAEAEQAWLLLMDGG

SEQ ID NO: 82600 - DNA, 1914 bp, Agrobacterium tumefaciens str. C58
  CDS (1)..(1914): transl_table=11
ttggccagacagttcggccaaaacggcgccatgattacgattaccgatctttccgcccgcatcgccgggcgtctgcttcttgaccatgccagcgtggcgcttcccgccggtgtgaaggcgggtctcgtcggccgcaacggcgccggaaaatccaccctgttccggatcatcaccggcgatcttgcggcggaaggcggttcggtgacgatcccgaaactcgcccgcatcggccaggtggcacaggaagcgccgggcacggaggaatcactgatttccatcgtgcttgccgccgacaaggagcgcagcgcgcttttggccgaagcggaaaccgcaaccgatcctcaccggatcgctgaaatccagatgcggcttgtcgatatcgatgcccattcggcggaagcgcgcgcctccagcattctcgccggtctcggcttcgatcacgaggcgcagcttcggcccgcctcctccttctccggcggctggcgcatgcgcgtggcgctcgcctcggtgctgtttgccgaaccggacctgttgctgctcgacgagccgaccaactatctcgacctcgaaggcacgctctggctggaagactatatccggcgttatccgcataccgtcatcatcatcagccatgaccgcgatcttctcaacaatgccgtcaattccatcgtgcatctggaccagaagaagctgaccttctatcgcggtggttacgaccagttcgagcggcagaaggccgaggctgacgaattgcagatgaaggccaaggtcaagaacgatgctgcacgcaaacatctgcaaagcttcatcgaccgtttccgcgccaaggccaccaaggcacgccaggcccagagccgcatcaaggcgctggagcgcatgggcaccgttgccgccgtgatcgaggatcacgtccagccgatcacgtttcccgagccggaaaagcagcccgcctcccccatcgtcgccatcaatggcggtgccgtcggttacgagccgggcaaatccatcctgaaacagcttaatctcaggatcgacaatgacgaccgcatcgcgctgctcggctcgaacggcaacggcaaatcgaccttcgcgaaattcatctccggccggcttgccccgcaggcgggcgatcttcgtgtggcctcggggctcaagatcggtttcttcgcacagcatcagctcgacgacctcgtgccggatgaaacgcccgtcgaacatgtgcgcaagctgatgccgctcgctcctgaagcgcaggttcgtgctcgcgtggcgcagatgggccttgcaacggaaaaaatgtcgacggcggcgaaggacttgtccggtggtgaaaaggcccggctgctgatggggcttgccgccttccatgcgccgaacctgctgatcctcgacgaaccgaccaaccatctcgacatcgacagccgccgggcgctgatcgaggcgctgaacgattatagcggcgcggtcatcctcatctcgcacgaccgccacctgatcgaagcgacggtggaccggctgtggctggtagccgacggcacggtcaagaccttcgaaggcgacatggaggaatatcgcgatctcgttatttcgtccggcaggaagaaggacgacaagaccgaggccgctgccgaccagacctcgaaagccgaccagcgcaaggccaatgcagaaaagcgcgcccagctggcgccgctcaagaaaaagatcaacgaaatcgagtccctgacggcaaagcttgagaaactgattcaggcgctcgacaaggagttggcggaccctgctttgtacgaaaaagcacccgccaaggccgcgctgaaggtgaaggagcgcggcgaggccgcgagcaagctttcggacgccgaggagcaatggctgatgctttcgagcgaatacgaggatgccatggcgcagtga

SEQ ID NO: 82601 - protein, 637 aa, Agrobacterium tumefaciens str. C58
MARQFGQNGAMITITDLSARIAGRLLLDHASVALPAGVKAGLVGRNGAGKSTLFRIITGDLAAEGGSVTIPKLARIGQVAQEAPGTEESLISIVLAADKERSALLAEAETATDPHRIAEIQMRLVDIDAHSAEARASSILAGLGFDHEAQLRPASSFSGGWRMRVALASVLFAEPDLLLLDEPTNYLDLEGTLWLEDYIRRYPHTVIIISHDRDLLNNAVNSIVHLDQKKLTFYRGGYDQFERQKAEADELQMKAKVKNDAARKHLQSFIDRFRAKATKARQAQSRIKALERMGTVAAVIEDHVQPITFPEPEKQPASPIVAINGGAVGYEPGKSILKQLNLRIDNDDRIALLGSNGNGKSTFAKFISGRLAPQAGDLRVASGLKIGFFAQHQLDDLVPDETPVEHVRKLMPLAPEAQVRARVAQMGLATEKMSTAAKDLSGGEKARLLMGLAAFHAPNLLILDEPTNHLDIDSRRALIEALNDYSGAVILISHDRHLIEATVDRLWLVADGTVKTFEGDMEEYRDLVISSGRKKDDKTEAAADQTSKADQRKANAEKRAQLAPLKKKINEIESLTAKLEKLIQALDKELADPALYEKAPAKAALKVKERGEAASKLSDAEEQWLMLSSEYEDAMAQ

SEQ ID NO: 82602 - DNA, 1929 bp, Staphylococcus aureus subsp. aureus Mu50
  CDS (1)..(1929): transl_table=11
atgatacttttacaactcaatcatatatcaaaatcgttcgatggtgaagatatatttactgatgttgattttgaagtaaaaactggtgaacgaattggtatcgtaggaagaaatggcgccggtaaatcaacattgatgaaaattatagctggtgtagaaaactatgattctggaaatgtgtcaaaaattaaaaacttaaaactaggttatttaactcaacaaatgactttaaattctaatgcaacagtttttgaagaaatgtcaaaaccatttgaacatattaaacgaatggaaagcttaatcaaagaagaaacagattggttatcaaaacatgcaaatgattacgatagtgatacatataaaacacatatgtcccgttatgaatctttatcgaatcaatttgaacaattagaaggatatcaatatgaaagtaaaattaaaacagtacttcacgggttaaattttagtgaagaagatttcaataaacctatcaatgattttagcggcggccaaaaaacacgtttatctttagctcaaatgctattaaacgaacctgatttattacttttagatgaacctactaaccacttagatttagaaacgacaaagtggcttgaagattatctacgttattttaaaggtgcaatcgtcatcatcagccatgatcgttactttttagataaaatagttactcaaatttatgatgtggctttaggtgatgtcaaacgctatgttggtaattacgaggaatttatacagcaacgggatttatattatcaaaaacgaatgcaagaatatgaaagtcaacaagcagaaataaaacgattagaaacttttgttgagaaaaatattacccgtgcttcaacaagtggaatggcaaaaagtagacgtaagattttagaaaaaatggaacgcattgataaaccaatgttagatgccaaaagtgcaaatattcaatttggctttgaccggaatacaggtaatgacgtcatgcatgtaaaaaatttagaaatcggttatcaaactgcaattaccaaacctatcagtatagaggtctctaaaggcgatcatatagcaatcattgggccaaatggtattggaaaatcgaccttaattaaaactattgctaatcaacaaaaagcgcttaatggcgatattactttcggcgcaaatttacaaattggttattatgatcaaaagcaagcagaatttaaatctagtaaaacgattttagattatgtgtgggatcaatatccgttaatgaatgaaaaagatattcgagcagttcttggacgtttcttatttgtacaagacgatgttaaaaagataattaatgatttatctggtggtgaaaaagcacgtttacaactagcactacttatgttgcaacgtgacaatgtacttattttagatgaacctaccaaccacctcgatatagattcaaaagaaatgttagagcaagcactccaacattttgaaggaacaatactatttgtttcccatgatcgttactttattaaccaattagcaaacaaggtatttgatttaacaattgatggcggaaagatgtatttaggagattatcaatattacattgaaaaagttgaggaagccgaagcgttgaaagcgcaccaagaagaacagtcagttaacgtacaagcacataaaaagtctatggaacaatcgtcgtatcataaccaaaaagaacaaagacgtgaacaacgcaaacttgaacgacaaatatccgagtgtgaaaatgaaatagaaactttagagactactatcttacaaatagacgagcaattaacccaaccagaagtgtataacaatccacaaaaagcaaacgaattagctatccaaaaacaagatagcgaacaaaaattagaacacgctatgtctaaatgggaagaattacaacaaaaactataa

SEQ ID NO: 82603 - protein, 642 aa, Staphylococcus aureus subsp. aureus Mu50
MILLQLNHISKSFDGEDIFTDVDFEVKTGERIGIVGRNGAGKSTLMKIIAGVENYDSGNVSKIKNLKLGYLTQQMTLNSNATVFEEMSKPFEHIKRMESLIKEETDWLSKHANDYDSDTYKTHMSRYESLSNQFEQLEGYQYESKIKTVLHGLNFSEEDFNKPINDFSGGQKTRLSLAQMLLNEPDLLLLDEPTNHLDLETTKWLEDYLRYFKGAIVIISHDRYFLDKIVTQIYDVALGDVKRYVGNYEEFIQQRDLYYQKRMQEYESQQAEIKRLETFVEKNITRASTSGMAKSRRKILEKMERIDKPMLDAKSANIQFGFDRNTGNDVMHVKNLEIGYQTAITKPISIEVSKGDHIAIIGPNGIGKSTLIKTIANQQKALNGDITFGANLQIGYYDQKQAEFKSSKTILDYVWDQYPLMNEKDIRAVLGRFLFVQDDVKKIINDLSGGEKARLQLALLMLQRDNVLILDEPTNHLDIDSKEMLEQALQHFEGTILFVSHDRYFINQLANKVFDLTIDGGKMYLGDYQYYIEKVEEAEALKAHQEEQSVNVQAHKKSMEQSSYHNQKEQRREQRKLERQISECENEIETLETTILQIDEQLTQPEVYNNPQKANELAIQKQDSEQKLEHAMSKWEELQQKL

SEQ ID NO: 82604 - DNA, 1911 bp, Synechocystis sp. PCC 6803
  CDS (1)..(1911): transl_table=11
atggctctcatcactgttcaatccctccgcaaagattttggtattaaagaaattctgcgggacgctacgttcaacatcgagccaggcgatcgggtgggattaattggggttaatggctccggtaaatccaccctgttgaaaatgattgccgggttagaaccctttgatggcggagaatattggtgcaacagcagtgccaaagtggtttatttaccccaacaaccagagatggacggcgatcgcaccgtgttggagcaggtttttgtggacagtggcgaacagtggcaattagttaaacaatacgaactgctgtcggacaagttggcccaccagggcagtgacgagcaattgcttaatcaactgtcggccctatcagcccagatggaaaccagtggggcctgggaattggaaacccaagccaaaattattctgacccagttgggggtagatcatctcgatgccaaagtaggcgatctttccggtggttaccgtaaacgggtggcgatcgccgccgcattgttgtcccaaccggatgtgctgttgatggacgaacccactaaccatttggatgctttttcggtggaatggctacaaagttacctgcaacggttccggggagcattgttattaattacccacgaccgctattttttggaccgggtgacgaaccgtattttggaaattgaccaaggagaactgtatagctacaacggtaactatggttattatctgaccaaaaaagcggaagcagaggaatcggaacagagcagtcagaaaaaacaccggggagtgttgcggcgggaattggaatggttaaaaagagggcctaaagcccggagcactaagcaaaaagcccgcattgaccgcatccaggatatgcaggagaccagctttaaaacggggacgggaaaagtagatattagtacggctgggcggcgcattggcaaaaaagtggtagagctggaaaacattagcaagggctttgaaaacaaacaattaattaaagatttttcctatattttcacccccggcgatcgggtgggaattgtgggcaaaaatggcgtgggcaaatccactttaatgaatatgatcactggcagattggagccggaccaaggcacagtggacattggtagcaccattcattttggttattttgatcaacactccgatgacctgagtttaaatcctaatcaacgggtaattgattacctcaaaagtgtggcggaattgatcaaaaccaccgacggcgaagtaattaccgctgggcagatgttagaaagatttttatttccccccaatcaacaatttgctcccattgccaagttatccgggggagaaaagcgccgtttatttttactgcgggtgttgatgcgagcccccaacgttttaattttggacgaacctaccaacgatttggatgtgcaaaccctggcggtgttggaagattacctggaagattttaacggttgcgtcattgtggtttcccatgaccggtatttcctcgaccgcaccgtggaaaccatttttgcttttgaagaagagggagaactacggcaatatcccggcaattacactttgtatttggaatataaaaaagcagaacaggttagagcaaaccaagaagaaactgagttaaaaaaatctcaaccagttgcttctgttacgaccaaagttagccaagatagtagctcgaaaaaactttcctataaagaaaagcgggaatacgaacagcttgagcaacaaattccccaattggaagaagaaaaagcccaactggaagcccaactttaccagagttccaacggcaattttaccgagttgcaaaacctgacggaacgcttagctaatttaagtgaaagtattgatcaaaaaacagaacgttggctaactttagctgagagaatttga

SEQ ID NO: 82605 - protein, 636 aa, Synechocystis sp. PCC 6803
MALITVQSLRKDFGIKEILRDATFNIEPGDRVGLIGVNGSGKSTLLKMIAGLEPFDGGEYWCNSSAKVVYLPQQPEMDGDRTVLEQVFVDSGEQWQLVKQYELLSDKLAHQGSDEQLLNQLSALSAQMETSGAWELETQAKIILTQLGVDHLDAKVGDLSGGYRKRVAIAAALLSQPDVLLMDEPTNHLDAFSVEWLQSYLQRFRGALLLITHDRYFLDRVTNRILEIDQGELYSYNGNYGYYLTKKAEAEESEQSSQKKHRGVLRRELEWLKRGPKARSTKQKARIDRIQDMQETSFKTGTGKVDISTAGRRIGKKVVELENISKGFENKQLIKDFSYIFTPGDRVGIVGKNGVGKSTLMNMITGRLEPDQGTVDIGSTIHFGYFDQHSDDLSLNPNQRVIDYLKSVAELIKTTDGEVITAGQMLERFLFPPNQQFAPIAKLSGGEKRRLFLLRVLMRAPNVLILDEPTNDLDVQTLAVLEDYLEDFNGCVIVVSHDRYFLDRTVETIFAFEEEGELRQYPGNYTLYLEYKKAEQVRANQEETELKKSQPVASVTTKVSQDSSSKKLSYKEKREYEQLEQQIPQLEEEKAQLEAQLYQSSNGNFTELQNLTERLANLSESIDQKTERWLTLAERI

SEQ ID NO: 82606 - DNA, 1908 bp, Salmonella typhimurium LT2
  CDS (1)..(1908): transl_table=11
atgattgttttctcctcgttacaaattcgtcgcggcgtgcgcgtcctactggacaatgcctcggctaccattaatccaggccagaaagtcggcctggtgggtaaaaacggctgcggtaaatctaccctgctggcattgctaaaaaatgaaatcagcgccgatgccgggagttttaccctgcccggaacctggcaattagcgtgggtgaatcaggaaacacctgcgttgcctcagccagcgattgagtatgtcattgacggcgaccgtgaataccggcagctggaggcgcagcttaacgacgccaacgaacgtaacgacggacatgctatcgcctccatacatggcaagctggacgccatcgacgcatggaccgttcgttcgcgcgccgccagcctgctacacggtctcggcttctctaacgatcagctggaacgtccggtcagcgacttttccggcggctggcggatgcgccttaacctggcccaggcgctgatttgccgttccgatttactgctgctcgacgaaccgaccaaccacctcgatctggatgccgtcatctggctggaaaaatggctgaagagctatccgggcaccctgattctgatctcccacgatcgcgactttcttgacccgatagtggataaaattatccatatcgaacaacagactctgttcgagtacaccggcaactacagcgcgtttgaagttcagcgcgccacgcgcctggcgcaacagcaggcgatgtatgagagtcagcaggagcgtgtggcgcatctgcaaagctacatcgaccgtttccgcgctaaagcgaccaaggccaagcaggcgcaaagccgtatcaagatgctggagcgtatggagctgattgcgccggctcatgtcgacaacccgttccatttcagcttccgcgcgccggaaagcctgccgaacccgctgctgaagatggaaaaagtcagcgcaggttatggcgatcgcatcattctggaatccatcaagctgaacctggtgcccggctcgcgtatcggcctgctgggtcgcaacggcgcggggaaatcgacgctgatcaagctgctggcgggcgaactggaaccgttgcacggtgaaatcggcctcgccaaaggcattaagctcggctacttcgcccagcaccaactggagttcctgcgcgccgatgaatccccgctgcaacatatggcgcgtctggcgccgcaggaactggagcagaagctgcgcgactatctcggcggcttcggtttccagggcgacaaagtaacggaagagacgcaacgtttctccggcggcgagaaagcgcgcctggtactggcgctgatcgtctggcagcgtccaaatctgctgttgctcgatgaaccgaccaaccacctggatctcgacatgcgtcaggcgctcaccgaagcgctgattgatttcgaaggcgcattggtcgtcgtgtcgcacgaccgccacctgattcgctccaccactgacgacctctatctggttcacgacaaaaaggtcgaaccgttcgacggagacctggaagattatcagcaatggctgagcgacgtgcagaaacaggaaaaccaggccgacaacgcgccgaaggaaaacaacgccaacagcgctcagtcacgcaaagatcagaagcgtcgcgaagccgagctacgcactctgacgcaaccgctgcgtaaagagattacccgtctggaaaaagagatggaaaagctcaacgcccaactggcgcaggcggaagagaagcttggcgacagcagcctgtatgacccaagccgtaaagcggagatgaccgagtgtctgcaactgcaggccagcgccaaatccgggctggaagcgtgtgaaatggcatggcttgaggcgcaggagcagcttgagcagatgatgcagaacgactaa

SEQ ID NO: 82607 - protein, 635 aa, Salmonella typhimurium LT2
MIVFSSLQIRRGVRVLLDNASATINPGQKVGLVGKNGCGKSTLLALLKNEISADAGSFTLPGTWQLAWVNQETPALPQPAIEYVIDGDREYRQLEAQLNDANERNDGHAIASIHGKLDAIDAWTVRSRAASLLHGLGFSNDQLERPVSDFSGGWRMRLNLAQALICRSDLLLLDEPTNHLDLDAVIWLEKWLKSYPGTLILISHDRDFLDPIVDKIIHIEQQTLFEYTGNYSAFEVQRATRLAQQQAMYESQQERVAHLQSYIDRFRAKATKAKQAQSRIKMLERMELIAPAHVDNPFHFSFRAPESLPNPLLKMEKVSAGYGDRIILESIKLNLVPGSRIGLLGRNGAGKSTLIKLLAGELEPLHGEIGLAKGIKLGYFAQHQLEFLRADESPLQHMARLAPQELEQKLRDYLGGFGFQGDKVTEETQRFSGGEKARLVLALIVWQRPNLLLLDEPTNHLDLDMRQALTEALIDFEGALVVVSHDRHLIRSTTDDLYLVHDKKVEPFDGDLEDYQQWLSDVQKQENQADNAPKENNANSAQSRKDQKRREAELRTLTQPLRKEITRLEKEMEKLNAQLAQAEEKLGDSSLYDPSRKAEMTECLQLQASAKSGLEACEMAWLEAQEQLEQMMQND

SEQ ID NO: 82608 - DNA, 1884 bp, Agrobacterium tumefaciens str. C58
  CDS (1)..(1884): transl_table=11
atgattacgattaccgatctttccgcccgcatcgccgggcgtctgcttcttgaccatgccagcgtggcgcttcccgccggtgtgaaggcgggtctcgtcggccgcaacggcgccggaaaatccaccctgttccggatcatcaccggcgatcttgcggcggaaggcggttcggtgacgatcccgaaactcgcccgcatcggccaggtggcacaggaagcgccgggcacggaggaatcactgatttccatcgtgcttgccgccgacaaggagcgcagcgcgcttttggccgaagcggaaaccgcaaccgatcctcaccggatcgctgaaatccagatgcggcttgtcgatatcgatgcccattcggcggaagcgcgcgcctccagcattctcgccggtctcggcttcgatcacgaggcgcagcttcggcccgcctcctccttctccggcggctggcgcatgcgcgtggcgctcgcctcggtgctgtttgccgaaccggacctgttgctgctcgacgagccgaccaactatctcgacctcgaaggcacgctctggctggaagactatatccggcgttatccgcataccgtcatcatcatcagccatgaccgcgatcttctcaacaatgccgtcaattccatcgtgcatctggaccagaagaagctgaccttctatcgcggtggttacgaccagttcgagcggcagaaggccgaggctgacgaattgcagatgaaggccaaggtcaagaacgatgctgcacgcaaacatctgcaaagcttcatcgaccgtttccgcgccaaggccaccaaggcacgccaggcccagagccgcatcaaggcgctggagcgcatgggcaccgttgccgccgtgatcgaggatcacgtccagccgatcacgtttcccgagccggaaaagcagcccgcctcccccatcgtcgccatcaatggcggtgccgtcggttacgagccgggcaaatccatcctgaaacagcttaatctcaggatcgacaatgacgaccgcatcgcgctgctcggctcgaacggcaacggcaaatcgaccttcgcgaaattcatctccggccggcttgccccgcaggcgggcgatcttcgtgtggcctcggggctcaagatcggtttcttcgcacagcatcagctcgacgacctcgtgccggatgaaacgcccgtcgaacatgtgcgcaagctgatgccgctcgctcctgaagcgcaggttcgtgctcgcgtggcgcagatgggccttgcaacggaaaaaatgtcgacggcggcgaaggacttgtccggtggtgaaaaggcccggctgctgatggggcttgccgccttccatgcgccgaacctgctgatcctcgacgaaccgaccaaccatctcgacatcgacagccgccgggcgctgatcgaggcgctgaacgattatagcggcgcggtcatcctcatctcgcacgaccgccacctgatcgaagcgacggtggaccggctgtggctggtagccgacggcacggtcaagaccttcgaaggcgacatggaggaatatcgcgatctcgttatttcgtccggcaggaagaaggacgacaagaccgaggccgctgccgaccagacctcgaaagccgaccagcgcaaggccaatgcagaaaagcgcgcccagctggcgccgctcaagaaaaagatcaacgaaatcgagtccctgacggcaaagcttgagaaactgattcaggcgctcgacaaggagttggcggaccctgctttgtacgaaaaagcacccgccaaggccgcgctgaaggtgaaggagcgcggcgaggccgcgagcaagctttcggacgccgaggagcaatggctgatgctttcgagcgaatacgaggatgccatggcgcagtga

SEQ ID NO: 82609 - protein, 627 aa, Agrobacterium tumefaciens str. C58
MITITDLSARIAGRLLLDHASVALPAGVKAGLVGRNGAGKSTLFRIITGDLAAEGGSVTIPKLARIGQVAQEAPGTEESLISIVLAADKERSALLAEAETATDPHRIAEIQMRLVDIDAHSAEARASSILAGLGFDHEAQLRPASSFSGGWRMRVALASVLFAEPDLLLLDEPTNYLDLEGTLWLEDYIRRYPHTVIIISHDRDLLNNAVNSIVHLDQKKLTFYRGGYDQFERQKAEADELQMKAKVKNDAARKHLQSFIDRFRAKATKARQAQSRIKALERMGTVAAVIEDHVQPITFPEPEKQPASPIVAINGGAVGYEPGKSILKQLNLRIDNDDRIALLGSNGNGKSTFAKFISGRLAPQAGDLRVASGLKIGFFAQHQLDDLVPDETPVEHVRKLMPLAPEAQVRARVAQMGLATEKMSTAAKDLSGGEKARLLMGLAAFHAPNLLILDEPTNHLDIDSRRALIEALNDYSGAVILISHDRHLIEATVDRLWLVADGTVKTFEGDMEEYRDLVISSGRKKDDKTEAAADQTSKADQRKANAEKRAQLAPLKKKINEIESLTAKLEKLIQALDKELADPALYEKAPAKAALKVKERGEAASKLSDAEEQWLMLSSEYEDAMAQ

SEQ ID NO: 82610 - DNA, 1932 bp, Clostridium perfringens str. 13
  CDS (1)..(1932): transl_table=11
atgattattttaagctgtagacacttaactaaaagttttggtattgatgagattttaagagatataacatttaatataaatgaaggtgacaaggttggtttaataggaccaaatggagaaggtaaatcaaccttatttaaaattcttaccaagcaactagattatgatagtggtgaattatttttagataaaaacaaaaccctaggatatctctctcagaatttatctttagatagtgaaaatactatttatgatgagatgctttctgtattctcatctttaacggaacttgaagataaaattaaaaccttagaagaaaaacttaatgaaccttatgatgcttcaaatgaagaatatcataataaacttataaaggattataccttatctcaagaactttatgaaaatagaggcggttatacttttaggggagaaatttctagagttcttaaaggtttaggttttttagaggaagatttcaacaatcaaattataaaccttagtggtggtcaaaaaactagattagcactctgtaaactgcttttaagaaaaccagacttacttcttttagatgagcctacaaaccacttagatttagaagctatagaatggcttgaagaatatcttaatggttataagggaacagtctttgttatttcccatgatagatttttcttagactctgtaacaaatacaacctttgaacttattggtggaaagatacattgttataatgcaagctacacaaaatttcttgaacttagaaaaaaggatattgaagctagattaaaagcttataatcttcaacaggcagaaataaaaagacaagaggaaattatagaaaagttccgttcatttaatagagaaaaaagtgttagagctgctgaaagtagacaaaaagctttagataaaatggatcgtctagaggcaccagaggttataaaagaagcttctaaaataagctttgaaaccttagttaaaagcggaaatgatgttttacatattgaaaacctaaaaaagagctatgatagtcttttatttgaaaatgtaaatttagatttaaaacgtggagaaaaggttgccctaataggggaaaatggtagaggtaagactactctatttaaaataataatgggaatgttaaaacaggattctggttctgtatcccttggtaaaaacgtatttacaggatattatgaccaagagcaatctaatttaaatctccataaaaccataatagatgaagtttgggatgacttccctaatcttactactactgaggttagaaattatcttgcttctttcctatttactggtgatgatgtatttaaagaaatttccctattaagtggtggtgaaaagtgtaagataaaccttttaaaacttatgctttcaaaggccaatcttcttctcttagatgagcctacaaatcacttagatattatgtctagagaagccctagaagatgcaattttaagttatgatggaactttaatagtaatttcccatgatagatacttcctaaataaagtaatcaacaaaattgttgaacttcaagaaaatggtcttaagacatacttaggaaattacaattattatatggataagaaagctaatcctaatagatatgaagatattgatgaggaaataaaccaaggtaaaacaaaaacccaaataaaagaagaaagaaaaaagaaaaaatctgctgaaaaatcagctagagctttaagagctcaacttagagatgttgaaaaattaattcctcaaaaagaagaagaacttgaaaaacttcaaggaatgctttgtactgaggaagtttattcaaatccagaggaaagtgtaagagtaaataaagaaattaattcagttcaagaagaaatagattctctttacgctacttgggaagagctttctgaatctcttgaggaataa

SEQ ID NO: 82611 - protein, 643 aa, Clostridium perfringens str. 13
MIILSCRHLTKSFGIDEILRDITFNINEGDKVGLIGPNGEGKSTLFKILTKQLDYDSGELFLDKNKTLGYLSQNLSLDSENTIYDEMLSVFSSLTELEDKIKTLEEKLNEPYDASNEEYHNKLIKDYTLSQELYENRGGYTFRGEISRVLKGLGFLEEDFNNQIINLSGGQKTRLALCKLLLRKPDLLLLDEPTNHLDLEAIEWLEEYLNGYKGTVFVISHDRFFLDSVTNTTFELIGGKIHCYNASYTKFLELRKKDIEARLKAYNLQQAEIKRQEEIIEKFRSFNREKSVRAAESRQKALDKMDRLEAPEVIKEASKISFETLVKSGNDVLHIENLKKSYDSLLFENVNLDLKRGEKVALIGENGRGKTTLFKIIMGMLKQDSGSVSLGKNVFTGYYDQEQSNLNLHKTIIDEVWDDFPNLTTTEVRNYLASFLFTGDDVFKEISLLSGGEKCKINLLKLMLSKANLLLLDEPTNHLDIMSREALEDAILSYDGTLIVISHDRYFLNKVINKIVELQENGLKTYLGNYNYYMDKKANPNRYEDIDEEINQGKTKTQIKEERKKKKSAEKSARALRAQLRDVEKLIPQKEEELEKLQGMLCTEEVYSNPEESVRVNKEINSVQEEIDSLYATWEELSESLEE

SEQ ID NO: 82612 - DNA, 2172 bp, Arabidopsis thaliana
  CDS (1)..(2172)
atgggtaagaagaagtcagacgagagtgctgctaccacaaaggtgaagccaagtgggaaagatgcttcgaaagattctaaaaaagagaaattgtcagtctcggctatgcttgcaggcatggatcagaaagatgataaaccgaagaagggctcatcatctagaaccaaggctgctccgaaatctacatcttacactgatggcatagatcttcctccttctgatgaagaagacgacggtgaatctgatgaggaagagagacagaaggaagcaaggaggaagctgaagagtgaacaaaggcaccttgagatatctgtgactgataaggaacaaaagaagcgagaggcgaaagaaagattagctcttcaggctgcagagtcggcaaagagggaggctatgaaggacgatcatgatgcattcacggttgttattggaagcaagacctcagtgcttgaaggagacgacatggctgatgcaaatgttaaggatattaccatagaatctttttctgtatctgctcgaggtaaagagcttttgaagaatgcttctgtcaggatttcacatggtaaaaggtatgggttgatcgggccaaacggaatgggaaagtctacactgttaaagcttttagcttggaggaagattccagtgccaaagaatattgatgttcttcttgttgagcaagaggtggttggtgatgaaaagagtgctctgaatgcagttgtctctgccaatgaagagttggttaagctacgggaagaggctgaagctctgcagaagtcgtcttctggagctgatggagaaaatgttgatggtgaggatgatgatgatactggagaaaagcttgctgaactgtatgacaggctgcagattttagggtcagatgctgctgaagcacaggcatccaaaattcttgcggggttaggtttcacaaaagatatgcaagtgcgtgcgactcagtccttcagtggtggctggaggatgcgaatatcattagctagagctctgttcgtgcaacctacccttttgctgttagatgaacccactaaccatcttgacctgagagctgttctatggttagaggagtatttgtgtcgctggaagaagacactagttgttgtttcacatgaccgggacttcctcaacacagtctgcacggagataatacatctccatgaccaaaatctccacttctaccgtggtaatttcgatggttttgaaagcggatatgagcagcgtcgcaaggagatgaacaaaaaatttgatgtctacgacaaacagatgaaagcagcgaagaggactggaaaccggggtcaacaggagaaggtaaaggacagggccaagtttactgctgcaaaagaagcatccaagagtaagtcaaagggcaagacagtggatgaagaaggcccagcaccagaagctccaaggaagtggagagattacagtgtggtgttccacttcccagaaccaactgagctcactcctcctcttctgcagttaattgaggttagcttcagctatcccaacaggccagatttcagactctcgaatgttgatgtaggtatcgatatggggacacgggttgcgatagttgggcctaacggagcaggaaagtccactctattaaatcttcttgcgggagatttagttccaacagagggtgaaatgagaagaagccagaagctgaggattggcaggtattctcagcattttgttgaccttttaacaatgggggaaacaccggttcagtatctccttcgtcttcatcctgaccaagagggatttagcaagcaagaggcagtgcgagcgaagctaggcaagtttgggctaccaagtcacaatcacttatctccaattgcgaaattgtctggaggacaaaaggctagggttgtgttcacctcgatctcaatgtcaaaaccacacattttgcttctggacgagcctacaaatcacttagacatgcagagtatagatgccttggcggatgcactagatgagttcacaggtggagttgtgttggtgagtcacgactcgagactcatatcacgtgtatgtgcggaagaggagaagagtcaaatttgggttgtagaagacggaacagtgaatttcttcccaggcacatttgaagagtacaaagaagatctccaaagagaaatcaaagcagaagttgatgagtga

SEQ ID NO: 82613 - protein, 723 aa, Arabidopsis thaliana
MGKKKSDESAATTKVKPSGKDASKDSKKEKLSVSAMLAGMDQKDDKPKKGSSSRTKAAPKSTSYTDGIDLPPSDEEDDGESDEEERQKEARRKLKSEQRHLEISVTDKEQKKREAKERLALQAAESAKREAMKDDHDAFTVVIGSKTSVLEGDDMADANVKDITIESFSVSARGKELLKNASVRISHGKRYGLIGPNGMGKSTLLKLLAWRKIPVPKNIDVLLVEQEVVGDEKSALNAVVSANEELVKLREEAEALQKSSSGADGENVDGEDDDDTGEKLAELYDRLQILGSDAAEAQASKILAGLGFTKDMQVRATQSFSGGWRMRISLARALFVQPTLLLLDEPTNHLDLRAVLWLEEYLCRWKKTLVVVSHDRDFLNTVCTEIIHLHDQNLHFYRGNFDGFESGYEQRRKEMNKKFDVYDKQMKAAKRTGNRGQQEKVKDRAKFTAAKEASKSKSKGKTVDEEGPAPEAPRKWRDYSVVFHFPEPTELTPPLLQLIEVSFSYPNRPDFRLSNVDVGIDMGTRVAIVGPNGAGKSTLLNLLAGDLVPTEGEMRRSQKLRIGRYSQHFVDLLTMGETPVQYLLRLHPDQEGFSKQEAVRAKLGKFGLPSHNHLSPIAKLSGGQKARVVFTSISMSKPHILLLDEPTNHLDMQSIDALADALDEFTGGVVLVSHDSRLISRVCAEEEKSQIWVVEDGTVNFFPGTFEEYKEDLQREIKAEVDE

SEQ ID NO: 82614 - DNA, 2706 bp, Drosophila melanogaster
  CDS (1)..(2706)
atgtccaaggccaagggtaagaagaaggagcgctttgatgacgacgaggagcagctggagaaagtgcaggagaagaagccaccgacaagcaagaagggtggtaagaagggaaagcgaggaggtggcggcggcgactccagcgacgaggatgtcacgaccaggaatcgggacaacgaggatctggagagcatagcctcatcgaatcagagcaaacagcagactgccggcaaaaagcaggccaagaagggtaaaaagggcaagaggaataatgactggagcgacgaggatgagaagccagagaagagtttgcctgccaacgacttggacgatgaagatgacgacgaggcgcctctggcatccaagccagctgctaaaaagccacagcccagcaaaaagaacaagaagaacaagaagaagaacgacgatttctcggacgaagataaaccggagctggacttggacgacctggacaatgaggaggatgaggtggaagtggttgctgtcaagccagcctccaagaagtccaagaagaagcagcaggctcagcaaaagaacatgttcgccatgagcgatgatgaggaggatgaggttgccgatgatctgccaaatgacagcgaagaggaggagaaggaacagctgtccaacaaggcggccaaggagtcaaaaaaggaacagcagaagcagcccgaaaaggaagtggaggagcagaaagtggagcaagtccttagcgaaaaagtggcggcagtaagtctcaaggaaaagacacctgagccggtacccaaggccgagcccgaacccgagtctgaaccccaacccgacgaggaagccgatgctgaggtagattccaagttcgaggagagcaaggaagccaaggagaagaaactcactcacaaggagaaaaagaagcaaaagaagcagcaggagtacgaacgccaaatggagctgatgacaaagaagggtggtgccggtcactcggacttggacaacaatttcaccatgtcgcaggtgcagaagagcgctggtcaaaaggcggctctggagcaagccgtggatatcaagatcgagaatttcaccatctcagccaagggtaacgatctatttgtgaacgccaacctattgattgcacatggacgccgttatggtttggtgggtcccaacgggcacggcaagaccaccctgctccggcatattgccacccgtgcctttgccataccgcccaatatcgatgtgctgctttgcgaacaggaagtcgtagctaccgataaaacggccatcaatacaatcttggaagctgatgtgcgtcgcacagagatgctaaagaaggccgatgaactggagaaacagtttgtcgctggcgatttgacggtgcaggaggagctaaacgataccttcgcggaactgaaagccattggagcctactcggcggaagccagggcacgaagaatccttgccggtttgggtttcagcaaagagatgcaggacaggccgacgaacaaattctccggaggctggcgcatgagagtgtccctagcaagagctctctatctggagcccacgttgcttatgctcgacgaaccgaccaatcatttggatcttaatgctgtcatttggctggacaactatctgcagggctggaagaagaccctgttgatcgtgtcccacgaccagagtttcttggacaacgtctgcaacgagatcatacatttggatcaaaagaaactgcaatactacaagggcaactattccatgttcaagaagatgtatgtgcagaaacgccgcgagatgatcaaggagtacgagaagcaggagaagcgcctgcgcgagctgaaggcccacggtcagtcgaagaaggcagcggaaaagaagcagaaggaatcgctcacacgcaagcaggagaagaacaagtctaagcagcagaaacaggacgaggatgagggacctcaggagctgttggccaggcccaaggaatatattgtcaagttccgcttcccggagccatcgcagctccagccacccattctgggtgtccacaatgtcaccttcgcctttccgagccagaaaccgctgttcatcaaggttgactttggcattgatctaactagtcgagtggccatcgtgggacccaatggtgtgggcaaatcaaccttcctcaagctgctgctcggtgaattggaaccgcaggagggtgagcagcgcaagaatcaccgacttcatgtgggccgcttcgatcagcactcaggtgaacatctcacggcagaggaatcggctgcagagtacctgcagcgtctgttcaatctgccccacgaaaaggcgcgtaaggcattgggttcctttggtttggtcagtcatgcacacaccatcaagatgaaggatctgtccggtggtcagaaagcccgtgtggccctcgctgagctatgcttgagtgcgccggatgtactaattctcgatgagcctacgaacaatctggacatcgagagtatcgacgccttggcggaggcaatcaacgagtacgagggtggcgtgatcatcgtctcccacgacgagcgtttgatccgtgaaacaggttgcactctctacgtaattgaggatcagacgatcaacgagattgttggagagttcgatgactacagaaaggaggttctcgattcgctcggcgaggtggtcaacaatcctagcgtggtggccaatgcggctgtgctgcaataa

SEQ ID NO: 82615 - protein, 901 aa, Drosophila melanogaster
MSKAKGKKKERFDDDEEQLEKVQEKKPPTSKKGGKKGKRGGGGGDSSDEDVTTRNRDNEDLESIASSNQSKQQTAGKKQAKKGKKGKRNNDWSDEDEKPEKSLPANDLDDEDDDEAPLASKPAAKKPQPSKKNKKNKKKNDDFSDEDKPELDLDDLDNEEDEVEVVAVKPASKKSKKKQQAQQKNMFAMSDDEEDEVADDLPNDSEEEEKEQLSNKAAKESKKEQQKQPEKEVEEQKVEQVLSEKVAAVSLKEKTPEPVPKAEPEPESEPQPDEEADAEVDSKFEESKEAKEKKLTHKEKKKQKKQQEYERQMELMTKKGGAGHSDLDNNFTMSQVQKSAGQKAALEQAVDIKIENFTISAKGNDLFVNANLLIAHGRRYGLVGPNGHGKTTLLRHIATRAFAIPPNIDVLLCEQEVVATDKTAINTILEADVRRTEMLKKADELEKQFVAGDLTVQEELNDTFAELKAIGAYSAEARARRILAGLGFSKEMQDRPTNKFSGGWRMRVSLARALYLEPTLLMLDEPTNHLDLNAVIWLDNYLQGWKKTLLIVSHDQSFLDNVCNEIIHLDQKKLQYYKGNYSMFKKMYVQKRREMIKEYEKQEKRLRELKAHGQSKKAAEKKQKESLTRKQEKNKSKQQKQDEDEGPQELLARPKEYIVKFRFPEPSQLQPPILGVHNVTFAFPSQKPLFIKVDFGIDLTSRVAIVGPNGVGKSTFLKLLLGELEPQEGEQRKNHRLHVGRFDQHSGEHLTAEESAAEYLQRLFNLPHEKARKALGSFGLVSHAHTIKMKDLSGGQKARVALAELCLSAPDVLILDEPTNNLDIESIDALAEAINEYEGGVIIVSHDERLIRETGCTLYVIEDQTINEIVGEFDDYRKEVLDSLGEVVNNPSVVANAAVLQ

SEQ ID NO: 82616 - DNA, 1836 bp, Drosophila melanogaster
  CDS (1)..(1836)
atgtcatccgccgcgaagaaacgggaggcgcagaagaagaaggatgcgcgcaacaagaagatccaacagataccctccaccaagaaggccaatggtgtcccggaacgcgaactgaccgaggaggagaagctgtgcgccaagctggaggaggaggcccggatcagtgcggaggcccgatcctgcaccggatcgctggcggtgcatccgcgttcccgtgacgtcaagatcgccaacttttcgatcacgttctttggctccgagctgctgcaggacaccatgctggagttgaattgcgggcgtcgctacggtctgattggcctgaacggatgcggtaagtcctcgctgctggccgtgcttggcggcagggaggtgccggtaccgccgcacatcgacatcttccacttgacgcgcgaaatcccggccagttcaaagagtgcgctgcagtgcgtcatggaggtggatgaggagcgcattaagctagagaagctggccgaagagctggccatgagcgaggaagatgatgctcaggagcagctgatcgacatctacgagcggctggacgatatgtccgccgatctggcagaggtcaaggcggcccgcatccttcacggtcttggcttcgacaaggccatgcaacagaaacaggccaaggacttctcaggtggttggcgtatgcgtatcgccttggcccgcgcgctgtttgtgaagccccatctgctgttgctggacgagccgacgaatcacttggatttggacgcctgtgtgtggctggaggaggagcttaagacatacaagcgaatcctggtgctcatctcgcactcgcaggatttcctcaacggtgtctgcacaaacatcattcacctgacgggcaagcgactcaagtactatacgggtaactatgaggcctttgtgcgcacacgcatggaactgctggaaaaccagatgaagcagtacaactgggaacaggaccagatttcgcacatgaagaactacattgctcgattcggtcacggttccgccaagttggcgcgacaggcgcagtccaaggagaagacgctggccaagatggttgctcagggactcacagagaaggtgtccgacgataaggtgctcaacttttacttcccatcgtgcggcaaggtgccgccacccgtgattatggttcagaacgtgaatttccgatacaacgatgagacaccgtggatctacaaaaatctggagttcggaattgatctagacacacgtctcgctttggttggacccaacggagctggcaagtccacgttgctgaagctgctttatggcgatctggtgcccacctccggcatgatccgcaagaactcccatctgcgcatcgcccgctaccaccagcatctgcacgagctgctcgatttggatgccagtccgctagagtacatgatgcgtgccttccctgacgtcaaggagaaggaggagatgcgcaagattattggtcgctacggcctcactggtcgccagcaggtgtgtccgattcgccagctctccgatggccagcggtgccgcgtggtgttcgcctggctcgcctggcaggtgccccatcttctgctacttgacgaacccaccaatcacttggacatggagacaatcgatgcgctcgcggatgcgatcaacgatttcgatggcggcatggtgctagttagtcacgatttccgtctgattaatcaggtggctgaggagatttgggtatgcgaaaaggagacggtaaccaagtggaagggcggcattctggactacaaggatcatctgaagaacaagatcacctccgagaacgagaagaaggccaaggcgggaaagtag

SEQ ID NO: 82617 - protein, 611 aa, Drosophila melanogaster
MSSAAKKREAQKKKDARNKKIQQIPSTKKANGVPERELTEEEKLCAKLEEEARISAEARSCTGSLAVHPRSRDVKIANFSITFFGSELLQDTMLELNCGRRYGLIGLNGCGKSSLLAVLGGREVPVPPHIDIFHLTREIPASSKSALQCVMEVDEERIKLEKLAEELAMSEEDDAQEQLIDIYERLDDMSADLAEVKAARILHGLGFDKAMQQKQAKDFSGGWRMRIALARALFVKPHLLLLDEPTNHLDLDACVWLEEELKTYKRILVLISHSQDFLNGVCTNIIHLTGKRLKYYTGNYEAFVRTRMELLENQMKQYNWEQDQISHMKNYIARFGHGSAKLARQAQSKEKTLAKMVAQGLTEKVSDDKVLNFYFPSCGKVPPPVIMVQNVNFRYNDETPWIYKNLEFGIDLDTRLALVGPNGAGKSTLLKLLYGDLVPTSGMIRKNSHLRIARYHQHLHELLDLDASPLEYMMRAFPDVKEKEEMRKIIGRYGLTGRQQVCPIRQLSDGQRCRVVFAWLAWQVPHLLLLDEPTNHLDMETIDALADAINDFDGGMVLVSHDFRLINQVAEEIWVCEKETVTKWKGGILDYKDHLKNKITSENEKKAKAGK

SEQ ID NO: 82618 - DNA, 2211 bp, Schizosaccharomyces pombe 972h-
  CDS (1)..(2211)
atggagcaagtcattcagaataattgctctgaagtagaccctcatgtcctcagctactgcactggatatgctaatgatgctattaaagatgtagatgaggcttcagaccatacgatctctctcattcgtaatttattgctagatgctggcgctcgtgaggaagcggtacagctcatacaaaacgaactagagaaacaatttaaagaaagagaggaacatctagatacattacaaacgaatggacttgttcgtttgaaggagactattcgaatggattcccaatccgaaatttcgtcaactatgggtttggttggcgaaaagatggaattagatgctgtaaagggccgtaaggttgaatctagggtagatagaagaaaattagagaaggctgaacggaagattcgtgccaaatgggagaaacgtactatcaaagcagaatacgaatcttcaaagttggttcaacccgaacaaaagtcttatgaagagttttacatggctgtaaatcctctagatttatccggaagtaaccaaggaaaatcgaaagatattaaaattgatggaattgatcttgcttttgctggtcatcgtatattgactggtgcttcgttgacacttgcacagggtagacgatacggtttaactggtcgcaacggtatcggtaaatctactcttctacgtgctctttctcgccgtgaaattgcgattcctacccatattaccattcttcatgttgagcaagaaatgacaggtgatgatacacctgccctacagtcagttttggatgccgatgtttggcgcaagtatttgattcaggaccaggaaaagataactaatcgtctatcaacgattgaaaaagaattggaagaacttagtaaagaccaaactgctgatcaagctatttcccgtcgccttgagcgtgaacgagacgaacttgatttacggttgttagatattcaaaataagctttccgagatggactctgatagagcagaatcacgcgctgctactattttagctggtcttggatttactcaagaaatgcaaagccatgctaccaagactttttcaggtggttggcgtatgcgtttgtcattggcacgtgctctgttttgtcaaccagatttactacttttggatgaaccttcgaacatgcttgacgttccctcaattgctttcttatctgaatatttacaaacttataaaaatatcgttttagtcgtttcacacgatcgttctttcttgaatgaagttgctactgatattattcatcaacactctgagcgcttggattactataagggtaattttagtcaattctatgctactcgtgaagaacgttgcaaaaatcaacttcgtgaatatgaaaagcaaatggaataccgcaaacatttgcaatcattcattgacaaatttcgttataatgctgccaaatcatccgaagcacaaagtcgtattaagaagttggaaaaactgccgatccttgaaaagcctcaaactgaggaagaagttgagtttgaatttccacctgtggaaaaaatatctcctcctatcttacaaatgtctgatgtcaattttgagtatgttccaggtcaccctattctcaaacatgttgatattgatgttcaaatggattctcgtatcggtgtggttggtcccaacggtgctggtaaatcaacaatgcttaagcttcttatcgaacaacttcatccaacatctggtatagttagtcggcacccccgacttcgtattgcatactttgcacaacatcatgtcgatactttggacttaaacttgaatgccttaagctttttagctaagacatttcctggcaaaggtgaagaagaataccgtcgtcatcttggcgcttttggtgttagtggacctcttgcattgcaaaaaatgatcacgctttctggtggtcagaaatctcgtgttgcgttcgcatgcctaggtctacaaaaccctcacattcttattctagatgaacccaccaaccatctggatatggagtccatggatgccttgacaagagctgttaaacgcttccaaggtggtgtgattcttgtttctcacgatgttgatttcttggacaagacatgtaccagtatttggcagtgtgaccataatgtcgtctccaagtttgatggaacaatttcacaatataagaaattctgtctatctcaacagccaaccatgactataaaaacttaa

SEQ ID NO: 82619 - protein, 736 aa, Schizosaccharomyces pombe 972h-
MEQVIQNNCSEVDPHVLSYCTGYANDAIKDVDEASDHTISLIRNLLLDAGAREEAVQLIQNELEKQFKEREEHLDTLQTNGLVRLKETIRMDSQSEISSTMGLVGEKMELDAVKGRKVESRVDRRKLEKAERKIRAKWEKRTIKAEYESSKLVQPEQKSYEEFYMAVNPLDLSGSNQGKSKDIKIDGIDLAFAGHRILTGASLTLAQGRRYGLTGRNGIGKSTLLRALSRREIAIPTHITILHVEQEMTGDDTPALQSVLDADVWRKYLIQDQEKITNRLSTIEKELEELSKDQTADQAISRRLERERDELDLRLLDIQNKLSEMDSDRAESRAATILAGLGFTQEMQSHATKTFSGGWRMRLSLARALFCQPDLLLLDEPSNMLDVPSIAFLSEYLQTYKNIVLVVSHDRSFLNEVATDIIHQHSERLDYYKGNFSQFYATREERCKNQLREYEKQMEYRKHLQSFIDKFRYNAAKSSEAQSRIKKLEKLPILEKPQTEEEVEFEFPPVEKISPPILQMSDVNFEYVPGHPILKHVDIDVQMDSRIGVVGPNGAGKSTMLKLLIEQLHPTSGIVSRHPRLRIAYFAQHHVDTLDLNLNALSFLAKTFPGKGEEEYRRHLGAFGVSGPLALQKMITLSGGQKSRVAFACLGLQNPHILILDEPTNHLDMESMDALTRAVKRFQGGVILVSHDVDFLDKTCTSIWQCDHNVVSKFDGTISQYKKFCLSQQPTMTIKT

SEQ ID NO: 82620 - DNA, 1920 bp, Xanthomonas axonopodis pv. citri str. 306
  CDS (1)..(1920): transl_table=11
atgatttccctgcgtaacttctccatgcgacgcggcgagcgtctgctgctctccaacgtcgacctgaccatgcacgccggctaccgcgtcggtgtggtcggccgtaacggcaccggcaagtcgagcctgttcgctgcggtgaagggcgagctggaggccgacaagggcgatgtcgatctgcccggcaaggtgcgcacggccagcgtttcgcaggaaaccccgtccttgcccgacccggcgctgtcgttcgtactgggtggggacatcgaggtctccgcggtgctgcaggaagaagccgcagccactgcgcgcgaagactgggaggcggtggccaacgcacaccagaagatggccgagatcggcgcctacgacgccgaagcgcgcgccggcaagttgctgcacggtctgggatttccggcagacacgcaccatcgcgcggtgtcgtcgttctccggcggctggcgcgtgcggctgaatctggcgcgcgcgctgatgatgcccagcgacctgctgctgctcgacgaaccaaccaaccacttggacatggatgcggtgctgtggctggagcagtggctgctcaagtacccgggcacgctgctgctgatttcgcatgaccgcgaatttctcgacaacgtggccacccacaccctgcacctgcatggtggcaccgccaagctgtatgtcggtggctacaccgatttcgaacgccagcgcatcgaacatttgcggcagcagcagatcgcgcatgacaaggaacaggccgagcgcgcgcatctgcagagcttcatcgaccgcttcaaggcgcaggccagcaaggcgacccaggcgcagagccgcatgaagcgcctggccaagatggccggcaccgaggcggtgcgcgccgagcgcgagtttcgcatccagttcgcgcagcccaatcggctgccgttttcgctgatccggctcaatcacgtggaagccggctatcccgcgcccgcaacccttcccccgcgtgcgggggaaggtgcccgaagggcggatgggggtgacgccgccacggtcatcctgcacgatgtcggtttcggcctggaagcgggtgatcggatcgggttgttggggcccaatggcgcgggtaagtccaccctggtcaagaccttggtgggcgaactggcaccgctggcaggcgagcgcagcgcacatccggatttgcgcatcggttacttcgcccagcacacggtggaatcgctgcacgaaggccagtcgccgatggaccacttccgcgagctgtcgccggatggcgccaatcaggcgttccgcgactttttgggtaaatggaattttgccggcgaccgcgccttcgaagtggtggatggcttctccggcggcgagcgcgcgcgtctggcgctggcgttgatcgcctggcagcagccgaacgtgctgttgctcgacgaaccgaccaaccacttggacctggaaatgcgtgaagcgctggccgaggcgctgagcgatttcgagggggccatcgtgatggtctcccacgatcgccatctgatcggcctggtctgcgacagtttctggcgcgtggccgatggcgtggtcgagccgttcgccggcgacctggacgaatatgcggcctggttgcgtagtcgcccggctgcgcagggcaccaagcagaagatggccgaagtggcgccgaccccgccaccgccgaccaagccgctgccgccgaaaaaggccgtcaacccgcacaagctggccagcgccgaaaagcgcgtcggcgagctggaagcggcgcttgctgcgctggatcgcgagctggccaatcccggcaactacgccgacagcgagaagatggccgtgctcggacgcgaccgcgaagcaaccgcgcagcagctggctgaagccgagacggcgtggatggaattgatcgacggtgcgtaa

SEQ ID NO: 82621 - protein, 639 aa, Xanthomonas axonopodis pv. citri str. 306
MISLRNFSMRRGERLLLSNVDLTMHAGYRVGVVGRNGTGKSSLFAAVKGELEADKGDVDLPGKVRTASVSQETPSLPDPALSFVLGGDIEVSAVLQEEAAATAREDWEAVANAHQKMAEIGAYDAEARAGKLLHGLGFPADTHHRAVSSFSGGWRVRLNLARALMMPSDLLLLDEPTNHLDMDAVLWLEQWLLKYPGTLLLISHDREFLDNVATHTLHLHGGTAKLYVGGYTDFERQRIEHLRQQQIAHDKEQAERAHLQSFIDRFKAQASKATQAQSRMKRLAKMAGTEAVRAEREFRIQFAQPNRLPFSLIRLNHVEAGYPAPATLPPRAGEGARRADGGDAATVILHDVGFGLEAGDRIGLLGPNGAGKSTLVKTLVGELAPLAGERSAHPDLRIGYFAQHTVESLHEGQSPMDHFRELSPDGANQAFRDFLGKWNFAGDRAFEVVDGFSGGERARLALALIAWQQPNVLLLDEPTNHLDLEMREALAEALSDFEGAIVMVSHDRHLIGLVCDSFWRVADGVVEPFAGDLDEYAAWLRSRPAAQGTKQKMAEVAPTPPPPTKPLPPKKAVNPHKLASAEKRVGELEAALAALDRELANPGNYADSEKMAVLGRDREATAQQLAEAETAWMELIDGA

SEQ ID NO: 82622 - DNA, 2127 bp, Drosophila melanogaster
  CDS (1)..(2127)
atgagcgagtacacaagcattctgcagcgcgagtttcccaaaatcgaccacgagctgctcacctatgtcgttggcgtgctcaccggaagcgaggaggacttcgaaagcggcgatgacatcttcgaagcggtgggcgacatcctgcagagcgtcgactgtgataggtcggaggagagtgtacgtacgctttgcgagcagttcctcaacatcatgaagaacaacgaggtcaacgtggagcgaaaggttctcaacgcgccggtcaacatcgaggagatggccaagaacatggagcggctggacaaggatatgcaaagcatctgggtggccaacaaagatggcgccaataaagtggactccaagaaactaggaaaggcggaggccaagctgcagcagaagcaggagaaacggcaggaggtgaacaaacatggtatgattcctgttgcggtgaagctacaaacggccacagcctcacaggtgaccaacaagaagaacaccaagctggatcagaaaggtcttaaccgatccatggacatcaagatcgaaaactttgacctggcttttggcgaaaaagttcttctgcagaatgcgaatctgctgctgtcttacggacgccgctatggtctggtgggacgcaatggcctgggcaagactacactgctccgcatgattgccgagcgacagctacagatcccttcgcacatatcggtgctgcacgtggagcaggaggtggttggcgatgacacaccagcagtggagagtgtgctggaatgtgatactgagcgaacgagacttctgacccgcgagaaggagattctggctgcccttaacaatggagttcaggatgcgacgctgtccaatgagctgagcgagacctacgcctctctgcagaacatcgaggcggacaaggctgtggcccgcgcatctgtgatacttaagggcttgggattcgatgcagatatgcagctgcgtccaactaaatccttctcaggcggctggcgcatgcgtcttgctttggccagggcactgttctcaaaacccgatctgttactgctcgatgagccgacgaacatgttagacatcaaagccattatttggctggaaaactatctgcagacatgggccaccaccattctggtagtttctcacgatcgcaacttcctggacacggtgccgacagacattattcacctacattcccaggaactggaggcatacaagggaaactatgaacagttcgagaagaccaagacggagaagctgaagtcccaaagacgtgaatacgaggcccaaatggctcacagagctcatgtccaggacttcatcgatcgcttccgatacaacgcaaaccgtgcctcgtctgtgcaatccaaaattaaaatgctcgaaaagctgccggaactaaagccagtggaaaaggagactgtggtcacgctcaaattccccgaagtggaaccccttaatcctcccgtgctggccatttcggaggttactttccgttacaatccagaagatccactgcccatcttcaagggcgtcaatctctcagccacatcggactctcgaatttgcattgtcggagaaaacggagcgggaaagtcgacgctgctgaagattattgtcggtcaactgagcactattcacggaaacattgtcctgcatcgcggtcttcgaattggatattttgcgcagcaccatgtggaccatctgaatatgaatgtaacgtgtgtgggagttttggcagaactgtttcctggtcgcccggacgaagagtatcgccggcagttgggcagcttcggcatatccggaccactggcactgcagagcattgccagtttatctggaggacaaaaatcacgagtggccttagcaaagatgtgcatggcggagccaaatttcctggtgctcgatgagccgactaatcacttggacattgaaaccattgatgctttgggccgagccataaatgcctttaagggcggcgtaatcctggtttcccacgacgaacgcctcattaaggtcgtctgcaaggaactctgggtgtgtggcaatcgcacagtcagagcgatcgaaggtggtctggacgagtataagcgcgaggtttacaaggaaatcgaagctaatagttga

SEQ ID NO: 82623 - protein, 708 aa, Drosophila melanogaster
MSEYTSILQREFPKIDHELLTYVVGVLTGSEEDFESGDDIFEAVGDILQSVDCDRSEESVRTLCEQFLNIMKNNEVNVERKVLNAPVNIEEMAKNMERLDKDMQSIWVANKDGANKVDSKKLGKAEAKLQQKQEKRQEVNKHGMIPVAVKLQTATASQVTNKKNTKLDQKGLNRSMDIKIENFDLAFGEKVLLQNANLLLSYGRRYGLVGRNGLGKTTLLRMIAERQLQIPSHISVLHVEQEVVGDDTPAVESVLECDTERTRLLTREKEILAALNNGVQDATLSNELSETYASLQNIEADKAVARASVILKGLGFDADMQLRPTKSFSGGWRMRLALARALFSKPDLLLLDEPTNMLDIKAIIWLENYLQTWATTILVVSHDRNFLDTVPTDIIHLHSQELEAYKGNYEQFEKTKTEKLKSQRREYEAQMAHRAHVQDFIDRFRYNANRASSVQSKIKMLEKLPELKPVEKETVVTLKFPEVEPLNPPVLAISEVTFRYNPEDPLPIFKGVNLSATSDSRICIVGENGAGKSTLLKIIVGQLSTIHGNIVLHRGLRIGYFAQHHVDHLNMNVTCVGVLAELFPGRPDEEYRRQLGSFGISGPLALQSIASLSGGQKSRVALAKMCMAEPNFLVLDEPTNHLDIETIDALGRAINAFKGGVILVSHDERLIKVVCKELWVCGNRTVRAIEGGLDEYKREVYKEIEANS

SEQ ID NO: 82624 - DNA, 1956 bp, Chlorobium tepidum TLS
  CDS (1)..(1956): transl_table=11
atgctcgaagtacgaaatctctctctttcagcaggcaccaaagtgctcctgcgcaacacctcattccggatcggcgacaaggatcgcgcctcgctggtcggcctgaacggcactggcaaatccacgctgctgcgcctcctcagcggccagctcaaggaggacgggcccatcagcgaagggcagatcatgaagtcctcgaccaccaccatcggctatctgccgcaggagatttcgttcgaaggcgacctcgacaaaaccgcgctccagtacgctctcgaagcgaacaaaacgctgcatgaactttctgaaaagatttcgcgcatggagcacgagctcgcgctgcccgatcaggatcacgcgagcgacgagtaccacaagctgatcgaacgcttcagcgacgcctcgcaagacttcgagcggcttggcggctaccggatgcagtccgacgcagagaaaattctctccggactcggcttcggcagcgcggatttctacaaaaaggtgaaagagttttccggcggctggcaaatgcgcctgctcatcgcccgcttgctcttgcaaaacccgacgctgctgctgctcgacgaaccgacaaaccacctcgacatcgactcgctccgctggctcgaacagtacctgctcaactacgagcacagctacctgatcgtctcgcacgaccgctttttcctcgacaagctcaccaccaaaacgctcgaaatcgccttcaacgaaatcaccgagtacaagggcaactacagcttttatgagaaagaaaaggccgagcgatacacactcatgatgtcgcgctacgaaaacgatctgaaaaagatggccgacctgaagtcgttcgtggaccgcttccgctacaaggccaccaaggcgcggcaggcgcaaagccggttgcgccagatgcagaaactcgaaaaggagttgcaggcgccggaggaggatctgtcgcagatttctttctcgttcccgaaggccagaccgtcgggccgcgaagtgctccggctggagggagtctcaaagtcgttcacgctaccggacggcacgacgaaaaccgtgctcaagaacatcgatctcgaaatcatgcgcggcgaccgcatcgccatcgtcggctcaaacggtgcgggcaagacgacgttttgcaggattctggccgacgagatcgacttcgagggcaaacgccagaccggccaccacgtcagcatgagctacttcgcccagcaccagaccgacaatctcgcgccggaaaagagcatccttcaggagatgatggacgcagccccgacctctgaagcacagcgccgcgtgcgagacatcctcggctgcttcctcttcagcggcgacgcggtggagaagaaaatcgccgtgctctccggaggcgaaaaatcgagggtggcactcgccaagattctgctccaggcctcgaacctgctcatcatggacgagccgaccaaccacctcgacatgcgctccaaagaaatgctgatcgactcgctcgaaaactacgacggcacgctgctcatcgtctcgcacgaccgctacttcctcgacagcctcgtcaacaaggtgttcgagatcaagaacggtggagtgcaggtctatctcggcacttatgccgaatacctcgaaaaagccgaaaaatcgtgggaagaggagaaaaaacagcaggccgaagcccaggccaaagaggaagccgcacgcaaagccgccacggcgaaatctgtcgaaaaaaaaccggccgcgcccaaagcgaacagcaaaaagatcgcggcaatcgaaaaggagattcagcggttggaggagtcaaaaaaacagcacgaggatatgatggcccaacccttattttacgaacaatccgcagaagagacgcacaaagccatcgcagagtacgaagagctatgcaaagagctggatgcgctctaccagtgctgggaggacgaagcggggtga

SEQ ID NO: 82625 - protein, 651 aa, Chlorobium tepidum TLS
MLEVRNLSLSAGTKVLLRNTSFRIGDKDRASLVGLNGTGKSTLLRLLSGQLKEDGPISEGQIMKSSTTTIGYLPQEISFEGDLDKTALQYALEANKTLHELSEKISRMEHELALPDQDHASDEYHKLIERFSDASQDFERLGGYRMQSDAEKILSGLGFGSADFYKKVKEFSGGWQMRLLIARLLLQNPTLLLLDEPTNHLDIDSLRWLEQYLLNYEHSYLIVSHDRFFLDKLTTKTLEIAFNEITEYKGNYSFYEKEKAERYTLMMSRYENDLKKMADLKSFVDRFRYKATKARQAQSRLRQMQKLEKELQAPEEDLSQISFSFPKARPSGREVLRLEGVSKSFTLPDGTTKTVLKNIDLEIMRGDRIAIVGSNGAGKTTFCRILADEIDFEGKRQTGHHVSMSYFAQHQTDNLAPEKSILQEMMDAAPTSEAQRRVRDILGCFLFSGDAVEKKIAVLSGGEKSRVALAKILLQASNLLIMDEPTNHLDMRSKEMLIDSLENYDGTLLIVSHDRYFLDSLVNKVFEIKNGGVQVYLGTYAEYLEKAEKSWEEEKKQQAEAQAKEEAARKAATAKSVEKKPAAPKANSKKIAAIEKEIQRLEESKKQHEDMMAQPLFYEQSAEETHKAIAEYEELCKELDALYQCWEDEAG

SEQ ID NO: 82626 - DNA, 1884 bp, Brucella suis 1330
  CDS (1)..(1884): transl_table=11
atgcttatccttgacgatatttccgtacgaattgccggacgcctattgatcgaccacgccagcgtgacgctgcctgcgggatcgaagacaggctttgtcggccgcaacggcaccggcaaatcaaccctgtttcgcgtgattacgggcgatctggcgccggaaaccggcagcatatcgtttccgaagaacacccgcatcggccaggtggcgcaggaagcgccgggcactgaggaaccgctgatcgaaatcgtcatgaaggcggacaaggagcgcgccgcccttctggaagaagcagccaccgccacagacccgcaccggattgcggaaatccacacgcggcttgccgatatcgacgcgcattcggcagaagcgcgcgcgggagccatcctgtccggccttggcttcgatgcacaagcgcagcgccagcctgcttccgccttttccggcgggtggcggatgcgcgtggcgcttgccgccgttctgtttgccgaacccgatcttcttcttctcgatgagccgaccaactatctcgaccttgaaggcgtcttgtggctggtggattatgtgaagcgttatccgcacacggtcatcatcatcagccatgatcgcgatctgttgaactcggccacatcatcgatcatgcatctcgaccagaagaagatcagcttctggcgcggcaattacgatcaatttgagcggcagcggcatgaaatgctggaacttcagcaaaaggcccatgccaggcaggaagcccaccgcaagcacatggaaagcttcgtggagcgtttccgcgccaaggcgaccaaggcgcgccaggcgcaatcacgcctgaaagcattgcaaaagctgaagcccatcgagctttatgtggaaagccatgtgcagcctttccgctttcccgatgcggaaaagaaggccgcctcgcccattatcgcgcttgacggcgcggatgtgggctatgtgccgggaaagccggtgctgcgcaatgtgacgctgcgcatcgacaatgacgaccgcatcgcactgcttggctcaaacggcaacggtaaatccacgctcgccaagctgattgccgggcgattggccccggaaaaaggcacccttaccatttcgcccaatctgaaggttgcatttttcgcgcagcaccagcttgacgatctggtgccggaagacaatgcgatcgagcatgtgcgcaagctgatgccggccgagccggaagccagagtgcgtgcccgtgtcgcgcagatgggcctttcgacggaaaaaatgctgacacccgccaaggatttgtcgggcggcgaaaaggcgcgccttctcatgggccttgcgacattccacggcccgaacctgctcatcctcgacgagccgacaaaccatctcgatatcgacagccgcgaggagctggtgcacgcgctcaacgccttcaacggcgcggtgatcctgattgcccacgaccgccaccttatcgaagccacgatggagcggctctggcttgtgcgcgaaggcggcgtgaaaccatttgaaggcgatcttgatgaatatcgccagatcgtgctggcagacgcgaagggcgagcctgctgcggaccgcgacgaagggccgaaggtgaacaaggccgagcagcgcaagcttgcagcacaaaagcgcgaagcccttgcgccgttgcagaaaaagatcaaggaaaccgaaagcttgatccagaaattgcagaaacagattcaagacttcagcatgcagttggaagacccggctctttatgagaaggaaccgcagaaagccattcgcatcaacaaggatatgagcgacgccaaatcaacccttgccgaagccgaggataagtggctggagctttcagccgaatatgaggaagccatggcggagtga

SEQ ID NO: 82627 - protein, 627 aa, Brucella suis 1330
MLILDDISVRIAGRLLIDHASVTLPAGSKTGFVGRNGTGKSTLFRVITGDLAPETGSISFPKNTRIGQVAQEAPGTEEPLIEIVMKADKERAALLEEAATATDPHRIAEIHTRLADIDAHSAEARAGAILSGLGFDAQAQRQPASAFSGGWRMRVALAAVLFAEPDLLLLDEPTNYLDLEGVLWLVDYVKRYPHTVIIISHDRDLLNSATSSIMHLDQKKISFWRGNYDQFERQRHEMLELQQKAHARQEAHRKHMESFVERFRAKATKARQAQSRLKALQKLKPIELYVESHVQPFRFPDAEKKAASPIIALDGADVGYVPGKPVLRNVTLRIDNDDRIALLGSNGNGKSTLAKLIAGRLAPEKGTLTISPNLKVAFFAQHQLDDLVPEDNAIEHVRKLMPAEPEARVRARVAQMGLSTEKMLTPAKDLSGGEKARLLMGLATFHGPNLLILDEPTNHLDIDSREELVHALNAFNGAVILIAHDRHLIEATMERLWLVREGGVKPFEGDLDEYRQIVLADAKGEPAADRDEGPKVNKAEQRKLAAQKREALAPLQKKIKETESLIQKLQKQIQDFSMQLEDPALYEKEPQKAIRINKDMSDAKSTLAEAEDKWLELSAEYEEAMAE

SEQ ID NO: 82628 - DNA, 1941 bp, Leptospira interrogans serovar Lai str. 56601
  CDS (1)..(1941): transl_table=11
ttgcttcaatttatcgacataaaacatcagtacggttctaacgtattgtttaacggtttttcttggcacatcaaaccggggtctcgcgtttgtcttgtgggtccaaacggttctggtaaatcgactttgtttaggatcgcagagggaaaatttattccggacgaaggaagtgtagcaaaatctaaaaacactgaaatttcagtattccaacagattccagaatttaatcctgaagcattggtcattgatactgcattagaaaaacataaacattatcgggaatattcagaacgtttgaaagaaatcaatcgtaagttcgatcttgtttctcacgattcgaaggaatttactacgattctggatgaacaaagcgctttagaagaatatgcttttacatatggagtacacgaacttgaatctaaagctcgcaaagttttaggtggattagggttttctaatgttcagatggaaatgaaagttcgggaattttctccaggttatcaacatcgtcttggtttagcaattactcttttgaatccgggcaacttattgttgttagatgaacctacaaatcatttggataatacttctaaagaatggttggcggactatcttaattctacaggtcaatcttttgtactcgtaactcacgatccggaatttttggatgcgacttgtgatacgattgcggaactttcctcttccgaagttatagaatttcggggaaccttagaggaatatttcgaacataaaaatgaacttcaagaaaaacttagagctcagtaccgaaaagaagaaacttatctcaaaaagagaatggaatggatcgaacgttttcgcgcaaaggctacaaaagcgaaacaagtccaatccgcgatcaaaaaactcgaaaaaagaaataaggtagaagcgcctgaggaatccttttggaattccaagtcggattatcgttttaattttatatcttccggaaaaattactgtaagaattgaagatggagctttctcatattcggataaaactccatctatttttagcggcgctaatctggaaatttcagcgggtgataaaattgcggtagtgggtcctaatggtgcaggaaagtccacgtttcttcgttgtttattagagattcataaattaacttccggtaaaatttattacggacctaaaacgaaaatcggttatttctcacaaaatcatcacgaggaattagatccttctaaaaatcttattcaaacggttatgtccgcatacccggatctttcggaacaacaggccagaagtcttttaggttatttttctttttctgacgattctgtttataaacaaaccagtcttctttcgggtggagaacaaagtcgtcttcgtcttgcaatgcttgttcgttttcctgctaattctatttttttggatgaacctaccaaccatcttgatttagtagtacgggacaatttactgagagcattgatggaatatgaaggttctcttttaattatttctcacgatcctgaattcttaagaagtctttgtaatcgtactatttctgtggacaagggacaaattcgggattttaactgcacgtttgaggattatttaaaatataatttgcaagagaccacatcatctaaacaacaagtcggaaacttggtttttaaaaaagaggaaacaggacaaacgcgctctaagagaaattcagataaaaacagaatcaaaaaaattcagaaagatttagaacaactggaaactaagatcgaacttttagaaaaatcaaaaaagaatttggaagaagtgttagccgatcccgacttttttaaaaatcgtagttatcaattagaattggacaatttaaacgaaaccaaaaacgaaattacacgtttgactttggaatgggagtcacttcaattagagttggaagaactttctggaactgtaaattag

SEQ ID NO: 82629 - protein, 646 aa, Leptospira interrogans serovar Lai str. 56601
MLQFIDIKHQYGSNVLFNGFSWHIKPGSRVCLVGPNGSGKSTLFRIAEGKFIPDEGSVAKSKNTEISVFQQIPEFNPEALVIDTALEKHKHYREYSERLKEINRKFDLVSHDSKEFTTILDEQSALEEYAFTYGVHELESKARKVLGGLGFSNVQMEMKVREFSPGYQHRLGLAITLLNPGNLLLLDEPTNHLDNTSKEWLADYLNSTGQSFVLVTHDPEFLDATCDTIAELSSSEVIEFRGTLEEYFEHKNELQEKLRAQYRKEETYLKKRMEWIERFRAKATKAKQVQSAIKKLEKRNKVEAPEESFWNSKSDYRFNFISSGKITVRIEDGAFSYSDKTPSIFSGANLEISAGDKIAVVGPNGAGKSTFLRCLLEIHKLTSGKIYYGPKTKIGYFSQNHHEELDPSKNLIQTVMSAYPDLSEQQARSLLGYFSFSDDSVYKQTSLLSGGEQSRLRLAMLVRFPANSIFLDEPTNHLDLVVRDNLLRALMEYEGSLLIISHDPEFLRSLCNRTISVDKGQIRDFNCTFEDYLKYNLQETTSSKQQVGNLVFKKEETGQTRSKRNSDKNRIKKIQKDLEQLETKIELLEKSKKNLEEVLADPDFFKNRSYQLELDNLNETKNEITRLTLEWESLQLELEELSGTVN

SEQ ID NO: 82630 - DNA, 1914 bp, Shewanella oneidensis MR-1
  CDS (1)..(1914): transl_table=11
atgatcagcatcaaccaagcacaattaatccgtggtagcaaaaccctgctcgacgaagcctctctgaccatctatcccggccataaggtcggcctagtgggcgccaacggcacgggtaaatcctcactgctggcattaattatgggtcacctgagcttagataaaggcgagtttagtatgccttcaggttggcagattgccagcgtcgcccaggaaacccctgcgctcgatatgtctgcacttgaatatgtacttgatggcgataaagaatatcgccagcttgaggctgatctgcacattgcacaggaacataatgatggccatgccattgccaccttgcacggtaaaatcgatgccattggcggttatgctattcgcgcccgcgccggagccctgcttgcaggtttaggctttagcgaagccgagcaaaataaccccgtgaaaagcttttcgggcggttggcggatgcgcctcaacttagcccaagcactgctgtgccgctcggacttactgctgcttgacgaaccaaccaaccacttagacttagataccatgtactggctcgaaggttggattaagtcctatcaaggcacactgattttaatcagccacgatagggattttatcgatgaaatcgttgatgaaatcgtccatgtcgaaaatcaaaaactcaacttctacaaaggcaactacagtgcctttgagcgcatccgcgctgaacgtatggcgcaacaacaggtcgcctttgaacgccaacaaaaagaacgggcgcatatgcagtcttttgttgaccgcttccgctacaaggccagtaaagccaagcaagcacagagccgcttaaaggcgctggagcggatgactgagctattgccatcccaagccgatagcccgttttatatggagtttcgcccaccagaagccctgcccaatccgctgattaagatggagcaagtggccgttggctatggcgataagcaaatcctcagcaaagtgcatttaaacttagtgcccggtgcgcgcattgggttgctcggccgtaacggtgcgggtaaatcaaccctaatcaagctgttatcgggccagttatcaccgatgaccggattgtatgagcccaatcccggcctgaatatcggttactttgcccagcaccaaatcgaatttttacgcttagacgatacgccgctgcaacatttagtgcgccttgcgcccaatgcccgcgagcaggaattgcgtaacttcctcggcggttttggctttaatggcgatatggcactctcgccagtgcgccccttctcgggtggcgaaaaagcccgtttagtgttggcattattggtatggcaacggcccaatctgttgctacttgacgaaccaaccaaccatttagatttagagatgcgccatgctttaaccatggcattgcaaacctttgaaggtgccatggtgattgtatcgcacgaccgccatttattgcgcttaacctgtagcgactactatttggttgatcaaggtgaagtacaagccttcgatggtgatcttgacgattaccaccaatggttactcgatgccgctaaggctgccagtgccaaccaagcggccaacagcgatgacacaaaacccgctgtcgataagaagcagcaaaagcgcttagaggctgagctacgccaaaaagtgtccccccttaaacgtaagcaagccaaattagaaattgatcaacaaaaactcagtgagcgtctcgccgagttagaacatttactggccgatggtgagttatatgatcaagacaataaagctaaactcacctcagtgctcagtgaacgcaccagcttgacacagacgctagaagaaagtgaaatgcaatggcttgagttgcaagaagaaattgataccatggaacttgagttaatgggccaataa

SEQ ID NO: 82631 - protein, 637 aa, Shewanella oneidensis MR-1
MISINQAQLIRGSKTLLDEASLTIYPGHKVGLVGANGTGKSSLLALIMGHLSLDKGEFSMPSGWQIASVAQETPALDMSALEYVLDGDKEYRQLEADLHIAQEHNDGHAIATLHGKIDAIGGYAIRARAGALLAGLGFSEAEQNNPVKSFSGGWRMRLNLAQALLCRSDLLLLDEPTNHLDLDTMYWLEGWIKSYQGTLILISHDRDFIDEIVDEIVHVENQKLNFYKGNYSAFERIRAERMAQQQVAFERQQKERAHMQSFVDRFRYKASKAKQAQSRLKALERMTELLPSQADSPFYMEFRPPEALPNPLIKMEQVAVGYGDKQILSKVHLNLVPGARIGLLGRNGAGKSTLIKLLSGQLSPMTGLYEPNPGLNIGYFAQHQIEFLRLDDTPLQHLVRLAPNAREQELRNFLGGFGFNGDMALSPVRPFSGGEKARLVLALLVWQRPNLLLLDEPTNHLDLEMRHALTMALQTFEGAMVIVSHDRHLLRLTCSDYYLVDQGEVQAFDGDLDDYHQWLLDAAKAASANQAANSDDTKPAVDKKQQKRLEAELRQKVSPLKRKQAKLEIDQQKLSERLAELEHLLADGELYDQDNKAKLTSVLSERTSLTQTLEESEMQWLELQEEIDTMELELMGQ

SEQ ID NO: 82632 - DNA, 1911 bp, Pseudomonas putida KT2440
  CDS (1)..(1911): transl_table=11
atgatcagactatccaacctcactttacagcgtggtccgcagcgcttgctagaaggcgccgagatgaccctgcacgccggtcacaaggccggcctgatcggcgccaacggcgccggaaaatccagcctgttcgccttgctgcgcggtgagctgtcgcccgatgccggtgactgccaactgcccggcgactggcgcatcgcccacatgcgccaagaggtcgacaccctcgaccgcctggctgtggactatgtgcttgacggcgacgtgcgcctgcgcaaggtccaggccgaactggccgcggccgagcaggcccacgacggcaccgccctggcgcgcctgcacagtgagctggaaagcgccgacggctataccgccgacgcccgtgcgcgcaagttgctggctgggctgggcttcaccaacgaacagatggaccgccgtgtcggcgatttctctggtggctggcggatgcgcctgaacctggcccaggcactgatgtgcccgtccgacctgttgctgctcgacgagcccaccaaccacctcgacctcgacgcgatcctgtggctggaagactggctcaagggctaccccggcacgttgttgctgatctcccacgaccgtgacttcctcgatgccgtggtcgaccatgtgctgcacgtcgagcagcgcaagctcaacttgtacaaaggcggctacaccgcctttgagcgcacccgtgccgagcgcctggcgcagcagcagcaggcctacgagaagcagcaggcgcagcgcgcgcacatggagaagtacattgcccgcttcaaggcgcaagccaccaaggcccgccaggcgcaaagccggatcaaggccctggagcgcatggaagagctgtcggcagcgcatgtcgattcaccgttcgactttgtcttccgtgaatcgcagaaaatttccagcccgttgctgagcctttccgaaggtcgcctcggttatggcgacaaggccatcctcgacaaggtcaagctgcagctgaccccgggtgctcgtattggtctgctcgggcccaacggcgccggcaagtcgaccctgatcaagaaccttgcaggtgagctggagccgttgtcgggccgcctggttcgtggcgagaacctggcggtaggctactttgcccagcaccagctggactcgctggacgacaaggccagccccctgctgcacttgcagcgcatcgcccctaccgagcgtgagcagacgctgcgcgacttccttggcggcttcgacttccatggtgcccgctgcgacgagccggtggttaacttctccggtggcgaaaaggcccgcctggcactcgcgctgattgcctgggagcggccaaacctgctgctgctcgacgaaccgaccaaccacctcgatctggaaatgcgtctggcgctgaccatggccttgcaggagtttgccggtgcagtggtggtggtgtcccacgaccgtcatttgctcaagagcaccactgatgacttcctgctggtggccgacggcaaggtcgacaccttcgacggtgacctggaggactacagccgctggctggtcgagtaccgccagcgcagtgcgccggccagtactgcaccggccaacccggacaagaccgacaagaaagcccagcgccaggctgccgcagccttgcgtcagcagttggcaccgcacaagaaggctgccgacaagctggaaaccgagctcaaccaggtgcacgcgcaattggccgagatcgagaccgcgctgggtgatggtggcctttacgatgcggcgcgcaaggacgagttgcgcgacctgctggcgcggcagaccaagctcaagcaacgcgaaggcgagctggaagaggcctggatggaagcgctggaaacccttgaaagcatgcaggccgaactcgaggcgttgtcctga

SEQ ID NO: 82633 - protein, 636 aa, Pseudomonas putida KT2440
MIRLSNLTLQRGPQRLLEGAEMTLHAGHKAGLIGANGAGKSSLFALLRGELSPDAGDCQLPGDWRIAHMRQEVDTLDRLAVDYVLDGDVRLRKVQAELAAAEQAHDGTALARLHSELESADGYTADARARKLLAGLGFTNEQMDRRVGDFSGGWRMRLNLAQALMCPSDLLLLDEPTNHLDLDAILWLEDWLKGYPGTLLLISHDRDFLDAVVDHVLHVEQRKLNLYKGGYTAFERTRAERLAQQQQAYEKQQAQRAHMEKYIARFKAQATKARQAQSRIKALERMEELSAAHVDSPFDFVFRESQKISSPLLSLSEGRLGYGDKAILDKVKLQLTPGARIGLLGPNGAGKSTLIKNLAGELEPLSGRLVRGENLAVGYFAQHQLDSLDDKASPLLHLQRIAPTEREQTLRDFLGGFDFHGARCDEPVVNFSGGEKARLALALIAWERPNLLLLDEPTNHLDLEMRLALTMALQEFAGAVVVVSHDRHLLKSTTDDFLLVADGKVDTFDGDLEDYSRWLVEYRQRSAPASTAPANPDKTDKKAQRQAAAALRQQLAPHKKAADKLETELNQVHAQLAEIETALGDGGLYDAARKDELRDLLARQTKLKQREGELEEAWMEALETLESMQAELEALS

SEQ ID NO: 82634 - DNA, 1863 bp, Bradyrhizobium japonicum USDA 110
  CDS (1)..(1863): transl_table=11
atgctatccatcaccgacctttccatccgcctcgccggacgccttttgattgaccagagttccgtgcagatcacgcccggatcgcgcgtcggcatggtcggacgcaacggcaccggcaagtcgacgctgttcaaggtgatccgcggcgagctcgcggccgagcacggcgcggtgaccctgcccccacgctggcgcgtgggcagcctcgcgcaggaggcaccgaacggccccgagagcctgatctccgtcgtgctcaaggccgatctggaacgcgacgcgctgcttcacgaagccgagagcgccaccgatccgcaccggatcgccgagatccagacccggctggtcgacatcgacgcgcattcggcgccgagccgcgccgccgcgatcctgtccggcctcggcttctccgccgccgatcagctccgtccctgcgccgagttttccggcggctggcgcatgcgcgtcgcgctcgccgcgacgctgttcgcggcccccgacctgttgctgctcgacgagcccaccaactatctcgatctcgaaggcacgctgtggctggaagaccacttggcgcactatccgcgcacggtgatcgtgatcagccacgaccgcgacctcctcgaaagctcggtcgaccagatcctgcatctggagcgcggcaagctcacgctctacaagggcacctactcctccttcgaggagcagcgcgccgcgcgcgagctgctcgatgcgaaggcggtcaagcgccaggaggccgaacgcgcccgcctgcaagccttcgtcgaccgcttcaaggccaaggcctcgaaagcgcgccaggcccaatcacgcgtcaagatgctggagcggctgaagccgatcaccgcgctggtcaccgaagacgtgcgcgagatcagcttccccgcgccggaaaaaatcctgtcgccgccgatcatcgccgtcgacaacgcctcggtcggctacgatccggcgacgccggtgctcggccgcgtcaccttgcgcatcgacaatgacgaccgcatcgcccttctcggcgccaacggcaacggcaagtcgacgctggtgaagctgctcgccggccgcctcgcgccgttctcgggcaaggtcacgcgcgccgacaagctctcgatcgcctatttcgcgcagcatcagctcgacgagctgaacgaggacgcctccgcctacgatcacgtccgcaagctgatgggcgatgcgccggaagcgaaagtgcgggcacgcgccggcgcgatcggcttctccggcaaggcggccgacaccaaggtggcaaaactgtcgggcggcgagaaggcgcggctgttgctcggcattgcgaccttcttcggccccaacatgatcatcctggacgagccgaccaaccatctcgacatcgacagccgcgctgcgcttgcggaagccatcaacgaattccccggcgcggtgatcatggtctcgcatgaccgctatctgatcgaggcctgcgccgaccggctctggatcgtcgccgaccgcaccgtcaccaattacgacggcgaccttgacgaataccgccgcctggtcctgtcggcgcgcaacagcgaacctgccccgcgcgagcgcagtacggcagccgagaagccgcagcgcccgaagtcggacaatcgcggctcgctcaggaagcgcattaccgaagccgaagccgagatcgcccgcgtcagcgacatcatcaccaagatcgacacggcgctcgccctgcccgacatctttacccgcgatcccaagcaggccgcgcagctgtcgaaggcgcgcgcaaacgcagcggatgcgctggcgcgcgcggaagagcagtggctcgaggcgagcacacaattcgacgaggccgcgggctag

SEQ ID NO: 82635 - protein, 620 aa, Bradyrhizobium japonicum USDA 110
MLSITDLSIRLAGRLLIDQSSVQITPGSRVGMVGRNGTGKSTLFKVIRGELAAEHGAVTLPPRWRVGSLAQEAPNGPESLISVVLKADLERDALLHEAESATDPHRIAEIQTRLVDIDAHSAPSRAAAILSGLGFSAADQLRPCAEFSGGWRMRVALAATLFAAPDLLLLDEPTNYLDLEGTLWLEDHLAHYPRTVIVISHDRDLLESSVDQILHLERGKLTLYKGTYSSFEEQRAARELLDAKAVKRQEAERARLQAFVDRFKAKASKARQAQSRVKMLERLKPITALVTEDVREISFPAPEKILSPPIIAVDNASVGYDPATPVLGRVTLRIDNDDRIALLGANGNGKSTLVKLLAGRLAPFSGKVTRADKLSIAYFAQHQLDELNEDASAYDHVRKLMGDAPEAKVRARAGAIGFSGKAADTKVAKLSGGEKARLLLGIATFFGPNMIILDEPTNHLDIDSRAALAEAINEFPGAVIMVSHDRYLIEACADRLWIVADRTVTNYDGDLDEYRRLVLSARNSEPAPRERSTAAEKPQRPKSDNRGSLRKRITEAEAEIARVSDIITKIDTALALPDIFTRDPKQAAQLSKARANAADALARAEEQWLEASTQFDEAAG

SEQ ID NO: 82636 - DNA, 1956 bp, Pseudomonas syringae pv. tomato str. DC3000
  CDS (1)..(1956): transl_table=11
gtgatccacctgttcaggacgaagctggtagactccgccgccattatgattcgacttcagagccttaccttacagcgtggtccgcaacgtctgctagaagacgccgagctgaccctgcacgccggccataaagccggcctgatcggtgccaatggcgccgggaaatccagcctgtttgccttgctgcgcgcagagctgacgcccgacgccggcgactgcctgctacccgccgactggcgcatcgcgcacatgcgtcaggaggtcgataccctcgaacgcctggcagtggactacgtgctggacggcgatgagcgcctgcgcgaagtacaaagctcgctggccgaggccgaagcggcgcaggacggcgctgctcaggcgcgcctgcattcggagctcgacagtgccgacggctacaccgccgacgcgcgtgcgcgcaagctgctggcgggcctgggcttcaccaacgagcagatggaacgtcaggttggcagcttctccggcggctggcggatgcgcctgaacctggcgcaggcgttgatgtgtccttcagacctgctgttgctcgatgagcccaccaaccacttggacctcgacgccattctgtggcttgaggactggctcaagagttaccccggcaccttgctgctgatttcccacgaccgggactttctcgatgccgtggttgatcacatcgctcacgtcgagcagcgcaagatcaccttgtatcgcggtggctacagcgccttcgagcgggcccgcgccgaacgtctggcccagcagcaacaggcctacgagaagcagcaagtgcaacgtgcgcacatggagaagtacattgcgcgcttcaaggcacaagccaccaaggcccgccaggcacagagccgcataaaggcgctggagcgcatggaagagctgtccgctgcccacgttgactcgcccttcaacttcgtcttccgtgagtcggacaagatctccagcccgctgctggacctgtccgacgcgcgcctgggttatggcgacaagaccgtcctggagaaggtcaagctgcaactgacgccgggcgcacgtattggcctgctaggccccaacggcgccggcaagtcgacactgatcaaaaacctggctggcgagcttgagccgcagagcggccggctggtgcgtggtgaaaacctcacggttggctacttcgcccagcatcagctcgactcactggacgccaaggccaccccattgctgcacttgcagcgcctggcaccgaccgagcgtgagcagaccctgcgcgacttcctcggcggcttcgacttccgtggcgcgcgtctggacgagccggtgctgaatttctcgggtggtgaaaaagcccgcctggcgctggcactgattgcctgggaaaaacccaacctgctgctgctcgacgaaccgaccaaccacctggacctggaaatgcgtctggcgctgaccatggccctgcaggaatttggcggtgcggtgttggtggtgtctcacgatcggcacttgctcaagagcaccaccgacgacttcctgctggtggccgacggccgcgtgcaggagttcgacggcgatctggatgactacacgcgctggctggcggactaccgactgcgcaacgcgccggtcagcaacacgccggtcaatgccgacaagaccgacaaaaaagcccagcgccaacaggcagcggccttgcgtcagcaactggccccgcacaagcgcgaagccgacaagctggagcgcgacctcggcctggtgaatgaaaaactcgccaaggtcgaagaggcactggcggacagcaccaactatgaggctgccaacaaggacaagctgcgcgatctgctggccgagcaggcgaaactgaaagtgcgtgagtccgagctggaagacgcctggatgcaagcactggaattgctcgagtctatgcaggccgagctggaagcattgtcgtga

SEQ ID NO: 82637 - protein, 651 aa, Pseudomonas syringae pv. tomato str. DC3000
MIHLFRTKLVDSAAIMIRLQSLTLQRGPQRLLEDAELTLHAGHKAGLIGANGAGKSSLFALLRAELTPDAGDCLLPADWRIAHMRQEVDTLERLAVDYVLDGDERLREVQSSLAEAEAAQDGAAQARLHSELDSADGYTADARARKLLAGLGFTNEQMERQVGSFSGGWRMRLNLAQALMCPSDLLLLDEPTNHLDLDAILWLEDWLKSYPGTLLLISHDRDFLDAVVDHIAHVEQRKITLYRGGYSAFERARAERLAQQQQAYEKQQVQRAHMEKYIARFKAQATKARQAQSRIKALERMEELSAAHVDSPFNFVFRESDKISSPLLDLSDARLGYGDKTVLEKVKLQLTPGARIGLLGPNGAGKSTLIKNLAGELEPQSGRLVRGENLTVGYFAQHQLDSLDAKATPLLHLQRLAPTEREQTLRDFLGGFDFRGARLDEPVLNFSGGEKARLALALIAWEKPNLLLLDEPTNHLDLEMRLALTMALQEFGGAVLVVSHDRHLLKSTTDDFLLVADGRVQEFDGDLDDYTRWLADYRLRNAPVSNTPVNADKTDKKAQRQQAAALRQQLAPHKREADKLERDLGLVNEKLAKVEEALADSTNYEAANKDKLRDLLAEQAKLKVRESELEDAWMQALELLESMQAELEALS

SEQ ID NO: 82638 - DNA, 1920 bp, Vibrio parahaemolyticus RIMD 2210633
  CDS (1)..(1920): transl_table=11
atgattaccttctctgatattcagttactgcgtggcggtaaacctcttttagaccaagcatcggcaaccattcacccaggtgacaaagtgggtctggttggcaaaaacggctgtggtaaatcgaccttatttgctctactgaaagatgaactgtcgattgacgcgggctcgttcagccaacctcagcattgggaattggcgtgggtagcgcaggaaacacctgctttagaacgcagcgcactggaatacgtcattgatggtgatcgcgaataccgcggtcttgagcaacagctagcggttgccgaagaaaaagacaacggtacgctggtggcagaaattcacggcaagatcgaaaccattggcggttatagcatccgtgcccgtgcggcagaattgcttgacggccttggctttagccaagaacagatgagctggaacttaactcagttctctggtggttggcgtatgcgccttaacttagctcaagcactattgtgtcgttccgatctactactgctcgacgaaccaaccaaccacttggatttggacgcagtaatgtggctagaacgctggctgcagaactaccctggcacactgatcttgatctcgcacgaccgagatttcctagatccgatcgttggtcgtatcatccacatagaaaaccaacagctgaacgaatacacgggcaactactcgtcattcgaaaatcaacgtgcgcaaaaaatgatgctgcaacaagcgatgttcgagaagcaacaaaagcaaatgtcgcacatgcaaagctacatcgaccgcttccgctacaaagcgtcgaaagcgcgccaagcgcaaagccgaatcaaagcgctagaacgcatggaaaaagtcttgcccgcgcagttcgataacccattcagctttgaattccgtcaaccagctgcgctgccaaatccaatcatgatgatggacgacgtatcggcaggttacggcgacaacctaattttagaaaagattcgtctgaacttagtaccgggcagccgtattggtttgcttggccgcaacggcgcaggtaaatcgaccttaatcaaactactttcaggtgaacttaaagcgcaaggcggcgatctcacctattcgcaaggcgtaaagatcggctactttgctcagcaccagttggaaacgttgcacccagaagaaacaccactgcagcacatgatgcagatcgcaccggatcaaacagagcagcaactgcgcgattacctaggtagttttggtttccaaggcgacaaagcgctagaaaaagtcgcaccgttctctggtggtgaaaaggcacgcttggtgctggcattgatcgtgtggcaaaaaccaaacctattgctactcgacgaaccaaccaaccacctagacttagacatgcgccaagcgttaaccatggccctgcaaacgttcgaaggtgcgatggtgattgtttcacacgaccgttacttactgcgcgcaaccaccgatgacttgtacttagtgcatgatcgccaagttgcgccattcgatggtgacctaaacgactactacaagtggctgactgaacaacaaaaagccgagagaaaagaagcacaagcgttgcaaccagttaaagataccgcaaacagcgctgcagcgaagaaagagcaaaaacgtcgcgaagcggaatttcgtaaactgacggcgccaattcgcaaaaccctgacacaattagaaaataaaatggataagttaggtgtagcactggcagaggctgaagaacaattggcggataactcactgtatgaagccgaaaataaagctaaactaaatgaagtgctggcccttcaagcttcgagcaaatcagaacttgaagaagtggaaatggaatggatgtctgctcaggaagaactggagcagatggagctagagtttaaccaatga

SEQ ID NO: 82639 - protein, 639 aa, Vibrio parahaemolyticus RIMD 2210633
MITFSDIQLLRGGKPLLDQASATIHPGDKVGLVGKNGCGKSTLFALLKDELSIDAGSFSQPQHWELAWVAQETPALERSALEYVIDGDREYRGLEQQLAVAEEKDNGTLVAEIHGKIETIGGYSIRARAAELLDGLGFSQEQMSWNLTQFSGGWRMRLNLAQALLCRSDLLLLDEPTNHLDLDAVMWLERWLQNYPGTLILISHDRDFLDPIVGRIIHIENQQLNEYTGNYSSFENQRAQKMMLQQAMFEKQQKQMSHMQSYIDRFRYKASKARQAQSRIKALERMEKVLPAQFDNPFSFEFRQPAALPNPIMMMDDVSAGYGDNLILEKIRLNLVPGSRIGLLGRNGAGKSTLIKLLSGELKAQGGDLTYSQGVKIGYFAQHQLETLHPEETPLQHMMQIAPDQTEQQLRDYLGSFGFQGDKALEKVAPFSGGEKARLVLALIVWQKPNLLLLDEPTNHLDLDMRQALTMALQTFEGAMVIVSHDRYLLRATTDDLYLVHDRQVAPFDGDLNDYYKWLTEQQKAERKEAQALQPVKDTANSAAAKKEQKRREAEFRKLTAPIRKTLTQLENKMDKLGVALAEAEEQLADNSLYEAENKAKLNEVLALQASSKSELEEVEMEWMSAQEELEQMELEFNQ

SEQ ID NO: 82640 - DNA, 1908 bp, Salmonella enterica subsp. enterica serovar Typhi Ty2
  CDS (1)..(1908): transl_table=11
atgattgttttctcctcgttacaaattcgtcgcggcgtgcgcgtcctactggacaatgcctcggctaccattaatccaggccagaaagtcggcctggtgggtaaaaacggctgcggtaaatctaccctgctggcattgctaaaaaatgaaatcagcgccgatgccgggagttttaccctgcccggaacctggcaattagcgtgggtgaatcaggaaacacctgcgttgcctcagccagcgattgagtatgtcattgacggcgaccgtgaataccggcatctggaggcgcagcttaacgacgccaacgaacgtaacgacgggcatgctatcgcctccatacacggtaagctggacgccatcgacgcatggaccgttcgctcgcgcgccgccagcctgttacacggcctcggcttctctaacgatcagctggaacgtccggtcagcgacttttccggcggctggcggatgcgccttaatctggcccaggcgctgatttgccgttccgatttactgctgctcgacgaaccgaccaaccacctcgatctggatgccgttatctggctggaaaaatggctgaagagctatccaggcaccctgattctgatctcccacgatcgcgattttcttgacccgatagtggataaaattatccatatcgaacagcagactctgttcgagtacaccggtaactacagcgcgtttgaagttcagcgcgccacgcgcctggcgcagcagcaggcgatgtatgagagtcagcaggagcgtgtggcgcatctgcaaagctacatcgaccgtttccgcgccaaggccaccaaggccaagcaggcgcaaagccgtatcaagatgctggagcgtatggagttgattgcgccggctcatgtcgacaacccgttccatttcagcttccgcgcgccggaaagcctgccgaacccgctgctgaagatggaaaaagtcagcgcaggttatggcgatcgcatcattctggaatccatcaagctgaacctggtgcccggctcgcgtatcggcctgctgggccgcaacggcgcggggaaatcgacgctgatcaagctgctggcgggcgaactggaaccgttgcacggtgaaatcggcctcgccaaaggcattaagctcggctacttcgcccagcaccaactggagttcctgcgcgccgatgaatccccgctgcagcatatggcgcgtctggcgccgcaggaactggagcagaagctgcgcgactatctcggcggcttcggtttccagggcgacaaagtaacggaagagacgcaacgtttctccggcggcgagaaagcgcgcctggtactggcgctgatcgtctggcagcgtccaaatctgctactgctcgatgaaccaaccaaccacctggatctcgacatgcgtcaggcgctcaccgaagcgctgattgatttcgaaggcgcattggtcgtcgtgtcgcacgaccgccacctgattcgctccaccaccgacgacctctatctggttcacgacaaaaaggtcgaaccgttcgacggcgacctggaggattatcagcagtggctgagcgacgtgcagaagcaggaaaaccaggccgacgacgcaccgaaggaaaacaacgccaacagcgctcagtcacgcaaagatcagaagcgtcgcgaagccgagctacgcactctaacgcagccgctgcgtaaagagattacccgtctggaaaaagagatggaaaagctcaacgcccaactggcgcaggcggaagagaagcttggcgacagcagcctgtatgacccaagccgtaaagcggagatgaccgagtgtctgcaactgcaggccagcgccaaatccgggctggaagaatgtgaaatggcatggcttgaggcgcaggagcagcttgagcagatgatgcagaacgactaa

SEQ ID NO: 82641 - protein, 635 aa, Salmonella enterica subsp. enterica serovar Typhi Ty2
MIVFSSLQIRRGVRVLLDNASATINPGQKVGLVGKNGCGKSTLLALLKNEISADAGSFTLPGTWQLAWVNQETPALPQPAIEYVIDGDREYRHLEAQLNDANERNDGHAIASIHGKLDAIDAWTVRSRAASLLHGLGFSNDQLERPVSDFSGGWRMRLNLAQALICRSDLLLLDEPTNHLDLDAVIWLEKWLKSYPGTLILISHDRDFLDPIVDKIIHIEQQTLFEYTGNYSAFEVQRATRLAQQQAMYESQQERVAHLQSYIDRFRAKATKAKQAQSRIKMLERMELIAPAHVDNPFHFSFRAPESLPNPLLKMEKVSAGYGDRIILESIKLNLVPGSRIGLLGRNGAGKSTLIKLLAGELEPLHGEIGLAKGIKLGYFAQHQLEFLRADESPLQHMARLAPQELEQKLRDYLGGFGFQGDKVTEETQRFSGGEKARLVLALIVWQRPNLLLLDEPTNHLDLDMRQALTEALIDFEGALVVVSHDRHLIRSTTDDLYLVHDKKVEPFDGDLEDYQQWLSDVQKQENQADDAPKENNANSAQSRKDQKRREAELRTLTQPLRKEITRLEKEMEKLNAQLAQAEEKLGDSSLYDPSRKAEMTECLQLQASAKSGLEECEMAWLEAQEQLEQMMQND

SEQ ID NO: 82642 - DNA, 1956 bp, Bacteroides thetaiotaomicron VPI-5482
  CDS (1)..(1956): transl_table=11
gtgatttcagtagaaggattatcagtagaatttaatgcgacaccgctctttgcggatgtcagctatgttatcaataaaaaagaccgcatcgctttggtcggcaagaatggtgcgggcaaatcgactatgttgaaaatattggcaggtctgcaaaacccgacccgtggagtggtagccgtccctaaagatgtaacaatcggctatctgccgcaagtcatgatcctttcggatgtccgcacggtgatggaggaagcagaactcgctttcgagcatattttcgaacttcaggcaaaccttgaacggatgaatcagcagcttgccgaccgcaccgactatgaatccgaagaataccaccagttaatagaccgcttcacacacgaaaacgaccgcttcctgatgatgggaggaaccaattttcaggcggaaatagaacgtaccctgttgggattgggctttagcagggaagactttaaccgttcgacttccgaattctccggcggctggcgtatgcgtatcgaactagcgaagctcttgctccgtcgtccggatgtgctgctccttgatgagccgactaaccatctggatatcgagagtatacaatggctggagaactttctgtctacccgtgccaatgctgttgtgctggtcagccacgaccgtgctttccttaataatgtaactacccgtacgatcgagattacctgcggtcagatttatgactataaagtgaagtacgatgagtttgtcgtattacgtaaagaacgtcgtgagcagcagctccgtgcctatgagaatcagcagaagcagatacaggatacggaagactttatcgaacgtttccgctataaggcaaccaaagccgtacaggtgcagagtcgtatcaaacaactggaaaagatagaccgtatcgaggtcgatgaggaagacaactcttccctccgtctgaaatttcctcctgccagccgcagcgggaattatccggttatctgtgaagacgtacgcaaggcatacggacagcacgttgttttccatgatgtgaatctgacgatcaacagaggagaaaaagtcgcatttgtcggaaagaacggagaaggtaaatctacgttagtgaaatgtatcatgggcgagattgattttgatggtaaactgacgatcgggcataacgtgcagatcggttactttgcacagaatcaggcgcagatgctggatgaaaacatgacggtatttgatacgatcgaccgtgtggcgacaggagatatccggttgaagatacgtgacattttgggtgcattcatgtttggcggagaggcttcggataaaaaagtgaaagtactttccggtggagagcgtactcgtctggctatgattaagttgctgctggaaccggtgaacttcctgattttggacgaacctaccaatcatttggatatgcgttccaaagatgtactgaaagaagctatccgcgaatttgacggaacagtgatacttgtcagccacgaccgtgattttttggacggacttgcgactaaagtatatgagttcggtggtggaacagtgaaagaacatcttggcggtatctacgatttcctgcaaaagaagaagatcgacagcctgaatgaacttcagaaaggagtttctctctctacttctcctaccgcatctgccaaaggaaacgaagcggatacagagcaaccttcggagaacagactctcgtatgaagcgcagaaggaactcaataagaagataaagaagttggaacgccaggtggcggactgtgaggcttcgattgaagaaacggaatcggcaatcgccattctggaagcaaaaatggcaaccccggaaggagcatcggatatgcaactgtatgaacggcatcagaagctgaaacagcaattggataccaccgttgaagagtgggaacgggtttcgatggaactggaagaagtgaaaaactaa

SEQ ID NO: 82643 - protein, 651 aa, Bacteroides thetaiotaomicron VPI-5482
MISVEGLSVEFNATPLFADVSYVINKKDRIALVGKNGAGKSTMLKILAGLQNPTRGVVAVPKDVTIGYLPQVMILSDVRTVMEEAELAFEHIFELQANLERMNQQLADRTDYESEEYHQLIDRFTHENDRFLMMGGTNFQAEIERTLLGLGFSREDFNRSTSEFSGGWRMRIELAKLLLRRPDVLLLDEPTNHLDIESIQWLENFLSTRANAVVLVSHDRAFLNNVTTRTIEITCGQIYDYKVKYDEFVVLRKERREQQLRAYENQQKQIQDTEDFIERFRYKATKAVQVQSRIKQLEKIDRIEVDEEDNSSLRLKFPPASRSGNYPVICEDVRKAYGQHVVFHDVNLTINRGEKVAFVGKNGEGKSTLVKCIMGEIDFDGKLTIGHNVQIGYFAQNQAQMLDENMTVFDTIDRVATGDIRLKIRDILGAFMFGGEASDKKVKVLSGGERTRLAMIKLLLEPVNFLILDEPTNHLDMRSKDVLKEAIREFDGTVILVSHDRDFLDGLATKVYEFGGGTVKEHLGGIYDFLQKKKIDSLNELQKGVSLSTSPTASAKGNEADTEQPSENRLSYEAQKELNKKIKKLERQVADCEASIEETESAIAILEAKMATPEGASDMQLYERHQKLKQQLDTTVEEWERVSMELEEVKN

SEQ ID NO: 82644 - DNA, 1947 bp, Enterococcus faecalis V583
  CDS (1)..(1947): transl_table=11
atgattttattacaagcaaatcaagttgcccggcattttggctcggaaacattgtttgaaaacatacatttagaaattgcaacaaaaagtcggattgccttagttggtcgtaatggtgctggaaaatcgacttttttaaaaatcattgcaggcattgatgctcccgatagcggaaccattgccaaaaataaaactgctacgttaggttatttagctcaaaataccggcttagaatcagataaaaccgtttgggaagaaatgacaaaagcctttgctgacatcctagaaatggaacagcgtatgcgagaattagaaactaaaattagtgaaatggagccaaccacttccgtttatgaaggaattttaaaagagtacgatcaattgcaacatacgttttctgaaaaaaatggctacggctatgaaaatgaaattcgctcagtccttcacggctttggctttgatgaatccttttacacgaaagatattcaaaccttatctggtggtcaaaaaacccggcttgcattagcgagaatgcttttacaaaaaccagacattttaattctggacgagcctacaaaccacttagatatcgagacgctttcttggctggaatcttatttgccaagttatgccggcgccctattaattgtttcccacgatcgttattttttagataaggtagttaatgaagtttatgaactgagtcgcaaaaaaatgactcactacaaaggaaactattccaaatacttagagttaaaagcagaacaattagccagtgaatggaaagcgtatgaaaagcaacaagaagaaatcaataagttagaagatttcgttgccaaaaatctggttcgtgcatctacaacgaaacgtgcacaaagtcgccgaaaagtattagaaaaaatggaccgtttagaccgacctcaaggagatgaaaaatcggcgcattttcttttcgatagtgaaaaagtctcgggaaatgttgttttacaagtcgaagatgccgccattggttacgaccaagaacatattttatccgaacctattcacttggatattcgtcgcaaagaagccattgccttagtcggaccgaacggaattggtaaatccactctcttgaaatcaattattgaccgcattcctttcattaaaggaagtaaaacttttggcaccaatgtttctgtaggttactatgaccaagagcaagccaatttacatggcaataaaacggtcttagcggaattatgggatgaacacccaaccacacctgaaaaagagattcgaagtattttaggcggctttctcttcagtggagacgatgttgaaaaaacgattcctttattaagcggtggcgaaaaagcccgtgtggcattagcaaaactagcgatggatcgtgacaatttcttgattctcgatgagccaaccaatcacttggatatcgataataaagaagttttagaaaatgcgctgattgattatgaaggaaccatcctcttcgtttcccatgaccgttactttatcaatcgaattgcaacaaaagttgttgagctttctgaaaaaggcagcaaactttatttaggcgactatgattattatttagaaaagaaacaagaggaagaagaaatcgctgccctcttagctaatgaagaagcggcgaaaaaacccgaaccagttacagccaaaaataccttttatcaaaacaaggagcaacaaaaattactccgtactttgcaaagaaaaataacacaagtcgaagaaaatcttgctcagttagatacgacaattgcacaattagaagcacaaatgagtcaaccagacattctagaaaatcatgttgaattgctggctttaaaccaacaattagatgaagttcgtcagcaacaagatgaactacttgagcaatgggaaaatttcagtttagaattagaagaaatggaaaataacaattaa

SEQ ID NO: 82645 - protein, 648 aa, Enterococcus faecalis V583
MILLQANQVARHFGSETLFENIHLEIATKSRIALVGRNGAGKSTFLKIIAGIDAPDSGTIAKNKTATLGYLAQNTGLESDKTVWEEMTKAFADILEMEQRMRELETKISEMEPTTSVYEGILKEYDQLQHTFSEKNGYGYENEIRSVLHGFGFDESFYTKDIQTLSGGQKTRLALARMLLQKPDILILDEPTNHLDIETLSWLESYLPSYAGALLIVSHDRYFLDKVVNEVYELSRKKMTHYKGNYSKYLELKAEQLASEWKAYEKQQEEINKLEDFVAKNLVRASTTKRAQSRRKVLEKMDRLDRPQGDEKSAHFLFDSEKVSGNVVLQVEDAAIGYDQEHILSEPIHLDIRRKEAIALVGPNGIGKSTLLKSIIDRIPFIKGSKTFGTNVSVGYYDQEQANLHGNKTVLAELWDEHPTTPEKEIRSILGGFLFSGDDVEKTIPLLSGGEKARVALAKLAMDRDNFLILDEPTNHLDIDNKEVLENALIDYEGTILFVSHDRYFINRIATKVVELSEKGSKLYLGDYDYYLEKKQEEEEIAALLANEEAAKKPEPVTAKNTFYQNKEQQKLLRTLQRKITQVEENLAQLDTTIAQLEAQMSQPDILENHVELLALNQQLDEVRQQQDELLEQWENFSLELEEMENNN

SEQ ID NO: 82646 - DNA, 1911 bp, Nitrosomonas europaea ATCC 19718
  CDS (1)..(1911): transl_table=11
atgataagaatctcagaactgaccttgcaacgtggccctctgcgtttactggaaaatgcagatttaaccctgcacccagggcataaagtcggcttaattggtgccaatggcgctggcaaatcaagcttattcgccctgctacgtggggaattgcatcctgatgcaggcgattgcgtattgccaatgaactggcgcattgcccatatgcgtcaagaaatcgatgcacctgattgtaatgcgattgattatgtgctcgatggtgatggctacttacgcgatattcaacagcaactggtcaaagctgaacaacgacaagacggagttgagcttggccgcttgtactcggaacttgataacgctgatgcctatacctccgacgcgcgcgcacgtaaattattagctggtttgggtttcctggaagaacaaatgggaaatcaggtcaatagcttttccggtggctggcggatgcgcttaaatctggcacaagcgttaatgtgcccatcagacttgctattacttgatgagcccactaaccacttggatctcgatgcaattttatggttggaaagttggctgcaaagctatcccggtaccttgctgctgatttcccatgaccgtgatttcttagatgcagtggtcggtcatattgtccatattgatcaacaaaaactaacgctatattgcggcggctatacagcctttgaacgcgcccgtgctgcacgtattatgcagcaacagcaagcgcacgaaaaacaaagagcacagcgcgcgcatatggaagattttatccgacgctttaaagccaaggccagtaaagcacggcaagcacaaagccgtgttaaagccctggaacgcatggaggagctggcaccagcacacttcgattcaccttttgactttattttccgcgtggctgataaagtctctacaccgctgctgaatctcaatgaagcagagcttggttacaacgtgggacagcctattttaagcaatgtaaagctacagctagtcccgggcgcacggattgctttacttggccccaacggtgcaggtaaatcaactctgattaaaagtattgtggacgatttaccgctattggcaggtcaactcacccgcagtgaaaacttagcgattggctactttgcccaacatcaactggactcacttgatccaaaagccagcccgttgctacattttcaacgcattgctcaagatgaacgcgagcaagttttgcgtaatttcctcggcggttttaattttcgcggcaagcgctgtgatgaacctgtgctcaatttctccggtggtgaaaaagcccgcttggctttggcgctgattgcgtggggtaaacctaatttattactgctcgatgagcccaccaaccaccttgatttagaaatgcgacaagcattgagtatggctttacaagatttctccggtgcgctactgctggtgtctcacgatcgccatctgatcaaaagtaccatggatgagttgtacttagttgctgatggccgtgtgcgggagtttgcaggcgatcttgaggactacagcaaatggctcaacgattatcgtttgcgccagcgtcctgataacgacgcaaccagccccgataaagtcgatcgccgcgcacaacgccaggcaactgcagcactccgtaaacaactggcaccgctacgcaagcacactgatacattagaaaaacagttagataacattcaaaaagagctacaggctttggaaaccattctggctgataataatctctatgagcagccgcaaaaagatcagctcaagcaatacctaagccagcaaaccaacttgctacaaaagcaagtaaaactggaagaaacctggctcaataacttagaagagctggaattattgcaaagtgaacttggggaagatgtataa

SEQ ID NO: 82647 - protein, 636 aa, Nitrosomonas europaea ATCC 19718
MIRISELTLQRGPLRLLENADLTLHPGHKVGLIGANGAGKSSLFALLRGELHPDAGDCVLPMNWRIAHMRQEIDAPDCNAIDYVLDGDGYLRDIQQQLVKAEQRQDGVELGRLYSELDNADAYTSDARARKLLAGLGFLEEQMGNQVNSFSGGWRMRLNLAQALMCPSDLLLLDEPTNHLDLDAILWLESWLQSYPGTLLLISHDRDFLDAVVGHIVHIDQQKLTLYCGGYTAFERARAARIMQQQQAHEKQRAQRAHMEDFIRRFKAKASKARQAQSRVKALERMEELAPAHFDSPFDFIFRVADKVSTPLLNLNEAELGYNVGQPILSNVKLQLVPGARIALLGPNGAGKSTLIKSIVDDLPLLAGQLTRSENLAIGYFAQHQLDSLDPKASPLLHFQRIAQDEREQVLRNFLGGFNFRGKRCDEPVLNFSGGEKARLALALIAWGKPNLLLLDEPTNHLDLEMRQALSMALQDFSGALLLVSHDRHLIKSTMDELYLVADGRVREFAGDLEDYSKWLNDYRLRQRPDNDATSPDKVDRRAQRQATAALRKQLAPLRKHTDTLEKQLDNIQKELQALETILADNNLYEQPQKDQLKQYLSQQTNLLQKQVKLEETWLNNLEELELLQSELGEDV

SEQ ID NO: 82648 - DNA, 1917 bp, Haemophilus ducreyi 35000HP
  CDS (1)..(1917): transl_table=11
atgatcttttttacagacctaattttaaaacgtgggcttaatgtccttttagataaaacctctgcgattattcataaaggccaaaaagttggctttgttggtaaaaatggttgtgggaaatcctcactctttgctttaataaaaggcgaacttcaagcagaagcaggtgaagttgcgttacccaaaaactgctcaatggcgtgggtaaaccaagaaactccggcattagatatttctgcactagattatgttattcaaggtaaccgtgaatatactacgttgatgacacagcttgaacaagccaacttggcaaatgacggtaatcaaatcgcccatattcacaaccatctagatatgattgatgcgtggacgattcaggctcgtgctgcggcattattaaatggcttaggtttcgctaatgaacaacttaccttggcagtgaaatcattttctggtggttggcgtatgcgtttaaacctagcacaagcattgctatgtcgctctgacttattattacttgacgaacccaccaaccatttagatttagatgcagtgatttggttagaaaaatggttgactaattaccgtggcactttactgctcatttcacacgatcgtgactttttagatcccattattgatcacgtgattcacttggaaaaccaacggcttcaagaatacaccggcaactacacctcttttgagatacaacgagcgactaagatttcgcaacaaaatgcggcttatcaacaacaccaaagaaaagtggctcatttacaaagctttattgaccgctttaaagcgaaagccaccaaagccaaacaagcacaaagccgtatcaaagcgctcgaaaaaatggaattgattgcaccggcttatgcagattcaccgtttgaatttgagtttaaaccgccattatcgttgcctagtccgttaatgatgatggaaaaagtcagtgccggttatgagaaacaagttattttagaatctgtcaaacttaatttagtgccgggctctcgtatcggattgcttggtcgcaatggtgcgggtaaatcaaccctaattaaactattagccggaaaaatcgacccactggcaggtaatattcaactcgcaaaaggggtacagttaggctattttgcgcaacatcaagtggatacattacgctttgatgaaagcccactttggcatttacaaaaattagctccacagcaaactgaacaagcattacgcaattatttgggcggttttgactttaaaggagataaagtcaatcaactagtaatgactttttcaggcggtgaaaaagcccgtctggtattagcattaattgtttggcaacgcccaaatctgttgttattagatgaaccaaccaaccatttagatttggatatgcgtcaagcattaacagatgccttaacttattatgaaggttctttagttgttgtttcacacgaccgccatttattacgcacgaccgtcaatgaattctatttggtgcataatcataaagtcgtcgaatttaaaggtgatttagacgattatcaaaagtggctgatcgaacagaatcaacttgccactgtcagcaatcaagtaaattcaaccacgttaaacaaaactgagcaagataattctgctcaatcccataaagcgcaaaaacgcttagcggcagaacttcgccaacaaacggcgccattacgcaaaaaaattagccaattggaaaaggcgatagaaaaagcaactgaaaaactaaccgcactagagacattacttgcctcaaatacgctttatgaagcaggcaataaagcacaattagctgaaacacttgctcaacaagtagaaaccaaaagatcactggaagaaaatgagctaatgtggttagaagcacaagaaacattagaaaagatgctaaaatag

SEQ ID NO: 82649 - protein, 638 aa, Haemophilus ducreyi 35000HP
MIFFTDLILKRGLNVLLDKTSAIIHKGQKVGFVGKNGCGKSSLFALIKGELQAEAGEVALPKNCSMAWVNQETPALDISALDYVIQGNREYTTLMTQLEQANLANDGNQIAHIHNHLDMIDAWTIQARAAALLNGLGFANEQLTLAVKSFSGGWRMRLNLAQALLCRSDLLLLDEPTNHLDLDAVIWLEKWLTNYRGTLLLISHDRDFLDPIIDHVIHLENQRLQEYTGNYTSFEIQRATKISQQNAAYQQHQRKVAHLQSFIDRFKAKATKAKQAQSRIKALEKMELIAPAYADSPFEFEFKPPLSLPSPLMMMEKVSAGYEKQVILESVKLNLVPGSRIGLLGRNGAGKSTLIKLLAGKIDPLAGNIQLAKGVQLGYFAQHQVDTLRFDESPLWHLQKLAPQQTEQALRNYLGGFDFKGDKVNQLVMTFSGGEKARLVLALIVWQRPNLLLLDEPTNHLDLDMRQALTDALTYYEGSLVVVSHDRHLLRTTVNEFYLVHNHKVVEFKGDLDDYQKWLIEQNQLATVSNQVNSTTLNKTEQDNSAQSHKAQKRLAAELRQQTAPLRKKISQLEKAIEKATEKLTALETLLASNTLYEAGNKAQLAETLAQQVETKRSLEENELMWLEAQETLEKMLK

SEQ ID NO: 82650 - DNA, 1926 bp, Bordetella bronchiseptica RB50
  CDS (1)..(1926): transl_table=11
gtgatacgcgcttctggcttgaccctgcgccgcggcaccaaagtgctgctcgacggcgccgatttcgttgtgcatcccggcgaacgcgtcggcatcgtcggcaagaacggcgcgggcaaatcgtcgctgttcgcgctgctgaccggcgcgctggaccccgacgccggcaacctggacctgcccgcgggctggcgcatcgccagcgtgcagcaggagattgccgccgacgcgcaagcggcgcgcgaattcgtcatcgacggcgacacccacctgcgcgcactgcaggcccagcgcgccgcgctgaccgacgaccagggcacgcagatcgccgaaaccgaagcggcgctgatcgaggcgggcgcctggagcgcggcctcgcgcgccgagcagttgctcgcgggcctgggattcaagccatccgaatggatgcagccggtgcgcagcttttccggcggctggcgcatgcggctggcgctggcgcgcgcgctgatggcgccgtcggagctgttgctgctggacgagccaaccaaccacctggaccttgacgccatgctgtggctggagaaatggctgaccgcctatcccggtacggttctgctgatttcgcacgacacggaattcctggacgcggtggcgcgcgccatcctgcacttcgaccaggccaagctgcagcgctatcgcggcggctaccaggacttcctgctgcagcgcgccgaacgcctgcgccaagccaatatcgcctacgaacgccagacgcgcgaagccgcgcgcctgcaaggcttcatcgatcgtttcaaggccaaggcttccaaggccaagcaggcgcaaagccgcgtcaaggcgctcgcgcgcatggaagcgctggcgcctatccatgccgaatcgggcatcgatatccgcatcccctcgcccgaccacatgcccgacccgctgctggccatggaacacatggatgccggctacggcggcgccgagcccattctgcgcgacgtcacgctgatggtgcgagccggcagccgtatcggcgtgctgggcgccaatggcgcgggcaagagcaccctgatcaagacgctggccgacgagctggccccgcatgccggcacgcggcgcgcgtcgcgcgggctggcgatcggctatttccaccagcaccagctcgacatgctggacctcgacagcacgccgctcgcgcacctcgcgcggctggctccggaagtgcgcgagcaggagctgcgcaactacctgggcggcttcggcttttccggcgacaccgtgctgagcaaggtcggccccatgtccggcggcgagaaagcccgtctcgccctgtcgctgatcgtctggcaaaaacccaacctgctgctgctcgacgaacccagcaaccacctggacgtggagacgcgcgaggcgctggccacggcgctcgcggaattctccggcagcatgctgctggtatcgcacgaccggcacctgctgcgcaccacggtcgacagcttctggatcgtggccgacggcggcgtgcgcgagttcgacggcgatctcgaagactatcgggactggctggccgcccgcaacgccggcgaacgcgccgccgcgcgcgaggccgccgccggcgagccgggcgtggccgtcgatcgcaaggcccagcgccggctcgaagccgagcagcggcaacgcctggccacgctgcgcaagccgctggccgccaaactggcgaaggtcgaggccgacatggagcgcgcccgcgcccgcctgcaggaactggatgccgtgatcgccgacgccgatctctattccgacgcgcgacgcaccgaacgccagcaagtgatgaccgaacacggcgaatccggcaagcgcctcaatgacctcgaggagcaatggctggagatccagcaggcactcgaagagatcgagcaggacaacgccgcctga

SEQ ID NO: 82651 - protein, 641 aa, Bordetella bronchiseptica RB50
MIRASGLTLRRGTKVLLDGADFVVHPGERVGIVGKNGAGKSSLFALLTGALDPDAGNLDLPAGWRIASVQQEIAADAQAAREFVIDGDTHLRALQAQRAALTDDQGTQIAETEAALIEAGAWSAASRAEQLLAGLGFKPSEWMQPVRSFSGGWRMRLALARALMAPSELLLLDEPTNHLDLDAMLWLEKWLTAYPGTVLLISHDTEFLDAVARAILHFDQAKLQRYRGGYQDFLLQRAERLRQANIAYERQTREAARLQGFIDRFKAKASKAKQAQSRVKALARMEALAPIHAESGIDIRIPSPDHMPDPLLAMEHMDAGYGGAEPILRDVTLMVRAGSRIGVLGANGAGKSTLIKTLADELAPHAGTRRASRGLAIGYFHQHQLDMLDLDSTPLAHLARLAPEVREQELRNYLGGFGFSGDTVLSKVGPMSGGEKARLALSLIVWQKPNLLLLDEPSNHLDVETREALATALAEFSGSMLLVSHDRHLLRTTVDSFWIVADGGVREFDGDLEDYRDWLAARNAGERAAAREAAAGEPGVAVDRKAQRRLEAEQRQRLATLRKPLAAKLAKVEADMERARARLQELDAVIADADLYSDARRTERQQVMTEHGESGKRLNDLEEQWLEIQQALEEIEQDNAA

SEQ ID NO: 82652 - DNA, 1905 bp, Chromobacterium violaceum ATCC 12472
  CDS (1)..(1905): transl_table=11
atgatccaactgaaaaatctgagcctgcgccgcggcctgaaggaattgctgatcggcgccaacctgacgctgaatcccggctacaaggccggcctgaccggcgccaacggcgtcggcaagtccagcctgttcgccatgctgctgggcgagttgcacgccgacggcggcgacatgctgctgccgcccaactggaccgtcgcccacgtggcgcaggaaacgccggcgctggaacgcagcgcgctcgactacgtgctggacggcgacaaggagctgcgcgcgctggagtcgcagctggccgacgcggaagacaagcatgacggcaacgccatcggccatctgcacggcgagctggccaatatcgacgcctactccgccccggcgcgcgccggcaagctgttgaccggcctgggcttcgacgaggccgcccagcagcgcccggtggccagcttctccggcggctggcgcatgcgcctgaacctggcccaggcgctgatgtgccgctccgacctgctgctgctggacgagccgaccaaccacctggacctggaaacggtgctgtggctggaggactggctgaaggcctatcccggcaccctgctggtgatctcgcacgaccgcgatttcctggacgccatctgcagccacatcgtcgaagtggccagccagacgctgacgctgtacaccggcaactacagccagttcgaagtcatgcgcgccgagaagctggcgcgccagcaaggcgaatacgaaaagcagcagcgccagatcgcccacctggaatcgttcatcaaccgcttcaaggccaaggccagcaaggcgcgccaggcgcagagccgggtcaaggcgctggagaagctggaacggatcgcgccggcccacatcgcttcgccgttcgacttccatttcgacagccccgagcacctgcccaatcccttgctgaagctggacaaggccgacgccggctacggcgacaagaccatcctgtccggcatcagcctgtcggtggaagccggcgcgcgcatcggcctgttgggcgtcaacggcgccggcaagtcgacgctggtcaagctgctgtccggcgacctcgcgccgcaagccggcgagcgcatcaacgcgcagatgctgaagataggctatttcgcccagcacacgctggagacgctgcgcccggatgaaagccccctgcagcacatgcagcgcctggcgccgaccacgcgcgaactggagctcaggagtttcctcggcggcttcaacttccgcggcgacgccgccaccgacccggtcggcccgatgtccggcggcgagaaggcccgcctcgcgctggccatgatcgtgtggcagaaacccaacctgctgctgctggacgaaccgaccaaccacctggacctggaaatgcgccacgcgctgacgctggcgctgcaggacttcaccggcgcgctgatcgtggtctcccacgaccgcagcctgctggagtccaccaccgacgtgttctggctggtcagcggcggcaaggtgcagcccttcgacggcgacctggaagactaccgccaatggcgcatcgcccaactggcggaaggcggcaaaccgtccgacggcgacgcccagggcgtcaaccgcaaggaacagaagcgccaggaggcagaggctcgccagcaattggccaagcaacgcaagcccttgcaaacccgcctgtccaagctggagcaggaaatgaacaagctgagcgacgagaaagccgagctggaagccttcatgtcctccagcgaggcctacgacgatgccaaccgccagaagctggccgacagcgtgaaacgccagggcgaagtcgccagccggctggaaatcgtcgaagaggaatggatggaagtgcaggagcagctggaagcgctggctcaggccgactga

SEQ ID NO: 82653 - protein, 634 aa, Chromobacterium violaceum ATCC 12472
MIQLKNLSLRRGLKELLIGANLTLNPGYKAGLTGANGVGKSSLFAMLLGELHADGGDMLLPPNWTVAHVAQETPALERSALDYVLDGDKELRALESQLADAEDKHDGNAIGHLHGELANIDAYSAPARAGKLLTGLGFDEAAQQRPVASFSGGWRMRLNLAQALMCRSDLLLLDEPTNHLDLETVLWLEDWLKAYPGTLLVISHDRDFLDAICSHIVEVASQTLTLYTGNYSQFEVMRAEKLARQQGEYEKQQRQIAHLESFINRFKAKASKARQAQSRVKALEKLERIAPAHIASPFDFHFDSPEHLPNPLLKLDKADAGYGDKTILSGISLSVEAGARIGLLGVNGAGKSTLVKLLSGDLAPQAGERINAQMLKIGYFAQHTLETLRPDESPLQHMQRLAPTTRELELRSFLGGFNFRGDAATDPVGPMSGGEKARLALAMIVWQKPNLLLLDEPTNHLDLEMRHALTLALQDFTGALIVVSHDRSLLESTTDVFWLVSGGKVQPFDGDLEDYRQWRIAQLAEGGKPSDGDAQGVNRKEQKRQEAEARQQLAKQRKPLQTRLSKLEQEMNKLSDEKAELEAFMSSSEAYDDANRQKLADSVKRQGEVASRLEIVEEEWMEVQEQLEALAQAD

SEQ ID NO: 82654 - DNA, 1938 bp, Porphyromonas gingivalis W83
  CDS (1)..(1938): transl_table=11
atgatctccgtcaataacctgactgtcgatttcggcacccgtctgctcttcgatcaggtatcattcgtcatcaacaggcgcgaccgtatcgctcttgtagggaagaacggtgccggcaagagtacgctgctcaagctgattgccggcatggaagaaccgacatccggacacatagcacgccccaaggggatccgcataggctatctgccgcaggtgatgcgtttgcaggacggacacacggtttacgaagaggtcgagcaggctttcaacgatattcgccaaatagaggaagagatacggcgtctgtccgatgaaatggccggacgtacggactacgaatcggatgactatatccgactgatagagcattatacgaatatgagcgagaccctctctctcatgcagcagggcaactatcatgctgcgatcgaacagacattgatcggtctgggcttcggccgagaggacttccaccgccccacagccgatttcagcggaggatggcgtatgcggatagagctggccaaacttctgctccaacgccccgaagttttgctgctcgacgagccgaccaatcacctcgacatcgaatccatcggctggctggagcagttcatcgccaccaatgcaggagccgttatcctggtgtcgcacgacagggcattcatcgacaataccacgacacgcactatcgaaatagaactgggacatatatacgactacaagaccaactacagccactatgtggagctgcgcgaagagcggctgcgacagcagatgcgtgcctacgagaatcagcagaagatgatccgcgatacggaggacttcatcgaacgattcagatacaaggccacgaagtccgtacaggtacagagccggatcaaacagttggagaaagtagagcgcgtggagatagacgagcgggatcgttcggcatttcacttccgctttatcccggcacagccttccggcagttatccgctaatagtggatgatttggccaaggcttatggcgatcaccaggtgttttccggagctacatacaccatcgaaagaggcgaaaaggtggctttcgtaggcaaaaacggtgccggcaaaagtaccatggtcaagtgtatcatgggagagctgacagactacaccggcaagctcgaactggggcacaacgtgcagctgggctactttgcccaaaacgaagcccaagagctaagaggggatctcacggtattcgacacgatagaccgtgaggccgtgggcgacatccgtctgcgcctgaacgatttgctcggggcttttctcttcgggggcgaagcatcggaaaagaaagtaagtgtcctgagtggaggagaacgagcacgattggctattatcaggcttttgctacagccggctaacttccttattctcgatgagccgaccaatcacctcgatatgcgctcgaaggatgtactgaaagaggcgatcaagaacttcgatgggactgtcatcgtagtatctcacgaccgtgagttcctcgatgggcttgtcagcaaggtgtatgaatttgcagatggacaggtgaacgaacacctcggaggtatatacgactatctccggacccgccgtatgcagacgctgacagagctggagcgaaccactacgatcgaaacaaaaaccacacgggaggctatacctgaaacggaagccaaagcggactaccgtcggcaaaaggaggtagccaaacagctgcgcacgttggagcgaaccgtagcaacctgcgaggagcggatcggaaaattggagtcggaattacaggcaatagagatgctactgcaagatccgaaacatgcgactgacgcgaatctgttcgagcgatacgccggcatgaaacaagaactcgaaaaggccatggaggactgggaacaggcttccgaagctttatccgaagcccaaggataa

SEQ ID NO: 82655 - protein, 645 aa, Porphyromonas gingivalis W83
MISVNNLTVDFGTRLLFDQVSFVINRRDRIALVGKNGAGKSTLLKLIAGMEEPTSGHIARPKGIRIGYLPQVMRLQDGHTVYEEVEQAFNDIRQIEEEIRRLSDEMAGRTDYESDDYIRLIEHYTNMSETLSLMQQGNYHAAIEQTLIGLGFGREDFHRPTADFSGGWRMRIELAKLLLQRPEVLLLDEPTNHLDIESIGWLEQFIATNAGAVILVSHDRAFIDNTTTRTIEIELGHIYDYKTNYSHYVELREERLRQQMRAYENQQKMIRDTEDFIERFRYKATKSVQVQSRIKQLEKVERVEIDERDRSAFHFRFIPAQPSGSYPLIVDDLAKAYGDHQVFSGATYTIERGEKVAFVGKNGAGKSTMVKCIMGELTDYTGKLELGHNVQLGYFAQNEAQELRGDLTVFDTIDREAVGDIRLRLNDLLGAFLFGGEASEKKVSVLSGGERARLAIIRLLLQPANFLILDEPTNHLDMRSKDVLKEAIKNFDGTVIVVSHDREFLDGLVSKVYEFADGQVNEHLGGIYDYLRTRRMQTLTELERTTTIETKTTREAIPETEAKADYRRQKEVAKQLRTLERTVATCEERIGKLESELQAIEMLLQDPKHATDANLFERYAGMKQELEKAMEDWEQASEALSEAQG

SEQ ID NO: 82656 - DNA, 1926 bp, Photorhabdus luminescens subsp. laumondii TTO1
  CDS (1)..(1926): transl_table=11
atgattgttttctcttcattacaaattcgtcgcggaactcgtgttctgctggacaatgccagcgccactatcaatcccgggcagaaagttggtctggtagggaaaaatggctgtggtaaatctaccctacttgcactattaaaaaatgagcttcaggctgaaacaggcacattcacttttcccagtaactgggcactttcttgggtgaatcaggaaacgccagcactggaaatacccgctctggaatatgtcattgatggtgatcgtgaattccgtcaactggaacaacaactgcggatagccaatgaaaaaaatgaaggtaatctgattgctcatctgcatggtcaattagacacgattcaagcctggacgatccgttcaagagcatcaagtctactgcacggtttaggtttctctcaagagcaacttgatcaacctgtacgtgcattttccggcggatggcgcatgcgcctcaatctggctcaggcactactctgccgttctgatttactgttgcttgatgaaccgactaaccatcttgatctggatgcggttatctggttggaaaaatggctgaaaagctaccccggaacattaatccttatctcccatgatcgggattttcttgacccgattgccgataagatcctccatatagaacaacaatccctatttgagtacagtggcaactactcatctttcgaacgccagcgcgccaccaaactggcgcaacaacaggccctttataaaagtcagcaagagaaagttgcccatctgcaaagttatattgaccgtttccgtgccaaggccagcaaagccaaacaagctcagagccgtatcaagatgttagagcggatggaattaatcgctcctgcccatgttgataacccatttcatttcagtttccgtaaaccggaaagtctgccaaacccactcctgaaaatggaaaaagtcagcgcaggctatggcgaacggaccgttttaaattccatcaaactgaatctggttcccggctcccgcattggcctgcttggccgtaatggtgcgggtaaatccacgttaattaaactactggctggcgaactgcaatctcagagtggaacggtagaattagctaaagggattaaactgggatatttcgcccagcatcaactggaatatttacgtgctgatgaatcaccattacagcatttagtccgcattgcgcaacaggaaacagaacaacaacttagagattatctgggcggctttggtttcaaaggtgatcaagtgactgacccaagtgggcgtttttccgggggagaaaaagcacgtttggttttggcattgatggtctggcaacgccctaacctcctgttactcgatgaaccaacgaaccacctcgacctggatatgcgtcaggcactgacagaagctttgatcgactttgacggtgcattggttgtggtttctcacgaccgacatctattacgttcaacaaccgatgagttgtatctggttcatgatggccgggtagaatcattcaacggcgatttagaagattatcaacaatggctgatagatcaacaacgtcaacaaaatcagcaaatacgtgaaaacaacgataaggaaaaagagacatccagccaaagtgctcaggaaagaaaagatcaaaaacggcgtcaagctgacttccgtaaccaaacgcaacccttgcgtaagcaactggctaattttgaaaaacagatggagaaactgggtggcgaattggttgcactcgaaaatcaacttttagacagcgctatctatgatagcagccgtaaagtcgaattaactgaatatctgcaaaaacaaaatcagaccaaattaaaattggaagaaattgaattagcatggatggaaattcaagaacagcttgaaaaaataacacaagagtttgaaggataa

SEQ ID NO: 82657 - protein, 641 aa, Photorhabdus luminescens subsp. laumondii TTO1
MIVFSSLQIRRGTRVLLDNASATINPGQKVGLVGKNGCGKSTLLALLKNELQAETGTFTFPSNWALSWVNQETPALEIPALEYVIDGDREFRQLEQQLRIANEKNEGNLIAHLHGQLDTIQAWTIRSRASSLLHGLGFSQEQLDQPVRAFSGGWRMRLNLAQALLCRSDLLLLDEPTNHLDLDAVIWLEKWLKSYPGTLILISHDRDFLDPIADKILHIEQQSLFEYSGNYSSFERQRATKLAQQQALYKSQQEKVAHLQSYIDRFRAKASKAKQAQSRIKMLERMELIAPAHVDNPFHFSFRKPESLPNPLLKMEKVSAGYGERTVLNSIKLNLVPGSRIGLLGRNGAGKSTLIKLLAGELQSQSGTVELAKGIKLGYFAQHQLEYLRADESPLQHLVRIAQQETEQQLRDYLGGFGFKGDQVTDPSGRFSGGEKARLVLALMVWQRPNLLLLDEPTNHLDLDMRQALTEALIDFDGALVVVSHDRHLLRSTTDELYLVHDGRVESFNGDLEDYQQWLIDQQRQQNQQIRENNDKEKETSSQSAQERKDQKRRQADFRNQTQPLRKQLANFEKQMEKLGGELVALENQLLDSAIYDSSRKVELTEYLQKQNQTKLKLEEIELAWMEIQEQLEKITQEFEG

SEQ ID NO: 82658 - DNA, 1923 bp, Vibrio vulnificus YJ016
  CDS (1)..(1923): transl_table=11
atgattaccttttcagatatccagctgctgcgcggcggctctcctctccttgaccaagcatccgcaacgattcatccgggtgataaaatcggccttgtcggcaaaaatggctgtggtaaatccaccctgtttgccttaattaaagacgaactttcgattgatgcgggctcatttagctctccacaacattgggagttagcttgggtcgcacaggaaacgcccgctttagaacgcagcgccattgaatatgtgattgatggagatcgtgaatatcgtcagcttgaacgccagttggcggaagccgaagcacaagagcaagggactcgcattgcggaattgcacggtaaaattgaaaccattggcggctacagcattcgtgcacgcgcttcagagcttttagatggtttaggttttagccaagagcagatgcattggaacctgacccagttttcgggtggctggcgcatgcgcctcaaccttgctcaagccctgctgtgtcgttctgatctgttgctgcttgacgaaccaaccaaccacttagatcttgatgctgtcatgtggctagaacgttggctgcaaagctacccaggtactttgatgctgatctcgcacgaccgtgattttctcgacccaatcgtgaaccgcatcgttcacattgaaaaccagaaactcaatgagtacaccggtaactactcatcgtttgaaaatcagcgcgctcagaaactgatcctgcaacaatcgatgtttgagaagcagcagaagcagatggcgcacatgcaaagctacatcgatcgtttccgctacaaggcgtccaaagcacgccaagcgcaaagccgcatcaaagcgttggagaagttagaaaaagtgctccccgcacagtttgataacccatttagctttgaatttcgtgaacctgccgcgctgccaaatccgatcatgatgatggatgacgtttctgctggttacggtgacaacctcatcctcgataaaattcgtcttaatctggtgccaggcagccgcatcggtttgctcggccgtaacggcgccggtaaatcaacgctgatcaagctcctctccggagagttgaaagcccaaggtggcgatttgacttactcgcaaggcgtcaaaattggttactttgctcagcaccaattggaaaccttgcatcccgaagaaacgccactgcaacacatgatgcagatcgcgccagataaaaccgaacaagaactgcgtaattatctgggtagttttggttttcacggtgacaaagcgctggagaaagtggcgccattttcaggcggagaaaaagcgcgcttggtgttagcgttgatcgtctggcaaaaaccaaacttactgctgctcgacgaaccgaccaaccacctagacttagatatgcgccaagcgctgacactggcactgcaaacctttgaaggcgcgatggtgatcgtctcacacgatcgctatttgatccgcgcgaccaccgatgatctttacctagtgcacgatcgccaagtggctccatttgatggtgatctcaatgactactacaaatggctcactgaacagcaaaaagcagagcgtcgcgaagcggccgcagaaatgccagccaaagacagcagcaacagtgccgcagcgaaaaaagagcaaaagcgtcgtgaagccgattttcgtaagttaaccgcaccaattcgcaaaaaactgacacagttggaagcgaaaatggataagttgggcgaagcgttggcagaagcagagcagcaattgtctgataactcactgtatgatgccgaaaataaagctaaacttactcaagtactggcgctgcaagcacaaagtaaatccgctctcgaagagattgaaatggagtggatggcagaacaggaagtactggaacagatggaacaggagttcaatagccaatga

SEQ ID NO: 82659 - protein, 640 aa, Vibrio vulnificus YJ016
MITFSDIQLLRGGSPLLDQASATIHPGDKIGLVGKNGCGKSTLFALIKDELSIDAGSFSSPQHWELAWVAQETPALERSAIEYVIDGDREYRQLERQLAEAEAQEQGTRIAELHGKIETIGGYSIRARASELLDGLGFSQEQMHWNLTQFSGGWRMRLNLAQALLCRSDLLLLDEPTNHLDLDAVMWLERWLQSYPGTLMLISHDRDFLDPIVNRIVHIENQKLNEYTGNYSSFENQRAQKLILQQSMFEKQQKQMAHMQSYIDRFRYKASKARQAQSRIKALEKLEKVLPAQFDNPFSFEFREPAALPNPIMMMDDVSAGYGDNLILDKIRLNLVPGSRIGLLGRNGAGKSTLIKLLSGELKAQGGDLTYSQGVKIGYFAQHQLETLHPEETPLQHMMQIAPDKTEQELRNYLGSFGFHGDKALEKVAPFSGGEKARLVLALIVWQKPNLLLLDEPTNHLDLDMRQALTLALQTFEGAMVIVSHDRYLIRATTDDLYLVHDRQVAPFDGDLNDYYKWLTEQQKAERREAAAEMPAKDSSNSAAAKKEQKRREADFRKLTAPIRKKLTQLEAKMDKLGEALAEAEQQLSDNSLYDAENKAKLTQVLALQAQSKSALEEIEMEWMAEQEVLEQMEQEFNSQ

SEQ ID NO: 82660 - DNA, 1884 bp, Nasonia vitripennis
  CDS (1)..(1884)
atgtcggacctggagcaaaacgtcgccgagctcgagatcgaggagtcgggcaagaagaagctcacccacaaggaaaagaagaaactgaagaagaagcaggaatatgagaagaccatcgagatgctaaccaaagcgggcggccagggacacagtgagttggagtcgaatttcaccgtttcccagagccagacgcagaataggggtggtcaacagctggagaacgctgtggatatcaaggtggaaaacttcagcatcgctgcgaaaggcaaagagctgttcaccaatgccaatctcctcatcgcacagggcagacgatacggtctggttggtcctaatggccatggaaaaactacgctattgcgtcatattgcaaagagagcattcaacatcccacctagcatcgacattctgtactgtgagcaagaagttgttgctgacgatacaccagctgttgaagtagtcttgaaagccgatgttaagtgcaatgaattacaagaggaatgcaaaaaattggaagagaaagttgaagcaggtgacactactgttcaagacaggttacaagaagtctatgaagagttgaaggctattggtgctgactcggcagaacccagagcaagaagaatccttgctggtttaggattcagtaaagagatgcagaaccgtgctaccaaaaatttttctggtggttggcgtatgcgtgtctctctagctagagcactgtttttagagcccacgttattgttgttggatgaacctacgaatcacttggatcttaacgccgttatttggttagataattatctgcaaggctggaagaaaactttgttggttgtttctcacgaccaaagtttcttagacaatgtttgtacagatattatgcatttagatcaacagaaactattttactacaagggcaactacagtatgttcaagaaaatgtactcccaaaagtgtaaagaaatgctgaaggcatatgagcagcaagaaaagcgcataaagaacatgaaatctcaaggtcagagtaaaaagcaagctgagaagaagcagaaggaagcacttacgcgtaaacaagagaagaacaagactaaaatacagaaacaggaagaggacactggaccaacagagctattgcagaaaccaagagagtatcttgttaaatttagcttcccagatccaccacctcttcagcctcctattcttggacttcacgaggtgtcatttgctttcccgggtcaaaagcctcttttcatagatgttgactttggtatagacttaagttcccgtgtggccattgttggacccaatggtgttggtaagacaacattcttgaagttgctggttggtgaattgtctcccaacaaaggagagctcattagaaatcatagattgaggataggaagattcgatcagcactctggagagcatctgactgctgaggaaactccgaccgagtatctcattcgcctgtttgatcttccctatgaaaaagccagaaaacagttgggaacctttggcttgagctctcacgcccacactatcaaaatgaaggacctgtccggtggacagaaagcacgtgtcgctttagctgaactttgccttaacgcgcctgatgtgctaattttggatgaacctacaaacaatttggacattgaatccattgatgccttaggtgaagccatcaccagatacaagggtggtgtggtcatagtttctcacgacgagcgacttattagggacactgagtgttgtttgtatgtgatagaaaaccaaactattaacgaaatcgacggcgactttgacgactacaggaaagaattgctcgaaagtctgggtgaaattgttaataatcctagtatagccgccaacgccgccgttctccagtaa

SEQ ID NO: 82661 - protein, 627 aa, Nasonia vitripennis
MSDLEQNVAELEIEESGKKKLTHKEKKKLKKKQEYEKTIEMLTKAGGQGHSELESNFTVSQSQTQNRGGQQLENAVDIKVENFSIAAKGKELFTNANLLIAQGRRYGLVGPNGHGKTTLLRHIAKRAFNIPPSIDILYCEQEVVADDTPAVEVVLKADVKCNELQEECKKLEEKVEAGDTTVQDRLQEVYEELKAIGADSAEPRARRILAGLGFSKEMQNRATKNFSGGWRMRVSLARALFLEPTLLLLDEPTNHLDLNAVIWLDNYLQGWKKTLLVVSHDQSFLDNVCTDIMHLDQQKLFYYKGNYSMFKKMYSQKCKEMLKAYEQQEKRIKNMKSQGQSKKQAEKKQKEALTRKQEKNKTKIQKQEEDTGPTELLQKPREYLVKFSFPDPPPLQPPILGLHEVSFAFPGQKPLFIDVDFGIDLSSRVAIVGPNGVGKTTFLKLLVGELSPNKGELIRNHRLRIGRFDQHSGEHLTAEETPTEYLIRLFDLPYEKARKQLGTFGLSSHAHTIKMKDLSGGQKARVALAELCLNAPDVLILDEPTNNLDIESIDALGEAITRYKGGVVIVSHDERLIRDTECCLYVIENQTINEIDGDFDDYRKELLESLGEIVNNPSIAANAAVLQ

SEQ ID NO: 82662 - DNA, 2145 bp, Nasonia vitripennis
  CDS (1)..(2145)
atggcagtgtgcggcagctacatcaggagtctgttcccgacgatcgacgacgaactctaccagtatgtggaaggtatactcgacagttccaaggacgactttgaggacgcggacgaagtttatgaagccattggcgaggtactgcacgaggtagaggaaaggtcagaaaacgaggttaggctaatatgcaagcgactgctggaaatgctgaagggtggcacaaatggaggcatagagaggcgaaaaaatggcgtaaacaaagtattaaatgtacctattcacatgggatcgctggcctcgaatttggaggagcaggttgatgatataaagagtatatgggtcacaacaagggatgatgttatgaaagtagatgctaagaagctggaaaaggcagaggccaaattgaaactaaagcaagacattcgcagcggcgaagtgacgtctgctaaaaacactgctctccctgcactggaatctgcaacagttagccaagttattagtaaaaaggacaatagaatggaagcaaagggcggcacaaatagaactaatgatattaggatagaaaatttcgatgtagcatatggagacagagttctattacaaggtgctgatttaacgttagccttcggtaggaggtacggatttgtaggacgcaatgggcttggcaagacgacgttacttcgtatgatatctagcaaacagttacaaataccatcgcacgtacgagtgctgcacgtcgagcaggaagttgcgggcgacgatacttccgccctcgagtcggtcttgcagtccgatcaggagcgcagtgaactgcttgcccgagaagccgagctacaggcggcgatcgaaaaggagggcggcaagaccaatgatgctctcggtgaagaattagcaaaggtgttcgaggcgatgcagatggcggaggtagagaaagcaccggcgcgcgccagcacaatcctctcgggtctgggtttctcggtggaacggcagacctggccgaccaaggccttctccggtggttggcgtatgagacttgctctcgcacgagcccttttctccaagccagacctgttactgctcgacgaacctaccaacatgttggacatcaaggccatcctctggctcgagaagtacctgcaatcctggcccaccacgctactcgtcgtttctcacgatcgtaacttcctcgatactgttcctacagatatattgtacttgaaagcacaaaagatcgaatcctatcacggtaattacgagcagttcgccaaaacgaaaggagagcgcgagaggaaccagcaacgcgagttcgaggctcagcaggctaaacgagcccacgttcaggagttcattgaccggttccgttacaatgccaaccgagcctccagcgttcagagcaagataaaaatgctggagaaactgcctgatctcaagccaatggaaaaggaaggcgaggtgacgctgcgcttccccgacgtcgagccgctgaacccgccaatcctgcaaatcaacgaagtgtccttccgctacccgaacaccaacgacttccttttcaccaatgtttccctgagcgcctccctgcagtcgcgcatctgcatcgtgggtgagaacggcgctggaaaaacgacacttctcaagatcatcacgggtacgcttagcccaacccacggttccatccatctgcaccgaaacctcaagttcggatactttagccagcaccacgtcgatcagctcgatctcagggtttgcccagtcgaactgctgcagaataatttccccggtaaaccaatcgaagagtatcgcagaatgttgggtagttttggaattagtggtgatttggcacttcaaacaatacactcactatctggaggtcaaaagtcgagagttgcctttgcgcttatgtgcgcagccatgcctaatttcctagtactggatgagcctacgaatcatcttgacattgaatcaattgaagctctcggcaaagctatcaataactgtcaagctggcgtaatcttagtttctcacgacgaaaggctcattcgaatggtttgtgaggaattatgggtttgtggaggtggctctgttaaatgtatagaaggaggcttcgatgaatatcgtcaaattatcgagaaggagctcgaggcgtga

SEQ ID NO: 82663 - protein, 714 aa, Nasonia vitripennis
MAVCGSYIRSLFPTIDDELYQYVEGILDSSKDDFEDADEVYEAIGEVLHEVEERSENEVRLICKRLLEMLKGGTNGGIERRKNGVNKVLNVPIHMGSLASNLEEQVDDIKSIWVTTRDDVMKVDAKKLEKAEAKLKLKQDIRSGEVTSAKNTALPALESATVSQVISKKDNRMEAKGGTNRTNDIRIENFDVAYGDRVLLQGADLTLAFGRRYGFVGRNGLGKTTLLRMISSKQLQIPSHVRVLHVEQEVAGDDTSALESVLQSDQERSELLAREAELQAAIEKEGGKTNDALGEELAKVFEAMQMAEVEKAPARASTILSGLGFSVERQTWPTKAFSGGWRMRLALARALFSKPDLLLLDEPTNMLDIKAILWLEKYLQSWPTTLLVVSHDRNFLDTVPTDILYLKAQKIESYHGNYEQFAKTKGERERNQQREFEAQQAKRAHVQEFIDRFRYNANRASSVQSKIKMLEKLPDLKPMEKEGEVTLRFPDVEPLNPPILQINEVSFRYPNTNDFLFTNVSLSASLQSRICIVGENGAGKTTLLKIITGTLSPTHGSIHLHRNLKFGYFSQHHVDQLDLRVCPVELLQNNFPGKPIEEYRRMLGSFGISGDLALQTIHSLSGGQKSRVAFALMCAAMPNFLVLDEPTNHLDIESIEALGKAINNCQAGVILVSHDERLIRMVCEELWVCGGGSVKCIEGGFDEYRQIIEKELEA

SEQ ID NO: 82664 - DNA, 1914 bp, Nasonia vitripennis
  CDS (1)..(1914)
atgccgtccgacgccaagaagaagcagcagcagaagaagaaggaggctgcgaaggcaaggcaatccggtaagaagcccacgcagaccggacagcgcaacgaggaggacggctccatcaaggaggacagccctacacccggacaggatagaagacagaacggaaccaatggaaccgtcgcgctcagtgaagaggaagcgctgtgtgcgaaactcgaggctgacgccaggctgaacgcggaggctcgcgcctgcacgggttcgctggcctcccacccgcgtagtcgtgacatcaagatctccaacttctcggtcaccttccatggctgcgagctcatgcaggacacgatgctcgagcttaattgtggccggcgctacggtctgctcggtctcaacggctccggcaagtcaactctgctctcggttcttggcaaccgcgaagtacccatccccgatgccatcgacatcttccacctgaccagggagatgcccgccagcaacaaaactgccctgcagtgcgtcatggaggtcgacgaggagcgagtcagactcgagaaactcgccgaggaacttgtcgactgtcccgaagaggacgctcaggagcaactcatggacgtttacgaaagattagacgacatgagcgctgatacagcggaagcgcgcgccgctggtatactgcacggtcttggattcacttccaaaatgcagcagacacccactagagatttctcaggaggttggagaatgcgtatcgctcttgctagagctctgtacgtgaaaccgcatttacttctactcgatgaacccacaaatcatcttgatcttgatgcctgtgtatggttggaagaagagttgaagacgtataaacgaattttagttatcatatcccattcgcaagatttcctcaatggtatctgcacaaatatcattcatcttcacaaaaagcaactaaagtattatactggaaattacgaggcgttcgtcaagacgaggatggaactgttggagaaccaggctaagcagtacaactgggaacaggatcaaatcgcccacatgaagaattacattgctcgatttggtcacggttccgccaagttggctcgtcaagctcaatctaaggaaaagactttggcaaaaatggttgctcaaggactcacagaaaaggttacgagtgacaaaattttgaacttctatttcccatcatgtggaacgattccgccgcccgtcattatggtccagaacgttagtttccggtacagtgacgatggtccttggatttacaaaaatctagaattcggtatcgatttagatactaggctggctcttgtaggtcctaatggagctggtaagagtactctattgaagcttctgtatggtgacttggtgccatcaagcggtatgattagaaaaaatagccatcttcgaattggaaggtatcatcagcatttgcacgaacttcttgatttagatatgtctccactagattatatgatgaaagctttcccggatgtcaaggaacgcgaagagatgcgtaaaatcattggccgatacggattaacgggaagacagcaggtctgccctatccgtcaattgtccgacggacaaagatgtcgcgttgtgtttgcatggctggcctggcaagttcctcatctgctgttgatggacgaacctacgaatcacttggatatggaaaccattgacgccttagcagacgcaatcaatgaatttgatggtggaatggtgctagtttctcacgatttcagactgataaaccaggtggctgaagaaatttgggtgtgtgagaatggaactgtcaccaaatggcagggcaatattctcgactacaaggagcatctgaagactaaggttctcaaagataatcaaaagcgcgcaaaggacatgggccgacagaaatag

SEQ ID NO: 82665 - protein, 637 aa, Nasonia vitripennis
MPSDAKKKQQQKKKEAAKARQSGKKPTQTGQRNEEDGSIKEDSPTPGQDRRQNGTNGTVALSEEEALCAKLEADARLNAEARACTGSLASHPRSRDIKISNFSVTFHGCELMQDTMLELNCGRRYGLLGLNGSGKSTLLSVLGNREVPIPDAIDIFHLTREMPASNKTALQCVMEVDEERVRLEKLAEELVDCPEEDAQEQLMDVYERLDDMSADTAEARAAGILHGLGFTSKMQQTPTRDFSGGWRMRIALARALYVKPHLLLLDEPTNHLDLDACVWLEEELKTYKRILVIISHSQDFLNGICTNIIHLHKKQLKYYTGNYEAFVKTRMELLENQAKQYNWEQDQIAHMKNYIARFGHGSAKLARQAQSKEKTLAKMVAQGLTEKVTSDKILNFYFPSCGTIPPPVIMVQNVSFRYSDDGPWIYKNLEFGIDLDTRLALVGPNGAGKSTLLKLLYGDLVPSSGMIRKNSHLRIGRYHQHLHELLDLDMSPLDYMMKAFPDVKEREEMRKIIGRYGLTGRQQVCPIRQLSDGQRCRVVFAWLAWQVPHLLLMDEPTNHLDMETIDALADAINEFDGGMVLVSHDFRLINQVAEEIWVCENGTVTKWQGNILDYKEHLKTKVLKDNQKRAKDMGRQK

SEQ ID NO: 82666 - DNA, 2157 bp, Apis mellifera
  CDS (1)..(2157)
atggcaatctgtggagaatatattcgtagtcaatttcccacaatagatgatgatttgtatcaatatgtggaaggtattttagatagttctaaggatgatttcgaggatggagatgaagtttatgaagcaataggagaagtattacatgaggttgcagaaaaaacagaaaatgaggttaggcaaatatgtgtaaaattattggaaatgttaaaaggtaattcaaatgatgaaaatgttgaaaggagaaaaaatggagtgaacaaagtactaaatgctccagtacacttggggactatggctgctactttagaagctcaagtagaacaaataaaaagtatatgggttacgactagagatgatggcatgaaagtagatgctaaaaaattagaaaaggcagaagcaaaattacaacaaaaacaagaaaaaagaagtaataatgaattaagtggacgaattaatatcacaagtcaaggtatagaatctgctagtgcgagtcaaatgacaagtaaaaaagatagtagaatggaaacaaaaggcaatgtaaataagattcaggatattaggatagaaaattttgatatagcatatggagatagaatattattgcaaggagctgatttaacacttgcatttggtagacgttatggccttattggtagaaatggattgggtaaaactactttattaagaatgatatctagtaaacaattaagaataccatctcatataagagttttacatgtagaacaagaagtcgctggagataatacttctgcacttgaatctgtattagaatgtgaccaagaaagaagtatgttacttagtaaagaagcagaattacaagcaatgatagaaaaagatggtggtaaaactggggatgtattaggcgaagaattagctaaaatatatgaagcaatgcaattagcagaagtagacaaagcacctgctagagctagtgctattttatcaggactcgggttttctgttgaaagacaatcgtggccaactaaagccttctctggtggctggagaatgagattagctcttgcaagagcactattttctagacctgatcttttgttacttgatgaacctacaaatatgcttgatattaaagctattttatggttagagaaatatttacaatcatggccaactactttacttgttgtttctcatgacagaaattttttggacacggttcccactgatatattatatttacgtggacaaaaaattgaagcatatcgaggtaattatgaacaattttcaaaaactaaaggagaacgtgaaagaaatcaacagagagaatatgaagctcaacaagctaaaagagcacatgtacaggaattcattgatcgattccgatacaatgccaatcgtgcttctagtgtacaaagtaaaatcaagatgttagaaaaattaccagaacttaaaccaatggaaaaggaaggcgaagtaactcttcgttttccagatgttgaaccattaagtcctccaatattacaacttaatgaagtctcctttagttatattggaggaaatgataattcatatatattcagttctgtgaacttaactgctagcttacaatctcgcatttgtatcgtaggagaaaatggtgccggtaaaactactcttttaaaaatcataacaggtgcattaagtccaacacgaggtacagtgcatgttcatagaaatttgaaatttggatattttagtcaacatcatgtagatcaactagatatgcgcgtatgtccagttgaattattacaaaatcattttccaggaaaaccaattgaagaatatagaagaatgcttggaagttttggaataagtggtaacttagctttgcaatctatcaattctttatctggaggacaaaaatctagagtagcatttgcattaatgtgtgctgctatgccaaactttttagtacttgatgaacctacaaatcatttggatattgaatctattgaagctttaggtaaagcactaaatgcatgtcaggcaggtgttatattagtttcgcacgatgaaagattaattcgcatggtatgcactgaactttgggtatgtgctgaaggttctgttcgatgcatcgaaggaggttttgatgaatatcgtaagatcattgaaaaggaactcgaaatgtaa

SEQ ID NO: 82667 - protein, 718 aa, Apis mellifera
MAICGEYIRSQFPTIDDDLYQYVEGILDSSKDDFEDGDEVYEAIGEVLHEVAEKTENEVRQICVKLLEMLKGNSNDENVERRKNGVNKVLNAPVHLGTMAATLEAQVEQIKSIWVTTRDDGMKVDAKKLEKAEAKLQQKQEKRSNNELSGRINITSQGIESASASQMTSKKDSRMETKGNVNKIQDIRIENFDIAYGDRILLQGADLTLAFGRRYGLIGRNGLGKTTLLRMISSKQLRIPSHIRVLHVEQEVAGDNTSALESVLECDQERSMLLSKEAELQAMIEKDGGKTGDVLGEELAKIYEAMQLAEVDKAPARASAILSGLGFSVERQSWPTKAFSGGWRMRLALARALFSRPDLLLLDEPTNMLDIKAILWLEKYLQSWPTTLLVVSHDRNFLDTVPTDILYLRGQKIEAYRGNYEQFSKTKGERERNQQREYEAQQAKRAHVQEFIDRFRYNANRASSVQSKIKMLEKLPELKPMEKEGEVTLRFPDVEPLSPPILQLNEVSFSYIGGNDNSYIFSSVNLTASLQSRICIVGENGAGKTTLLKIITGALSPTRGTVHVHRNLKFGYFSQHHVDQLDMRVCPVELLQNHFPGKPIEEYRRMLGSFGISGNLALQSINSLSGGQKSRVAFALMCAAMPNFLVLDEPTNHLDIESIEALGKALNACQAGVILVSHDERLIRMVCTELWVCAEGSVRCIEGGFDEYRKIIEKELEM

SEQ ID NO: 82668 - DNA, 1899 bp, Apis mellifera
  CDS (1)..(1899)
atgtcaaccgataaaaaaatattagatgttacgaaaaaaatatctgacatggaaatggaggaaacggggaaaaaattaacacataaagaaaagaaaaaattaaaaaaacaacaagaatatgagaaaacgatggaaatgttaacgaaaactggtggtcagggtcatagtgaacttgaaacaaatttcactgtttctcagactcaaagtctacaacgaagtaatcaacaattagaaaatgctgttgatattaaggtagaaaatttcagtattgctgctaaaggaaaagaattgtttaccaatgctagtttattgattgcacaaggtagacgttatggattagtaggaccaaatggtcatggaaaaactactttacttcgtcatattgcaaaacgagcttttgctattccacctaatattgatgttttatattgtgaacaagaagttattgccgatgatactcctgctgtagaagtagtacttaatgcagatgtaaaatgtaaagatttaatgacagaatgtaaaaaattagaagaatttgtagaacaaggagataactctgttcaaaacagattgcaagaggtttatgaagaattaaagattattggtgcagattctgcagaaccacgagctagaagaattcttgctggtttaggatttaatcgtgctatgcaagatcgagcaacaaaaaatttttctggtggttggcgtatgcgtgtttcccttgctagagctcttttcttagaaccaacattattattacttgatgaaccaacaaatcatttagatttaaatgctgttatttggttagacaattatcttcaagcctggaaaaaaactttacttattgtttctcatgaccaaagttttctagataatgtatgtacagatataattcatttagatcaacaaaaattattttattacaagggaaattacagtatgtttaagaaaatgtatgagcaaaaaaaaaaagaaatgattaaagcatatgagaaacaagaaaaacgacttaaggatatgaaagcttcaggtcaaagtaaaaaacaagctgaaaaaaaacagaaagaagctttgactagaaaacaagaaaaaaatagaacaaagatgcaaaagcaagaagaagacaatgcacctactgaattattacaaaaacctagagaatatatagtaaaatttagttttcctgatccacctccattgcaaccaccaattcttggtcttcataatgtaatttttgcttatgaaggacaaaaaccattgtttattgatgttgattttggcatagatttaagttctagaatagctatagtaggacctaatggtgttggcaaatctacattcttgaaattattgacaggtgatttacaaccaataaaaggagaatccataaaaaatcatcgattaagaataggaaaatttgatcaacattctggtgaacatctaactgctgaagaatcaccagtggaatatttgatgcgtttatttgatttaccatatgaaaaagctagaaaacaattagggacatttggacttagttctcatgctcatacaattaaaatgaaagatttatcaggaggtcaaaaagcacgagttgcattagctgaattatgtttaaatgctcctgatgttgtaattttagatgaaccaacaaataatttagatatagaatctattgatgcattggctgatgctatcaatgaatataaaggaggagttattattgtttctcatgacgaacgtttaattagagacacagaatgttgcttatatgtaattgaaaaccaacaaattaatgaaattgatggagattttgatgattatagaaaagaattattggaaagtttaggagaagttgttaataatccaagtatagctgcaaatgctgctgttttgcaatga

SEQ ID NO: 82669 - protein, 632 aa, Apis mellifera
MSTDKKILDVTKKISDMEMEETGKKLTHKEKKKLKKQQEYEKTMEMLTKTGGQGHSELETNFTVSQTQSLQRSNQQLENAVDIKVENFSIAAKGKELFTNASLLIAQGRRYGLVGPNGHGKTTLLRHIAKRAFAIPPNIDVLYCEQEVIADDTPAVEVVLNADVKCKDLMTECKKLEEFVEQGDNSVQNRLQEVYEELKIIGADSAEPRARRILAGLGFNRAMQDRATKNFSGGWRMRVSLARALFLEPTLLLLDEPTNHLDLNAVIWLDNYLQAWKKTLLIVSHDQSFLDNVCTDIIHLDQQKLFYYKGNYSMFKKMYEQKKKEMIKAYEKQEKRLKDMKASGQSKKQAEKKQKEALTRKQEKNRTKMQKQEEDNAPTELLQKPREYIVKFSFPDPPPLQPPILGLHNVIFAYEGQKPLFIDVDFGIDLSSRIAIVGPNGVGKSTFLKLLTGDLQPIKGESIKNHRLRIGKFDQHSGEHLTAEESPVEYLMRLFDLPYEKARKQLGTFGLSSHAHTIKMKDLSGGQKARVALAELCLNAPDVVILDEPTNNLDIESIDALADAINEYKGGVIIVSHDERLIRDTECCLYVIENQQINEIDGDFDDYRKELLESLGEVVNNPSIAANAAVLQ

SEQ ID NO: 82670 - DNA, 2256 bp, Aspergillus nidulans FGSC A4
  CDS (1)..(2256)
atggaggcggaactgcaatctcagattcctggcctcgaccatgtgatcactgagtactccgtcggttatttgactcacgcgtcaagggcctatgttgaagatgcgaatgctccatctccggtggcagaagccgctgacatggtcacggagctgttagtttctgcctctggggacttctccgctcaaaatgaagaggccattcgcaatctcgtagagaagttcatttcttcccttagtgcttccgatggcgtcgatgcggagcgcaggcaaatgccctttgccgccaagaagctcgaccaggctattaatgttgggtctcagcgaaacatgtcctctactctgggtcttgctggaggaaatgttgacctcgagtctgttggtacgcgcaagatggaatctcgcgtcgaccgcaagaagctggagaaggcggaacgcaagatccgtgccaaacaggaaaagaagcagatgaaaacggtgcaatatgaagcatctcgtctgcttaacgagcccgatgcaaccatgtcgtacgaagagttcttcatggctgtcaatccccttcaactgggctccgactcccaggcaaagagcaaggatatcaaactcgaaggcattgatatctcagttggtggccaccgcattctttcagaagcctcccttacgctggcttacggccgtcgatatggtcttgttggtcagaacggtatcggtaagagtactctgctccgcgctttgagtcgcagagaagtagccattccaagccatatttcgattctccatgttgaacaggagattactggtgatgacactcctgcccttcaagcggtgttggatgcggatgtgtggcgcaagcggctacttgcggaccaagagaaaatctcaaaacaactcgcagccattgaagcggagcgatcttcaatggcagatacgtctacagacgcagctaggctcgatcatgagcgagagggactcgatatcacgctgaacgatatccattcgaagcttgcagaaatggagtcggacaaggccgaatcccgagcagccagcattctggctggtctgggtttctcccctgaacgccaacagtatgctaccaggacattctctggtggttggcgcatgcgtctggctctggctagagctctgttttgcgagcccgatttgctccttttagacgaaccttccaacatgttggatgtgccgtctatcacctttttatcaaattacctccaaggatatccaagcactgttctagttgtttctcacgacagagcgtttttgaatgaggttgccactgatatcgtccatcaacactctgaacgattagactattacaaaggagccaacttcgactccttctacgcaaccaaggaggaaaggaagaaacaggctaaacgcgagtatgagaagcaaatggctgaacgtgcgcatctgcaagcgttcattgataaattccgttacaatgctgccaaatcgtccgaggcccaatcaagaatcaagaagctggagaggatgcccgtattgacaccaccggaaagcgactatgttgtgcacttcaaattccccgaagtagagaagctctctccgccaattgtgcagatgaccgaagttgcgttcggatacacgaaagacaagcttctgctgaagaatgttgaccttgatgttcaactcgactcgcgtatcggtatcgttgggccgaacggtgctggtaaaaccacggtgctcaaattgctcactgggcagcttgaacctacttccggtctcatgtcacagcatccacggttgcgcatcggctactttgcgcagcaccacgtcgacgctctggatttgacgaccagtgctgtgagcttcatggccaaaacatatcctgggaaaacagatgaggagtaccgtcggcaccttggagcatttggtatcaccggtatgaccggcctccagcgcatggagttgctctctggaggtcaaaagtctcgtgttgctttcgcctgcttgtcattaacaaatccacacatccttgttctcgacgagccctctaaccatttggatattgaaggtatggacgcactgtctgaggcgctgcagaagtttgaaggaggtgttgtgatggtgtctcacgatgtgacaatgttgcggaatgtctgcaccagtctctgggtctgcgacaagggaacagtgcagaagttcgacggcactgttgacgcgtacaagaagaagattagcgcacaagcagacgaggctggcgtagcagcagctcattag

SEQ ID NO: 82671 - protein, 751 aa, Aspergillus nidulans FGSC A4
MEAELQSQIPGLDHVITEYSVGYLTHASRAYVEDANAPSPVAEAADMVTELLVSASGDFSAQNEEAIRNLVEKFISSLSASDGVDAERRQMPFAAKKLDQAINVGSQRNMSSTLGLAGGNVDLESVGTRKMESRVDRKKLEKAERKIRAKQEKKQMKTVQYEASRLLNEPDATMSYEEFFMAVNPLQLGSDSQAKSKDIKLEGIDISVGGHRILSEASLTLAYGRRYGLVGQNGIGKSTLLRALSRREVAIPSHISILHVEQEITGDDTPALQAVLDADVWRKRLLADQEKISKQLAAIEAERSSMADTSTDAARLDHEREGLDITLNDIHSKLAEMESDKAESRAASILAGLGFSPERQQYATRTFSGGWRMRLALARALFCEPDLLLLDEPSNMLDVPSITFLSNYLQGYPSTVLVVSHDRAFLNEVATDIVHQHSERLDYYKGANFDSFYATKEERKKQAKREYEKQMAERAHLQAFIDKFRYNAAKSSEAQSRIKKLERMPVLTPPESDYVVHFKFPEVEKLSPPIVQMTEVAFGYTKDKLLLKNVDLDVQLDSRIGIVGPNGAGKTTVLKLLTGQLEPTSGLMSQHPRLRIGYFAQHHVDALDLTTSAVSFMAKTYPGKTDEEYRRHLGAFGITGMTGLQRMELLSGGQKSRVAFACLSLTNPHILVLDEPSNHLDIEGMDALSEALQKFEGGVVMVSHDVTMLRNVCTSLWVCDKGTVQKFDGTVDAYKKKISAQADEAGVAAAH

SEQ ID NO: 82672 - DNA, 2310 bp, Ustilago maydis 521; identical to SEQ ID NO: 59999
  CDS (1)..(2310)

SEQ ID NO: 82673 - protein, 769 aa, Ustilago maydis 521; identical to SEQ ID NO: 60000

SEQ ID NO: 82674 - DNA, 1860 bp, Tribolium castaneum
  CDS (1)..(1860)
atgccttccgacgcgaagaaacgcgaacagcagcgtaaaaagggggctgcgaaggcgcgtcaagccggaaagaaggcccccaacaagaacgaagagcaagctgcgtcccagaacggtgattccatttcgcagaatggctcagtcgagctgagtgctgaagaagcgctttgcgcgaaactcgaagccgatgcgaggttgaatgctgaggcgagggcttgtacgggcagcttggcagtccatcccaagtcaagggacatcaaaatcgataacttttccattacttttcacggatgtgagatgctgcaagacgctatgcttgagttgaattgcgggagacggtatggattgttggggctgaatggcagtggaaagtcgactattctggcagtattagggaacagggaagttcccattcctgaacatattgatatttttcacttgactagggaaatgccagcgtcggataagtctgccttgcagtgtgttatggaagttgatgaggagagggtgaggctggagaagctggccgaggaattggtggcgtgtgaagatgatgaatcgcaggagcaactcatggacatctacgagcgtctggacgagatttcggctgacacggccgaagcccgtgcagccaacatcctccacggtttgggcttcaccaaagaaatgcaaagtaagaagaccaaggacttcagcggtggctggagaatgaggatagcgttagctcgcgctctttacgtcaaacctcatttgttacttttggacgaaccgaccaatcatctcgatcttgacgcttgtgtatggcttgaagaggaactcaaacattataagagaattttggttttaatttcgcactcacaggatttcctaaacggcgtttgcacaaacattatccacgttaataaaaaacgcttgaagtactatactggtaattatgacgcttttgttcgaactcgcatggagttgctagagaatcaaatgaagcaatacaattgggaacaagaccagatcaaccatatgaagaattatattgcaaggtttggacacggttcggctaaattagcccgtcaagctcaatctaaggaaaaaactctagccaaaatggtcgctgctggtctaactgaaaaagtagtcagtgataaaatcgttacgttttatttccctagttgtggaaaaattccgccgcccgtcatcatggtacaaaatgttagttttcggtatagtgatgacggtccttggatttatagaaatttggaatttgggattgatttggacacgaggctggcccttgttggaccgaacggtgccggaaaaagtactctgctgaaacttctttatggtgacttggtgcccaccgaaggcatgattagaaaaaactcgcatttgaggatcgcacgataccaccaacacctccacgaactcctagacctggacctctcccctctggaatacatgatgaagtcgttccctgaagtgaaggaaaaggaagaaatgcgtaaaatcatcggacgttacggtctaacaggccgtcagcaagtttgccccattagacaattgtcagatgggcaaagatgcagagtggtatttgcctggttggcttggcaagcccctcatttgctcctgtttgatgaacccaccaatcacttggacatggaaacaatcgacgctctagctgaagccatcaatgattttgaaggtggaatggtgctggttagtcacgatttcagactcatcagccaggtcgctaatgaaatttgggtttgcgagaaggagacttgcacgaaatggaacggaacaattctggagtataaggaacacttgaaatcgaagatcttgaaagagaatgataaacggaaataa

SEQ ID NO: 82675 - protein, 619 aa, Tribolium castaneum
MPSDAKKREQQRKKGAAKARQAGKKAPNKNEEQAASQNGDSISQNGSVELSAEEALCAKLEADARLNAEARACTGSLAVHPKSRDIKIDNFSITFHGCEMLQDAMLELNCGRRYGLLGLNGSGKSTILAVLGNREVPIPEHIDIFHLTREMPASDKSALQCVMEVDEERVRLEKLAEELVACEDDESQEQLMDIYERLDEISADTAEARAANILHGLGFTKEMQSKKTKDFSGGWRMRIALARALYVKPHLLLLDEPTNHLDLDACVWLEEELKHYKRILVLISHSQDFLNGVCTNIIHVNKKRLKYYTGNYDAFVRTRMELLENQMKQYNWEQDQINHMKNYIARFGHGSAKLARQAQSKEKTLAKMVAAGLTEKVVSDKIVTFYFPSCGKIPPPVIMVQNVSFRYSDDGPWIYRNLEFGIDLDTRLALVGPNGAGKSTLLKLLYGDLVPTEGMIRKNSHLRIARYHQHLHELLDLDLSPLEYMMKSFPEVKEKEEMRKIIGRYGLTGRQQVCPIRQLSDGQRCRVVFAWLAWQAPHLLLFDEPTNHLDMETIDALAEAINDFEGGMVLVSHDFRLISQVANEIWVCEKETCTKWNGTILEYKEHLKSKILKENDKRK

SEQ ID NO: 82676 - DNA, 2424 bp, Tribolium castaneum
  CDS (1)..(2424)
atgtctaaaaaacgcggaaacaaaaagaatttaaatttggaaagtgataacgaggacgaagggcttgttacgaaaggagaggccgaaaaaggtaacataacctcaaaaccgagtaagagtaaagcccccaaaaagggtaaaaagggcaaaaaagacgactggagcgatgatgacgatgataaaacggtctctctgattgataacgtggacgaggagattcaaccggtggcgaaaaagagtgcaaagaagaagtcgaaaaagaaggaacatgagtccggtagtgaagatgaagaagataaagtcgaggttaaggttgagaataaaaagaaagctggaaaaaaaggtaaaggtaaaaacgattggtcggataatgacagtgaagtggaactgcaaatatcggacgttgaggaagaaattcaaccggtgaagaaaagtagcaaaaaggttgctaaaaccaaaaagaagaaagatctgagtgaggaagatgaaatccttgaggaaccagttgaagagtcagacaaagaagaacctgacgaaatcgcggaaaaagtatcagaactgcaaataactgaagctaagaaggaaccagaagagaagaaactcacccacaaggagaagaaaaagctgaagaagcagcaagaatacgagaaacaaatggaaaccctccttaaaaaaggtggccaaggtcactcagaccttgacagtaacttcacagtctcccagtcgcaaaaaaccgccggacaattggcccaattagaaaatgccgttgatattaaaatcgaaaatttcagtatctcggctaaaggcaacgatttattcgtaaacgcgaatttgttaatcgccaacgggcgtcattacggtcttgtggggcccaatggtcacggtaaaacaacacttttgcgtcatattgcgcaacgggctttcgcgatacccccaaatatcgatattttgtattgtgaacaagaagtggtcgctgatgatttttcagcggttgaatcggtgcttaaatcggatgtgaaacggactgaattgttagaagaatgtaaaaaattagaggatgcgtttaataccggggatttgggcgttcaggaccggcttaatgaagtttatgccgaattgaaggccattggggcggattcggccgaacctaaggcgaggagaatcttagctggtctaggattcactaaagaaatgcaagatagagcaactaaaaatttttctggtggatggagaatgagagtgtcactagccagagcgttgtatatagaacccactttattacttcttgatgaaccaacgaatcatttagatttgaatgcagttatttggttggataattatttgcaagggtggaaaaaaactctacttatcgtttcacacgaccagtcattcttagataatgtttgtaatgaaattatccatttagataatcaaaagttgtattattacaaagggaattactcaatgtttaaaaaaatgtaccaacaaaaacgcaaagaaatgattaaagaatacgagaagcaggaaaaacgtttgaaagagttaaaggcacacggatcgtcgaaaaaacaagccgaaaagaaacaaaaagaggctttgacgcgaaaacaggagaagaacagaacgaaaatgcagaaacaagaggacgaaacagccccaactgaacttctacaaaaaccgaaagaatatttcgtcaaattttcatttccggaacctccgcctctacaacccccaattttggggcttcataacgtaacttttgcatattcgggccaaaaacccctcttccgaaacaccgacttcggtatcgatatgagcagcagagtggcaatagttggtccgaacggagtcggaaaatccacatttttgaaattattaaccggtgatttggacccgcaacaaggggaagtccggaaaaatcatcgtttgaggattggtcgttttgatcaacattcaggtgagcatttaacggccgaagaaacacccgctgaatatctgatgcgattgtttgatctgccgtacgaaaaatcccgaaagcaattggggacttttggtctagcgagtcatgctcacactatcaaaatgaaggacttgtccgggggacagaaagcacgagtggctttagccgaattgtgtcttaacgcaccggatgttctcattttggatgaaccgacgaataatttagatattgaatcgattgatgcactagctgaggccattaacgacttcagtggaggggttattatagtgagccacgacgaacgacttatacgtgaaactgattgcgccttgtacgtaatagaagaccagaccataaacgaattagacggcgacttcgacgactaccgcaaagagctcttggagagtctgggtgaagtcatcaacagcccaagtattgcagcaaacgctgccattgctcaataa

SEQ ID NO: 82677 - protein, 807 aa, Tribolium castaneum
MSKKRGNKKNLNLESDNEDEGLVTKGEAEKGNITSKPSKSKAPKKGKKGKKDDWSDDDDDKTVSLIDNVDEEIQPVAKKSAKKKSKKKEHESGSEDEEDKVEVKVENKKKAGKKGKGKNDWSDNDSEVELQISDVEEEIQPVKKSSKKVAKTKKKKDLSEEDEILEEPVEESDKEEPDEIAEKVSELQITEAKKEPEEKKLTHKEKKKLKKQQEYEKQMETLLKKGGQGHSDLDSNFTVSQSQKTAGQLAQLENAVDIKIENFSISAKGNDLFVNANLLIANGRHYGLVGPNGHGKTTLLRHIAQRAFAIPPNIDILYCEQEVVADDFSAVESVLKSDVKRTELLEECKKLEDAFNTGDLGVQDRLNEVYAELKAIGADSAEPKARRILAGLGFTKEMQDRATKNFSGGWRMRVSLARALYIEPTLLLLDEPTNHLDLNAVIWLDNYLQGWKKTLLIVSHDQSFLDNVCNEIIHLDNQKLYYYKGNYSMFKKMYQQKRKEMIKEYEKQEKRLKELKAHGSSKKQAEKKQKEALTRKQEKNRTKMQKQEDETAPTELLQKPKEYFVKFSFPEPPPLQPPILGLHNVTFAYSGQKPLFRNTDFGIDMSSRVAIVGPNGVGKSTFLKLLTGDLDPQQGEVRKNHRLRIGRFDQHSGEHLTAEETPAEYLMRLFDLPYEKSRKQLGTFGLASHAHTIKMKDLSGGQKARVALAELCLNAPDVLILDEPTNNLDIESIDALAEAINDFSGGVIIVSHDERLIRETDCALYVIEDQTINELDGDFDDYRKELLESLGEVINSPSIAANAAIAQ

SEQ ID NO: 82678 - DNA, 2121 bp, Tribolium castaneum
  CDS (1)..(2121)
atgaccacttgtagtgaatacattaaaaacgtgttccctttaattgacgacgacctcaagcattacgttgaaggagtcttacaaaacggtgctgatgatttccaagacagcgaagaggtgtacgaagccatcggtgaggtgttacaggaagtttccagtgacaaaaccgaagaagacatacggaacatatgcaacgagttgcacaatatgatgaaacctgacaaaagcaatgccaaaaacggccccacaaaggtgctaaacgcaccggtacacctggcttcaatggccgcaaacttggaaaataacatcggtgatatcaaaagtatttgggttatgcagcgtgacgacaccttgaaagtcgatgctaaaaaactcgaaaaagccgaggccaaattgcaggaaaagcaagaaaagcgctccaaagacgtcaaaaccgcagcccctgttaaactagagtccgcgacggcttctcaagtcaccagcaaaaaagagagcaaaatggaggccaaaggcaataataggactcaggacatacggatcgaaaacttcgatgtggcttacggcgaccgggttctcctgcaaggcgccgacttgatcctggccttcggccggcgctacggcctcgtggggcgcaacggcttgggaaaatcaaccctcctgaggatgatttcaaacggccaactgcgcatcccgtcccacatttcgattttgcacgtggaacaagaggtcataggtgacgacactttggccatccagagcgtgcttgagtgcgatacggtccgggaaagtttactcaaacgcgagaaggaaataagtgccgcggtcaactcgggaaatagcgacccggaattgtcgaatcagctgaccgagatctacgcccaacttcagaatatcgaagctgataaagccccagctaaggcgtcgattattttgaacgggttggggttcactcctgagatgcagcagagggagactaagacgttttctggcggctggaggatgaggcttgctttggccagggcgttgttttcgcgccccgatttgctgcttttggacgaaccgacgaacatgttggatattaaggcgattatttggctggagaattatttacagaattggccgacaacgttactagtggtttcccacgatcgaaattttctagatacggtcccgacggatattttgcacttgcattcgcaaaggatagatgcctacaggggaaattatgaacagtttgagaaaactaaaaccgagaaactaaaaaatcagcagagagagtacgaggcgcaaatgcagcacagacaacacgtccaagtgttcattgataagtttaggtacaatgccaacagagcggcctcagtgcagtcaaaaatcaaattgttggataaattacctgaattgaagccaatagaaaaggaaactgctgtagttttgaaattcccagataccgaacctctctcaccccccattttgcaacttaacgaagtttcgtttggttacaacaaagatagactcatatttaccaacgttaatctaggggctaccatggattccaggatatgtattgtcggtgacaacggtgctggtaaaaccaccctcctcaaaatcatcatgggcctcctgtccccatctgcgggcatgctccacgtccatcgaaacctaaaattcggctacttcagccagcaccacgtggaccaactcgacatgaacgtcaactcggtcgagctcctccaaagcacatatcccggaaaaccaatcgaggaatatagacgccagcttgggagttttggcgtctcgggcgacctcgccctccaaaccgtcgccagtttatcaggggggcaaaaatctcgagtcgcttttgcccgaatgtgcatgggtaacccaaatttcctcgtacttgacgaacccaccaatcatttagatatcgaaacaattgaagctttagggaatgcgatagtcaaattcaccggcggtgtgatacttgtgtcgcacgacgagcggcttattcgcaaagtgtgcaaggagttgtgggtttgtggtaatggctctgtgcgaagtatagaaggttttgatgagtacagacgacttgtcgaacaggaactcgaaagtcagtctaaataa

SEQ ID NO: 82679 - protein, 706 aa, Tribolium castaneum
MTTCSEYIKNVFPLIDDDLKHYVEGVLQNGADDFQDSEEVYEAIGEVLQEVSSDKTEEDIRNICNELHNMMKPDKSNAKNGPTKVLNAPVHLASMAANLENNIGDIKSIWVMQRDDTLKVDAKKLEKAEAKLQEKQEKRSKDVKTAAPVKLESATASQVTSKKESKMEAKGNNRTQDIRIENFDVAYGDRVLLQGADLILAFGRRYGLVGRNGLGKSTLLRMISNGQLRIPSHISILHVEQEVIGDDTLAIQSVLECDTVRESLLKREKEISAAVNSGNSDPELSNQLTEIYAQLQNIEADKAPAKASIILNGLGFTPEMQQRETKTFSGGWRMRLALARALFSRPDLLLLDEPTNMLDIKAIIWLENYLQNWPTTLLVVSHDRNFLDTVPTDILHLHSQRIDAYRGNYEQFEKTKTEKLKNQQREYEAQMQHRQHVQVFIDKFRYNANRAASVQSKIKLLDKLPELKPIEKETAVVLKFPDTEPLSPPILQLNEVSFGYNKDRLIFTNVNLGATMDSRICIVGDNGAGKTTLLKIIMGLLSPSAGMLHVHRNLKFGYFSQHHVDQLDMNVNSVELLQSTYPGKPIEEYRRQLGSFGVSGDLALQTVASLSGGQKSRVAFARMCMGNPNFLVLDEPTNHLDIETIEALGNAIVKFTGGVILVSHDERLIRKVCKELWVCGNGSVRSIEGFDEYRRLVEQELESQSK

SEQ ID NO: 82680 - DNA, 1878 bp, Bartonella henselae str. Houston-1
  CDS (1)..(1878): transl_table=11
atgttagtattgaatgatattacaatacggatagctgggcgtcttttaattagccgtgctaacattgctcttcctactggttcaaaaactggatttgttggctataatggcactggaaaatcaaccctttttcgcgccattacaggtgaaatatcacccgaaaacggcgatattattatgcccaaaagtacaaagattggtcacgttgctcaagaggcacccgcaaccgaacactctttgcttgcaactgtcttagccgccaacacagaacacgccaatcttctccatgaagcagaaagcgcaactgatcctctgcggattgctgccatttatgcacgcttagccgatattgatgcccatgctgcagaagcacgcgccggaaaaatcctctctggtttaggatttgattctcacacacaacagcgacctctctcatccttttccggcggatggcgtatgcgaattgcgctagcagctatactgtttactgagcctgatcttttactgctcgatgaaccaacaaattatctcgatattgaaggaactctctggctcactgagtatgtgcgtcaatacccccatacagtaatcataatcagtcatgatcgcgattttttaaataatacagttaattctatcatgcatctcgaaaataaccaacttactttttggcgtggtaattatgatcaatttgaacaacaaaaagctgaagttgttaaagtacaacaaaaacaaattgaaaaacaagaagtgcaacaaaaacatatggaagattttattgttcgttttcgtgctaaagcaagtaaagcgcgacaagcgcaatcgcgcctcaaagctctcgaaaagcttaagccccttacaacgtggaaaattcagcatgttcagccttttatctttccaaaagtagaaaagcctgtagcttctcctattattgcattatcaaacgtaagtgttggttatgaaacaggaaaaccaattttaaaagaattaaatttaagaattgataatgatgaccgtatcactctcttgggctcaaacggaaacggaaaatcaactcttgctaaattgctcgctggccgtctgaaagcggaaaaaggaacaatcactcttgctccacatctgaaaattgcttttttttctcaacatcaacttgatgatctgaaaccggaagaaaatgcaatagatcacatgcgtcatctcatgccaggaaaagcagacgctaaaatacgcgcagcagtcgctcgtatgggaatatcaacggaaaaaatgatgacaaaagccaaagagctttcaggaggtgaaaaagttcgcttgcttatgggacttactgtttttgaagggccccatcttcttattcttgatgaaccaaccaatcaccttgacattgatagccgtcaagaactgatacatgcactcaatcattttaatggagcagtaatacttattgctcatgaccgccaccttatcgaagcaacaatggatcgcttatggcttgtgaaaaataaaactgtccttccttatgaaggtgacatgcatacttaccgtaaagagattcttggactttcatccaaaaaagaaacaaatgtatccctcaaaaaacaactttccctttctaaaaatgatcaacgaaaaagcaacgctcaaaaacgttctagtcttgctccattacgtaagaaaattgtagaaaccgaagcattgatagagtaccttcataaacaaattgcacaacttgatgaagaacttatttctgcttcttttcataacaaaatacctgaaaaaataaaagaacgtgcccaaaaggctaaaaaattacaagaagctgaaacactctggtttacgttatctgatcaatatgaaacacaaatgatgcaaaaataa

SEQ ID NO: 82681 - protein, 625 aa, Bartonella henselae str. Houston-1
MLVLNDITIRIAGRLLISRANIALPTGSKTGFVGYNGTGKSTLFRAITGEISPENGDIIMPKSTKIGHVAQEAPATEHSLLATVLAANTEHANLLHEAESATDPLRIAAIYARLADIDAHAAEARAGKILSGLGFDSHTQQRPLSSFSGGWRMRIALAAILFTEPDLLLLDEPTNYLDIEGTLWLTEYVRQYPHTVIIISHDRDFLNNTVNSIMHLENNQLTFWRGNYDQFEQQKAEVVKVQQKQIEKQEVQQKHMEDFIVRFRAKASKARQAQSRLKALEKLKPLTTWKIQHVQPFIFPKVEKPVASPIIALSNVSVGYETGKPILKELNLRIDNDDRITLLGSNGNGKSTLAKLLAGRLKAEKGTITLAPHLKIAFFSQHQLDDLKPEENAIDHMRHLMPGKADAKIRAAVARMGISTEKMMTKAKELSGGEKVRLLMGLTVFEGPHLLILDEPTNHLDIDSRQELIHALNHFNGAVILIAHDRHLIEATMDRLWLVKNKTVLPYEGDMHTYRKEILGLSSKKETNVSLKKQLSLSKNDQRKSNAQKRSSLAPLRKKIVETEALIEYLHKQIAQLDEELISASFHNKIPEKIKERAQKAKKLQEAETLWFTLSDQYETQMMQK

SEQ ID NO: 82682 - DNA, 1935 bp, Acinetobacter sp. ADP1
  CDS (1)..(1935): transl_table=11
atgattcaactcgaccaattttcagttcgccgtggcggacgagtcctctttcaaaaagcatcgatgcaattgcatccaggctggaaaattggtttaactggtgtcaatggtgctggtaaatcgaccctattttctgcacttctgggtggaattgaatcggatagtggtagcttgagtcgtccgaatgtctggactgtggcacacatggcacaagaaattaaagcgctgaatatgaaagcgattgatttcgtcttgtctggcgatgaagagtactggaccattcagcatcagcttgaacatccagaacagcttagcgacaacgagttggctcacctttatagtcgttttgatgaaattaacggttatgcagcagcggctaaagcatcccagcttatggcaggtttaggtttttttgaatatcaatcgcaatatgatgttgccagcttctctggcggttggcggatgcggttgaatctggcgcgtaccctgatgagtcgctcagatttactcttactcgacgaaccaaccaaccatttggacttggacgcgattttgtggcttgaagactggttgaaagcctatgaaggaacactggttctgatttcgcatgaccgtgattttcttgatgccattactgatcatattttacatatcgaaaatcagcagttaacactttatacaggtaattattcaaccttcgaaaccacacgtgcagaacgtttggcgcagcaacagcaagcgtttgaaaaacagcaagagacgcgcgcgcacttacaaaaatatattgatcgttttaaggcacaagccactaaggctcgtcaagcacaaagccgtattaaacaattagaacgcatgcaagaactggcacctgcacatgtcgatacgcctttcacctttagctttcgtgaaccaagcaaaatgagctcgccgctgttggcacttgaacacgccgacattggttatggcgacaaattgattgtgaccaatgtcaatttgcaaattaccccgaccagccggattggtctgctcggaatgaacggcgcgggtaaatcgacactgattaaatctctggtgggtgatttggcgctattgcgtggcacacgttatgcctcagagctgctcaatatcggttactttgcccagcatcaaatggatgctttggatggatcagccagtccaatgctacaactgtcacgtattgcagataaaaaaatcagcgaagcaacactacgtgcttttctgggcagctttggttttagcggcgaacgcatggatacgccgagcgagagtttttcgggtggcgaacgtgctcgactggcactggcattgattgtctggcaacgtcccaatgttttaattttagatgaaccgaccaaccatctagatttagatatgcgtcatgcgctaaccatggcattacaggactttgaaggtgccgtggttttggtatcacatgagcgtcaattgatcgccagcgtctgcgatgagctgattctggttcataatggcagcagtcgcgattttgatggtgatctacatgattatgcgaactggttacgtcaggcacgtaatgacatgatgaagcaaggacaacagcctaccgcgcctattcaatctaaagttgaagcgcaacctgtcatctctaaactggacaaagaagcccaacgcaaagaagccgcgaaacgtcgcgaacaaacgcgtccgattcgtaaaaatattgaaaaatgtgaaagtcaggttgagcgcttacaaaaacgtttagcggaaatcgaaaccttactcggtgatagctcactttacgatgccgatcgtaaaaatgatttgttaaaactcatgaatgaacaaagcgattcaaaacaggaactggagcaggcggaagaacaaatgcttgaattgatgatgcaactcgaagagctcgaaagtttatttgattaa

SEQ ID NO: 82683 - protein, 644 aa, Acinetobacter sp. ADP1
MIQLDQFSVRRGGRVLFQKASMQLHPGWKIGLTGVNGAGKSTLFSALLGGIESDSGSLSRPNVWTVAHMAQEIKALNMKAIDFVLSGDEEYWTIQHQLEHPEQLSDNELAHLYSRFDEINGYAAAAKASQLMAGLGFFEYQSQYDVASFSGGWRMRLNLARTLMSRSDLLLLDEPTNHLDLDAILWLEDWLKAYEGTLVLISHDRDFLDAITDHILHIENQQLTLYTGNYSTFETTRAERLAQQQQAFEKQQETRAHLQKYIDRFKAQATKARQAQSRIKQLERMQELAPAHVDTPFTFSFREPSKMSSPLLALEHADIGYGDKLIVTNVNLQITPTSRIGLLGMNGAGKSTLIKSLVGDLALLRGTRYASELLNIGYFAQHQMDALDGSASPMLQLSRIADKKISEATLRAFLGSFGFSGERMDTPSESFSGGERARLALALIVWQRPNVLILDEPTNHLDLDMRHALTMALQDFEGAVVLVSHERQLIASVCDELILVHNGSSRDFDGDLHDYANWLRQARNDMMKQGQQPTAPIQSKVEAQPVISKLDKEAQRKEAAKRREQTRPIRKNIEKCESQVERLQKRLAEIETLLGDSSLYDADRKNDLLKLMNEQSDSKQELEQAEEQMLELMMQLEELESLFD

SEQ ID NO: 82684 - DNA, 1908 bp, Erwinia carotovora subsp. atroseptica SCRI1043
  CDS (1)..(1908): transl_table=11
atgattgttttctcttcgctgcaaattcgacgtggtgtacgcgttctgatcgacaacgcgacagcaacggttaatcccggccagaaagtgggtctggttggcaagaacggctgtggtaaatctacactgctgtcattactgaaaggtgaaatcagcgccgacggtggtagcgcgacattcccgcaaaactggtcactggcctgggtcaatcaggaaacacctgcattgaacaaacccgcgctggactacgtgattgacggcgaccgtgagtttcgccaactggaagccgcgttgcagaccgccaacgaagagaacaacggcaacgccattgctacgttgcacggcaagctggatgccattcaagcctggacaattcaggccagagcttcaagcctgctcaatgggttagggttttctcagccacagttgcaacagcctgtcagcgccttttccggcggctggcggatgcgtctaaacctggcacaggcactgatttgccgttcagacttgctgctgctggatgaaccgaccaaccacctcgatctggatgccgttatctggctggaaaagtggctgaaaaactacgctggtacgctagtcctgatctcgcacgaccgtgatttcctcgatccggtggtgaccaagattctgcatatcgaacagcagtcgctcaacgagtacaccggcaactactcctcatttgaacgccagcgtgccacccgtctcgcacagcagcaatcgctctatgagcaccagcaggagcgtgtcgcgcacctgcaaaactacattgatcggttccgcgcgcaagcaaccaaagccaagcaggcccaaagccggataaaaatgctggaacgtatggagatgattgcgccagcgcacgtcgataaccctttccgcttcagctttcgcaccccagaatcgttgcccaatccactcatgaagatggaaaaggtcagcgcaggctacaacgacaatctgattctcgaatccatcaaactcaatttagtgccgggttcccgcatcggactcctcggccataacggcgcaggtaaatccacgctgatcaagctgcttgctggcacgcttgctccgctgaaaggggaaatcgggctggcgaaaggcgttaaactcggttatttcgcccagcatcaattggagttcctgcgtgcggacgagtcaccattacaacatctggtgcgtctggcagagcgggaaacggaacagcagctgcgcgactacctcggcggcttcggttttcagggcgacaaagtcacagagatcaccgagcgcttctccggcggtgaaaaagcccgtctggtgctggcgctagtcgtctggcagcgtccgaatctcctgctgctcgacgaaccgaccaaccacctcgatctggatatgcgtcaggcgttgaccgaagcgttaatcgattttgaaggcgcgctggttgtcgtctcgcacgatcgacacctgatccgttcaaccacggacgatctctatctggtacacgaccagaaagtggagccgttcgatggtgatttggaagattaccaacagtggctggtcggcctgcaacgtcaggaaaatgcggccgatgaaacgccaaaagagaatgtcgccaacagtgcgcagggtagaaaagatcagaaacgccgcgaagccgagttgagaacacaaactcagccgctgcgtaagcagataaccaagcttgagcagcagatggaaaagctgggtgaaacgctggcagcgcttgaagcccgactggcggacagtgcaatttacgatatcagccgcaaagccgaactcaccgactgcctgcaacaacaaaccaaagttaaaatcgagctggaagatacagagatgtcctggctggacgcgcaggaacagctagaacagatcatgcagagcgaataa

SEQ ID NO: 82685 - protein, 635 aa, Erwinia carotovora subsp. atroseptica SCRI1043
MIVFSSLQIRRGVRVLIDNATATVNPGQKVGLVGKNGCGKSTLLSLLKGEISADGGSATFPQNWSLAWVNQETPALNKPALDYVIDGDREFRQLEAALQTANEENNGNAIATLHGKLDAIQAWTIQARASSLLNGLGFSQPQLQQPVSAFSGGWRMRLNLAQALICRSDLLLLDEPTNHLDLDAVIWLEKWLKNYAGTLVLISHDRDFLDPVVTKILHIEQQSLNEYTGNYSSFERQRATRLAQQQSLYEHQQERVAHLQNYIDRFRAQATKAKQAQSRIKMLERMEMIAPAHVDNPFRFSFRTPESLPNPLMKMEKVSAGYNDNLILESIKLNLVPGSRIGLLGHNGAGKSTLIKLLAGTLAPLKGEIGLAKGVKLGYFAQHQLEFLRADESPLQHLVRLAERETEQQLRDYLGGFGFQGDKVTEITERFSGGEKARLVLALVVWQRPNLLLLDEPTNHLDLDMRQALTEALIDFEGALVVVSHDRHLIRSTTDDLYLVHDQKVEPFDGDLEDYQQWLVGLQRQENAADETPKENVANSAQGRKDQKRREAELRTQTQPLRKQITKLEQQMEKLGETLAALEARLADSAIYDISRKAELTDCLQQQTKVKIELEDTEMSWLDAQEQLEQIMQSE

SEQ ID NO: 82686 - DNA, 1821 bp, Leifsonia xyli subsp. xyli str. CTCB07
  CDS (1)..(1821): transl_table=11
atggcgcatcttctgggggcggagtccctgcatcttgagtttcccacccgcgttgtcttcgactcggtttcgctcggggtcgacgagggcgaccgtatcggcatcgtcggccgcaacggcgacggcaaatcgagcctcctcgggatgctgtcgggccgcatcccgccagactccggccgggtgacggtgcgcggcggtgtccggatcggcgtgctcgaccaggcggacacgctcgcggacgacgagacgatcgggcacgctgtggtcggcgacgcacccgagcacgagtgggcgggcgacgctcgggtgcgggacgtgatcgccggtctgctcggcgacctgccgtgggaggcgcggctgagcagcctctccggcggtcagcgccgccgggtcgccctggcccagctactgacgggcgactgggatgtgctggctctggacgagcccaccaaccacctcgatgtcgaggcgatcgcctggctggccgagcacctgaagcggcgctggacggccaccgcgggcgggctgctggtcgtgacgcacgatcggtggttcctggacgaggtgtgtacggcgacgtgggaggtacacgaccggatcgtggagccgttcgagggcggctacgccgcctacatcctgcagcgcgtcgagcgcgaccgccaggcggcggcgatcgaggcccggaggcagaacatcgcgcggaaggagctggcgtggctgcgccgcggcgctcccgcccgcacatcgaagccgaagttccgcatcgacgcggccaacgcgctcatcgccgacgtccccgagatccgcgaccgggtctcactccagtcgctcgctgtctcccggctcggcaaagacgtggtcgacatcctgggcgcctcggccggctacggggaccgcgagatcctgcacgaggtggagtggcggatcgccccgggcgagcgcaccggcgtcctgggcgtcaacggggccggcaaatcgacgctgctgggcctcgtggcggggacggtcgagcccacctccggtcgcgtgaagcggagcaagacggtccgcgtcgcaaccctcacgcagcggatggacgaactcgaccagcaccgcgacgacccggtgcgcgtggtcgtctcgggcctgcgcaccagctacaccctcggcagcgactcgaaggcccaggagatcactccgggccagctgctggagcggatgggcttcgcctccgcgcagctctccaccccggtgaaggatctctccggcggacagcagcgccgcctccagctcctcctcatcctgatcgaccagccgaacgtcctcatcctggacgagcccaccaacgacctggacaccgacatgctcgccgcggtcgaggatctgctcgactcctgggcggggacgctgatcgtggtctcgcacgaccggtacttcctggagcgggtgacagaccagcagttcgcgatcctggaccggcggctgcggcacctgccgggcggggtggacgagtacctgcggctgcggaagaaccagcagcgccgggacgccgcgcgagcgtccgcacccgccgggggctcaggccccgcacctgccgccgccacgacagccgccccggcgctcagcggcggcgagctgcgggcggctcagaaggagctcgcctcgatcgaacgccgcctctccaagctcaccggccgaatcgacgcgaaacgcacagcgctcgccgaacgcgaccagtcggactacgtggggctgggcgaggagctgacggcgatcggcgagctggaacgggagaccgagcagcttgaggagcggtggctagagctgtcggagcaggtgtga

SEQ ID NO: 82687 - protein, 606 aa, Leifsonia xyli subsp. xyli str. CTCB07
MAHLLGAESLHLEFPTRVVFDSVSLGVDEGDRIGIVGRNGDGKSSLLGMLSGRIPPDSGRVTVRGGVRIGVLDQADTLADDETIGHAVVGDAPEHEWAGDARVRDVIAGLLGDLPWEARLSSLSGGQRRRVALAQLLTGDWDVLALDEPTNHLDVEAIAWLAEHLKRRWTATAGGLLVVTHDRWFLDEVCTATWEVHDRIVEPFEGGYAAYILQRVERDRQAAAIEARRQNIARKELAWLRRGAPARTSKPKFRIDAANALIADVPEIRDRVSLQSLAVSRLGKDVVDILGASAGYGDREILHEVEWRIAPGERTGVLGVNGAGKSTLLGLVAGTVEPTSGRVKRSKTVRVATLTQRMDELDQHRDDPVRVVVSGLRTSYTLGSDSKAQEITPGQLLERMGFASAQLSTPVKDLSGGQQRRLQLLLILIDQPNVLILDEPTNDLDTDMLAAVEDLLDSWAGTLIVVSHDRYFLERVTDQQFAILDRRLRHLPGGVDEYLRLRKNQQRRDAARASAPAGGSGPAPAAATTAAPALSGGELRAAQKELASIERRLSKLTGRIDAKRTALAERDQSDYVGLGEELTAIGELERETEQLEERWLELSEQV

SEQ ID NO: 82688 - DNA, 1923 bp, Yersinia pseudotuberculosis IP 32953
  CDS (1)..(1923): transl_table=11
atgattgttttttcctcgcttcaaattcgacgtggtactcgcgtcttgctggacaacgccacagctacgattaaccccggtcagaaagtcggcctggttggcaagaacggttgtggtaaatcgactctgctggcgttgctcaaaggcgaactgagcgccgatgggggcaatgtcacatttcccaataactgggcactggcctgggttaatcaggaaaccccggcactggatatcccggcgatagagtatgttatcgacggtgaccgcgaatatcgccagttggaggccgaacttcaggctgccaatgaaaaaaatgatggccatgccatcgcaaccgtgcacggtaagctggatgccatccatgcctggactatccaatcgcgtgcggccagtttgctccacgggctcgggttttctcaagaaaaactacagcaaccggtacgttcattttcgggtggctggcgtatgcgtcttaatctggcgcaggcgctggtttgccgctctgatttactgctcttggatgaaccaaccaaccacttggatttggatgccgtcatctggctggaaaaatggctgaaaagctacaccggtaccttggtattaatttcccatgaccgcgatttccttgatcctattatcgataagattttgcatattgaacagcaaacgctgaatgaatataccggtaactattcatcgttcgaacgccagcgcgccaccaaactgtcgcaacaacaatcgatgtatcagcatcagcaagaaaaagtggcgcatttacaaagttatattgatcgcttccgggcgcaagccaccaaagccaagcaagcccagagccgtatcaagatgctcgagcgtatggagctgattgcccctgcacatgtggataatccgttccacttcagttttcgtacaccagaaagcctgccagatcccttgctgcgcatggataaagtcagtgccggttacggggaaaacaccgtcttacagtccattaaactcaacctggtgcccggttcacgcatcggtctcttggggcgtaatggtgccggtaaatcaacgctgattaaattattggccgggacgttagaaccgcaaagcggtgagatcgccctgtccaaaggcattaaactcggttacttcgcccagcatcagttggagttcttacgggctgatgaatcaccgttgcagcatatgagccgcctggcccctaaagagtcagagcagcaattgcgcgattatctcggtggttacggctttcagggcgatcaggtgaccgacccaaccgcccgcttttccggtggagagaaggcgcgtttagtgctggcactgattatttggcaacggccgaatctgttactgctggatgagcccaccaaccatttggatttggacatgcgacaagccctgaccgaggctctgattgattttgaaggcgcattggtggtggtttcccatgaccgtcatttactgcgctctaccaccgatgacctctatctggtgcacgacggtaaagtggaacagttcgatggcgatctggaagattatcagcagtggctggtggattcacagcgccagcaaagccaacaggataatccggcgaaggagctatcgggcaacagcgcacaacagcgtaaagaccaaaaacgtcgcgatgctgaattccgcactcaaacgcagccactgcgtaagcagattatgacgctggaaaaacagatggataaactcagcactgagctggccgctatcgaagcacagttggcggattcagcactgtatgatattgcgcgcaaagcggacttgacccaatgcctactgcaacaaacgcaagtgaaatccaagctggaagagacggaaatgcagtggttagatgtgcaagaacagcttgaaatactgactaaagagtttagcgatgccgatatataa

SEQ ID NO: 82689 - protein, 640 aa, Yersinia pseudotuberculosis IP 32953
MIVFSSLQIRRGTRVLLDNATATINPGQKVGLVGKNGCGKSTLLALLKGELSADGGNVTFPNNWALAWVNQETPALDIPAIEYVIDGDREYRQLEAELQAANEKNDGHAIATVHGKLDAIHAWTIQSRAASLLHGLGFSQEKLQQPVRSFSGGWRMRLNLAQALVCRSDLLLLDEPTNHLDLDAVIWLEKWLKSYTGTLVLISHDRDFLDPIIDKILHIEQQTLNEYTGNYSSFERQRATKLSQQQSMYQHQQEKVAHLQSYIDRFRAQATKAKQAQSRIKMLERMELIAPAHVDNPFHFSFRTPESLPDPLLRMDKVSAGYGENTVLQSIKLNLVPGSRIGLLGRNGAGKSTLIKLLAGTLEPQSGEIALSKGIKLGYFAQHQLEFLRADESPLQHMSRLAPKESEQQLRDYLGGYGFQGDQVTDPTARFSGGEKARLVLALIIWQRPNLLLLDEPTNHLDLDMRQALTEALIDFEGALVVVSHDRHLLRSTTDDLYLVHDGKVEQFDGDLEDYQQWLVDSQRQQSQQDNPAKELSGNSAQQRKDQKRRDAEFRTQTQPLRKQIMTLEKQMDKLSTELAAIEAQLADSALYDIARKADLTQCLLQQTQVKSKLEETEMQWLDVQEQLEILTKEFSDADI

SEQ ID NO: 82690 - DNA, 1941 bp, Symbiobacterium thermophilum IAM 14863
  CDS (1)..(1941): transl_table=11
atggcgattctgaccgtgcaggggctcaccaagtactggggggttgacctgctcttcaaggatatctcgttcctgctgaacgagggcgagaagatggccctcgtgggccccaatggggccggaaagaccaccctgctgcgcatcctgctcggccgcatggagtacgacgaggggcggatcatcatgcccgccggtacccgggtggcttacctgagccaggaccccgagttcacccccggccggaccgtcttccaggaggcccggtcggtgttcagccatctggccaagtgggagcgggatctgcgggagctggaggcccggatgggggaggcggagtccgaggaggccctgcaggccgtcatggacgagtacacccgggtgacggcgctctacgaggcggccggcgcctacgacgcgccggcgcgcacacgggcggtgctcttcggcctcggcttcaccgaggcggacctggagaagccggtcgaggtgctgtcgggcggccagaaggtccgcctgggcctcgcgaagatcctgctggcggagcccgatctgatgctcctggacgagcccaccaaccacctggacctgcaggcggtggagtggctggagggctacttccggcaggtgaagtccgcggccatcctggtctcccacgaccggtacttcctggaccgggtgatcagccgcacgctggagatcgacagccacacctgcgacatgtaccacggcaactactcgtactacgtggaggagaagaagcggcggctggaggcccggctctccgcgtacgagcggcagcagcgggaggccgagcggctgcggaccttctacgagaagtggcggagcaacgccaaccgcaagggccaggcgatgtcccgcaagcggcagctggagaagatggagctcatggagcggccgcaggtgaagcggcgcacgatgagactgtcctttgatgtcgactacgagtcgggggacgacgtgctcgtcgtggaggggctggccaagtccttcggcgatcgcaccctgttccggaacgccaacctcaccgtgcagaagggcgaccggatcgccctggtggggcccaacggctccggcaagaccaccttcctgaagatcatccacggcctcgtgcagccgagcgccggctcctaccgctggggcgtcggcgtccagcggggctacttcagccaggacctggacgacctggacccgagccgcacctgcctggaggagatcatggcgctgccgggcttcacccggtacgacgcccactccctgctgggacagttccttttctccggtgaggacgccctgaagcgcatcggcgactgctccggcggcgagcgcaaccggctgatcctggccaagttgatggtgagcggcgccaacgtcctgctgctggacgagcccaccaaccacctggatctggagtccaagcaggtgctggaagaggcgctgcgggcctacccgggcaccgtgctgtttgtctcccacgaccgcttcttcgtggaccggatcgccacccacgtctgggagttcggccagcctgagggcatcgccgtctacgagggcaactacacggcgtaccgggaggagaaggagcggcaggcgctcctggcggcgcaggcggctgcggccgccggggcggacgggcgggccgagctgccgcggtcgggcgcaggccaggacggcgcggggcgcaggccggcgcgctcccgcaaggaagagcggaaggcggcggaagcggttcgccggctggaggccgagatccagcggctggagcagcggaaggccgagctggaggagcggatggccgacccggacatctaccggagcgccacgggccgggaggccgtcgcggaatacaacgctgtccgggacgagctggagcggctctacgtggagtgggaggagctcgcggcggagctggccggcggctga

SEQ ID NO: 82691 - protein, 646 aa, Symbiobacterium thermophilum IAM 14863
MAILTVQGLTKYWGVDLLFKDISFLLNEGEKMALVGPNGAGKTTLLRILLGRMEYDEGRIIMPAGTRVAYLSQDPEFTPGRTVFQEARSVFSHLAKWERDLRELEARMGEAESEEALQAVMDEYTRVTALYEAAGAYDAPARTRAVLFGLGFTEADLEKPVEVLSGGQKVRLGLAKILLAEPDLMLLDEPTNHLDLQAVEWLEGYFRQVKSAAILVSHDRYFLDRVISRTLEIDSHTCDMYHGNYSYYVEEKKRRLEARLSAYERQQREAERLRTFYEKWRSNANRKGQAMSRKRQLEKMELMERPQVKRRTMRLSFDVDYESGDDVLVVEGLAKSFGDRTLFRNANLTVQKGDRIALVGPNGSGKTTFLKIIHGLVQPSAGSYRWGVGVQRGYFSQDLDDLDPSRTCLEEIMALPGFTRYDAHSLLGQFLFSGEDALKRIGDCSGGERNRLILAKLMVSGANVLLLDEPTNHLDLESKQVLEEALRAYPGTVLFVSHDRFFVDRIATHVWEFGQPEGIAVYEGNYTAYREEKERQALLAAQAAAAAGADGRAELPRSGAGQDGAGRRPARSRKEERKAAEAVRRLEAEIQRLEQRKAELEERMADPDIYRSATGREAVAEYNAVRDELERLYVEWEELAAELAGG

SEQ ID NO: 82692 - DNA, 1929 bp, Mannheimia succiniciproducens MBEL55E
  CDS (1)..(1929): transl_table=11
atgatttttttttcaaatttaaccttaaagcgcggtctcaatcttttacttgaagaagcgaacgcaaccatcaatccaaaacaaaaagtcggtttagtcggtaaaaacggctgcggcaaatcttcgctcttttccttattaaaaaaagaaaatcaacccgagggcggtgagattaattatcccgccgactgggcggtatcctgggtgaatcaggaaacccctgcgctgaacatttccgcgttggattatgtcattgagggcgaccgcacttattgccggttacaaaaagaattgaagcttgccaacgaacataacgacggtaatgctatcgcccgcattcacggacaactcgacattattgacgcctggaccgttcaatcccgcgcctcggccttgttgcacggtctgggcttttcccaggaagaactcggtcgcccggtaaaatccttttccggcggctggcgcatgcgtttgaatttggcacaagcgctgttatgcccgtcggatttattattactggacgaacccaccaaccatttggacttagatgcggtgatctggttggaacgctggctggtgcaatatcagggcactttagtactgatttcccacgaccgggattttcttgatcctatcgtgaataaaattattcatattgaagataaaaaactcaatgaatacaccggcgattattcctcttttgaattgcaacgggcggaaaaactggcgcaacaaaacgcactgtttcgccaacaacaggacaaaatagcccatctgcaaaaatatatcgatcgtttcaaagccaaggccaccaaagcgaaacaagcgcaaagccgcatgaaagcgctggaacgcatggaacgtattgcgcccgcccatgtggataaccctttcaccttcgaatttcgcgaaccgctttctctaccgaaccctttggtaatgatcgataaagcttccgccggttacggtgaaggtgaaagtgcggtggaaattctgcaaaaaatcaaactcaatttggtacccggctcccgcatcgggttgctgggcaaaaacggcgccggtaaatccactttgatcaaattactggcgggcgaattaacggcgcgttcgggcgtcctacagttagccaaaggcgtgcagctcggttatttcgctcaacatcagttggatacgctgcgggctgatgaatccgcactctggcatttgcaaaaactggcgccgcaacaaacggaacaggaactgcgcaattatctcggcggttttgcctttcacggcgacaaagtgaaagatccggtaaagcaattttccggcggcgaaaaggcccgtttggtgcttgccttaattgtgtggcaacgtccgaatttactgctactggacgaacctaccaaccacctggatttggatatgcggcaggctttaacggaagccttagtggattatcagggatcactggtggtggtatctcatgaccgccatttattgcgtaacacggtggaagaattttatctggtacatgataaacaagtagaagaattcaacggtgatttggaggattatgccaaatggctgaatgacctcaacgttcaggaaaaaagtgcggtcaaaaatacggaagtttctaaagaatcaaataatgaaaattccggtcaaaaccgcaaagaacaaaaacgccgcgaagcggaattacgccagcaaaccgcgccgattcgtaaacaaattgcaaaatttgaaacggaaatggataaactgaccgctcagcttaccgaaattgaagttcgactggcggattccgggctttatcagacagaaaataaagaaaaactgaccgcacttttaacgcagcaggtacaaaccagaaaagcgctggaagaagcggaagctcattggctgactgcacaggaagaattggaaacgcttttggcggaatga

SEQ ID NO: 82693 - protein, 642 aa, Mannheimia succiniciproducens MBEL55E
MIFFSNLTLKRGLNLLLEEANATINPKQKVGLVGKNGCGKSSLFSLLKKENQPEGGEINYPADWAVSWVNQETPALNISALDYVIEGDRTYCRLQKELKLANEHNDGNAIARIHGQLDIIDAWTVQSRASALLHGLGFSQEELGRPVKSFSGGWRMRLNLAQALLCPSDLLLLDEPTNHLDLDAVIWLERWLVQYQGTLVLISHDRDFLDPIVNKIIHIEDKKLNEYTGDYSSFELQRAEKLAQQNALFRQQQDKIAHLQKYIDRFKAKATKAKQAQSRMKALERMERIAPAHVDNPFTFEFREPLSLPNPLVMIDKASAGYGEGESAVEILQKIKLNLVPGSRIGLLGKNGAGKSTLIKLLAGELTARSGVLQLAKGVQLGYFAQHQLDTLRADESALWHLQKLAPQQTEQELRNYLGGFAFHGDKVKDPVKQFSGGEKARLVLALIVWQRPNLLLLDEPTNHLDLDMRQALTEALVDYQGSLVVVSHDRHLLRNTVEEFYLVHDKQVEEFNGDLEDYAKWLNDLNVQEKSAVKNTEVSKESNNENSGQNRKEQKRREAELRQQTAPIRKQIAKFETEMDKLTAQLTEIEVRLADSGLYQTENKEKLTALLTQQVQTRKALEEAEAHWLTAQEELETLLAE

SEQ ID NO: 82694 - DNA, 1926 bp, Bacillus licheniformis ATCC 14580
  CDS (1)..(1926): transl_table=11
atgatgattttacaagtaaatcagctttcaaaatcgtttggagccgatacgattttaacgaatataaaactcgaagtcaggtctcgggaccggattgcggtcgtcggacgcaacggcgccggaaaatcgactcttctaaagattatcgcaggaaagctctcatacgaaaagggggacatcatcaaacctaaagatttgacgatgggctaccttgaccagcattccggcctcgattccaagctgacgcttaaagaggaattgctgtcggtatttgattttcttaaaaaaatggaaaaagaaatgcgcgcgatcgaggaaaagatggcgcaagccggaccggacaagcttgaatcattaatgaagacatatgacaggcttcagcaggagttcaaggacaaaggcggctaccaatatgaggcagaggtcagatccgtcatgcacgggctcggctttgcgggatttgacgactccgtccgcgttcaggatttaagcggaggccaaaaaacaagacttgccctcggaaaaatgcttttgacaaaacccgacctcctcattttggacgaaccgacaaaccacttggatatcgacaccctgacatggctcgaacaatatttgcaaagctacagcggagcgattttaatcgtttcccatgacaggtactttcttgacaaagtggttacccaagtttacgagattaccaggtcccaaagcaaaaaatatatcgggaactacagctcttatctccaattaaaagccgagcagctggaaagggaaacaaagctttacgaaaagcagcaggacgaaatcgccaagctgcaggatttcgtcgatcggaacttggcaagggcttcgacgacgaaacgggcgcagagcagacgaaagcagcttgaacggatggagatcatggacaaaccgcttggagatgaaaagtcggcgtcattccgctttgaaattacaaggcaaagcggaaacgatgtactgcgagtggaagacctgacggtaagctatcaggaccagcccccgcttctccgttcactggattttcgcattacccgcggggaaagcgttgcactagtcgggccgaacggaatcggcaagtcgacccttttgaaagcattgatccaaaagctgcagccggtgtcgggaacaatcgcgacgggctctcacgtctcaatcggatactacgaccaggaacaggctgaattgacgtcgtcaaaacgcgtgcttgacgagctttgggacgattatccggagatgaatgaaaaggatatcaggacctgcctcggcaacttcttgttctcgggagaagatgtattaaagcctgtacatgcattaagcggtggcgaaaaagccaggcttgccctcgccaagctgatgttgcaaaaagcgaacttccttattcttgatgagccgacaaaccatctcgacctggacagcaaggaagtcttggagaacgctttaatcgattacccgggaacgatattatttgtgtcccatgaccgctattttatcaaccggattgcgacaaaagtactggagctttctcgcgacaaagccgaagaatatttaggcgactacgattattacacggaaaaaaaagcgcagcagcttgaactgaaagaactagaaaaacagacggaagagcgtcagaaagccgcttccgaaaaaccgggcgcaaaaaagagctatgaagaagaaaaagagctgaaaagaaaagaacgccagcggcagcgcaggattgaagacatcgaaacaagaattacggccattgaagaacaaattgaaaagaatgaagagctcctatgcaatcccgacgtcttccaagaccacgagaaggttcaggaaatccactctgaaaatgaacagctgaatgaggagcttgaacagctgttatcagaatgggaaacactatctacaaatgaataa

SEQ ID NO: 82695 - protein, 641 aa, Bacillus licheniformis ATCC 14580
MMILQVNQLSKSFGADTILTNIKLEVRSRDRIAVVGRNGAGKSTLLKIIAGKLSYEKGDIIKPKDLTMGYLDQHSGLDSKLTLKEELLSVFDFLKKMEKEMRAIEEKMAQAGPDKLESLMKTYDRLQQEFKDKGGYQYEAEVRSVMHGLGFAGFDDSVRVQDLSGGQKTRLALGKMLLTKPDLLILDEPTNHLDIDTLTWLEQYLQSYSGAILIVSHDRYFLDKVVTQVYEITRSQSKKYIGNYSSYLQLKAEQLERETKLYEKQQDEIAKLQDFVDRNLARASTTKRAQSRRKQLERMEIMDKPLGDEKSASFRFEITRQSGNDVLRVEDLTVSYQDQPPLLRSLDFRITRGESVALVGPNGIGKSTLLKALIQKLQPVSGTIATGSHVSIGYYDQEQAELTSSKRVLDELWDDYPEMNEKDIRTCLGNFLFSGEDVLKPVHALSGGEKARLALAKLMLQKANFLILDEPTNHLDLDSKEVLENALIDYPGTILFVSHDRYFINRIATKVLELSRDKAEEYLGDYDYYTEKKAQQLELKELEKQTEERQKAASEKPGAKKSYEEEKELKRKERQRQRRIEDIETRITAIEEQIEKNEELLCNPDVFQDHEKVQEIHSENEQLNEELEQLLSEWETLSTNE

SEQ ID NO: 82696 - DNA, 1878 bp, Legionella pneumophila subsp. pneumophila str. Philadelphia 1
  CDS (1)..(1878): transl_table=11
ctgattagttcaagcttacggtataacatgcttacattgcgtcaaattactttatccagaggagataaaattttactcgataaggtcaatgtcagtctttatgaaaaacaaaaaattggccttatcggtcataatggatgtggaaaatcaacattatttgattttcttttaggtcaattatctcctgatactggagaatatctaattaatccacaactcagcatcagtcatttgtctcaacacatacctgatagcaatgaaaaagctttggattttgttcttgccggagatcaacaatacattaaattgctaaagcgcctttcagaagctgaaaaaaacggcgatgatgcagaggttttgcaatgtcacgaggaactctctcatactggtggttacagtaagcccgcgcaagcagcagttattatgtctggcttaggatttagtggaaatcaacagcaagagcccgttaacagcttttctggtggctggagaatgcgcttaaatcttgctcggtgcttaatgaaacccgccgatttactcctgcttgatgaacccacaaaccatttagacatggaagccatcttctggctggaacgctatttaaaacaaagtccaagtactattattcttatttcacatgatagagaatttcttgatgcctttgttactcatatattacatatagaaaatcgtaatctgacactttattcaggaaactatagcagctttgaaaaaactcatgcgcaacaactggctctgcaacaagcaatgcatgaaaagcaacaaaccaaaatcaaacatatgatgacttttgtaactcgttttaaagcgaaagcagccaaggccaaacaagcgcaaagtcgaatgaaagctatagaaaagatggaaataattgcagcagcccaagccgactcccctttttcttttgattttttcccttgtcctcgggcaggaaatcctttaattcaatgcaatcaagttgatgcaggatatatcaatcatcctccgattttgaaaaaaatcaaactctctcttaatcccggcgatagaattgcgctactgggacctaacggtgaaggaaaatcaaccttaattaaaacgcttacagcagatttgcccgtattaagtggagatattcatcgttctccacacttacaaataggctactacgctcagcatcaacttgagcaattaaactgtaaattaagtccggtagaaacactgcaaactctctcgccagaggtaagagaacaaaccatacgggattttttaggtgggtttaatttcagaggggacatggcggtacaatccattcagcacttttcaggtggtgaaaaagcccgcctggcattagcaagactggtttggctaaaacccaatcttcttttgctggatgagccaacaaaccatttggatcttggaatgcgctcagcaattgaattagcgctgcaaacttatgagggtgccttaattttgatttcgcatgaccgccatttgttaaaatcaagtgtggacaacttttatcttatttatcaaggaaaagtacaaccatttgaaggggatcttgatgattactatctctggctgcaaaccagaaattcagaaaaggaatccaaattagctacttccccaaatgaatataaagaaagaaaaagctatcaaaacaaattaaaaaagctggagcaactcattgagcactatcagaatcaattgcgccttcttgataagcagttagctgacgtttctctgtatgaagacacaaagcagaaaagcaaattggataatcttttgatggaacgagatatcgctcattcttctttaatgaagacagaagaagagtggttagaaatatgtaatgctctggaaaacctggagtaa

SEQ ID NO: 82697 - protein, 625 aa, Legionella pneumophila subsp. pneumophila str. Philadelphia 1
MISSSLRYNMLTLRQITLSRGDKILLDKVNVSLYEKQKIGLIGHNGCGKSTLFDFLLGQLSPDTGEYLINPQLSISHLSQHIPDSNEKALDFVLAGDQQYIKLLKRLSEAEKNGDDAEVLQCHEELSHTGGYSKPAQAAVIMSGLGFSGNQQQEPVNSFSGGWRMRLNLARCLMKPADLLLLDEPTNHLDMEAIFWLERYLKQSPSTIILISHDREFLDAFVTHILHIENRNLTLYSGNYSSFEKTHAQQLALQQAMHEKQQTKIKHMMTFVTRFKAKAAKAKQAQSRMKAIEKMEIIAAAQADSPFSFDFFPCPRAGNPLIQCNQVDAGYINHPPILKKIKLSLNPGDRIALLGPNGEGKSTLIKTLTADLPVLSGDIHRSPHLQIGYYAQHQLEQLNCKLSPVETLQTLSPEVREQTIRDFLGGFNFRGDMAVQSIQHFSGGEKARLALARLVWLKPNLLLLDEPTNHLDLGMRSAIELALQTYEGALILISHDRHLLKSSVDNFYLIYQGKVQPFEGDLDDYYLWLQTRNSEKESKLATSPNEYKERKSYQNKLKKLEQLIEHYQNQLRLLDKQLADVSLYEDTKQKSKLDNLLMERDIAHSSLMKTEEEWLEICNALENLE

SEQ ID NO: 82698 - DNA, 1941 bp, Burkholderia pseudomallei K96243
  CDS (1)..(1941): transl_table=11
gtgatccgtttcaatcagttcagcctcgcccgcggcacgaagccgctcttcgacgcgacctcgttcacgctgaatcccggcgagaaggcgggcctcgtcggcgcgaacggcgccggcaaatcgacgctcttcgcggtactgcgcggcgagctgcacgcggacgcgggcgacttctcgatgccgccggcatggcgcatcgcgcacgtgtcgcaggaaacgcccgccgtcgagcgcagcgcgctcgactacacattggacggcgacgccgcgttgcgcgcgatcgaggcgcgcatcgcgcaggcgtccgccgcgcacgacggcgcagccgaggccgacgcgcacgcggcgttcgcggacgccgacggctacaccgcgcccgcgcgcgccgaggcgctgctgctcgggctcggcttcacgctcgcgcagacgcgcgagcccgtcgcgagcttctcgggcggctggcgcatgcgcctgaatctcgcgcaggcgctgatgtgccgctcggatctgctgctgctcgacgagccgacgaaccacctggatctcgacgcgatcgtctggctcgaagactggctgcatcgctatccgggcacgctcgtcatcatctcgcacgatcgcgaattcctcgacgccgtctgcgacgtgacgctgcatctcgagaatcgccaggtgaagcgttacggcggcaactactcgcagttcgaagtgctgcgcgcgcagcagctcgaattgcagcaaagcgcatacgaaaagcagcagaagacgattgcgcatctgcagagcttcgtcgaccgcttcaaggcgaaggcgtcgaaggcgaagcaggcgcaaagccgggtgaaggcgctcgagaagatggagcggatcgcgcccgcgcacatcgcttcgccgttcacgttcgaattccgcacgcccgattccgcgccgaacccgatgctcgtgatggaaaacgtgcgctgcggctaccgcgcggacgacggcggcgaaatcccgatcgtcgagcgcgtcgcgctgtcgatccagaacggccagcgcatcggcctgctcggcgcgaacggccagggcaagtcgacgctcatcaagacgctcgcgggcacgctcgcgccgctgtcgggcgagctgcgcaccggccgcgggctcacgatcggctatttcgcccagcaccagctcgagacgctgcgcgaggacgattcggcgctcgcgcatctcgcgcgcctcgccccggacacgcgcgagcaggaactgcgcgactttctcggcggcttcaacttctccggcgagatggcgaccgcgccgatcgcgccgttctccggcggcgagaaagcgcggctcgcgctcgcgctgatcatctggcggaagccgaacctgctgctgctcgacgagccgacgaaccacctcgatctggaaacgcgccacgcgctcacgatggcactcgcgcaattcgagggcacgctgatcctcgtgtcgcacgaccgtcacctgctgcgcgcgacgaccgaccagttcatgctggtcgcgaagcaccggctgcagccgttcgacggcgatctcgacgactaccgcgactggctgctgcagcacgcggccgaacagcgcgcggcggcgaaggcagcctgcggcccggcgggcgacgccgacgacggcgcgcccgccgtgaatcgcaaggaccagaaacggcaggaagccgaagcgcgccagcgtctgtcgcagctgaagaaaccgctgcaggcgcggatcacgaagatcgagaaggaaatggagcggctgcacgcgcagaaggcggagctcgacgcgttcgtcgccgatccggcgagctatgcggcggaccagaagacgcggctcaccgaggcgatccgcaagctcggcgacgtcaacggccagctcgaaacgctcgaggcggactggctcggcgcgcaggacgagctggaaaaaatcgggtga

SEQ ID NO: 82699 - protein, 646 aa, Burkholderia pseudomallei K96243
MIRFNQFSLARGTKPLFDATSFTLNPGEKAGLVGANGAGKSTLFAVLRGELHADAGDFSMPPAWRIAHVSQETPAVERSALDYTLDGDAALRAIEARIAQASAAHDGAAEADAHAAFADADGYTAPARAEALLLGLGFTLAQTREPVASFSGGWRMRLNLAQALMCRSDLLLLDEPTNHLDLDAIVWLEDWLHRYPGTLVIISHDREFLDAVCDVTLHLENRQVKRYGGNYSQFEVLRAQQLELQQSAYEKQQKTIAHLQSFVDRFKAKASKAKQAQSRVKALEKMERIAPAHIASPFTFEFRTPDSAPNPMLVMENVRCGYRADDGGEIPIVERVALSIQNGQRIGLLGANGQGKSTLIKTLAGTLAPLSGELRTGRGLTIGYFAQHQLETLREDDSALAHLARLAPDTREQELRDFLGGFNFSGEMATAPIAPFSGGEKARLALALIIWRKPNLLLLDEPTNHLDLETRHALTMALAQFEGTLILVSHDRHLLRATTDQFMLVAKHRLQPFDGDLDDYRDWLLQHAAEQRAAAKAACGPAGDADDGAPAVNRKDQKRQEAEARQRLSQLKKPLQARITKIEKEMERLHAQKAELDAFVADPASYAADQKTRLTEAIRKLGDVNGQLETLEADWLGAQDELEKIG

SEQ ID NO: 82700 - DNA, 1905 bp, Methylococcus capsulatus str. Bath
  CDS (1)..(1905): transl_table=11
atgatcgagtttcacgaggtcaccctcaggatcggcggccggagcctgttcgagcacgcctcgttcaacatctttcccggccagaaagtcggcgtgaccggcgccaatggcgtcggcaagtccagcctgttcgggttggtgaccgggagcaggcagaccgacgccggcgaagtccggctcccgccgaactgggtcatcgcccatgtcgcccaggaaacgccatcggacgcacgggctgcgatcgaattcatcatggatggcgacaccgagctgcgggaagtcgaacgcgagatcgcctcggccgaagcctccggagacggccttgcactggcccgcgcccatgcccgttacgaggcgatcggcggctatcaggccagagccaaggccgggcggttgctcgccggtctgggcttcgcagcgggcgacggggagcgtccggtcgacgccttttctggcggctggcgcatgcggctcgcgctgggccgcgcgctgatgggccgctcggatctcctgctgctcgacgagcccaccaaccacctcgacctcgatgccgtgctgtggttgcaggaatggctggccggctatcccggcaccctgctgttcgtctcgcacgaccgcgacttcctcgacggtctggccgatcacatcctccacatcgaaaacggccaggtcattctcaacacgggcaatttttcggacttcgaacgggcgcgggcccagcggctggcgcagaaccaggcggcgttccgccggcagcaggccgagatcgcccgcctgcaggggttcgtcgaccggttccgtgccaaggcgaccaaggcgcgccaggcccagagccggctcaaactgctggcgaagatggaggtcatttcactggcccatgtggattcccccttcgaattcgccttccgcccgccggaaaaactgccccgtccgttgctgcagaccgaagacgtcacggtgggatacgaaggcgttacgctcttggaaaacatcgggctgtcgctgatgccgggcgaccgggtcggcctgctgggccgcaacggcgccggcaaatcgaccttgatcaagctgctggctgggctgcatccgccctcgagcggtgagcgccgggtttcaggcgaactgcgactgggatatttcgcccagcatcaggtggaactgctgcgccccgcggaaaacgccgtgttccatgtccagagtctggacgacaaggcttccgaaaaggacatccgcaatttcctcggcggcttcggcttcagcggcgaacggactttcgaacccgtcgccgggttttcaggcggcgagaaagcccgactggtgctggcccttctcgtctaccagcgacccaacctcctgttgctggacgaaccgaccaaccatctggatctggagatgcggctggcgctgatccgggcactgcaggatttcgaaggtgcggtcgtgctggtgtcgcacgacagctacctgctgcgcgcggtggcagatgatttcttcctggtcgccgatggcagggtcaccccattcgacggtgatctggacgactaccgcgcctggctccgcaaccgcgcctcctccaactccagcggcgccgaggaccaccgcgacgcggggacgtcccgccgcgaaacccggcgggccgatgccgaaagacgacagcggctccggcctttgcgcctgcagctcgaacgtgccgaagcggaactggagcactgctcgaagcggcgggaagaactcgaatcccagttggccgatcccggtctttatgccgaggaggccagggaccggctcaaacgcctgctgctggagaaggccgaggcggaagcttcactggtccgcgccgaagcggcctggtatgccgccagcgaagcgctggaacaggcacagctgcagaccgacatggcctga

SEQ ID NO: 82701 - protein, 634 aa, Methylococcus capsulatus str. Bath
MIEFHEVTLRIGGRSLFEHASFNIFPGQKVGVTGANGVGKSSLFGLVTGSRQTDAGEVRLPPNWVIAHVAQETPSDARAAIEFIMDGDTELREVEREIASAEASGDGLALARAHARYEAIGGYQARAKAGRLLAGLGFAAGDGERPVDAFSGGWRMRLALGRALMGRSDLLLLDEPTNHLDLDAVLWLQEWLAGYPGTLLFVSHDRDFLDGLADHILHIENGQVILNTGNFSDFERARAQRLAQNQAAFRRQQAEIARLQGFVDRFRAKATKARQAQSRLKLLAKMEVISLAHVDSPFEFAFRPPEKLPRPLLQTEDVTVGYEGVTLLENIGLSLMPGDRVGLLGRNGAGKSTLIKLLAGLHPPSSGERRVSGELRLGYFAQHQVELLRPAENAVFHVQSLDDKASEKDIRNFLGGFGFSGERTFEPVAGFSGGEKARLVLALLVYQRPNLLLLDEPTNHLDLEMRLALIRALQDFEGAVVLVSHDSYLLRAVADDFFLVADGRVTPFDGDLDDYRAWLRNRASSNSSGAEDHRDAGTSRRETRRADAERRQRLRPLRLQLERAEAELEHCSKRREELESQLADPGLYAEEARDRLKRLLLEKAEAEASLVRAEAAWYAASEALEQAQLQTDMA

SEQ ID NO: 82702 - DNA, 1839 bp, Azoarcus sp. EbN1
  CDS (1)..(1839): transl_table=11
gtgagcgacagtggccgggcgtcgtggagctgcgacgcctcgcgccgcccggattgcacgggccgcgcgggagccgttcgcatccgcgctggaagttttcgtaggaatggaatggcgcgctcgctatcatgcgccacgtccaacgaaagcccgcccatgatcacgctcaagaacgtcacgctgcgccgcggtgtcaaagtgttgctcgacaccgcttcggtcacgctcaatcccggtgaaaaagtcggcctcgtcggccgcaacggcgccggcaaatccagtctgttcggtctgctcaccggcgtgttgcacgaggacgccggcgattattccatcccgtcgcagtggcgcatggcacaggtcgcgcaggacatgcccgaaaccgcgcagagcgcgaccgacttcgtcatcgacggcgacacggtcctgctggccgcgcgcgccgaggtgcacgccgccgaggccagcgacgacggcatgcgcatggctcacgcctacatggcgctccatgacgccggcgcgcacgacgccgaagcgcgggcgcaggcgctgattctcgggctgggctttcgcagtgccgagctcacgaacccggtcaacagcttttccggcggctggcgcatgcgcctgcagctcgcgcgcgcgctgatgtgcccgtccgatctgctgctgctcgacgagccgacgaaccacctcgacctggacgcgctggtgtggctcgaagcgtggctcaagcgttacgccgggacgctggtcgtgatcagccacgaccgggagttcctcgacgcggtgacgcaggtcacgctgcacatcgacaacgcccggctggtgcgctacggcggcaactacagcgctttcgaggacatgcgcgccgagcagctggcgttgcagcagtcggcgctggcccggcagcaggaccggatcgcccatctgcagaaattcatcgaccgcttcaaggccaaggcgagcaaggcgaagcaggcgcaaagccgcgtcaaggcgctggagcggatggagcgcatcgcgccggtcctcgccgatgcggagttcaacttcgaattccaggaaccggccaacttgccgaacccgatgctgtcgatgcacgacgcgagcttcggctatccgccgccgccgggcgcggctgccggaaccgcccctgccgtcatcgtgcgccacatcaaccgctcagtgcacgccggccagcgcatcggcatcctcggcgcgaacggccagggcaagtcgacgctggtgaagacggtcgcccgcacgctcgacgtcctcggcggcgagatcaccgaaggcaaaggcctgaacatcggctatttcgcccagcaggaactcgacgtgctgcgcccgcaggacacgccgctcgagcacatggtacggctggcgaaagaaaccctcgccagcgggcgcagcggctggatcgccgcgcgcgaacaggacttgcgcaacttcctcggcacgttcaacttcagcggcgacatggtcaagcaggcggtcggcacgatgagcggcggcgaaaaggcgcgcctcgtgctgtgcatgatcgtctggcaacggcccaacctgctgctgctcgacgagccgaccaaccacctcgacctggcgacgcgcgaagcgctcagtgtcgcgctcaacgagttcgaaggcacggtcatgctcgtcagccacgaccgcgcgctgctgcgcgcggtgtgcgacgaattctggctggtcgcgcgcggcggcgtcgagccgttcgacggcgacctggacgactaccagcgctacctgctcgacgaggcacgacgatcgcgcgacacatcggtgggcgcgcggcagaaacgggccgcgtag

SEQ ID NO: 82703 - protein, 612 aa, Azoarcus sp. EbN1
MSDSGRASWSCDASRRPDCTGRAGAVRIRAGSFRRNGMARSLSCATSNESPPMITLKNVTLRRGVKVLLDTASVTLNPGEKVGLVGRNGAGKSSLFGLLTGVLHEDAGDYSIPSQWRMAQVAQDMPETAQSATDFVIDGDTVLLAARAEVHAAEASDDGMRMAHAYMALHDAGAHDAEARAQALILGLGFRSAELTNPVNSFSGGWRMRLQLARALMCPSDLLLLDEPTNHLDLDALVWLEAWLKRYAGTLVVISHDREFLDAVTQVTLHIDNARLVRYGGNYSAFEDMRAEQLALQQSALARQQDRIAHLQKFIDRFKAKASKAKQAQSRVKALERMERIAPVLADAEFNFEFQEPANLPNPMLSMHDASFGYPPPPGAAAGTAPAVIVRHINRSVHAGQRIGILGANGQGKSTLVKTVARTLDVLGGEITEGKGLNIGYFAQQELDVLRPQDTPLEHMVRLAKETLASGRSGWIAAREQDLRNFLGTFNFSGDMVKQAVGTMSGGEKARLVLCMIVWQRPNLLLLDEPTNHLDLATREALSVALNEFEGTVMLVSHDRALLRAVCDEFWLVARGGVEPFDGDLDDYQRYLLDEARRSRDTSVGARQKRAA

SEQ ID NO: 82704 - DNA, 1914 bp, Bacillus clausii KSM-K16
  CDS (1)..(1914): transl_table=11
atgattgtactacaatgcgtaaacgtatcaaaggcttttggcacagaacctgtgctcgaacaggtgaaattagaagtacaggcgagagatcgagtaggcttagtcgggcgaaacggggcaggcaaatcgacgcttttaaaaataattactggtgaaatgagccaagatacaggcgaaatcgtcattccaaagcaaacaacaattggctacctagcccagcatacggggcttgcttcaaaccgttctatttgggatgaaatgcttgaagtgtttgcgccgctgttggaaatggaacgctcactgcgtacgttggaacagcagatggccaatccagaggcgatagagcaaaacaattaccaaaaactgctttctgaatacgaccagttgcagctcgcttttaaagattccggtggctaccaatacgaagcggatattcgcagtgtgctggctggactccattttcatcattttgattacagcacagccatttctacgcttagcggcgggcagaaaacaaggctcgctttagccaaactgctcctttcgaaaccagacattcttgtccttgatgaaccaacgaaccatctggatatggaaacattgtcttggctcgaacagtatttggctaactactctggggcaattttagtcgtatcccatgaccgttattttctggacaaacttgtgacgaagacagtggaattatcacggggcaaaacgacaacttttcacgggaactatagccattacctcgacgaaaaagcaaaacggtatcaacaagcagtcaaacaatacgagaaacagcaagaggaagtcgccaaattagaaacatttattgccaaaaacattgcccgtgcttcgactacgaaacgagcccaaagccgaagaaagcaactcgaaaaaatggacatggttgatcgccctgatggcgataaatcagttgttttttcgtttaacatcaacaagcaaacaggaaacgacgtgctcaccatccgtgacttagctgtcggatacggacaagacacagtgtttgaaggcttgcatctttcattaacacgaggtgaatcagtcgggttaattggtgaaaatggagcaggcaaatcgacattattaaaagccattacccaacaactctccccacaaaaagggtcgatcatttacggcagcaatgtcgttattggctactacgatcaagaacaagcaaaactgtcgagcaacaaaaccgttttacatgaattatgggacgagtatcccactactcccgaaaaagacatccgcgcggtgcttggccggtttttatttactggcgacgatgtcctcaaacccgtttcctcactaagcggcggcgagaaagcccgtgtcgcactcgccaaattaatgatgcagcaagccaattttctcattttagacgagccgacaaaccatttggacttggatgctaaagaagtattggaagccgcactgctggactatccagggacaattttatttgtttcccatgaccgttactttattaatcgcctagcgacgcgaatcatcgaattggatcaaggtgacacaaatgtttatttaggcaattataatgattaccttgaaaagaaacggcaaaacgccgagcgtgctgctttgaagaaagaagaaaccttaacaaagcaggcagcggagacagatagaaattcgtttcagcttgataaagaggcgaaacgacaagagcggcaaaaacaacggcggattgaagcaatcgaaacagaactggaacaaattgaagcgtccatttccgctcttcacgaacagcttgctgacccagacgtttataccgatcatcaaaaagcgcaaacgatccaagccgaactcgagcaacaaaacaacgctctcgaagcgttaatggaagaatgggaaacactatcgacataa

SEQ ID NO: 82705 - protein, 637 aa, Bacillus clausii KSM-K16
MIVLQCVNVSKAFGTEPVLEQVKLEVQARDRVGLVGRNGAGKSTLLKIITGEMSQDTGEIVIPKQTTIGYLAQHTGLASNRSIWDEMLEVFAPLLEMERSLRTLEQQMANPEAIEQNNYQKLLSEYDQLQLAFKDSGGYQYEADIRSVLAGLHFHHFDYSTAISTLSGGQKTRLALAKLLLSKPDILVLDEPTNHLDMETLSWLEQYLANYSGAILVVSHDRYFLDKLVTKTVELSRGKTTTFHGNYSHYLDEKAKRYQQAVKQYEKQQEEVAKLETFIAKNIARASTTKRAQSRRKQLEKMDMVDRPDGDKSVVFSFNINKQTGNDVLTIRDLAVGYGQDTVFEGLHLSLTRGESVGLIGENGAGKSTLLKAITQQLSPQKGSIIYGSNVVIGYYDQEQAKLSSNKTVLHELWDEYPTTPEKDIRAVLGRFLFTGDDVLKPVSSLSGGEKARVALAKLMMQQANFLILDEPTNHLDLDAKEVLEAALLDYPGTILFVSHDRYFINRLATRIIELDQGDTNVYLGNYNDYLEKKRQNAERAALKKEETLTKQAAETDRNSFQLDKEAKRQERQKQRRIEAIETELEQIEASISALHEQLADPDVYTDHQKAQTIQAELEQQNNALEALMEEWETLST

SEQ ID NO: 82706 - DNA, 1992 bp, Dehalococcoides ethenogenes 195
  CDS (1)..(1992): transl_table=11
atgctaaatatccaaaatctttccaaatccttcggggtgcgcagcctttacaccggcgtaaacctgaatataggggcaagagaccggctggctctgcttgggccaaacggcagcggcaagaccaccctttttgaaatgattgccggtaggctggaagcggacgaaggtaaaattatcctccgccgcggcactacggtgggttatctggaacaggatatcaagcccagctccaaacagcccctgcttaaagctgtctccagtgcctctgaccgccttagctccctttcacacaaaatttccctgcttcagggggaactggccgaggaaaaagacggctctgaaaataaccgcctgatgaacgagctgggggagcttcagcactcatttgaggctctgggtggttataatgccgaacaggaagccaagctgatactggccgggctgggtttcaaaccggtagattttgaccgccccctgcatgagttttccggcggctggctgatgcgggctgaactggccaaactccttttcctcagcccggatatactcatactggacgagcctaccaatcaccttgacttagagtccacccgctggtttgaaagctacctcaaacagtatagcggctcggtgctctttaccagccatgaccgggcatttttaaactccatcgctaccaagatactgtcactggaagaccaaaaagcccgcctttactccggtaattatgacagctacctgcgggaacgtgaactccgcctgaaccagctggaaagccaggcccgccgccagcaggaacttattgataaagaaaccaagtttatagagcgcttccgttacaaagccaccaaagccagccaggtgcaaagtcggataaaaaagctggataagctgtctgcggtagctatcccccgccagaccaaaaaaatacactttaatttccccgaacccgaacgcagcgggcatgatgttataaaactaagaaacctcaccaagtcttacggtgacctggttatctaccaggggctggaactggtgcttgcccggggtgacaaggccgctctggtaggccctaacggtgccggcaaaaccaccctccttaagatactggccggggttatgccgtttgattcaggttaccgtaatctgggggcaaacgtaaacaccgcctattttgcccagtattatgtagagtctctaagccctgcaaataacctgatagaggagctggaaactattttaccggacgctcccgaacagcagctgcggggtatgctgggggcatttctcttcagcggggatgatgtaaaaaagaggatatcggtgctgtccgggggtgaaaaaacccgcttggccattgccaaaatgctgcttaagcccgccaatctggtactaatggacgaacccaccaatcatctggacatacccgcccgcgaaatactggcagacgcccttcaggcatacaaaggcactctgtgttttatcacccatgaccgcacccttatccgcgaagtggccaacaagattattgaagtacgtaacggcaaaatcagggtttttgaaggcgattatgatgcctatctggaatttgccgccgccaacccttttaaaggggaagcacccaaaaaccctgcaccggttatttctcaccgcccctcccccgttccggccgcactctcccagaaacagcgcaaaactctggaagggcagataagaaaccagcattataaagaaaccggggctttgaagaaggaaatatccgacacagaggctgaaataacaagcctggaacaacgcaaacaggaactggaaacactgcttgccgaccctgatttataccgcagcggccaaaaagcggccgatacatcagcggaatataaaaactgcaaggagcagctggtcactctgggtgataaatggctaaggctatgccagcagaacgatgccctcaaacagaaactggaagatgccctgaaggcactggataattag

SEQ ID NO: 82707 - protein, 663 aa, Dehalococcoides ethenogenes 195
MLNIQNLSKSFGVRSLYTGVNLNIGARDRLALLGPNGSGKTTLFEMIAGRLEADEGKIILRRGTTVGYLEQDIKPSSKQPLLKAVSSASDRLSSLSHKISLLQGELAEEKDGSENNRLMNELGELQHSFEALGGYNAEQEAKLILAGLGFKPVDFDRPLHEFSGGWLMRAELAKLLFLSPDILILDEPTNHLDLESTRWFESYLKQYSGSVLFTSHDRAFLNSIATKILSLEDQKARLYSGNYDSYLRERELRLNQLESQARRQQELIDKETKFIERFRYKATKASQVQSRIKKLDKLSAVAIPRQTKKIHFNFPEPERSGHDVIKLRNLTKSYGDLVIYQGLELVLARGDKAALVGPNGAGKTTLLKILAGVMPFDSGYRNLGANVNTAYFAQYYVESLSPANNLIEELETILPDAPEQQLRGMLGAFLFSGDDVKKRISVLSGGEKTRLAIAKMLLKPANLVLMDEPTNHLDIPAREILADALQAYKGTLCFITHDRTLIREVANKIIEVRNGKIRVFEGDYDAYLEFAAANPFKGEAPKNPAPVISHRPSPVPAALSQKQRKTLEGQIRNQHYKETGALKKEISDTEAEITSLEQRKQELETLLADPDLYRSGQKAADTSAEYKNCKEQLVTLGDKWLRLCQQNDALKQKLEDALKALDN

SEQ ID NO: 82708 - DNA, 1917 bp, Haemophilus influenzae 86-028NP
  CDS (1)..(1917): transl_table=11
atgattgtatttagtaatctgtccttaaaacgagggcaaacggagcttctcgaaaatgcttctgctaccattaatcctaagcaaaaagtcggcttggtggggaaaaatggttgtggaaaatcttcgctttttgccttattaaaaaaagaattaacgccagagggcggcgaggtaaattatccagcaaattggcgggtatcttgggtgaatcaagaaacgcctgcattggatatttctgcaattgattatgtaattcaaggggatcgtgaatattgccgtttgcaacaagagcttgaacaagcaaatgaatgcaatgacggtaacgccattgcacgtattcacgggcaattagaaaccttggatgcgtggacaattcaatctcgtgccgcttcgttattgaatggtttaggatttagtcaagaagaaacaacccagccagtgaaagccttttcgggcggttggcggatccgtttgaatttggcacaagctctgctttgtccatcagatttattattactggatgagccaaccaaccatttggatttggatgcggttatttggttagagcgttggctagtacaatatcaaggcaccttggtattaatttctcacgatcgtgattttctcgatccgattgtgacaaaaatcctccatatcgaaaatcagaagctcaacgaatacacgggcgattattcttcctttgaagtgcaacgagccactaaattggcacaacaaacagcgatgtatcgtcagcaacaacaaaagatttcccatttacaaaaatatattgatcgctttaaagccaaagccactaaagccaaacaggcacaaagccgtatgaaagcactagaaagaatggagctgattgcaccagcttatgtggataatccttttacttttaaatttcgtccaccgcaatccttgccgaatcccttagtgatgattgaacaggcaagtgcaggttatggcagcggagaaagtgcggtagaaattttaagtaaaattaaactgaatttagtgccaggttcgcgcattggtttactcgggaaaaatggtgcaggaaaatcaaccttgattaaacttttagcgggagaactgaccgcactttcaggcacagtgcagttggcaaaaggcgtgcagcttggctattttgctcagcatcaattagatactttacgcgcagacgaatctgctctgtggcatatgcaaaaactcgcaccagaacaaacggagcaacaagttcgagattatttaggcagttttgcgtttcacggcgataaagtaaatcaagcagtgaaatctttttctggaggagaaaaagctcgtttggtgttggctttgattgtttggcaacgcccgaatttattactacttgatgaaccgactaaccatttggatttggatatgcgtcaagcattaacggaagcattggtagattacgaaggttctttggtggtggtgtcgcacgatcgtcatttattacgcaataccgtggaagaattttatttagttcacgataaaaaagtggaagaatttaaaggcgatttagaagactatcaaaaatggctgaatgaacaaaatagcacatctgaaaataaagtttcggaaaaagtgggcgataatgaaaattcggttcaaaatcgtaaggaacaaaaacgccgtgaagcagagttacgccaacaaactgcaccattacgtaaaaaaatcacgcaattagaagaaaaaatgaataaattttcttctgagcttgcgaacatagaaaatcaactggcagatactgaattatataatgcggaaaataaagaaaaattgaccgcacttttggctcaacaagtggatgtgaagaaagcattagatgatgtagaaacggaatggatgactgcacaggaagaattggaagaaatgcttcaagcgtaa

SEQ ID NO: 82709 - protein, 638 aa, Haemophilus influenzae 86-028NP
MIVFSNLSLKRGQTELLENASATINPKQKVGLVGKNGCGKSSLFALLKKELTPEGGEVNYPANWRVSWVNQETPALDISAIDYVIQGDREYCRLQQELEQANECNDGNAIARIHGQLETLDAWTIQSRAASLLNGLGFSQEETTQPVKAFSGGWRIRLNLAQALLCPSDLLLLDEPTNHLDLDAVIWLERWLVQYQGTLVLISHDRDFLDPIVTKILHIENQKLNEYTGDYSSFEVQRATKLAQQTAMYRQQQQKISHLQKYIDRFKAKATKAKQAQSRMKALERMELIAPAYVDNPFTFKFRPPQSLPNPLVMIEQASAGYGSGESAVEILSKIKLNLVPGSRIGLLGKNGAGKSTLIKLLAGELTALSGTVQLAKGVQLGYFAQHQLDTLRADESALWHMQKLAPEQTEQQVRDYLGSFAFHGDKVNQAVKSFSGGEKARLVLALIVWQRPNLLLLDEPTNHLDLDMRQALTEALVDYEGSLVVVSHDRHLLRNTVEEFYLVHDKKVEEFKGDLEDYQKWLNEQNSTSENKVSEKVGDNENSVQNRKEQKRREAELRQQTAPLRKKITQLEEKMNKFSSELANIENQLADTELYNAENKEKLTALLAQQVDVKKALDDVETEWMTAQEELEEMLQA

SEQ ID NO: 82710 - DNA, 1944 bp, Pseudomonas fluorescens Pf-5
  CDS (1)..(1944): transl_table=11
ttgctaacgaagctggtagactccgccgccattatgattcgacttcagaacctgactttacagcgtggcccgcaacgtctgctagaagacgccgagctaaccctgcacgccggccagaaagccggcctgatcggtgccaacggcgccggcaaatccagcctctttgccttgctgcgcggtgagctgcacccggactcgggtgactgcttcctgccggccgactggcgcatcgcccacatgcgccaggaggtcgataccctcgagcgcctggcggtggactatgtgctcgacggcgacttgcgcctgcgccaggtgcagcgtgacctggccgctgcagaagcggcccaggacggcgccgcgcaagcgcgcttgcatgccgagctggacagcgccgacggttacaccgccgatgcgcgggcgcgcaagctgctggctggcctgggtttcaccaacgagcagatggaccgtcaggtcggcgacttctccgggggctggcggatgcgcctgaacctggcgcaggcgctgatgtgtccctcggacctgctgctgctcgacgaacctaccaaccacttggatctcgacgccatcatctggctcgaagagtggctcaagggttaccccggcaccttgctcctgatctcccacgaccgggacttcctcgatgccgtggtcgatcacgtggcccacgtcgaccagcgcaagatcaccctctatcgcggtggctacagcgccttcgaacgcgcccgtgccgagcgtctggcccagcagcagcaagcctacgagaagcagcaggcgcagcgcgcgcacatggaaagctacatcgcccgcttcaaggcccaggctaccaaggcccggcaggcacagagccggatcaaggccctggagcgcatggaggagctgtcggcggcccacgtcgattcgcccttcgatttcaccttccgtgagtcgacgaagatctccagcccgctgatcgacctctccgatgcccgcctgggctatggcgagcgtgcggtcctggagaaggtcaagctgcagctgactccgggcgcgcggatcggcctgctggggcccaacggcgccggcaagtcgaccctgatcaagaacctctccggcgaactccagccgctgtccgggcgcctgacccggggcgagaacaccgttgtcggttacttcgcccagcatcagctcgattccctggactccaaggccagccccttgctgcatctgcagcgcctggcgcccaccgagcgcgagcagaccctgcgcgacttcctcggcggcttcgacttccgcggcgcacggatcgacgagccggtgctgaacttctccggcggtgaaaaagcccgtttggccttggctctgattgcctgggagcggcccaacctgctgctgctcgacgaacccaccaaccacctggacctggagatgcgcctggccctgaccatggccctgcaagagttcagtggtgcggtgctggtggtctcccacgatcgccatctgctcaagagcaccaccgacaacttcttcctggtggccgacggcaaggtcgaagagttcgacggcgacctggacgactacacccgttggctggtggattaccgccagcgcaatgccccggtcagcaacacgccggtgaacccggacaagaccgacaagaaggcccagcgccaggccgccgcggcgttgcgtcagcaactggcaccgcacaagcgcgaggccgacaagctggaagccgagttgggcaaggtgcatgagcgcctggccaagatcgaggccagcctgggcgacagcggtttgtacgaggctgcgcgcaaggatgagttgcgggatctgctggccgagcaggccaagctcaagacccgtgagtccgagctggaagaagcctggatggaggccctggaactgctggaaagcatgcaggccgagctggaggcgctgtcctga

SEQ ID NO: 82711 - protein, 647 aa, Pseudomonas fluorescens Pf-5
MLTKLVDSAAIMIRLQNLTLQRGPQRLLEDAELTLHAGQKAGLIGANGAGKSSLFALLRGELHPDSGDCFLPADWRIAHMRQEVDTLERLAVDYVLDGDLRLRQVQRDLAAAEAAQDGAAQARLHAELDSADGYTADARARKLLAGLGFTNEQMDRQVGDFSGGWRMRLNLAQALMCPSDLLLLDEPTNHLDLDAIIWLEEWLKGYPGTLLLISHDRDFLDAVVDHVAHVDQRKITLYRGGYSAFERARAERLAQQQQAYEKQQAQRAHMESYIARFKAQATKARQAQSRIKALERMEELSAAHVDSPFDFTFRESTKISSPLIDLSDARLGYGERAVLEKVKLQLTPGARIGLLGPNGAGKSTLIKNLSGELQPLSGRLTRGENTVVGYFAQHQLDSLDSKASPLLHLQRLAPTEREQTLRDFLGGFDFRGARIDEPVLNFSGGEKARLALALIAWERPNLLLLDEPTNHLDLEMRLALTMALQEFSGAVLVVSHDRHLLKSTTDNFFLVADGKVEEFDGDLDDYTRWLVDYRQRNAPVSNTPVNPDKTDKKAQRQAAAALRQQLAPHKREADKLEAELGKVHERLAKIEASLGDSGLYEAARKDELRDLLAEQAKLKTRESELEEAWMEALELLESMQAELEALS

SEQ ID NO: 82712 - DNA, 2019 bp, Psychrobacter arcticus 273-4
  CDS (1)..(2019): transl_table=11
atgatcgaatttaaagacgttggtgttcgccgtgatggtcgtgagttgtttgcaggggcaagcttccagctacatccgggccacaaagttggcttaacgggcaataacgggaccggaaaatcgaccttatttgccttattattgacacgaatgggtaccggtgacaccgaagtgacgcttgataaaggtgaagtgagtatccctgatagttggcatgtggcgcatatggcgcaggaagttggcgcgaccacacagacggcgattgattatgtgctgagcggtgatgagcaatggtacgagattaacgccactttgaatgacctaagcagcgtcagcgatgagcagattggggtattgcatcagcagtttgatgaaattgatggttatcgtacaccgaccaaagccgcacaaatcatggcgggtttaggttttaataccaaccaacatgagctgccagtagaagggttttcgggtggctggcgcatgcgcttaaaccttgctaaaaccttgatgagccgtgcagatttgatgctacttgatgagccaaccaaccatttggatttggatgctatcttgtggcttgagacgtggattaatgcttttaccggtctagttatcgttatctcgcatgaccaaacgttcttggacaatacggttggtcatatcttgcacgttgagcagcaaaaaatcactctgtataccggtaactatcagcagtttattcgcacgcgtcacgagcgtatggcacagcagcagcaagcttttgagaagcaagaagcgaccaaagcacatttggatgactttattcggcgtttccgcgcaaaggccagtaaggcaaagcaagcgcagagccgtatcaagcagcttgagcgtatggctgagctgtcaccgatgatggcagacaatccgttttcgttccgcttttatgagccagctaacatgagctcgccgttgattgagttgaccgatgcagatattggctatagcgacacaccgctactttataatgccaatgtgcaagtcacccctgatactcgtatcgggctgctagggatgaatggcgcaggtaaatcgaccttgattaaagcattggtcggtgagcttggtgtattaacaggcagctataatgtctcagatacgctaaagctaggctatttcaaccagcatcaaatggatatccttgatcctaaggcaaccccgatagagatgttacgccgcttagcaggcaaaacttctgatgcgatgctacgttcgtttttaggtagctttgatttccgtggcgaccgtatcgataccatcagtgagctattctctggtggcgagcgtgcgcgcttaacgttagctttgattgtttggcaacgtccgaatgtgctggtactcgatgagccaaccaaccatttagacttacaaatgcgtcaagcgttgacgattgctttgcaaggctttgaaggggcagtggtactggtatcgcatgaccgtgagctgattgccaacgtctgtgatgagctatttttggtacatgatggccaaatcgatgagttcgatggtgatatcagcgactacggtaaatggcttgccgaaaagcgtaaacaagaaaactcgcaagataaaaataccagtaagaaaaaaagtaaaaaagagagtaagaagtttgtttcacgtgaaacaaatgccaattcagcaggcagccaagcaggcaagcaagtgggcaacagcgagtctcaacctgcgcttagtaaagatgcgcagcgcaagctggcggctgaacaacgcaaattaaccgcgcctatccgccgtgatatcgaaactacagaaaagaccttagcgaccattgatgaaaagctgctggttttagaagaaaaactggcgaatactgatctttatgaagaaagccgtaaggctgatttgatgacattgttgaacgagcaaaccatgctacagcagcaacatagtcaacatgaagaaaagttgctactggcaatgacaaccttggaagaaatggaagccagtatcggctaa

SEQ ID NO: 82713 - protein, 672 aa, Psychrobacter arcticus 273-4
MIEFKDVGVRRDGRELFAGASFQLHPGHKVGLTGNNGTGKSTLFALLLTRMGTGDTEVTLDKGEVSIPDSWHVAHMAQEVGATTQTAIDYVLSGDEQWYEINATLNDLSSVSDEQIGVLHQQFDEIDGYRTPTKAAQIMAGLGFNTNQHELPVEGFSGGWRMRLNLAKTLMSRADLMLLDEPTNHLDLDAILWLETWINAFTGLVIVISHDQTFLDNTVGHILHVEQQKITLYTGNYQQFIRTRHERMAQQQQAFEKQEATKAHLDDFIRRFRAKASKAKQAQSRIKQLERMAELSPMMADNPFSFRFYEPANMSSPLIELTDADIGYSDTPLLYNANVQVTPDTRIGLLGMNGAGKSTLIKALVGELGVLTGSYNVSDTLKLGYFNQHQMDILDPKATPIEMLRRLAGKTSDAMLRSFLGSFDFRGDRIDTISELFSGGERARLTLALIVWQRPNVLVLDEPTNHLDLQMRQALTIALQGFEGAVVLVSHDRELIANVCDELFLVHDGQIDEFDGDISDYGKWLAEKRKQENSQDKNTSKKKSKKESKKFVSRETNANSAGSQAGKQVGNSESQPALSKDAQRKLAAEQRKLTAPIRRDIETTEKTLATIDEKLLVLEEKLANTDLYEESRKADLMTLLNEQTMLQQQHSQHEEKLLLAMTTLEEMEASIG

SEQ ID NO: 82714 - DNA, 1926 bp, Colwellia psychrerythraea 34H
  CDS (1)..(1926): transl_table=11
ttgattatcgccacagacttaagtttagatcgaggggctaaaaacctaataaaatcatctagctttactatacaccctaaccacaaggttggcttagtaggcagtaatggctgtggaaaatcatctcttttcgccgcactattaggtgacttatcacctgactctggcgatttagctttaccaacaagttgggatattgccaccgtaaggcaagaaactccttcgttagagcaaacggcacttgattacgtgatggatggcgataaagaatttcgccaattagagcacgagcttgaacaagcccgcataatggataacggtaacctcgaagccactattatcaataaaatagataccatcagcggatacagtttaccagctcgcgctggtgagttgttgcatggtttaggttttttacaatcacaacttgataatccagtgaaagacttttctggtggttggcgcatgcgattaaacttagcccaagcgctaatatctcgagctgacttgttattactcgatgaaccgaccaaccatttagacttagatgcagttatctggctacaacgatggttaaaacgctttaccggtaccttagtcctcatttcacatgaccgtgactttctagatacggttattggtcaaatattacatattgagcatcagcgcgctaaattatacagcggcaactataccgcttttgaacgccaacgccgcgaacatttagcacaacaagacgcacagtttcaaaagcagcaaaaagaagctgcacatctaaccgcttttgttgatcgttttcgcgcgaaagccagtaaagcaaaacaagcacaaagtcgattgaagcgtttagaaaagttacctgatttagcgccagcgcatgttgatagccaatttaccttcagctttgcagagcctgaaagtttaccctacccacttttatcacttgataaaagtcagtgtggttaccctaaatctgatcatggtgagcaggcaattattctagatgacgttggcttaacattaatacctggtagccgcattggtttattaggcagaaatggcgcagggaaatcaaccttaattaaatcccttgccggtgaacttgccttacttggtggtgaacgttactgcgcacaagacttaaccgtaggttatttttctcagcatcaattagagcaattgcatgcgccatcgagtcctgttgatcatattttacgtgctaaacctgctttaggtgaaccacaagcccgaacctttttaggaaagttcggttttagtggcgaccaagcgttatcacaagtttcaaccatgtcaggtggtgaaaaagcgcgtttagtactggctttgattgttttagaaaaaccacagttattattactagatgaaccgaccaaccatttagatttagaaatgcgccaagcattggtgatggcattacaagattttggcggcgcgattattttgattgctcatgataggttcttattagagtcatgtgttgatgaattttatcttgttgccaacggccgagtgagtgattttagtggcaatatcgatgattaccagcagtggttaaatgatgataaaaaacaagcgataaaatcaatcaaaaccgatcaacaaagcggtgataaaggtttatataaaaaacaacttcgtcagcaacaagcggagctaagaaaaaaatctgcccctatgcgcaaagaagctgataaattagagaaaaaggttcatcagtggcaagaagagctaaccaagattgaagctttattaagtgacagtgatatttatcaatcagagcgtaaagctgaactaacagacttactgaaaaaacaagctaacttgaaaggtgatattgaagaaaatgaaatgctatggcttgaactagccgagcagattgaagagatgatgtcagtcactgattga

SEQ ID NO: 82715 - protein, 641 aa, Colwellia psychrerythraea 34H
MIIATDLSLDRGAKNLIKSSSFTIHPNHKVGLVGSNGCGKSSLFAALLGDLSPDSGDLALPTSWDIATVRQETPSLEQTALDYVMDGDKEFRQLEHELEQARIMDNGNLEATIINKIDTISGYSLPARAGELLHGLGFLQSQLDNPVKDFSGGWRMRLNLAQALISRADLLLLDEPTNHLDLDAVIWLQRWLKRFTGTLVLISHDRDFLDTVIGQILHIEHQRAKLYSGNYTAFERQRREHLAQQDAQFQKQQKEAAHLTAFVDRFRAKASKAKQAQSRLKRLEKLPDLAPAHVDSQFTFSFAEPESLPYPLLSLDKSQCGYPKSDHGEQAIILDDVGLTLIPGSRIGLLGRNGAGKSTLIKSLAGELALLGGERYCAQDLTVGYFSQHQLEQLHAPSSPVDHILRAKPALGEPQARTFLGKFGFSGDQALSQVSTMSGGEKARLVLALIVLEKPQLLLLDEPTNHLDLEMRQALVMALQDFGGAIILIAHDRFLLESCVDEFYLVANGRVSDFSGNIDDYQQWLNDDKKQAIKSIKTDQQSGDKGLYKKQLRQQQAELRKKSAPMRKEADKLEKKVHQWQEELTKIEALLSDSDIYQSERKAELTDLLKKQANLKGDIEENEMLWLELAEQIEEMMSVTD

SEQ ID NO: 82716 - DNA, 1956 bp, Pseudomonas syringae pv. phaseolicola 1448A
  CDS (1)..(1956): transl_table=11
gtgatccacctgttcaggacgaagctggtagactccgccgccattatgattcgacttcaaagccttaccttacagcgtggtccgcaacgtctgctagaagacgccgagctgaccctgcacgccggccataaagccggcctgatcggtgccaatggcgccggtaaatccagcctgttcgccttgctgcgtggcgagctgacgcccgatgcgggtgactgcctgctgcccgccgactggcgtatcgcgcatatgcgtcaggaggtcgacacccttgagcgcctgggcgtggactacgtactcgacggcgacgagcgcctgcgcgaggttcagcgtctgctggccgaggcggaagccgcgcaggacggcgctgctcaggcgcgtctgcattcggagctcgacagcgccgacggttacaccgcagatgcgcgggcacgcaagctgctggcagggttgggcttcaccaacgaacagatggaacgtcaggtcggcagtttctccggcggctggcgtatgcgcctgaacctcgcgcaagcgctgatgtgcccatcggacctgttgctgctcgacgaaccgaccaaccacttggacctggacgccattctttggcttgaagactggctcaaaagctaccctggcaccttgctgctgatttcccacgaccgggattttctggacgctgtggtcgatcacatcgcccatgtcgagcaacgcaagatcacgctttaccgtggcggctacagcgctttcgagcgcgctcgtgccgaacgtctggcccagcagcaacaggcctacgagaagcagcaggcgcaacgcgcgcacatggaaaaatacatcgcgcgcttcaaggcccaggccaccaaggcccgtcaggcccagagccggatcaaggcactggagcgcatggaagagctgtccgccgcgcacgtcgattcgccgttcaacttcgttttccgtgagtccgacaagatctccagcccgttgctggatctgtcagacgcgcgtctgggttacggcgacaagaccatcctggagaaggtcaagctgcaactcacgccgggcgcgcgcatcggcctgctgggccccaacggcgcgggcaagtcgacgttgatcaaaaatctggctggcgagcttgagccgcagagcggtcgactggttcgaggcgaaaacctcaccgtgggctactttgcccagcatcagcttgactcactggacgccaaggcgaccccgttgctgcacttgcagcgtctggcaccgactgagcgtgaacagacgctgcgcgacttcctcggcggcttcgatttccgtggcgcacgtctggatgagcccgtgctgaatttctccggtggcgagaaagcccgcttggcgctggcactgatcgcctgggaaaagcccaacctgttgctgctcgatgaaccgaccaaccacctcgacctggagatgcgcctggcgctgaccatggccttgcaggagttcggtggtgcggtactggtggtgtctcacgatcggcacttgctcaagagcaccaccgatgacttcctgctggtggctgacggccgcgtacaggagttcgacggcgatctggatgactacacgcgctggctggccgattaccgcctgcgcaacgcgccggtcagcgccacgccagtcaacgccgacaagactgacaagaaagcccaacgtcagcaggcagcggccttgcgtcagcaactggcgccacacaagcgtgaagccgacaagctggagcgtgaccttgggctggtgaatgaaaaactcgccaaggtcgaggaagcgctggcggacagcaccaactacgaggcggccaacaaggacaaactgcgcgacctgctggccgagcaggccaagctgaaagtgcgtgagtccgagctggaagacgcctggatgcaggcgctggaactgctggagtccatgcaggccgaactggaagcattgtcgtga

SEQ ID NO: 82717 - protein, 651 aa, Pseudomonas syringae pv. phaseolicola 1448A
MIHLFRTKLVDSAAIMIRLQSLTLQRGPQRLLEDAELTLHAGHKAGLIGANGAGKSSLFALLRGELTPDAGDCLLPADWRIAHMRQEVDTLERLGVDYVLDGDERLREVQRLLAEAEAAQDGAAQARLHSELDSADGYTADARARKLLAGLGFTNEQMERQVGSFSGGWRMRLNLAQALMCPSDLLLLDEPTNHLDLDAILWLEDWLKSYPGTLLLISHDRDFLDAVVDHIAHVEQRKITLYRGGYSAFERARAERLAQQQQAYEKQQAQRAHMEKYIARFKAQATKARQAQSRIKALERMEELSAAHVDSPFNFVFRESDKISSPLLDLSDARLGYGDKTILEKVKLQLTPGARIGLLGPNGAGKSTLIKNLAGELEPQSGRLVRGENLTVGYFAQHQLDSLDAKATPLLHLQRLAPTEREQTLRDFLGGFDFRGARLDEPVLNFSGGEKARLALALIAWEKPNLLLLDEPTNHLDLEMRLALTMALQEFGGAVLVVSHDRHLLKSTTDDFLLVADGRVQEFDGDLDDYTRWLADYRLRNAPVSATPVNADKTDKKAQRQQAAALRQQLAPHKREADKLERDLGLVNEKLAKVEEALADSTNYEAANKDKLRDLLAEQAKLKVRESELEDAWMQALELLESMQAELEALS

SEQ ID NO: 82718 - DNA, 1680 bp, Dechloromonas aromatica RCB
  CDS (1)..(1680): transl_table=11
atgatcatcctcaagaacgtcactctgcgccgcagctcgaaagtgctgctcgacaaggcctccgtcaccatcaatcccggtgaaaaggtcggtctggttggccgcaatggtgccggcaagtccacgctgtttgcactgctcaacggcacgctgcatgaggatggcggggattattcgattcccaagcaatggcagatgggccaggtggcgcaggacatgccggaaaccgagcagtcggccaccgatttcgtcatcgacggcgacaccaagctgctcgccgcccgcaacgaagtgcacgacgccgaagccagcgacgacggcatgcgcatggccgaggcctacatggcgctcaacgacgctggcgagcacgacgccgaagcgcgcgcccagtcgctgatcctcggcctcggtttcaaggtgtccgaactgcacaacccggtcaacagcttctccggcggctggcgcatgcgcctgcaactggcccgcgccctgatgtgcccgtccgatatcctgctgctcgacgaaccgaccaaccacttggacttggacgcgctggtctggctcgaagcgtggctcaagcgttaccagggcacgctggtcatgatcagccacgaccgcgaattcctcgacgccatcacccaggtcacgctgcatatcgacaacgccaagctggtccgttacggcggcaattacagcaagttcgaagacatgcgcgccgagcagatgctgctccagcaggcgacgatggcgaagcaggccgagaagatcgcacacctgcaatccttcatcaaccgcttcaaggccaaggccagcaaggccaagcaggcccagagccgagtcaaggcgctcgaccgcatggaaaagatcgcgccggtgctggccgacgccgaattcaccttcgagttccaggagccgcagaacctgcccaacccgatgctgtcgatgatggacgtcaccatcggctacccgccggcggaagaagcgccggccggcacgccgccgaccgtcatcgtccgcggcatcaaccggtcggtcatggccggccagcgcatcggcatcctcggcgccaacggccagggcaagtcgacgctggtcaagaccatcgcccgcgacctccaggcgatcagcggcgatgtcaccgagggcaagggcctgaacatcggctacttcgcccagcaggagcttgacgtgctgcgcccgcaggacacgccgctcgaacacatggtgcgcctggccaaggaagccatcgctgccggccgcagcaacgtgccgggacgcgaacaggaactgcgaaatttcctcggcaccttcaatttcggcggcgagatggtcaagcaggcggtcggcaccatgagcggcggcgaaaaggcgcgcctggtgctgtgcatgctggtctggcagcgccccaacctgctgctgctcgacgaaccgaccaaccacctcgacctcaacacgcgcgaagcgctggccgtcgcgctcaacgaattcgaaggcaccgtcatgctggtcagccacgaccgcgccctgctgcgctcggtctgcgacgagttctggctggtttccaagggcggtgttgcgccgttcgacggtgatctggaagactatcagcgctatctgctcgacgaagccaaacgggtgcgtgaagaggcatcggctgcgcagaagaagctggcggcgtag

SEQ ID NO: 82719 - protein, 559 aa, Dechloromonas aromatica RCB
MIILKNVTLRRSSKVLLDKASVTINPGEKVGLVGRNGAGKSTLFALLNGTLHEDGGDYSIPKQWQMGQVAQDMPETEQSATDFVIDGDTKLLAARNEVHDAEASDDGMRMAEAYMALNDAGEHDAEARAQSLILGLGFKVSELHNPVNSFSGGWRMRLQLARALMCPSDILLLDEPTNHLDLDALVWLEAWLKRYQGTLVMISHDREFLDAITQVTLHIDNAKLVRYGGNYSKFEDMRAEQMLLQQATMAKQAEKIAHLQSFINRFKAKASKAKQAQSRVKALDRMEKIAPVLADAEFTFEFQEPQNLPNPMLSMMDVTIGYPPAEEAPAGTPPTVIVRGINRSVMAGQRIGILGANGQGKSTLVKTIARDLQAISGDVTEGKGLNIGYFAQQELDVLRPQDTPLEHMVRLAKEAIAAGRSNVPGREQELRNFLGTFNFGGEMVKQAVGTMSGGEKARLVLCMLVWQRPNLLLLDEPTNHLDLNTREALAVALNEFEGTVMLVSHDRALLRSVCDEFWLVSKGGVAPFDGDLEDYQRYLLDEAKRVREEASAAQKKLAA

SEQ ID NO: 82720 - DNA, 1953 bp, Thiobacillus denitrificans ATCC 25259
  CDS (1)..(1953): transl_table=11
atgatcctcctgaagaatctgagcctgcggcgcggcgcgaaagtgctgctcgacgacgcctcggtcgcgatcaatcccggcgagaaagtcggactcgtcggccgcaacggcgccggaaaatcgagcctgttcgcgctcctgaacggctcgctgcatgaagataagggcgacttctcggtcccgtcgcaatggcggctcgcgcaggtcgcgcaggacatgcccgagaccgatgcgccggcgaccgacttcgttatcgccggcgacacgcggctcgtcgccgcccaggccgaagtggaagcggccgaagcgagcgacgacggcgaacgcatggcgcacgcctacatggcgctgcacgacgcgggcgcccacgacgccgaatcgcgggcgcaggccttgattctcggcctcgggttccaggttcgcgagctgagccaaccggtcaacagcttctccggcggatggcgcatgcgtctgcagctcgcgcgtgcgctgatgtgcccgtccgatctgctgctgctcgacgaaccgaccaaccacctcgacctcgatgccctggtgtggctcgaggcctggctgaagaaatacgccggcacgctgctggtgatcagccacgaccgcgatttcctcgacgccgtcaccgacgtcacgctccacatcgagaacggccggctgacccgctacggcggcaactacagcaccttcgaggacatgcgcgtcgagcagatggccttgcagcaggcagcctacgcccgtcagcaggaaaagatcgcccatctcaagaagttcattgatcgcttcaaggccaaggcgagcaaggccaagcaggcgcaaagccgggtcaaggcgctcgaccgcatggagcgcctcgcgccgctcctcgccgacgccgagttctcgttcgaattccaggaacccgagagcctgccgaacccgatgctcacgatcgacgacgcgagcttcggctaccccccgcccgacggggcgccggccggcacgccgccgaccgtgatcgtccagcacgtcagcaggtcggtattcgccggccagcgcatcggcatcctcggtgccaacggccagggcaagtcgacgctcgtgaagacgatcgcgcgcacgctgcccgtcgtcgccggcagcgtgattgaaggcaagggcctcaacatcggctatttcgcgcagcaggagctcgacgtgctgcgtccggccgacacgccgctcgagcacatgatccggctcgcgcgcgacgtcatcgccaacggcggcgccggccgcttcagcagccgcgaacaggacctgcgcaatttcctcggcaccttcaatttcagcggcgacatggtcaagcaggcggtcggcagcatgagcggcggcgagaaggcgcgcctcgtgctgtgcatgatcgtgtggcagcggccgaatctgctgctgctcgacgagccgaccaaccacctcgacctcgcgacgcgcgaggcgctcgcgatggccttgaacgagttcgaggggacgctgatgctggtcagtcacgaccgcgccctgctgcgttcggtgtgcgacgagttctggcttgtcacgcgcggcggcgtcgtgcccttcgacggcgatctcgacgactaccagcgctacctgctcgacgaggcgaaacgcctgcgcgaaagcctgaaggcggcggacaaggcggtggaaacgcccgcgccgaaggcgccgctggcgcccgcgaagcgtgcgccctcgggcaagctcaagccgctcaagcagtcgctcgagaagagcgagcaacgcctcgcggcgttgcaggccgaaaaggccacgctcgaggcgcgtctcgacggcgccgtcgcgcgcgacgaaatcgccgcggctggcacccggcttcaacagctcgccgacgaactcgagcgcgaagaagaaaggtggctgcagatatcgggagagatcgagacgcacgaggcgagcgcctga

SEQ ID NO: 82721 - protein, 650 aa, Thiobacillus denitrificans ATCC 25259
MILLKNLSLRRGAKVLLDDASVAINPGEKVGLVGRNGAGKSSLFALLNGSLHEDKGDFSVPSQWRLAQVAQDMPETDAPATDFVIAGDTRLVAAQAEVEAAEASDDGERMAHAYMALHDAGAHDAESRAQALILGLGFQVRELSQPVNSFSGGWRMRLQLARALMCPSDLLLLDEPTNHLDLDALVWLEAWLKKYAGTLLVISHDRDFLDAVTDVTLHIENGRLTRYGGNYSTFEDMRVEQMALQQAAYARQQEKIAHLKKFIDRFKAKASKAKQAQSRVKALDRMERLAPLLADAEFSFEFQEPESLPNPMLTIDDASFGYPPPDGAPAGTPPTVIVQHVSRSVFAGQRIGILGANGQGKSTLVKTIARTLPVVAGSVIEGKGLNIGYFAQQELDVLRPADTPLEHMIRLARDVIANGGAGRFSSREQDLRNFLGTFNFSGDMVKQAVGSMSGGEKARLVLCMIVWQRPNLLLLDEPTNHLDLATREALAMALNEFEGTLMLVSHDRALLRSVCDEFWLVTRGGVVPFDGDLDDYQRYLLDEAKRLRESLKAADKAVETPAPKAPLAPAKRAPSGKLKPLKQSLEKSEQRLAALQAEKATLEARLDGAVARDEIAAAGTRLQQLADELEREEERWLQISGEIETHEASA

SEQ ID NO: 82722 - DNA, 1941 bp, Anabaena variabilis ATCC 29413
  CDS (1)..(1941): transl_table=11
atgagcgtcatcacattacaatcagttaaaaaagactttggaatcaaagaaattttaaaagatgctagctttagtttagatgctactgataaagttggcttaataggtacaaacggttccggcaaatccactttattaaaaatgatcgccggcatagaatctattgatagtggacaaattctttgtacttctggttctaaaatcatctacttaccccaacagccagacttagatgaaaaccttactgttttagaacaaatttttgccgacagtggcgaacaaatgaccttagtacgtgagtatgaagaactttctgataaactagctcactacccagaagatagccaaatcatgtcccgtctttctgttgtcatgcagcgcatggacgcaactaacgcctgggagttagaaaccaatgccaaaattatcctcagcaaactaggaattactgattttgatgcgcccattggcagtttatctggcggctatcgtaagcgtatagctttagcaacagccttacttgcagaaccagatgttttactgatggatgagccaacaaaccatctggatgctttgtctgtagaatggttacaaagctatcttaaccgctttcgtggggcattattcctgattacacacgatcgctactttttagataaagttaccaaccgcatcatcgaaatcgaccgaggcgatgtttacagctatgcaggtaattactcatactacctggaaaagaaagctctggcggaagaatcagccattagtacccaacgcaaacatcaaggtgtattgcggcgagaactagaatggctcaagcgcggccccaaagccagaagtaccaaacaaaaagcccgcattcaacgcgtccaagccatgcgcgaaactgagtttaaacaaactcaaggtaaagtggatatctccacagttagccgtcgcattggcaaaaaagtgattgatttgcataacatttctaaagcctataatgaccgcatcttaatcaaagattttacctacgaatttagcccggaagaccgcatcggcattatcggcggtaacggtgctggcaagtctaccttaatgaatatcatcaccgggcgtatagaacccgatgccggtaaagtagaaattggttctaccatccacattggttattttgaccaacattctgaagaattactcacagctgtagatgaaaatcagcgcgtgattgactacattaaagaagagggagaatttgttcagatagccgatgggacaaaaattactgcttcccaaatgttagaacgctttctctttccagggaatcagcagtatgcaccaattcataaactatctggtggtgaaaaacgccgattatttctcctgcgtatcctcatcagcgcccccaatgtcttaattttagatgaaccgacaaacgatttagatgtgcaaacactagcagtcttagaagactacttggaagattttagcggtagcgtgattgtagtttcccacgatcgctactttttagaccgtactgttgatacaatatttgccttggaagaaggtggaaacctgcggcaatatccaggtaattattcagtttatctagactacaaaaaagccgaggaagcacaacaagcaacactcaacactaaagaaaagacaaaaaattccccagaaacaaaagttacatcgcaaactaaagatgtagaaactaaaaaacggcgtagactatccaattgggaaaagcgggaatttaccgagttagaaggcaaaattgctcaactagaggacgaaaaaacccaagccgagcaagcactaactcatgtccctcccggcaattatacccaagtacaaaaactctacgaacaaatagaagcgctgaagcaagcaattgatgtagcgactgagcgctggttagaattagcggagatagagtcttccgagagtgggtaa

SEQ ID NO: 82723 - protein, 646 aa, Anabaena variabilis ATCC 29413
MSVITLQSVKKDFGIKEILKDASFSLDATDKVGLIGTNGSGKSTLLKMIAGIESIDSGQILCTSGSKIIYLPQQPDLDENLTVLEQIFADSGEQMTLVREYEELSDKLAHYPEDSQIMSRLSVVMQRMDATNAWELETNAKIILSKLGITDFDAPIGSLSGGYRKRIALATALLAEPDVLLMDEPTNHLDALSVEWLQSYLNRFRGALFLITHDRYFLDKVTNRIIEIDRGDVYSYAGNYSYYLEKKALAEESAISTQRKHQGVLRRELEWLKRGPKARSTKQKARIQRVQAMRETEFKQTQGKVDISTVSRRIGKKVIDLHNISKAYNDRILIKDFTYEFSPEDRIGIIGGNGAGKSTLMNIITGRIEPDAGKVEIGSTIHIGYFDQHSEELLTAVDENQRVIDYIKEEGEFVQIADGTKITASQMLERFLFPGNQQYAPIHKLSGGEKRRLFLLRILISAPNVLILDEPTNDLDVQTLAVLEDYLEDFSGSVIVVSHDRYFLDRTVDTIFALEEGGNLRQYPGNYSVYLDYKKAEEAQQATLNTKEKTKNSPETKVTSQTKDVETKKRRRLSNWEKREFTELEGKIAQLEDEKTQAEQALTHVPPGNYTQVQKLYEQIEALKQAIDVATERWLELAEIESSESG

SEQ ID NO: 82724 - DNA, 1848 bp, Rhodobacter sphaeroides 2.4.1
  CDS (1)..(1848): transl_table=11
atgctgcgcatttcggacatctcctactcggtcgagggacggccgctctttcagggcgcctccgctacgattcccaccggccacaaggtcggcctcgtcggccgtaacggcaccggcaagaccacgctcttccggctgatccggggcgagctcgcgctggaagggggcgagatcgccctgcccgcccgctcgcgcatcggcggcgtggcgcaggaggtgccctcctcctcgacttcgcttctcgacacggtgctggccgccgataccgaacgcgccgcgctgatggaggaggccgagaccgccaccgatccgcaccggatcgccgagatccagcatcgtctggccgatatcgacgcctggtcggccgagggccgcgcctcggcgatcctgaaggggctgggtttcgacgccgaggcgcagcttcgcccctgctccgacttctcgggcggctggcggatgcgcgtggcgctggcgggcgtcctgttcgcccagccggacctgctcctccttgacgagcctaccaactacctcgacctcgaaggcgcgctctggctcgagagctacctgcagaaatatccgcacaccgtgctcatcatctcgcacgaccgcgggctcttgaaccgcgcggtgcagggcatcctgcatctcgaccagaagaagctgacctactggaccggcccctacgaccagttcgcccgccagatggccgagaagcgcgccgtgcaggccgccgaagccaagaaacaggaggcccgccgggcccacctgcagagcttcgtcgaccggttcaaggccaaggcctcgaaggcggtgcaggcccagagccgggtgaagatgctcgagaagatgacgccgatcacgccgcccgaagaggcgaagcggcaggtcttcaccttccccaagcccgaggaactgtcgccgcccatcatcacgatggagggcgtgtcggtcggctacgatggcccgcccgtgctccgccgcctgagcctgcggatcgaccaggacgaccggatcgcccttctcggccgcaacggcgagggcaagtccacactctcgaagctgctcgccggcaagcttgcggcgcaggaggggcggatggtcagctcctcgaagctgcgcatcggctatttcgcccagcatcaggtggacgaactccacatcgaagagacgccgctccagcatgtgatgcgcctgcgccccgacgagggccagccgcggctgcgcgcccgtctcgcgggcttcgggctgatggccgatcaggccgagaccgccgtggggcggctgtcgggagggcagaaggcgcggctctcgctgctcctcgccaccatcgatgcgccgcacctgctgatcctcgacgagcccaccaaccacctcgacatggaaagccgcgaggcgctggtcgaggcgctcaccgaatattccggcgccgtggtcctcgtcagccacgacatgcacctgttgggcctcgtggccgaccggctctggctggtgaagggcggcgcggtcgcccccttcaccgaggatctcgaggcctaccgccgccagcttctggcgggcgacgatccgccgcccgagaagaaggccgagaagcccgcgccgaaggccgccagccgcgaggagaagctcgcgctgcgcgccgaggtgcgccgctgcgaggagcggcttgagaagctgaacgggatgcgcgacaagcttgcgaccaagctcgccgatcctgcgctctacgagcccgagcgcctgggcgagatggagacctggcagaagaaatatgccgaagtgatggaggggctcgaccgggccgaggcgctgtggctgaccgcgcaggagcggctcgaggcggcgggctga

SEQ ID NO: 82725 - protein, 615 aa, Rhodobacter sphaeroides 2.4.1
MLRISDISYSVEGRPLFQGASATIPTGHKVGLVGRNGTGKTTLFRLIRGELALEGGEIALPARSRIGGVAQEVPSSSTSLLDTVLAADTERAALMEEAETATDPHRIAEIQHRLADIDAWSAEGRASAILKGLGFDAEAQLRPCSDFSGGWRMRVALAGVLFAQPDLLLLDEPTNYLDLEGALWLESYLQKYPHTVLIISHDRGLLNRAVQGILHLDQKKLTYWTGPYDQFARQMAEKRAVQAAEAKKQEARRAHLQSFVDRFKAKASKAVQAQSRVKMLEKMTPITPPEEAKRQVFTFPKPEELSPPIITMEGVSVGYDGPPVLRRLSLRIDQDDRIALLGRNGEGKSTLSKLLAGKLAAQEGRMVSSSKLRIGYFAQHQVDELHIEETPLQHVMRLRPDEGQPRLRARLAGFGLMADQAETAVGRLSGGQKARLSLLLATIDAPHLLILDEPTNHLDMESREALVEALTEYSGAVVLVSHDMHLLGLVADRLWLVKGGAVAPFTEDLEAYRRQLLAGDDPPPEKKAEKPAPKAASREEKLALRAEVRRCEERLEKLNGMRDKLATKLADPALYEPERLGEMETWQKKYAEVMEGLDRAEALWLTAQERLEAAG

SEQ ID NO: 82726 - DNA, 1932 bp, Burkholderia sp. 383
  CDS (1)..(1932): transl_table=11
gtgatccgtttcaatcagttcagccttgcgcgcggcaccaagccgctgttcgagtcgacctccttcgtgctcaatcccggcgagaaagccggcctgatcggcgcaaacggcgccggcaagtcgaccctgttctcggtcctgcgcggcgagttgcactcggacggcggcgatttctcgatgccgccgtcgtggcggatcgcccatgtgtcgcaggaaacgcccgcggtcgaccgttcggcgctcgactacacgctcgatggcgacgccgcgctgcgcgagatcgaggcgcgtatcgccgccgcgtccgccgcacatgacggcgccgccgaagccgacgcgcacgcggcgttcgccgacgccgacggctacaccgcacctgcccgcgccgaggcgctgctgctcggcctcggcttcacgctcgcgcagacgcgcgaatccgtcgccagcttctccggcggctggcgcatgcgcctgaatctcgcgcaggcgctgatgtgccgttccgacctgctgctgctcgacgaaccgacgaaccacctcgacctcgacgcgatcgtctggctcgaagactggctgcaccgctaccccggcacgctcgtcgtgatttcgcacgaccgcgaattcctcgattcgatctgcaacgtcacgctgcacctggaaaaccgccaggtgaagcgctatggcggcaactactcgcagttcgaagtgctgcgcgcgcagcaactggcgctgcagcaaagcgcctacgaaaagcagcagaagacgatcgagcacctgcagagcttcgtcgaccgcttcaaggccaaggcgaccaaggccaagcaggcgcagagccggatgaaggcgctcgagaagatggagctgatcgcgcccgcgcacatcgcgtcgccgttcacgttcgaattccgcatgcccgatgccgcgccgaacccgatgatggtgatggaagacgtccgctgcggctaccacgccgacggcggagcggaaatcccgatcgtcgagcgcgtcgcgctgtcgatccagaacggccagcgcatcggcctgctcggcgcgaacggccagggcaagtcgacgctgatcaagacgctggccggtacgctcgcgccgctgtcggggcacgtccgcgacggcaaggggctgacgatcggctatttcgcgcagcaccagctcgaaacgctgcgcgaggacgattcgccgctcgcgcatctggcgcggctcgcgcccgacacgcgcgagcaggagctgcgcgacttcctcggcggcttcaacttctcgggcgacatggcgaccaccccggtcgggccgttttcgggcggtgaaaaggctcgcctcgcgctcgcgctgatcatctggcagaagccgaacctgctgctgctcgacgaaccgaccaaccacctcgacctcgaaacccgtcatgcgctgacgatggcgctcgcgcagttcgaaggcacgctgatcctcgtctcgcacgaccgccacctgctgcgcgcgacgaccgaccagttcatgctggtcgcgaagcaccggctgcagccgttcgacggcgacctcgacgactaccgcgactggctgctgcagcacgcggccgagcagcgcgccgccgcgaaggccgacagcgcggcttcatcgggcgcgggcgccgcggccaatcgcaaggaccagaagcgtcaggccgccgaggagcggcagcgcctgtcggtgttgaagaagccgctgcagacgcgcatcacgaagctcgaaaaggaaatggagacgctgcacgcggagaaggcgcgcctcgacacattcgtcgccgatccagcgagctacgaagccgagcgcaagacggaactgaccgatgcgatccgcaagctcggcgacgtcaacacgcgtctcgaaacggtcgaggccgactggctcgccgcgcaggaagagctcgagcagatcggctga

SEQ ID NO: 82727 - protein, 643 aa, Burkholderia sp. 383
MIRFNQFSLARGTKPLFESTSFVLNPGEKAGLIGANGAGKSTLFSVLRGELHSDGGDFSMPPSWRIAHVSQETPAVDRSALDYTLDGDAALREIEARIAAASAAHDGAAEADAHAAFADADGYTAPARAEALLLGLGFTLAQTRESVASFSGGWRMRLNLAQALMCRSDLLLLDEPTNHLDLDAIVWLEDWLHRYPGTLVVISHDREFLDSICNVTLHLENRQVKRYGGNYSQFEVLRAQQLALQQSAYEKQQKTIEHLQSFVDRFKAKATKAKQAQSRMKALEKMELIAPAHIASPFTFEFRMPDAAPNPMMVMEDVRCGYHADGGAEIPIVERVALSIQNGQRIGLLGANGQGKSTLIKTLAGTLAPLSGHVRDGKGLTIGYFAQHQLETLREDDSPLAHLARLAPDTREQELRDFLGGFNFSGDMATTPVGPFSGGEKARLALALIIWQKPNLLLLDEPTNHLDLETRHALTMALAQFEGTLILVSHDRHLLRATTDQFMLVAKHRLQPFDGDLDDYRDWLLQHAAEQRAAAKADSAASSGAGAAANRKDQKRQAAEERQRLSVLKKPLQTRITKLEKEMETLHAEKARLDTFVADPASYEAERKTELTDAIRKLGDVNTRLETVEADWLAAQEELEQIG

SEQ ID NO: 82728 - DNA, 1962 bp, Desulfitobacterium hafniense Y51
  CDS (1)..(1962): transl_table=11
atgaatctgttaactgctgagtccctaaccaagagttatggaattaagcctttattccaggatatttccttaggcatagaggaaggtcaaaaaattggtattatcggggtcaacggaacagggaaatccaccttgctgaagattctggccggcttggagcagccggatcaagggcagatcacgaccaataacgagctgcagttggaatatcttcctcaagagcccgacttcgatccagaggctacggtattgcagcaggtttttaaaggcaattccccgctcatgaagctgcttagggactatgaaacggccctggaacggctgaatcaagatcccaacagcgaaagttaccaaaataccctgctccagctagggcagaagatggacagccacaatgcctggcaaatcgagagtgaggctaaagccgttctcactaagctggggataacccagtttgatattcccgtcgggacactgtccggaggacagcgtaaacgggtggctttagccggtgcactgattcagccttcaaatgtattgattctggacgaacctaccaaccatatcgataatgagatggtggattggttggagaattacttgcataagcttaagggtgctcttttgatggtcactcatgatcgctattttcttgatcgggtggcgaatcgaatttttgaactggatcggggaaaactttatgcatatccaggtaattacagccgttttttagaattaaaggcagagcgggatgagcaggaggaagccacagaaaggaaacggcaaaatatcctgcgcaatgagctggcctggattcgccggggagctaaagcacgcaccaccaagcaaaaagcacgcattgatcggtttgaacagcttcaagctgatcagcctgaagagaagaccgggaaagtggaagtttctgcaggagcagcccggttgggaaaaaaggtcatccagtgttctcatctgcgtaaatcatattccggctcagggacggttattgatgatttcagcatcatcctggctaaatatgatcgcatcgggatcattggccccaatggcagcggcaagtcaaccctgttaaatattttggctgggcggatgccagccgatgccggagagattgaatggggacccacagtaaagctggggtactttgctcaggaataccgggagtttgaaccacagaccaaggtgatcgatgtgattaaagccgtggcggaagtgattccaacttctgatggaggggtcctgacggcctcgcaaatgctggaacgcttccttttcactcctgcccagcaatggactcccgttgaaaagctctccggaggagagaagcggagactttatctgctgcaggttttgatgagctcccctaacgtgctgctgctggatgagccgaccaatgatctggatattcaaacccttagcattcttgaagattatctggaggattttcccggagtggtgatcacggtatcccatgaccgctttttcctggatagggtggtagatcaaattctggcctttgagggccaaggaaaaatccattccgccatcgggaactatacagactatagggaacagctggccaggcggattgcggaggagcagtcctcaagagaagccctctctaagacgcagaagctgaacggccagaactcgaggctgggtgaagctgaggctgccgggcatcaggccaagccaaaagagcgcccggtgaaaatgagctataaagagcaacgggagtatgagcagattgaagacagaattgccggtcttgagggtcaattggaacaagtggatcaagacatggcggaagcgggaagcaattacggtaaattgaatgagctgatgaaagcaaaagaagacttggagaagcagctggaagaatctctggagcgctggacctatctcagtgaacttgccgaggagattgcgggccgtaaagccccctaa

SEQ ID NO: 82729 - protein, 653 aa, Desulfitobacterium hafniense Y51
MNLLTAESLTKSYGIKPLFQDISLGIEEGQKIGIIGVNGTGKSTLLKILAGLEQPDQGQITTNNELQLEYLPQEPDFDPEATVLQQVFKGNSPLMKLLRDYETALERLNQDPNSESYQNTLLQLGQKMDSHNAWQIESEAKAVLTKLGITQFDIPVGTLSGGQRKRVALAGALIQPSNVLILDEPTNHIDNEMVDWLENYLHKLKGALLMVTHDRYFLDRVANRIFELDRGKLYAYPGNYSRFLELKAERDEQEEATERKRQNILRNELAWIRRGAKARTTKQKARIDRFEQLQADQPEEKTGKVEVSAGAARLGKKVIQCSHLRKSYSGSGTVIDDFSIILAKYDRIGIIGPNGSGKSTLLNILAGRMPADAGEIEWGPTVKLGYFAQEYREFEPQTKVIDVIKAVAEVIPTSDGGVLTASQMLERFLFTPAQQWTPVEKLSGGEKRRLYLLQVLMSSPNVLLLDEPTNDLDIQTLSILEDYLEDFPGVVITVSHDRFFLDRVVDQILAFEGQGKIHSAIGNYTDYREQLARRIAEEQSSREALSKTQKLNGQNSRLGEAEAAGHQAKPKERPVKMSYKEQREYEQIEDRIAGLEGQLEQVDQDMAEAGSNYGKLNELMKAKEDLEKQLEESLERWTYLSELAEEIAGRKAP

SEQ ID NO: 82730 - DNA, 1911 bp, Saccharophagus degradans 2-40
  CDS (1)..(1911): transl_table=11
atgatcaagctagaaaacgtaagcttacagcgcggcaccaagtttttacttgaggaagcctcgctcactatccaccccggccaaaagtggggaattattggcagcaatggctgcggtaaatccaccctattccaaatgcttaccggcaagctcgccgaagatgcaggcagcctgagcattccgtcggactggcgcattgcacatatggcgcaagaagtttctgcagtaaagcgctgcgcagaagactacgtattagacggcgataaaattttgcgccgcatagaaaacgatattgccaacgcacaagcaaaagatgacggcgaggcactggctaaagggtttgccgagctggaacaagtagacggctacaccgcgcaagcgcgcgcgcagcgattattggcaggccttggctttaaacccgctgatggcaagcgcgacgttagcgacttttcgggtggctggcgcattcgcttaaaccttgctcaagcacttatgtgcccatcagatttattactgctagacgaaccaaccaaccacttagatttagatgcaacattgtggctagaaaattggcttaagcagtattccggcacactcattattatttcgcacgatagagactttttagataacgttattggcaacatagtgagcttcgaaaactgcaaacttgtcagttacacgggcggctattcagattacgaaattcaacgcgccgaacgtcttgcccaacaagctattgcttttagcaaacaacaagaacgtattgcagagatagaacaatttgttaatcgctttcgcgccaaagccaccaaagcaaggcaagcacagagccgactaaaagagttggaccgaatggaaaagattgcgcccgcgcatgtggattcgccctttgactttcgcttccccaaaccagaaaagcttccacaagtgcttattactttgagtgaagccgctattggctacagtgcagacgcccccattgccgacaaaattgagtttggcgttttaggctcttcacgcatcggcctgcttggccacaatggcgcgggtaaaaccacgctaattaaaaccctttcaaatatgattccgcttgttggcggtcaacgcagcgaaggccagcatttgcgcattggctatttcgcccagcaccagctcgaatctctcgacaccaagggcacaccactactgcaccttcgccggctaactccgaaagaaaccgaacaaaaaatgcgagactttttgggtagctttggttttcacggcgacaaagcattagatacagtaggcaatttttctggcggcgaaaaagctcgcctcgcactagccattatcgcttggcaaaaacccaatttattactgctggatgagccaacaaaccacttagacttagaaatgcgacacgctcttaccgttgcgttacaagcttttgaaggcgctgtgattatcgtatcgcacgataggcatttattgcgctcaaccgtagaagaatttgtattagtggataacggcaaggttgccgaatttgatggcgacctagaagattatcgcaactggcttagcaacgaaaacaaagaaagcaaagaggccgaagccgaggcaagcaataaaaacgaacccaataaagccgacaaaaaacaattgcgccaaaatgccgctgcgttaagggacaaactaaaaccctacaccaacgccattaagaagcttgaaaagcaaatggaaacgctacaagaaaaactcgccaagctagaagaagagctagccgacccagaactctaccaaacgggcggcgataaacttaaaacactgttaaaacagcaaggcgaactgcgatcgcagctcgccgaaacagaagaagaatggtttattaaaagtgatgaactagaagcacttaacgcagaggtgcaatag

SEQ ID NO: 82731 - protein, 636 aa, Saccharophagus degradans 2-40
MIKLENVSLQRGTKFLLEEASLTIHPGQKWGIIGSNGCGKSTLFQMLTGKLAEDAGSLSIPSDWRIAHMAQEVSAVKRCAEDYVLDGDKILRRIENDIANAQAKDDGEALAKGFAELEQVDGYTAQARAQRLLAGLGFKPADGKRDVSDFSGGWRIRLNLAQALMCPSDLLLLDEPTNHLDLDATLWLENWLKQYSGTLIIISHDRDFLDNVIGNIVSFENCKLVSYTGGYSDYEIQRAERLAQQAIAFSKQQERIAEIEQFVNRFRAKATKARQAQSRLKELDRMEKIAPAHVDSPFDFRFPKPEKLPQVLITLSEAAIGYSADAPIADKIEFGVLGSSRIGLLGHNGAGKTTLIKTLSNMIPLVGGQRSEGQHLRIGYFAQHQLESLDTKGTPLLHLRRLTPKETEQKMRDFLGSFGFHGDKALDTVGNFSGGEKARLALAIIAWQKPNLLLLDEPTNHLDLEMRHALTVALQAFEGAVIIVSHDRHLLRSTVEEFVLVDNGKVAEFDGDLEDYRNWLSNENKESKEAEAEASNKNEPNKADKKQLRQNAAALRDKLKPYTNAIKKLEKQMETLQEKLAKLEEELADPELYQTGGDKLKTLLKQQGELRSQLAETEEEWFIKSDELEALNAEVQ

SEQ ID NO: 82732 - DNA, 1902 bp, Methylobacillus flagellatus KT
  CDS (1)..(1902): transl_table=11
ttgattcagctaaaaaatatcaaactgttccggggagctaaatgcctgatcgaaggcgcaagctttcagcttcatcccggtcacaaagtcggcctgaccggtgcaaacggcgcaggaaaatccagcatattcgccatgttgcgcggcgagctgcatcctgaatctggtgagctggatattcccgcgcattggacaattgcccatgtcgcccaggaaactccggcgcttgccgatgccgcgatcgaattcaccctggacggcgatgtcgagctcaggcagatcgaggcagcgctgcgcgaggccgaggctgcgggagagggggagaaggttggtgagctgcatgcccgcctgggagaaatcgatggttattccgcgcgagcacgcgcggcggagctgttgcatgggctgggtttcggaccggcggacctgggcaggccggtttccgatttctccggcggatggcgcgtgcgactcaatctggcccgcgcactgatgtgccgctccgacttgctgctgctcgacgagccgaccaaccacctcgaccttgatgccgtgatctggctggaaaactggctcaaggattaccgcggcaccttgctgctgatctcgcatgaccgcgatttcctcgatgccatcgtcaaccacatcgcacatatcgagcagcagacactgacgctttatcgcggcggttattctgatttcgagcgccagcgcgccgagcgcatggcacagcaacaagccaactatgaacgtcagcagcgcgaagtgacgcacttgcagaaatatatcgaccgcttccgtgcccaggccaccaaggcacggcaggcacaaagccgcatcaagatgttggagcgcatggagctgattagcgcggcgcatgtggacagcccattcagcttcagcttccgcgagccgttagcggcgccagatcccttgctggtattggaccaggccgatgcgggttatgcatctacgctgatattgcagcgcatcatgctgaccttgcgtcccggtgaacgggtcggcctgcttggccgtaacggcgcgggaaaatccacgctcatcaagctgcttgccaatgccatgccgccattgcaaggcaaacgggtggaaggcaaggatttgcggcttggctatttcgcccagcatcaattggagcaattgcgtccggatgagtctcccttgcagcacatgctgcgccttgatcccgagacgcgcgagcaggaacaccgcaactacctgggcgggtttgatttccgcggcgacatggccaccagcgcagtcggcgcgttttccggcggtgaaaaatccaggctggccttggcattactgatctggcagcgtcccaatctgttgctgctggacgagccgaccaaccacctcgacctggaaatgcgccatgccctgaccatggccttgcaggattaccagggcggcatggtgctggtgtcgcatgaccgttccctgttgcgtgctacctgtgaccgtttcctgctggtcgcggatggcaaggtgcaggagtttgatggtgatctggaggattatcgccactggctcaacaagcagcgcctgcgcgacaaggcgaaggaagaaaaagacaaaccagaagcggcgcccaatgcccgcgcgcagaacaaggcagaacgccatgcacggctgcaggaacgcaggcccctgctgaaggaactggagcagatagaaaagaaaatggctgtctggcagccagaaaaaaaccaattggaacaagccttggccgcacccgagctataccaggaagcggacaagacgcgcttgtacagcttgcagaagcgccaggcagagctggaacagcaactggcgcaggcagaagagcgctggctgaccttgcaggaacagctggaagccttgcccgacatccattga

SEQ ID NO: 82733 - protein, 633 aa, Methylobacillus flagellatus KT
MIQLKNIKLFRGAKCLIEGASFQLHPGHKVGLTGANGAGKSSIFAMLRGELHPESGELDIPAHWTIAHVAQETPALADAAIEFTLDGDVELRQIEAALREAEAAGEGEKVGELHARLGEIDGYSARARAAELLHGLGFGPADLGRPVSDFSGGWRVRLNLARALMCRSDLLLLDEPTNHLDLDAVIWLENWLKDYRGTLLLISHDRDFLDAIVNHIAHIEQQTLTLYRGGYSDFERQRAERMAQQQANYERQQREVTHLQKYIDRFRAQATKARQAQSRIKMLERMELISAAHVDSPFSFSFREPLAAPDPLLVLDQADAGYASTLILQRIMLTLRPGERVGLLGRNGAGKSTLIKLLANAMPPLQGKRVEGKDLRLGYFAQHQLEQLRPDESPLQHMLRLDPETREQEHRNYLGGFDFRGDMATSAVGAFSGGEKSRLALALLIWQRPNLLLLDEPTNHLDLEMRHALTMALQDYQGGMVLVSHDRSLLRATCDRFLLVADGKVQEFDGDLEDYRHWLNKQRLRDKAKEEKDKPEAAPNARAQNKAERHARLQERRPLLKELEQIEKKMAVWQPEKNQLEQALAAPELYQEADKTRLYSLQKRQAELEQQLAQAEERWLTLQEQLEALPDIH

SEQ ID NO: 82734 - DNA, 1974 bp, Burkholderia xenovorans LB400
  CDS (1)..(1974): transl_table=11
gtgatccgctttaaccagttcagcctcgcgcgcggcaccaagccgctcttcgacaacaccacgttcaccctcaaccccggcgaaaaggccggtctggtgggggcgaacggcgcgggcaagtcaacgctgttcgccgtgctgcgcggcgaactgcatgcggacggcggcgatttttcaattccgcccacctggcagatcgcccacgtcgcgcaggaaacgcccgccgcggacaagaccgccctcgcctacacgctggacggcgacgccgcgctgcgtacgatcgaagcgcgcattgccgccgcctccgccgcccatgacggcgcggccgaaggtgaagcgcacgcggccttcgccgacgccgacggctacaccgcgcccgcgcgcgccgaagcgctgttgctcggcctcggcttcacgctcgaacagacgcgcgagccggtcagcagtttttcgggcggctggcgcatgcggctgaatctcgcgcaggctctgatgtgccgctccgacctgctgctgctcgacgaaccgaccaaccacctggatctcgacgcgatcgtctggctcgaagactggctgcaccgttatccgggcacgctgatcgtgatctcgcacgaccgcgaattcctcgactcggtctgcaatgtcacgctgcatctggagcagcagcagatcaagcgctacggcggcaactactcgcaattcgaagtgctgcgcgcgcagcagatcgcgctgcaacaaagcgcgtacgaaaaacagcagcgcacggtcgagcatttgcagagctatatcaaccgcttcaaggcgcaggccaccaaggcgcgccaggcgcaaagccgcgtcaaggcgctggaaaagatggagctgatcgcgccggcgcatgcggcctcgccgttcacgttcgagttccgcacccccgattccgcgccgaatccgatgatggtgatggaagacgtgcgctgcggctatcgcagcgagagcgaaccgggcgtcgagattcccatcgtcgaccacgtcatgctgtcgatccagaacggtcagcgcatcggcctgctcggcgcgaacggccagggcaagtccacgctgatcaagacgctcgccggcacgctcgaaccgctcggcggccacgtgcgggaaggcaaggggctgcgcatcggctatttcgcgcaacatcagctcgaaacactgcgtccggaagacacgccgttgcagcacctcgcgcgcctcgcaccggacacgcgcgaacaggaattgcgcgacttcctcggcagcttcaatttttccggcgagatggcgacctcgaagatcgcgcccttctccggcggcgaaaaggcccgcctcgcgctcgcgctgatcatctggcaaaagccaaacctgctgctgctcgacgaaccgaccaaccacctggatctcgaaacgcgtcacgcgctgactatggcgctcgcgcagttcgaaggcacgctgattctggtctcgcacgaccggcatctgctgcgtgccaccacggatcaattcatgctggtcgcgaaacatcggctgcaggagttcgacggcgatctcgacgactaccgcgactggctgctgcaacacgcggccgaacagcgcgccgcgctcaaggcgggcacggcgtcgaacggcggcaatggtggtaatggcggcagcggcagtgacggcggcgcggacaacggcgtgaatcgcaaggaacagcggcgcctcgaagccgaaacgcgccagaagctcgcgcacctgaaaaagccgctgcaaagccggatcacgaagatcgaaaaggaaatggacgcgctcaacgcggagaagaccacgctcgatgcgttcgtcgtcgatccggcgagttacgagcccgggcagaaaagcaaactgacggaggcgatccgccgtcaggcagatgtgaacgcgcgcctcgaagcgctcgaagccgagtggctcgaggcgcacgaggaactcgaacagatcggctag

SEQ ID NO: 82735 - protein, 657 aa, Burkholderia xenovorans LB400
MIRFNQFSLARGTKPLFDNTTFTLNPGEKAGLVGANGAGKSTLFAVLRGELHADGGDFSIPPTWQIAHVAQETPAADKTALAYTLDGDAALRTIEARIAAASAAHDGAAEGEAHAAFADADGYTAPARAEALLLGLGFTLEQTREPVSSFSGGWRMRLNLAQALMCRSDLLLLDEPTNHLDLDAIVWLEDWLHRYPGTLIVISHDREFLDSVCNVTLHLEQQQIKRYGGNYSQFEVLRAQQIALQQSAYEKQQRTVEHLQSYINRFKAQATKARQAQSRVKALEKMELIAPAHAASPFTFEFRTPDSAPNPMMVMEDVRCGYRSESEPGVEIPIVDHVMLSIQNGQRIGLLGANGQGKSTLIKTLAGTLEPLGGHVREGKGLRIGYFAQHQLETLRPEDTPLQHLARLAPDTREQELRDFLGSFNFSGEMATSKIAPFSGGEKARLALALIIWQKPNLLLLDEPTNHLDLETRHALTMALAQFEGTLILVSHDRHLLRATTDQFMLVAKHRLQEFDGDLDDYRDWLLQHAAEQRAALKAGTASNGGNGGNGGSGSDGGADNGVNRKEQRRLEAETRQKLAHLKKPLQSRITKIEKEMDALNAEKTTLDAFVVDPASYEPGQKSKLTEAIRRQADVNARLEALEAEWLEAHEELEQIG

SEQ ID NO: 82736 - DNA, 1923 bp, Ralstonia metallidurans CH34
  CDS (1)..(1923): transl_table=11
gtgatccgaatcgaccagcttgtcctccagcgcggcaccaaagtgctgttcgaccacaccagcgtgacgctcaatccgggcgagcgcgtcggccttgtcggcgccaacggcagtggcaagtccacactgttctccatgctgcgcggcgagttgcacgccgacggcggcgacgtcttcctgcccgcccagtggcgcattgcgcatgtggcgcaggagacgcccgcggtagcccgctccgccgtggactatgtggtcgatggcgatacccgcctgcgcgagatcgaggctcggatagccgccgcccaagccagcggcgatggctcggccgaaggcgaagcccatgcagcctatgccgacgccgacggctacaccgccgccgcgcgcgccgaggcgctgttgctgggcctgggcttcacgctgccgcaggtgtcgcagcccgtggcatcgttctcgggcggctggcggatgcgcttgaacctggcgcaggcgctgatgtgtccgtcggacctgctgctgcttgacgaaccgaccaaccacctggacctcgacgccatcgtttggctcgaagactggcttgcgcgctacccaggcacgctggtgatgatctcgcacgatcgcgaattcctcgacgcgatctgcaacgtcacggtgcatatcgagaaccagcaactgaagcgttacggcggcaactacacgcagttcgaaacgatgcggctgcagcagatggcgcagcagcagtcggcctacgcgcgccagcagaaggaaatcgcgcacctggagtcgttcatcaaccgcttcaaggccaaggccaccaaggcacgccaggcgcaaagccgggtgaaggcgctggaaaagatggagcggctggcgccggtgcacgtggcagcgggcttcgctttcgaattccgtgagcccgattcggcgccgaacccgatgatggtgctggaaggtgtggactgcggctatgccgaggccgacccgcccgtcacgatcctgcacaaccttgcactgtcgatccagaacggccagcgcatcggcctgctgggcgcgaacggccagggcaagtcgacgctggtgaagacgctggccggcacgcaggcgccgctgaacggcaccgtccggctcggcaagggactcgtgatcggctacttcgcccagcaccagctggaaacgctgcgcgaccacgattcgccgctccagcatctggcgcggctggcgccggatgtgcgagagcaggaactgcgcgacttcctgggcagcttcaatttccgcggtgacatggcgacgtcaccgatcgaaccgttctcgggcggcgagaaggcccggctggcgctgtccctgatcgtctggcaaaagccgaacctgctgctgctagatgaaccgaccaaccacctggacctcgacacccgcgaagcgctgacgatggcgctggcccagttcgaaggcacgctgatcctggtctcgcacgaccgacatctgctgcgcgccacctcggaccagttcatgctcgtggccgagggcacgatccgcccgttcgatggcgatctggacgactaccgcgactggctgctgcaacaggcggccgccaagcgcaacgcggccacggccgcgcacgccgccgaagccgcgcccgtggtcaaccggaaggaccagcgccgcgcagaagccgacgagcgccagcgcctgtcggtactgcgcaagccgctgacgaaggaactggaaaaggtggaaaagcggatgtcggtgctacaagccgacaagaccacgatcgacacgttcatggccgacgcgtcgagttacgacgacgccaacaagacgaagctgaaggacatgctcaagcgccagggcgaagtcaccggcgaactcgagcaactggaggaacgctggctcgaactgcaggagcagatcgagcagatcgcctga

SEQ ID NO: 82737 - protein, 640 aa, Ralstonia metallidurans CH34
MIRIDQLVLQRGTKVLFDHTSVTLNPGERVGLVGANGSGKSTLFSMLRGELHADGGDVFLPAQWRIAHVAQETPAVARSAVDYVVDGDTRLREIEARIAAAQASGDGSAEGEAHAAYADADGYTAAARAEALLLGLGFTLPQVSQPVASFSGGWRMRLNLAQALMCPSDLLLLDEPTNHLDLDAIVWLEDWLARYPGTLVMISHDREFLDAICNVTVHIENQQLKRYGGNYTQFETMRLQQMAQQQSAYARQQKEIAHLESFINRFKAKATKARQAQSRVKALEKMERLAPVHVAAGFAFEFREPDSAPNPMMVLEGVDCGYAEADPPVTILHNLALSIQNGQRIGLLGANGQGKSTLVKTLAGTQAPLNGTVRLGKGLVIGYFAQHQLETLRDHDSPLQHLARLAPDVREQELRDFLGSFNFRGDMATSPIEPFSGGEKARLALSLIVWQKPNLLLLDEPTNHLDLDTREALTMALAQFEGTLILVSHDRHLLRATSDQFMLVAEGTIRPFDGDLDDYRDWLLQQAAAKRNAATAAHAAEAAPVVNRKDQRRAEADERQRLSVLRKPLTKELEKVEKRMSVLQADKTTIDTFMADASSYDDANKTKLKDMLKRQGEVTGELEQLEERWLELQEQIEQIA

SEQ ID NO: 82738 - DNA, 1926 bp, Acidobacteria bacterium Ellin345
  CDS (1)..(1926): transl_table=11
atgatccagttgtctgccgccggaaagcgtttcggccccaagagtctgtttcaaaatctcgactggctgatcacgccgcaggaccgcgtcggcctggttggcgccaacggcaccggcaaatccacgctgctcaaagtgcttggcggcatcgagtcgctcgactacggctcgctgcaatctaccaagggcatcacccagggctacctgccacaggatggcctgcggctgtccggacgaagcgtattcgccgagtgtctgagcgtcttcgaagacctcaaagcgatggagaaggaaatcgaaacgctcacgcggcgcatgagcgaaatcgatcacgagtcgattgagtacaagcagatctccgatcgcttccaccgcatcgacggcgaatttcgcatccgcgatggatacgccctggaatcgcaggtcggcaccgtgctttccggactcggtttcagcaaagaggattggcagcgggacaccggtgagttctcgggtggctggcaaatgcgcattgcgctggggaaactgctactcgccaggccgaatcttctgcttctcgacgagccgactaaccacctcgacctcgaaacccgcaactggctcgaggagtacctcacgcactatccattcgcctacatcctgatatcacacgatcggtatttcctcgatgttacggtcaacaagatcgttgagatatggaacaaggaagtgcacttctacgcgggcaattacgacaagtatctcgcgcaaaaagaaatgcgccggacgcagatcgtgagcgcctacaagaaccagcgcgagcggatcgagcagctcgaagccttcatcaaccgatttcgataccaggcaaccaaggcgaaacaagtccagagtcgcatcaaagagctggaaaagatcgagcgtatcgaaattccgccggatgaaaagaccattcacttcacattcccgcagccgaagcccagcggacgtcaggtggtcgagtccaaggggctggcgaagagctacggtgagaagcaggtcctcaacaacgtagatttctttattgagcgcggcgatcgggtagcgcttgtcggtgtgaacggtgccggcaaatccacgcttatcaagctgctcgccggtcttgagccgctcaccggtggagagttgcggctcgggcacaacgttgaagtggactactttgcccaggaccaatacaaggaactcgatccgaacgcgcgcatgctcgacgacattgctgagatttcgccgcgttccacccagacggaactacgcagcctgcttggttgcttccttttctcggaagaagatgtcttcaagacgctgggcgtgctctccggcggcgagcgtaatcgttatgcgctggcgcgcatgcttctgcatccgtcgaacttcctgctgctcgatgagccgaccaaccacctcgacatgcgagccaaggacgtgctgctcgaatcgctggagaagttccagggaaccgtcgtctttgtgtcgcacgaccgctactttatcgacaagctcgcgacacgagtcttcgaagttgccgatggcggcgtgcaggtatatccggggaactacgaagaatacctgcgctcgaaggccggcgtcacgaccgcagttgatctcgaggcggtaagagctgaggcccccaaaagcaatggtgacggggctacgacggctggcgaaaaagcaaagcgtctcaatcctatcaagctgcgccagtatgaagaacgcatgcgcgagctcgaagaacttgtcgaacgcaccgaaaccggcatcgtggagtgtgagaattctctcggcaatttcgtgagcgtggaagagacgaagcgccagacggagctgctcgaacagcgccgcgccgagctggaaactctgatggtcgagtgggaacaactcacgcaggctctcgaagaagcgaaggcatag

SEQ ID NO: 82739 - protein, 641 aa, Acidobacteria bacterium Ellin345
MIQLSAAGKRFGPKSLFQNLDWLITPQDRVGLVGANGTGKSTLLKVLGGIESLDYGSLQSTKGITQGYLPQDGLRLSGRSVFAECLSVFEDLKAMEKEIETLTRRMSEIDHESIEYKQISDRFHRIDGEFRIRDGYALESQVGTVLSGLGFSKEDWQRDTGEFSGGWQMRIALGKLLLARPNLLLLDEPTNHLDLETRNWLEEYLTHYPFAYILISHDRYFLDVTVNKIVEIWNKEVHFYAGNYDKYLAQKEMRRTQIVSAYKNQRERIEQLEAFINRFRYQATKAKQVQSRIKELEKIERIEIPPDEKTIHFTFPQPKPSGRQVVESKGLAKSYGEKQVLNNVDFFIERGDRVALVGVNGAGKSTLIKLLAGLEPLTGGELRLGHNVEVDYFAQDQYKELDPNARMLDDIAEISPRSTQTELRSLLGCFLFSEEDVFKTLGVLSGGERNRYALARMLLHPSNFLLLDEPTNHLDMRAKDVLLESLEKFQGTVVFVSHDRYFIDKLATRVFEVADGGVQVYPGNYEEYLRSKAGVTTAVDLEAVRAEAPKSNGDGATTAGEKAKRLNPIKLRQYEERMRELEELVERTETGIVECENSLGNFVSVEETKRQTELLEQRRAELETLMVEWEQLTQALEEAKA

SEQ ID NO: 82740 - DNA, 1899 bp, Cytophaga hutchinsonii ATCC 33406
  CDS (1)..(1899): transl_table=11
atgttaacattgaataatatctcctacttcattggcggtcgcgccctatacagaaatatcaccatgcagataaaacccaaagataaaatcggattgatcggtgcaaatggcaccggcaagtcaacgttattaaaggtaattacaggtgagtatagtgcggatgaagggaacattcaaaaaagcaaagactgtaccattggtttcttaaaccaggatctgctatccttccagagtgatgaaagtattttagcggtagccatggaagcttttgaagaagcgaccaaaattcaaatccagatggatcaattgatacataaaatggaaacggattataccgatgacatgattgaaaaattaagtgcacttcaggaacgttttcaggcacttgaaggatataccatacaatccaaagcggaaaaaattctggaaggtttaggtttttcaaccaacgatctgaacaagcccttaaagaatttttccggaggctggagaatgcgggtaatgcttgccaaaatgctgcttgccaagcctgcactgctcatgctcgatgaacctaccaatcacctggatctcccatccatacaatggctggaaaactacctgcgcgattatgaaggtgctgtaattgttgtttcgcacgatagagaatttattgataactgtgtgaaaacaattgttgaagtagcccagcaaacattaaatatctatgccgggaattatagtttttatctggaagaaaaagaattaagatcggaaattcaaaaagcttcttttgaaaatcaacaggcaaaaattaaacaaacggaacgtttcattgaacgcttcaaagccaaagcaagtaaatccacacaggtacagtccagagtgaaagcgctcgacagaatggatatgattgaagatgtggtggaagataatcaaaccgtaaacttccgtttcacatttaaaacacaaccgggcagagtaattaatgaattaaagaatatttccaaaagttatggagacttacatattcttaaaaatactgatgcaaagattgagcgtggcgacaaaatcgcattgattggtgcaaacggtaaaggcaaatcaactgtactgcgcatcctaaccggcggtgaaagtgcagaaggtgaagtggcacttggtcataatgtaatttcttctttttatgcgcagcatcagctggaatcattaaatataaataatgagatattagaagaattgaagcagcatggctctaaccggacagaaacagaattacggaatgtactcggctgcttcctgttctccagtgatgatgctttcaagaaaattaaagtactttcaggtggagaaaaatcacgtgttgcattagcaaagaccttaatctctgatgccaattatttattactggatgaacctaccaatcacctggatatggtatctgttaatattttgattcaggcattacagcaatatgaaggaacattgatcgttatcagtcacgacagacactttgtttctaaagttgcaaacaaaatctggtacatcgaagatcaggaaatcaaagtatatccgggaacatacgatgaatataaatactggatcgaaaatattaaaactaccggtgcaacggccgctcccaaggagaagaaagaacctgtagctgaaaagaaaaaagctccggcaccagctgctgatccggaaataaaaaaaatccaacagcagatttcacgtttggaagaacagataacagcacttgaaaagaaaaaaacagccgcagaagaacatctcgctaaaccggaagtatacggcaatccggatcaattagcaaaagccagcatggaatttgataaagtagataaagaacttttacagctgcagacggaatgggaaatgtgtgttgaaaaactggaacaataa

SEQ ID NO: 82741 - protein, 632 aa, Cytophaga hutchinsonii ATCC 33406
MLTLNNISYFIGGRALYRNITMQIKPKDKIGLIGANGTGKSTLLKVITGEYSADEGNIQKSKDCTIGFLNQDLLSFQSDESILAVAMEAFEEATKIQIQMDQLIHKMETDYTDDMIEKLSALQERFQALEGYTIQSKAEKILEGLGFSTNDLNKPLKNFSGGWRMRVMLAKMLLAKPALLMLDEPTNHLDLPSIQWLENYLRDYEGAVIVVSHDREFIDNCVKTIVEVAQQTLNIYAGNYSFYLEEKELRSEIQKASFENQQAKIKQTERFIERFKAKASKSTQVQSRVKALDRMDMIEDVVEDNQTVNFRFTFKTQPGRVINELKNISKSYGDLHILKNTDAKIERGDKIALIGANGKGKSTVLRILTGGESAEGEVALGHNVISSFYAQHQLESLNINNEILEELKQHGSNRTETELRNVLGCFLFSSDDAFKKIKVLSGGEKSRVALAKTLISDANYLLLDEPTNHLDMVSVNILIQALQQYEGTLIVISHDRHFVSKVANKIWYIEDQEIKVYPGTYDEYKYWIENIKTTGATAAPKEKKEPVAEKKKAPAPAADPEIKKIQQQISRLEEQITALEKKKTAAEEHLAKPEVYGNPDQLAKASMEFDKVDKELLQLQTEWEMCVEKLEQ

SEQ ID NO: 82742 - DNA, 1914 bp, Shewanella sp. MR-4
  CDS (1)..(1914): transl_table=11
atgatcagcatcaaccaagcgcaattaatccgtggcagcaaaaccctgctcgacgaagcctctttgaccatctatcccggccataaggtcggcctagtcggcgccaatggcacgggtaagtcctcactgctggcattaattatgggtcacctgagcttagacaaaggcgagttcagtatgccttcgggttggcaaatcgccaccgtagctcaagaaacgcccgcgctggaagtctctgcacttgagtatgtacttgatggtgataaagaatatcgccaacttgaggccgacttgcatatcgcgcaggaacacaatgatggccacgccattgccaccctgcacggtaaaatcgatgccattggcggctacgccattcgtgcccgcgcaggtgccttgctggcaggtttaggctttagcgaagccgagcaaaataacccagtgaaaagcttttcgggtggttggcggatgcgcttaaaccttgcccaggcactgctgtgccgctccgacttactgctgctcgacgaaccgaccaaccacttagacttagataccatgtactggctcgaagggtggattaagtcctatcaaggcacgctgattttaatcagccacgatagggattttatcgacgagattgtcgatgaaatcgtccatgtcgagaatcaaaaactcaattattacaaaggcaactatagtgcctttgagcgcattcgtgccgaacgtatggcgcagcaacaggtcgcctatgagcgccaacaaaaagaacgggcgcatatgcagtccttcgtcgaccgcttccgctacaaggccagtaaagccaagcaagcgcagagccgcttaaaagcgctggagcggatgactgagctattgccatcccaggccgatagcccgttttatatggagtttcgcccgccagaagccctgcccaatccattgataaaaatggaacaagtggcagtgggttatggtgataagcaaatccttagcaaagtgcatttgaacttagttcccggtgcccgtattggcctcttaggccgcaacggtgcgggtaaatcgacattaatcaaactgttatcgggacaactgtcaccgatgaccggattgtatgagcccaatcccggcctgaatatcggttactttgcccagcaccaaatcgaatttttacgtttagacgatacgccgctgcaacatctggtgcgcctcgcgcccaatgcccgtgagcaggaattacgtaacttcctcggtggttttggcttccatggcgatatggcgctctcgccggtacgccccttctcgggtggcgagaaagcgcgtttagtgttggccttattagtgtggcaacgccctaacctattactgctcgacgaaccgaccaaccacttagatctagagatgcgccatgcgctcactatggcattgcaaacctttgaaggcgcaatggttatcgtatcgcacgaccgtcacttactgcgattaacctgtagcgattactatctggttgaccaaggccaagtgcaggccttcgatggcgatttagaggattaccaccaatggttactcgatgccgctaaggccgccagtgcgaattccaccgttaacggtgacgatgccaaacccgccgtcgataagaaacagcaaaagcggttagaggcagagctacgccaaaaggtgtcgccacttaaacgcaaacaggcgaagcttgaaaccgatcagcaaaagctcagtgaacgcctcgccgagttggagcatctactggccgatagcgagctttacgatcaggacaataaagccaaactcacatcggtactcagtgagcgcaccagcttgacacaaacgctggaagaaagtgaaatgcaatggcttgagctgcaagaagaaattgattcaatggaacttgagctgatgggccagtaa

SEQ ID NO: 82743 - protein, 637 aa, Shewanella sp. MR-4
MISINQAQLIRGSKTLLDEASLTIYPGHKVGLVGANGTGKSSLLALIMGHLSLDKGEFSMPSGWQIATVAQETPALEVSALEYVLDGDKEYRQLEADLHIAQEHNDGHAIATLHGKIDAIGGYAIRARAGALLAGLGFSEAEQNNPVKSFSGGWRMRLNLAQALLCRSDLLLLDEPTNHLDLDTMYWLEGWIKSYQGTLILISHDRDFIDEIVDEIVHVENQKLNYYKGNYSAFERIRAERMAQQQVAYERQQKERAHMQSFVDRFRYKASKAKQAQSRLKALERMTELLPSQADSPFYMEFRPPEALPNPLIKMEQVAVGYGDKQILSKVHLNLVPGARIGLLGRNGAGKSTLIKLLSGQLSPMTGLYEPNPGLNIGYFAQHQIEFLRLDDTPLQHLVRLAPNAREQELRNFLGGFGFHGDMALSPVRPFSGGEKARLVLALLVWQRPNLLLLDEPTNHLDLEMRHALTMALQTFEGAMVIVSHDRHLLRLTCSDYYLVDQGQVQAFDGDLEDYHQWLLDAAKAASANSTVNGDDAKPAVDKKQQKRLEAELRQKVSPLKRKQAKLETDQQKLSERLAELEHLLADSELYDQDNKAKLTSVLSERTSLTQTLEESEMQWLELQEEIDSMELELMGQ

SEQ ID NO: 82744 - DNA, 2019 bp, Alkalilimnicola ehrlichei MLHE-1
  CDS (1)..(2019): transl_table=11
gtgcgcatccgcctggggcatcgccctgacgccttggcaccatcggctggtagaatcccagccatgatcaccctcaaggacatcaccctttcccgcggccccgaggaactcctccaccaggccagtctcaccgtctacccggggcagcgcctcggcctggtcggtcccaacggctgcggcaagagcaccctgttcgccctgctgcagggcgagatcggcccggacgccggcgaggtgggcatcccccgtgattggcgtatcgcccatgtggtccaggagaccccggcgctggccagcagcgccctggactacgtgctggatggccacctggagctgcgagcactccaggcgcggctggccgaggcggaagcggcgggcgacggcgaggccatggggcaactgcacgcccgcctggacgccatcgacggctacaccgccgcctcccgggcggagaccctgctggaggggctgggttttgacgccgccgggcgggcccggccggtgagcgatttctccggcggctggcgcatgcgcctcaacctggcccgcgcgctcatccagccctccgacctgctgctgttggacgagcccaccaaccacctggacctggaggctgtgctctggctggagcagtggctctgccagtacccgggggcgctgctgctcatctcccacgaccgcgacttcctcgacaccgtggtccagggcatcgtccacttcgatggccggcggctggtgcactatacgggcggctacagcgacttcgaaaagcgccgcgccgagcgcctggcgcaacagcaggcccagtacgagaagcagcaggcggagattgcccatctgcacaaattcatcgaccgcttccgcgcccaggccaacaaggccaaggcggcgcagagccgtatcaaggcgctggagcggatggagcgcatcgccccggcgcacgtggacgcgcccttcgagttccacttccccgacccgccccgggccgccaacccgctgctggtgctcgaccgggtggatttgggctatggcggtgacccggtcctgcgccggattcagctctcgctgcgcccgggggagcggatgggcctgctgggaccgaacggggccggcaagtccaccttcatccgcgccctggccggcgagttgaaaccccaggcgggccagatcaccggcagtcaggggctggccgtgggctacttcgcccagcatcaactggagcaactggatggccaggcctcgccgctgctgcacctgcagcgcctggccccgaaggcgcaggaacagaccctgcgcaactttatcggcggtttcggcttctccggcgacgatgcggaccgtgccgtggcccccttcagcggtggtgaaaaggcccgcctggtgctggcactgctggtctggcagcggcccaacctgttgctgttggacgagcccaccaaccacctggacctggagatgcgccacgccctgaccgtcgccttgcaggaatacgaaggcgccgtggtcctcgtctcccacgaccgtcacctgctcaccaccacctgcgatgagtactacctggtggccgagggccgcgtccgcccgctggacggcgacctggagacctaccgccagtggttcctcgaatggcgcgaggcgcagaaggccgtcaacggcgtcgcctctgccgggaccgggcccgcgcctgatggcgacgaaccgcggcacgggtcctccccggcgcacacggctgaatcgcgcaaggcccagcgccgcgcccaggcgcggcaacgcgagcagcttcgcccgttgcgtcgcaaggccgagcagttggagaaggcgctggatgaactgagcggggagctggctgacgtggagagggccctgggtgagcccgctttgtacgaggcagcgggcaaggaccgcctgaccgaactgctgcaccggcagggggtgctcaaggcccgccaggaggccttggaggcggactggatggaggccctggaggcgttggaggcggccgaggccgcgttgggttga

SEQ ID NO: 82745 - protein, 672 aa, Alkalilimnicola ehrlichei MLHE-1
MRIRLGHRPDALAPSAGRIPAMITLKDITLSRGPEELLHQASLTVYPGQRLGLVGPNGCGKSTLFALLQGEIGPDAGEVGIPRDWRIAHVVQETPALASSALDYVLDGHLELRALQARLAEAEAAGDGEAMGQLHARLDAIDGYTAASRAETLLEGLGFDAAGRARPVSDFSGGWRMRLNLARALIQPSDLLLLDEPTNHLDLEAVLWLEQWLCQYPGALLLISHDRDFLDTVVQGIVHFDGRRLVHYTGGYSDFEKRRAERLAQQQAQYEKQQAEIAHLHKFIDRFRAQANKAKAAQSRIKALERMERIAPAHVDAPFEFHFPDPPRAANPLLVLDRVDLGYGGDPVLRRIQLSLRPGERMGLLGPNGAGKSTFIRALAGELKPQAGQITGSQGLAVGYFAQHQLEQLDGQASPLLHLQRLAPKAQEQTLRNFIGGFGFSGDDADRAVAPFSGGEKARLVLALLVWQRPNLLLLDEPTNHLDLEMRHALTVALQEYEGAVVLVSHDRHLLTTTCDEYYLVAEGRVRPLDGDLETYRQWFLEWREAQKAVNGVASAGTGPAPDGDEPRHGSSPAHTAESRKAQRRAQARQREQLRPLRRKAEQLEKALDELSGELADVERALGEPALYEAAGKDRLTELLHRQGVLKARQEALEADWMEALEALEAAEAALG

SEQ ID NO: 82746 - DNA, 1932 bp, Azoarcus sp. BH72
  CDS (1)..(1932): transl_table=11
gtgatcagttttcgcaacctccgtctggcgcgcggcgccagaacgctcatcgaaggcgccagcctgcagatccaccccggctggaaggtcggcctgaccggcgccaacggcagcggcaagtccagcctgttcgcgatgctgcgcgaccagctccatcccgaccagggcgacctcgacatgccgcagggctgggtgatcgcgcacgtcgcccaggaaaccccgggcctgccgcagccggcgatcgactacgtgctcgacggcgacgccgagctgcgcgaggtcgagagcgcactggcgaaggcggaggcggagcacgacggcagccacatcggcgaactccatgcccgcctgcacgagatcggcggttacgccgcgcgcgcccgcgccgccgcgctgctcgacggtctcggcttcctgcctgcggacatcgagcgtccggtggcggatttctccggtggctggcgcatgcgcctgaacctggcgcaggcgctgatgtgccgctccgacctgctgctgctcgacgaaccgaccaaccacctcgacctcgacgcggtgatctggctcgaggcctggctgcgcgactaccgcggcacgctgctgctgatctcgcacgaccgcgagttcctcgatgcctgcgtcacccacgtcgcccacatcgagcagcagaagctcacgctctacaccggcggctattccgacttcgagcgccagcgcggcgagcgcctgatccagcagcaatcgatgttcgagcgccagcagcgcgagatcgcgcacatggaggactacatccgccgcttccgcgccaaggccaccaaggcgcgccaggcgcagagccggatcaaggcgctggagcggatggagcgcatcgccgcggcccacgtcgatacgccgttttccttcagcttccgcgactgcccggcggcgccggatccgctgctgcagatcgaggacggcgcggtgggctacggcgggcgcacggtgctcgatcgcatcgtgctcacgctgcgcccgggtgagcgcgtcggcctgctcggccgcaacggcgcgggcaaatcgacgctgatcaagctgctgtccgggcaactggccctgagcgccggccgccggctggaaggcaaggggctggcgaccggctatttcgcccagcaccagctcgaaaccctgcgcccggaagaatcggcgctgcagcacatgacccggctcgacccggccgcgcgcgagcaggacctgcgcgactacctcggcggcttcgatttccgcggcgacggcgtcggcggcacctcgaccccggcgaccacgccgtgcgcgccgttttccggcggcgagaagtcgcgcctggcgttggcgctgctgatctggcagcggcccaacctgctgctgctcgacgaaccgaccaaccacctcgacctcgaaatgcgccatgcgctgacgctggcgctgcaggactacgagggcgcgatggtgctggtgtcgcacgaccgcgcgctgctgcgcgccacctgcgaccgcttcctgctggtcgatgacggccgcatccagcccttcgacggcgatctcgacgactatcgcgactggctggcagcgcgccgcgccgaagcggccgcggcggcgcagtgccctgaccaggccgccgacaaggcggcgcgcaaggctgaccgcgcccaggccgcggcagaccgccaggcgcggctggcggcgcgccggccgctggtgaaggaactggaccagctcgagaaaaagctcgccggctggaatggcgagaagaagctgctcgacgcgcgccttgccgaccccacgctctacagcggcggcgacagcgcgcaattgcagaccctgctcaagcgccaggccgaactcgccggctggatcgatgaggcggaactgcgctggctggagatctccgaggcgctggaggcgctgccggccgactga

SEQ ID NO: 82747 - protein, 643 aa, Azoarcus sp. BH72
MISFRNLRLARGARTLIEGASLQIHPGWKVGLTGANGSGKSSLFAMLRDQLHPDQGDLDMPQGWVIAHVAQETPGLPQPAIDYVLDGDAELREVESALAKAEAEHDGSHIGELHARLHEIGGYAARARAAALLDGLGFLPADIERPVADFSGGWRMRLNLAQALMCRSDLLLLDEPTNHLDLDAVIWLEAWLRDYRGTLLLISHDREFLDACVTHVAHIEQQKLTLYTGGYSDFERQRGERLIQQQSMFERQQREIAHMEDYIRRFRAKATKARQAQSRIKALERMERIAAAHVDTPFSFSFRDCPAAPDPLLQIEDGAVGYGGRTVLDRIVLTLRPGERVGLLGRNGAGKSTLIKLLSGQLALSAGRRLEGKGLATGYFAQHQLETLRPEESALQHMTRLDPAAREQDLRDYLGGFDFRGDGVGGTSTPATTPCAPFSGGEKSRLALALLIWQRPNLLLLDEPTNHLDLEMRHALTLALQDYEGAMVLVSHDRALLRATCDRFLLVDDGRIQPFDGDLDDYRDWLAARRAEAAAAAQCPDQAADKAARKADRAQAAADRQARLAARRPLVKELDQLEKKLAGWNGEKKLLDARLADPTLYSGGDSAQLQTLLKRQAELAGWIDEAELRWLEISEALEALPAD

SEQ ID NO: 82748 - DNA, 1923 bp, Neisseria meningitidis FAM18
  CDS (1)..(1923): transl_table=11
atgattgaaatcaaaaacctcaccctgcaacgcggtttgaaagtcctgctcgacaaagccaacgctaccgtcaatcccggtcagcgcgtcggtttgatcggcaaaaacggaacgggcaaatcgagcctgtttgccttaatcaagggtaaaatcactcaggacggcggcgatgtctcgattccgaaaaactggcggctcgcttccgtttcccaagaaacgcccgatttggatatttccgctttggattacgttttgcagggcgatgccgagttgcaggcttttcagacggcattgaggcaggcggaagcgcaaaatgacggcatgaagcaggcggaatatcatgccaaattggaagaaatcgacgcttataccgcgccggcccgcgcggcaaaattgttgaacgggctgggtttttcgcaagaagaacacagccgccccgtcaaatccttttccggcggctggcgtatgcgcttgaatcttgcgcaagccctgatttgccgcgccgatttgctcttgcttgacgaaccgaccaaccacttggatttagaaaccgtcttgtggctggaaaaccaccttgcctctttaccctgcacgcaaatcatcatttcccacgaccgcgattttctcaacgcggcaactacccaaaccattgaattatcgcagcaaaaactcacgcaatacggcggcaattacgatttttaccaaaacgaacgcgcgcagcgtctcgcgcaacaacaagctgcctatgtcaaacagcaggcgcaaatcaaacatctgcaatcctttatcgaccgcttcaaagccaaagccaccaaagccgttcaagcgcaaagccgcatgaaggctttggcaaagctagaacgcgttgcgcccgcgcatctggacagcgagttttcctttgagttttaccatcccgaccatctgcccaatcctttgttaaagctagaacacgctgatttgggttacgaaggcaaaaccgttctgcatgacattaccctgtcgctggaaagcggcgcacgctacgggctattgggtgtcaacggcagcggtaaatctacctttatcaaagccttggcgggcaaaatcgatttgctttccggcagcatcgtccgttccgaaaaactcaatatcggctattttgcccaacaccaactcgacaccatccgcgccgaccaaaaccctgtttggcatattcagcagctttctcccaaagtacgcgaacaagaaatccgaaatttcctcggcggcttcaattttgttggcgatatggcgttacagaaaaccgaacctttttccggcggagaaaaagcccgccttgcccttgccatgattatctggcaaaagccgaacctgttgctgcttgacgaaccaaccaaccatctggacttggatatgcgccacgccctgacgctcgctctgcaaagtttccaaggcgccttaatcatcgtatcgcacgaccgcagcctgcttgaagcgactaccgacagcttcctcctgatcgacaaaggccgtctgaagaacttcgacggcgatttgaacgattaccgccaatggcgtttggcacaggaaaacgccgccgccgcacccgcagcatccgcacaaagccaaagccgcaaagacaccaagcgcatcgaagcgcaaatccgtcaggaaaaagcccgacgcggcaagccgatacagcagaaaatagaccgtgccgaaaaagaaatggcgcagctttccgaaattcagacggcatgtgaagcatttttagcacaagaagacgcttaccttgaagcaaacaaagaaaaattgcaaaataccttatcccagctggcaaaagtcaaaacacaacttgcccaaatcgaagaggtttggctggcttgtcaagaagaattggaacggattgaaactgaaatcgagaaacagtttgccgagcgataa

SEQ ID NO: 82749 - protein, 640 aa, Neisseria meningitidis FAM18
MIEIKNLTLQRGLKVLLDKANATVNPGQRVGLIGKNGTGKSSLFALIKGKITQDGGDVSIPKNWRLASVSQETPDLDISALDYVLQGDAELQAFQTALRQAEAQNDGMKQAEYHAKLEEIDAYTAPARAAKLLNGLGFSQEEHSRPVKSFSGGWRMRLNLAQALICRADLLLLDEPTNHLDLETVLWLENHLASLPCTQIIISHDRDFLNAATTQTIELSQQKLTQYGGNYDFYQNERAQRLAQQQAAYVKQQAQIKHLQSFIDRFKAKATKAVQAQSRMKALAKLERVAPAHLDSEFSFEFYHPDHLPNPLLKLEHADLGYEGKTVLHDITLSLESGARYGLLGVNGSGKSTFIKALAGKIDLLSGSIVRSEKLNIGYFAQHQLDTIRADQNPVWHIQQLSPKVREQEIRNFLGGFNFVGDMALQKTEPFSGGEKARLALAMIIWQKPNLLLLDEPTNHLDLDMRHALTLALQSFQGALIIVSHDRSLLEATTDSFLLIDKGRLKNFDGDLNDYRQWRLAQENAAAAPAASAQSQSRKDTKRIEAQIRQEKARRGKPIQQKIDRAEKEMAQLSEIQTACEAFLAQEDAYLEANKEKLQNTLSQLAKVKTQLAQIEEVWLACQEELERIETEIEKQFAER

SEQ ID NO: 82750 - DNA, 1920 bp, Haemophilus somnus 2336
  CDS (1)..(1920): transl_table=11
atgatcctttttacaaatttaactttaaagcgtggaaataccttactcttagaaaatacctgtgccactattaaccccggtcaaaaagttggcttagtcggaaaaaatggttgtggtaaatcttctttatttgcactactcaaaaaagaaatgagtgctgaagaaggtgatataacttttccaaatcactgggcaatggcttgggtaaatcaagaaacacccgccttagaaataagtgcgttagattatgttatcaaaggcgatcgtgaatattgcaaattacaaaaggccttagcaactgctaccgaaaataatcatggcaatgatattgcccgtattcatgcacaattagacacaattgatgcttggacaattcaagcgagagcggcttctcttttacatggattggggttttctcaagaggatttaacaagaacggttaaatctttctcgggcggttggcgtatgcgtcttaaccttgcacaagccctgctttgtcgctctgatttactcttattagacgaaccgacaaaccatttagacttagatgctgtcatttggttagaacgttggttaattcaatatcaaggcaccttgattttaatttcacatgaccgtgattttcttgatcctattgtgaataaaatcattcatattgaacaacataaactgcatgaatacagtgtcaattattcttcctttgaagtgcaacgtgcaacaaaattagcacaacaaaccgcactttatcgccaacagcaacaaaaaataaaccatctacaaaaatatatcgatcgctttaaagccaaagcaactaaagccaaacaagcacaaagtcgagtcaaagccttagaacgaatggaacttattgcacctgcttatgtagataatccttttacctttaaatttcgtgaaccgctcgctttacccaatcccttggtttccattgaaaaagccagtgcaggttatgacaatggagaaagtacggtggaaattttacaaaaaattaagctcaatttagtaccaggatctcgtatcgggttgctcggtaaaaatggggcgggtaaatctacgttaattaaattattggcaggggaactgaccgcactttccggtcatgtccaattagcaaaaggcgtaaaattagggtattttgcacagcatcaattggatacgctacgttcggaagaaaatgcactctggcatatgcaaaaaattgctccacaacaaacggaacaacaattacgtgattacttgggcagttttgcttttcatggtgataaagtaactcaagctgtttcttctttttccggcggtgaaaaggctcgcttggttttagctattattgtttggcaacgcccaaacttattactgctggacgaaccgacgaaccacttggatttagatatgcgtcaagccttgacagaagcattaatagattatcaaggttcactggtcgtggtttcccacgatcgccatttactgcgtaatacagtagaagaattttatttggttcatgataaacaagttgaggaatttacaggcgatttagaagactatcaaaaatggctaaatgaaattaatagcacgccgaaacataatgagaaaatcatcaataataacgaaaacaccggtaatcatcgcaaagaacaaaaaagaaaagaagctgaactgcgtcaacggagtgcaccattacgaaaagaaattgccgatattgaacgcaaaatgcaaatatatcaacaaaaactacaagaaattgaattacttctttccgatacagtgctttatcagacagaaaataaagcaaaactcaccgcacttttaaatgaacaggttcagcttaaaaaagcacttgaagatatagaaatttcatggttcacaatgcaagaagcattagaaaatttgattaataatatagaataa

SEQ ID NO: 82751 - protein, 639 aa, Haemophilus somnus 2336
MILFTNLTLKRGNTLLLENTCATINPGQKVGLVGKNGCGKSSLFALLKKEMSAEEGDITFPNHWAMAWVNQETPALEISALDYVIKGDREYCKLQKALATATENNHGNDIARIHAQLDTIDAWTIQARAASLLHGLGFSQEDLTRTVKSFSGGWRMRLNLAQALLCRSDLLLLDEPTNHLDLDAVIWLERWLIQYQGTLILISHDRDFLDPIVNKIIHIEQHKLHEYSVNYSSFEVQRATKLAQQTALYRQQQQKINHLQKYIDRFKAKATKAKQAQSRVKALERMELIAPAYVDNPFTFKFREPLALPNPLVSIEKASAGYDNGESTVEILQKIKLNLVPGSRIGLLGKNGAGKSTLIKLLAGELTALSGHVQLAKGVKLGYFAQHQLDTLRSEENALWHMQKIAPQQTEQQLRDYLGSFAFHGDKVTQAVSSFSGGEKARLVLAIIVWQRPNLLLLDEPTNHLDLDMRQALTEALIDYQGSLVVVSHDRHLLRNTVEEFYLVHDKQVEEFTGDLEDYQKWLNEINSTPKHNEKIINNNENTGNHRKEQKRKEAELRQRSAPLRKEIADIERKMQIYQQKLQEIELLLSDTVLYQTENKAKLTALLNEQVQLKKALEDIEISWFTMQEALENLINNIE

SEQ ID NO: 82752 - DNA, 1917 bp, Actinobacillus pleuropneumoniae serovar 1 str. 4074
  CDS (1)..(1917): transl_table=11
atgatttttttcactgatcttatcttaaaacgtggacaatccgtccttttagaaaatacctccgctaccattcataccgggcaaaaagttgggctggtcggcaaaaacggttgtggtaaatcttcacttttcgctttagtgaaaggtgaattacaaccggaaggcggcgatgtttctctgccgaaaaactgggcgatttcttgggtaaatcaagaaacgcctgcactggaaatttccgcattggattatgtgattcaaggcgatcgcgaatataccggtttgatgaaccagctggaaaaagccaatcaagaaaacaacggcaaccaaattgcgatgattcatactcaactggatacgatagacgcatggacgattcaagcccgtgcagcaactttattaaacggcttgggcttctctaacgaacaactttctttaccgatgaaatcgttctcgggtggttggcgtatgcgtttaaatttagcgcaagcgctgatctgccgttctgatttattactcctcgatgaaccgactaaccatttggatttagatgcggtaatttggttggagaaatggctgaccaattatcgtggcacgctattattaatctcccatgaccgagattttcttgatccgattattgatcgtgtgattcatatcgaaaatcagcagctgaatgattacaccggtaactacacctcgtttgaaattcagcgtgccaccaaaatctcgcaacaaaatgccgcttatgcacaacaacagcgcaaagttgctcatttacagagctttatcgaccgttttaaagccaaagcaaccaaagcgaaacaagcacaaagccgtatcaaagcgttggaaaaaatggaactgattgcaccggcttatgcggatagcccgtttgaatttgaattccgtccgccgctcgctttgccaagcccgttattaatgatggaaaaagccggtgcaggttatggtaacaaaaccattttggaatcggttaagttgaatttagtccccggctcacgtatcggtttactcgggcgaaacggtgcgggtaaatccacgctgattaaattactcgccggcgaattagctccgcaaacagggcatattcaattagctaagggagtgcaattaggttatttcgctcaacatcaagtagatacgttacgctttgatgaaagcccgttatggcatttacaaaaaattgcgccggaattaacggaacaagaagtacgcaattatttaggcggctttgattttaaaggcgataaagtgaaacaaaacgtcggctcgttttccggcggggaaaaagcccgtttagtgttagcgttaatcgtatggcaacgtccaaatttactgttattggacgaaccgaccaaccatttagatttagaaatgcgtcaggcactcaccgatgcgctcacttactatgaaggctcgctagtagtggtttcgcatgatcgtcatttattacgtagtacggtgaatgaattttatctggtgcatgataaaaaagtggaagaattcaaaggcgatctggatgattaccaaaaatggctaaacgaacaaaatgcgctggaagctgcaaaaaattcaggaaattcgaccgcttgtacggaagaaaaagcggataacagtgcggcaaatcgtaaggagcagaagcgtttagaggcagagttacggcaacaaaccgcaccgttacgtaaaaagatcacccagctagagaaagatcttgaaaaagcgagtgaaaagctaaatcaactcgaagcactactggcgtcaagcgagatctatgaagcggaaaataaagcgcaactaaccgaaacgctcgcgaagcaaatcgaagagaaaaaagcagttgaagaaatcgaaatggaatggctggattgccaagaacagcttgaggcattgctcagctaa

SEQ ID NO: 82753 - protein, 638 aa, Actinobacillus pleuropneumoniae serovar 1 str. 4074
MIFFTDLILKRGQSVLLENTSATIHTGQKVGLVGKNGCGKSSLFALVKGELQPEGGDVSLPKNWAISWVNQETPALEISALDYVIQGDREYTGLMNQLEKANQENNGNQIAMIHTQLDTIDAWTIQARAATLLNGLGFSNEQLSLPMKSFSGGWRMRLNLAQALICRSDLLLLDEPTNHLDLDAVIWLEKWLTNYRGTLLLISHDRDFLDPIIDRVIHIENQQLNDYTGNYTSFEIQRATKISQQNAAYAQQQRKVAHLQSFIDRFKAKATKAKQAQSRIKALEKMELIAPAYADSPFEFEFRPPLALPSPLLMMEKAGAGYGNKTILESVKLNLVPGSRIGLLGRNGAGKSTLIKLLAGELAPQTGHIQLAKGVQLGYFAQHQVDTLRFDESPLWHLQKIAPELTEQEVRNYLGGFDFKGDKVKQNVGSFSGGEKARLVLALIVWQRPNLLLLDEPTNHLDLEMRQALTDALTYYEGSLVVVSHDRHLLRSTVNEFYLVHDKKVEEFKGDLDDYQKWLNEQNALEAAKNSGNSTACTEEKADNSAANRKEQKRLEAELRQQTAPLRKKITQLEKDLEKASEKLNQLEALLASSEIYEAENKAQLTETLAKQIEEKKAVEEIEMEWLDCQEQLEALLS

SEQ ID NO: 82754 - DNA, 1899 bp, Fusobacterium nucleatum subsp. vincentii ATCC 49256
  CDS (1)..(1899): transl_table=11
ttggcaatattacaagtaaatgatatatatatgggtttctctggtgaaactctttttaaagatataaatttttcagttgatgaaaaagataaaataggaataataggtgtaaatggtgcaggaaaaactacacttataaaattattactaggtttagaaaattctgaaatcaatcctgccaccaatgagagaggaactatctcaaagaaaagcaatttgaaagttggatatcttgcacaaaatacacaacttaacaaagaaaacactgttttcaatgagcttatgacagtattcaataatcttttagaagactataatagaatgcaagaaataaattttttattaacagttgatgtagataattttgataaattaatggaagaacttggggaaatttctgaaagatatgaaagacatgaaggatattcaatagaatacaaaatcaagcagattttaaatggtttaaatatcccagaaaatttatggactatgaagatagggaatttatcaggtggtcaaaattcaagagttgcacttgctaaaatactattggaagagccagatttattgatacttgatgaacctactaaccatttagatttaacttctattgaatggcttgaaaaaattttaaaagactataataaggctataattttaatatcacatgatgtatattttttagataatgtagtaaatagaatttttgagattgaaggaaaaaggttaaaagactataaaggaaactacactgattttttaattcaaaaagaggcttatttaagtggggaagttaaagcctatgagaaagaacaagaaaaaatcaagaaaatggaagaatttatcagaagatacaaagcaggagtgaaatctaaacaagccagaggtagagaaaaaatacttaatagaatggaaaaaatggaaaatcctgttgtaacaacaaaaaagataaaacttaaatttgatattaaagcacaaagtgttgacttagttttggatattaaaaatttatccaagacttttgaagataaattattatttaaagacttaaatttaaaaatttatcgtggagaaagaataggtttaattggaaaaaatggtacagggaaatctactcttttaaagattatcaatggaatagaaaaggctagttcaggagaatttaaaataggtgaaagagtttctattggttactatgaccaaaatcaccaaggtttaggtttgaataataatattatagaagaactgatgtactattttactctatcagaagaagaagcaagaaatatctgtggagcatttctatttagagaagatgatatttacaaaaagatttcttctttaagtggtggagaaaaagcaagggttgcatttatgaaacttatgcttgaaaaacctaactttttaatactagatgaacctactaaccacttggatatatattcaagagaaattttaatggatgcacttgaagattatcctggaactattttagttgtttctcatgatagaaatttcttagatactgttgtcaataaaatctatgaattaaaaacagatggtgttgaaacttttgatggcgattatgaggcctacaaacaagaaagagataatataaaggtaaaaaatgaagaagctgttaaatcttatgaagaccaaaaaaaagctaaaaataaactggcttccttagaaaagaaactcataaaacttgaagaagaaatacaaaaaattgaagcacaaaaagaggaaataaataaaaagtatctacttgcaggagaaaaaaataatatagatgaacttatgtctttacaagaagaattggatagtcttgataataaaatattaaaaaaatatcaagagtgggaagaaatagaggaagaattaaaaaatttacaataa

SEQ ID NO: 82755 - protein, 632 aa, Fusobacterium nucleatum subsp. vincentii ATCC 49256
MAILQVNDIYMGFSGETLFKDINFSVDEKDKIGIIGVNGAGKTTLIKLLLGLENSEINPATNERGTISKKSNLKVGYLAQNTQLNKENTVFNELMTVFNNLLEDYNRMQEINFLLTVDVDNFDKLMEELGEISERYERHEGYSIEYKIKQILNGLNIPENLWTMKIGNLSGGQNSRVALAKILLEEPDLLILDEPTNHLDLTSIEWLEKILKDYNKAIILISHDVYFLDNVVNRIFEIEGKRLKDYKGNYTDFLIQKEAYLSGEVKAYEKEQEKIKKMEEFIRRYKAGVKSKQARGREKILNRMEKMENPVVTTKKIKLKFDIKAQSVDLVLDIKNLSKTFEDKLLFKDLNLKIYRGERIGLIGKNGTGKSTLLKIINGIEKASSGEFKIGERVSIGYYDQNHQGLGLNNNIIEELMYYFTLSEEEARNICGAFLFREDDIYKKISSLSGGEKARVAFMKLMLEKPNFLILDEPTNHLDIYSREILMDALEDYPGTILVVSHDRNFLDTVVNKIYELKTDGVETFDGDYEAYKQERDNIKVKNEEAVKSYEDQKKAKNKLASLEKKLIKLEEEIQKIEAQKEEINKKYLLAGEKNNIDELMSLQEELDSLDNKILKKYQEWEEIEEELKNLQ

SEQ ID NO: 82756 - DNA, 1917 bp, Haemophilus influenzae R2846
  CDS (1)..(1917): transl_table=11
atgattatatttagtaacttatccttaaaacgagggcaaacggaacttctcgaaaatgcttctgctaccattaatcccaagcaaaaagtcggtttggtggggaaaaatggttgcggaaaatcttctctttttgccttattaaaaaaagaattaacgccagagggcggcgaggtaaattatccgtcaaattggcgggtgtcttgggtgaatcaagaaacgcctgcattggatatttcagcgattaattatgtgattcaaggggatcgtgaatattgccgtttgcaacaagagcttgaacaagcaaatgaacgcaatgacggtaacgctattgcacgtattcatgggcaattagaaatgttggatgcgtggacaattcaatctcgtgccgcgtctttattgcatggtttaggattcagtcaagaagaaacaacacagccagtgaaagccttttcgggcggttggcggatgcgtttgaatttggcacaagctctgctttgtccgtcagatttattgttacttgatgagccaaccaaccatttggatttggatgcggttatttggttggagcgttggttagtgcaatatcaaggcactttggtattaatttctcacgaccgtgattttctcgatccgattgtgacaaaaatcctccatatcgaaaatcagaagctcaacgaatacacaggcgattattcttcctttgaagtgcaacgcgccactaaactggcacaacaaacggctatgtatcgtcagcaacagcaaaagatttcccatttacaaaaatatattgatcgctttaaagccaaagccaccaaagctaaacaggcacaaagccgtatgaaagcattggaaagaatggagctgattgcacctgcttatgtggataatccttttacctttgaatttcgtccgccgcaatccttgccaaatcccttagtgatgattgagcaagcgagtgcaggttatggttgcggagaaagtgcggtagaaattttaagtaaaattaaactgaatttggtgccaggttcgcggattggtttgctcgggaaaaatggtgcgggaaaatcaaccttgattaaacttttagcgggagaactgaccgcactttcaggcaccgtgcagttggcaaaaggcgtgcagcttggctattttgcccaacatcaattagatactttacgcgcagatgaatctgccctgtggcatatgcaaaaactcgcaccagaacaaacggagcaacaagttcgcgattatttgggcagttttgcgttccacggcgataaagtaaatcaagcagtgaaatccttttctggtggcgagaaagctcgtttggtgttggctttaattgtttggcaacgacctaatttgttattacttgatgaaccgactaaccatttggatttggatatgcgtcaggcattaacggaagcgttggtggattacgaaggttctttggtggtggtgtctcacgatcgtcatttattacgcaataccgtagaagaattttatttagttcacgataaaaaagtggaagaatttaaaggcgatttagaagactatcaaaaatggctgaatgaacaaaacagtacgtctgaaaataaagtctcagaaaaagtaggtgataatgaaaattcggttcaaaatcgtaaggaacaaaaacgccgtgaagcagagttacgccaacaaactgcaccattgcgtaaaaaaatcacgcaattagaagaaaaaatgaataaattttcttctgagcttgcgaacatagaaaatcaactggcagatgccgaattatataatgccgaaaataaagaaaaattgaccgcacttttggctcaacaagtggatgtgaagaaagcattagatgatgtggaaacggaatggatgaccgcacaggaagaattggaagaaatgcttcaagcataa

SEQ ID NO: 82757 - protein, 638 aa, Haemophilus influenzae R2846
MIIFSNLSLKRGQTELLENASATINPKQKVGLVGKNGCGKSSLFALLKKELTPEGGEVNYPSNWRVSWVNQETPALDISAINYVIQGDREYCRLQQELEQANERNDGNAIARIHGQLEMLDAWTIQSRAASLLHGLGFSQEETTQPVKAFSGGWRMRLNLAQALLCPSDLLLLDEPTNHLDLDAVIWLERWLVQYQGTLVLISHDRDFLDPIVTKILHIENQKLNEYTGDYSSFEVQRATKLAQQTAMYRQQQQKISHLQKYIDRFKAKATKAKQAQSRMKALERMELIAPAYVDNPFTFEFRPPQSLPNPLVMIEQASAGYGCGESAVEILSKIKLNLVPGSRIGLLGKNGAGKSTLIKLLAGELTALSGTVQLAKGVQLGYFAQHQLDTLRADESALWHMQKLAPEQTEQQVRDYLGSFAFHGDKVNQAVKSFSGGEKARLVLALIVWQRPNLLLLDEPTNHLDLDMRQALTEALVDYEGSLVVVSHDRHLLRNTVEEFYLVHDKKVEEFKGDLEDYQKWLNEQNSTSENKVSEKVGDNENSVQNRKEQKRREAELRQQTAPLRKKITQLEEKMNKFSSELANIENQLADAELYNAENKEKLTALLAQQVDVKKALDDVETEWMTAQEELEEMLQA

SEQ ID NO: 82758 - DNA, 1917 bp, Haemophilus influenzae R2866
  CDS (1)..(1917): transl_table=11
atgattatatttagtaacttatccttaaaacgagggcaaacggagcttctcgaaaatgcttcagctaccattaatcctaagcaaaaagtcggtttggtggggaagaatggttgcggtaagtcgtctctttttgccttattaaaaaaagaattaacgccagaggggggcgaggtaaattatccagcaaattggcgggtatcttgggtgaatcaagaaacgcctgcattggatatttcagcaattgattatgtaattcaaggggatcgtgaatattgccgtttgcaacaagagcttgaacaagcaaatgaacgcaatgacggtaacgccattgcgcgtattcacgggcaattagaaaccttggatgcgtggacaattcaatctcgtgccgcttcgttattgaatggtttaggatttagtcaagaagaaacaacccagccagtgaaagccttttcgggcggttggcggatgcgtttgaatttggcacaagctctgctttgtccgtcagatttattgttacttgatgaaccgaccaaccatttggatttggatgcggttatttggttagaacgttggttagtgcaatatcaaggcactttggtattaatttctcacgaccgtgattttctcgacccgattgtgacaaaaatcctccatatcgaaaatcagaagcttaacgaatacacaggcgattattcttcctttgaggtgcaacgagccactaaattggctcaacaaacagcgatgtatcgtcagcaacaacaaaaaatttcccatttacaaaaatatattgatcgctttaaagccaaagccaccaaagctaaacaagcacaaagccgtatgaaagcattggaaagaatggagctgattgcgcctgcttatgtggataatccttttacctttgaattccgtccgccgcaatctttgccaaatcccttagtgatgattgagcaggccagtgcaggttatggttgcggagaaagtgcggtagaaattttaagtaaaattaaactgaatttggtgccaggttcgcggattggtttgctcggtaaaaatggtgcgggaaaatcaactttgattaaacttttagcaggagaactgaccgcactttcaggcacagttcagttggcaaaaggcgtgcagcttggctattttgctcagcatcaattagatactttacgcgcagacgaatccgccctgtggcatatgcaaaaactcgcaccagagcaaacggagcaacaagttagggattatttgggcagttttgcgttccacggcgataaagtaaatcaagcagtgaaatccttttctggtggcgagaaagctcgtttggtattagctttgattgtttggcaacgacctaatttgttattacttgatgaaccgactaaccatttggatttggatatgcgtcaagcattaacggaagcattggtggattacgaaggttctttggtggtggtgtctcacgatcgtcatttattacgcaataccgtagaagaattttatttagttcacaataaaaaagtggaagaatttaaaggcgatttagaagactatcaaaaatggttgagtgaacaaaatagcacatctgaaaataaagtttcggaaaaagtgggcgataatgaaaattcggttcaaaatcgtaaggaacaaaaacgccgtgaagcagagttacgccaacaaactgctccattgcgtaaaaaaatcacgcaattagaagaaaaaatgaataaattttcttctgagcttgcgagcatagaaaatcaattggcagatgctgaattatataatgccgaaaataaagaaaaattgaccgcacttttggctcaacaagtggatgtgaagaaagcattggatgatgtggaaacagaatggatgaccgcacaggaagaattggaagaaatgcttcaagcgtaa

SEQ ID NO: 82759 - protein, 638 aa, Haemophilus influenzae R2866
MIIFSNLSLKRGQTELLENASATINPKQKVGLVGKNGCGKSSLFALLKKELTPEGGEVNYPANWRVSWVNQETPALDISAIDYVIQGDREYCRLQQELEQANERNDGNAIARIHGQLETLDAWTIQSRAASLLNGLGFSQEETTQPVKAFSGGWRMRLNLAQALLCPSDLLLLDEPTNHLDLDAVIWLERWLVQYQGTLVLISHDRDFLDPIVTKILHIENQKLNEYTGDYSSFEVQRATKLAQQTAMYRQQQQKISHLQKYIDRFKAKATKAKQAQSRMKALERMELIAPAYVDNPFTFEFRPPQSLPNPLVMIEQASAGYGCGESAVEILSKIKLNLVPGSRIGLLGKNGAGKSTLIKLLAGELTALSGTVQLAKGVQLGYFAQHQLDTLRADESALWHMQKLAPEQTEQQVRDYLGSFAFHGDKVNQAVKSFSGGEKARLVLALIVWQRPNLLLLDEPTNHLDLDMRQALTEALVDYEGSLVVVSHDRHLLRNTVEEFYLVHNKKVEEFKGDLEDYQKWLSEQNSTSENKVSEKVGDNENSVQNRKEQKRREAELRQQTAPLRKKITQLEEKMNKFSSELASIENQLADAELYNAENKEKLTALLAQQVDVKKALDDVETEWMTAQEELEEMLQA

SEQ ID NO: 82760 - DNA, 1929 bp, Burkholderia vietnamiensis G4
  CDS (1)..(1929): transl_table=11
gtgatccgtttcaatcagttcagccttgcgcgcggcaccaagccgctgttcgagtcggcctcgttcgtgctcaatcccggcgagaaagccggcctgatcggcgcgaacggcgccggcaaatcgacgctgttcgcggtgctgcgcggcgagctgcattccgacggaggcgatttcgcgatgccgccgtcgtggcgcatcgcccacgtgtcgcaggaaacgccggccgtcgaccgctcggcgctcgactacacgctcgacggcgacaccgcgctgcgcgagatcgaggcgcgcatcgccgcggcctcggccgcgcatgacggcgcagccgaggccgacgcgcacgcggcattcgccgacgccgacggctatacggcgccggcgcgcgccgaagcgctgctgctcggcctgggcttcacgctcgcgcagacgcgcgaatcggtcgccagcttctcgggcggctggcgcatgcgcctgaacctcgcgcaggcgctgatgtgccgttccgacctgctgctgctcgacgagccgaccaaccacctcgacctcgatgcgatcgtctggctcgaagactggctgcatcgctacgccggcacgctggtcgtgatctcgcacgaccgcgaattcctcgattcgatctgcaacgtcacgctgcatctggagaatcgccaggtgaagcgctacggcggcaactactcgcagttcgaagtgctgcgcgcgcagcagctggcgctgcagcaaagcgcctacgagaagcagcagaagacgatcgagcatctgcagagcttcgtggaccgcttcaaggcgaaggccaccaaggcgaagcaggcgcaaagccggatgaaggcgctcgagaagatggagctgatcgcgcccgcgcacgtcgcgtcgccgttcacgttcgagttccgcacgcccgacgcggcgccgaacccgatgctcgtgatggaagacgtccgctgcggctaccatgccgacgacggtgcggaaattccgatcgtcgagcgcgtcacgctgtcgatccagaacggccagcgcatcggcctgctcggcgcgaacggccagggcaagtcgacgctgatcaagacgctggccggcacgctcgcgccgctgtccggccacgtgcgcgaaggcaaggggctgacgatcggctatttcgcgcagcatcagctggaaacgctgcgcgaagacgattcgccgctcgcgcatctcgcccggctcgcgcccgacacgcgcgagcaggagttgcgcgacttcctcggcggcttcaatttctcgggcgacatggcgacgagcgcggtcggcccgttctcgggcggcgagaaggcgcggctcgcgctcgcgctgatcatctggcaaaagccgaatctgctgctgctcgacgagccgaccaaccacctcgatctcgaaacgcgtcacgcgctgacgatggcgctcgcgcagttcgaaggcacgctgatcctcgtgtcgcacgaccgccatctgctgcgcgcgacgaccgaccagttcatgctcgtcgccaagcaccggctgcagccgttcgacggcgacctcgacgattaccgcgactggctgctacagcacgcggccgagcaacgcgcggccgcgaaggccgacagcgcggcgtccgctacggagcccggcgtcaatcgcaaggatcagaagcgccaggccgccgaggagcgtcagcgcctgtcgcagctgaagaagccgctgcagaaccgcatctcgaagctcgaaaagcaaatggaaacgctgcatgcggaaaaggcgcggctcgatgcgttcgtcgccgatccggcgagctacgaggccgcccgcaagacggagctgaccgacgcgatccgcacgctcggcgaagtcacgacgcgcctcgaagccgtcgaggcggagtggctcgcggtgcaggaagagctcgagcagatcggctga

SEQ ID NO: 82761 - protein, 642 aa, Burkholderia vietnamiensis G4
MIRFNQFSLARGTKPLFESASFVLNPGEKAGLIGANGAGKSTLFAVLRGELHSDGGDFAMPPSWRIAHVSQETPAVDRSALDYTLDGDTALREIEARIAAASAAHDGAAEADAHAAFADADGYTAPARAEALLLGLGFTLAQTRESVASFSGGWRMRLNLAQALMCRSDLLLLDEPTNHLDLDAIVWLEDWLHRYAGTLVVISHDREFLDSICNVTLHLENRQVKRYGGNYSQFEVLRAQQLALQQSAYEKQQKTIEHLQSFVDRFKAKATKAKQAQSRMKALEKMELIAPAHVASPFTFEFRTPDAAPNPMLVMEDVRCGYHADDGAEIPIVERVTLSIQNGQRIGLLGANGQGKSTLIKTLAGTLAPLSGHVREGKGLTIGYFAQHQLETLREDDSPLAHLARLAPDTREQELRDFLGGFNFSGDMATSAVGPFSGGEKARLALALIIWQKPNLLLLDEPTNHLDLETRHALTMALAQFEGTLILVSHDRHLLRATTDQFMLVAKHRLQPFDGDLDDYRDWLLQHAAEQRAAAKADSAASATEPGVNRKDQKRQAAEERQRLSQLKKPLQNRISKLEKQMETLHAEKARLDAFVADPASYEAARKTELTDAIRTLGEVTTRLEAVEAEWLAVQEELEQIG

SEQ ID NO: 82762 - DNA, 1956 bp, Prosthecochloris aestuarii DSM 271
  CDS (1)..(1956): transl_table=11
atgtttgaagcccgaaacatcttcctcagcgcaggaaccaaagaccttctccagaacgcatcattccgtatcggagaccgggaccgcgtctcgctcgtaggcctcaacggaacaggaaaatcaacccttttgcgactcatcagccaggccgcatcaggcaggacagctctctcacaaggtgaattcacctgttcatcgggtaccacgataggctaccttccacaggaaatatcgtttgagaacgagcttgaaacgacagcattccactatgtgatgcaggccaacaaaaccctcaatgaacttgccgaaaaaatcgagcgactgcaggaagaccttgccgcaccaggccacgaccatgaaagcagtcaataccaccgccttattgaacgcttcagtgaagcatcccatgactttgagcggctcggcggctatacgatggagggacaggctgaaaaagtactgaccggcctgggattcaccaaaacaggattcgaaaaaaaagtaaaggagttttcaggcggatggcagatgcgactgctcattgccagactgcttctgcagaaccctacgcttcttctcctggatgaaccgaccaaccatctcgatatcgattctctgcgctggcttgaaaactacctgctgaactacgaacacagttgtatgatcgtttcgcatgaccgcttctttctcgacaaggtcacgactcgaacactggagatcaatttcagaaccataatagaatacaagggcaactacagctattacgaaaaagagaaagctgaacggttcgaactcatgatggctcgctacgaaaacgacctgaaaaagatggcccatctgaaagactttgtcgacaggttccgtgcaaaggcaaccaaagccaaacaggcccagagcaggctgagacagatgcagaaacttgaagaggaactccaggctcccgaagaggataacgcatcgatctccttcagctttcccaaagccaggccctcaggcaaagaggtgctgcgcctccagaacatctcgaaatcgtggcagttgccagacggaacaaaaaaacaggttctgcaagccatcgatgcagaaatcatgcgtggtgaccgtatagcaatcgtagggtccaacggagccggtaaaaccacattctgcagaatcatcgccggcgatcttgactacgaggggaccatgaccactggtcacaatgtcagcctgaactatttcgcccagcatcagacagaacatctcgatcccctgaaaacgattcttgaagagatgatgaacgccgcaccggactccgaatcacaacgaaaggtccgtgacattctcggctgctttctgttcagcggagagtgcgtcgagaaaaaaaccggggttctttcgggtggcgaaaaatcaagagttgcccttgcaaaaattctgctccaggcatccaaccttctcatcatggacgaaccgaccaatcatcttgacatgcgttccaaggagatgctgatcgatgcgcttgaaaactatgacggaacgcttctgctcgtcagccatgaccgctactttctcgatagtcttgtcaacaaggttatcgaaataaaagatggatcgcttcagctctatctcgggacctatgccgaatatctcgaaaaagctgacaaagcagataaagctgcagaagaagaacgccgaaaaaaagcagctcaacagatccaacggcctgtaaaaagcaaaaaaaacacacacaaaaaggatagcaccccaccgggcaacaacagccggaaaacagaacgtatcgaaaaagagataacccgtctcgaacaacaaaaaaaagatctggaagcgatcatgggcgcccctgcattttatgaggaatcgggagaaaaaacagcggcgaccctgaaaaaatacgatgggatctcaaacgaactcgacaagctctataaggaatgggaaaaggccctctcataa

SEQ ID NO: 82763 - protein, 651 aa, Prosthecochloris aestuarii DSM 271
MFEARNIFLSAGTKDLLQNASFRIGDRDRVSLVGLNGTGKSTLLRLISQAASGRTALSQGEFTCSSGTTIGYLPQEISFENELETTAFHYVMQANKTLNELAEKIERLQEDLAAPGHDHESSQYHRLIERFSEASHDFERLGGYTMEGQAEKVLTGLGFTKTGFEKKVKEFSGGWQMRLLIARLLLQNPTLLLLDEPTNHLDIDSLRWLENYLLNYEHSCMIVSHDRFFLDKVTTRTLEINFRTIIEYKGNYSYYEKEKAERFELMMARYENDLKKMAHLKDFVDRFRAKATKAKQAQSRLRQMQKLEEELQAPEEDNASISFSFPKARPSGKEVLRLQNISKSWQLPDGTKKQVLQAIDAEIMRGDRIAIVGSNGAGKTTFCRIIAGDLDYEGTMTTGHNVSLNYFAQHQTEHLDPLKTILEEMMNAAPDSESQRKVRDILGCFLFSGECVEKKTGVLSGGEKSRVALAKILLQASNLLIMDEPTNHLDMRSKEMLIDALENYDGTLLLVSHDRYFLDSLVNKVIEIKDGSLQLYLGTYAEYLEKADKADKAAEEERRKKAAQQIQRPVKSKKNTHKKDSTPPGNNSRKTERIEKEITRLEQQKKDLEAIMGAPAFYEESGEKTAATLKKYDGISNELDKLYKEWEKALS

SEQ ID NO: 82764 - DNA, 1935 bp, Xylella fastidiosa Dixon
  CDS (1)..(1935): transl_table=11
atgatctctctacgtcattttgcaatgcgccgcggtgggcgcttgttgctgtccaatgttgatatcaccttgcatgcgggggatcgtgttggcgttgttggtcgcaatggtgttggaaagtccagtctgttcgcagcgatacgtggagaattggaagcggacaaaggcaatgttgagttacctggaaaattacgtattgccagtgttgcgcaggaaaccccctccttgtcggatctggccctggactttgtactcagtggtgatgatgtggttgccgaggtcctgcgtgtcgaggcagaggcgaatgcacgcgaggattgggaggcggtagccgctgcccatcagcgcttagccgagatcggcggttacgacgccgaagcacgtgcaggtaaattgctgcatggcttgggttttatcacacagacgcagcggcgtgctgtctcgacgttctctggtggctggcgcgtccgcttgaacctggcacgtgcactgatgatgcccagtgatctgttgttactggacgaaccaaccaaccatctggatatggatgccgtgttctggttagaacaatggttgcagaagtaccctggtacgttgctgctgattagtcatgaccgtgagtttttggataacgttgccacccatatcctgcatttgcatgatggtaacgccaaactatacgtgggcggctacaccgacttcgagcgtcaacgtgccgagcaactacgtcagcaacagattgcttttgagaaagagcaggccgagcgtgttcacttgcagagcttcattgaccgtttcaaggccaaagcatcaaaagccaagcaggcacaaagccggatcaaacgcttagaaaagttggctggaacggaggctatccgtatggagcgtgaattccgtatcacgtttgcaccgccaaccaaactaccgcattccttgattacgctgcgccaggtgaattgcggttattcggtattgtccccgtctacaccctccgatcctccacctgttgatattcatgcggcagcaccttcgcagcatgccgtgattcttcatcgtgttgattttggacttgaggcgggagaccgtattgggttgcttggtcccaatggcgccggaaaatcgaccctggtcaaaacattggtgagtgacctggcccctttgacgggggagcgcatcgctcatcctgatgtgcgtattggttattttgcacagcacacggttgaatcactgcacgagggacaatcgccgattgatcatttccgtacccttgcgccgcaagcaccgatccaatccatacgcgactttttgggtaaatggaattttcctggagatcgtgcctttgaacctgtggatggtttttccggaggtgagcgtgcgcgcttggcattgtcgttgattgcttggcggcagccgaatgttttgttacttgatgaacccaccaaccacctggatctagagatgcgcgaagccttggctgaggcgctgagtgattttgatggagcgattgtgatggtctcgcacgaccgtcacttgattggcttagtgtgcgacacgttttggcgtgttgctgatggtgtggtcgagccgtttgctggtgatcttgaccaatacgctgcttggctgcggacacgtcccgcggcacgcggtgtgcgcgccaagacagaggaggtcaatcagccacaggcttcgttgactgccaaatcgcttgcttctcaactcccagtgaaaaagtcggtcaactcacaaaagctattggttgcggaaaagcatgtgagcgaattggagacgctcttggccgaattggatcgcaagcttgccgatccggtcaattatgccaatggcgaagtgatgaggcgtcttggcgatgagcgcgagcatgctgccagacggttagctgaagccgaacaggcttggttgctgttgatggatgggtga

SEQ ID NO: 82765 - protein, 644 aa, Xylella fastidiosa Dixon
MISLRHFAMRRGGRLLLSNVDITLHAGDRVGVVGRNGVGKSSLFAAIRGELEADKGNVELPGKLRIASVAQETPSLSDLALDFVLSGDDVVAEVLRVEAEANAREDWEAVAAAHQRLAEIGGYDAEARAGKLLHGLGFITQTQRRAVSTFSGGWRVRLNLARALMMPSDLLLLDEPTNHLDMDAVFWLEQWLQKYPGTLLLISHDREFLDNVATHILHLHDGNAKLYVGGYTDFERQRAEQLRQQQIAFEKEQAERVHLQSFIDRFKAKASKAKQAQSRIKRLEKLAGTEAIRMEREFRITFAPPTKLPHSLITLRQVNCGYSVLSPSTPSDPPPVDIHAAAPSQHAVILHRVDFGLEAGDRIGLLGPNGAGKSTLVKTLVSDLAPLTGERIAHPDVRIGYFAQHTVESLHEGQSPIDHFRTLAPQAPIQSIRDFLGKWNFPGDRAFEPVDGFSGGERARLALSLIAWRQPNVLLLDEPTNHLDLEMREALAEALSDFDGAIVMVSHDRHLIGLVCDTFWRVADGVVEPFAGDLDQYAAWLRTRPAARGVRAKTEEVNQPQASLTAKSLASQLPVKKSVNSQKLLVAEKHVSELETLLAELDRKLADPVNYANGEVMRRLGDEREHAARRLAEAEQAWLLLMDG

SEQ ID NO: 82766 - DNA, 1932 bp, Croceibacter atlanticus HTCC2559
  CDS (1)..(1932): transl_table=11
atgcttaacattcacgaattatctatatcatttcaaggcgaattccttttcgaggacataacttttaggcttaatgcgggagatcgcgtaggtttagttggtaaaaatggcgccggaaaatctacaatgctcaaaatcttatcaaaagatttagaaccagatactggtcaaattgcaattgagaaagacataagcattgggtttcttagacaggatatagattttgtagaaggccgaactgtattagaagaggcttatcaagcttttgaagagataaagcgcctcgaaaaacaaatagacgacattaacacacagcttgctgaacgtacagattacgaaagtcaaggttacgagcagttaatgatagatcttaatgatatacaacatcaatatgaaataattggtggttataattatcaaggagatacagagcgcatcttacaaggattaggatttaaacgagaagatttcaacaaaaaaacagacaccttttctggaggttggcgtatgcgtatagagctggcaaagctcttattgcaaaaccatgacatcatgcttctagatgagcctacaaaccacttagatatagaaagtattctatggtttgaatctttcttaaaacagttttctggagttgcggtcgtagtctctcacgataagatgtttttagataatgtgactaataggactattgaaatatctttaggtaagatttacgactacaatacctactattcaaaatacttagtacaacgtaaagagttacgtgaacaacagttggccactcaaaaaaaccaacaaaaacaaattgagcacaccgaaaagctaattgaaaaatttagagcaaaagcatctaaagctacaatggcacaatctctaattaaaaaattagacaaggttgagcgtattgaggtagatgaagatgacaactctgttatgactgttagcttccctgtttctgtaagaccaggaaaagttgtaattgaagcagaaggcatttcaaaaagttacggcgacaaacaagtacttaagaatatagatttacttgtagagcgtgaaagtaaaatagcatttgtaggtcaaaacggacaaggaaaaacaacattagcaaaaattatagtcgatgagatttctcatcagggtcatttaaagcttggacataatgtacagataggatattttgcccaaaaccaagcagattatttagacggcactaaaacagtactccaaactatggaagatgctgctaatgaaaaaaaccgcaccaaagtaagagacattttagggtcattcttatttagaggtgaagaagtagataaatacgttcgtgtactttctggaggtgaacgtaacaggctagcattagccaaaatgcttttatcaccttttaatgtcttggttatggatgagccaacaaaccacttagacattaaatctaagaatgttttaaaagatgctttagaaaattttgaaggcacgttacttttagtttctcacgatagagactttttgcaaggactcacatcttctatctatgagtttaaagatcataggataaaagaatacctaggagatatagactattacttaagtgaacgaaaggttgaggatatgcgtgctgtcgaaaaaagagacaagcaacctacagcttctaaaaatacagatgatactactgcttctcaagacaacaaacaatcttacgaagaccaaaaaaaggtaaagtcgctttctaacagactaagcaaggttgaaaagaatattaaccaattagagaaagaaattaaagctatagatcttgaactagagcttaattacgacaaaaccattgctcaagataatttctttgacaactaccaggcaaaaaagaaaaaactaaccacctacatgcaagattgggaaacaatacaactagagctagagcaatttagttaa

SEQ ID NO: 82767 - protein, 643 aa, Croceibacter atlanticus HTCC2559
MLNIHELSISFQGEFLFEDITFRLNAGDRVGLVGKNGAGKSTMLKILSKDLEPDTGQIAIEKDISIGFLRQDIDFVEGRTVLEEAYQAFEEIKRLEKQIDDINTQLAERTDYESQGYEQLMIDLNDIQHQYEIIGGYNYQGDTERILQGLGFKREDFNKKTDTFSGGWRMRIELAKLLLQNHDIMLLDEPTNHLDIESILWFESFLKQFSGVAVVVSHDKMFLDNVTNRTIEISLGKIYDYNTYYSKYLVQRKELREQQLATQKNQQKQIEHTEKLIEKFRAKASKATMAQSLIKKLDKVERIEVDEDDNSVMTVSFPVSVRPGKVVIEAEGISKSYGDKQVLKNIDLLVERESKIAFVGQNGQGKTTLAKIIVDEISHQGHLKLGHNVQIGYFAQNQADYLDGTKTVLQTMEDAANEKNRTKVRDILGSFLFRGEEVDKYVRVLSGGERNRLALAKMLLSPFNVLVMDEPTNHLDIKSKNVLKDALENFEGTLLLVSHDRDFLQGLTSSIYEFKDHRIKEYLGDIDYYLSERKVEDMRAVEKRDKQPTASKNTDDTTASQDNKQSYEDQKKVKSLSNRLSKVEKNINQLEKEIKAIDLELELNYDKTIAQDNFFDNYQAKKKKLTTYMQDWETIQLELEQFS

SEQ ID NO: 82768 - DNA, 1872 bp, Oceanicola batsensis HTCC2597
  CDS (1)..(1872): transl_table=11
atgcggcccgtcatgttgcgcattgaaaacctctcattctcgatcgccggccgcccgctgatcgaagacgcctcggccaccattcccgagggccacaaggtcggcatcgtcgggcgcaacggcgcgggcaagacgacgctgttccgcctgatccgcggcgagctgacgctggacgccggcgccatcggcctgcccgaaagggcgcgcatcggcggcgtggcgcaggaggtgccggggaacgaggtctcgctgctcgacacggtgctggcggcggataccgagcgcgcggcgctgatggccgaggccgagacggcgagcgacccggcccgcatcgccgaggtgcagacacggctggccgacatcgatgcgtggtcggccgagggccgcgcggcgacgatcctcaaggggctgggctttaccgaagaggagcagcagatgccctgttccgccttctcgggcggctggcggatgcgcgtcgcgctggccggggtgctgttctcgcagcccgacctgctgctgctggacgaaccgaccaactatctcgacctcgagggcgcgctgtggctggaaagctatcttcagagatacccccacaccgtgctgatcatcagccatgaccgcgggcttctgaaccgcgccgtcgggtcgatcctgcatctcgaggaccgcaagcttacgctgtacaaagggccctatgacaccttcgcggaaacccgggccgcccgtctcgccgtggccgaggcagaggccaggaaacaggatgcccggcgcgcgcatctgcaatcctacgtggaccgcttccgctacaaggccgacaaggcccggcaggcgcagtcgcgcctcaaggcgctggcgcggatgaagccgatcaccctgccgcaggaggccgccctgcgcgccttctccttcccctcgcccgaggaactgtcgccgccgatcatccggatcgaagggggcgcggtcggctactccgaacgcccggtcctgtcgcggctcgacctgcggatcgaccaggacgaccggatcgcgctgctcgggcgcaacggcgaaggcaaatcgaccctggccaagctcctgtccgagcgcctgtcgctcatggacggaaagatgacccgggcctccaagctgcgcgtcggcttcttcgcgcagcaccaggtggacgagctgcatctcgacgaaacgcccatagaacacctgcgccgcgagcggccggacgaggcgccggccaggctgcgcgcgcgcctcgcggggttcgggctgggcgcggaccaggccgagaccgaggtcgggcggctttccggcggccagaaggcgcggctgacgctgttgctggcgaccctcgacgcgccgcatctgctgatcctcgacgaaccgaccaaccacctcgacatcgaaagccgcgaggcgctggtcgaggcgctgaccgcctattcgggcgccgtggtcctggtgagccacgacatgcacctgctcagcctcgtggcggaccggttgtggctggtcaaggacggtcgcgtggcatcgttcgagggcgatctcgaaacctacagggacctgttgctgagcacgaacagcggttcaaaagcatctgagaaaaaagagaaaccgaaacgcgcctcgcgcgaggacattctcgccctgcgggccgaggtgcgcaaatgcgaggcgcggatcgacaagctgcaggagatggcggacaagctgtcgcgcaagctggcagaccccgccctctatgcggacgacaaggtgggcgaactcgaggtctggaaccgcaagtacgccgaggtgcgcgaggccaccgaacgggccgaggcgctgtggatggcggcgcaggaaaagctcgaggcggcagagccctcgaccgtcgcctga

SEQ ID NO: 82769 - protein, 623 aa, Oceanicola batsensis HTCC2597
MRPVMLRIENLSFSIAGRPLIEDASATIPEGHKVGIVGRNGAGKTTLFRLIRGELTLDAGAIGLPERARIGGVAQEVPGNEVSLLDTVLAADTERAALMAEAETASDPARIAEVQTRLADIDAWSAEGRAATILKGLGFTEEEQQMPCSAFSGGWRMRVALAGVLFSQPDLLLLDEPTNYLDLEGALWLESYLQRYPHTVLIISHDRGLLNRAVGSILHLEDRKLTLYKGPYDTFAETRAARLAVAEAEARKQDARRAHLQSYVDRFRYKADKARQAQSRLKALARMKPITLPQEAALRAFSFPSPEELSPPIIRIEGGAVGYSERPVLSRLDLRIDQDDRIALLGRNGEGKSTLAKLLSERLSLMDGKMTRASKLRVGFFAQHQVDELHLDETPIEHLRRERPDEAPARLRARLAGFGLGADQAETEVGRLSGGQKARLTLLLATLDAPHLLILDEPTNHLDIESREALVEALTAYSGAVVLVSHDMHLLSLVADRLWLVKDGRVASFEGDLETYRDLLLSTNSGSKASEKKEKPKRASREDILALRAEVRKCEARIDKLQEMADKLSRKLADPALYADDKVGELEVWNRKYAEVREATERAEALWMAAQEKLEAAEPSTVA

SEQ ID NO: 82770 - DNA, 1911 bp, Synechococcus sp. WH 7805
  CDS (1)..(1911): transl_table=11
gtgagtctgatcagccttgttgatgcgtccaaggacttcgggatccgcacactgtttgaggacctcaccctgcatgtgcgagagggagatcgtctcgggctgattggccccaatggagcggggaaatcaaccctgttgagggtgctcgcagggctggagcccctcggcagcggagagcgtcgctgctcagcccgactgcgggtggaactggtggggcaagagagccgagtggatccgggattaacggtgctggagcaggttctggctggatgcggcaagaaaagggatctgcttctgcgcttcagcgaggtctcggaagccgttgcaaaaacgccggatgacacggccctgatgggtgagctgggagcgctcagcgaacgcatggatgaagaggaggcctgggcgctggagcagcagtgtcaggaggtgctgcaacgcctgggaatctccgacttgcatcggcccgtggaggatctctccggcggataccgcaagcgggtgggattggcctcagccctggtggcctgccccgatgttctcctactggacgaacccacgaaccatctcgatgcggcggcggtggagtggcttcagagctggctggatcgctatccaggcgccgtggttctcgtgacccacgatcgttacgtcctggatcaggtgacccgtcggatcgtggaagtcgaacggggggtcgccagcagcatcgacggaaattacagcgcctatctgcaacgcaaggccgaccaggaggtggccgatgccgcagaagccgctcgcttcaaaagtgtgatgcgtcgcgaactggcctggctgcgccaaggtccgaaagcgagaagcaccaaacagagagccaggatcgaaaggattgaggcccttaaggcgtcaccgacgaagcaagccaagcaggagctggcgatgagcagcgtcagtcggcgcatcggcaaggtcgtcattgaggctgaggagctcaccgtcacaacggatggccagccgggcgggccctcactgctgcgggatttcacctacagcttcagccccgaggatcgagtcgggatcatcggccccaacggcagcggcaaatcgacccttctcgatctgatcgctggccgccgccaggtcaccagcggctccctgcggctgggtgacacggtccacctcggctacctcgatcagcacacggatgctctcagcgagggacgcggtctcgaaaggaaggtgatcgaatttgtagaggaagcagcctccaggatcgaactagctggcgaacagttgagtgcatcccagcttctggaacggtttttgtttccccctgcccaacagcacagccccctgaacaaactctcgggtggcgaacgcaggcgtctgagtctctgccggatgttgatccaggctccgaatgtgctgttgctggatgagccaaccaacgatttagacgtgcaaaccttgagcgttctcgaggatctgctcgaggatttccgtggctgtgtcgttgtggtctcgcacgatcgctacttcctcgaccgcacgattgatcgtttgttctgtttcgaggacggtcgtctgaagcggttcgaaggcaactacagcgccttccttgaccacaaacgtgccttggagaagaacagctccgagccatcgtctgttccgaaagagaccgccagctccaagaagaagccgaagaaatcctccgattcaggcccacgacgccgcagtttcaaggagtccagagaactggaaactctggagcagacattgccagaccttgaaaagcgcaaggctgatctggaagaggcgatcgggtcaggccagggagacctcaccaacctgagtcaagatctggcgacactgctcgaacgaattcaggagagcgaagagcgctggctggaactcagtgaactggctccctga

SEQ ID NO: 82771 - protein, 636 aa, Synechococcus sp. WH 7805
MSLISLVDASKDFGIRTLFEDLTLHVREGDRLGLIGPNGAGKSTLLRVLAGLEPLGSGERRCSARLRVELVGQESRVDPGLTVLEQVLAGCGKKRDLLLRFSEVSEAVAKTPDDTALMGELGALSERMDEEEAWALEQQCQEVLQRLGISDLHRPVEDLSGGYRKRVGLASALVACPDVLLLDEPTNHLDAAAVEWLQSWLDRYPGAVVLVTHDRYVLDQVTRRIVEVERGVASSIDGNYSAYLQRKADQEVADAAEAARFKSVMRRELAWLRQGPKARSTKQRARIERIEALKASPTKQAKQELAMSSVSRRIGKVVIEAEELTVTTDGQPGGPSLLRDFTYSFSPEDRVGIIGPNGSGKSTLLDLIAGRRQVTSGSLRLGDTVHLGYLDQHTDALSEGRGLERKVIEFVEEAASRIELAGEQLSASQLLERFLFPPAQQHSPLNKLSGGERRRLSLCRMLIQAPNVLLLDEPTNDLDVQTLSVLEDLLEDFRGCVVVVSHDRYFLDRTIDRLFCFEDGRLKRFEGNYSAFLDHKRALEKNSSEPSSVPKETASSKKKPKKSSDSGPRRRSFKESRELETLEQTLPDLEKRKADLEEAIGSGQGDLTNLSQDLATLLERIQESEERWLELSELAP

SEQ ID NO: 82772 - DNA, 1917 bp, Pseudoalteromonas tunicata D2
  CDS (1)..(1917): transl_table=11
atgatccaaataagccaactagaactattacgtggcggtaaagccctactcaaagatgctaatgcaacgttattcccaaaccataaagtaggcttggttggcgcgaatggttgcggtaagtcatcgctatttgccttattaaaaggagaattacatctcgatagtggtaattgttcagtgccaaaagactggacaatctcctccgtaaaacaagaaacacccgcgctgagcatttctgcattagaatacgtattacaaggccataaagcctactatgaattacgcattcaactacaacaggcagagcttagtcacgatggcgaagcgcaagcaaaagtgcatttacagcttgaagcgattaatggttattcaattgaatcaaaagccggtgaattactgcatggtttaggctttaataatgaacaaatcagcttacccgtgagttctttttcaggtggctggcgcatgcgcttaaacttagcccaagcgctgatttttgagtctgatttattactgctcgatgaaccaactaaccatcttgatttagatgctgtttattggttggagcgctttttaaatgcgtatacgggcactttggttcttatttcccatgaccgtgagtttctcgatgcggtagttgatgaaatttggcacattgaaaatcaaaaaatcaatatttacaaaggtcactactctcagtttgaacgccaaaaagcagagcgcctatctcagcaacaagctagtttcgaaaaacagcaagatcaaatagctcacctcgaaaaatttattgcccgctttaaggccaaagccagtaaagccaaacaagctcaaagccgcgtaaaagcgctagagcgcatggaaaaactcgctcccgcacacgttgattcgccatttgattttgaatttgcagaaccgctggcattgcctaatccgttgatgacgctcgatcaagccaaagcaggttatggcgaagtcactattttagattctattaaatttaacttagtccctggtagccgtattgcgctgcttggtcgtaacggcgcaggtaaatcaaccttaatcaaactccttgcaggtgaacttgcaccacaaagtggtgaggtgtttcagcataaagggctcaatatcggctactttgcgcagcatcaattagaatctcttgatttatcagccagtgcagttttacatattcaacgtttagatccgcaagcacctgaacaaagaattcgtgatttcttaggtggttttgctttttttggtgataaagcccttgagccagttgctcctttttcgggcggcgaaaaagcccgtttggtattggccatgctggtatatcaaaaaccaaacttgttattacttgatgaaccaactaaccatttagaccttgaaatgcgccacgcattagtcatggcactgcaaggatttgaaggcgcaatggtcaccgtatcgcatgatcgccacatgcttaaaaacacagccgatgaatactacttagttgatcaaggccaagtgactccgtttggttatgatcttgatgcgtattaccaatggctactcgccgcaaacaaagcagataatgttgttgaagacaaagctgataaaacccacagcgcggttaatcgtaaagatcaaaaacgtcgcgaagcagagtttcgccaagccgttcaaccgctgaaaaagaaaatcactcagctagaaaccaaactagacaaagtaacggcacaacttcaagaagttgaaaacgcccttgctgataactcactgtacgatgcgcaaaacaaagcaatacttactgaattactcgctaagcaagcaaaactggtacctgaacaaaatgatttagaagagctgttacttgagttattagaagagcttgaacaacacgaaaacgaatttaatgcccaactcgattaa

SEQ ID NO: 82773 - protein, 638 aa, Pseudoalteromonas tunicata D2
MIQISQLELLRGGKALLKDANATLFPNHKVGLVGANGCGKSSLFALLKGELHLDSGNCSVPKDWTISSVKQETPALSISALEYVLQGHKAYYELRIQLQQAELSHDGEAQAKVHLQLEAINGYSIESKAGELLHGLGFNNEQISLPVSSFSGGWRMRLNLAQALIFESDLLLLDEPTNHLDLDAVYWLERFLNAYTGTLVLISHDREFLDAVVDEIWHIENQKINIYKGHYSQFERQKAERLSQQQASFEKQQDQIAHLEKFIARFKAKASKAKQAQSRVKALERMEKLAPAHVDSPFDFEFAEPLALPNPLMTLDQAKAGYGEVTILDSIKFNLVPGSRIALLGRNGAGKSTLIKLLAGELAPQSGEVFQHKGLNIGYFAQHQLESLDLSASAVLHIQRLDPQAPEQRIRDFLGGFAFFGDKALEPVAPFSGGEKARLVLAMLVYQKPNLLLLDEPTNHLDLEMRHALVMALQGFEGAMVTVSHDRHMLKNTADEYYLVDQGQVTPFGYDLDAYYQWLLAANKADNVVEDKADKTHSAVNRKDQKRREAEFRQAVQPLKKKITQLETKLDKVTAQLQEVENALADNSLYDAQNKAILTELLAKQAKLVPEQNDLEELLLELLEELEQHENEFNAQLD

SEQ ID NO: 82774 - DNA, 1923 bp, Photobacterium sp. SKA34
  CDS (1)..(1923): transl_table=11
atgattatcttttcagatatccaacttctacgtggtggcaaagtattacttgaaaacgccacttcaacgatccatccgggcgacaaagtcggtcttgtcggtaaaaacggttgtggtaaatcgaccctgttcgctttactgaaaaatgagctcagcttagatgctggcaactgtcaatttccaagtaactgggaaatggcatgggttgctcaggaaacgcctgcgttagagcgcgctgctattgaatatgtcattgatggtgaccgtgagtaccgtgaacttgagcgccaactccttgccgctgagcaagccgacaacggtactaaagtcgcagagcttcacggtaaaatggataccattggaggctatagcattaaggctcgtgcggcagaattacttgatggtctaggcttttcacagcatcaaatgcaatggaacctaacccaattttcgggtggttggcgtatgcgtcttaaccttgcccaagcgctattatgccgctctgatctcttacttctcgatgagccaactaaccacttagatttagatgcggtcatgtggttggaaaaatggctccaaagctaccgtggtaccttggtgttgatttcccatgaccgcgatttcttagatccagtggttaaccgcattatccatcttgaaaatcaaaccatgaacagttacaccggtaactattcatcgtttgaagtacaacgcgccgaaaagctagtactacaacaagcaatgtatcagaaacaacaaaagcaaatgacgcacatgcagtcatacattgaacgtttccgttacaaagccagtaaagcacgccaagcgcaaagtcgtattaaagcccttgagcgcatggaaaaagtgttaccagctcagtttgataatccattcagttttgaattccgcgagccaagtgctctgccaaacccaatcttaatgatggatcaagttgccgcaggttatgacgacctactgattttagaaaagattcgtctgaatcttgttcctggtagtcgtattggcctacttggccgaaatggtgctggtaaatctaccctgatcaaaatgctatctggtgatttaccagcgaaagccggtgatatggcatattcgcaaggggttaaaattggttactttgcccagcaccaattagaaaccttgtaccttgatgatacccctgtacagcatattgcacgtattgcaccacaagcaaccgagcaacaactacgtgattatttaggtagttttggttttattggtgataaagcgctagaaaaagtcggtccgttttctggcggtgagaaagcacgtttagtgctggcacttattgtatggcaacgtcctaacctattactgctcgatgagccaaccaaccaccttgatttagatatgcgccaagcactgacgttggcactgcaatcttatgaaggtgcaatggttattgtaagtcacgatcgttacttactacgtgcgacaaccgatgacttatatttggtgcatgatcgccaagtcgtaccgtttgatggggatttaaatgattaccacaaatggcttaccgagcaacagcgtaatgagcgccgtgatcaacaagcaacaaaacctgaaaccaacaaagacaacagcgcggcatcgcgtaaagagcaaaaacgtttagaggcagagttccgtaaacaaactgccccgatacgtaaagaaatcaccaagcttgaaaagcaaatggacaagctcaataccattatcaccgatgctgaaactgcgttaagtgatagcagtatttatgaagctgagaacaaagcccgtatgaacgagcaattaaaactgcaaggcgatgcaaaatctgacttggaagatgttgaagttgcttggatggagttacaagagcaattagaagagatggaatctcaatttagcgccgaataa

SEQ ID NO: 82775 - protein, 640 aa, Photobacterium sp. SKA34
MIIFSDIQLLRGGKVLLENATSTIHPGDKVGLVGKNGCGKSTLFALLKNELSLDAGNCQFPSNWEMAWVAQETPALERAAIEYVIDGDREYRELERQLLAAEQADNGTKVAELHGKMDTIGGYSIKARAAELLDGLGFSQHQMQWNLTQFSGGWRMRLNLAQALLCRSDLLLLDEPTNHLDLDAVMWLEKWLQSYRGTLVLISHDRDFLDPVVNRIIHLENQTMNSYTGNYSSFEVQRAEKLVLQQAMYQKQQKQMTHMQSYIERFRYKASKARQAQSRIKALERMEKVLPAQFDNPFSFEFREPSALPNPILMMDQVAAGYDDLLILEKIRLNLVPGSRIGLLGRNGAGKSTLIKMLSGDLPAKAGDMAYSQGVKIGYFAQHQLETLYLDDTPVQHIARIAPQATEQQLRDYLGSFGFIGDKALEKVGPFSGGEKARLVLALIVWQRPNLLLLDEPTNHLDLDMRQALTLALQSYEGAMVIVSHDRYLLRATTDDLYLVHDRQVVPFDGDLNDYHKWLTEQQRNERRDQQATKPETNKDNSAASRKEQKRLEAEFRKQTAPIRKEITKLEKQMDKLNTIITDAETALSDSSIYEAENKARMNEQLKLQGDAKSDLEDVEVAWMELQEQLEEMESQFSAE

SEQ ID NO: 82776 - DNA, 1923 bp, Oceanospirillum sp. MED92
  CDS (1)..(1923): transl_table=11
atgattcaatttcagcaagttagcttacaacgcggccacaacctattgctagagcaggcagacttaaccctgcactctggttggaaaattggtttggtcggcgcaaatggtgcaggtaagtcatccgtatttaaattaattatgggtgaacttcactgtgataatggtgatctcgatctgccaggtgggctgcgtatctcgcatatggcccaggaagtcccgacatccgagcgtacggctctggactatgtattagacggtgatcatcaactcagacagattcaacagcagatcagtgatgcagaagccgcacacgacatgcatcgtttgggggagctccatgcagagcttgatagccataacggctacagcgctgaatccagagcggctcaactactagctggtctgggctttagtcaccaggatatcagccgttcggttaaggaattttccggcggttggcggattcgcctgaacctggctcaggcgctgatgtgcccttctgacctgctgctgcttgacgagcccaccaaccacttggatctggacgctacgatctggctggagcagtggttacgccaatatccagggatgcttattctgatctctcacgaccgcgatttcctggataacgtggttagccatataacccatgttgagcataagaagctgaacctctataagggcggatactctgcctttgaattgcagcgtgctgacaggctcgcacagcaacaagcagccttcgaaaaacagcagcaacgtattggtgagattgaggactttgttcggcgcttcagagcgaaggcaaccaaggctaagcaagcccagagtcgtatcaaagagctggagcgcatggagaagatcgcgccggctcacgtggacagccctttcagcttccacttccgcgcttcagataagatgtcatcgccgcttttaacactttatcaggcggactgtggctatacagataaggcgattcttaataaaacctctctgacactggttccagggatgcgcatcggcttgttaggccctaatggtgccggtaaatctaccttggtaaaaaccctggtcggtgatctgggtctgtgctcaggggaccgtcacgaaagtgaaaacctacagatcggttactttgctcagcaccagttagaagcgctggacatggcagcgtccccgctactgcatattaaacgcatcagccctaaagcctcagagcaggagattcgggacttcctgggctcctttggtttctttggtgatcgcgcgctggaacctgtggaaaacttttccgggggcgaaaaagcccgtgtggctctatccatgatcgcctggcagaagccaaacctcctgctgatggacgaacctaccaaccaccttgatctggaagttcgccacgcgctgacgctggcgctgcaaaccttcgagggcgtgctgattctggtctcccatgaccgtcacctactacgaaataccgtagatgagtttttactggtcgctaatggcgaagtcagcgagttcaagggggaccttgatgattaccagaactggctcctcgaacagaaacgcgaagcacaacgcgccgaagccgaagcatttgccaaaccaaccgaagataaaaagtcactctctgcagcagagcgtaaagagcagaagcgacttgcagcggagcgcagaaaccaactacgtccactgaagaaaaagctggaaaaactagaagccgccatggaaacgttccatgaaaagctcagcgaggttgaagaaaccctctctgatgcaagcatctacgaagaagctaataaagaacagctaaaggcagtgttgcaacagcaggctgagctgaaacaacaagcggagcaaaccgaagaggaatggatggagcaacaggaagctcttgaagcgctggaagcggagctatag

SEQ ID NO: 82777 - protein, 640 aa, Oceanospirillum sp. MED92
MIQFQQVSLQRGHNLLLEQADLTLHSGWKIGLVGANGAGKSSVFKLIMGELHCDNGDLDLPGGLRISHMAQEVPTSERTALDYVLDGDHQLRQIQQQISDAEAAHDMHRLGELHAELDSHNGYSAESRAAQLLAGLGFSHQDISRSVKEFSGGWRIRLNLAQALMCPSDLLLLDEPTNHLDLDATIWLEQWLRQYPGMLILISHDRDFLDNVVSHITHVEHKKLNLYKGGYSAFELQRADRLAQQQAAFEKQQQRIGEIEDFVRRFRAKATKAKQAQSRIKELERMEKIAPAHVDSPFSFHFRASDKMSSPLLTLYQADCGYTDKAILNKTSLTLVPGMRIGLLGPNGAGKSTLVKTLVGDLGLCSGDRHESENLQIGYFAQHQLEALDMAASPLLHIKRISPKASEQEIRDFLGSFGFFGDRALEPVENFSGGEKARVALSMIAWQKPNLLLMDEPTNHLDLEVRHALTLALQTFEGVLILVSHDRHLLRNTVDEFLLVANGEVSEFKGDLDDYQNWLLEQKREAQRAEAEAFAKPTEDKKSLSAAERKEQKRLAAERRNQLRPLKKKLEKLEAAMETFHEKLSEVEETLSDASIYEEANKEQLKAVLQQQAELKQQAEQTEEEWMEQQEALEALEAEL

SEQ ID NO: 82778 - DNA, 1926 bp, Flavobacteria bacterium BBFL7
  CDS (1)..(1926): transl_table=11
atgctcaatattcacgatttacatgttagttttggcggcgagccactttttgaagaaattacttttagacttaatggtgggaatcgtgtaggtttaataggtaaaaatggtgctggtaaatctactttattaaaagtcatcgctggtgatattgagtatgatcaaggtcaacttgccatggaaaaaggtacgagcattggtttcttacgacaggatattgattttgagaaaggacgtaccgttctagaagaagcttataccgctttcgcgaaagcgagagaaatagaagcagagctggatcaaataaatattcaattagctgaaagaactgattatgaatctgattcttactcaaagcttattgaggacatgagtacattaactcatgaatatgagattataggaggataccaatacaaaggagaaacagaaaagatcttaaagggattagcttttaagccagagcagtttgggatgcttactgatgagctatctggtggatggcgcatgcgtattgagcttgcaaaactcttattagagaaccacgacatcttattactcgatgagcctacaaaccacttagatatcgattctattttatggttagagcaattcttacagacatatcctggagctgttgttattgtaagtcacgataaaatgtttttggataatgtgactaatcgtaccatagaaattagtttaggtcgtatatatgattacccaaaaccatatacacagtttctagcattaagagcagagatgcgcgagcaacaagaggcaacctttaaaaatcagcaaaaagagattgaacgtactgagaagcttattcaaaaatttaaagctaaagcaagtaaggctaccatggctcaatcactggttaaaaagttgaatcgcatggatgtggtggagattgaacaaaccgataacgctgcgatgaatatcaactttgcaaaatctatacagcctggtaaagtggttttagaaattgataaggtaagcaagtcttacggtgagaaaaaagtactgagcgaggtcgatttaatgatagaacgtggttctcgagtagcttttgtagggcaaaatggaatggggaaatctactctagctaaaattattgtaggtgatataaacgattccacaggaacggttaacttaggtcataatgtacagttagggtactttgcacagaatcaagcagaatatttagatggtgaaaaaacggtcttggatataatgatagatgctgctgacgatagtaaccgtgttaaggtacgtgatatgttaggttctttcttatttcgtggtgatgaggcagaaaaaaaggtaaaagtattaagtggtggtgaacgcaatcgattagcgctttgtaaattgctattgcagccatttaatgtgttgatcatggatgagcctactaaccacctagatatacaatctaaaaatgttttaaaggcagctctacttaaatttgatggaacacttatcgttgtgtcacacgatagagaatttttgcaaggccttaccgatgttgtttatgaattccgtgatcataaattaaacttgcatttaggtgatatagactattaccttcaacaacgcaaggctcaagatatgcgagagatagaaaaagttactgaggctaaagttgatccgctttcgcgaaagcaagaaacagaaaagaagcagctttcttatgaagatcaaaagaagcaaaagtcattaaataatagactttccaaagcagaagccgaaatcaataacttagagcgagaaattaaaaaattagatcaagagctagcagctaattatgatgagctggctgcaaaaccagggttttttgatgcttaccaagcaaagaagaaagcattagacgaatggatgacaaaatgggaagatgtctctgagcagctagataaattctaa

SEQ ID NO: 82779 - protein, 641 aa, Flavobacteria bacterium BBFL7
MLNIHDLHVSFGGEPLFEEITFRLNGGNRVGLIGKNGAGKSTLLKVIAGDIEYDQGQLAMEKGTSIGFLRQDIDFEKGRTVLEEAYTAFAKAREIEAELDQINIQLAERTDYESDSYSKLIEDMSTLTHEYEIIGGYQYKGETEKILKGLAFKPEQFGMLTDELSGGWRMRIELAKLLLENHDILLLDEPTNHLDIDSILWLEQFLQTYPGAVVIVSHDKMFLDNVTNRTIEISLGRIYDYPKPYTQFLALRAEMREQQEATFKNQQKEIERTEKLIQKFKAKASKATMAQSLVKKLNRMDVVEIEQTDNAAMNINFAKSIQPGKVVLEIDKVSKSYGEKKVLSEVDLMIERGSRVAFVGQNGMGKSTLAKIIVGDINDSTGTVNLGHNVQLGYFAQNQAEYLDGEKTVLDIMIDAADDSNRVKVRDMLGSFLFRGDEAEKKVKVLSGGERNRLALCKLLLQPFNVLIMDEPTNHLDIQSKNVLKAALLKFDGTLIVVSHDREFLQGLTDVVYEFRDHKLNLHLGDIDYYLQQRKAQDMREIEKVTEAKVDPLSRKQETEKKQLSYEDQKKQKSLNNRLSKAEAEINNLEREIKKLDQELAANYDELAAKPGFFDAYQAKKKALDEWMTKWEDVSEQLDKF

SEQ ID NO: 82780 - DNA, 1947 bp, marine gamma proteobacterium HTCC2207
  CDS (1)..(1947): transl_table=11
atgattacattaactgacatcgagctgcgtcgcggcactaaagtactgctgcaagacgctgagctggtcgtccacccgggtcaacatataggtattatcggtgccaatggcagcggtaagtcgagcctgtttaaattgctgatgggtaaaattagtgccgatgcgggtgaattatttattccccaggactggcgtgtcgcccatatggctcaggagttggcgaactccgagagcagtgtggtggactttgttctcgacggtgatccgcagattcgccagattgagcgggctattgaaaaagccctagccgatgaagatcacgatcgtttggcactggaatatgagaagttagataacgccaatggcttcgatgcccactatcgggccgagcaattactgcatggattggggtttgatcaatcggagctagatcgctcggtaaacagtttttcaggtggctggcgcatccgattaaatctggcgcaagcattgatgagcccatcggatttgatgttgctcgatgagccaaccaatcacttagatttagatgcaacgctgtggttggaacagtggttaaaaagttataccggaacattactaattatttctcacgatcgtgactttattgataatgttgtggatcggattgttcatgttgaacattgcaaaaccaatgcttacaaaggtaactattcgacatttgaacgtgtccgcggcgagcgcctagcattgcagcaagccagctttgaaaaacaacaaaaacgccgcaaagaggttgaagagtttattactcgctttaaagctaaagcgtcaaaagcgaagcaggcgcagagtagagtaaaagagttggcgcgtatggaagatattgccccagcgcatatcgactcgcccttttatttcagttttgcacagggaaagaaagcgcatagcgcactggccaatatcagtcagggtgatttgggtcatgacggtcgcgctattttgtccaatgttaattttgatcttcatccgggaactcgcatcgggttattggggccaaatggcgcaggtaaatcgaccttgattgctagcttaactggcgatctaaatttacttaatggcgaaagagtatatggtgaaaatgtaaaaattggttattttgcgcagcatcaactggaggttttagacttacaggcaagtgcctttttgcatcttcagcgaatcagtccaaaatccacagatcaagaactgcgaaattttctcggtggatttgattttcacggtgataaagcattggaacctattaaggcattttctggtggcgaaaaagcgcgggttgccctagctttaattgtctggcaaaagcccaacctattgcttctcgatgaacccactaaccatttggatctagaaatgcgccatgcattgactcttgctctgcagagctatgagggtgcgctggtggttatttctcatgatcgacatcttctgcgaaacaccgttgatgaattttacttggttgcagatggcgcagttaaagaatttgaaggtgaccttaaagattaccaactgtggttgaaaaattttaatcgagtgcctacagattctggtgaaaaagtgggtgggttagaggttccagttattgagaaaataattgagcccgttgctgttgcagaagtgcttagtgcggcggagaaaaaacttcagcgtcaacagtcggctgatgcgcgtaagcagcttgcacccctgaccaaaaaatcgaatcagttggaaaataaaattgaaaaatttcaggtgcagctaagtgagatagaatttagtcttgctgatgcagatttatatctggataccaataagacaatattaaaagaaaaacttagtcttcaggctgaaattaaaaaattaatttccgaaaatgaggagcagtggtttgatattcaacagcagatcgaacagttcaattgctaa

SEQ ID NO: 82781 - protein, 648 aa, marine gamma proteobacterium HTCC2207
MITLTDIELRRGTKVLLQDAELVVHPGQHIGIIGANGSGKSSLFKLLMGKISADAGELFIPQDWRVAHMAQELANSESSVVDFVLDGDPQIRQIERAIEKALADEDHDRLALEYEKLDNANGFDAHYRAEQLLHGLGFDQSELDRSVNSFSGGWRIRLNLAQALMSPSDLMLLDEPTNHLDLDATLWLEQWLKSYTGTLLIISHDRDFIDNVVDRIVHVEHCKTNAYKGNYSTFERVRGERLALQQASFEKQQKRRKEVEEFITRFKAKASKAKQAQSRVKELARMEDIAPAHIDSPFYFSFAQGKKAHSALANISQGDLGHDGRAILSNVNFDLHPGTRIGLLGPNGAGKSTLIASLTGDLNLLNGERVYGENVKIGYFAQHQLEVLDLQASAFLHLQRISPKSTDQELRNFLGGFDFHGDKALEPIKAFSGGEKARVALALIVWQKPNLLLLDEPTNHLDLEMRHALTLALQSYEGALVVISHDRHLLRNTVDEFYLVADGAVKEFEGDLKDYQLWLKNFNRVPTDSGEKVGGLEVPVIEKIIEPVAVAEVLSAAEKKLQRQQSADARKQLAPLTKKSNQLENKIEKFQVQLSEIEFSLADADLYLDTNKTILKEKLSLQAEIKKLISENEEQWFDIQQQIEQFNC

SEQ ID NO: 82782 - DNA, 1911 bp, Oceanobacter sp. RED65
  CDS (1)..(1911): transl_table=11
atgatacgactacagtctctcaacttacaccttggccagaaagatatttttgtgggtgctgatttagctgtgcacgatggtcaaaagttggcggttgtaggtgcgaacggagccggcaaatcgactctatttaaattgttgctgggagaattggtgccagaccagggagaacttgatatccctaaggcgtggcgtatcgcccatatggcgcaagaagtggcggccagtgaacaatcagcgttggattatgtgctagatggtcaccaagattatcgacgcttgagtgagggtattgctaatgcagagcaaaccggagcagaggcagagctagtaaagctacatggtgagtttgaaactctacaaggttatcaagtaccgcaacaggcgaaaaccatgctcgcaggtttaggttttactgaagcgcaaatgcagcattcggtatctgcattcagtggcggttggcgcatgcgtttgaacttagcacgcgcgctgattatgcccagtgatttaatgatgctagacgagcctactaaccatttagatttagatgcagcactttggttagagggttttttgcagcagtatcgcggaacccttttattgattagccacgatcgcgatttcattgatagtgtagtcgatggcattgtgcatttgcaccagaacaagttgaacttatatagcggcaattacgccgatttcgaacgtcgtcgagcagaacgtttggcgcagcagcaatctttgttcgagcaacagcagcgagagatcgcccatattgaaagctttattactcgcttcaaagcaaaagcttcgaaagcgaaacaagcacaaagtcgaataaaagcgctagagcgaatggaaagaattgctccggctcacatcgatagtgaatttcactttagtttccccaatgctgacaaagttagtgatccattgacgaaattagagcaagcagaaattggttatggagagcgggctcaattaacacaagtgagcttgcagttacgccctggaatgcgcattggtctattgggcgccaatggcgcgggtaaatccactttgattaaagcccttgtgggtcagctaccgctgatggaaggcgaacaatttagcggagaatatttaagtgtcggatactttgctcagcatcaagtagatgagttagatctatctttaagcccagtccaacacttgcaaaaactgatccctgaaaccagcgaacaagaagctcgcaacttcatgggcggttttggttttcatggtgatcaagcagtagaaagttgcgaagcgttttcaggtggggagctggctcgcttggctctagcgcgtatcgcgttcctcaaacccaatttattgatactggatgagcctactaaccacttggatttagatatgcgccatgcgttaacgctagcgcttcaagactttgaaggcgccatgatagtagtaagccacgatcgtcatttgttggctaatacagtggatgagttttatttggttcatcaaagtaaagtgagtccatttgatggcgaccttgaagactatcgccagtttataaagctagagcagcagcgtgaagccggtattacttcagaaaagtccagcggcgagcatagtgccgaagcgaaaaaagaacgtaagcgtaaggccgcacaattacgtcaacaactaagtccgcttaaaaaagcagtgaataaactagagtctcagttagagacggtgcaagaacagctatcggatgttgaacagcaattagcggatacgagtctctacgaagccagcgagaaggatcgtttgcaatctgtgctatcccagcaagcggaattaaaaaagcaaagtgaaaccatcgaagaagagtggatggaaaaactagaagagttggagacgctagaaagccagctacaagaatag

SEQ ID NO: 82783 - protein, 636 aa, Oceanobacter sp. RED65
MIRLQSLNLHLGQKDIFVGADLAVHDGQKLAVVGANGAGKSTLFKLLLGELVPDQGELDIPKAWRIAHMAQEVAASEQSALDYVLDGHQDYRRLSEGIANAEQTGAEAELVKLHGEFETLQGYQVPQQAKTMLAGLGFTEAQMQHSVSAFSGGWRMRLNLARALIMPSDLMMLDEPTNHLDLDAALWLEGFLQQYRGTLLLISHDRDFIDSVVDGIVHLHQNKLNLYSGNYADFERRRAERLAQQQSLFEQQQREIAHIESFITRFKAKASKAKQAQSRIKALERMERIAPAHIDSEFHFSFPNADKVSDPLTKLEQAEIGYGERAQLTQVSLQLRPGMRIGLLGANGAGKSTLIKALVGQLPLMEGEQFSGEYLSVGYFAQHQVDELDLSLSPVQHLQKLIPETSEQEARNFMGGFGFHGDQAVESCEAFSGGELARLALARIAFLKPNLLILDEPTNHLDLDMRHALTLALQDFEGAMIVVSHDRHLLANTVDEFYLVHQSKVSPFDGDLEDYRQFIKLEQQREAGITSEKSSGEHSAEAKKERKRKAAQLRQQLSPLKKAVNKLESQLETVQEQLSDVEQQLADTSLYEASEKDRLQSVLSQQAELKKQSETIEEEWMEKLEELETLESQLQE

SEQ ID NO: 82784 - DNA, 1980 bp, Vibrio sp. Ex25
  CDS (1)..(1980): transl_table=11
ttgaaaccacttcgcgatgtaaccaagcaacgcgcactgcgcaaagtgaatgaaaactttatgattaccttctctgatattcagttactgcgtggcggtaaacctcttttagaccaagcttcagcgactatccatcctggcgataaagtcggtcttgtgggcaaaaacggctgcggtaaatcaacgctatttgcattgctgaaagatgaactgtcgattgatgcaggctcatttagccaacctcaacattgggagttggcctgggtcgcacaggaaacgcctgcgctagagcgcactgcactggaatacgtcattgatggtgatcgcgagtaccgagcgctcgaaaagcagttggctgaagcggaagcacaagacaacggcaccttggttgccgagatccacggtaaaattgaaaccatcggcggttatagcattcgcgctcgcgcggcagaattgctcgacggtttaggtttcagccaagagcaaatgagttggagtttgactcaattctcaggtggttggcgtatgcgccttaacttagcccaggcgctattgtgccgttctgacttattgctactcgatgagccaaccaaccacttggacttagacgcagtgatgtggcttgaacgttggctacaaaactacccaggcacactgatcctgatctcgcacgaccgtgacttccttgaccccattgttggccgtattattcacatcgaaaaccaacaattgaacgaatacacgggtaactattcgtcgttcgaaaaccaacgagcgcaaaaaatggtgctgcagcaagcgatgttcgagaagcaacagaaacagatgtcgcacatgcaaagctacatcgaccgcttccgttataaagcctctaaagcacgccaggctcaaagccgtattaaagctttggagcgcatggagaaagtgttacccgctcaattcgataacccatttagcttccaattccgtgagcccgcggcgctgccaaacccaatcatgatgatggatgaagtatcggcaggctacggtgacaacctgatcttagagaagatcaggttgaacttggttcctggcagtcgcattggtctgctcggccgtaatggcgcgggtaaatcgaccttgatcaaattgctctctggtgagcttaacgcgcaaggtggcgatctgacttactcacaaggcgtaaaaataggttactttgctcagcatcaattagaaacgctgcacccagaggaaacgccgctgcaacacatgatgcagatcgcgccggatcaaaccgaacaacagctacgtgattacctgggcagctttggcttccaaggcgacaaagcactggagaaagtcgcgccgttttcgggtggtgaaaaagcccgtttagtgctggccttaattgtgtggcaaaagccaaacctgttgctacttgatgaaccaaccaaccacttggatttggacatgcgtcaggcattgacgatggcactgcaaacgttcgaaggtgcaatggtgattgtttcgcacgatcgctacttactgcgtgctacaaccgatgacttgtacttggtgcatgatcgtcaagttgcgccgttcgatggtgacttaaacgactactacaaatggttaactgagcaacaaagagcggaacgcaaagaagcacaagctgcacagccagccaaagatagcgccaacagcgcggcagcgaaaaaagagcagaaacgtcgcgatgcagaatttcgtaagcagacggcgccaattcgcaaaacgctgacacaattagaaaataaaatggataagttaggtgctgcactggccgaagctgaagaacaattggcagataactcactgtatgaagccgaaaataaagctaaacttaaccaagtgctggctcttcaagcttctagtaaggcagagctcgaagaaattgaaatggaatggatgtctgctcaggaagaactggagcagatggagctagagtttaatcaatga

SEQ ID NO: 82785 - protein, 659 aa, Vibrio sp. Ex25
MKPLRDVTKQRALRKVNENFMITFSDIQLLRGGKPLLDQASATIHPGDKVGLVGKNGCGKSTLFALLKDELSIDAGSFSQPQHWELAWVAQETPALERTALEYVIDGDREYRALEKQLAEAEAQDNGTLVAEIHGKIETIGGYSIRARAAELLDGLGFSQEQMSWSLTQFSGGWRMRLNLAQALLCRSDLLLLDEPTNHLDLDAVMWLERWLQNYPGTLILISHDRDFLDPIVGRIIHIENQQLNEYTGNYSSFENQRAQKMVLQQAMFEKQQKQMSHMQSYIDRFRYKASKARQAQSRIKALERMEKVLPAQFDNPFSFQFREPAALPNPIMMMDEVSAGYGDNLILEKIRLNLVPGSRIGLLGRNGAGKSTLIKLLSGELNAQGGDLTYSQGVKIGYFAQHQLETLHPEETPLQHMMQIAPDQTEQQLRDYLGSFGFQGDKALEKVAPFSGGEKARLVLALIVWQKPNLLLLDEPTNHLDLDMRQALTMALQTFEGAMVIVSHDRYLLRATTDDLYLVHDRQVAPFDGDLNDYYKWLTEQQRAERKEAQAAQPAKDSANSAAAKKEQKRRDAEFRKQTAPIRKTLTQLENKMDKLGAALAEAEEQLADNSLYEAENKAKLNQVLALQASSKAELEEIEMEWMSAQEELEQMELEFNQ

SEQ ID NO: 82786 - DNA, 1923 bp, Alteromonadales bacterium TW-7
  CDS (1)..(1923): transl_table=11
atgatccaaatatcagaaatagaactccttcgtggcggcacagccttattaaaaaatgcatcagctacgttatttccagagcacaaagtaggccttgtaggtgccaatggctgtggaaaatcaaccttatttggtttactaaaatctgaattgcaacttgatgctggtaattgcagtattcctaaagattggtctattgcctcggttaaacaagaaacccctgccctcgaaataagcgcgattgattatgtattgcaaggacacccggaatactacgcgctgcgtattgcgctgagagaagcagaacaaaataacgatggcgatacccaagccaaagtgcatattcagctagaaaacatgaaaggctacagcattgaatcgcaagctggcgagctgttgcatgggttaggatttgctaataaccaaatagaaaaccctgttagtgcgttttcgggggggtggcgcatgcgtttaaaccttgcccaagcacttattcgaaacgctgatttactattgctcgatgagccgacaaaccaccttgatttagatgccgtatattggcttgagcgctttttgcgtgcctacacaggcacattggtacttatatcgcacgaccgtgagtttttagatgccgtggttgatcaaatttggcacatagataaacaacttatcaatgtatacaaaggtaactactcgcagttcgaacgccaaaaagcagagcgtttattacaacagcaagccatgttcgaaaaacagcaagagcaaattgcccacctagaacagtttattactcgctttaaagcaaaagccagtaaagctaagcaggcgcaaagccgtgttaaagcacttgagcgtatggaaaagcttgccccagcacatgccgactcaccatttaattttgagtttgcagagccattagcgctaccaaacccactcatgacgctcgacaaagctcaagctgggtatggcaacgtaactattttaaatagtattaagctaaacctggtacctggcagccgtattgcactgcttggtagaaatggcgcaggtaaatccacattaattaaattacttgccggcgacttaaaaccacaagcaggagatgtatttcagcaccaaggccttaatattggctactttgcacagcaccagcttgaatcccttgacttaaaagccagcgcaattacacatttacaacgtttaaatcctaaggctagcgaacaatcgctacgtgactttttaggcggttttgcctttattggcgataaagcgcttgagcctgtagcaccgttttcaggtggagaaaaagcccgtttagtgctggctatgttggtatatcaaaaaccaaatttactgctactcgatgagcctaccaaccaccttgacttagaaatgcgccatgcacttgttatggccctgcaaggctttgaaggcgctatggttaccgtatcgcatgaccgccacatgctgaaaaataccgccgatgagttttaccttgtagacagcggtgaagtaacccaatttggctacgaacttgacgattattaccaatggcttctcaatgcgaataaagcggctactaaatcggagcaggctgatgagccaaaagcaaactcaggggttaatagaaaagagcaaaagcgcttagaggctgaatttagaaaagccattcaaccgcttaaaaagcaaattgagaaacttgaaaagcagctcgacaaatacgccgcagagctcagcgaagtggaagttgcacttggcgataacgaactctataacgatgacaacaaagcccggttaaaagagttaattgctaagcaagccacgcttacgcctaaacttaacgatattgaagaagagttacttatggcgcttgaagaaatggaagaaaaagaacaggcctttgccgatgaacttgctcaataa

SEQ ID NO: 82787 - protein, 640 aa, Alteromonadales bacterium TW-7
MIQISEIELLRGGTALLKNASATLFPEHKVGLVGANGCGKSTLFGLLKSELQLDAGNCSIPKDWSIASVKQETPALEISAIDYVLQGHPEYYALRIALREAEQNNDGDTQAKVHIQLENMKGYSIESQAGELLHGLGFANNQIENPVSAFSGGWRMRLNLAQALIRNADLLLLDEPTNHLDLDAVYWLERFLRAYTGTLVLISHDREFLDAVVDQIWHIDKQLINVYKGNYSQFERQKAERLLQQQAMFEKQQEQIAHLEQFITRFKAKASKAKQAQSRVKALERMEKLAPAHADSPFNFEFAEPLALPNPLMTLDKAQAGYGNVTILNSIKLNLVPGSRIALLGRNGAGKSTLIKLLAGDLKPQAGDVFQHQGLNIGYFAQHQLESLDLKASAITHLQRLNPKASEQSLRDFLGGFAFIGDKALEPVAPFSGGEKARLVLAMLVYQKPNLLLLDEPTNHLDLEMRHALVMALQGFEGAMVTVSHDRHMLKNTADEFYLVDSGEVTQFGYELDDYYQWLLNANKAATKSEQADEPKANSGVNRKEQKRLEAEFRKAIQPLKKQIEKLEKQLDKYAAELSEVEVALGDNELYNDDNKARLKELIAKQATLTPKLNDIEEELLMALEEMEEKEQAFADELAQ

SEQ ID NO: 82788 - DNA, 1914 bp, marine gamma proteobacterium HTCC2143
  CDS (1)..(1914): transl_table=11
atgatcaaactagaccaaataagcttacagcgtggtagcaaatttctgctagaaaaagccagtgttgtgtttcacccaggtcagaaaattgctttgatcggggctaatggcagtggtaaatcgagtctatttcaattattccttggaaaattgactgccgatgaaggtagtgtagcaattcctgtccagtggcgtattgcacatatggctcaggaagtggctaccagcaatcgcagagcattagatttcataattgatggcgatcaccagctgcgagggattgaggctgccatagacaaagccgagcgtgaagaaaatcacacacttatggccagcctccacgaaaaattggacacaatagacggctataatgctcgggttcgcgcagaacaactcatgctagggctagggttcaagcttgatgatagggacaaaccagcaaacagtttttccgggggatggagaattcgtctaaatctagcccaagcgctgatgagcccttcagacttgctattgctagatgaacccaccaatcacttagacctagacgcagagctgtggctcgagcaatggttacaacgctatcagggtagcctattactcatttctcatgacagggattttattgacagtgtctgtgaaggaatagtccacatagaacatcaaacacttaatacttaccgaggaaattattcagcctttgagcgccagcgagcagaaaagctggcccagcagcaagtgaactatgaaaaacagcagcgtcgaaaagacgaaatcaacgattttgttcggcgttttcgggccaaggcaaccaaagccaaacaagctcaaagtcgacttaaagaactaggccgcatggaagatattgcaccggctcatatcgactcaccctttaactttagctttcccgagccggaaaaattctcagatccattacttaatctgagccacgcttcattgggctataatcaggacccaatagttagtcatattaatctcagcatacaccccggaagtcgcatcggtctgctgggcgcaaacggtgccggcaaatcaacattgattaaatcccttgcgaaagagatcgatctgctgtcgggggaattcactgaaggagaaaatcttcagctaggctacttcagccagcatcaactcgaggcgctggatctagatgcaagtcccatgttacatcttcagcgattggatgctcaggctcgtgagcaggatattcggaacttcctcgggggcttcaactttcatggtgatatggcagtaggctcaatacgccatttttcgggcggcgaaaaggcacgactcgcattagcgattgttgtttggcaaaaacccaatttattacttcttgatgaacctaccaatcatctcgatctggaaatgtgccatgcgctcaccatggccttacaagtatttgaaggggccgtcattattgtctcacacgatcgtcatttgttacgaaacacggtcgatcagtttttactaattgctggaggaaaagctcaggcttatgatggcgatctcgatgactacagtcgctggctgatatcacaaagaaagcaagatgctcctgcatccacgccgggatcggattcaacggggaaaacaggaaagaaagaacagcggcaacaggcagcagagataagaaagcagctcaatcctatcagtaatgctataaagaaaattgagcataaaatggaaaagaccgataaattgcttaaagacatggaagctgaactcggcgacaacgatctctacaaagcaaataataatgaaaaacttcaacagttactgcgtcaacagggacacttaaaactggaaaaaaaccacgatgaagaacgctggtttgagttgacggaaaaacttgagtctctccaagacgaactggcatcacagggttag

SEQ ID NO: 82789 - protein, 637 aa, marine gamma proteobacterium HTCC2143
MIKLDQISLQRGSKFLLEKASVVFHPGQKIALIGANGSGKSSLFQLFLGKLTADEGSVAIPVQWRIAHMAQEVATSNRRALDFIIDGDHQLRGIEAAIDKAEREENHTLMASLHEKLDTIDGYNARVRAEQLMLGLGFKLDDRDKPANSFSGGWRIRLNLAQALMSPSDLLLLDEPTNHLDLDAELWLEQWLQRYQGSLLLISHDRDFIDSVCEGIVHIEHQTLNTYRGNYSAFERQRAEKLAQQQVNYEKQQRRKDEINDFVRRFRAKATKAKQAQSRLKELGRMEDIAPAHIDSPFNFSFPEPEKFSDPLLNLSHASLGYNQDPIVSHINLSIHPGSRIGLLGANGAGKSTLIKSLAKEIDLLSGEFTEGENLQLGYFSQHQLEALDLDASPMLHLQRLDAQAREQDIRNFLGGFNFHGDMAVGSIRHFSGGEKARLALAIVVWQKPNLLLLDEPTNHLDLEMCHALTMALQVFEGAVIIVSHDRHLLRNTVDQFLLIAGGKAQAYDGDLDDYSRWLISQRKQDAPASTPGSDSTGKTGKKEQRQQAAEIRKQLNPISNAIKKIEHKMEKTDKLLKDMEAELGDNDLYKANNNEKLQQLLRQQGHLKLEKNHDEERWFELTEKLESLQDELASQG

SEQ ID NO: 82790 - DNA, 2091 bp, Pseudomonas putida GB-1
  CDS (1)..(2091): transl_table=11
gtgcctgcagccaggttgcgcacaacagcaggcagacatcgccaccttgcgcttgcagctcaaggcacgcggcttccacgccgggcctggcatacagggccagggcgtaactccacaggtcgttgtgcatggttccactcgcgctatgggccgaggaagctggtagactccgcgaccatcatgatcagactatccaacctcactttacagcgtggtccgcagcgcttgctagaaggcgccgagatgaccctgcacgccggtcacaaggccggcctgatcggcgccaacggcgccggaaaatccagcctgttcgccctgctgcgcggtgagctgtcgcccgatgccggtgactgccaactgcccggtgactggcgcatcgcccatatgcgccaggaggtcgacaccctcgaccgcctggccgtggactatgtgctcgacggcgacgtgcgcctgcgcaaggtccaagccgaactggccgcggccgagcaggcccacgacggcaccgccctggcgcgcctgcacagtgaactggaaagcgccgacggctacaccgccgacgcccgcgcgcgcaagttgctggccggcctgggcttcaccaacgaacagatggaccgccgcgtcggcgacttctccggtggctggcggatgcgcctgaacctggcccaggcactgatgtgcccgtccgacctgctgttgctcgacgaacccaccaaccacctcgacctggacgccatcctgtggctggaagactggctcaagggctaccccggtacgctgttgctgatctcccacgaccgtgacttcctcgatgccgtggtcgaccatgtgctgcacgtcgagcagcgtaagttgaacctgtacaaaggcggctacaccgccttcgagcgcacccgtgccgaacgcctggcgcagcagcagcaggcctacgaaaagcagcaggcgcagcgcgcgcacatggaaaagtacatcgcccgcttcaaggctcaggccaccaaggcccgccaggcgcaaagccggatcaaggcccttgagcgcatggaggagttgtcggcggcgcatgtcgattcgccgttcgactttgtcttccgcgaatcgcagaaaatttccagcccgttgctgagcctgtccgaaggctgccttggctatggcgacaaggccatccttgaaaaggtcaagctgcagctcaccccgggtgctcgtattggcctgctcggccccaacggcgccggcaagtccaccctgatcaagaacctcgccggtgagctggagcctttgtcgggccgtttggtccgtggcgaaaaccttgcggtaggctacttcgcccagcaccagctggactcgctggatgacaaggccagcccgctgctgcacctgcagcgcatcgcccccaccgagcgtgagcagaccctgcgcgacttccttggcggcttcgacttccatggtgcccgttgcgacgagccagtggtgaacttctccggtggtgaaaaggcccgcctggcgttggcgctgatcgcctgggagcggccaaacctgctgctgcttgacgaaccgaccaaccacctcgacctggaaatgcgcctggcgctgaccatggccctgcaggagtttgccggtgccgtggtggtggtgtcccacgaccggcatttgctcaagagcaccaccgacgatttcctgctggtggccgacggcaaggtcgataccttcgacggtgacctggaagattacagccgctggctggttgagtaccgccagcgcagcgcgccggccagtaccgccccggtcaacccggacaagaccgacaagaaagcccagcgtcaggctgccgcagccttgcgccagcaactggcaccgcacaagaaggctgccgacaagctggaaaccgagctcaaccaagtgcacgtgcaattggccgagatcgagaccgcgctgggtgatggtggcctctacgaagcggcgcgcaaggacgaattgcgtgacctgctggcgcgccagaccaagctcaaacaacgcgaaggtgagctggaagaggcctggatggaagcgctggaaaccctcgaaagcatgcaggccgagctcgaggcgttgtcctga

SEQ ID NO: 82791 - protein, 696 aa, Pseudomonas putida GB-1
MPAARLRTTAGRHRHLALAAQGTRLPRRAWHTGPGRNSTGRCAWFHSRYGPRKLVDSATIMIRLSNLTLQRGPQRLLEGAEMTLHAGHKAGLIGANGAGKSSLFALLRGELSPDAGDCQLPGDWRIAHMRQEVDTLDRLAVDYVLDGDVRLRKVQAELAAAEQAHDGTALARLHSELESADGYTADARARKLLAGLGFTNEQMDRRVGDFSGGWRMRLNLAQALMCPSDLLLLDEPTNHLDLDAILWLEDWLKGYPGTLLLISHDRDFLDAVVDHVLHVEQRKLNLYKGGYTAFERTRAERLAQQQQAYEKQQAQRAHMEKYIARFKAQATKARQAQSRIKALERMEELSAAHVDSPFDFVFRESQKISSPLLSLSEGCLGYGDKAILEKVKLQLTPGARIGLLGPNGAGKSTLIKNLAGELEPLSGRLVRGENLAVGYFAQHQLDSLDDKASPLLHLQRIAPTEREQTLRDFLGGFDFHGARCDEPVVNFSGGEKARLALALIAWERPNLLLLDEPTNHLDLEMRLALTMALQEFAGAVVVVSHDRHLLKSTTDDFLLVADGKVDTFDGDLEDYSRWLVEYRQRSAPASTAPVNPDKTDKKAQRQAAAALRQQLAPHKKAADKLETELNQVHVQLAEIETALGDGGLYEAARKDELRDLLARQTKLKQREGELEEAWMEALETLESMQAELEALS

SEQ ID NO: 82792 - DNA, 2541 bp, Ostreococcus tauri
  CDS (1)..(2541)
atgagcacgcgtaaggagcgcgagaaggcggagctcgcggagcagaaacgacaagaaaaggaggcgaagaaggcgctcctcgcggcgaaacgcgcggcgcgagacgaagcgcgcgcggcgaagcgagaggacggcggcgacgacggggacgggggcgagggcgaggacgatgccgcgggcgatgcggtggcgtcgtcgaagacatcggacgggacgtggaccgagctcgaggacttggcgctgattgagggcttgaagacgagaggcgtccgcgcgtcggacgacgcggagagcgatgaggcgcgatggagcgcgatcgcggctggcgtcgagggaagaagcgcgatggagtgctgtcaacagtatcgagtgctgctcgcgcgggtgaagcgggcgagggagaacggcgaacgcgtggcgaacggcgagacgcttccggaggagacggtgaagcgaggcaaggcaaagtcgaggaagatgctgagcgtgaagcaggaacaagaggcggaggcgaagaagaagcgcgaggcgaagcttgagcgcgagcgattggcgcgaattgaggccaacggagggcggttgagctcggaagatttgggcttccacattcgaagcggaccggacgcgaaccgccggaacaactgcaacatggacattcatatgaccggcattcagctctacggcggtcgagacgagctgattcaggacgggacgttgaagctggtgttcgggaccaagtacggtttggtcggtcgtaacggatgcgggaagtcgacgctcctgcgagccatctccgagaagacgataaaacttcccgactttttgcacatcattcacgtcgagcaagaggcgtcgccggacgagcggtcggcgctgcaaaccgtggtggaaacggatcaagagcggctatatctgctcgatctcgagaagcgcatgctcgacgaggagatcgataagattgatgggatcgatttgaacgaggtgtacgagcgcctggacgaaatcgacgcggacaccgccttggcgagagctggacagatcttgggcggtctcgggttcgatcctcaggaacaacagaaagcgaccaaggagttctctggtggctggcgcatgcgcatcgctctcgcggcggcacttttcatgacgccggatttgttgctcctggatgagccaacgaatcacttggacgtccacgccttgacgtggctcgaagagtttttgcgcagatgggagaagacagttctcatcgtctctcacgaccgcggcttcttgaacgattgtacgacagcgacgattttcttgcaccataagaaactgcgatactacggcggttcctacgacaccttcctcaaggtgcgcgccgagcaccgtgcaaacgaggaggcggttcagagaaatcagaatttgcgagaggcctctctcaagcagttcatctctcgattcggtcaaggtcacaagaaaatggtgcgtcaagcgcagtgtcgcatgaagatgctcgagaagttacagtccgagcgcgtcgacgtggattacgacgatccgtacctgcgcatcaacttcccatcggctacgccgttaccgccgccgtgcatctcggtgatgaacgtcgcgttcggttacgagggttaccaaacgttgtaccaaggattggactttggattagacatggactctcgcgtcgccatcgtaggtccgaacggcgccggtaagtcaaccttcttgaaacttctagagggtgacattttgccgactgaaggttggatcaaccgtcacacgaagcttcgactggcgcgtttctcgcagcatcacctcgagacaatggatccagagcaagactctgtcgcacacatgaagcgtctcgacccggagatgccactcgagacggctcgagcgtatctcggtcgattcggtctctcaggcgagctcgcgacgaagcccattcgcgtcttgtctggggggcaaaagtcgcgtctagcgtttgcggaactcgcctggaaacaaccgcatatccttctcttggatgagccaacgaatcatctcgatttggagacgattgaatcgctctccatggctctgaataacttcgagggcggtgtcgtgcttgtttcgcacgacgagcgtctgatttctctcgtcgtcgacgaaatttggatcgtcaaaaagggtgatatgacgtccaaccctcccgtcccgggcagcgtcagcgttttcaacggttcatttgacgactataaggacatgttgcgtcaagagttctcgggtggtaatctcttgacggagaagcgcaagaaggagcgtgcgaacgccaagtcggcaaagcccgagcccgagcctgagcccgagcccgagcccgaggcaccgccgaaacccaaagggaagatcatgatggacagtgcgttcaccaagtcgactgatgcttcgagcgaaaacacggagcgcccggcaccttcggcggtgaagtgggtgccgccgcacttgcgaggagcgcgaggagaagaaaatgagaatctcggcagcgcggactccgcgtgggacgagtga

SEQ ID NO: 82793 - protein, 846 aa, Ostreococcus tauri
MSTRKEREKAELAEQKRQEKEAKKALLAAKRAARDEARAAKREDGGDDGDGGEGEDDAAGDAVASSKTSDGTWTELEDLALIEGLKTRGVRASDDAESDEARWSAIAAGVEGRSAMECCQQYRVLLARVKRARENGERVANGETLPEETVKRGKAKSRKMLSVKQEQEAEAKKKREAKLERERLARIEANGGRLSSEDLGFHIRSGPDANRRNNCNMDIHMTGIQLYGGRDELIQDGTLKLVFGTKYGLVGRNGCGKSTLLRAISEKTIKLPDFLHIIHVEQEASPDERSALQTVVETDQERLYLLDLEKRMLDEEIDKIDGIDLNEVYERLDEIDADTALARAGQILGGLGFDPQEQQKATKEFSGGWRMRIALAAALFMTPDLLLLDEPTNHLDVHALTWLEEFLRRWEKTVLIVSHDRGFLNDCTTATIFLHHKKLRYYGGSYDTFLKVRAEHRANEEAVQRNQNLREASLKQFISRFGQGHKKMVRQAQCRMKMLEKLQSERVDVDYDDPYLRINFPSATPLPPPCISVMNVAFGYEGYQTLYQGLDFGLDMDSRVAIVGPNGAGKSTFLKLLEGDILPTEGWINRHTKLRLARFSQHHLETMDPEQDSVAHMKRLDPEMPLETARAYLGRFGLSGELATKPIRVLSGGQKSRLAFAELAWKQPHILLLDEPTNHLDLETIESLSMALNNFEGGVVLVSHDERLISLVVDEIWIVKKGDMTSNPPVPGSVSVFNGSFDDYKDMLRQEFSGGNLLTEKRKKERANAKSAKPEPEPEPEPEPEAPPKPKGKIMMDSAFTKSTDASSENTERPAPSAVKWVPPHLRGARGEENENLGSADSAWDE

SEQ ID NO: 82794 - DNA, 2165 bp, Pteris vittata
  CDS (163)..(1956)
gctttttagttttccccaaccctcaacgttgtcgcggagggaaaggccaccagttttgttcaatttcgcaaatcctgttcttcctttgcgctgtcgtctcagttgccgcccttctacttgcaggaagaagctcacgtagaagaaaatatttagtgcagaaatatggcgtcagatgcaagcaagaagaaggcagctcaaaagaaggcagctgctgcagctaagcgcggttccaaagccactgctactaatgcaacctcgtctaaaactaatggggtttccaattcatccccaaatgaagttgcagatgagatggcctatatgcagataactgataggacatgtacaggaatccttgcttcccatccacaatcaagagatattcatatcgaaagtctaacggtgacatttcatggccatgatctcattgtagattcgagcctcgaactcaactatagaaggcgttatggattgcttgggctgaatggttgtggaaagtcgactctcctgtcagccataggttgccgtgagctacccattccagagcatatggatatttaccatttaactcgggaaattgaagcaactgacttgacctctctgcaagccgttgtaaacgtagatgaagaaaggatcaagctagaaaaagaggctgaaatgctagctgctcaggatgatggtggtggtgaggttctagaaagattatatgagcgtttggaggctatggatgcagctacagcagagaagagggcagctgaaattttgtatggtctgggtttcaacaaaagcatgcaacagaagaagacccgggatttttcaggcggctggagaatgaggattgcattagccagagcattgttcatgaacccaactattttactgcttgatgaaccaacgaaccatcttgatctcgaagcctgtgtgtggcttgaggaaacattgaagaagtttgaccgcattcttgtcgttgtatcacactctcaggattttcttaatggcatctgcacaaacattatacatatgcaaagtaagaagctgaagttctacacaggaaattacgaccaatatgtccaaacccgtgaagagctggaagaaaatcagatgaagcagtataagtgggaacaagagcagatagcaaacatgaaagagtacattgccaggtttgggcatggctctgctaaactagccaggcaggcacagagcaaggagaagacattggcaaagatggaaagagggggtctcacagagagggtggttaaggacaaggtgcttgttttccgatttactgacgttggcaagttacccccaccagttctacaatttgtggaggtggactttggttacactccagaacatatgatatacaagaaaattgactttggagttgacctggattcgaggatagctttggttggtcccaatggagcaggtaagagcactcttttgaagcttatgacgggcgaattgtctcccattgatggcatggtgcggcgccacaaccatttacggattgcgcagtttcaccagcatttggcagataagctgaatcttgatatgcctgccctacagtacatgatgtcggaatatcctggcttagaagaagaaaagatgcgggcagcgattggaaggtttgggctgactggaaaggctcaaatcatgcccatgagaaatctatccgacggtcagaggagtcgtgttatttttgcttggttagcttggcggttacctcatatgctcctgcttgatgaacctacgaatcatcttgatattgagacaatagatgctttggctgatgcattaaatgaatgggatggagggcttgtgcttgtgggtcatgattttaggcttatcaaccaggtggccaaggagatctgggtttgtgagaaccaaacagtgtcaaggtgggaaggtgacattatggacttcaaacagcacctaaaagcaaaagcaggcctttgagatggtgttgcttagaagattgaacttgagaggccatagccatatctacttttaataaagtagtaaagattttgcttttgatatgaattattctcaagatacgagaatgcctacttggaagctcgtaatgaagctttttatattgcttcatcatttctgatcaatatttataacactttcttcttgtagaaaaaaaaaaaaaaaaaaaa

SEQ ID NO: 82795 - protein, 597 aa, Pteris vittata
MASDASKKKAAQKKAAAAAKRGSKATATNATSSKTNGVSNSSPNEVADEMAYMQITDRTCTGILASHPQSRDIHIESLTVTFHGHDLIVDSSLELNYRRRYGLLGLNGCGKSTLLSAIGCRELPIPEHMDIYHLTREIEATDLTSLQAVVNVDEERIKLEKEAEMLAAQDDGGGEVLERLYERLEAMDAATAEKRAAEILYGLGFNKSMQQKKTRDFSGGWRMRIALARALFMNPTILLLDEPTNHLDLEACVWLEETLKKFDRILVVVSHSQDFLNGICTNIIHMQSKKLKFYTGNYDQYVQTREELEENQMKQYKWEQEQIANMKEYIARFGHGSAKLARQAQSKEKTLAKMERGGLTERVVKDKVLVFRFTDVGKLPPPVLQFVEVDFGYTPEHMIYKKIDFGVDLDSRIALVGPNGAGKSTLLKLMTGELSPIDGMVRRHNHLRIAQFHQHLADKLNLDMPALQYMMSEYPGLEEEKMRAAIGRFGLTGKAQIMPMRNLSDGQRSRVIFAWLAWRLPHMLLLDEPTNHLDIETIDALADALNEWDGGLVLVGHDFRLINQVAKEIWVCENQTVSRWEGDIMDFKQHLKAKAGL

SEQ ID NO: 82796 - DNA, 1731 bp, Aspergillus oryzae
  CDS (1)..(1731)
atgtcctcgactttgggacttgctggtggaaatgtcgacttggaatctgccaacagcaggaaagtagagtctcgcgtagaccgcaagaaacttgaaaaggcagagcgaaagatccgtgccaaacaggagaaaaagcaaatgaagatggtgcaatacgaatcgtcccgtctcctcgaccagccagatagcaccatgtcttacgaggagttcttcatggctgttaacccgctccagctgggctcggattctgcagcaaagagcaaggacattaagattgatagcattgacacctctgttggtggtcatcgaatcctgaccgacgcttctcttaccttggcgtacggtcgacggtacggtcttgttggtcagaacggtataggaaagtccactcttctgcgggccttgagccatgctgccaggcttgatcacgaaagggagggcctagacataaccttaagtgatatccattccaaactttcagaaatggaatcggacaaggccgaatcgcgcgctgccagtatcttggctggtcttggtttttcacctgaaagacagcagtttgcaacaaaaaccttctctggtggttggcgaatgagattagctctagcgcgagctttattctgcgaaccagacttgcttcttctagatgaaccctccaatatgctggacgttccgtccattacattcttatccaactacctccagggataccctagtactgttcttgtggtctcgcacgaccgggctttcttaaacgaggtcgctaccgatattatacatcaacactctgaaaggctggattactataagggggccaacttcgactcgttctatgctaccaaggaggaacggaagaagaatgcgaagcgtgaatacgagaaacaaatggcagaaagagcacatttgcaagcattcatcgataaatttagatacaacgcggccaagtcatccgaggcgcaatctcgaatcaagaagcttgagagaatgccagtcttggaagccccggagagtgattacgttgtgcatttcaaatttccagatgtcgaaaagctttctccacccattgtacagatgtccgagatttcctttggttattccaaagataagccccttttaaaaaatgtcgatctcgatgtgcaacttgactctcggataggaattgttggaccgaacggcgctggtaaaaccacagtgttgaagctgctaactggccagcttgagccaacttcgggccttctttcgcaacatgctcgcttacgtattggatactttgcccaacatcatgttgatgctctggatctgacgaccagtgcggtaagcttcatggcaaagacctacccaggaaagacagacgaggaataccgcaggcatctgggagcattcggaatcactggaatgactggacttcaaaagatggagctcctgtctggaggacaaaaatctcgtgtcgcatttgcttgcttgtcgttgacaaatccacacatcttggtccttgacgaaccttccaaccacctggatattgaaggtatggatgcattgtctgaggcattgcagaggttcgaaggtggtgtcgtgatggtatcacacgatgtgacaatgctgcagaacgtctgcactagtctttgggtgtgcgacaagggcacagtaaccaagttcgatggcaccgtcaatgcctacaagaagatgatcagttcacaagccaacgaagcaggtgtagcagttgcccactag

SEQ ID NO: 82797 - protein, 576 aa, Aspergillus oryzae
MSSTLGLAGGNVDLESANSRKVESRVDRKKLEKAERKIRAKQEKKQMKMVQYESSRLLDQPDSTMSYEEFFMAVNPLQLGSDSAAKSKDIKIDSIDTSVGGHRILTDASLTLAYGRRYGLVGQNGIGKSTLLRALSHAARLDHEREGLDITLSDIHSKLSEMESDKAESRAASILAGLGFSPERQQFATKTFSGGWRMRLALARALFCEPDLLLLDEPSNMLDVPSITFLSNYLQGYPSTVLVVSHDRAFLNEVATDIIHQHSERLDYYKGANFDSFYATKEERKKNAKREYEKQMAERAHLQAFIDKFRYNAAKSSEAQSRIKKLERMPVLEAPESDYVVHFKFPDVEKLSPPIVQMSEISFGYSKDKPLLKNVDLDVQLDSRIGIVGPNGAGKTTVLKLLTGQLEPTSGLLSQHARLRIGYFAQHHVDALDLTTSAVSFMAKTYPGKTDEEYRRHLGAFGITGMTGLQKMELLSGGQKSRVAFACLSLTNPHILVLDEPSNHLDIEGMDALSEALQRFEGGVVMVSHDVTMLQNVCTSLWVCDKGTVTKFDGTVNAYKKMISSQANEAGVAVAH

SEQ ID NO: 82798 - DNA, 2148 bp, Sarcoptes scabiei type hominis
  CDS (1)..(2148)
  misc_feature (2133)..(2133): n is a, g, c or t
atggctgcaacagaaatcctaaaagttcttaaaaattatattccagatatggggcaatatataagcgattacatagttggctttttgacttcggattcgtttaattcgcccaatgatatcagtgaagctgtgggaagaatcctagaatcttgtctaaatgatctcctttccaaacagccaattgatgaaaaatctaatgaagagaaacttaaatgtatttataatcaaatttatcaaattcttcacatcaatgatctcgaaacgggaaatagagatgatgaagatgaaaaactgaaacagcctgtctacatagatccaacagcgggtcagaatgagaatgaatggaaatctatttggactagtcacaaagaaatcgaatctaaggttgatgccaacaaattaagaaaagccgaagagaagctcagattaaaagcagaaaagcgtgagggtgcccaagagaattcttcaaacgcggctatctcgaacattcaagcatcagcatcgcaatcattatcgaaaaaatcaaccaaattggaagagctaggcagtaatcttataaaagatatcaaaatcgaaaactttgatatttcttttggcagtaatattttattgaaaaacgctaatttaaatctaaactatggcgagcgctatggactttgtgggcgcaatggaatcggcaaatctacattgttgaaaatgatttccaacggatcattggtcattccatctcatatcagaattctacacgtggaacaagaaatagtaggagatgatacatcagctattgagtcggtattagaatgtgatgttgttaggaaaaatttgctggctgaagagaagattttaacacaaaaaacatcgttgaccgatcaagaaagtacgaaattgaacaacatttaccaagagttagcagcgattgaagctgataaagctccagctcttgctgcaacgattttgcttggtctaggtttcactcatgatatgcaacaaaaagcaacgaaaacgttttcgggcggctggcgtatgcgtttagctctggctcgagcacttttttccaaaccagatctactattattggatgaaccgaccaatatgttggacctgaaagcaatctattggctttctaattacttggtgaatcactggaaatctacattactagttgtctcacacgaccgaaaatttttctctgaagttccaacttatattctccattttcattcaaaaagaatcgatccatatcatgggacatatgaggctttcatgactgctatgacggaaaaactcaaaaaccaacagcgagaatatgaggcacagcaaacgcagatcaaaagtacacaagaattcattaatagatttcgctacaacagtaaaagagcatcattggttcaaagccgaatcaaaagtttagacaaaatgaaaattgtagacaaagttgaaaaagattccgtggtaattttccgattgcctcaaccagaaaatctttctccacccattttacagttaaatgatgtcaattttgcctatgagcctggcaaagtcattttaaaaaatgttaatctaaatgccaatcttcagtctcgaatttgtattgtcggtgataatggctcaggcaaaacaactctattaaaactcttaatcaacgccttggaacctacgtctggaatcagacattctcataggaatctcgcaatcggatattttactcagcatcatgttgatcaactaccgatgaaccagactccattgcaattcatggctacgcagcaacctggaaaatctgtcgagcactatcgtaaatatctaggaagtttcggtatcactggagatttgagcttacaaccattgcaatcattgtccggagggcaaaaatctagagtcgcgtttgcggccatgacattgacaaacccacatcttttgataatggatgaaccaacaaatcatttggatgtcgaaactgttgaagcactggcaaaagctctgaatgaatacacaggaggagtgatattggtcactcatgatcagagtatgatccaaaaaatttgtaaggaattgtggcattgcatcgatggacatgtaaattgtgttaaaggcggttttgatgagtacgccgagttcatcaagaaagaattncaagaaatcctttga

SEQ ID NO: 82799 - protein, 715 aa, Sarcoptes scabiei type hominis
  misc_feature (711)..(711): The Xaa at location 711 stands for Leu, or Phe.
MAATEILKVLKNYIPDMGQYISDYIVGFLTSDSFNSPNDISEAVGRILESCLNDLLSKQPIDEKSNEEKLKCIYNQIYQILHINDLETGNRDDEDEKLKQPVYIDPTAGQNENEWKSIWTSHKEIESKVDANKLRKAEEKLRLKAEKREGAQENSSNAAISNIQASASQSLSKKSTKLEELGSNLIKDIKIENFDISFGSNILLKNANLNLNYGERYGLCGRNGIGKSTLLKMISNGSLVIPSHIRILHVEQEIVGDDTSAIESVLECDVVRKNLLAEEKILTQKTSLTDQESTKLNNIYQELAAIEADKAPALAATILLGLGFTHDMQQKATKTFSGGWRMRLALARALFSKPDLLLLDEPTNMLDLKAIYWLSNYLVNHWKSTLLVVSHDRKFFSEVPTYILHFHSKRIDPYHGTYEAFMTAMTEKLKNQQREYEAQQTQIKSTQEFINRFRYNSKRASLVQSRIKSLDKMKIVDKVEKDSVVIFRLPQPENLSPPILQLNDVNFAYEPGKVILKNVNLNANLQSRICIVGDNGSGKTTLLKLLINALEPTSGIRHSHRNLAIGYFTQHHVDQLPMNQTPLQFMATQQPGKSVEHYRKYLGSFGITGDLSLQPLQSLSGGQKSRVAFAAMTLTNPHLLIMDEPTNHLDVETVEALAKALNEYTGGVILVTHDQSMIQKICKELWHCIDGHVNCVKGGFDEYAEFIKKEXQEIL

SEQ ID NO: 82800 - DNA, 2415 bp, Populus tremula x Populus tremuloides
  CDS (188)..(2374)
aaaactctctctctcggctctgtactacatttatatctcctggaagcagaaaactccattctctgtccctctctacttccagagaaagacaaggggagaagaagctatctctacagctattctgagacttctttcttcatcaattaattagcttctctgttatcaatcagactaactaactgctgcaatgggaaagaagcaaaaggaggatgctagtggcgccccctcaaaggctaaggctggcaataaagatgcaaagaaggaaaaactatcagtcactgccatgttggctagcatggaccagaaacctgacaaacctaagaagggttcttcgtcaaccgtaacgtctagcaagcccaagccaaagtcagctccttcttacaccgatggaattgatcttcctccgtctgatgatgaagaagagccgaatggcttggaagaagagcaacagcagaatgatccaaacaagagacccagtcagcggaggtctgaattgaagccccttgatgtagccatatcggataaagaattaaaaaagcgtgaaaagaaggaacttcttgctgcccatgccattgagcatgcgaggcaggaggcccttaaagatgaccatgatgctttcacggtcgtcattggaagccgggcttctgtccttgatggggaagatgaaggtgatgcaaatgtcaaagatataacaatagagaatttttctgtctcggctcgggggaaagaactgcttaaaaatgcatctgtgaagatagcacatggacggagatatggtttggttgggcccaatggaatgggcaagtctacactattgaagctccttgcttggagaaagattcccgtgccgaagaatattgatgtgcttttggttgaacaggaggtcattggtgatgataaaacagctttacaagcagttgtttcagctaatgaagaacttgtcaaactccgagaagaagttgcctccctgcagaaatctgacggccctgctgagggtgaaaacaatggtgatgattatgatgaagatgatgctggagagaggcttgctgaattgtatgagaaattgcagttgatgggatcagatgctgctgaatcacaggcatcaaagattcttgctgggttgggtttcaccaaggatatgcagggccgtccaaccaggtcatttagtggtggctggaggatgagaatttcactggcaagggcactttttgtgcagcctactcttttattgcttgatgagcctaccaaccatcttgacttgagggctgttctctggttggaggagtatctgtgccggtggaagaaaactttggttgttgtctcacatgaccgagatttcctcaacacagtttgcaatgacatcattcatctacatgatcagaaacttgactcctatcgtggaaattttgatgactttgaagttgggtatgagcagaggcggaaggagacaaacaagaagtttgagatatatgacaagcagatgaaagctgccaagaggagtgggaatcgggttcagcaggaaaaggtcaaggatcgagcaaagtttgctgcaaccaaggaagcagcaaagaataagggcagggctaaggttgatgaggatcaagccgcacccgaagctccaaggaagtggagagattacagcgttgagttccactttcctgaacctactgagcttacaccaccactcctgcagctcattgaagtgagctttagttatccaaatcgggaggatttcaagttgtcaaatgttgatgtgggcattgacatggggacccgtgttgctattgttggacccaatggagctggcaaatccactctcttaaatcttcttgcaggtgatttggtaccaaccgaaggtgaagtgaggcggagtcagaagttgaggattggaaggtactcgcagcactttgtggatcttcttacaatggatgaaacacctgtacaataccttcttcgtctccatccagaccaagaggggcttagcaaacaggaggctgttcgggggaagcttggcaaatttggacttcccagtcataatcatcttacccctattgcaaaattatcaggtgggcagaaagcccgagttgtcttcacatcaatatcaatgtcaaagccccatattctacttttggacgaacccacaaaccacttggatatgcaaagtatcgatgccttggctgatgcgcttgatgaattcactggcggggtggtcctggtcagtcacgactctagattgatatcacgtgtctgtgatgatgaagagaagagtgaaatttgggtggtggaagatggaactgtgactgcttttccggggacatttgaattgtacaaagaggagctacagaaagaaattaaggctgaggttgatgattaaggttgcagttacaatacttattctttgcatcggtaagttaa

SEQ ID NO: 82801 - protein, 728 aa, Populus tremula x Populus tremuloides
MGKKQKEDASGAPSKAKAGNKDAKKEKLSVTAMLASMDQKPDKPKKGSSSTVTSSKPKPKSAPSYTDGIDLPPSDDEEEPNGLEEEQQQNDPNKRPSQRRSELKPLDVAISDKELKKREKKELLAAHAIEHARQEALKDDHDAFTVVIGSRASVLDGEDEGDANVKDITIENFSVSARGKELLKNASVKIAHGRRYGLVGPNGMGKSTLLKLLAWRKIPVPKNIDVLLVEQEVIGDDKTALQAVVSANEELVKLREEVASLQKSDGPAEGENNGDDYDEDDAGERLAELYEKLQLMGSDAAESQASKILAGLGFTKDMQGRPTRSFSGGWRMRISLARALFVQPTLLLLDEPTNHLDLRAVLWLEEYLCRWKKTLVVVSHDRDFLNTVCNDIIHLHDQKLDSYRGNFDDFEVGYEQRRKETNKKFEIYDKQMKAAKRSGNRVQQEKVKDRAKFAATKEAAKNKGRAKVDEDQAAPEAPRKWRDYSVEFHFPEPTELTPPLLQLIEVSFSYPNREDFKLSNVDVGIDMGTRVAIVGPNGAGKSTLLNLLAGDLVPTEGEVRRSQKLRIGRYSQHFVDLLTMDETPVQYLLRLHPDQEGLSKQEAVRGKLGKFGLPSHNHLTPIAKLSGGQKARVVFTSISMSKPHILLLDEPTNHLDMQSIDALADALDEFTGGVVLVSHDSRLISRVCDDEEKSEIWVVEDGTVTAFPGTFELYKEELQKEIKAEVDD

SEQ ID NO: 82802 - DNA, 2349 bp, Arabidopsis thaliana
  CDS (95)..(2266)
ttcaatccccttttttttttcgtttcgtcgtttgttcgttttctctatcgctctcgttcatctacgcaatctctctcactaggtacagttttaaatgggtaagaagaagtcagacgagagtgctgctaccacaaaggtgaagccaagtgggaaagatgcttcgaaagattctaaaaaagagaaattgtcagtctcggctatgcttgcaggcatggatcagaaagatgataaaccgaagaagggctcatcatctagaaccaaggctgctccgaaatctacatcttacactgatggcatagatcttcctccttctgatgaagaagacgacggtgaatctgatgaggaagagagacagaaggaagctaggaggaagctgaagagtgaacaaaggcaccttgagatatctgtgactgataaggaacaaaagaagcgagaggcgaaagaaagattagctcttcaggctgcagagtcggcaaagagggaggctatgaaggacgatcatgatgcattcacggttgttattggaagcaagacctcagtgcttgaaggagacgacatggctgatgcaaatgttaaggatattaccatagaatctttttctgtatctgctcgaggtaaagagcttttgaagaatgcttctgtcaggatttcacatggtaaaaggtatgggttgatcgggccaaacggaatgggaaagtctacactgttaaagcttttagcttggaggaagattccagtgccaaagaatattgatgttcttcttgttgagcaagaggtggttggtgatgaaaagagtgctctgaatgcagttgtctctgccaatgaagagttggttaagctacgtgaagaggctgaagctctgcagaagtcgtcttctggagctgatggagaaaatgttgatggtgaggatgatgatgatactggagaaaagcttgctgaactgtatgacaggctgcagattttagggtcagatgctgctgaagcacaggcatccaaaattcttgcggggttaggtttcacaaaagatatgcaagtgcgtgcgactcagtccttcagtggtggctggaggatgcgaatatcattagctagagctctcttcgtgcaacctacccttttgctgttagatgaacccactaaccatcttgacctgagagctgttctatggttagaggagtatttgtgtcgctggaagaagacactagttgttgtttcacatgaccgggacttcctcaacacagtctgcacggagataatacatctccatgaccagaatctccacttctaccgtggtaatttcgatggttttgaaagcggatatgagcagcgtcgcaaggagatgaacaaaaaatttgatgtctacgacaaacagatgaaagcagcgaagaggactggaaaccggggtcaacaggagaaggtaaaggacagggccaagtttactgctgcaaaagaagcatccaagagtaagtcaaagggcaagacagtggatgaagaaggcccagcaccagaagctccaaggaagtggagagattacagtgtggtgttccacttcccagaaccaactgagctcactcctcctcttctgcagttaattgaggttagcttcagctatcccaacaggccagatttcagactctcgaatgttgatgtaggtatcgatatggggacacgggttgcgatagttgggcctaacggagcaggaaagtccactctattaaatcttcttgcgggagatttagttccaacagagggtgaaatgagaagaagccagaagctgaggattggcaggtattctcagcattttgttgaccttttaacaatgggggaaacaccggttcagtatctccttcgtcttcatcctgaccaagagggatttagcaagcaagaggcagtgcgagcgaagctaggcaagtttgggctaccaagtcacaatcacttatctccaattgcgaaattgtctagaggacaaaaggctagggttgtgttcacctcgatctcaatgtcaaaaccacacattttgctcctggacgagcctacaaatcacttagacatgcagagtatagatgccttggcggatgcactagatgagttcacaggtggagttgtgttggtgagtcacgactcgagactcatatcacgtgtatgtgcggaagaggagaagagtcaaatttgggttgtagaagacggaacagtgaatttcttcccaggcacatttgaagagtacaaagaagatctccaaagagaaatcaaagcagaagttgatgagtgaagttttgttgttagcttctaaggtaaactcaaactcctttatgttttataacaaactcaaaaagttttggacaattttatttt

SEQ ID NO: 82803 - protein, 723 aa, Arabidopsis thaliana
MGKKKSDESAATTKVKPSGKDASKDSKKEKLSVSAMLAGMDQKDDKPKKGSSSRTKAAPKSTSYTDGIDLPPSDEEDDGESDEEERQKEARRKLKSEQRHLEISVTDKEQKKREAKERLALQAAESAKREAMKDDHDAFTVVIGSKTSVLEGDDMADANVKDITIESFSVSARGKELLKNASVRISHGKRYGLIGPNGMGKSTLLKLLAWRKIPVPKNIDVLLVEQEVVGDEKSALNAVVSANEELVKLREEAEALQKSSSGADGENVDGEDDDDTGEKLAELYDRLQILGSDAAEAQASKILAGLGFTKDMQVRATQSFSGGWRMRISLARALFVQPTLLLLDEPTNHLDLRAVLWLEEYLCRWKKTLVVVSHDRDFLNTVCTEIIHLHDQNLHFYRGNFDGFESGYEQRRKEMNKKFDVYDKQMKAAKRTGNRGQQEKVKDRAKFTAAKEASKSKSKGKTVDEEGPAPEAPRKWRDYSVVFHFPEPTELTPPLLQLIEVSFSYPNRPDFRLSNVDVGIDMGTRVAIVGPNGAGKSTLLNLLAGDLVPTEGEMRRSQKLRIGRYSQHFVDLLTMGETPVQYLLRLHPDQEGFSKQEAVRAKLGKFGLPSHNHLSPIAKLSRGQKARVVFTSISMSKPHILLLDEPTNHLDMQSIDALADALDEFTGGVVLVSHDSRLISRVCAEEEKSQIWVVEDGTVNFFPGTFEEYKEDLQREIKAEVDE

SEQ ID NO: 82804 - DNA, 1821 bp, Oryza sativa
  CDS (1)..(1821)
atggtgcacaagctcgctggcgctgccacgccgagggcggcgtcgttcgcgccggtcgacgtcaacgccgccgcgccgccgccgccgccgcagcgcaaggaggtgaagacgaagaagaaggaggagcggcgcaagcacgaggcggcggcggcggcggcgaatctctgggacgaccctgactcgtacgtcgtcaccatcggcggccgcgtcctgggacgcggcgccgccgccaccgcggacgccgcgactgacaacgtgagggacgtcgtcgtggaggactccgacgtgtgggtgcagggggtggcgctgttcgagggcgcgtcgctgcgcgtcgcgcacgggcggcggtacggcctcgtcgggcccaacggcaaggggaagaccaccctgctcaagctcctccactggaggaagctcccggtgccgcgcggcatccgcgtcacgctcgtggtgcaggaggacgacaaccgcgacccccgcccggtgatcgaggtggtgctcgccgccgacgaggagctcgccacgctgcgcgccgagcgtgaccagctcgaggcctcctccgccgccgccgccgccaacggcgcccggctcgccgaggtgtacgaggagctcacgcagcgtggctgggacaccgccccggcgcgcgcggccaagatcctcgccgggctggggttcgaccaggcgagccaggcgcggccggcgagctccttcagcggcggctggatcaagcgcatcgcgctcgccggcgcgctcttcatgcagccaacgctcctcctcctcgacgagcccaccaaccacctcgacctccgcgccgtcctgtggctggaggagtaccttaccgcgcagtgcaagagcaccctcgtcgtcgtctcccacgaggagggcttcctcaacgccatctgcgacgaggtcgtgcacctccaggacaagaagctgcacgcctaccgcggcggcttcgactccttcgtcggcagctacgagcagaagaaggccaaggccatgaaggagagcgagaggctggccaaggcggcgcggaagagcggccggagggcgcccaagaagtggcacgactacaccgtcgagttccacttcgccgcgcccaccgagctcgccggcggcgggcccctcctccgcctcgccgaggccgggttcacccgcggcggattccagctgtccgccatcgacgccgacgtctccatggggcagcgcgtcgccgtcgtcggccccaacggggcagggaaatccaccctcctcaagctcctcgccggcgagctcacgccgacgagcggcgaggcgaggaggaaccccaagctgaggatcgggctctactcgcagcacttctgcgacgcgctgccggaggagaagagccccgtgcagcacggacaatgtcaccgagagtgtctcgacacgcatccccacctgaagagcaagccatgggaggcgcgcgccaagctcgccaggttcgggctggccaaggagagccacctcaccaccatcggcaagctctccggcgggcagaaggcccgcgtcgcgctcgcctccgtcgcgctcggggagccgcacgtgctgctgctcgacgagccgaccaacaacctcgacatgcagaacatcgacgcgctggcggacgcgctcgacgagttcgccggcggcgtggtcatcgtcagccatgactcgaggctggtgtcccgcgtctgcgacgacgaggagaggagcgcgctgtgggtggtgcaggacggcacggtgaggccgtacgacggcacgttcgccgagtacagggacgatctcctggacgacatcaggaaggagatggccgccgactga

SEQ ID NO: 82805 - protein, 606 aa, Oryza sativa
MVHKLAGAATPRAASFAPVDVNAAAPPPPPQRKEVKTKKKEERRKHEAAAAAANLWDDPDSYVVTIGGRVLGRGAAATADAATDNVRDVVVEDSDVWVQGVALFEGASLRVAHGRRYGLVGPNGKGKTTLLKLLHWRKLPVPRGIRVTLVVQEDDNRDPRPVIEVVLAADEELATLRAERDQLEASSAAAAANGARLAEVYEELTQRGWDTAPARAAKILAGLGFDQASQARPASSFSGGWIKRIALAGALFMQPTLLLLDEPTNHLDLRAVLWLEEYLTAQCKSTLVVVSHEEGFLNAICDEVVHLQDKKLHAYRGGFDSFVGSYEQKKAKAMKESERLAKAARKSGRRAPKKWHDYTVEFHFAAPTELAGGGPLLRLAEAGFTRGGFQLSAIDADVSMGQRVAVVGPNGAGKSTLLKLLAGELTPTSGEARRNPKLRIGLYSQHFCDALPEEKSPVQHGQCHRECLDTHPHLKSKPWEARAKLARFGLAKESHLTTIGKLSGGQKARVALASVALGEPHVLLLDEPTNNLDMQNIDALADALDEFAGGVVIVSHDSRLVSRVCDDEERSALWVVQDGTVRPYDGTFAEYRDDLLDDIRKEMAAD

SEQ ID NO: 82806 - DNA, 1917 bp, Drosophila melanogaster
  CDS (1)..(1917)
atgaagaacaacgaggtcaacgtggagcgaaaggttctcaacgcgccggtcaacatcgaggagatggccaagaacatggagcggctggacaaggatatgcaaagcatctgggtggccaacaaagatggcgccaataaagtggactccaagaaactaggaaaggcggaggccaagctgcagcagaagcaggagaaacggcaggaggtgaacaaacatggtatgattcctgttgcggtgaagctacaaacggccacagcctcacaggtgaccaacaagaagaacaccaagctggatcagaaaggtcttaaccgatccatggacatcaagatcgaaaactttgacctggcttttggcgaaaaagttcttctgcagaatgcgaatctgctgctgtcttacggacgccgctatggtctggtgggacgcaatggcctgggcaagactacactgctccgcatgattgccgagcgacagctacagatcccttcgcacatatcggtgctgcacgtggagcaggaggtggttggcgatgacacaccagcagtggagagtgtgctggaatgtgatactgagcgaacgagacttctgacccgcgagaaggagattctggctgcccttaacaatggagttcaggatgcgacgctgtccaatgagctgagcgagacctacgcctctctgcagaacatcgaggcggacaaggctgtggcccgcgcatctgtgatacttaagggcttgggattcgatgcagatatgcagctgcgtccaactaaatccttctcaggcggctggcgcatgcgtcttgctttggccagggcactgttctcaaaacccgatctgttactgctcgatgagccgacgaacatgttagacatcaaagccattatttggctggaaaactatctgcagacatgggccaccaccattctggtagtttctcacgatcgcaacttcctggacacggtgccgacagacattattcacctacattcccaggaactggaggcatacaagggaaactatgaacagttcgagaagaccaagacggagaagctgaagtcccaaagacgtgaatacgaggcccaaatggctcacagagctcatgtccaagacttcatcgatcgcttccgatacaacgcaaaccgtgcctcgtctgtgcaatccaaaattaaaatgctcgaaaagctgccggaactaaagccagtggaaaaggagactgtggtcacgctcaaattccccgaagtggaaccccttaatcctcccgtgctggccatttcggaggttactttccgttacaatccagaagatccactgcccatcttcaagggcgtcaatctctcagccacatcggactctcgaatttgcattgtcggagaaaacggagcgggaaagtcgacgctgctgaagattattgtcggtcaactgagcactattcacggaaacattgtcctgcatcgcggtcttcgaattggatattttgcgcagcaccatgtggaccatctgaatatgaatgtaacgtgtgtgggagttttggcagaactgtttcctggtcgcccggacgaagagtatcgccggcagttgggcagcttcggcatatccggaccactggcactgcagagcattgccagtttatctggaggacaaaaatcacgagtggccttagcaaagatgtgcatggcggagccaaatttcctggtgctcgatgagccgactaatcacttggacattgaaaccattgatgctttgggccgagccataaatgcctttaagggcggcgtaatcctggtttcccacgacgaacgcctcattaaggtcgtctgcaaggaactctgggtgtgtggcaatcgcacagtcagagcgatcgaaggtggtctggacgagtataagcgcgaggtttacaaggaaatcgaagctaatagttga

SEQ ID NO: 82807 - protein, 638 aa, Drosophila melanogaster
MKNNEVNVERKVLNAPVNIEEMAKNMERLDKDMQSIWVANKDGANKVDSKKLGKAEAKLQQKQEKRQEVNKHGMIPVAVKLQTATASQVTNKKNTKLDQKGLNRSMDIKIENFDLAFGEKVLLQNANLLLSYGRRYGLVGRNGLGKTTLLRMIAERQLQIPSHISVLHVEQEVVGDDTPAVESVLECDTERTRLLTREKEILAALNNGVQDATLSNELSETYASLQNIEADKAVARASVILKGLGFDADMQLRPTKSFSGGWRMRLALARALFSKPDLLLLDEPTNMLDIKAIIWLENYLQTWATTILVVSHDRNFLDTVPTDIIHLHSQELEAYKGNYEQFEKTKTEKLKSQRREYEAQMAHRAHVQDFIDRFRYNANRASSVQSKIKMLEKLPELKPVEKETVVTLKFPEVEPLNPPVLAISEVTFRYNPEDPLPIFKGVNLSATSDSRICIVGENGAGKSTLLKIIVGQLSTIHGNIVLHRGLRIGYFAQHHVDHLNMNVTCVGVLAELFPGRPDEEYRRQLGSFGISGPLALQSIASLSGGQKSRVALAKMCMAEPNFLVLDEPTNHLDIETIDALGRAINAFKGGVILVSHDERLIKVVCKELWVCGNRTVRAIEGGLDEYKREVYKEIEANS

SEQ ID NO: 82808 - DNA, 1866 bp, Zymomonas mobilis
  CDS (1)..(1866): transl_table=11
atgcttagtttttcggctattactgtccggcttggaggccaacttatccttgatcaggccacggccagcctaccacccggtagccatgtcggcttaatcggtcgtaacggggcagggaagtcaaccttaatgaaggtggttgccggtttattggaagccgacagcggcgaattatccatgccgcgtgggacacggatcggctatattgcacaggaagcgcccgaaggatcagccacgccttatgaaacagtattggcggctgatgaagaacgttcgcgcctgatggaggccagcgaaacggaaagcgatcttgaaaaactggccgaaattcatgaaagactgaacacgattgatgcttataccgcgccacaaggggcagcgcgtattctggctggtcttggttttgatgagactatgcagcatcaaccgctttcggctttttcaggtggttggcggatgcgggtcgccttgggcgcacttttattctcagcgcctgatctgttgctgttggatgaaccttccaaccatcttgatttggaagccgtgctttggcttgaaaactttctgcggggatatcgtgggacgttacttttaatcagtcacgaacgcgattttctgaacaaggttgccgaccatattttgcatttacagcaaggcaagctgactctttatccggggggatatgatgcttttgaaagacagcgggcagaaagactctcccaactcgaatcggcgcgtaatcggcaattagccgaaagggaaaaattacaaagttttgtcaatcgttggcggacaaaagcccattctgcccgtcaggcacaaagccggatgaaagcactggaaagaatggaaccgattgccgctgcggtcgaagatccatcactcagcttttcttttccaagtcccgatgacaatctgaaaccgcctttaatcacgctagatcaagctgcggtcggttatgatgacaagccgattttgaccaagctcaatctgcggatcgaccctgatgaccgaatcgctttcatcggtcggaacggtaacggtaagacaaccttggcaaagctgattgttggccaattgcctacagttgatggccagatggttacttcttccaagataaaggtaggctatttcacccaatatcaagtggaagaactggatgttgacgatagtccgctggaccatatgacgcggcttatgccgggcgcgtcaacaacagccgtgcggtcacaattagggcgttttggtttttcgggtgataaagcgacccaaaaagtgggcagcatgtctggtggtgaaagggcaagattggccttggcattgattacccgcgacgcacctcatctacttattttggacgaaccaacgaaccatcttgatgtggatgttcggcaagccttgatcgaggctttggctgattatcagggcgccgttatcatcgtttcccatgatcgccatatgttagaattaactgcagaccgcctcattttggtcgataatggtaaagccactgatttcgatggcgatttgaatgattataccaatttcattttaggcaaatctgataaacccacctcagaggctccggtaaaagcacaagataaaaaagccgacaagcgcgctagggcagaaaaaaggcaacaaaacaaagccttgcgcgatgaaatcaaaaaacttgaaggtgaaatcagcaagttaacttcttgcagaagcgagatagatcaggctttatttgatcccgatcaggcctctcccaaggacaaaaaactgaccgttacccagttaatgaagtcgcgcgctgatattgaagacgaactcaataaaaaagaagcgatctggctcgaaaaaagcgaaatgcttgaatag

SEQ ID NO: 82809 - protein, 621 aa, Zymomonas mobilis
MLSFSAITVRLGGQLILDQATASLPPGSHVGLIGRNGAGKSTLMKVVAGLLEADSGELSMPRGTRIGYIAQEAPEGSATPYETVLAADEERSRLMEASETESDLEKLAEIHERLNTIDAYTAPQGAARILAGLGFDETMQHQPLSAFSGGWRMRVALGALLFSAPDLLLLDEPSNHLDLEAVLWLENFLRGYRGTLLLISHERDFLNKVADHILHLQQGKLTLYPGGYDAFERQRAERLSQLESARNRQLAEREKLQSFVNRWRTKAHSARQAQSRMKALERMEPIAAAVEDPSLSFSFPSPDDNLKPPLITLDQAAVGYDDKPILTKLNLRIDPDDRIAFIGRNGNGKTTLAKLIVGQLPTVDGQMVTSSKIKVGYFTQYQVEELDVDDSPLDHMTRLMPGASTTAVRSQLGRFGFSGDKATQKVGSMSGGERARLALALITRDAPHLLILDEPTNHLDVDVRQALIEALADYQGAVIIVSHDRHMLELTADRLILVDNGKATDFDGDLNDYTNFILGKSDKPTSEAPVKAQDKKADKRARAEKRQQNKALRDEIKKLEGEISKLTSCRSEIDQALFDPDQASPKDKKLTVTQLMKSRADIEDELNKKEAIWLEKSEMLE

SEQ ID NO: 82810 - DNA, 2148 bp, Arabidopsis thaliana
  CDS (1)..(2148)
atgactgaagttgcgagctcagtggtgtatgaagtgctcggacgcagagctcaggatgtggacgagccgattatggactacatcattaatgtcctcgctgatgaggatttcgacttcggtgaggaaggtgaaggcgcctttgatgccgtcggtgagctcctcgtcgctgctgaatgcgtttccgatttcgaagagtgccgtttggtttgtagcaaactgtcggataagtttggaaagcatggattggtgaagcctacacctactgtgaggagtcttgctatgcctgtgcggatgaacgatgggatggatgatggacctgttaagaagaagaagccagagcctgtggatgggcctttgctcactgaacgtgacttggctaagattgaaaggagaaagaaaaaggatgatcgccaaagagagctacaatatcagcagcatgttgctgaaatggaagccgctaaagcagggatgcctactgttagtgtcaatcatgacactggtggtggctctgctatcagagatattcatatggataactttaatgtttctgttggaggccgtgatctcattgtcgatggatcaatcaccctctcttttggacgtcattacggtcttgtaggacgtaatggtaccggaaaaacaacttttttgaggtatatggctatgcatgctatagagggtattcctactaattgccagatattgcatgttgaacaagaagtcgttggtgacaagacaacagccttacagtgcgttcttaacactgatattgaaagaaccaaactgttggaagaagagattcaaatactagcaaagcagagagaaacggaagaacccacagctaaggatggaatgcctaccaaagacacagttgaaggagatcttatgtctcaaaggcttgaagaaatatacaaaaggcttgatgcaattgatgcttatactgctgaggctcgggcagctagtatccttgctggtctaagtttcactccagaaatgcagctgaaagctacaaatactttttcaggaggatggagaatgcgaattgcacttgctcgtgcactatttatagagcctgatttgttgttgcttgatgaacctacgaaccatcttgatctccatgctgtcttatggttagaaacatatctaacgaagtggccaaaaacatttatagtcgtttcccatgctagggaattcttgaacacggtggtcacggacatcatccatttgcaaaaccaaaaactaagtacctataaaggaaattatgatatcttcgaaagaacacgggaagaacaagtgaaaaatcagcaaaaagcttttgaatcaagtgaacgatcacggtcacatatgcaggcgttcattgataaatttcgttacaatgcaaagagggcgtctcttgttcagtcaagaatcaaggcattggaccgactggctcatgtggatcaagttattaatgatcctgactataaatttgaattcccaactcctgacgataagcctggacctcccatcatcagttttagtgatgcatcatttggctaccctggtggtccgttgttgtttaggaacctaaatttcggaatagatctggacagccgtattgcaatggtgggacccaatggtattggtaaatcaacaatactcaaacttatttctggcgatctgcaaccaagctctggaacagttttccgttctgctaaggttcgagttgcagtctttagtcagcaccatgtggatggactagacctttcatcgaatcctcttctatatatgatgagatgctacccaggagtaccagaacaaaagctgagaagtcacttgggttctcttggggtaactggaaatcttgcactgcagcccatgtacactttatcaggtggtcagaaaagcagagttgcatttgcgaagataacattcaagaaaccacacttgctattgcttgatgagccgtccaatcatcttgatttggatgccgtggaagctttgattcaaggacttgtcttattccaaggcggtatttgcatggtgagtcacgacgagcatctgatatcgggaagcgtggacgagttgtgggttgtgtcagacggcaggattgcaccattccatggaaccttccatgactacaagaagcttctccagtcttcaacttaa

SEQ ID NO: 82811 - protein, 715 aa, Arabidopsis thaliana
MTEVASSVVYEVLGRRAQDVDEPIMDYIINVLADEDFDFGEEGEGAFDAVGELLVAAECVSDFEECRLVCSKLSDKFGKHGLVKPTPTVRSLAMPVRMNDGMDDGPVKKKKPEPVDGPLLTERDLAKIERRKKKDDRQRELQYQQHVAEMEAAKAGMPTVSVNHDTGGGSAIRDIHMDNFNVSVGGRDLIVDGSITLSFGRHYGLVGRNGTGKTTFLRYMAMHAIEGIPTNCQILHVEQEVVGDKTTALQCVLNTDIERTKLLEEEIQILAKQRETEEPTAKDGMPTKDTVEGDLMSQRLEEIYKRLDAIDAYTAEARAASILAGLSFTPEMQLKATNTFSGGWRMRIALARALFIEPDLLLLDEPTNHLDLHAVLWLETYLTKWPKTFIVVSHAREFLNTVVTDIIHLQNQKLSTYKGNYDIFERTREEQVKNQQKAFESSERSRSHMQAFIDKFRYNAKRASLVQSRIKALDRLAHVDQVINDPDYKFEFPTPDDKPGPPIISFSDASFGYPGGPLLFRNLNFGIDLDSRIAMVGPNGIGKSTILKLISGDLQPSSGTVFRSAKVRVAVFSQHHVDGLDLSSNPLLYMMRCYPGVPEQKLRSHLGSLGVTGNLALQPMYTLSGGQKSRVAFAKITFKKPHLLLLDEPSNHLDLDAVEALIQGLVLFQGGICMVSHDEHLISGSVDELWVVSDGRIAPFHGTFHDYKKLLQSST

SEQ ID NO: 82812 - DNA, 1929 bp, Bacillus subtilis
  CDS (1)..(1929): transl_table=11
atgatgatcttacaagctaatcagctgtccaaatcatttggtgctgatactattttaaacaatataaagctggaagtcagaaatcgtgatcgcatcgccattgtaggaagaaatggcgccggaaaatccacgctccttaaaattatcgcaggccagctttcgtatgaaaagggcgaaattattaaaccgaaagatattacaatgggatatctcgcccagcatactggcttggattctaagcttaccataaaagaagagctgctgactgtttttgaccacttaaaagcaatggaaaaggaaatgcgggctatggaagaaaaaatggcggcagctgacccgggtgaattagaaagcatcatgaaaacctacgaccgtcttcagcaggaattcaaagataaaggcggttatcaatatgaagcggatgttagatctgtgctgcatggtctcggcttcagccattttgacgattctacacaggttcaaagcctcagcggaggccagaaaacaagactggctttaggtaagcttctattaacacagcctgatttgctcattcttgatgagccgacaaaccatctggatattgatacgcttacctggcttgagcattatttacaaggctattcaggcgccattctcatcgtttcgcatgaccgctactttttggacaaagtagtaaaccaggtatacgaggtatcaagagcagaaagcaaaaagtatcacggcaactacagcgcttatctcgaccaaaaagccgcgcagtatgaaaaagatctgaaaatgtatgaaaagcagcaggacgagattgcaaagctgcaggacttcgtagatcgaaatctggcgagagcctctaccaccaaaagggcgcaaagccgcagaaagcagcttgagcgaatggatgtcatgtcaaaaccgcttggcgatgaaaaatccgcaaactttcattttgatattacaaaacagagcggaaatgaagtccttcgtgttcaggatctcacaatcagctatgaaaaccagccgccgcttttaacagaagtgtcattcatgctcacaagaggagaaagcgctgcgcttgtcggccctaacggaataggtaaatcgacattgctgaaaacattaatagacaccctaaaaccagatcagggaacaatttcttacggctcaaatgtcagtgtcggctattatgaccaggaacaggctgagttgacttcctctaaacgtgtccttgatgagctgtgggacgagtaccccgggctcccagaaaaagaaatcagaacgtgtctcggaaatttcttattctccggagatgatgtgctgaaaccagttcattcactgagcggaggcgaaaaagcaagattggctctagctaagctgatgcttcaaaaagccaactttctcatccttgatgaaccgacgaaccatctggatttagacagcaaagaagttctcgaaaacgcgctgattgattatccaggcacactgttatttgtctcacatgacagatattttattaacagaatcgccacaagagtattggagctttcttcaagccatatagaggagtatctgggagattacgattattatacagagaaaaaaacagagcagcttgaattggagaaaatgaatcagcaagaggaaactgataaaacgccagctacagtgaagtctgactccaaacgttcctacgaggaagaaaaagaatggaaaaagaaagagcgccaacgactccgtcggattgaagaaattgaaaccaccgttcaaaccattgaggagaacatcagccgcaatgatgaattgctatgtgaccctgaagtctatcaggatcatgaaaaagtacaagctatccatgcagacaatgagaagcttaatcaggagctggaatctcttttgtccgaatgggaagaactatccacagaagaagattaa

SEQ ID NO: 82813 - protein, 642 aa, Bacillus subtilis
MMILQANQLSKSFGADTILNNIKLEVRNRDRIAIVGRNGAGKSTLLKIIAGQLSYEKGEIIKPKDITMGYLAQHTGLDSKLTIKEELLTVFDHLKAMEKEMRAMEEKMAAADPGELESIMKTYDRLQQEFKDKGGYQYEADVRSVLHGLGFSHFDDSTQVQSLSGGQKTRLALGKLLLTQPDLLILDEPTNHLDIDTLTWLEHYLQGYSGAILIVSHDRYFLDKVVNQVYEVSRAESKKYHGNYSAYLDQKAAQYEKDLKMYEKQQDEIAKLQDFVDRNLARASTTKRAQSRRKQLERMDVMSKPLGDEKSANFHFDITKQSGNEVLRVQDLTISYENQPPLLTEVSFMLTRGESAALVGPNGIGKSTLLKTLIDTLKPDQGTISYGSNVSVGYYDQEQAELTSSKRVLDELWDEYPGLPEKEIRTCLGNFLFSGDDVLKPVHSLSGGEKARLALAKLMLQKANFLILDEPTNHLDLDSKEVLENALIDYPGTLLFVSHDRYFINRIATRVLELSSSHIEEYLGDYDYYTEKKTEQLELEKMNQQEETDKTPATVKSDSKRSYEEEKEWKKKERQRLRRIEEIETTVQTIEENISRNDELLCDPEVYQDHEKVQAIHADNEKLNQELESLLSEWEELSTEED

SEQ ID NO: 82814 - DNA, 2169 bp, Oryza sativa
  CDS (1)..(2169)
atggcggcggcgacgttggcggcggcgagcatgggggtggtgacggaggtgctggggagcgacgtcgtcgacgaggtcgaccagcccatcatcgactacatcgccaacgtcctcgccgacgaggacttcgacttcggcgcccccgacggccacggcatcttcgacgcgctcggcgacctcctcatcgacgctcggtgcgtcgccgacgaggagcactgcctcgaggtctgcagtaagatttgtgaaaaatttggaaagcatggcctggtaaaacctaaacaagctatgcgaagccttgtcactcctttacgtatgaacgagggaatggacgataaggttgcccccaaaaagcaagctgatgtatttgatggacccttgctttcatcacgtgacaaagccaagattgaacggaagaagagaaaggatgagagacaaagagaggctcaataccaaacgcatgttgctgaaatggaggcacttagggctggaatgcctccagtatttgtaaatcacaataactctggtgggccagctgttagggatatccatatggagaacttcagtgttactgttggtggtcgtgatctcattcaagattgcactgtaacacttgcttttgggaggcactatggtcttgttggaagaaatggtacagggaaaacctcttttctcagagctatggcgatgcatgcgattgatgggattcccaagaactgccagatattgcatgttgagcaagaggttgtgggcgatgacacaacagctttgcagtgtgttctgaatgctgatattgaacgggttcaacttttgcaagaagaagctcatctggttcaacggcagaaagatctagagtatgaggctgagtttgagcagagcgcgtccaaaagcaaggatggtcttgacaaagatgctatcagcaagaggcttgaggagatatacaaacgccttgagtttattgatgctgatgctgcagaggctcgtgcagcatcaattctggcgggtcttagtttcactcctgaaatgcaacgtaaacgcacaaaacagttttctggtggatggcgcatgagaattgctctagcacgtgctctcttcattgagcctgatttgttgctacttgatgagccaacaaatcatcttgatctccatgctgtgttatggttagaaacatatctcctgaaatggccaaagacattcattgttgtatcacatgctagggagtttcttaatacggtcgtcaccgacattcttcatctgcatggacaaaagctacatgcttacaaaggtgattatgacacattcgagaggacaagggaggagcaccttaagaaccagcagaaagcttttgaaacaaatgagaaggccagatcccacatgcaggcattcattgacaagttccgttacaatgcaaagagagcatcacttgttcaatcaagaatcaaggcattggagcgaatggagcatgttgatgcggtcgtcagtgatccagactataaattcgaatttccaacaccagatgaccgccctggaccaccaatcatcagcttcagtgacgcatcttttggttatcctggaggccccaccttatttaaaaacttgaattttggtattgacctggacagccgcatagcaatggttggtccaaatggtattggcaaatccactatacttaaactaatatctggagatcttcagccaacttcagggacagtgttccgctctcccaaggttcgcatggctgtattcaatcaacaccatgttgatgggcttgatttaacagtgaacccccttttgtacatgatgagatgctaccctggtgtacctgaacagaaactgagggcacacttgggttctttcggtgttacaggaaatcttgccctccaaccaatgtacactttatcaggtggtcagaaaagtagggttgcctttgcaaagatcaccttcaagaagccacacattattcttctcgatgagccttctaaccatcttgatctggatgctgtggaggcgctgatccagggtttactcgttttccagggaggagtgctaatggtgagtcacgacgagcacctgataacggggagcgtggatgagctttgggtggtgtcggaaggcagggtgtcgcctttcgcaggcacgttcaaggactacaagaagatgctcaagtcttaa

SEQ ID NO: 82815 - protein, 722 aa, Oryza sativa
MAAATLAAASMGVVTEVLGSDVVDEVDQPIIDYIANVLADEDFDFGAPDGHGIFDALGDLLIDARCVADEEHCLEVCSKICEKFGKHGLVKPKQAMRSLVTPLRMNEGMDDKVAPKKQADVFDGPLLSSRDKAKIERKKRKDERQREAQYQTHVAEMEALRAGMPPVFVNHNNSGGPAVRDIHMENFSVTVGGRDLIQDCTVTLAFGRHYGLVGRNGTGKTSFLRAMAMHAIDGIPKNCQILHVEQEVVGDDTTALQCVLNADIERVQLLQEEAHLVQRQKDLEYEAEFEQSASKSKDGLDKDAISKRLEEIYKRLEFIDADAAEARAASILAGLSFTPEMQRKRTKQFSGGWRMRIALARALFIEPDLLLLDEPTNHLDLHAVLWLETYLLKWPKTFIVVSHAREFLNTVVTDILHLHGQKLHAYKGDYDTFERTREEHLKNQQKAFETNEKARSHMQAFIDKFRYNAKRASLVQSRIKALERMEHVDAVVSDPDYKFEFPTPDDRPGPPIISFSDASFGYPGGPTLFKNLNFGIDLDSRIAMVGPNGIGKSTILKLISGDLQPTSGTVFRSPKVRMAVFNQHHVDGLDLTVNPLLYMMRCYPGVPEQKLRAHLGSFGVTGNLALQPMYTLSGGQKSRVAFAKITFKKPHIILLDEPSNHLDLDAVEALIQGLLVFQGGVLMVSHDEHLITGSVDELWVVSEGRVSPFAGTFKDYKKMLKS

SEQ ID NO: 82816 - DNA, 1785 bp, Brassica napus
  CDS (1)..(1785)
atggtgtccgacgctagcaagaagaaggctctccagaagaaagccgccgccgccgccaaaagaggcggtaaagcagccgccgctaaagccgccgcctcttcttcaaacggagctgatagcttgtcgagcggcgtcgacgctcttcagatatccgaccggacctgtaccggaatcctctgctctcatcctcagtccagagacattcgtattgaatctctgtctgttacgtttcatggttacgacctgattgttgattcgatgctggagcttaactacgggagacgctacggtctcctcgggctgaatggttgtgggaagtctactctcttaactgcgattggactcagagagctcccgattcctgatcacatggacatctaccatctctcccacgagattgaagccactgacatgacttctctcgaggctgtgatgagctgtgacgaggagaggttgaagctggagaaggagattgagactcttgttgaacaggatgatggaggcggagagaggcttgacacaatctacgagaggttagaagccatggatgcttctacagcggagaagcgtgctgctgagattctgtttggtcttggtttcgataaggagatgcaggctaagaagactaaggatttttctggtgggtggaggatgagaattgcgttggcgagagctctcttcattatgccgactatccttttgcttgatgagcccactaatcatttagatttggaagcttgtgtctggttagaagagagcctgaagaactttgaccgtatccttgtggtggtatcccattcacaggattttttgaacggagtctgcaccaacatcatccacatgcaaagcaagcagctaaagtactacaccggtaacttcgaccagtactgccagacacgttccgagctagaagagaatcagatgaaacagtacagatgggagcaggagcagatctcccacatgaaggagtacatcgcccggttcggtcacggttcagcgaaactcgcccgccaagcgcagagcaaggagaagactttggccaagatggagagaggtgggctcacggagaaggtggcgagagacagtgtcctcgttttccgattcgccgacgtcggaaagcttccaccgccggtgcttcagtttgtggaagtctcgtttgggtacactccggactaccttatatacaagaacatcgactttggtgttgacttggactcgagggtggcacttgttggacccaatggagctgggaagagtactctcttgaagctcatgactggcgagctgcaaccaactgaaggaatggtgaggcgtcacaaccacttgaagattgctcagtaccatcagcatctagctgagaagctggaccttgaagtgcctgcgcttatctacatgatgaacgagtttccgggtaacgaagaggagaagatgagagctgctattggtaggttcggtctgaccggtaaggcgcaagtgatgccgatgaagaatctatctgatggacagaggagccgtgtgatattcgcgtggctggcttacaagcagcctaacatgcttctactggatgagccgactaaccatctggacattgagacaatcgactctcttgccgaggcgttgaacgagtgggatggtggtctggttctggtgagtcacgacttcaggttgattaaccaagtggctcatgagatatgggtgtgtgagaagcagtgcatcactaaatggaatggtgatattatggacttcaagaagcatctcaaggctaaagctgggcttgaagactga

SEQ ID NO: 82817 - protein, 594 aa, Brassica napus
MVSDASKKKALQKKAAAAAKRGGKAAAAKAAASSSNGADSLSSGVDALQISDRTCTGILCSHPQSRDIRIESLSVTFHGYDLIVDSMLELNYGRRYGLLGLNGCGKSTLLTAIGLRELPIPDHMDIYHLSHEIEATDMTSLEAVMSCDEERLKLEKEIETLVEQDDGGGERLDTIYERLEAMDASTAEKRAAEILFGLGFDKEMQAKKTKDFSGGWRMRIALARALFIMPTILLLDEPTNHLDLEACVWLEESLKNFDRILVVVSHSQDFLNGVCTNIIHMQSKQLKYYTGNFDQYCQTRSELEENQMKQYRWEQEQISHMKEYIARFGHGSAKLARQAQSKEKTLAKMERGGLTEKVARDSVLVFRFADVGKLPPPVLQFVEVSFGYTPDYLIYKNIDFGVDLDSRVALVGPNGAGKSTLLKLMTGELQPTEGMVRRHNHLKIAQYHQHLAEKLDLEVPALIYMMNEFPGNEEEKMRAAIGRFGLTGKAQVMPMKNLSDGQRSRVIFAWLAYKQPNMLLLDEPTNHLDIETIDSLAEALNEWDGGLVLVSHDFRLINQVAHEIWVCEKQCITKWNGDIMDFKKHLKAKAGLED

SEQ ID NO: 82818 - DNA, 2070 bp, Brassica napus
  CDS (1)..(2070)
atgggtttatccacaaacctccacaccatcaacctccgctccactttcttcaccggcggcctccgcccatctccagtcgcatcaaacttcatcaaagtctcctcctttccaatccctagacgccacaccgccacaatcagatcatcccaactctccacaatcacccccgaaaaagaccaaaaaaaagacatcgaatcactcttctccaccccaacgacccaacaacactccgaccgcaaacgaaagaactcctcctcctcctcctccggcgtctcctccggcgtcaagctcgagaacataagcaaaacctacaaaggcctaaccgtcctcaaagacgtctcctgggaggtgaagcgcggcgagaaagtaggcttagtcggcgtcaacggcgcgggcaaaacgacgcagcttcgaatcataacgggccaagaagagcccgactcgggacacgtgataaaggcccggcccaatatgaaagtggcctttttgagccaggagttcgaggtgtcgatgagcaggacggttaaggaggagttcatgagcgccttcaaggaggagatggaggttgctgataagctcgagagagttcagaaggctattgaagggtctgttgatgatttggagctcatggggaggttgcttgatgagtttgatttgctgcagaggagggctcaggctgtgagtttggatagtgttgatgcgaagattagtaagctgatgccggagctggggtttgcggcggaggatgctgataggcttgtggcttcgtttagtggtgggtggcagatgaggatgtcgcttgggaagatcttgcttcaggatcctgatttgctgctactcgatgaacctacaaaccatttggatctcgacaccatcgaatggctcgaaggctatttgcaaaagcaagaggttcccatggtcatcatctcacacgacagagccttcctcgaccagctctgcaccaaaatcgtcgaaaccgagatgggtgtctccaggacattcgaaggcaactactcgcagtacgtcatctccaaagcagagtggatcgaaactcagaacgcagcttgggagaagcagcagaaagagatcgaatcaactaaggacttaatcgctaggctcggtgctggtgcaaactctggccgtgcttccactgcagaaaagaaactagagaagctgcaagagcaggagcttatagagaagcctttccagaggaagcagatgaagatcaggtttccggagcgtgggactagtgggagatctgtagtcacggttaagaacgttgattttggttttgaggataagatgctgttcaagaaggcgaatctagcgatagagagaggagagaagattgctatcattggccccaacgggtgtggcaaaagcacgttgctgaagcttataatgggtttagagaagccaaccaaaggtgaagttatcctcggagagcacaatgtactaccaaactactttgaacagaaccaggctgaggttcttgatttggataaaacagttcttgaaacggtttgtgaagctgcggaagactggagaagtgatgatgtaaaaggtcttctaggacggtgcaacttcaaagcagacatgcttgatcggaaagtctctcttttgagcggtggcgagaaagcgcgtcttgctttctgcaaattcatggtgacgccttcgaatgtgcttgttttggatgaaccgaccaatcacttggacattccttctaaggagatgctcgaggaagcgataaacgagtaccaaggcacagtgattgcagtctcacacgaccggtacttcatcaaacagattgttaacagagtgatagaagttgaagatggttgtttggaagattacgcaggagactacaattattacttggagaagaacctggaagctagagcaaaggcggtggagagagaagcggagctagaagagaaagcaccgaaagtgaaggcgaagtcaaagatgtcaaaagcagagaaagaagcgaggaagaagcagaagatgcaggcgtttcaacaggcgaaacagaagtcaaaggccagcaagaactccaagagatggaactga

SEQ ID NO: 82819 - protein, 689 aa, Brassica napus
MGLSTNLHTINLRSTFFTGGLRPSPVASNFIKVSSFPIPRRHTATIRSSQLSTITPEKDQKKDIESLFSTPTTQQHSDRKRKNSSSSSSGVSSGVKLENISKTYKGLTVLKDVSWEVKRGEKVGLVGVNGAGKTTQLRIITGQEEPDSGHVIKARPNMKVAFLSQEFEVSMSRTVKEEFMSAFKEEMEVADKLERVQKAIEGSVDDLELMGRLLDEFDLLQRRAQAVSLDSVDAKISKLMPELGFAAEDADRLVASFSGGWQMRMSLGKILLQDPDLLLLDEPTNHLDLDTIEWLEGYLQKQEVPMVIISHDRAFLDQLCTKIVETEMGVSRTFEGNYSQYVISKAEWIETQNAAWEKQQKEIESTKDLIARLGAGANSGRASTAEKKLEKLQEQELIEKPFQRKQMKIRFPERGTSGRSVVTVKNVDFGFEDKMLFKKANLAIERGEKIAIIGPNGCGKSTLLKLIMGLEKPTKGEVILGEHNVLPNYFEQNQAEVLDLDKTVLETVCEAAEDWRSDDVKGLLGRCNFKADMLDRKVSLLSGGEKARLAFCKFMVTPSNVLVLDEPTNHLDIPSKEMLEEAINEYQGTVIAVSHDRYFIKQIVNRVIEVEDGCLEDYAGDYNYYLEKNLEARAKAVEREAELEEKAPKVKAKSKMSKAEKEARKKQKMQAFQQAKQKSKASKNSKRWN

SEQ ID NO: 82820 - DNA, 2139 bp, Glycine max
  CDS (1)..(2139)
atgacagaggtggcgagatcagtggtgcacgacgttttggggcaaagggtggtcgacgtggaccagccaatcgtcgattacatcgtaaacgtcctcgccgacgatgacttcgatttcggcctcgacggccaaggcgccttcgaagccctcggcgagctcctcgtcgccgccggctgcgtcgacgatttctcccactgccgctccgtgtgcagcacgctgtgcgacaagttcgggaagcacggtttggtgaaggagaagcccgctgttcgaagccttgcggcgccgtttcgaatgaacgaggggatggacgacgtgcaagctcccaagaagaagcccgagcccgtcgacggccctcttctctcggaacgcgaccggttaaagctggagaggcgaaaacgcaaggatgaacgccagcgagaggcacaataccaaatgcacttggcggagatggaggcggcacgagcggggatgccggtggtgtgtgtgagacatgataacagcgggggaccaaacgtgaaggacattcatatggagaatttcaacatctctgttggtgggcgtgatctcattgtggatggttgtgtcacgctttcatttggaaggcattatggtttggtgggaagaaatgggacggggaaaaccactttccttaggcacatggctatgcatgccattgatggtgttccaaggaattgtcagatactgcatgtggagcaagaggtgacaggtgatgctacgactgctttgcagtgtgtcctcaacgctgacattgagaggactcagcttctagatgaagaaactcagttagttgcccaacagagggaattcgaggacaaaaacgaaaaaggtgattcgaatggagtggtcggtagggatgacatttcaaaaaggcttgaggaaatatataagaggcttgaacacattgatgctgattcggccgaggcacgagcagcatcaatactagcaggtttgagtttcactcctgagatgcagaagaaggcaacaaaaacattttctggaggatggcggatgcgaatagctcttgctcgtgcattgtttatagagcctgatatattgcttcttgatgagcctacgaatcatcttgatcttcatgctgttagagaatttttaaacacggtggttactgatataattcacttacaaaaccaaaagctgactacttataaagggaattatgatgcttttgagaagactcgagaagaacaagttaaaaaccacttatggcttgaatcgtacttggttaaatggccaaaaacatttatcgttgtttctcatgcgcaaaaagcattagaggcaaacgaacgtgctagatctcatatgcagaccttcattgacaagttccgttataatgcgaagagggcatcacttgttcaatctagaatcaaggctttggatcgaatgggccatgtggatgaaattgttaatgatcctgactacaaatttgacttccccactccagatgatagacctggtgcaccaataataagtttcagtgatgcatcatttggttatcctgggggccccattctgtttaagaatttgaactttgggattgatctcgacagtcgtattgcaatggttggaccaaatggtattggcaaatcaactatacttaagttaattgctggggatcttcagcccagttctgggactgtcttccgatctgctaaggttcgtatagcagtgttcagtcagcaccatgttgatggactcgacttatcctcaaatcctcttctgtatatgatgcgctgctatcctggagttccagaacagaagcttcgagctcacttaggttcttttggtgtaaccggaaatcttgcgctgcagccaatgtatactttgtcaggtggtcagaaaagcagggttgcctttgcaaagataacttttaagaagccacacataatattgcttgatgagccatccaatcatctggatttggatgctgttgaggcgcttattcaaggtcttgtgctgttccaaggaggcattctcatggtgagtcacgatgagcacctcatctctggaagcgtggaggaactatgggttgtatccgaaggaagagtggcaccattccatggcacattccaagattataagaagatactccaatcatcctag

SEQ ID NO: 82821 - protein, 712 aa, Glycine max
MTEVARSVVHDVLGQRVVDVDQPIVDYIVNVLADDDFDFGLDGQGAFEALGELLVAAGCVDDFSHCRSVCSTLCDKFGKHGLVKEKPAVRSLAAPFRMNEGMDDVQAPKKKPEPVDGPLLSERDRLKLERRKRKDERQREAQYQMHLAEMEAARAGMPVVCVRHDNSGGPNVKDIHMENFNISVGGRDLIVDGCVTLSFGRHYGLVGRNGTGKTTFLRHMAMHAIDGVPRNCQILHVEQEVTGDATTALQCVLNADIERTQLLDEETQLVAQQREFEDKNEKGDSNGVVGRDDISKRLEEIYKRLEHIDADSAEARAASILAGLSFTPEMQKKATKTFSGGWRMRIALARALFIEPDILLLDEPTNHLDLHAVREFLNTVVTDIIHLQNQKLTTYKGNYDAFEKTREEQVKNHLWLESYLVKWPKTFIVVSHAQKALEANERARSHMQTFIDKFRYNAKRASLVQSRIKALDRMGHVDEIVNDPDYKFDFPTPDDRPGAPIISFSDASFGYPGGPILFKNLNFGIDLDSRIAMVGPNGIGKSTILKLIAGDLQPSSGTVFRSAKVRIAVFSQHHVDGLDLSSNPLLYMMRCYPGVPEQKLRAHLGSFGVTGNLALQPMYTLSGGQKSRVAFAKITFKKPHIILLDEPSNHLDLDAVEALIQGLVLFQGGILMVSHDEHLISGSVEELWVVSEGRVAPFHGTFQDYKKILQSS

SEQ ID NO: 82822 - DNA, 1788 bp, Glycine max
  CDS (1)..(1788)
atggtgtctgacgcgagcaagaagaaggctgcgcagaagaaggcggcggcagcggccaagagaggaggcaaagcagcagctgcttcgtcgaaaacgacgtcgtcggagaaggccgccgacaagcttgccaacggaattggggaaattcagatatccgatcgaacctgcaccggtgtcctctgctcgcatcctctttccagggatattaggatagaatctctgtcagttacttttcatggacatgatttgatagttgattccgaattggagctaaattatggaagacgttatggcttgcttggattaaatggttgtgggaagtctaccctgcttacggctataggttgtcgagagctacctattccagaccacatggatatttatcaccttaccagggaaattgaagcctctgacatgtctgcattggaggctgtcataagctgtgatgaggaaaggttgagattggagaaagaagctgaagctttggcagcgcaggatgatggaggtggggaagctcttgaacgtatttatgaacgattggaagccattgatgcatcaactgcagaaaagcgtgccgctgaaaatttatttggtcttggtttcaacaagcagatgcaagcaaagaagacacgcgatttctctggtggttggagaatgaggattgctttagcacgtgctctatttatgaaccctaccatccttttacttgatgaaccaaccaatcaccttgacttggaagcttgtgtgtggctggaagagaatctgaagaagtttgaccgtattctggttgtggtttcacactcccaggatttccttaatggtgtctgcacaaatatcattcacatgccaaacaagaagctgaagctctacactggtaattatgatcaatatgttcagacacgtgctgaactggaagagaaccagatgaagcagtacaaatgggagcaggagcaaattgcctcgatgaaggaatacattgcccgatttggtcatggatcagcaaaactagcccgccaagctcagagtaaagagaaaactcttgcaaaaatggagcggggtggacttgcagagaaggtggtaagagacaaagttttggtattccgctttgttgatgtgggaaaacttcccccgcctgtcctccagtttgttgaggtgacatttgggtacactcctgataatctgatctacaagaaccttgactttggggttgatttagactctaggattgctctggttggacccaatggagctgggaagagtacgttactgaagctaatgactggtgatttggaacctctagatggcatggttcgacgccacaatcaccttcggattgcacaatatcaccagcacttggctgagaagctagacttggaaatgtctgccctccagtatatgataaaagaataccctggaaacgaggaggagaggatgagagcagccattgggaaatttggactgtctggcaaagcgcaggtcatgcctatgaagaatttatccgatgggcagaggagccgtgtgatattcgcatggttagcttatagacagcctcacctgctacttttggatgagccaacgaaccatttggatatagaaacaattgactcattggctgaggcattgaatgaatgggatggtggcatggtgcttgttagccatgattttaggctcataaatcaggttgcccatgagatatgggtgtgtgctgatcaagctgtgaccagatgggaaggtgacattatggatttcaaggagcacctaaggtcaaaggcgggtttatctgactga

SEQ ID NO: 82823 - protein, 595 aa, Glycine max
MVSDASKKKAAQKKAAAAAKRGGKAAAASSKTTSSEKAADKLANGIGEIQISDRTCTGVLCSHPLSRDIRIESLSVTFHGHDLIVDSELELNYGRRYGLLGLNGCGKSTLLTAIGCRELPIPDHMDIYHLTREIEASDMSALEAVISCDEERLRLEKEAEALAAQDDGGGEALERIYERLEAIDASTAEKRAAENLFGLGFNKQMQAKKTRDFSGGWRMRIALARALFMNPTILLLDEPTNHLDLEACVWLEENLKKFDRILVVVSHSQDFLNGVCTNIIHMPNKKLKLYTGNYDQYVQTRAELEENQMKQYKWEQEQIASMKEYIARFGHGSAKLARQAQSKEKTLAKMERGGLAEKVVRDKVLVFRFVDVGKLPPPVLQFVEVTFGYTPDNLIYKNLDFGVDLDSRIALVGPNGAGKSTLLKLMTGDLEPLDGMVRRHNHLRIAQYHQHLAEKLDLEMSALQYMIKEYPGNEEERMRAAIGKFGLSGKAQVMPMKNLSDGQRSRVIFAWLAYRQPHLLLLDEPTNHLDIETIDSLAEALNEWDGGMVLVSHDFRLINQVAHEIWVCADQAVTRWEGDIMDFKEHLRSKAGLSD

SEQ ID NO: 82824 - DNA, 1788 bp, Glycine max
  CDS (1)..(1788)
atggtgtccgacgccagcaagaagaaggccgcacagaagaaggccgccgccgccgccaagagaggtggcaaagctgccgccgctgccgttatggccgccacctcttccaaagccgccgacaaggtcgccaacggaatcgccgatattcagatttcggatcggacctgcaccggcgtcctctgttcgcatcctctctccagagatattcgaatagagtctctatccgtcacattccatggacatgatctcattgttgattctgaattggagctgaattatggaaggcgttatggcttactcggattaaatggttgtggaaaatctacactgcttacagccattggttgtcgggaacttccaattcccgatcacatggatatatatcacctaaccagggagattgatgcctctgacatgtctgcattggaagctgtcataagctgtgacgaagaaaggttgaaattggagaaagaagctgaagttttggctgcacaggatgacggaggtggtgaatcccttgaacgcatttatgaacgattggatgccctagatgctgccactgcagaaaagcgtgctgctgaaatcttgcatggtcttggctttgacaagcaaatgcaggcaaagaagacgcgtgatttttccggtggctggagaatgaggattgcgttagcacgggctttatttatgaatccaaccattcttctacttgatgaaccaaccaatcaccttgatttggaagcttgtgtgtggctggaggagagtttgaagaagtttgaacgtattctggttgtgatttcacactctcaggactttcttaatggtgtctgcacaaatattatccacatgcaaagcaaaaaactgaagctctacactggtaattatgatcaatatgttcagacacgttctgagctagaagagaaccagatgaaacagtacaagtgggagcaggagcagattgcctcaatgaaggaatacattgcccgatttggccatggttcggctaaactagctcgccaggcacagagtaaggagaaaacactggcaaaaatggaacgtggtggacttgcagagaaggtggtcagagacaaagttttggtatttcgttttactgatgttgggaaacttccccctccagttctccagtttgttgaggtgtcatttggttatactcctgataatctcatctacaagaacattgactttggggttgatttagactctagggttgcactggttggacccaatggtgctgggaagagtacactactgaagctaatgacaggtgacttgatgcctagtgacggcatggtaaggcgtcataatcatcttcgaattgcacaatatcaccagcatttggcagaaaagctagacatggaaatgtctgctctacagtttatgattaaagaataccccggtaatgaggaagagaagatgaggggggcaattgggaagtttgggctgtcaggaaaagcacaggtgatgccaatgaagaacttgtcagatggacagaggagccgagtgatatttgcttggttagcttggagacagcctcagatgcttcttttggatgagccaactaatcatttggatattgagacaattgactcgttggccgaggcattgaatgaatgggatggtggcttggtgcttgtaagccatgattttaggctcataaatcaagtggctcatgagatatgggtatgtgctaatcaatctgtgaccagatgggagggtgacatcatggaattcaaggcgcatctaaagtcaaaggcgggtttatctgactga

SEQ ID NO: 82825 - protein, 595 aa, Glycine max
MVSDASKKKAAQKKAAAAAKRGGKAAAAAVMAATSSKAADKVANGIADIQISDRTCTGVLCSHPLSRDIRIESLSVTFHGHDLIVDSELELNYGRRYGLLGLNGCGKSTLLTAIGCRELPIPDHMDIYHLTREIDASDMSALEAVISCDEERLKLEKEAEVLAAQDDGGGESLERIYERLDALDAATAEKRAAEILHGLGFDKQMQAKKTRDFSGGWRMRIALARALFMNPTILLLDEPTNHLDLEACVWLEESLKKFERILVVISHSQDFLNGVCTNIIHMQSKKLKLYTGNYDQYVQTRSELEENQMKQYKWEQEQIASMKEYIARFGHGSAKLARQAQSKEKTLAKMERGGLAEKVVRDKVLVFRFTDVGKLPPPVLQFVEVSFGYTPDNLIYKNIDFGVDLDSRVALVGPNGAGKSTLLKLMTGDLMPSDGMVRRHNHLRIAQYHQHLAEKLDMEMSALQFMIKEYPGNEEEKMRGAIGKFGLSGKAQVMPMKNLSDGQRSRVIFAWLAWRQPQMLLLDEPTNHLDIETIDSLAEALNEWDGGLVLVSHDFRLINQVAHEIWVCANQSVTRWEGDIMEFKAHLKSKAGLSD

SEQ ID NO: 82826 - DNA, 1788 bp, Glycine max
  CDS (1)..(1788)
atggtgtctgacgcgagcaagaagaaggctgcgcagaagaaggcggcggcagcggccaagagaggaggcaaagcagcagctgcttcgtcgaaaacgacgtcgtcggagaaggccgccgacaagcttgccaacggaattggggaaattcagatatccgatcgaacctgcaccggtgtcctctgctcgcatcctctttccagggatattaggatagaatctctgtcagttacttttcatggacatgatttgatagttgattccgaattggagctaaattatggaagacgttatggcttgcttggattaaatggttgtgggaagtctaccctgcttacggctataggttgtcgagagctacctattccagaccacatggatatttatcaccttaccagggaaattgaagcctctgacatgtctgcattggaggctgtcataagctgtgatgaggaaaggttgagtttggagaaagaagctgaagctttggcagcgcaggatgatgggggtggggaagctcttgaacgtatttatgaacgattggaagccattgatgcatcaactgcagaaaagcgtgccgctgaaaatttatttggtcttggtttcaacaagcagatgcaagcaaagaagacacgtgatttttctggtggctggagaatgaggattgctttagcacgtgctctatttatgaaccctaccattcttttacttgatgaaccaaccaatcaccttgacttggaagcttgtgtgtggctggaagagaatctgaagaagtttgaccgtattctggttgtggtttcacactcccaggatttccttaatggtgtctgcacaaatatcattcacatgccaaacaagaagctgaagctctacactggtaattatgatcaatatgttcagacacgtgctgaactggaagagaaccagatgaagcagtacaaatgggagcaggagcaaattgcctcgatgaaggaatacattgcccgatttggtcatggatcagcaaaactagcccgccaagctcagagtaaagagaaaactcttgcaaaaatggagcggggtggacttgcagagaaggtggtaagagacaaagttttggtattccgctttgttgatgtgggaaaacttcccccgcctgtcctccagtttgttgaggtgacatttgggtacactcctgataatctgatctacaagaaccttgactttggggttgatttagactctaggattgctctggttggacccaatggagctgggaagagtacgttactgaagctaatgactggtgatttggaacctctagatggcatggttcgacgccacaatcaccttcggattgcacaatatcaccagcacttggctgagaagctagacttggaaatgtctgccctccagtatatgataaaagaataccctggaaacgaggaggagaggatgagagcagccattgggaaatttggactgtctggcaaagcgcaggtcatgcctatgaagaatttatccgatgggcagaggagccgtgtgatattcgcatggttagcttatagacagcctcacctgctacttttggatgagccaacgaaccatttggatatagaaacaattgactcattggctgaggcattgaatgaatgggatggtggcatggtgcttgttagccatgattttaggctcataaatcaggttgcccatgagatatgggtgtgtgctgatcaagctgtgaccagatgggaaggtgacattatggatttcaaggagcacctaaggtcaaaggcgggtttatctgactga

SEQ ID NO: 82827 - protein, 595 aa, Glycine max
MVSDASKKKAAQKKAAAAAKRGGKAAAASSKTTSSEKAADKLANGIGEIQISDRTCTGVLCSHPLSRDIRIESLSVTFHGHDLIVDSELELNYGRRYGLLGLNGCGKSTLLTAIGCRELPIPDHMDIYHLTREIEASDMSALEAVISCDEERLSLEKEAEALAAQDDGGGEALERIYERLEAIDASTAEKRAAENLFGLGFNKQMQAKKTRDFSGGWRMRIALARALFMNPTILLLDEPTNHLDLEACVWLEENLKKFDRILVVVSHSQDFLNGVCTNIIHMPNKKLKLYTGNYDQYVQTRAELEENQMKQYKWEQEQIASMKEYIARFGHGSAKLARQAQSKEKTLAKMERGGLAEKVVRDKVLVFRFVDVGKLPPPVLQFVEVTFGYTPDNLIYKNLDFGVDLDSRIALVGPNGAGKSTLLKLMTGDLEPLDGMVRRHNHLRIAQYHQHLAEKLDLEMSALQYMIKEYPGNEEERMRAAIGKFGLSGKAQVMPMKNLSDGQRSRVIFAWLAYRQPHLLLLDEPTNHLDIETIDSLAEALNEWDGGMVLVSHDFRLINQVAHEIWVCADQAVTRWEGDIMDFKEHLRSKAGLSD

SEQ ID NO: 82828 - DNA, 2166 bp, Glycine max
  CDS (1)..(2166)
atgggaaggaaaaagacagaggatgctggcccatctgcgaaggtaaaggctggtagcaaagatcctcctaagaaggaaaaaatttctgtgtctgccatgctggccagtatggatgaaaagcctgataaacctaaaaaggtcccttcttcctccagtaagccgaagccgaaatctgctccaaaagcttccacatacaccgatggaattgatcttcctccatccgacgatgaagatgatgatgatctcttggaagagggggaagccaaaaggtccagtcagcagcagcaaagggttgatttgaagccacttgatgtgcctattgctgataaagagttgaaaaagcgcgaaaagaaggatcttttagccgcacatgctgctgagcaggcaaagaaggaggctcttagggatgaccacgatgctttcactgtggtcattggaagccgggcttcggtgcttgatggaggagatgatgctgatgctaatgtcaaagatataacagtagaaaatttctccgtgtctgcacggggtaaagaacttctgaaaaatgcaacagtgaagatatctcacgggaagaggtatggtttggttgggcccaatggaaaaggaaagtccacgctgttgaaacttcttgcttggaggaagataccggtacctaagaatatcgatgtccttctggttgagcaggaggtagttggtgatgataaaacagctcttgaagctgttgtttctgctaatgacgaacttgttaaaattcgacaagaagttgcctctctgcagaatgcagcttctgttgaagacaaagataatgatgaggaagacgatacaggagagaagctagcagagctatatgaaaaactacagctgatgggatctgatgctgctgaagctcaagcatcaaagatattagctggtttaggttttacaaaggatatgcaagcccgtcctacaaaatcctttagtggtggctggaggatgagaatttctttagctcgagcactttttgtgcaaccaactctattattgcttgatgaacccacaaatcatcttgacctgagggctgttctctggttggaagagtatttgtgccgttggaagaaaactctggtggttgtctcacatgatagggattttctcaatacagtgtgtactgagattattcatctccatgatttgaaacttcatttctatcgtggaaattttgatgattttgagagcgggtacgaacagcgtcgtaaagagatgaataagaagtatgatatttatgccaagcaattgcaagctgctaaaagaagtggaaaccaggctcagcaaaaaaaggttaaggatcaagctaagtttgcagcagctaaggaaaaaagcaagggaaagggcaagggcaaggttgacgaggatgaggccccaccagaggcacctcagaagtggagggattacagcgtggaatttcactttccggaacctactgagctcacacccccacttctgcagcttattgaagtcagctttagctacccaaaccgggaggatttcaggctctcaaatgttgatgttggaattgatatggggactcgtgttgcgattgttgggcctaatggagctggaaaatctacattgctgaatcttctagctggtgatttggttccttctgagggtgaagttcgaaggagtcagaagttgaggataggaagatattcccaacactttgtggaccttctaacaatggatgaaacagctgtgcagtatcttctgcgtctccatccagatcaggagggacttagcaagcaggaggctgtccgtgcaaaacttggtaagtttgggctaccaagtcataaccatcttactcctattgccaaactatcaggagggcagaaagctcgggtggtcttcacatctatctccatgtcaaatccacacattttattgttagatgaacccaccaatcatctggacatgcaaagtattgatgcattggccgatgcactggatgaattcaccggtggagttgttcttgttagtcatgattcaagattgatatcacgtgtatgtgaggatgaagaaaggagtcaaatctgggttgtcgaagagggcactgtcaaaaatttcccaggaacatttgaggattacaaggacgacttgctgagagagattaaagctgaagttgatgattga

SEQ ID NO: 82829 - protein, 721 aa, Glycine max
MGRKKTEDAGPSAKVKAGSKDPPKKEKISVSAMLASMDEKPDKPKKVPSSSSKPKPKSAPKASTYTDGIDLPPSDDEDDDDLLEEGEAKRSSQQQQRVDLKPLDVPIADKELKKREKKDLLAAHAAEQAKKEALRDDHDAFTVVIGSRASVLDGGDDADANVKDITVENFSVSARGKELLKNATVKISHGKRYGLVGPNGKGKSTLLKLLAWRKIPVPKNIDVLLVEQEVVGDDKTALEAVVSANDELVKIRQEVASLQNAASVEDKDNDEEDDTGEKLAELYEKLQLMGSDAAEAQASKILAGLGFTKDMQARPTKSFSGGWRMRISLARALFVQPTLLLLDEPTNHLDLRAVLWLEEYLCRWKKTLVVVSHDRDFLNTVCTEIIHLHDLKLHFYRGNFDDFESGYEQRRKEMNKKYDIYAKQLQAAKRSGNQAQQKKVKDQAKFAAAKEKSKGKGKGKVDEDEAPPEAPQKWRDYSVEFHFPEPTELTPPLLQLIEVSFSYPNREDFRLSNVDVGIDMGTRVAIVGPNGAGKSTLLNLLAGDLVPSEGEVRRSQKLRIGRYSQHFVDLLTMDETAVQYLLRLHPDQEGLSKQEAVRAKLGKFGLPSHNHLTPIAKLSGGQKARVVFTSISMSNPHILLLDEPTNHLDMQSIDALADALDEFTGGVVLVSHDSRLISRVCEDEERSQIWVVEEGTVKNFPGTFEDYKDDLLREIKAEVDD

SEQ ID NO: 82830 - DNA, 2118 bp, Zea mays
  CDS (1)..(2118)
atggccgccatggacctcctctccggcaagctcatacgctccctgcgtctccattcctcactcctcccctctgctccttcctcctcccgcgccgtccccacatcccgccgtctccggcgccgccgccatgcccccctgtactgccgccttaccaccacctcctcctcctcatctgcctccaccaccacaaccaccggggtggaggaagacgtcaaaagccaggacctttcctccctcctcacctcctccgacccttctgccgcgcccgccgtcgggaccaagaagaagcggtcgggcggcagcagcggcgcgtctagcatcccgtccggggtgcggctggagggaatctccaagtcctacaagggcgtgacggtgctcaaggacgtgtcctgggaggtgcagcgcggcgagaaggtggggctcgtcggcgtgaacggcgccggcaagacgacgcagctccgcatcatcgcggggctcgagaagcccgacggcggcgccgtcatcaaggccaaggagaacatgaagatcgccttcctcagccaggagttcgaggtctccgcctcccgcaccgtcagggaagagttcttcagcgccttcgaggaggagatggaggtcaagcggcggctcgagcaggtgcaggcggcgctcgagggcgccactgaagacatggacctcatgggccggctcctcgatgagctcgacctgctgcagcgccgctcccaggacgtggacctcgatatggtggacgtcaaggtgcagaagctcatgccagagctcgggttcacgcctgaggacgccgaccgcctcgtcgcctccttcagcggtgggtggaaaatgaggatgtctctaggcaagatacttcttcaggaccctgatttgcttttgcttgatgagcctacgaatcatgtcgatttggataccattgagtggctggagatgtatctcaagacgcaggatgtgccgatggtcattatatctcatgacagggcgttccttgatcagttgtgcacaaagatagtggaaactgaatttggtgtgtccaagacatacaagggtaactattcagagtacattctagcaaaggcggtagcagtggaggcacagtatgctgcgtgggagaagcaacagaaggaaattgaacagacaaaggagctgataaacagacttggtgctggagttaatgcagggcgtgcttccagcgagcagaagaaattggagaagcttgaaaaagaagggttgattgagaaacctttccaaaggaagcagctaaagatcagattccctgagcgtggaagaagtgggagaactgtgttgacgataaacaatcttcaattcggatttgagaataagactttgttcaacaatgctaatctgatagtagagagaggtgaaaagatagctattattgggcccaatggttgtgggaagagcacactgcttaaacttatgttggggatggagaagccacaaggtggtgaggtgcttcttggggagcataatgtgttgccgaactattttgagcagaatcaggcagaagctcttgatttagagaagaccgtgttagacactgtagcagaagctgcggaagattggatacttgatgatatcaaaggtctccttggccgttgcaacttcagggatgacatgctggatagaaaagttcagtttttaagtggtggagagaaggcaaggcttgcattttgcaagttcatggtgactccatctactctactcatcttggatgaaccgacaaaccatcttgatatcccatcaaaagaaatgcttgaggaggcaatatcagaatatacaggcaccgtcataacagtttctcatgaccggtacttcataaaacaaattgtcaacagagtcatcgaagtgaaagatcagactatccaagactatcaaggagattacaattactaccttgagaggaaccttgaagcccgagaaagggaacttgcccgcgaggaagagctcgaggagagagcccccaaagtaaaagccaagtccaagatgtcgaaggcagagaaagccgtcaggaagaagcagaagatgcaggccttccagcagagcaagcagaaatccaagtcgcttaagaactcgaagcggtggaactga

SEQ ID NO: 82831 - protein, 705 aa, Zea mays
MAAMDLLSGKLIRSLRLHSSLLPSAPSSSRAVPTSRRLRRRRHAPLYCRLTTTSSSSSASTTTTTGVEEDVKSQDLSSLLTSSDPSAAPAVGTKKKRSGGSSGASSIPSGVRLEGISKSYKGVTVLKDVSWEVQRGEKVGLVGVNGAGKTTQLRIIAGLEKPDGGAVIKAKENMKIAFLSQEFEVSASRTVREEFFSAFEEEMEVKRRLEQVQAALEGATEDMDLMGRLLDELDLLQRRSQDVDLDMVDVKVQKLMPELGFTPEDADRLVASFSGGWKMRMSLGKILLQDPDLLLLDEPTNHVDLDTIEWLEMYLKTQDVPMVIISHDRAFLDQLCTKIVETEFGVSKTYKGNYSEYILAKAVAVEAQYAAWEKQQKEIEQTKELINRLGAGVNAGRASSEQKKLEKLEKEGLIEKPFQRKQLKIRFPERGRSGRTVLTINNLQFGFENKTLFNNANLIVERGEKIAIIGPNGCGKSTLLKLMLGMEKPQGGEVLLGEHNVLPNYFEQNQAEALDLEKTVLDTVAEAAEDWILDDIKGLLGRCNFRDDMLDRKVQFLSGGEKARLAFCKFMVTPSTLLILDEPTNHLDIPSKEMLEEAISEYTGTVITVSHDRYFIKQIVNRVIEVKDQTIQDYQGDYNYYLERNLEARERELAREEELEERAPKVKAKSKMSKAEKAVRKKQKMQAFQQSKQKSKSLKNSKRWN

SEQ ID NO: 82832 - DNA, 2163 bp, Zea mays
  CDS (1)..(2163)
atggcggctgcggcggccgccagcatggtggtggtgcgggaggtcctgggcctcgacgtcgtcgacgaggtggaccagcccatcatcgactacatcgccaacgtcctcgccgacgaggacttcgacttcggggccccggaagggcacggcatcttcgaagcgctcggggagctcctcatcgactctgggtgcgtctctgaccaggagcactgccttcaggtctgcagtaagctttgtgaaaagtttggaaagcatggtctggtgaaaccgaaacaagctatgcgcagccttgtcacaccattacgaatgaatgcggggatggacgatgatgtcgctcccaaaaagccgcagcctgaagtattcgatggaccactgctgtcttcgcgcgataaagccaagattgaacggagaaaaagaaaagaggagaggcaaagagaggttcaatatcaaatgcatgttgcggagatggagacacttagggctggaatgcctcctgtttatgtaaaccacagtaatgatggtgggccagctgttagggatatacatatggagaacttcagtgtcactgttggtggtcgtgatctaattcaagaagccactataacacttgcttttgggaggcactatggacttgttggaagaaacgggactgggaagacatcttttctcagagcgatggcattgcatgcaattgatggtattcctaagaactgccagatattgcatgttgagcaagaggtcgtgggtgacgatacgacagctttgcagtgtgttctgaacgccgatgtcgaacgagttcaacttttgcaggaagaagctcgtcttgttcaacaacagaaagatttagagattgaggctgagtttgggcagagctctgacaagggcaaggatggttttgacaaagattctatcagcaagaggcttgaggagatatataaacggcttgagctcattgatgcggatgcagcagaggctcgcgcagcatcaattttggcgggtcttagttttactccagaaatgcaacgcaagcgtacaaaacaattttctggtggatggcgcatgagaatagctctagcacgtgctctgttcattgagcctgatttgctactacttgatgagccgacaaaccatcttgatcttcatgctgtgttatggctagaaacttatctcctgaagtggccaaagacattcattgttgtatcacacgcaagggagtttttgaatacggttgtcaccgatatccttcatctgcatggtagaaaactacatgcttacaaaggtgactatgacacatttgagaggacaagggaagagcaccttaagaatcagcagaaagcctttgaaacaaatgagaaggccagacagcacatgcagacattcattgacaagtttcggtacaatgcaaagagagcatcacttgttcaatcaagaatcaaggcattggagcgaatggaacatgttgatgcagttgtcagcgatccagactataaatttgaatttccaaccccagatgaccgccctgggccaccaatcatcagcttcagtgatgcctcatttggttaccctggagggcctaccttgtttaaaaatttgaattttggtatcgacctggacagccgcatagcaatggttggtcctaatggcattggcaagtccactatactgaaactaatttctggggatctgcagccaacttctggaacagtatttcgctctcccaaggttcgcatggctgtattcaatcagcatcatgttgatggccttgatttgacggtgaatccccttttgtacatgatgaagtgctatccgggtgtgccggagcagaagttgagggcacatctgggttcgtttggtgtttcgggaagccttgccctccaatctatgtacactttatcaggtggtcagaagagtagggttgcattcgcgaaaataaccttcaagaagccgcacatcattctccttgacgagccttctaaccatcttgatctggacgctgttgaggcgctcatccagggtttactcatttttcagggaggggtgctgatggtgagtcacgatgagcatcttatcactggaagcgtggacgagctttgggtggtgtcggaaggcagggtgaccccgttctcgggcactttcaaggactacaagaagatgctcaagtaa

SEQ ID NO: 82833 - protein, 720 aa, Zea mays
MAAAAAASMVVVREVLGLDVVDEVDQPIIDYIANVLADEDFDFGAPEGHGIFEALGELLIDSGCVSDQEHCLQVCSKLCEKFGKHGLVKPKQAMRSLVTPLRMNAGMDDDVAPKKPQPEVFDGPLLSSRDKAKIERRKRKEERQREVQYQMHVAEMETLRAGMPPVYVNHSNDGGPAVRDIHMENFSVTVGGRDLIQEATITLAFGRHYGLVGRNGTGKTSFLRAMALHAIDGIPKNCQILHVEQEVVGDDTTALQCVLNADVERVQLLQEEARLVQQQKDLEIEAEFGQSSDKGKDGFDKDSISKRLEEIYKRLELIDADAAEARAASILAGLSFTPEMQRKRTKQFSGGWRMRIALARALFIEPDLLLLDEPTNHLDLHAVLWLETYLLKWPKTFIVVSHAREFLNTVVTDILHLHGRKLHAYKGDYDTFERTREEHLKNQQKAFETNEKARQHMQTFIDKFRYNAKRASLVQSRIKALERMEHVDAVVSDPDYKFEFPTPDDRPGPPIISFSDASFGYPGGPTLFKNLNFGIDLDSRIAMVGPNGIGKSTILKLISGDLQPTSGTVFRSPKVRMAVFNQHHVDGLDLTVNPLLYMMKCYPGVPEQKLRAHLGSFGVSGSLALQSMYTLSGGQKSRVAFAKITFKKPHIILLDEPSNHLDLDAVEALIQGLLIFQGGVLMVSHDEHLITGSVDELWVVSEGRVTPFSGTFKDYKKMLK

SEQ ID NO: 82834 - DNA, 1788 bp, Zea mays
  CDS (1)..(1788)
atggtgtcggaggccagcaagaagaaggccgcccagaagaaggccgctgccgccgcaaagaggggaggcaaggcctcggtggcgtcctcgtcgtcttcatctgcggccgcggccgccgataaggtggcgaacggcgtcgtggcgcttaagctatcagaccgcacctgcaccggggtcctcgcatctcaccccctttcccgggatatccacatagagtctctttctttaacattccatggacacgaccttattgtggattctgatttggagctgaactacggaaggcgatacggtttgcttgggttgaatggctgtggaaaatctactcttctcacagcaataggctgcagagaacttcctatccctgaacacatggacatataccatctaagccatgagattgaagcttctgacatgtctgcactgcaagccattgttagttgtgacgaagaaagagtgaagttggaaaaggaagctgaaattttggctgcacaggatgatggtggtggtgaagcattggagcgtgtttatgagcgtctagatgcaatggatgctggaactgcagaaaagcgagctgctgaaattttatttggtctgggttttgacaaacaaatgcaagcaaagaaaactaaagatttctctggaggttggcgtatgaggattgctttagcaagagcactgtttatgaatccaacaatccttttgcttgatgagcccacaaaccatctagatcttgaggcttgtgtctggttggaagagacactgaagaaatttgaccgcatacttgttgtcatatcacactcccaagattttctaaatggagtgtgtactaacattatccatatgcaaaacaagaagctcaagttatacaccggtaactacgatcagtatgttcaaactcgctccgatcttgaagagaatcaaatgaagcagtacaaatgggagcaggaacagattgcttcaatgaaggagtacattgctcgcttcggtcatggttctgcaaagcttgctcgtcaggctcagagcaaagagaaaactcttgcaaagatggagcgaggtggtctcaccgagaaggttgttagggacagagttctagtgttcaggtttacagatgtaggcaaacttcctccacctgtgctgcagtttgttgaagtcaagtttgggtatacaccagataatctcatatacaagagtcttgactttggtgttgatcttgactctagaatcgcattggttggtcccaatggtgcagggaagagcactcttctgaagcttatgactggtgaccttgctccattagatggcatggttcggcgccacaatcacctgcgcattgcacagtaccatcagcatcttgcggacaagctggatctggacatgccggctctggcttacatgatgaaggaataccctgggaccgaagaagagaagatgcgagctgctgttggcaggtttggcctatcaggaaaggcgcaggtgatgccaatgaggaatctttctgatgggcaaaggagccgtgtcatctttgcatggttggcatataggcagccgcaactgctactgctcgatgagccgacaaatcatttggacattgagaccattgactccctggcggaggcactgaatgagtgggatggtggtttggtcttggtgagccatgatttcaggctgatcaaccaggttgctcaagagatttgggtgtgtgagaatcaggcggtgacaaggtgggaaggtgatatcatggatttcaaggcacacttgaagagcaaggctggtttatctgattag

SEQ ID NO: 82835 - protein, 595 aa, Zea mays
MVSEASKKKAAQKKAAAAAKRGGKASVASSSSSSAAAAADKVANGVVALKLSDRTCTGVLASHPLSRDIHIESLSLTFHGHDLIVDSDLELNYGRRYGLLGLNGCGKSTLLTAIGCRELPIPEHMDIYHLSHEIEASDMSALQAIVSCDEERVKLEKEAEILAAQDDGGGEALERVYERLDAMDAGTAEKRAAEILFGLGFDKQMQAKKTKDFSGGWRMRIALARALFMNPTILLLDEPTNHLDLEACVWLEETLKKFDRILVVISHSQDFLNGVCTNIIHMQNKKLKLYTGNYDQYVQTRSDLEENQMKQYKWEQEQIASMKEYIARFGHGSAKLARQAQSKEKTLAKMERGGLTEKVVRDRVLVFRFTDVGKLPPPVLQFVEVKFGYTPDNLIYKSLDFGVDLDSRIALVGPNGAGKSTLLKLMTGDLAPLDGMVRRHNHLRIAQYHQHLADKLDLDMPALAYMMKEYPGTEEEKMRAAVGRFGLSGKAQVMPMRNLSDGQRSRVIFAWLAYRQPQLLLLDEPTNHLDIETIDSLAEALNEWDGGLVLVSHDFRLINQVAQEIWVCENQAVTRWEGDIMDFKAHLKSKAGLSD

SEQ ID NO: 82836 - DNA, 26 bp, Artificial sequence
  primer
atgattgttttctcctcgttacaaat

SEQ ID NO: 82837 - DNA, 24 bp, Artificial sequence
  primer
ttagttgctttggccttccagcag

SEQ ID NO: 82838 - protein, 658 aa, Artificial sequence
  consensus sequence
  Variant (2)..(11): Xaa in position 2 to 11 is any amino acid
  Variant (13)..(15): Xaa in position 13 to 15 is any amino acid
  Variant (18)..(18): Xaa in position 18 is any amino acid
  Variant (20)..(20): Xaa in position 20 is any amino acid
  Variant (23)..(23): Xaa in position 23 is any amino acid
  Variant (27)..(27): Xaa in position 27 is any amino acid
  Variant (29)..(33): Xaa in position 29 to 33 is any amino acid
  Variant (34)..(62): Xaa in position 34 to 62 is any or no amino acid
  Variant (65)..(91): Xaa in position 65 to 91 is any amino acid
  Variant (92)..(176): Xaa in position 92 to 176 is any or no amino acid
  Variant (178)..(180): Xaa in position 178 to 180 is any amino acid
  Variant (182)..(182): Xaa in position 182 is any amino acid
  Variant (187)..(197): Xaa in position 187 to 197 is any amino acid
  Variant (206)..(207): Xaa in position 206 to 207 is any amino acid
  Variant (210)..(211): Xaa in position 210 to 211 is any amino acid
  Variant (213)..(217): Xaa in position 213 to 217 is any amino acid
  Variant (230)..(233): Xaa in position 230 to 233 is any amino acid
  Variant (234)..(234): Xaa in position 234 is any or no amino acid
  Variant (238)..(239): Xaa in position 238 to 239 is any amino acid
  Variant (241)..(250): Xaa in position 241 to 250 is any amino acid
  Variant (251)..(254): Xaa in position 251 to 254 is any or no amino acid
  Variant (259)..(259): Xaa in position 259 is any amino acid
  Variant (262)..(278): Xaa in position 262 to 278 is any amino acid
  Variant (280)..(280): Xaa in position 280 is any amino acid
  Variant (282)..(282): Xaa in position 282 is any amino acid
  Variant (283)..(283): Xaa in position 283 is any or no amino acid
  Variant (285)..(314): Xaa in position 285 to 314 is any amino acid
  Variant (315)..(337): Xaa in position 315 to 337 is any or no amino acid
  Variant (339)..(348): Xaa in position 339 to 348 is any amino acid
  Variant (349)..(351): Xaa in position 349 to 351 is any or no amino acid
  Variant (354)..(355): Xaa in position 354 to 355 is any amino acid
  Variant (357)..(357): Xaa in position 357 is any amino acid
  Variant (359)..(371): Xaa in position 359 to 371 is any amino acid
  Variant (372)..(391): Xaa in position 372 to 391 is any or no amino acid
  Variant (393)..(411): Xaa in position 393 to 411 is any amino acid
  Variant (412)..(413): Xaa in position 412 to 413 is any or no amino acid
  Variant (415)..(430): Xaa in position 415 to 430 is any amino acid
  Variant (431)..(453): Xaa in position 431 to 453 is any or no amino acid
  Variant (455)..(458): Xaa in position 455 to 458 is any amino acid
  Variant (460)..(460): Xaa in position 460 is any amino acid
  Variant (463)..(463): Xaa in position 463 is any amino acid
  Variant (469)..(469): Xaa in position 469 is any amino acid
  Variant (471)..(473): Xaa in position 471 to 473 is any amino acid
  Variant (475)..(479): Xaa in position 475 to 479 is any amino acid
  Variant (480)..(480): Xaa in position 480 is any or no amino acid
  Variant (482)..(495): Xaa in position 482 to 495 is any amino acid
  Variant (496)..(496): Xaa in position 496 is any or no amino acid
  Variant (499)..(501): Xaa in position 499 to 501 is any amino acid
  Variant (502)..(502): Xaa in position 502 is any or no amino acid
  Variant (504)..(524): Xaa in position 504 to 524 is any amino acid
  Variant (525)..(536): Xaa in position 525 to 536 is any or no amino acid
  Variant (538)..(539): Xaa in position 538 to 539 is any amino acid
  Variant (542)..(542): Xaa in position 542 is any amino acid
  Variant (544)..(546): Xaa in position 544 to 546 is any amino acid
  Variant (548)..(557): Xaa in position 548 to 557 is any amino acid
  Variant (558)..(564): Xaa in position 558 to 564 is any or no amino acid
  Variant (568)..(570): Xaa in position 568 to 570 is any amino acid
  Variant (572)..(581): Xaa in position 572 to 581 is any amino acid
  Variant (583)..(584): Xaa in position 583 to 584 is any amino acid
  Variant (586)..(586): Xaa in position 586 is any amino acid
  Variant (596)..(601): Xaa in position 596 to 601 is any amino acid
  Variant (603)..(604): Xaa in position 603 to 604 is any amino acid
  Variant (607)..(610): Xaa in position 607 to 610 is any amino acid
  Variant (612)..(615): Xaa in position 612 to 615 is any amino acid
  Variant (620)..(642): Xaa in position 620 to 642 is any amino acid
  Variant (643)..(652): Xaa in position 643 to 652 is any or no amino acid
  Variant (654)..(656): Xaa in position 654 to 656 is any amino acid
  Variant (657)..(657): Xaa in position 657 is any or no amino acid
LXXXXXXXXXXGXXXGLXGXNGXGKSXLXXXXXXXXXXXXXXXXXXXXXXXXXXXXXXXXXXQEXXXXXXXXXXXXXXXXXXXXXXXXXXXXXXXXXXXXXXXXXXXXXXXXXXXXXXXXXXXXXXXXXXXXXXXXXXXXXXXXXXXXXXXXXXXXXXXXXXXXXXXXXXXXXXXXAXXXLXGLGFXXXXXXXXXXXFSGGWRMRXXLAXXLXXXXXLLLLDEPTNHLDXXXXXWLEXXLXXXXXXXXXXXXXXSHDRXFLXXXXXXXXXXXXXXXXXYXGXXYXXXXXXXXXXXXXXXXXXXXXXXXXXXXXXXXXXXXXXXXXXXXXXXXXXXXXRXXXXXXXXXXXXXQSXXKXLXXXXXXXXXXXXXXXXXXXXXXXXXXXXXXXXXFXXXXXXXXXXXXXXXXXXXXXYXXXXXXXXXXXXXXXXXXXXXXXXXXXXXXXXXXXXXXXRXXXXGXNGXGKSTLXKXXXGXXXXXXGXXXXXXXXXXXXXXXQHXXXXLXXXXXXXXXXXXXXXXXXXXXXXXXXXXXXXXXRXXLGXFXXXGXXXXXXXXXXXXXXXXXSGGXXXRXXXXXXXXXXPXXLXLDEPTNHLDXXXXXXLXXALXXXXGXXXXVSHDXXXXXXXXXXXXXXXXXXXXXXXXXXXXXXXXXGXXXXY

SEQ ID NO: 82839 - protein, 40 aa, Artificial sequence
  protein pattern
  Variant (2)..(2): Xaa in position 2 is Gly or Pro
  Variant (4)..(6): Xaa in position 4 to 6 is any amino acid
  Variant (8)..(8): Xaa in position 8 is Ile, Leu, Met or Val
  Variant (9)..(9): Xaa in position 9 is any amino acid
  Variant (10)..(10): Xaa in position 10 is Ile or Leu
  Variant (11)..(11): Xaa in position 11 is Ala, Cys or Gly
  Variant (12)..(13): Xaa in position 12 to 13 is any amino acid
  Variant (15)..(17): Xaa in position 15 to 17 is any amino acid
  Variant (18)..(18): Xaa in position 18 is Ala, Gly, Pro or Ser
  Variant (19)..(19): Xaa in position 19 is any amino acid
  Variant (21)..(21): Xaa in position 21 is any or no amino acid
  Variant (23)..(23): Xaa in position 23 is any or no amino acid
  Variant (25)..(25): Xaa in position 25 is any or no amino acid
  Variant (29)..(29): Xaa in position 29 is Ser or Thr
  Variant (31)..(31): Xaa in position 31 is any amino acid
  Variant (32)..(32): Xaa in position 32 is Leu or Val
  Variant (34)..(35): Xaa in position 34 to 35 is any amino acid
  Variant (36)..(36): Xaa in position 36 is Ala, Gly, Ser or Thr
  Variant (37)..(38): Xaa in position 37 to 38 is any amino acid
  Variant (39)..(39): Xaa in position 39 is Phe or Trp
SXGXXXRXXXXXXLXXXXXLXLXLXDEPXNXXDXXXXXXL

SEQ ID NO: 82840 - protein, 40 aa, Artificial sequence
  protein pattern
  Variant (2)..(3): Xaa in position 2 to 3 is any amino acid
  Variant (4)..(4): Xaa in position 4 is any or no amino acid
  Variant (13)..(13): Xaa in position 13 is Ile, Leu, Met or Val
  Variant (14)..(18): Xaa in position 14 to 18 is any amino acid
  Variant (20)..(21): Xaa in position 20 to 21 is any amino acid
  Variant (23)..(23): Xaa in position 23 is Ile, Leu or Val
  Variant (24)..(25): Xaa in position 24 to 25 is any amino acid
  Variant (26)..(26): Xaa in position 26 is Phe, Trp or Tyr
  Variant (27)..(27): Xaa in position 27 is any amino acid
  Variant (29)..(29): Xaa in position 29 is Ala, Gly, Ser, Thr or Val
  Variant (30)..(30): Xaa in position 30 is Ile, Leu, Met or Val
  Variant (31)..(32): Xaa in position 31 to 32 is any amino acid
  Variant (33)..(33): Xaa in position 33 is Ile or Val
  Variant (34)..(34): Xaa in position 34 is Ala, Gly, Ser or Thr
  Variant (37)..(38): Xaa in position 37 to 38 is any amino acid
  Variant (39)..(39): Xaa in position 39 is Phe, Leu or Met
  Variant (40)..(40): Xaa in position 40 is Ile, Leu or Val
LXXXDEPTNHLDXXXXXXLXXAXXXXXGXXXXXXHDXXXX

SEQ ID NO: 82841 - protein, 12 aa, Artificial sequence
  protein pattern
  Variant (3)..(3): Xaa in position 3 is Asp or Ser
  Variant (4)..(4): Xaa in position 4 is Gln or Arg
  Variant (5)..(5): Xaa in position 5 is any amino acid
  Variant (6)..(6): Xaa in position 6 is Phe or Leu
  Variant (8)..(8): Xaa in position 8 is Asp or Asn
  Variant (9)..(11): Xaa in position 9 to 11 is any amino acid
  Variant (12)..(12): Xaa in position 12 is Asp, Gly, Asn, Gln, Ser or Thr
SHXXXXLXXXXX

SEQ ID NO: 82842 - protein, 16 aa, Artificial sequence
  protein pattern
  Variant (2)..(2): Xaa in position 2 is any amino acid
  Variant (3)..(3): Xaa in position 3 is Ala, Cys, Gly or Thr
  Variant (4)..(4): Xaa in position 4 is Ile, Leu, Met or Val
  Variant (5)..(5): Xaa in position 5 is any amino acid
  Variant (7)..(7): Xaa in position 7 is any amino acid
  Variant (10)..(10): Xaa in position 10 is any amino acid
  Variant (15)..(15): Xaa in position 15 is any or no amino acid
RXXXXGXNGXGKSTXL

SEQ ID NO: 82843 - protein, 10 aa, Artificial sequence
  protein pattern
  Variant (2)..(2): Xaa in position 2 is any amino acid
  Variant (5)..(5): Xaa in position 5 is any amino acid
  Variant (9)..(9): Xaa in position 9 is Cys, Ser or Thr
  Variant (10)..(10): Xaa in position 10 is Phe, Ile, Leu or Val
GXNGXGKSXX

SEQ ID NO: 82844 - protein, 16 aa, Artificial sequence
  protein pattern
  Variant (2)..(3): Xaa in position 2 to 3 is any amino acid
  Variant (4)..(4): Xaa in position 4 is Ala, Ser or Thr
  Variant (5)..(6): Xaa in position 5 to 6 is any amino acid
  Variant (7)..(7): Xaa in position 7 is Ala or Val
  Variant (10)..(11): Xaa in position 10 to 11 is any amino acid
  Variant (13)..(13): Xaa in position 13 is any amino acid
  Variant (15)..(15): Xaa in position 15 is Ala, Asp, Glu, Gly, Asn or Gln
  Variant (16)..(16): Xaa in position 16 is Lys or Arg
AXXXXXXQSXXKXLXX

SEQ ID NO: 82845 - protein, 10 aa, Artificial sequence
  protein pattern
  Variant (4)..(4): Xaa in position 4 is Glu or Gln
  Variant (5)..(5): Xaa in position 5 is Lys or Arg
  Variant (6)..(6): Xaa in position 6 is Ala, Asn, Ser or Thr
  Variant (8)..(8): Xaa in position 8 is Leu or Val
  Variant (9)..(9): Xaa in position 9 is any amino acid
  Variant (10)..(10): Xaa in position 10 is Phe, Ile, Leu or Met
SGGXXXRXXX

SEQ ID NO: 82846 - DNA, 444 bp, Escherichia coli
  CDS (1)..(444): transl_table=11
atgatgatcttttgttcacgctacaactggagacgccgcatgagggttaaacgctggttgttggcaggtattgcattgtgccttttaaccggtatgcgtgacccttttaaaccgccggaagatctatgccggattagcgaacttagccagtggcgctatcaggggatggtagggcgaggcgagcgcatcatcggtgtaataaaagacgggcaaaagaaatggcgacgggtgcagcaaaacgatgtgctggaaaacggctggacaattttacagctgacgccagacgtactaacgctgggtaccgggacaaactgcgaaccgccacaatggttgtggcaacggcaaggagatacaaatgaagcaatggatagccgcactactgttgatgctgatacccggcgtacaggcggcaaagccgcaaaaagtgacgctgatggtggataa

SEQ ID NO: 82847 - protein, 147 aa, Escherichia coli
MMIFCSRYNWRRRMRVKRWLLAGIALCLLTGMRDPFKPPEDLCRISELSQWRYQGMVGRGERIIGVIKDGQKKWRRVQQNDVLENGWTILQLTPDVLTLGTGTNCEPPQWLWQRQGDTNEAMDSRTTVDADTRRTGGKAAKSDADGG

SEQ ID NO: 82848 - DNA, 444 bp, Escherichia coli O157:H7 EDL933
  CDS (1)..(444): transl_table=11
gtgatgatcttttgttcaccctacaactggagacgccgcatgagggttaaacgctggttgttggcaggtattgcattgtgccttttaaccggtatgcgtgacccttttaaaccgccggaagatctatgccggattagcgaacttagccagtggcgctatcaggggatggtagggcgaggcgagcgcatcatcggtgtaataaaagacgggcaaaagaaatggcgacgggtgcagcaaaacgatgtgctggaaaacggctggacaattttacagctgacgctagacgtactaacgctgggtaccgggacaaactgcgaaccgccacaatggttgtggcaacggcaaggagatacaaatgaagcaatggatagccgcactactgttgatgctgatacccggcgtacaggcggcaaagccgcaaaaagtgacgctgatggtggatga

SEQ ID NO: 82849 - protein, 147 aa, Escherichia coli O157:H7 EDL933
MMIFCSPYNWRRRMRVKRWLLAGIALCLLTGMRDPFKPPEDLCRISELSQWRYQGMVGRGERIIGVIKDGQKKWRRVQQNDVLENGWTILQLTLDVLTLGTGTNCEPPQWLWQRQGDTNEAMDSRTTVDADTRRTGGKAAKSDADGG

SEQ ID NO: 82850 - DNA, 402 bp, Salmonella typhimurium LT2
  CDS (1)..(402): transl_table=11
atgaaggctagccgcagtgtattgctctgtttttgtttgctgatgttgacaggaatgcgcgatcccttccgcccgccggaagatcgctgccggatagcggaactctcgcagtggcggtatcagggcgcggtgcgtaaaggcgagcgatggacaggcattcttaaagacagtcagcaaaaatggcgacgagtggaagaagggcagacgctggaaaacggttggacgattgtccgcctgacggcggaaaccttaacgttaacgaccggtaaaaattgtgcgccgccgcagtggcggtggctacgtcagggagcggacaatgaagcgatggatagccataatactgatagccttgatgcccgccgcgcaggcgggaaaagcggcgaaagtgacgctggtggttga

SEQ ID NO: 82851 - protein, 133 aa, Salmonella typhimurium LT2
MKASRSVLLCFCLLMLTGMRDPFRPPEDRCRIAELSQWRYQGAVRKGERWTGILKDSQQKWRRVEEGQTLENGWTIVRLTAETLTLTTGKNCAPPQWRWLRQGADNEAMDSHNTDSLDARRAGGKSGESDAGG

SEQ ID NO: 82852 - DNA, 444 bp, Escherichia coli CFT073
  CDS (1)..(444): transl_table=11
gtgatgaccttttgttcacgctacaactggagacaccgcatgagggttaaacgctggttgttggcaggtattgcattgtgccttttaaccggtatgcgtgacccttttaaaccgccggaagatctatgccggattagcgaacttagccagtggcgctatcaggggatggtagcgcgaggcgagcgcatcatcggtgtaataaaagacgggcaaaagaaatggcgacgggtgcagcaaaacgatgtgctggaaaacggctggacaattttacagctgacgccagacgcactaacgctgggaaccggaacaaactgcgaaccgccacactggttgtggcaacggcaaggagatacaaatgaagcaatggatagccgcactactgttgatgctgatacccggcgtacaggcggcaaagccgcaaaaagtgacgctgatggtggatga

SEQ ID NO: 82853 - protein, 147 aa, Escherichia coli CFT073
MMTFCSRYNWRHRMRVKRWLLAGIALCLLTGMRDPFKPPEDLCRISELSQWRYQGMVARGERIIGVIKDGQKKWRRVQQNDVLENGWTILQLTPDALTLGTGTNCEPPHWLWQRQGDTNEAMDSRTTVDADTRRTGGKAAKSDADGG

SEQ ID NO: 82854 - DNA, 402 bp, Salmonella enterica subsp. enterica serovar Typhi Ty2
  CDS (1)..(402): transl_table=11
atgaaggttagccgcggtgtattgctctgtttttgtttgctgacgttgacgggaatgcgcgatcccttccgcccgccggaagatcgctgccggatagcggaactctcgcagtggcgatatcagggcgcggtgcgtaaaggcgagcgatggacaggcattcttaaagacagccagcaaaaatggcggcgagtggaagaagggcagacgctggaaaacggttggacgattgtccgcctgacggcggaagccttaacgttaacgaccggtaaaaattgtgcgccgccgcagtggcggtggttacgtcagggagcggacaatgaagcgatggatagccataatactgatagtcttgatgcccgccgcgcaggcgggaaaagcggcgaaagtgacgctggtggttga

SEQ ID NO: 82855 - protein, 133 aa, Salmonella enterica subsp. enterica serovar Typhi Ty2
MKVSRGVLLCFCLLTLTGMRDPFRPPEDRCRIAELSQWRYQGAVRKGERWTGILKDSQQKWRRVEEGQTLENGWTIVRLTAEALTLTTGKNCAPPQWRWLRQGADNEAMDSHNTDSLDARRAGGKSGESDAGG

SEQ ID NO: 82856 - DNA, 405 bp, Escherichia coli B
  CDS (1)..(405): transl_table=11
atgagggttaaacgctggttgttggcaggtgttgcattgtgccttttaaccggtatgcgtgacccttttaaaccgccggaagatctatgccggattagcgaacttagccagtggcgctatcaggggatggtagggcgaggcgagcacatcatcggtgtaataaaagacgggcaaaagaaatggcgacgggtgcagcaaaacgatgtgctggaaaacggctggacaattttacagctgacgccagacgcactaacgctgggaaccgggacaaactgcgaaccgccacaatggttgtggcaacggcaaggagatacaaatgaagcaatggatagccgcactactgttgatgctgatacccggcgtacaagcggcaaagccgcaaaaagtgacgctgatggtggatga

SEQ ID NO: 82857 - protein, 134 aa, Escherichia coli B
MRVKRWLLAGVALCLLTGMRDPFKPPEDLCRISELSQWRYQGMVGRGEHIIGVIKDGQKKWRRVQQNDVLENGWTILQLTPDALTLGTGTNCEPPQWLWQRQGDTNEAMDSRTTVDADTRRTSGKAAKSDADGG

SEQ ID NO: 82858 - DNA, 405 bp, Escherichia coli
  CDS (1)..(405): transl_table=11
atgagggttaaacgctggttgttggcaggtattgcattgtgccttttaaccggtatgcgtgacccttttaaaccgccggaagatctatgccggattagcgaacttagccagtggcgctatcaggggatggtagggcgaggcgagcgcatcatcggtgtaataaaagacgggcaaaagaaatggcgacgggtgcagcaaaacgatgtgctggaaaacggctggacaattttacagctgacgccagacgtactaacgctgggtaccgggacaaactgcgaaccgccacaatggttgtggcaacggcaaggagatacaaatgaagcaatggatagccgcactactgttgatgctgatacccggcgtacaggcggcaaagccgcaaaaagtgacgctgatggtggatga

SEQ ID NO: 82859 - protein, 134 aa, Escherichia coli
MRVKRWLLAGIALCLLTGMRDPFKPPEDLCRISELSQWRYQGMVGRGERIIGVIKDGQKKWRRVQQNDVLENGWTILQLTPDVLTLGTGTNCEPPQWLWQRQGDTNEAMDSRTTVDADTRRTGGKAAKSDADGG

SEQ ID NO: 82860 - DNA, 26 bp, Artificial sequence
  primer
atgatgatcttttgttcacgctacaa

SEQ ID NO: 82861 - DNA, 26 bp, Artificial sequence
  primer
ttatccaccatcagcgtcactttttg

SEQ ID NO: 82862 - protein, 133 aa, Artificial sequence
  consensus sequence
  Variant (2)..(2): Xaa in position 2 is any amino acid
  Variant (4)..(4): Xaa in position 4 is any amino acid
  Variant (6)..(7): Xaa in position 6 to 7 is any amino acid
  Variant (9)..(12): Xaa in position 9 to 12 is any amino acid
  Variant (14)..(15): Xaa in position 14 to 15 is any amino acid
  Variant (24)..(24): Xaa in position 24 is any amino acid
  Variant (29)..(29): Xaa in position 29 is any amino acid
  Variant (33)..(33): Xaa in position 33 is any amino acid
  Variant (43)..(43): Xaa in position 43 is any amino acid
  Variant (45)..(46): Xaa in position 45 to 46 is any amino acid
  Variant (50)..(51): Xaa in position 50 to 51 is any amino acid
  Variant (53)..(54): Xaa in position 53 to 54 is any amino acid
  Variant (57)..(57): Xaa in position 57 is any amino acid
  Variant (59)..(59): Xaa in position 59 is any amino acid
  Variant (65)..(69): Xaa in position 65 to 69 is any amino acid
  Variant (77)..(78): Xaa in position 77 to 78 is any amino acid
  Variant (81)..(83): Xaa in position 81 to 83 is any amino acid
  Variant (87)..(87): Xaa in position 87 is any amino acid
  Variant (90)..(90): Xaa in position 90 is any amino acid
  Variant (93)..(93): Xaa in position 93 is any amino acid
  Variant (98)..(98): Xaa in position 98 is any amino acid
  Variant (100)..(100): Xaa in position 100 is any amino acid
  Variant (104)..(105): Xaa in position 104 to 105 is any amino acid
  Variant (112)..(113): Xaa in position 112 to 113 is any amino acid
  Variant (115)..(117): Xaa in position 115 to 117 is any amino acid
  Variant (119)..(119): Xaa in position 119 is any amino acid
  Variant (122)..(122): Xaa in position 122 is any amino acid
  Variant (126)..(128): Xaa in position 126 to 128 is any amino acid
  Variant (132)..(132): Xaa in position 132 is any amino acid
MXVXRXXLXXXXLXXLTGMRDPFXPPEDXCRIXELSQWRYQGXVXXGERXXGXXKDXQXKWRRVXXXXXLENGWTIXXLTXXXLTLXTGXNCXPPQWXWXRQGXXNEAMDSXXTXXXDXRRXGGKXXXSDAXG

SEQ ID NO: 82863 - protein, 59 aa, Artificial sequence
  protein pattern
  Variant (7)..(7): Xaa in position 7 is Lys or Arg
  Variant (12)..(12): Xaa in position 12 is any amino acid
  Variant (16)..(16): Xaa in position 16 is Ala or Ser
  Variant (26)..(26): Xaa in position 26 is any amino acid
  Variant (28)..(28): Xaa in position 28 is any amino acid
  Variant (29)..(29): Xaa in position 29 is Lys or Arg
  Variant (33)..(34): Xaa in position 33 to 34 is any amino acid
  Variant (36)..(36): Xaa in position 36 is Ile or Val
  Variant (37)..(37): Xaa in position 37 is Ile or Leu
  Variant (40)..(40): Xaa in position 40 is Gly or Ser
  Variant (42)..(42): Xaa in position 42 is any amino acid
  Variant (48)..(49): Xaa in position 48 to 49 is Glu or Gln
  Variant (50)..(50): Xaa in position 50 is Gly or Asn
  Variant (51)..(51): Xaa in position 51 is Asp or Gln
  Variant (52)..(52): Xaa in position 52 is Thr or Val
GMRDPFXPPEDXCRIXELSQWRYQGXVXXGERXXGXXKDXQXKWRRVXXXXXLENGWTI

SEQ ID NO: 82864 - protein, 57 aa, Artificial sequence
  protein pattern
  Variant (3)..(3): Xaa in position 3 is Ala, Leu or Pro
  Variant (4)..(4): Xaa in position 4 is Asp or Glu
  Variant (5)..(5): Xaa in position 5 is Ala, Thr or Val
  Variant (9)..(10): Xaa in position 9 to 10 is any or no amino acid
  Variant (12)..(12): Xaa in position 12 is any amino acid
  Variant (13)..(14): Xaa in position 13 to 14 is any or no amino acid
  Variant (17)..(17): Xaa in position 17 is Ala or Glu
  Variant (22)..(22): Xaa in position 22 is any amino acid
  Variant (24)..(24): Xaa in position 24 is any amino acid
  Variant (28)..(28): Xaa in position 28 is Ala or Asp
  Variant (29)..(29): Xaa in position 29 is Asp or Thr
  Variant (36)..(36): Xaa in position 36 is His or Arg
  Variant (37)..(37): Xaa in position 37 is Asn or Thr
  Variant (39)..(39): Xaa in position 39 is Asp or Val
  Variant (40)..(40): Xaa in position 40 is Asp or Ser
  Variant (41)..(41): Xaa in position 41 is Ala or Leu
  Variant (43)..(43): Xaa in position 43 is Ala or Thr
  Variant (46)..(46): Xaa in position 46 is Ala or Thr
  Variant (47)..(47): Xaa in position 47 is Gly or Ser
  Variant (50)..(50): Xaa in position 50 is Ala or Ser
  Variant (51)..(51): Xaa in position 51 is Ala or Gly
  Variant (52)..(52): Xaa in position 52 is Glu or Lys
  Variant (56)..(56): Xaa in position 56 is Asp or Gly
LTXXXLTLXXGXXXNCXPPQWXWXRQGXXNEAMDSXXTXXXDXRRXXGKXXXSDAXG

SEQ ID NO: 82865 - protein, 15 aa, Artificial sequence
  protein pattern
  Variant (2)..(2): Xaa in position 2 is Lys or Arg
  Variant (4)..(4): Xaa in position 4 is any amino acid
  Variant (6)..(6): Xaa in position 6 is any amino acid
  Variant (7)..(7): Xaa in position 7 is any or no amino acid
  Variant (10)..(10): Xaa in position 10 is Ala or Cys
  Variant (11)..(12): Xaa in position 11 to 12 is any amino acid
  Variant (13)..(13): Xaa in position 13 is Ala or Leu
  Variant (15)..(15): Xaa in position 15 is Cys or Thr
MXVXRXXLLXXXXLX

SEQ ID NO: 82866 - DNA, 1623 bp, Escherichia coli
  CDS (1)..(1623): transl_table=11
atgcgcgttaacaatggtttgaccccgcaagaactcgaggcttatggtatcagtgacgtacatgatatcgtttacaacccaagctacgacctgctgtatcaggaagagctcgatccgagcctgacaggttatgagcgcggggtgttaactaatctgggtgccgttgccgtcgataccgggatcttcaccggtcgttcaccaaaagataagtatatcgtccgtgacgataccactcgcgatactttctggtgggcagacaaaggcaaaggtaagaacgacaacaaacctctctctccggaaacctggcagcatctgaaaggcctggtgaccaggcagctttccggcaaacgtctgttcgttgtcgacgctttctgtggtgcgaacccggatactcgtctttccgtccgtttcatcaccgaagtggcctggcaggcgcattttgtcaaaaacatgtttattcgcccgagcgatgaagaactggcaggtttcaaaccagactttatcgttatgaacggcgcgaagtgcactaacccgcagtggaaagaacagggtctcaactccgaaaacttcgtggcgtttaacctgaccgagcgcatgcagctgattggcggcacctggtacggcggcgaaatgaagaaagggatgttctcgatgatgaactacctgctgccgctgaaaggtatcgcttctatgcactgctccgccaacgttggtgagaaaggcgatgttgcggtgttcttcggcctttccggcaccggtaaaaccaccctttccaccgacccgaaacgtcgcctgattggcgatgacgaacacggctgggacgatgacggcgtgtttaacttcgaaggcggctgctacgcaaaaactatcaagctgtcgaaagaagcggaacctgaaatctacaacgctatccgtcgtgatgcgttgctggaaaacgtcaccgtgcgtgaagatggcactatcgactttgatgatggttcaaaaaccgagaacacccgcgtttcttatccgatctatcacatcgataacattgttaagccggtttccaaagcgggccacgcgactaaggttatcttcctgactgctgatgctttcggcgtgttgccgccggtttctcgcctgactgccgatcaaacccagtatcacttcctctctggcttcaccgccaaactggccggtactgagcgtggcatcaccgaaccgacgccaaccttctccgcttgcttcggcgcggcattcctgtcgctgcacccgactcagtacgcagaagtgctggtgaaacgtatgcaggcggcgggcgcgcaggcttatctggttaacactggctggaacggcactggcaaacgtatctcgattaaagatacccgcgccattatcgacgccatcctcaacggttcgctggataatgcagaaaccttcactctgccgatgtttaacctggcgatcccaaccgaactgccgggcgtagacacgaagattctcgatccgcgtaacacctacgcttctccggaacagtggcaggaaaaagccgaaaccctggcgaaactgtttatcgacaacttcgataaatacaccgacacccctgcgggtgccgcgctggtagcggctggtccgaaactgtaa

SEQ ID NO: 82867 - protein, 540 aa, Escherichia coli
MRVNNGLTPQELEAYGISDVHDIVYNPSYDLLYQEELDPSLTGYERGVLTNLGAVAVDTGIFTGRSPKDKYIVRDDTTRDTFWWADKGKGKNDNKPLSPETWQHLKGLVTRQLSGKRLFVVDAFCGANPDTRLSVRFITEVAWQAHFVKNMFIRPSDEELAGFKPDFIVMNGAKCTNPQWKEQGLNSENFVAFNLTERMQLIGGTWYGGEMKKGMFSMMNYLLPLKGIASMHCSANVGEKGDVAVFFGLSGTGKTTLSTDPKRRLIGDDEHGWDDDGVFNFEGGCYAKTIKLSKEAEPEIYNAIRRDALLENVTVREDGTIDFDDGSKTENTRVSYPIYHIDNIVKPVSKAGHATKVIFLTADAFGVLPPVSRLTADQTQYHFLSGFTAKLAGTERGITEPTPTFSACFGAAFLSLHPTQYAEVLVKRMQAAGAQAYLVNTGWNGTGKRISIKDTRAIIDAILNGSLDNAETFTLPMFNLAIPTELPGVDTKILDPRNTYASPEQWQEKAETLAKLFIDNFDKYTDTPAGAALVAAGPKL

SEQ ID NO: 82868 - DNA, 2343 bp, Arabidopsis thaliana
  CDS (179)..(2128)
atcattttgtatcatcccttgaaaacgttaaatgatcttctcctccgatcattagtctctttaatctttctcagcctcttcttgttcgtgatctctcttcctccggaaaaagatgtcggccggtaacggaaatgctactaacggtgacggagggtttagtttccctaaaggaccggtgatgccgaagataacgaccggagcagcaaagagaggtagcggagtctgccacgacgatagtggtccgacggtgaatgccacaaccatcgatgagcttcattcgttacagaagaaacgttctgctcctaccacaccgatcaaccaaaacgccgccgctgcttttgccgccgtctccgaggaggagcgtcagaagattcagcttcaatctatcagtgcatcgttagcatcgttaacgagagagtcaggaccaaaggtggtgagaggagatccggcggagaagaagaccgatggttcaactactccggcgtacgctcacggccaacatcattctatcttttctccggctactggtgctgtcagtgatagctccttgaagtttactcacgtcctctacaatctttcgcctgcagagctttatgagcaagctattaagtatgagaaaggttcgtttatcacttctaatggagctttggcgacgctttctggtgctaagactggtcgtgctcccagagataagcgtgttgttagagatgctactactgaggatgagctttggtggggaaagggttcgccgaatatcgaaatggatgaacatactttcatggtgaacagagaaagagctgttgattacttgaattccttggaaaaggtctttgtcaatgaccaatacttaaactgggatccagagaacagaatcaaagtcaggattgtctcagctagagcttaccattcattgtttatgcacaacatgtgtatccgaccaactcaggaggagcttgagagctttggtactccggattttactatatacaatgctgggcagtttccatgtaatcgttacactcattacatgacttcgtccactagcgtagaccttaatctggctaggagggaaatggttatacttggtactcagtatgctggggaaatgaagaagggtcttttcagtgtgatgcattaccttatgcctaagcgtcgtattctctcccttcattctggatgcaatatgggaaaagatggagatgttgctctcttctttggactttcaggtaccgggaagacaacgctgtctactgatcacaacaggtatcttattggagatgatgagcattgttggactgagactggtgtttcgaacattgagggtgggtgctatgctaagtgtgttgatctttcgagggagaaggagcctgatatctggaacgctatcaagtttggaacagttttggaaaatgttgtgtttgatgagcacaccagagaagtggattactctgataaatctgttacagagaacacacgtgctgcctacccaattgagttcattccaaatgcgaaaataccttgtgttggtccacacccgacaaatgtgatacttctggcttgtgatgcctttggtgttctcccacctgtgagcaagctgaatctggcacaaaccatgtaccacttcatcagtggttacactgctctggttgctggcacagaggatggtatcaaggagccaacagcaacattctcagcttgctttggtgcagctttcataatgttgcatcccacaaagtatgcagctatgttagctgagaagatgaagtcacaaggtgctactggttggctcgtcaacactggttggtctggtggcagttatggtgttggaaacagaatcaagctggcatacactagaaagatcatcgatgcaatccattcgggcagtctcttgaaggcaaactacaagaaaaccgaaatctttggatttgaaatcccaactgagatcgaagggataccttcagagatcttggaccccgtcaactcctggtctgataagaaggcacacaaagatactctggtgaaactgggaggtctgttcaagaagaacttcgaggtttttgctaaccataagattggtgtggatggtaagcttacggaggagattctcgctgctggtcctatcttttagaaaaaccaaactctgaatgatgttgtcgaaaagaaagaaagatctactattattaagaagaataaaatgagactttgtgtttttctttgctgtgataatctctctgaataatagagagaatttaatgttccaaatgtggtgcgatatggataatgatgatgactatatgtaatttattactatccatcgtcatatatttttgttgggcctttgcc

SEQ ID NO: 82869 - protein, 649 aa, Arabidopsis thaliana
MPKITTGAAKRGSGVCHDDSGPTVNATTIDELHSLQKKRSAPTTPINQNAAAAFAAVSEEERQKIQLQSISASLASLTRESGPKVVRGDPAEKKTDGSTTPAYAHGQHHSIFSPATGAVSDSSLKFTHVLYNLSPAELYEQAIKYEKGSFITSNGALATLSGAKTGRAPRDKRVVRDATTEDELWWGKGSPNIEMDEHTFMVNRERAVDYLNSLEKVFVNDQYLNWDPENRIKVRIVSARAYHSLFMHNMCIRPTQEELESFGTPDFTIYNAGQFPCNRYTHYMTSSTSVDLNLARREMVILGTQYAGEMKKGLFSVMHYLMPKRRILSLHSGCNMGKDGDVALFFGLSGTGKTTLSTDHNRYLIGDDEHCWTETGVSNIEGGCYAKCVDLSREKEPDIWNAIKFGTVLENVVFDEHTREVDYSDKSVTENTRAAYPIEFIPNAKIPCVGPHPTNVILLACDAFGVLPPVSKLNLAQTMYHFISGYTALVAGTEDGIKEPTATFSACFGAAFIMLHPTKYAAMLAEKMKSQGATGWLVNTGWSGGSYGVGNRIKLAYTRKIIDAIHSGSLLKANYKKTEIFGFEIPTEIEGIPSEILDPVNSWSDKKAHKDTLVKLGGLFKKNFEVFANHKIGVDGKLTEEILAAGPIF

SEQ ID NO: 82870 - DNA, 2013 bp, Arabidopsis thaliana
  CDS (283)..(2013)
atggcgggaaacggaaacgaaagtaccggtggagacttcagtttctcggctgcggcggcccgtgatgcgcttccgaggatcacgactgagaagggcggcaaatctccagggccggcagacgtctgccaggatgacatcgcaccgcgggtcaactttcagaccatcgacgagcttcacagtctccagaagaaacgatctgcccctaccactcctcttagagatggcagcgccagcggagtcagcggaactagtggtccgactactcctgtctccagcgagaccatgcttcaatccgtcagtgcatcgttggcttcgttgacgagagagacaggaccgaagttaataagaggagatccgacttcggcagctaaagtagcacacgtgccagtgactcctacgtcacttccggctgctgacgtcagcgacagtggcttgaagttcactcacatccttcacaacctctctcccgccgagttgtacgagcaagcgataaagtttgagaagggatcgtttgtgacatcgaccggtgcgttggctacattgtctggagccaaaaccggtcggtctcctaaagacaagcgtgtggttaaggatgataccactgaggccgaactctggtggggaaaaggatcaccaaacattgaaatggatgaaaaaacttttttggtgaaccgagagagagctgttgattacttaaactccttggacaaggtgtttgtgaatgatcaatacctaaactgggatccagagaacaaaatcaaagtgagaattgtttcagcaagagcttaccattcactattcatgcacaacatgtgtatccgtccaacacctgaggagttagagaatttcgggacacccgatttcacgatttacaacgcggggaaattcccgtgtaaccgtttcactcattacatgacatcttcgacgagtgtggacataaacctaggaagaagagagatggtgattctaggtacccaatatgctggagaaatgaagaaaggactctttggtgtgatgcattatttgatgcctaagagaaagattttgtctcttcactctggttgtaacatgggcaaagatggagatgttgctctctttttcggactctctggtaccggaaagactacgttgtcgactgaccataaccggtatttgatcggagatgatgaacattgttggagtgaggctggagtttcgaatatcgaaggtggttgttacgcgaaatgcattgatttggctagggacaaagagcctgatatctggaacgctatcaagtttggaaccgttttggagaatgttgtgtttgatgagcatacacgagaagtggattacactgacaaatcagtgacggagaacacacgtgcggcttatccgatagagtacattccaaactcgaagataccgtgcgttggaccacacccgaagaacgtgatcctattggcttgtgacgccttcggtgtgttgccgccaatcagcaagctcaatcttgctcagactatgtaccatttcatcagtggctacactgctctcgttgcaggaacagaggaaggagttaaggaacctcgagcgacattctcagcttgttttggtgctgctttcattatgctacacccaaccaagtacgctgctatgttggctgagaaaatgcaggctcaaggagccaccggttggcttgttaacaccggttggtccggtggaagctacggaactggaagccgaatcaagttggcgtatacacgaaagataatcgatgctatacattcgggtagtctactgaatgcaagttaccgtaaaacagatatttttggtttggagattccaaatgaagtagaaggagttccttctgagatactggaacctattaatgcatggcctgataaaatggcttatgaggacacattgttgaaattggctggtttgtttaaaagcaattttgagacattcacaagtcataagattggtgatgatggaaaattgactgaagagattcttgcagctggtcctaacttctaa

SEQ ID NO: 82871 - protein, 576 aa, Arabidopsis thaliana
MLQSVSASLASLTRETGPKLIRGDPTSAAKVAHVPVTPTSLPAADVSDSGLKFTHILHNLSPAELYEQAIKFEKGSFVTSTGALATLSGAKTGRSPKDKRVVKDDTTEAELWWGKGSPNIEMDEKTFLVNRERAVDYLNSLDKVFVNDQYLNWDPENKIKVRIVSARAYHSLFMHNMCIRPTPEELENFGTPDFTIYNAGKFPCNRFTHYMTSSTSVDINLGRREMVILGTQYAGEMKKGLFGVMHYLMPKRKILSLHSGCNMGKDGDVALFFGLSGTGKTTLSTDHNRYLIGDDEHCWSEAGVSNIEGGCYAKCIDLARDKEPDIWNAIKFGTVLENVVFDEHTREVDYTDKSVTENTRAAYPIEYIPNSKIPCVGPHPKNVILLACDAFGVLPPISKLNLAQTMYHFISGYTALVAGTEEGVKEPRATFSACFGAAFIMLHPTKYAAMLAEKMQAQGATGWLVNTGWSGGSYGTGSRIKLAYTRKIIDAIHSGSLLNASYRKTDIFGLEIPNEVEGVPSEILEPINAWPDKMAYEDTLLKLAGLFKSNFETFTSHKIGDDGKLTEEILAAGPNF

SEQ ID NO: 82872 - DNA, 2252 bp, Oryza sativa
  CDS (68)..(1981)
gattctgaaaacttcagtctttctctcttcagcatctctactctcgctccatttctaagggatcgaaatgatggaggcgaaagacgggcaagcatggctggggacgaacggatacggcagcaggagggaggaagacggcgtgtgccacgacgacagcgcgacaccggtgagggcgaacactgtcgacgagctacactcgctgcagaggaagcctcaggtagtggaggatcgccacaggctgcagcttcagtccatcagtgcgtctttggcatcgatgacatgtgggattgggccaaaactcgtcaacggtgacccagcaaggaaaaaagaaatggctggcaaggctgtgacacatcaccaacaccatatcactgtccccacgatcactgtgagcgacagtgacctcaagttcacccatgttctgtacaacttatccccttctgaactttatgagcatgcaatcaaatatgagaaagggtcattcatcacatccagtggggcgttagcgacgctatcaggagcaaagaccggtcgatcacctagggacaagcgtgttgtcaaggatgaaacaacagatgatctgtggtggggcaagggatcaccaaacattgaaatggacgagcaaacctttctgatcaacagggagagagctgttgactacttgaactcccttgataaggtgtttgttaatgatcagttcctaaactgggaccccaacaataggataaaagttcgaatcatctctgcgagggcctaccattctctcttcatgcacaacatgtgcatccggccaacatacgaggaactagagaattttggcgagcccgacttcaccatctacaatgctggacagttcccgtgcaaccgttacacgcattacatgacatcgtcaactagcatagacttaaatcttaagcggagagaaatggtcatcctgggaacacaatatgctggagagatgaagaaaggcctcttcagtgtgatgcactacctcatgcccaaaaagcagatcctctcgttgcactctggctgcaacatgggcagagggggtgatgtagccctgttttttggattgtcaggtactggaaagacaactctgtcaacagacaggaataggatcttaattggtgatgatgaacactgctggagtgataatggtatctctaacattgagggcggctgctatgctaaatgcatagatctttctcaggagaaagaacctgacatttgggatgcaatcaagtttggcacagtgttggagaatgttgttttcgatgagcactcccgtgaagttgattatacagaaaaatctgtcacagagaatacccgtgctgcttaccctattgaatacatagctaatgctaagataccatgtgttgggccacacccaaaggatgttatcctacttgcatgtgatgcatttggtgtcctccctcctgtcagcaagttgagccatgcacaaaccatgtaccattttatcagtggctacactgcattggtcgctggaactgaagatggtatcaaggagccacaggctacattttctgcctgctttggtgcagcttttataatgctccacccaactcggtacgctgccatgctggcagataagatgaacaagcatggagctaccggatggcttgtcaacactggttggatcggggggagttatggtgtaggtgagcgaatcagcttggcctacacaaggaaaatcatcgatgccattcactcgggtgagcttttggctagaagctacaaaaagacagatgtctttggactagacatccccacaaaagtggaaggagttccatctgaattgcttgacccaataaatacctgggaagacaaagactcatacaagttgacacttctaaagctgtcagatctgttcaagagaaatttcaaggtatttgcaaattacaagaaaggtggtgttagtgatctggctgatgagattgctgctgcaggaccaaatttctgattttaattgaatagtagtagtatgtcttaatgtataccaaataaaagggatttttttatgttcctcgaggatgtatcgcaaggtaccacttattttagtgtaaatttttatacctcatggtacttctctagtgtaaagtaccaaaaagtatcataaattaacactaaaatatggtatctctcgttacctagtcttgtacggtaaaactgaacaaaatgcccattttgaggatggtgacatatatatattaaaagctatttcagagtgatgt

SEQ ID NO: 82873 - protein, 637 aa, Oryza sativa
MMEAKDGQAWLGTNGYGSRREEDGVCHDDSATPVRANTVDELHSLQRKPQVVEDRHRLQLQSISASLASMTCGIGPKLVNGDPARKKEMAGKAVTHHQHHITVPTITVSDSDLKFTHVLYNLSPSELYEHAIKYEKGSFITSSGALATLSGAKTGRSPRDKRVVKDETTDDLWWGKGSPNIEMDEQTFLINRERAVDYLNSLDKVFVNDQFLNWDPNNRIKVRIISARAYHSLFMHNMCIRPTYEELENFGEPDFTIYNAGQFPCNRYTHYMTSSTSIDLNLKRREMVILGTQYAGEMKKGLFSVMHYLMPKKQILSLHSGCNMGRGGDVALFFGLSGTGKTTLSTDRNRILIGDDEHCWSDNGISNIEGGCYAKCIDLSQEKEPDIWDAIKFGTVLENVVFDEHSREVDYTEKSVTENTRAAYPIEYIANAKIPCVGPHPKDVILLACDAFGVLPPVSKLSHAQTMYHFISGYTALVAGTEDGIKEPQATFSACFGAAFIMLHPTRYAAMLADKMNKHGATGWLVNTGWIGGSYGVGERISLAYTRKIIDAIHSGELLARSYKKTDVFGLDIPTKVEGVPSELLDPINTWEDKDSYKLTLLKLSDLFKRNFKVFANYKKGGVSDLADEIAAAGPNF

SEQ ID NO: 82874 - DNA, 2473 bp, Oryza sativa
  CDS (140)..(2131)
gcacgagggtcctgtcatcttgtacccggactccgcccaatacgccccacacccctccgctcctgtcctgtcatcttgtacactatcgcgttgctgatctcctcctcgactgcctcgtttcgcgcgaccggagacggccatggcgagcacgccgaacgggctggcgcggatcgagacgcacggggcgaagacgaagaagcacgagaacgggatatgccacgacgacagctcggcgccggtgcgggcgcagaccatcgacgagctccactcgctgcagcggaagcggtcggcgcccaccacgcccatcaaggacggcgcctcctcgcccttcgccgccgccctctccgaggaggagcgccagcgccagcagctccagtccatcagcgcgtcgttggcgtcgctgacgcgtgagaccgggccgaaggtcgtcaggggagatccggcgaggaagggcgaggccgcggcgaagggcgcgccgtcgccgcacccgcagccggtgcaccaccaccacccgcacgtcaccccgaccatcgccgtcagcgacagctccctcaagttcacccatgtgctctacaacctctcgcctgctgagctgtacgagcaggcgatcaagtacgagaaggggtcgttcatcacgtccaccggcgcgctggcgacgctgtccggcgccaagaccggccggtcgccgagggacaagcgcatcgtcaaggatgaggcctccgcgcaggagctttggtggggcaagggttcgcccaacatcgagatggacgagcacactttcctcaccaacagggagagggccgtcgactacctcaactcccttgacaaggtgtttgtgaacgaccagttcctgaactgggacacggagaaccggatcaaagtccgtatcatctcggccagggcgtaccactcgctcttcatgcacaacatgtgcatccggccgacggaggaggagctggaggagttcggcacgccggacttcaccatatacaacgccgggcagttcccctgcaaccggtacacgcactacatgacgtcgtcgacgagcgtagacatcaacctcgctaggagggagatggtgatcctcggcacgcagtacgccggggagatgaagaaggggctcttcggggtgatgcactacctcatgcccaggaggggcatcctctccctgcactccggctgcaacatgggcaagcagggcgacgtcgccctcttctttggactgtcaggtactggaaagactactctgtcaactgaccacaacaggctgctgatcggcgacgatgagcactgctggagtgacactggcgtgtccaacatcgagggtggttgctatgccaagtgcatagacttgtcacaggagaaagagcctgatatttggaatgccatcaagtttgggaccgtgttggagaatgtcgtctttgatgagcacacccgtgaagttgattacaccgacaaatctgtcaccgagaacacgcgcgctgcttaccctatcgagtacatccccaacgccaagataccgtgcgtcgggccacacccgaagaacgtcattctcctggcatgcgacgctttcggcgtcctccctcctgtcagcaagctaaaccttccacagaccatgtaccacttcatcagtggctacactgctctggttgccggcacggaggatggcatcaaggagccgcaggctacgttctctgcttgcttcggtgcagcgttcatcatgctccacccgaccaagtacgccgccatgctcgccgagaagatgcagaagtatggcgccaccgggtggctcgtcaacaccggttggtccggtggaaggtacggagttggcaagcggatcaggctgccgtataccaggaagatcatcgacgccatccactccggtgagctcctcaccgccaactacaagaagacggaggtgtttggcctggagatccccactgaaatcgacggcgtcccgtctgaaatcctcgacccgatcaacacctggacggacaagggcgcgtacaaggagacgctcctgaagctggctggcctgttcaagaagaacttcgaggtgttcgccaactacaagatcgggggagacagcagcctgacagacaagatcctcgctgctggaccaaacttttgagttactgaagaataaaaaatatgcagataaagaacgcgatgaagctagtcagttggttacaataaagaagtgggtctatgcgtgtttgccaatgatgatgacgaaaatgttggatcgatgtgcagctaccggtagagtttagctagcttcctataagtttcatgcgtgtctgttaggttctgtcagtttgtctagcttgatggtgtgtatgcagtatgctccattcccccttcccctgtacacatctctattttctgaattggaatttgaaagcatcttgatttgatcaaaaaaaaaaaaaaaaaaaaaaaaaaaaaataccaaaaaaaaaaaaaaaaaaaa

SEQ ID NO: 82875 - protein, 663 aa, Oryza sativa
MASTPNGLARIETHGAKTKKHENGICHDDSSAPVRAQTIDELHSLQRKRSAPTTPIKDGASSPFAAALSEEERQRQQLQSISASLASLTRETGPKVVRGDPARKGEAAAKGAPSPHPQPVHHHHPHVTPTIAVSDSSLKFTHVLYNLSPAELYEQAIKYEKGSFITSTGALATLSGAKTGRSPRDKRIVKDEASAQELWWGKGSPNIEMDEHTFLTNRERAVDYLNSLDKVFVNDQFLNWDTENRIKVRIISARAYHSLFMHNMCIRPTEEELEEFGTPDFTIYNAGQFPCNRYTHYMTSSTSVDINLARREMVILGTQYAGEMKKGLFGVMHYLMPRRGILSLHSGCNMGKQGDVALFFGLSGTGKTTLSTDHNRLLIGDDEHCWSDTGVSNIEGGCYAKCIDLSQEKEPDIWNAIKFGTVLENVVFDEHTREVDYTDKSVTENTRAAYPIEYIPNAKIPCVGPHPKNVILLACDAFGVLPPVSKLNLPQTMYHFISGYTALVAGTEDGIKEPQATFSACFGAAFIMLHPTKYAAMLAEKMQKYGATGWLVNTGWSGGRYGVGKRIRLPYTRKIIDAIHSGELLTANYKKTEVFGLEIPTEIDGVPSEILDPINTWTDKGAYKETLLKLAGLFKKNFEVFANYKIGGDSSLTDKILAAGPNF

SEQ ID NO: 82876 - DNA, 2255 bp, Glycine max
  CDS (62)..(2080)
gaattaagattgcattgcattaggctttcacaacacctcagcgtcactgtaccagttggaaatggagacaataacagagaacggatcagatggtgtgagtttggcaagaaatacatccaacaacgcccgtcgagggttgccaatgatccaaacaaacatgaagccaacggattcggaattccaagtgtgccacgacgacagcaccccgccggtcagagcccaaaccattcacgagctccattctctgcagaagaaaaagtcaaccccttccactcccctctcagcaacgcaaggccccttcgccactgtttccgatgaggaacgccagaaacagcaactccaatcaatcagtgcgtcgttggcgtcgttgacgagggagtcagggcctaaggtggtgaaaggagacccagccactaaggcagagaaggggacacatgttcatcaccatccgcaaccacattactttgcttcaacggcgtttgatgtcagtgacagtgcgctcaaattcacccacgtcctctacaatctctcccccgctgagctgtatgagcaagcgattaagcacgagaaaggatcattcataacggcaacgggagcgttagctacactttctggagcaaaaacgggacgctctccccgagacaaacgggttgtcagggacgacaccaccgagcatgacctctggtggggaaagggctcgcccaatattgaaatggacgaacataccttcttaatcaacagagaaagagcagttgattacttgaactcccttgaaaaggtttatgtgaatgatcaatttctgaattgggatccagaacacagaatcaaagtccggatagtatctgcaagagcttatcactccctatttatgcacaatatgtgcatccgacccactcctgaagagctagaggaatttggaactccagacttcactatatacaatgcaggacagttcccttgtaatcgttacacacactacatgacttcatcaactagtattgacatcaacattgcaaggaaagaaatggtcatccttggcacacaatatgctggggaaatgaagaaaggtctctttggtttaatgcactacctcatgcccaagcgcaatattctctccctacattctgggtgcaatatgggcaaagatggcgatgttgcactcttttttggattatcaggtactggaaagacaactctgtctaccgatcataaccggtacttaattggagatgatgagcattgctggagtgaaaatggagtggcaaatattgaagggggttgctatgcaaagtgtgtcgatctttcaaaggataaagaaccagacatctggaatgccatcaaatttgggacagtactcgaaaatgttgtttttgatgagcatactcgagaggtagatttctctgacaaatctgtgaccgagaacactcgtgcagcatatcctattgagtacatacccaatgctaagataccgtgtgttgctccccatgcaaagaatgtcatccttctagcttgtgatgcatttggggtgctccccccagtaagcaagctgagcttggcccaaacaatgtaccatttcatcagtggctacacagccctggttgctgggacagaggatggtataaaagaaccacaggctacattctctgcttgtttcggggcagcgtttataatgatgcaccctaccaaatatgcagcaatgctagccgaaaagatgcagaagcatggggctactggatggcttgtcaatactggctggtcaggaggaagttatggattaggcaatcggattaagttagcgtatactaggaaaatcattgatgctattcactctgggagccttttgaatgcacagtacactaagactgaagtgtttgggcttgagatcccaacagcactagagggagtcccttctgaaatcttggaccctgtgaatacttggtctgacaagaaggcctatcaagatacacgcttgaaactagcaagcttattcaagaagaattttgatggattcacgacctacaagataggaggggatcagaagttgactgaagagattgtctctgctggtcctatattctgatgagagcatttcctatttagcgaaaaaaaaaatgaagtccaaaagcattcggttgattatttctacttaaaggttttcactgtatttagcttgcttgactataagacgatccctttattattgacacttacgagacaatacacaaatctgttattttgcgagcgtttaattattc

SEQ ID NO: 82877 - protein, 672 aa, Glycine max
METITENGSDGVSLARNTSNNARRGLPMIQTNMKPTDSEFQVCHDDSTPPVRAQTIHELHSLQKKKSTPSTPLSATQGPFATVSDEERQKQQLQSISASLASLTRESGPKVVKGDPATKAEKGTHVHHHPQPHYFASTAFDVSDSALKFTHVLYNLSPAELYEQAIKHEKGSFITATGALATLSGAKTGRSPRDKRVVRDDTTEHDLWWGKGSPNIEMDEHTFLINRERAVDYLNSLEKVYVNDQFLNWDPEHRIKVRIVSARAYHSLFMHNMCIRPTPEELEEFGTPDFTIYNAGQFPCNRYTHYMTSSTSIDINIARKEMVILGTQYAGEMKKGLFGLMHYLMPKRNILSLHSGCNMGKDGDVALFFGLSGTGKTTLSTDHNRYLIGDDEHCWSENGVANIEGGCYAKCVDLSKDKEPDIWNAIKFGTVLENVVFDEHTREVDFSDKSVTENTRAAYPIEYIPNAKIPCVAPHAKNVILLACDAFGVLPPVSKLSLAQTMYHFISGYTALVAGTEDGIKEPQATFSACFGAAFIMMHPTKYAAMLAEKMQKHGATGWLVNTGWSGGSYGLGNRIKLAYTRKIIDAIHSGSLLNAQYTKTEVFGLEIPTALEGVPSEILDPVNTWSDKKAYQDTRLKLASLFKKNFDGFTTYKIGGDQKLTEEIVSAGPIF

SEQ ID NO: 82878 - DNA, 2255 bp, Glycine max; identical to SEQ ID NO: 82876
  CDS (158)..(2080)

SEQ ID NO: 82879 - protein, 640 aa, Glycine max
MKPTDSEFQVCHDDSTPPVRAQTIHELHSLQKKKSTPSTPLSATQGPFATVSDEERQKQQLQSISASLASLTRESGPKVVKGDPATKAEKGTHVHHHPQPHYFASTAFDVSDSALKFTHVLYNLSPAELYEQAIKHEKGSFITATGALATLSGAKTGRSPRDKRVVRDDTTEHDLWWGKGSPNIEMDEHTFLINRERAVDYLNSLEKVYVNDQFLNWDPEHRIKVRIVSARAYHSLFMHNMCIRPTPEELEEFGTPDFTIYNAGQFPCNRYTHYMTSSTSIDINIARKEMVILGTQYAGEMKKGLFGLMHYLMPKRNILSLHSGCNMGKDGDVALFFGLSGTGKTTLSTDHNRYLIGDDEHCWSENGVANIEGGCYAKCVDLSKDKEPDIWNAIKFGTVLENVVFDEHTREVDFSDKSVTENTRAAYPIEYIPNAKIPCVAPHAKNVILLACDAFGVLPPVSKLSLAQTMYHFISGYTALVAGTEDGIKEPQATFSACFGAAFIMMHPTKYAAMLAEKMQKHGATGWLVNTGWSGGSYGLGNRIKLAYTRKIIDAIHSGSLLNAQYTKTEVFGLEIPTALEGVPSEILDPVNTWSDKKAYQDTRLKLASLFKKNFDGFTTYKIGGDQKLTEEIVSAGPIF

SEQ ID NO: 82880 - DNA, 2245 bp, Urochloa panicoides
  CDS (45)..(1925)
cctcggcggccggcgcacgtcgctgctcccgacgctcgaacgagatggcgtcgccgaacggtggtgtcacgacctacgactaccacgacagcgacagcgcggcgccggtgaacgcgcagaccatcgaagagctgcattcgctgcagcggaaggctgccaccacgaccaaggatggcgcatcgcccctgcagtccatcagcgcgtcattggcgtctctggcacgtgaatatggccccaacctcgtcaagggtgacccggaagcgaccaagggcgcgccgccggtgccgataaagcaccagcagccctccgccgccgctgccaccatcgccgccagcgacagctccctcaagttcacccatgtcctctacaacctctcccccgctgagttgtacgagcaggctttcggccaaaagaagagttcgttcatcacgtcgaccggcgcgctggccacgctgtccggcgccaagaccggccggtcgcccagggacaagcgtgtcgtcaaggacgagaccacctcacaggagctctggtggggcaagggctcgcccaacatcgagatggacgagcgccagttcgtgatcaacagggagcgggccctggactacctcaactcactggacaaggtgtacgtcaacgaccagttcctcaactgggactcggagaaccgcatcaaggtccgcatcatcacctccagggcgtaccacgccctctttatgcacaacatgtgcatccggcccacggaagaggagctggagagcttcggcacgccggacttcaccatttacaacgccggggagttccccgccaaccgttacgccaactacatgacgtcgtcgacgagcataaacatcagcctcgctaggagggagatggtaatcctgggcacgcagtacgccggggagatgaagaaggggctctttggcgtcatgcactacctcatgcccaagcgaggcatcctctcgctgcactccgggtgcaacatgggcaaggagggtgacgtcgccctcttctttgggctctcaggtaccgggaagacgacgctgtcaactgaccacaataggctcctgatcggtgatgacgagcactgctggagcgacaatggcgtctccaacattgagggaggttgctatgccaagtgcattgacctgtcccaggagaaggaacctgatatctggaacgccatcaagtttggaactgtgctggagaacgtcgtcttcaacgagcgcactcgtgaagttgactacgccgacaaatctatcaccgagaacacccgggccgcctacccgatcgagttcatccccaacgccaagatcccgtgcgtcgggccgcaccccaagaacgtcatcctcctggcgtgcgacgcgtacggcgtgctcccgccggtgagcaagctcaacctggcgcagaccatgtaccacttcatcagcggctacaccgccatcgtggccggcacagaggacggcgtcaaggagccgacggccacattctcggcctgcttcggcgcggccttcatcatgtaccaccccaccaagtacgcagccatgctcgccgagaagatgcagaagtacggcgccaccgggtggcttgtcaacactggctggtccggcggcaggtacggtgtgggcaacaggatcaagctgccgtacaccaggaagatcatcgacgccatccactccggcgagctcctcaacgccagctacaagaagaccgaggtgttcgggctggagatccccaccgcgatcaacggcgtgccgtcggaaattctcgaccccgtcaacacctggacggacaaggccgcgtacaaggagacgctcctgaagcttgccgggctcttcaagaacaacttcgaggtgttcgccagctacaagatcgggaacaacaacagcctgacagaacagatcctcgccgcagcgcccaacttctgattccaagcaatggatctggaacggcgaggcgatggagttggttcagaataaaccggtggtgcgtgcgtgcgtgtgttacgatgatgatgatggcaaaaaaaaaaactgttggactgattatgtgccaacatgcagtagaccagctctgtatgctatcatgtgtgtgtggtggtgttacctgtaaggtttgttctatcagctggttcggcggcctggttctggtgtaaatctgggcgtgctttgcatcttgcccgtgtattccctcttgtttcagaatttgaatatatactatcttatttccaaaaaaaaaaaaaaaaaaa

SEQ ID NO: 82881 - protein, 626 aa, Urochloa panicoides
MASPNGGVTTYDYHDSDSAAPVNAQTIEELHSLQRKAATTTKDGASPLQSISASLASLAREYGPNLVKGDPEATKGAPPVPIKHQQPSAAAATIAASDSSLKFTHVLYNLSPAELYEQAFGQKKSSFITSTGALATLSGAKTGRSPRDKRVVKDETTSQELWWGKGSPNIEMDERQFVINRERALDYLNSLDKVYVNDQFLNWDSENRIKVRIITSRAYHALFMHNMCIRPTEEELESFGTPDFTIYNAGEFPANRYANYMTSSTSINISLARREMVILGTQYAGEMKKGLFGVMHYLMPKRGILSLHSGCNMGKEGDVALFFGLSGTGKTTLSTDHNRLLIGDDEHCWSDNGVSNIEGGCYAKCIDLSQEKEPDIWNAIKFGTVLENVVFNERTREVDYADKSITENTRAAYPIEFIPNAKIPCVGPHPKNVILLACDAYGVLPPVSKLNLAQTMYHFISGYTAIVAGTEDGVKEPTATFSACFGAAFIMYHPTKYAAMLAEKMQKYGATGWLVNTGWSGGRYGVGNRIKLPYTRKIIDAIHSGELLNASYKKTEVFGLEIPTAINGVPSEILDPVNTWTDKAAYKETLLKLAGLFKNNFEVFASYKIGNNNSLTEQILAAAPNF

SEQ ID NO: 82882 - DNA, 2107 bp, Urochloa panicoides
  CDS (1)..(1866)
atggccccctccgtgatggcgtcgtcggccaccaccgtcgctcccttccaggggctcaagtccaccgccggcatgcccgtcgcccgccgctccggcaactccagcttcggcaacgtcagcaatggcggcaggatcaggtgcatgcagtctagatctctggcacgtgaatatggccccaacctcgtcaagggtgacccggaagcgaccaagggcgcgccgccggtgccgataaagcaccagcagccctccgccgccgctgccaccatcgccgccagcgacagctccctcaagttcacccatgtcctctacaacctctcccccgctgagttgtacgagcaggctttcggccaaaagaagagttcgttcatcacgtcgaccggcgcgctggccacgctgtccggcgccaagaccggccggtcgcccagggacaagcgtgtcgtcaaggacgagaccacctcacaggagctctggtggggcaagggctcgcccaacatcgagatggacgagcgccagttcgtgatcaacagggagcgggccctggactacctcaactcactggacaaggtgtacgtcaacgaccagttcctcaactgggactcggagaaccgcatcaaggtccgcatcatcacctccagggcgtaccacgccctctttatgcacaacatgtgcatccggcccacggaagaggagctggagagcttcggcacgccggacttcaccatttacaacgccggggagttccccgccaaccgttacgccaactacatgacgtcgtcgacgagcataaacatcagcctcgctaggagggagatggtaatcctgggcacgcagtacgccggggagatgaagaaggggctctttggcgtcatgcactacctcatgcccaagcgaggcatcctctcgctgcactccgggtgcaacatgggcaaggagggtgacgtcgccctcttctttgggctctcaggtaccgggaagacgacgctgtcaactgaccacaacaggctcctgatcggtgatgacgagcactgctggagcgacaatggcgtctccaacattgagggaggttgctatgccaagtgcatcgacctgtccaaggagaaagaacctgatatctggaacgccatcacgtttggaacagtgctggaaaacgtcgtcttcaacgagcgcactcgtgaagttgactacgccgacaaatctatcaccgagaacacccgggccgcctacccgatcgagttcatccccaacgccaagatcccatgcgtcgggccgcaccccaagaacgtcatcctcctggcctgcgacgcgtacggcgtgctcccgccggtgagcaagctcaacctggcgcagaccatgtaccacttcatcagcggctacactgccatcgtcgccggcacggaggacggcgtcaaggagccgacggcgaccttctcggcctgcttcggcgcggccttcatcatgtaccaccccaccaagtacgccgccatgctcgccgagaagatgcagaagtacggccgcaccgggtggcttgtcaacaccggctggtccggcggcaggtacggtgtgggcaacaggatcaagctgccgtacaccaggaagatcatcgacgccatccactccggcgagctcctcaccgccaactacaagaagaccgaggtgttcgggctggagatccccaccgagatcaacggcgtgccgtcggaaatcctcgaccccgtcaacacctggacggacaaggccgcgtacaaggagactctcctgaagcttgccgggctcttcaagaacaacttcgaggtgttcgccagctacaagatcggggacgacaacagcctgaccgaacagatccttgccgcaggccccaacttctgattccaagcaatggatccggaacggcgaggcgttggagttggttcagaatgaaccagtggtgcgtgtgtgcgtgcgtgtgttacgatgatgatgatgatggcgaaaaaaaaactgttggactgatgagtgccaacatggagtagaccagctctgtatgctatcatgtgtgtgtggtgttgttaccttggtttgttctatctgggcgtggtcctggtgtaaatctgtatgcctgttcggcggc

SEQ ID NO: 82883 - protein, 621 aa, Urochloa panicoides
MAPSVMASSATTVAPFQGLKSTAGMPVARRSGNSSFGNVSNGGRIRCMQSRSLAREYGPNLVKGDPEATKGAPPVPIKHQQPSAAAATIAASDSSLKFTHVLYNLSPAELYEQAFGQKKSSFITSTGALATLSGAKTGRSPRDKRVVKDETTSQELWWGKGSPNIEMDERQFVINRERALDYLNSLDKVYVNDQFLNWDSENRIKVRIITSRAYHALFMHNMCIRPTEEELESFGTPDFTIYNAGEFPANRYANYMTSSTSINISLARREMVILGTQYAGEMKKGLFGVMHYLMPKRGILSLHSGCNMGKEGDVALFFGLSGTGKTTLSTDHNRLLIGDDEHCWSDNGVSNIEGGCYAKCIDLSKEKEPDIWNAITFGTVLENVVFNERTREVDYADKSITENTRAAYPIEFIPNAKIPCVGPHPKNVILLACDAYGVLPPVSKLNLAQTMYHFISGYTAIVAGTEDGVKEPTATFSACFGAAFIMYHPTKYAAMLAEKMQKYGRTGWLVNTGWSGGRYGVGNRIKLPYTRKIIDAIHSGELLTANYKKTEVFGLEIPTEINGVPSEILDPVNTWTDKAAYKETLLKLAGLFKNNFEVFASYKIGDDNSLTEQILAAGPNF

SEQ ID NO: 82884 - DNA, 2218 bp, Spartina anglica
  CDS (65)..(2041)
gttccattccgggacgccacccaaagcacgccgttcttttttcatcgaaatcagctcgagcgagatggcgaccccggacgcattggcgcggatcgagactaacgggaagaagagtcacgaggacgcggtgtgggacgacgacatctcggcgccggtgcgcgcgcagaacatcgacgagctgcactccctgcaaaagaagaggtcggcgcccaccacgcccatcaaggacggcgccgccgccgccttcgccgccgcactcaccgaggagcagcgccagaagcagcagctccagtccattagctcgtcgttggcatctctgacacgtgagaccggccccaaggtcctcaggggcgatccggccaggaagagcgaggcctccgtgaagagcacaccggcgccgagcccgcaggtgccggcgccgaaaccggccgcccccacaatcgccgtcagcgacagctccctcaagttcacacatgtgctctacaacctctcccctggcgacctgtacgagcatgcggtcaagtgcaatatggcttccttcatcacgtccactggcgcgctggcgacgctgtccggcgccaagaccgggcgctcgcccagggacaggcgcgtggtcaaggacgcggccgcggcgaaggacctgtggtggggcaagggatctccgaacatcgagatagacgagcacacgttcctcaccaacagggagagggccgtcgactacctcaactccctcgacaaggtgttcgtgaacgaccagttcctgaactgggacccggagaaccgcatcaaggtccgcatcatctctgccaggtcgtaccactccctcttcatgcacaacatgtgcatccgccccacggccgaggagctgaggaactttggcacgccggacttcaccatttacaacgccgggatgttcccgtgcaaccgttacacgaactacatgacatcatcgacgagcataaacatcaatctcgctaggagggagatggtcatcctgggcacccagtacgccggggagatgaagaaggggctcttcgccgtcatgcactacctcatgcccaaacgacaaatcctctccctccactccggatgcaacatgggcaaacacggtgacgtcgccctattctttgggctctcaggtaccgggaagacaacgctgtcaacagaccacaacaggctgttgatcggcgatgatgagcactgttggagtgacaacggcgtctccaacatcgaaggtgggtgctacgccaagtgtatagacctcgctcaggagaaggagcctgacatctggaacgccatcaagtttggaactgtgttggagaacgttgtgtttgatgagcgtactcgtgaggttgactacaccgataaatctgtcaccgagaacactcgtgctgcgtacccgatcgagtacatccccaacgcaaagataccgtgcgtcggaccgcacccgaagaacgtcatcctcctggcctgcgacgcgttcggtgtgctcccgcctgtcagcaagctcaaccttgcacagaccatgtaccatttcatcagcggctacactgctctggttgccggcacggaagaaggcatcaaggagccacaggccacgttctccgcctgcttcggtgcggcattcatcatgctccacccgaccaagtacgccgccatgctcgccgagaagatgcagaagtatggcgccaccgggtggcttgtgaacaccggctggtccggagggaggtacggcgttggcaagaggatcaagctgccgtacaccaggaagatcatcgacgccatccactccggcgagctcctcaccgccaactacaagaaaaccgaggtcttcggcctggagatccccaccgagatcaacggcgtgccgtccgaaatcctcgaccctatcaacacatggacggacaaggccgcgtacaaggaggcgctcatgaagctggccgggttgttcaagaacaacttcgaggtgttcgcaagctacaagatcggggacgacaacagcctgaccgacgagatcctcgccgcaggccccaacttctgatctgaagtggtgttgcactatatcagtagctgttgcagcggcgtacatagcttgtgctatgttagattacatcttgtcagcttgttcgactgggattgcgcttggctgcttgcagcattgtccatgtactctctccactttccgaaataaaaaatgatttcgaaactaaaaaaaaaa

SEQ ID NO: 82885 - protein, 658 aa, Spartina anglica
MATPDALARIETNGKKSHEDAVWDDDISAPVRAQNIDELHSLQKKRSAPTTPIKDGAAAAFAAALTEEQRQKQQLQSISSSLASLTRETGPKVLRGDPARKSEASVKSTPAPSPQVPAPKPAAPTIAVSDSSLKFTHVLYNLSPGDLYEHAVKCNMASFITSTGALATLSGAKTGRSPRDRRVVKDAAAAKDLWWGKGSPNIEIDEHTFLTNRERAVDYLNSLDKVFVNDQFLNWDPENRIKVRIISARSYHSLFMHNMCIRPTAEELRNFGTPDFTIYNAGMFPCNRYTNYMTSSTSININLARREMVILGTQYAGEMKKGLFAVMHYLMPKRQILSLHSGCNMGKHGDVALFFGLSGTGKTTLSTDHNRLLIGDDEHCWSDNGVSNIEGGCYAKCIDLAQEKEPDIWNAIKFGTVLENVVFDERTREVDYTDKSVTENTRAAYPIEYIPNAKIPCVGPHPKNVILLACDAFGVLPPVSKLNLAQTMYHFISGYTALVAGTEEGIKEPQATFSACFGAAFIMLHPTKYAAMLAEKMQKYGATGWLVNTGWSGGRYGVGKRIKLPYTRKIIDAIHSGELLTANYKKTEVFGLEIPTEINGVPSEILDPINTWTDKAAYKEALMKLAGLFKNNFEVFASYKIGDDNSLTDEILAAGPNF

SEQ ID NO: 82886 - DNA, 2208 bp, Zoysia japonica
  CDS (83)..(2044)
gcgtacaccgcgacacagacagagcacgccgttctcctcgtacgcggatcaacgaccaccgtgccgcacgcgcgccggcgagatggcgaccccgaacggcctggcccagatcgagacgaacgggaggaagaagcacgagaacgtggtgtgccacgacgacagcgctgcgccagtgcgcgcgcagaccatcgacgagctgcactccctgcagcggaagcgttcggcgcccagcacgcccaaggacagcgccgcctccgccttcgccgctgcgctcaccgaggagcagcgcgaggagcagcagctgcagtccatcagcgcgtcactggcgtctctgacgcgtgagaccggccccaaggtcgtcaggggagatccggccaggaagggtgaggcgtccgcgaagagcacgccggcgcaccaccaccagcaccccgccgcccccgccgtcgccgtcagcgacagctccctcaagtccacccatgtcctctccaacctctcgcctgccgagctgtacgagcaggcgatcaagtacgagaagggttcgttcatcacgtccacgggtgcgctggcgacgctgtccggcgcgaagaccggccgcgcgcccagggacaagcgcgtggtcaaggacgaggccgcggcgcgggagctgtggtggggcaaggggtcgccgaacatcgagatggacgagcacacgttcctcatcaacagggagagggccgtcgactacctcaactccctcgacaaggtgttcgtgaacgaccagttcctgaactgggacccggagaaccgcatcaaggtccgcatcatctccgccagggcgtaccactccctcttcatgcacaacatgtgcatccgcccgacggatgaggagctggagaacttcggcacgccggacttcaccatttacaacgccgggcagttcccttgtaaccgatacacgcactacatgacgtcgtcgtcgagcgtagccatcaacctggctaggagggagatggtgatcctgggcacgcagtacgccggggagatgaagaagggactcttcggcctcatgcactacctcatgcccaaacggcagatcctctcgctgcactccgggtgcaacatgggcaagggcggtgacgtcgccctcttcttcgggctgtcaggtactgggaagacgacgctatcgacagaccacaacaggcttctgatcggcgacgacgagcactgctggagcgacaatggcgtctccaacattgagggtgggtgctacgccaagtgtatagacctctctcgggagaaagagcctgacatctggaacgccatcaagtttggaaccgtgttggagaacgttgtgtttgacgagcgcacccgtgaagtcgactacaccgataaatccgtgacagagaacactcgtgctgcttacccgatagagtacatccccaacgcgaagataccgtgcgtcgggccgcacccgaaaaacgtcattctcctggcctgcgacgcgttcggcgtcctcccgcctgtcagcaagctcaaccttgcgcagaccatgtaccatttcatcagtggctacactgctcttgttgccggcacggaagaaggtatcaaggagccacaggccacgttctccgcctgcttcggcgcggctttcatcatgctccacccgaccaagtacgccgccatgctcgccgagaagatgcagaagtacggcgccacagggtggcttgtgaacactggctggtccggcgggaggtacggcgtcggcaagaggattaagctgccgtacaccaggaagatcattgacgccatccactccggcgagcttctcagcgccagctacaagaagaccgaggtcttcggcctggagatccccactcagatcgacggcgtgccgtcggaaatcctcgacccgatcaacacgtgggaggacaaggccgcgtacaaggagacgctcctgaagctggccggcctgttcaagaacaacttcgaggtgttcgccagctacaagatcggggacgacagcagcctgaccgacgagatcctcgccgcaggccccagcttctgatcttgaagaagaaggcgacgcgatggagtgggtattcagaataaacggtggtgtttgtctatcacgatgatgatgacgaaaaaaatatgttgtatcggtgtgtgagtactacattttctcagcttgatgacctgtgtgcgcgcttgctgtttgcagcattgtcc

SEQ ID NO: 82887 - protein, 653 aa, Zoysia japonica
MATPNGLAQIETNGRKKHENVVCHDDSAAPVRAQTIDELHSLQRKRSAPSTPKDSAASAFAAALTEEQREEQQLQSISASLASLTRETGPKVVRGDPARKGEASAKSTPAHHHQHPAAPAVAVSDSSLKSTHVLSNLSPAELYEQAIKYEKGSFITSTGALATLSGAKTGRAPRDKRVVKDEAAARELWWGKGSPNIEMDEHTFLINRERAVDYLNSLDKVFVNDQFLNWDPENRIKVRIISARAYHSLFMHNMCIRPTDEELENFGTPDFTIYNAGQFPCNRYTHYMTSSSSVAINLARREMVILGTQYAGEMKKGLFGLMHYLMPKRQILSLHSGCNMGKGGDVALFFGLSGTGKTTLSTDHNRLLIGDDEHCWSDNGVSNIEGGCYAKCIDLSREKEPDIWNAIKFGTVLENVVFDERTREVDYTDKSVTENTRAAYPIEYIPNAKIPCVGPHPKNVILLACDAFGVLPPVSKLNLAQTMYHFISGYTALVAGTEEGIKEPQATFSACFGAAFIMLHPTKYAAMLAEKMQKYGATGWLVNTGWSGGRYGVGKRIKLPYTRKIIDAIHSGELLSASYKKTEVFGLEIPTQIDGVPSEILDPINTWEDKAAYKETLLKLAGLFKNNFEVFASYKIGDDSSLTDEILAAGPSF

SEQ ID NO: 82888 - DNA, 2240 bp, Eremothecium gossypii
  CDS (394)..(2019)
ccagcacaaaaaagagccgcgctgctccgggcagccgccggcagacggagccgagcacttaccgaaaggcctttccaacagctgctaaatgtgggggattgattcgcatgcttccggatcggcgaaaaacggatagcacagcgaaaccgctgtacttgcttcatccataggtccgcgacgtagtttgtgctagcgacagcgctgttgcaggccgcgtagaacacagtggaacggccagagactgggcgctgcggcaaacagccaagtagacgtaattttcagtccttgtgcttcggcgtgtataaatagaggcatctagcgtagtagatggcatgtctcaagtggacaagcttcagctacacagaggagagctagcaggccaataagttcactatgtcgccatcaaaggtataccaaacaccagaggagaagatccgcgctgagcttgggctcagctcgggcgttttgacgattcggcgcaatgcgccggccgcggtgttgtacgaagatgcgctagcggagcgcaagacagcaatctccagcactggcgcgttgattgcgtactctggggaaaagacgggtcggtcgcctaaggacaagcggatcgtggacgagcccacgtcgtctgacaatatttggtggggtccagtgaaccgcaaggcgtcggagaagacgtggttgatcaaccgcgagcgtgccgcagacttcttgcgtacccgcgagcacctatacatcgtggatgcgtacgcgggctgggacccccgctaccgcatcaagatccggattgtgtgctgccgcgcataccacgcgttgttcatgaccaacatgttgatcaggccgaccgaagaggagcttgcggagttcggcgagccagacttcaccgtgtggaacgcgggccagttcccagcgaacacgcacactgagggtatgtcctcgaagaccactgtcgaaatcaacttcagggcgatggagatggtcatccttggcacggagtacgctggtgagatgaagaagggtatcttcacggtgatgttctacttgatgcctatcaaccacaacgtcttgacattgcactcctccgccaaccagggccccaacagcgatgtgacgctcttcttcggcttgagcggcactggtaagacgaccttgtctgcggaccagcaccggaaattgatcggcgacgacgagcactgctggtctgactacggtgtgttcaacatagaaggtgggtgctacgccaagtgtatcggcctaagcggggagaaggagccggaaatcttcaatgcaatcaagtacggctctgttttggagaacgtggtctacgacccagtaacgcgtgtcgtggactatgaggactcttcgatcaccgagaacacacgttgcgcgtacccaattgagtacatcccaagcgcgcagattccatgcttgtccgagaaccatccttctaacatcgttctattgacctgcgatgcctcaggtgtgttgccacctgtgtcccgtttgacgccggagcaggtgatgtaccacttcatctcgggctacacctccaagatggccggtactgagcagggagtcactgagcctgaggctaccttctcttcctgcttcggccagccattcctagccctacatccaatgaaatacgctacgatgttggctgaaaagatgtcgcagcataacgctagcgcctggttgattaacacgggctggactggctcctcgtatacggccggcggtaagcgctgtccattgaagtacacccgtgctatcttggactcgatccatgacggaaccttggcccaggctgaatacgagaccctacccgtctttggtttgtccattccaaaagcggtcgagggcgtgccagctgagttgctaaaccctgccaagaactgggtcgagggcgaaggcaagtacgctagcgccgtgtcggctttggcctcgaagttcacagagaactttaagatctatcaggaccaggccacagaggaggttgtccgcgctggcccacaaatatgagatgcgaccatatagtggtttcagggatctgagtcttccggaccctatttataaggtaaaatactatatgtaataaataacatattcttgagaaactgcctgcctcatcggcgcggtgtcactaggcgcccgagggggccgtaaccacagtttgcagtcatgcggggtggtggcatcgtagtcgtagtggtgtgtgctgttccagcagcaggcttctcact

SEQ ID NO: 82889 - protein, 541 aa, Eremothecium gossypii
MSPSKVYQTPEEKIRAELGLSSGVLTIRRNAPAAVLYEDALAERKTAISSTGALIAYSGEKTGRSPKDKRIVDEPTSSDNIWWGPVNRKASEKTWLINRERAADFLRTREHLYIVDAYAGWDPRYRIKIRIVCCRAYHALFMTNMLIRPTEEELAEFGEPDFTVWNAGQFPANTHTEGMSSKTTVEINFRAMEMVILGTEYAGEMKKGIFTVMFYLMPINHNVLTLHSSANQGPNSDVTLFFGLSGTGKTTLSADQHRKLIGDDEHCWSDYGVFNIEGGCYAKCIGLSGEKEPEIFNAIKYGSVLENVVYDPVTRVVDYEDSSITENTRCAYPIEYIPSAQIPCLSENHPSNIVLLTCDASGVLPPVSRLTPEQVMYHFISGYTSKMAGTEQGVTEPEATFSSCFGQPFLALHPMKYATMLAEKMSQHNASAWLINTGWTGSSYTAGGKRCPLKYTRAILDSIHDGTLAQAEYETLPVFGLSIPKAVEGVPAELLNPAKNWVEGEGKYASAVSALASKFTENFKIYQDQATEEVVRAGPQI

SEQ ID NO: 82890 - DNA, 1992 bp, Oryza sativa (japonica cultivar-group)
  CDS (1)..(1992)
atggcgagcacgccgaacgggctggcgcggatcgagacgcacggggcgaagacgaagaagcacgagaacgggatatgccacgacgacagctcggcgccggtgcgggcgcagaccatcgacgagctccactcgctgcagcggaagcggtcggcgcccaccacgcccatcaaggacggcgcctcctcgcccttcgccgccgccctctccgaggaggagcgccagcgccagcagctccagtccatcagcgcgtcgttggcgtcgctgacgcgtgagaccgggccgaaggtcgtcaggggagatccggcgaggaagggcgaggccgcggcgaagggcgcgccgtcgccgcacccgcagccggtgcaccaccaccacccgcacgtcaccccgaccatcgccgtcagcgacagctccctcaagttcacccatgtgctctacaacctctcgcctgctgagctgtacgagcaggcgatcaagtacgagaaggggtcgttcatcacgtccaccggcgcgctggcgacgctgtccggcgccaagaccggccggtcgccgagggacaagcgcatcgtcaaggatgaggcctccgcgcaggagctttggtggggcaagggttcgcccaacatcgagatggacgagcacactttcctcaccaacagggagagggccgtcgactacctcaactcccttgacaaggtgtttgtgaacgaccagttcctgaactgggacacggagaaccggatcaaagtccgtatcatctcggccagggcgtaccactcgctcttcatgcacaacatgtgcatccggccgacggaggaggagctggaggagttcggcacgccggacttcaccatatacaacgccgggcagttcccctgcaaccggtacacgcactacatgacgtcgtcgacgagcgtagacatcaacctcgctaggagggagatggtgatcctcggcacgcagtacgccggggagatgaagaaggggctcttcggggtgatgcactacctcatgcccaggaggggcatcctctccctgcactccggctgcaacatgggcaagcagggcgacgtcgccctcttctttggactgtcaggtactggaaagactactctgtcaactgaccacaacaggctgctgatcggcgacgatgagcactgctggagtgacactggcgtgtccaacatcgagggtggttgctatgccaagtgcatagacttgtcacaggagaaagagcctgatatttggaatgccatcaagtttgggaccgtgttggagaatgtcgtctttgatgagcacacccgtgaagttgattacaccgacaaatctgtcaccgagaacacgcgcgctgcttaccctatcgagtacatccccaacgccaagataccgtgcgtcgggccacacccgaagaacgtcattctcctggcatgcgacgctttcggcgtcctccctcctgtcagcaagctaaaccttccacagaccatgtaccacttcatcagtggctacactgctctggttgccggcacggaggatggcatcaaggagccgcaggctacgttctctgcttgcttcggtgcagcgttcatcatgctccacccgaccaagtacgccgccatgctcgccgagaagatgcagaagtatggcgccaccgggtggctcgtcaacaccggttggtccggtggaaggtacggagttggcaagcggatcaggctgccgtataccaggaagatcatcgacgccatccactccggtgagctcctcaccgccaactacaagaagacggaggtgtttggcctggagatccccactgaaatcgacggcatcccgtctgaaatcctcgacccgatcaacacctggacggacaagggcgcgtacaaggagacgctcctgaagctggctggcctgttcaagaagaacttcgaggtgttcgccaactacaagatcgggggagacagcagcctgacagacaagatcctcgctgctggaccaaacttttga

SEQ ID NO: 82891 - protein, 663 aa, Oryza sativa (japonica cultivar-group)
MASTPNGLARIETHGAKTKKHENGICHDDSSAPVRAQTIDELHSLQRKRSAPTTPIKDGASSPFAAALSEEERQRQQLQSISASLASLTRETGPKVVRGDPARKGEAAAKGAPSPHPQPVHHHHPHVTPTIAVSDSSLKFTHVLYNLSPAELYEQAIKYEKGSFITSTGALATLSGAKTGRSPRDKRIVKDEASAQELWWGKGSPNIEMDEHTFLTNRERAVDYLNSLDKVFVNDQFLNWDTENRIKVRIISARAYHSLFMHNMCIRPTEEELEEFGTPDFTIYNAGQFPCNRYTHYMTSSTSVDINLARREMVILGTQYAGEMKKGLFGVMHYLMPRRGILSLHSGCNMGKQGDVALFFGLSGTGKTTLSTDHNRLLIGDDEHCWSDTGVSNIEGGCYAKCIDLSQEKEPDIWNAIKFGTVLENVVFDEHTREVDYTDKSVTENTRAAYPIEYIPNAKIPCVGPHPKNVILLACDAFGVLPPVSKLNLPQTMYHFISGYTALVAGTEDGIKEPQATFSACFGAAFIMLHPTKYAAMLAEKMQKYGATGWLVNTGWSGGRYGVGKRIRLPYTRKIIDAIHSGELLTANYKKTEVFGLEIPTEIDGIPSEILDPINTWTDKGAYKETLLKLAGLFKKNFEVFANYKIGGDSSLTDKILAAGPNF

SEQ ID NO: 82892 - DNA, 1914 bp, Oryza sativa (japonica cultivar-group)
  CDS (1)..(1914)
atgatggaggcgaaagacgggcaagcatggctggggacgaacggatacggcagcaggagggaggaagacggcgtgtgccacgacgacagcgcgacaccggtgagggcgaacactgtcgacgagctacactcgctgcagaggaagcctcaggtagtggaggatcgccacaggctgcagcttcagtccatcagtgcgtctttggcatcgatgacatgtgggattgggccaaaactcgtcaacggtgacccagcaaggaaaaaagaaatggctggcaaggctgtgacacatcaccaacaccatatcactgtccccacgatcactgtgagcgacagtgacctcaagttcacccatgttctgtacaacttatccccttctgaactttatgagcatgcaatcaaatatgagaaagggtcattcatcacatccagtggggcgttagcgacgctatcaggagcaaagaccggtcgatcacctagggacaagcgtgttgtcaaggatgaaacaacagatgatctgtggtggggcaagggatcaccaaacattgaaatggacgagcaaacctttctgatcaacagggagagagctgttgactacttgaactcccttgataaggtgtttgttaatgatcagttcctaaactgggaccccaacaataggataaaagttcgaatcatctctgcgagggcctaccattctctcttcatgcacaacatgtgcatccggccaacatacgaggaactagagaattttggcgagcccgacttcaccatctacaatgctggacagttcccgtgcaaccgttacacgcattacatgacatcgtcaactagcatagacttaaatcttaagcggagagaaatggtcatcctgggaacacaatatgctggagagatgaagaaaggcctcttcagtgtgatgcactacctcatgcccaaaaagcagatcctctcgttgcactctggctgcaacatgggcagagggggtgatgtagccctgttttttggattgtcaggtactggaaagacaactctgtcaacagacaggaataggatcttaattggtgatgatgaacactgctggagtgataatggtatctctaacattgagggcggctgctatgctaaatgcatagatctttctcaggagaaagaacctgacatttgggatgcaatcaagtttggcacagtgttggagaatgttgttttcgatgagcactcccgtgaagttgattatacagaaaaatctgtcacagagaatacccgtgctgcttaccctattgaatacatagctaatgctaagataccatgtgttgggccacacccaaagaatgttatcctacttgcatgtgatgcatttggtgtcctccctcctgtcagcaagttgagccatgcacaaaccatgtaccattttatcagtggctacactgcattggtcgctggaactgaagatggtatcaaggagccacaggctacattttctgcctgctttggtgcagcttttataatgctccacccaactcggtacgctgccatgctggcagataagatgaacaagcatggagctaccggatggcttgtcaacactggttggatcgggggaagttatggtgtaggtgagcgaatcagcttggcctacacaaggaaaatcatcgatgccattcactcgggtgagcttttggctagaagctacaaaaagacagatgtctttggactagacatccccacaaaagtggaaggagttccatctgaattgcttgacccaataaatacctgggaagacaaagactcatacaagttgacacttctaaagctgtcagatctgttcaagagaaatttcaaggtatttgcaaattacaagaaaggtggtgttagtgatctggctgatgagattgctgctgcaggaccaaatttctga

SEQ ID NO: 82893 - protein, 637 aa, Oryza sativa (japonica cultivar-group)
MMEAKDGQAWLGTNGYGSRREEDGVCHDDSATPVRANTVDELHSLQRKPQVVEDRHRLQLQSISASLASMTCGIGPKLVNGDPARKKEMAGKAVTHHQHHITVPTITVSDSDLKFTHVLYNLSPSELYEHAIKYEKGSFITSSGALATLSGAKTGRSPRDKRVVKDETTDDLWWGKGSPNIEMDEQTFLINRERAVDYLNSLDKVFVNDQFLNWDPNNRIKVRIISARAYHSLFMHNMCIRPTYEELENFGEPDFTIYNAGQFPCNRYTHYMTSSTSIDLNLKRREMVILGTQYAGEMKKGLFSVMHYLMPKKQILSLHSGCNMGRGGDVALFFGLSGTGKTTLSTDRNRILIGDDEHCWSDNGISNIEGGCYAKCIDLSQEKEPDIWDAIKFGTVLENVVFDEHSREVDYTEKSVTENTRAAYPIEYIANAKIPCVGPHPKNVILLACDAFGVLPPVSKLSHAQTMYHFISGYTALVAGTEDGIKEPQATFSACFGAAFIMLHPTRYAAMLADKMNKHGATGWLVNTGWIGGSYGVGERISLAYTRKIIDAIHSGELLARSYKKTDVFGLDIPTKVEGVPSELLDPINTWEDKDSYKLTLLKLSDLFKRNFKVFANYKKGGVSDLADEIAAAGPNF

SEQ ID NO: 82894 - DNA, 1623 bp, Escherichia coli O157:H7 EDL933
  CDS (1)..(1623): transl_table=11
  misc_feature (808)..(808): k is g or t
atgcgcgttaacaatggtttgaccccgcaagaactcgaggcttatggtatcagtgacgtacatgatatcgtttacaacccaagctacgacctgctgtatcaggaagagctcgatccgagcctgacaggttatgagcgcggggtgttaactaatctgggtgccgttgccgtcgataccgggatcttcaccggtcgttcaccaaaagataagtatatcgtccgtgacgataccactcgcgatactttctggtgggcagacaaaggcaaaggtaagaacgataacaaacctctctctccggaaacctggcaacatctgaaaggcctggtgaccaaacagctttccggcaaacgtctgttcgttgtcgacgccttctgtggtgcgaacccggatactcgtctttccgtccgtttcatcaccgaagtggcctggcaggcgcattttgtcaaaaacatgtttattcgcccgagcgatgaagagttggcaggtttcaaaccagactttatcgttatgaacggcgcgaagtgcactaacccgcagtggaaagaacagggtctgaattccgaaaacttcgtggcttttaacctgaccgagcgcatgcagctgattggcggcacctggtatggcggcgaaatgaagaaagggatgttctcgatgatgaactacctgctgccgctgaaaggtatcgcttctatgcactgctccgccaacgttagcgagaaaggcgatgttgcggtgttcttcggcctttccggcaccggtaaaaccaccctttccaccgacccgaaacgtcgcctgattggcgatgackaacacggctgggacgatgacggcgtgtttaacttcgaaggcggctgctacgcaaaaactatcaagctgtcgaaagaagcggaacctgaaatctacaacgctatccgtcgcgatgcgctgctggaaaacgtcaccgtgcgtgaagatggcactatcgactttgatgatggttcaaaaaccgagaacacccgcgtttcttatccgatctatcacatcgataacatcgttaagccggtttcaaaagcgggtcacgcaacgaaagttatcttcctgaccgcagacgcctttggtgtgctgccaccggtttctcgtctgactgccgatcaaacccagtaccacttcctctctggcttcaccgccaaactggccggtactgagcgtggcatcaccgaaccgacgccaaccttctccgcttgcttcggcgcggcattcctgtcgctgcacccgactcagtacgcagaagtgctggtgaaacgtatgcaggcggcgggcgcgcaggcttatctggttaacactggctggaacggcactggcaaacgtatctcgattaaagatacccgcgccattatcgacgccatcctcaacggttcgctggataatgcagaaaccttcactctgccgatgtttaacctggcgatcccaaccgaactgccgggcgtagacacgaagattctcgatccgcgtaacacctacgcttccccggaacagtggcaggaaaaagccgaaaccctggcgaaactgtttatcgacaactttgataaatacaccgacacccctgcgggtgccgcgctggtagcggctggtccgaaactgtaa

SEQ ID NO: 82895 - protein, 540 aa, Escherichia coli O157:H7 EDL933
  misc_feature (270)..(270): The Xaa at location 270 stands for Stop, or Glu.
MRVNNGLTPQELEAYGISDVHDIVYNPSYDLLYQEELDPSLTGYERGVLTNLGAVAVDTGIFTGRSPKDKYIVRDDTTRDTFWWADKGKGKNDNKPLSPETWQHLKGLVTKQLSGKRLFVVDAFCGANPDTRLSVRFITEVAWQAHFVKNMFIRPSDEELAGFKPDFIVMNGAKCTNPQWKEQGLNSENFVAFNLTERMQLIGGTWYGGEMKKGMFSMMNYLLPLKGIASMHCSANVSEKGDVAVFFGLSGTGKTTLSTDPKRRLIGDDXHGWDDDGVFNFEGGCYAKTIKLSKEAEPEIYNAIRRDALLENVTVREDGTIDFDDGSKTENTRVSYPIYHIDNIVKPVSKAGHATKVIFLTADAFGVLPPVSRLTADQTQYHFLSGFTAKLAGTERGITEPTPTFSACFGAAFLSLHPTQYAEVLVKRMQAAGAQAYLVNTGWNGTGKRISIKDTRAIIDAILNGSLDNAETFTLPMFNLAIPTELPGVDTKILDPRNTYASPEQWQEKAETLAKLFIDNFDKYTDTPAGAALVAAGPKL

SEQ ID NO: 82896 - DNA, 1686 bp, Agrobacterium tumefaciens str. C58
  CDS (1)..(1686): transl_table=11
ttgcgtttccaaaagctggcacgtattttccgtgaagatttcaacggccttatcgtcatttacaaggaacgcgtcatgaacgagcttggggttcataatcctgccaatggagttgcggaactcggactgggcgaggcctcccgcgtcttttataacctcaatgagagcgaattatacgaacacgcgatccgtaacggcgaagccgaactgaccatcgacggcgcgctgcgcgccgtcaccggccagcatacgggccgctcgccgaaggataaattcgtcgttcgtgatgcttccaccgaaaacaccatctggtgggacaacaacaagccgctgtcgccggaaaatttcgagctgctgcgtcaggacatgctggcccatgccgccggcaagacgctttacgtgcaggatctgatcggcggtgccgatgaggaaaatgcgctgccgacccgcgtcgtcaccgagcttgcctggcattcgctgttcatccgcaatctactgatccggccgaagcgggagacgctttcgggcttcagccagaagctcaccatcatcaacctgccaagcttcaaggctgatccggcccgtcatggcgttcgctcggaaacggtcattgcctgcgatctgacgaatggcctcgtgctcatcggcggcacgtcctatgccggtgaaaacaagaagtcggtcttcacggtgctgaactacctgctgccggccaagggcgtgatgccgatgcattgctcggccaatgtcggtcctgagggtgattccgccgtgttcttcggcctctccggcaccggcaagaccacgctctccgccgacccggcacgcacgctgatcggcgatgacgaacatggctggggcgaacacggcatcttcaacttcgagggcggctgttatgccaaggcgatcaagctttcgtccgaggccgagccggaaatctacgccgcgaccaatcgtttcggcacggttctcgaaaacgtcgtgctggatgaaagccgggttcctgatttcaacgacaactcgctgacggaaaacacccgcagcgcctatccgctgcacttcattccgaatgcatcggaaacgggcattgccggccatccgaagacgatcatcatgctgacggcggatgccttcggcgtgctgccgccgatcgcgcgtctgacgccggaacaggccatgtaccacttcctctccggttacaccgccaaggttgccggcacggaaaagggcgtgaccgagccggaagccacattctccacctgcttcggcgcacccttcatgccgcgtcatccggcggaatacggcaacctgctgcgtgagctgatcggcaagcacggcgtcgattgctggctggtcaataccggctggaccggcggcgcctatggcatcggcaagcgtatgcccatcaaggcgacgcgcgcgcttctgaccgccgcacttaccggcgacctgaagaatgcgcaattccgcaccgatgcgaatttcggtttcgccgtaccgctgtcgctcgacggcgtcgatggtgcgatccttgatccacgttccacctgggccgatggcgcagcttacgacgcgcaggcgaagaagctggtatcgatgttcgtttcgaacttcaccaagttcgaagatcacgtcgacagcaaggttcgcgacgcagccccgggccttctgctcgcggctgaatga

SEQ ID NO: 82897 - protein, 561 aa, Agrobacterium tumefaciens str. C58
MRFQKLARIFREDFNGLIVIYKERVMNELGVHNPANGVAELGLGEASRVFYNLNESELYEHAIRNGEAELTIDGALRAVTGQHTGRSPKDKFVVRDASTENTIWWDNNKPLSPENFELLRQDMLAHAAGKTLYVQDLIGGADEENALPTRVVTELAWHSLFIRNLLIRPKRETLSGFSQKLTIINLPSFKADPARHGVRSETVIACDLTNGLVLIGGTSYAGENKKSVFTVLNYLLPAKGVMPMHCSANVGPEGDSAVFFGLSGTGKTTLSADPARTLIGDDEHGWGEHGIFNFEGGCYAKAIKLSSEAEPEIYAATNRFGTVLENVVLDESRVPDFNDNSLTENTRSAYPLHFIPNASETGIAGHPKTIIMLTADAFGVLPPIARLTPEQAMYHFLSGYTAKVAGTEKGVTEPEATFSTCFGAPFMPRHPAEYGNLLRELIGKHGVDCWLVNTGWTGGAYGIGKRMPIKATRALLTAALTGDLKNAQFRTDANFGFAVPLSLDGVDGAILDPRSTWADGAAYDAQAKKLVSMFVSNFTKFEDHVDSKVRDAAPGLLLAAE

SEQ ID NO: 82898 - DNA, 1584 bp, Fusobacterium nucleatum subsp. nucleatum ATCC 25586
  CDS (1)..(1584): transl_table=11
atgaaaatgtatggacttgaaaaattaggaattaataatgtaacagcagctcactataatttaagccctgcacagcttgtagaaaaagctttggcaaataatgaaggaatattaagtgatactggtgcctttgttatatcaactggtaaatatactggtcgtgcaccagatgataaattttttgtagacactccagaagttcataagtatattgattggagtagaaatcaacctattgaaaaagaaaaatttgatgcaatttttggaaaattagttgcttatttacaaaatcgtgaaatttttatttttgatggaagagcaggagctaatcctgaatacacaagaagattccgtgttataaatgaattagctagtcaaaacttatttattcatcaactattaattaggacagatgaagaatacaatgaaaataatgatattgactttactattatttcagcacctaattttcactgtgtacctgaaatagatggagttaattcagaagcagcgattattattaattttgaaaaaaagatagctattatctgtgctacaaaatattctggtgaaatcaaaaaaagtgtattttctataatgaactatatcatgcctcatgaaaacattttacctatgcactgctcagcaaatatggatccagtaactcatgaaactgcaattttctttggattatctggaacaggaaaaacaactctatcagccgatcctaatcgtaagttgattggtgatgatgaacatggttggtgtgataaaggtattttcaattttgaaggtggatgttatgcaaaatgtataaacttaaaagaagaaagtgaacctgaaatttatcgtgcaattaaatttggaagtttagtcgaaaatgttgttgtagaccccataacaagaaaaattcaatatgaagatgcaagtataactccaaatacaagagtaggatatcctatagactatattcctaatgctgaattatcaggagtaggtggaataccaaaagttgttatattcttaacagcagattcttttggagtattgcctccaatttcaagactaagccaagaagctgcaatgtaccattttgtaaccggatttactgcaaagttagcaggaacagaattaggggtaaaagaaccagttcctacattctcaacatgttttggagaaccatttatgcctatggatccaagtgtgtatgctgagatgcttggagaaagattaaagaaacataatacaaaagtgtatttaatcaacactggttggtcaggtggagcttatggaacaggtaagagaataaatttaaaatatactcgtgctatggtaacagcagtattaaatggatattttgataatgctgaatacaaacatgatgacatatttaacttagatattcctcaatcttgcccaggtgttcctagtgaaattatgaatccaatcgatacttggcaagatagagataaatatattatagctgctaaaaaattggctaatctattctataataactttaaagaaaaatatccaaatatgccagaaaatattacaaatgctggccctaaatataatgattaa

SEQ ID NO: 82899 - protein, 527 aa, Fusobacterium nucleatum subsp. nucleatum ATCC 25586
MKMYGLEKLGINNVTAAHYNLSPAQLVEKALANNEGILSDTGAFVISTGKYTGRAPDDKFFVDTPEVHKYIDWSRNQPIEKEKFDAIFGKLVAYLQNREIFIFDGRAGANPEYTRRFRVINELASQNLFIHQLLIRTDEEYNENNDIDFTIISAPNFHCVPEIDGVNSEAAIIINFEKKIAIICATKYSGEIKKSVFSIMNYIMPHENILPMHCSANMDPVTHETAIFFGLSGTGKTTLSADPNRKLIGDDEHGWCDKGIFNFEGGCYAKCINLKEESEPEIYRAIKFGSLVENVVVDPITRKIQYEDASITPNTRVGYPIDYIPNAELSGVGGIPKVVIFLTADSFGVLPPISRLSQEAAMYHFVTGFTAKLAGTELGVKEPVPTFSTCFGEPFMPMDPSVYAEMLGERLKKHNTKVYLINTGWSGGAYGTGKRINLKYTRAMVTAVLNGYFDNAEYKHDDIFNLDIPQSCPGVPSEIMNPIDTWQDRDKYIIAAKKLANLFYNNFKEKYPNMPENITNAGPKYND

SEQ ID NO: 82900 - DNA, 2013 bp, Arabidopsis thaliana; identical to SEQ ID NO: 82870
  CDS (1)..(2013)

SEQ ID NO: 82901 - protein, 670 aa, Arabidopsis thaliana
MAGNGNESTGGDFSFSAAAARDALPRITTEKGGKSPGPADVCQDDIAPRVNFQTIDELHSLQKKRSAPTTPLRDGSASGVSGTSGPTTPVSSETMLQSVSASLASLTRETGPKLIRGDPTSAAKVAHVPVTPTSLPAADVSDSGLKFTHILHNLSPAELYEQAIKFEKGSFVTSTGALATLSGAKTGRSPKDKRVVKDDTTEAELWWGKGSPNIEMDEKTFLVNRERAVDYLNSLDKVFVNDQYLNWDPENKIKVRIVSARAYHSLFMHNMCIRPTPEELENFGTPDFTIYNAGKFPCNRFTHYMTSSTSVDINLGRREMVILGTQYAGEMKKGLFGVMHYLMPKRKILSLHSGCNMGKDGDVALFFGLSGTGKTTLSTDHNRYLIGDDEHCWSEAGVSNIEGGCYAKCIDLARDKEPDIWNAIKFGTVLENVVFDEHTREVDYTDKSVTENTRAAYPIEYIPNSKIPCVGPHPKNVILLACDAFGVLPPISKLNLAQTMYHFISGYTALVAGTEEGVKEPRATFSACFGAAFIMLHPTKYAAMLAEKMQAQGATGWLVNTGWSGGSYGTGSRIKLAYTRKIIDAIHSGSLLNASYRKTDIFGLEIPNEVEGVPSEILEPINAWPDKMAYEDTLLKLAGLFKSNFETFTSHKIGDDGKLTEEILAAGPNF

SEQ ID NO: 82902 - DNA, 1692 bp, Escherichia coli CFT073
  CDS (1)..(1692): transl_table=11
ttgtcgcggttaacacccccaaaaagactttactattcaggcaatacatattggctaaggagcagtgaaatgcgcgttaacaatggtttgaccccgcaagaactcgaggcttatggtatcagtgacgtacatgatatcgtttacaacccaagctacgatctgctgtaccaggaagagctggacccgagcctgaccggttatgagcgcggggtgttaactaatctgggtgccgttgccgtcgataccgggatcttcaccggtcgttcaccgaaagataagtatatcgttcgtgacgataccactcgcgatactttctggtgggcagacaaaggcaaaggtaagaacgacaacaaacctctctctccggaaacctggcagcatctgaaaggcctggtgaccaggcagctttccggcaaacgtctgttcgttgtcgacgccttctgtggtgcgaacccggatactcgtctttccgtccgtttcatcaccgaagtggcctggcaggcgcattttgtcaaaaacatgtttattcgcccgagcgatgaagagctggcaggtttcaaaccagactttatcgttatgaacggcgcgaagtgcactaacccgcagtggaaagaacagggtctgaactccgaaaacttcgtggcgtttaacctgaccgagcgcatgcagctgattggcggcacctggtacggcggcgaaatgaagaaagggatgttctcgatgatgaactacctgctgccgctgaaaggtatcgcttctatgcactgctccgccaacgttggcgagaaaggcgatgttgcggtgttcttcggcctttccggcaccggtaaaaccaccctttccaccgacccgaaacgccgcctgattggcgatgacgagcacggctgggatgatgacggtgtgtttaacttcgaaggcggctgctacgcgaaaactatcaagctgtcgaaagaagcggaacctgaaatctacaacgctatccgtcgcgatgcgctgctggaaaacgtcaccgtgcgtgaagatggcacaatcgactttgatgatggttcaaaaaccgagaacacccgcgtttcttatccgatctatcacatcgataacatcgttaagccggtttccaaagcgggccacgcaacgaaagttatcttcctgacagcagacgcctttggtgtgctgccgccggtttctcgtctgactgccgatcaaacccagtaccacttcctctctggcttcaccgccaaactggccgggactgagcgtggcatcaccgaaccgacgccaaccttctccgcctgcttcggcgcggcgttcctgtcgctgcacccaactcagtacgcagaagtgctggtaaaacgtatgcaggcagcgggtgcgcaggcgtatctggttaacaccggctggaacggcactggcaaacgtatctccattaaagatacccgcgctattatcgacgccatcctcaacggttcgctggataacgcagaaaccttcactctgccgatgtttaacctggcgatcccaaccgaactgccgggcgtagacacgaagctcctcgatccgcgtaacacctacgcttctccggaacagtggcaggaaaaagccgaaacgctggcgaaactgtttatcgacaacttcgataaatacaccgacacccctgcgggtgccgcgctggtagcggctggtccgaagctgtaa

SEQ ID NO: 82903 - protein, 563 aa, Escherichia coli CFT073
MSRLTPPKRLYYSGNTYWLRSSEMRVNNGLTPQELEAYGISDVHDIVYNPSYDLLYQEELDPSLTGYERGVLTNLGAVAVDTGIFTGRSPKDKYIVRDDTTRDTFWWADKGKGKNDNKPLSPETWQHLKGLVTRQLSGKRLFVVDAFCGANPDTRLSVRFITEVAWQAHFVKNMFIRPSDEELAGFKPDFIVMNGAKCTNPQWKEQGLNSENFVAFNLTERMQLIGGTWYGGEMKKGMFSMMNYLLPLKGIASMHCSANVGEKGDVAVFFGLSGTGKTTLSTDPKRRLIGDDEHGWDDDGVFNFEGGCYAKTIKLSKEAEPEIYNAIRRDALLENVTVREDGTIDFDDGSKTENTRVSYPIYHIDNIVKPVSKAGHATKVIFLTADAFGVLPPVSRLTADQTQYHFLSGFTAKLAGTERGITEPTPTFSACFGAAFLSLHPTQYAEVLVKRMQAAGAQAYLVNTGWNGTGKRISIKDTRAIIDAILNGSLDNAETFTLPMFNLAIPTELPGVDTKLLDPRNTYASPEQWQEKAETLAKLFIDNFDKYTDTPAGAALVAAGPKL

SEQ ID NO: 82904 - DNA, 1623 bp, Shigella flexneri 2a str. 2457T
  CDS (1)..(1623): transl_table=11
atgcgcgttaacaatggtttgcccccgcaagaactcgaggcttatggtatcagtgacgtacatgatatcgtttacaacccaagctacgacctgctgtatcaggaagagctcgatccgagcctgacaggttatgagcgcggggtgttaactaatctgggtgccgttgccgtcgataccgggatcttcaccggtcgttcaccaaaagataagtatatcgtccgtgacgataccactcgcgatactttctggtgggcagacaaaggcaaaggtaagaacgacaacaaacctctctctccggaaacctggcagcatctgaaaggcctggtgaccaggcagctttccggcaaacgtctgttcgttgtcgacgctttctgtggtgcgaacccggatactcgtctttccgtccgtttcatcaccgaagtggcctggcaggcgcattttgtcaaaaacatgtttattcgcccgagcgatgaagagctggcaggtttcaaaccagactttatcgttatgaacggcgcgaagtgcactaacccgcagtggaaagaacagggtctgaactccgaaaacttcgtggcgtttaacctgaccgagcgcatgcagctgattggcggcacctggtacggcggcgaaatgaagaaagggatgttctcgatgatgaactacctgctgccgctgaaaggtatcgcttctatgcactgctccgccaacgttggcgagaaaggcgatgttgcggtgttcttcggcctttccggcaccggtaaaaccaccctttccaccgacccgaaacgccgcctgattggcgatgacgaacacggctgggacgatgacggcgtgtttaatttcgaaggcggctgctacgcaaaaactatcaagctgtcgaaagaagcggaacctgaaatctacaacgctatccgtcgtgatgcgctgctggaaaacgtcaccgtgcgtgaagatggcactatcgactttgatgatggttcaaaaaccgagaacacccgcgtttcttatccaatctatcacatcgataacatcgttaagccggtttccaaagcgggccacgcgactaaggttatcttcctgactgctgatgctttcggcgtgttgccgccggtttctcgcctgactgccgatcaaacccagtatcacttcctctctggcttcaccgccaaactggccggtactgagcgtggcatcaccgaaccgacgccaaccttctccgcttgcttcggcgcggcgttcctgtcgctgcacccgactcagtacgcagaagtgctggtgaaacgtatgcaggcggcgggcgcgcaggcttatctggttaacactggctggaacggcactggcaaacgtatctcgattaaagatacccgcgccattatcgacgccatcctcaacggttcgctggataatgcagaaaccttcactctgccgatgtttaacctggcgatcccaaccgaactgccgggcgtagacacgaagattctcgatccgcgtaacacctacgcttctccggaacagtggcaggaaaaagccgaaaccctggcgaaactgtttatcgacaacttcgataaatacaccgacacccctgcgggtgccgcgctggtagcggctggtccgaaactgtaa

SEQ ID NO: 82905 - protein, 540 aa, Shigella flexneri 2a str. 2457T
MRVNNGLPPQELEAYGISDVHDIVYNPSYDLLYQEELDPSLTGYERGVLTNLGAVAVDTGIFTGRSPKDKYIVRDDTTRDTFWWADKGKGKNDNKPLSPETWQHLKGLVTRQLSGKRLFVVDAFCGANPDTRLSVRFITEVAWQAHFVKNMFIRPSDEELAGFKPDFIVMNGAKCTNPQWKEQGLNSENFVAFNLTERMQLIGGTWYGGEMKKGMFSMMNYLLPLKGIASMHCSANVGEKGDVAVFFGLSGTGKTTLSTDPKRRLIGDDEHGWDDDGVFNFEGGCYAKTIKLSKEAEPEIYNAIRRDALLENVTVREDGTIDFDDGSKTENTRVSYPIYHIDNIVKPVSKAGHATKVIFLTADAFGVLPPVSRLTADQTQYHFLSGFTAKLAGTERGITEPTPTFSACFGAAFLSLHPTQYAEVLVKRMQAAGAQAYLVNTGWNGTGKRISIKDTRAIIDAILNGSLDNAETFTLPMFNLAIPTELPGVDTKILDPRNTYASPEQWQEKAETLAKLFIDNFDKYTDTPAGAALVAAGPKL

SEQ ID NO: 82906 - DNA, 1647 bp, Magnaporthe grisea 70-15
  CDS (1)..(1647)
ctgcacccgagtggtgtccaggcacatatcccccatgaacacaccgagctagaggaggaactgcacgagaaggcacacatcgactacgacagggtcgctattatccccaacccgtcagttccggcactgtatgaggatgcattggtgtacgagcccggctcggccatatcatcaacgggtgctctcacagcgtactcgggtaacaagacgggtcgttctcccttggacaagcgagttgtcaaggagccgacatcagaaaacgacatctggtggggacccgttaacaagcccatgagccctgacgtctggaagatcaaccgtgagcgcgccatcgactacctcaacacaaggagtcgtatctacgttgtcgacgggtatgctggatgggacgagaagtaccggatccgagtgcgcgtggtttgcgctcgtgcctaccatgccctcttcatgcgcaacatgctcattcgcccgcctcgtgaggagctcgagcacttccagcccgactacaccatttacaacgccggaactttccccgccaataggtataccgagggtatgacttcaggcacctcagtcgccatcaacttcgctgagaaggagatggtcatcctgggtaccgaatatgccggtgagatgaagaagggtatcttcaccgtcttgttctacgagatgcccatcaagcacaacgtgctcacgttgcattcgtctgcgaacgagggcaagaacggagacgtcacactcttcttcggtctgtcgggtactggcaagaccacgctgtcagctgaccccaaccgcatgctgatcggtgatgacgagcactgctggagcgacagcggtgtcttcaacattgagggtggttgctacgcaaagtgcatcggtctctcggccgagaaggagcccgatatctttggtgccatccagttcggctcagtcctcgagaacgtcgtatttgaccctaacactagggtcgtcgactacgatgactgcaccctgaccgagaacacccgatgtgcctaccccatcgagtacatctccaacgccaagatcccctgcctgtccaacaaccaccccagcaacatcatcctcctgacctgcgacgcccgtggtgttctcccgccgatctccaagctcaacagcgcccagaccatgttccacttcatctccggttacacctccaagatggccggtaccgaggacggtgttactgagccgcaagccactttctcgtcatgctttgcccagcccttcctggccctgcacccgatgcgctacgccaagatgttggctgacaagattgagcaccacaacgccaacgcctggttgctcaacaccggttgggtcggtgccggtgccgctcagggtggcaagcgctgccctctcaagtacactcgtgccattctcgacgccatccactcgggcgagctcgccaagcaggagtacgagacgtatgaggtctttaacctccaggtgcccaagagctgccctggcgtgccctcggagctgctcaaccccaaggccgcctggaccgctgggaacgacagcttcgacaccgaggtcaagaagcttggtggcctgttccttgagaacttcaagaagtacgagagcgaggctactgaggatgtcatcaaggccggtcccgttgtctga

SEQ ID NO: 82907 - protein, 548 aa, Magnaporthe grisea 70-15
MHPSGVQAHIPHEHTELEEELHEKAHIDYDRVAIIPNPSVPALYEDALVYEPGSAISSTGALTAYSGNKTGRSPLDKRVVKEPTSENDIWWGPVNKPMSPDVWKINRERAIDYLNTRSRIYVVDGYAGWDEKYRIRVRVVCARAYHALFMRNMLIRPPREELEHFQPDYTIYNAGTFPANRYTEGMTSGTSVAINFAEKEMVILGTEYAGEMKKGIFTVLFYEMPIKHNVLTLHSSANEGKNGDVTLFFGLSGTGKTTLSADPNRMLIGDDEHCWSDSGVFNIEGGCYAKCIGLSAEKEPDIFGAIQFGSVLENVVFDPNTRVVDYDDCTLTENTRCAYPIEYISNAKIPCLSNNHPSNIILLTCDARGVLPPISKLNSAQTMFHFISGYTSKMAGTEDGVTEPQATFSSCFAQPFLALHPMRYAKMLADKIEHHNANAWLLNTGWVGAGAAQGGKRCPLKYTRAILDAIHSGELAKQEYETYEVFNLQVPKSCPGVPSELLNPKAAWTAGNDSFDTEVKKLGGLFLENFKKYESEATEDVIKAGPVV

SEQ ID NO: 82908 - DNA, 1740 bp, Gibberella zeae PH-1
  CDS (1)..(1740)
atgattgaaccactacacccaatttctactattccaccagtccaaaaaaacaatactgaccttgtcgcagtgcttcccaacaacgttaacaagacttccctccaccctaccggtgttactccccaccaggagcacaccgagttggaacaggagctccacgacaaggctcacatcgattacgatcgtgtcgctattatccctaacccttcagtcgctgccctctacgaggatgctcttgtctacgagactggtaccgctatcacatccagcggtgccctgactgcctactctggcgctaagactggtcgatctcctctcgacaagcgaatcgtcgaggaggcttcttccaaggacaacatttggtggggacctgtcaacaagcccatgactcctgaggtctggaagatcaaccgagaacgtgctgtcgattacctcaacacccgaagccgtatctatgtcattgatggttttgccggctgggacgagaagtaccgcatcaaggtccgagttatctgcgcccgcgcctaccatgctctcttcatgcgaaacatgcttatccgacctacacgagaggagctcaacgacttccaccccgactacacaatctacaatgctggcaagttccctgccaaccgatacaccgagggtatgacctccggtacatcagttgccatcaacttcgagcagaaggagatggtcatcctcggtactgagtatgctggtgaaatgaagaagggagtcttcactgttcttttctacgagatgcccatcaagcacaacgtcctcactcttcactcctccgccaacgagggcaagaacggcgatgtcacccttttcttcggtctctctggaactggcaagaccactctctccgccgaccccaaccgagccctcattggtgacgacgagcactgctggtctgacaacggtgttttcaacatcgagggtggttgctacgccaagaccattggtctgtccgctgagaaggagcccgatatctatggcgctatccgatacggttccgtccttgagaacgtcgttttcgaccctctcacccgtgaggtcgactacgatgacgctaccctcactgagaacacccgatgcgcctaccccatcgagtacatctccaacgccaagattccttgcctctctcccaactctccctccaacatcatcctcctcacttgcgacgcccgcggtgtcctgcctcctatctccaaacttgacagcgcccagaccatgttccacttcatctctggttacacctccaagatggccggtactgaggacggcgtcaccgagccccaggctaccttctccagctgcttcgctcagcccttccttgctctgcaccccatgaagtacgccaagatgcttgccgacaagattgagacacacaaggccaacgcctggctcctcaacaccggttgggtcggtgccggtttcgcccagggcggcaagcgatgccccctcaagtacacccgtgccatcctcgacgccatccactctggtgacctcgccaacgttgagtacgagaactacggtgtcttcaacctccaggtccccaagtcctgccccaacgttccttcagaacttctcaacccctccaaggcctggaccgctggtgaggacagcttcaacactgaggttgtcaagctcggcaagctcttccgcgagaacttcgccaagtacgagagcgaggccaccgaagatgtcgtcaaggccggccccgttgtctaa

SEQ ID NO: 82909 - protein, 579 aa, Gibberella zeae PH-1
MIEPLHPISTIPPVQKNNTDLVAVLPNNVNKTSLHPTGVTPHQEHTELEQELHDKAHIDYDRVAIIPNPSVAALYEDALVYETGTAITSSGALTAYSGAKTGRSPLDKRIVEEASSKDNIWWGPVNKPMTPEVWKINRERAVDYLNTRSRIYVIDGFAGWDEKYRIKVRVICARAYHALFMRNMLIRPTREELNDFHPDYTIYNAGKFPANRYTEGMTSGTSVAINFEQKEMVILGTEYAGEMKKGVFTVLFYEMPIKHNVLTLHSSANEGKNGDVTLFFGLSGTGKTTLSADPNRALIGDDEHCWSDNGVFNIEGGCYAKTIGLSAEKEPDIYGAIRYGSVLENVVFDPLTREVDYDDATLTENTRCAYPIEYISNAKIPCLSPNSPSNIILLTCDARGVLPPISKLDSAQTMFHFISGYTSKMAGTEDGVTEPQATFSSCFAQPFLALHPMKYAKMLADKIETHKANAWLLNTGWVGAGFAQGGKRCPLKYTRAILDAIHSGDLANVEYENYGVFNLQVPKSCPNVPSELLNPSKAWTAGEDSFNTEVVKLGKLFRENFAKYESEATEDVVKAGPVV

SEQ ID NO: 82910 - DNA, 1662 bp, Debaryomyces hansenii CBS767
  CDS (1)..(1662)
atgacacctcctactgctgttgaatcatcaattaactttggtggtcacccaactattaaatctactgctgaaccagttgtgaagcaattatcgttagctgatgatactgttatccgtcacaacgcaccaccaccaactttatatgaagatggtttattggaaaaaggtacagttatttcatccacaggtgctttaatggcctactctggtaagaagaccggtagatcaccaaaggataagagaattgttgatgaagaaacctctacacaaaatatttggtggggtcccgtcaacaagcaagttgacgaattaacctggaaaatttccagatccagagctttggactacttgagaaccagagaaaagttgttcgttgttgatgcatacgctggttgggatccaagatacagactcaagattagagttatctgtgctagagcttaccacgctttattcatgaccaacatgttgatcagaccaactgaagaagaattaaagaactttggtgaaccagatttcactatttacaatgctggtcaattcccagctaacgttcacaccaagggtatgacctcttctacttctgttgaaatcaacttcaaggatatggaaatggttatcttaggtactgagtatgctggtgaaatgaagaagggtattttcactgttatgttctacttgatgccaataaagcacaagatcttaactttgcattcttccgctaaccaaggtgaacaaaagggtgatgttacattattctttggtttatctggtaccggtaagaccactttatctgctgatccaaacagaaagttgattggtgatgatgaacattgttggtctgacaacggtgtcttcaacattgaaggcggttgttacgctaagtgtttagatttatcagctgaaaaagaaccagaaattttcaactctatcaagttcggtgctatcttagaaaacgttgtctacgaccaaaactctaaggtagttgactacgccgactcgactatcacagaaaacacaagatgtgcatacccaattgatttcattccatctgctaagattccatgtttagctgatgaacatccaacaaacattgttttgttaacttgtgatgcatctggtgtcttaccaccagtctctaaattgactaacgctcaagttatgtatcatttcatcagtggttacacttctaagatggctggtaccgaagaaggtgttactgaaccacaagctactttctctgcatgtttcggtcaaccattcttagtcttgcatccaatgaaatacgctcaacaattatctgacaagatcagtaagcacaacgccaacgcttggttattgaataccggttgggttggtgcttctgctgctcaaggtggtaatagatgttctttgaaatacaccagagctatcttggatgctatccactctggtgaattaagtaaggttgagttcgagaacttcccaactttcaatttgaatgttccaaagtcttgtccaaatgttccatctgaaatcttgaacccaactaaggcttggaccgaaggtgacgcctcattccaaaaggaaatcaagtccttagctggtaagttcgccgaaaactttaccaagtatgctgatcaagctaccactgaagtcaaggctgctggtcctgatgcttaa

SEQ ID NO: 82911 - protein, 553 aa, Debaryomyces hansenii CBS767
MTPPTAVESSINFGGHPTIKSTAEPVVKQLSLADDTVIRHNAPPPTLYEDGLLEKGTVISSTGALMAYSGKKTGRSPKDKRIVDEETSTQNIWWGPVNKQVDELTWKISRSRALDYLRTREKLFVVDAYAGWDPRYRLKIRVICARAYHALFMTNMLIRPTEEELKNFGEPDFTIYNAGQFPANVHTKGMTSSTSVEINFKDMEMVILGTEYAGEMKKGIFTVMFYLMPIKHKILTLHSSANQGEQKGDVTLFFGLSGTGKTTLSADPNRKLIGDDEHCWSDNGVFNIEGGCYAKCLDLSAEKEPEIFNSIKFGAILENVVYDQNSKVVDYADSTITENTRCAYPIDFIPSAKIPCLADEHPTNIVLLTCDASGVLPPVSKLTNAQVMYHFISGYTSKMAGTEEGVTEPQATFSACFGQPFLVLHPMKYAQQLSDKISKHNANAWLLNTGWVGASAAQGGNRCSLKYTRAILDAIHSGELSKVEFENFPTFNLNVPKSCPNVPSEILNPTKAWTEGDASFQKEIKSLAGKFAENFTKYADQATTEVKAAGPDA

SEQ ID NO: 82912 - DNA, 1671 bp, Yarrowia lipolytica CLIB122
  CDS (1)..(1671)
atgtctccccccgtcaaccagacccaacttcaccccaagggcgtcgagcccactcccgccgctgaggagattgagaaggaactctacgacattgctcacatcgagtacgagcgagtcaacattgaccacaacccctcggtggcctccctgtacgaggacgccctggtgcaggagtctggctctgccatcaactccaccggcgctctggtcgcctcgtccggaaagaagaccggccgatctcccaaggacaagcgaattgtggaggagcccggttccgtcgagcacatctggtggggccccgtcaacaagaagctgtctgagcagtcgtggctcatcaaccgagagcgagctgtcgactacctcaacacccgaaagcgaatctacgttgtggacgcctacgccggctgggaccccaagtaccgaatcaaggtgcgaattgtctgtgcccgagcctaccacgctctgttcatgcgaaacatgctgatccgacccaccgccgaggagctcaagaactttggcaagcccgacttcaccatctacaacgctggcgccttccccgccaaccgatacacctcgggaatgacctccaacacctcgatcgacatcaacttcaagtccatggagatgctcattctgggaactgagtacgccggtgagatgaagaagggtatcttcactgtcatgttctacctcatgcccgtcaagcaccaggtgcttactctgcactcttctgccaacgagggcaaggatggcgatgtcactcttttctttggcctgtccggaaccggaaagactactctgtctgccgaccccaaccgacttctgatcggagacgacgagcactgctggtccgacaccggcgtcttcaacattgagggcggctgctacgccaagtgcctgggtctctctcgagagaaggagcccgatattttcgacgccatcaagtttggctctgttctggagaacgttgtcttcgaccccattacccgagaggtcgactacgacgacgctaccctcaccgagaacacccgatgctcctaccccatcgagtacattcccaacgccaagctgccctgtgtcactgagtcccaccccaccaacatcattctgctcacctgtgatgcccgaggtgtcattccccccatctccaagctcaccaacgagcaggtcatgtaccacttcatttccggttacacctccaagatggccggaaccgaggagggtgtcactgagcccgaggccactttctctgcatgctttggccagcccttcctggttctgcaccccatgcagtacgccaagatgctgtctgataagatgacccagcacaacgccaacgcctggctgctcaacaccggatggaccggccagtcttacaccaacggaggcaagcgatgccctctcaagtacactcgatccattctggacgccatccactctggtgagctcgccaaggtcgagtacgagaactttgacgttttcaacctccaggttcccaagaccgcccccaacgtgccttctgagatcctcaaccccgcccgagcctggtccggaggaaaggagcagttcaccgaggaggtcaccaagctcggcaagctgttcaacgagaactttgagaagtacaaggacatggctatccccgaggtcattgctgccggccctaaggcttag

SEQ ID NO: 82913 - protein, 556 aa, Yarrowia lipolytica CLIB122
MSPPVNQTQLHPKGVEPTPAAEEIEKELYDIAHIEYERVNIDHNPSVASLYEDALVQESGSAINSTGALVASSGKKTGRSPKDKRIVEEPGSVEHIWWGPVNKKLSEQSWLINRERAVDYLNTRKRIYVVDAYAGWDPKYRIKVRIVCARAYHALFMRNMLIRPTAEELKNFGKPDFTIYNAGAFPANRYTSGMTSNTSIDINFKSMEMLILGTEYAGEMKKGIFTVMFYLMPVKHQVLTLHSSANEGKDGDVTLFFGLSGTGKTTLSADPNRLLIGDDEHCWSDTGVFNIEGGCYAKCLGLSREKEPDIFDAIKFGSVLENVVFDPITREVDYDDATLTENTRCSYPIEYIPNAKLPCVTESHPTNIILLTCDARGVIPPISKLTNEQVMYHFISGYTSKMAGTEEGVTEPEATFSACFGQPFLVLHPMQYAKMLSDKMTQHNANAWLLNTGWTGQSYTNGGKRCPLKYTRSILDAIHSGELAKVEYENFDVFNLQVPKTAPNVPSEILNPARAWSGGKEQFTEEVTKLGKLFNENFEKYKDMAIPEVIAAGPKA

SEQ ID NO: 82914 - DNA, 1671 bp, Aspergillus nidulans FGSC A4
  CDS (1)..(1671)
atggttgctacttctgtgaaccgtactgccctgcaccctggtggtgtccaacccggcaagggccacaccgaactcgaagaagaacttcatgaacacgcccacatcgactacgaccgcgttgctattattgccaacccttctgtcgctgccctctatgaagacgctcttgtctacgagactggtactgctatcacatcaagcggtgctctcacagcctactctggcgccaaaactggtcgctctccttcagataagcgaatcgtgaaggaggagtcttcagagaaggaggtctggtggggacccgtcaacaagcctatgaccccggatgtctggcgtatcaaccgtgagcgtgctgtcgactacctcaacacccgaaaccgtatctacgtgattgatggtttcgctggctgggatgagcgctaccgtatcagcgtccgtgtcgtctgcgcgcgcgcctaccatgctctcttcatgcgcaacatgcttatccgaccttctgccgaagaacttaagcacttccaccctgactacgtgatctacaacgctggttccttccctgccaaccgcttcactgagggtatgacatctgccacctccgtcgctatcaactttgccgagaaggagatggttatcctcggtactgagtacgccggagagatgaagaagggtgtcttcaccatcctcttctacgagatgcccgtcaagcacaatgtcctgaccttgcactcttctgccaacgagggccagaacggcgacgttactgtcttcttcggtctgtccggaactggcaaaaccaccctctccgccgaccccaagcgtgctttgatcggtgacgacgagcactgctggactgaccgtggtgtcttcaacatcgagggtggctgctacgccaagtgcattggcctctccgccgagaaggagcctgatatcttcaacgccatccgctttggttccgtcctcgagaacgtcgtcttcgaccccatcagccgcgttgttgactacgacgactccaccctcaccgaaaacacccgctgtgcctaccccatcgagtatattgagaacgccaaggttccctgcctctccgacagccacccctcaaacatcatcctcctcacatgcgatgctcgtggtgtactcccccctatctccaagcttaccaccgagcagaccatgttccacttcatctccggttacacctccaagatggccggtaccgaggacggtgtcacagagccccaggctaccttctcttcctgctttgcccagcccttccttgccctgcaccccatgcgctacgcccgcatgctcgcggacaagatctctcagcacaaggccaacgcctggcttctcaacaccggatgggttggcgctggcgccaccaccggcggcaagcgttgcccgctcaagtacactcgtgccatcctcgatgccatccacagcggcgagctcgccaaggctgagtacgagacttacgacgtcttcaaccttcacgtgcccaagagctgccccggtgtgcctgatgagcttctgaaccccaagaacagctggaccgctaccaccagcttctcggacgaggtcaacaagctcgctaagctgtttaacgagaatttccaaaagtacgctgaccaagccaccaaggaagtcatcgcggccggtcccgttgtccagtaa

SEQ ID NO: 82915 - protein, 556 aa, Aspergillus nidulans FGSC A4
MVATSVNRTALHPGGVQPGKGHTELEEELHEHAHIDYDRVAIIANPSVAALYEDALVYETGTAITSSGALTAYSGAKTGRSPSDKRIVKEESSEKEVWWGPVNKPMTPDVWRINRERAVDYLNTRNRIYVIDGFAGWDERYRISVRVVCARAYHALFMRNMLIRPSAEELKHFHPDYVIYNAGSFPANRFTEGMTSATSVAINFAEKEMVILGTEYAGEMKKGVFTILFYEMPVKHNVLTLHSSANEGQNGDVTVFFGLSGTGKTTLSADPKRALIGDDEHCWTDRGVFNIEGGCYAKCIGLSAEKEPDIFNAIRFGSVLENVVFDPISRVVDYDDSTLTENTRCAYPIEYIENAKVPCLSDSHPSNIILLTCDARGVLPPISKLTTEQTMFHFISGYTSKMAGTEDGVTEPQATFSSCFAQPFLALHPMRYARMLADKISQHKANAWLLNTGWVGAGATTGGKRCPLKYTRAILDAIHSGELAKAEYETYDVFNLHVPKSCPGVPDELLNPKNSWTATTSFSDEVNKLAKLFNENFQKYADQATKEVIAAGPVVQ

SEQ ID NO: 82916 - DNA, 1662 bp, Candida albicans SC5314
  CDS (1)..(1662): transl_table=12
atggctcctcctactgctgttgaatcttcaatcaatttcggaggtcacccaactatcaaatccactcaagacccattggtccaaaagttgtctcttaataccgacactgtgatcagacacaatgctccacctccaaccttatacgaagatggtttattagaaaaaggtactactatctcatctactggtgctttaatggcttactctggtaacaaaaccggtagatctcctaaagacaagagaattgtcgacgaatccacctcatcccataacatttggtggggtccagtgaataaacaagttgacgaattaacttggaagatttctagatcaagagctttggattacttgagaactagagaaaagttgtttgttgttgacgcttatgctggttgggatccaagatacagaatcaaggtcagaattatctgtgctagagcttaccatgctttgttcatgaccaatatgttgatcagaccaactgaagaagaattaaaaaactttggtgaaccagatttcaccatctacaatgctggtcaattcccagccaacatccacactaaaggtatgacttctgccacttctgttgaaatcaactttaaagatatggaaatggttatcttgggtactgaatatgctggtgaaatgaagaaaggtatctttactgttatgttctacttgatgccaatcaaacacaaggttttgactttgcactcctcatgtaaccaaggggttgaaaaaggtgatgtcactttgttctttggtctttctggtactggtaagaccactttgtctgctgatccacaaagaaagttgattggtgatgacgaacattgttggtccgacaatggtgtgttcaacattgaaggtggttgttacgccaaatgtttggacttgtctgctgaaaaagaaccagaaattttcaactccatcaagtttggtgctattttggaaaatgttgtctacgacccaatcaccaaggttgttgactacgaagattcatcaatcactgaaaacactagatgtgcatacccaattgatttcattccatctgccaagattccatgtttggccgacacccatccaaccaatattatcttgttaacatgtgatgcttccggtgtgttgccaccagtctccaaattgactaatgctcaagttatgtatcatttcatttctggttacacctccaagatggcaggtactgaagaaggtgttactgaaccacaagctacattctccgcatgtttcggtcaaccattcttggtgttgcacccaatgaaatatgctcaacaattgtctgacaagatttccgaacacaatgccaacgcttggttgttgaacactggttgggttggttcttctgttgctcaaggtggtaagagatgtccattgaaatacaccagagctatcttggatgctatccactctggtgaattgtctaaagtcgaatacgaaaaagttccagttttcaaccttaatgttccaacttcttgtcctggtgttccaagtgaaattttgaacccaactaaagcttggacccaaggtactgattcattcaacaaggaaatcaaatctcttgctaccaagtttgctgaaaacttcaagacatacgctgatcaagctactgctgaagttaaagctgctggtccagaagcataa

SEQ ID NO: 82917 - protein, 553 aa, Candida albicans SC5314
MAPPTAVESSINFGGHPTIKSTQDPLVQKLSLNTDTVIRHNAPPPTLYEDGLLEKGTTISSTGALMAYSGNKTGRSPKDKRIVDESTSSHNIWWGPVNKQVDELTWKISRSRALDYLRTREKLFVVDAYAGWDPRYRIKVRIICARAYHALFMTNMLIRPTEEELKNFGEPDFTIYNAGQFPANIHTKGMTSATSVEINFKDMEMVILGTEYAGEMKKGIFTVMFYLMPIKHKVLTLHSSCNQGVEKGDVTLFFGLSGTGKTTLSADPQRKLIGDDEHCWSDNGVFNIEGGCYAKCLDLSAEKEPEIFNSIKFGAILENVVYDPITKVVDYEDSSITENTRCAYPIDFIPSAKIPCLADTHPTNIILLTCDASGVLPPVSKLTNAQVMYHFISGYTSKMAGTEEGVTEPQATFSACFGQPFLVLHPMKYAQQLSDKISEHNANAWLLNTGWVGSSVAQGGKRCPLKYTRAILDAIHSGELSKVEYEKVPVFNLNVPTSCPGVPSEILNPTKAWTQGTDSFNKEIKSLATKFAENFKTYADQATAEVKAAGPEA

SEQ ID NO: 82918 - DNA, 1659 bp, Ustilago maydis 521
  CDS (1)..(1659)
atgacttcgccaggaaaccaccacgatgatttgctcaccaacaaccctcactacacgctcttgggctccgacctgaagctcttctcggatgccggtttcgacatggacaagattcacctgaagcgcaatgcttccgtcgcgcagctctacgaagacgccatcaagaaagagggcgccgttatctcgtcggccggtgccttgatcaactactctggcaagaagaccggtcgttcgcccaaggacaagcgtatcgttttcgaggagacctccaaggaccacgtgtggtggggtcccgtcaacatcaagatggatgagcacacgtttgagatcaaccgtgagcgtgccatcgactacctcaacacccgtgacgacatttacgtctttgacggctttgcaggctgggaccccaagtaccgcatcaaggtgcgaatcatctgcagccgtgcctaccacgcgcttttcatgaacaacatgcttattcgccctaccgccgaagagctcgagcactttggtgagcccgactttatcatctacaacgccggtcagttccctgccaaccgtttcaccgccggtatgacttcatccacatcggtcgaggtcaactttaagcgtcacgagatggttatcctcggtaccgagtacgcgggtgagatgaagaagggcatcttctcggtcatgcactacctcatgcccgtcaagtttaaccagctctcgctgcactcttcggccaacgagggccctgacggtgacgtatcgctcttctttggtctctcgggtaccggcaagaccacgctctcggccgaccccaagcgtgcgctcatcggcgacgacgagcacgtgtggtcggacgagggtgtgttcaacattgagggtggttgctacgccaagtgcatcggtctctctgctgccaaggagcccgagatctacaacgcgattcgctttggtgccgtgctggaaaacgtcgtgtacgacaaaaacacgcgtgaagtcgactacgacgatgtggtgattacggaaaacacgcgatgctcgtacccgatcgagtttatccccaacgccaagatcccctgcatgtccaactcgccacccaagaacatcatcttcttgacttgcgacgcttacggtgtcttgccgcccgtctcgaagctggatgccaaccaggctcagtaccactttatctcgggttacacctccaagacgcccggtaccgaggatggtatccaggagccgtcgcccaccttctcgacgtgctacggtcagccattcattgtgcttcaccctcgcgtttacgccaagatgcttgccgagcgcatggagaagcacaaggccgacgtctggctcgtcaacaccggttgggcgggtggcaagtttggtgtcggtcagcgatgccctctcaagtacacgcgcaagatcatcgactcgatccacgacggctcattggccaagtccaagttccagaactttggcgtgttcaacctgcagatccctgaggccatcgagggcgtccccgagacgctgctcaaccctgccaccagctggccagacaagggcgcattcaaggccgagctgaacaagctcgccgagatgttctcgaccaactttgaaaagtacgtcaacgacgtttctgccgaggtcgccgctgctggccccaagctttga

SEQ ID NO: 82919 - protein, 552 aa, Ustilago maydis 521
MTSPGNHHDDLLTNNPHYTLLGSDLKLFSDAGFDMDKIHLKRNASVAQLYEDAIKKEGAVISSAGALINYSGKKTGRSPKDKRIVFEETSKDHVWWGPVNIKMDEHTFEINRERAIDYLNTRDDIYVFDGFAGWDPKYRIKVRIICSRAYHALFMNNMLIRPTAEELEHFGEPDFIIYNAGQFPANRFTAGMTSSTSVEVNFKRHEMVILGTEYAGEMKKGIFSVMHYLMPVKFNQLSLHSSANEGPDGDVSLFFGLSGTGKTTLSADPKRALIGDDEHVWSDEGVFNIEGGCYAKCIGLSAAKEPEIYNAIRFGAVLENVVYDKNTREVDYDDVVITENTRCSYPIEFIPNAKIPCMSNSPPKNIIFLTCDAYGVLPPVSKLDANQAQYHFISGYTSKTPGTEDGIQEPSPTFSTCYGQPFIVLHPRVYAKMLAERMEKHKADVWLVNTGWAGGKFGVGQRCPLKYTRKIIDSIHDGSLAKSKFQNFGVFNLQIPEAIEGVPETLLNPATSWPDKGAFKAELNKLAEMFSTNFEKYVNDVSAEVAAAGPKL

SEQ ID NO: 82920 - DNA, 1587 bp, Francisella tularensis subsp. holarctica
  CDS (1)..(1587): transl_table=11
atggatccttcaaccatagatgagtataagtatctatatacttgtgaaaatgtgcataaaaatctctctctccaagaattagcaaaatacgcacataatagtgatggttttatttgctacgataataaaactttagtagttggcagtggtgaaatcaagggtcgacttcctgatgataaatatattgttgagactaaatatgccaaaaaaaatatttggtggagtgaaaatggctcagataataaaagattaaaaagaaaaaactggaagctgattaaacaaagattatgtcaagaggtagtaacaaaggatctttttgttgtagatggtttttataatcatgatgagagatataccatagcggttagactaataactacccaagcttcagctgcatatttttttaagttgatatcgataactccgagtgaaaaagaattacagtcatttgagccacaatgggtaataatgcattcccctcaaacacagatagaagattaccaagaccttgatttaaattcttcaaaagtaatagcaactaaccttaagcagcgagaaagtatattggttgggactatgtatcttgctgagataaataaggtattgttgtcgattatgagctattatctcttgctcaacgatattggcgtattttactgtgctgtcagtgttgatgctgaagctaatagtacaatattttttggtttgtcaggtagcggtaaaacaacgttagctttagaccaaaataagagtcttgttgcaaatgaggctattgcttggacagaaatgcgtggtgtgtatagtctagagtcaggtttgacaattaaatcagcaagttttaaaaaagacgatccgcgtatcaaacaagcattagctggggaccttttgatagaaaatcctaactttgatgatagtcacaatattatatttggtgagaaaaatagttcacaaagtaatacttatgtaactttcccacgtgaaaattttgttaatgttataaacactgataaccctaacacaataatttttcttgtcaaagatgcaaaaggtgtattaccaagagttgcaaaacttagtaaaggtcaggcaatttactattttttatctggatatacttctacatctataggagtagaggcaggtgttacagagcctaaaccagagtttacaagttgctatgctcagccatttctattacttaagccaactagatatgcaagtatattgcgtcagcgtttgaagcatagtaatgctaaaatttatatgataaatgttggctggattgagggtgattataagacaggtagaagggttcctgttgaagagacaaaacttattgttaactacttattgactaaaccagagaatgttagctttaaatttacacgtcaaaaatattttaactttaaagctttaacttcaataaatgataatggtcaagagcttcaacttaccaataattggagtgatagtgctgaatataaaaaagaatataagtctttagcaagagcttttatcaaaaactatgagcagtttgaaaatgatgattttgcactaaaatataaaaaatttgaaccaattatttag

SEQ ID NO: 82921 - protein, 528 aa, Francisella tularensis subsp. holarctica
MDPSTIDEYKYLYTCENVHKNLSLQELAKYAHNSDGFICYDNKTLVVGSGEIKGRLPDDKYIVETKYAKKNIWWSENGSDNKRLKRKNWKLIKQRLCQEVVTKDLFVVDGFYNHDERYTIAVRLITTQASAAYFFKLISITPSEKELQSFEPQWVIMHSPQTQIEDYQDLDLNSSKVIATNLKQRESILVGTMYLAEINKVLLSIMSYYLLLNDIGVFYCAVSVDAEANSTIFFGLSGSGKTTLALDQNKSLVANEAIAWTEMRGVYSLESGLTIKSASFKKDDPRIKQALAGDLLIENPNFDDSHNIIFGEKNSSQSNTYVTFPRENFVNVINTDNPNTIIFLVKDAKGVLPRVAKLSKGQAIYYFLSGYTSTSIGVEAGVTEPKPEFTSCYAQPFLLLKPTRYASILRQRLKHSNAKIYMINVGWIEGDYKTGRRVPVEETKLIVNYLLTKPENVSFKFTRQKYFNFKALTSINDNGQELQLTNNWSDSAEYKKEYKSLARAFIKNYEQFENDDFALKYKKFEPII

SEQ ID NO: 82922 - DNA, 1542 bp, Desulfitobacterium hafniense Y51
  CDS (1)..(1542): transl_table=11
atggatcaaattgttcatcataatttagaggtatcagaattagttgacatggcccttgagcgtggagaaggtactcttgcttccagtggagcatttcgtgtaagtacggggaaatataccggacgttcccctctcgataaatttatcgtcgatgaaccttcggtccatgagcggatcgattggggctcagtgaaccgccctattgcccaggaatactttgagaagctttatgatgaagtccaagcctatctagaagctaaagaagaagtgtttatttttgatggctttgccggggcagatgaagaataccggcttcccatccgggtcatcaatgagttcgcctggcaaaatctctttgtacaccaactctttattcgccccaccccagaggaattagataaccatcaagcccagtttacgattattgctgtccccagctttaaagctgatccggaagtccatggaacccattccgaggcctttatcatttgctccttcgaaaagcgggtggtattgattggggggacccattatgccggcgagatgaagaaatccattttcagcgtcatgaactactatttgcctttaagggaagtcatgcccatgcattgttcggccaatatcggtgcggatggggatgtagccctgttctttggtttatccggaacgggaaagaccaccctttccgccgatccggagcgctgtttaatcggtgatgatgagcatggctggtcaaaaaacggggtctttaattttgaagggggctgctatgccaaatgcatcaacctttccgaggaaaaagaaccgcagatttggcaggccatccgctttggaacggttctggaaaacgtcgttcttcatccggacacccaggttgccgattatgacgatgccacactgacggaaaatacacgggcggcttaccccatcgactatatcgaaggagccgtaatccccggtgtagggggacagcctaaggtgattgttttcctcaccgcggacgcctttggcgtattgcctcccatcgccaaactcaccaaggaacaagcgatgtatcatttcttatccggatatacctccaagctggccggaactgagcggggaattacagagccacaggcgactttttccacctgctttggtgctcccttccttcctttggcaccccaagtgtatgcggaaatgctgggagagagaatcgacacctatggcacacgggtctatctggtcaataccggttggtccggcggcgcttacggggtgggcaagcgtatcaaactgggctatacccgggcgatgattacggcagccctccagggcactttggagcaggctgaattcaccgctgatccgaattttggcgtcctggttcctgaccatgtggaaggggtacccagtgaggttttaaatccaagattgacctggcagaataaagaggcttatgatatcaatgccagggaactggctcagcgcttccaaaagaacttcgagcaatttgcccagactgctgaagaaatccgccaggccgggccgaaagcttaa

SEQ ID NO: 82923 - protein, 513 aa, Desulfitobacterium hafniense Y51
MDQIVHHNLEVSELVDMALERGEGTLASSGAFRVSTGKYTGRSPLDKFIVDEPSVHERIDWGSVNRPIAQEYFEKLYDEVQAYLEAKEEVFIFDGFAGADEEYRLPIRVINEFAWQNLFVHQLFIRPTPEELDNHQAQFTIIAVPSFKADPEVHGTHSEAFIICSFEKRVVLIGGTHYAGEMKKSIFSVMNYYLPLREVMPMHCSANIGADGDVALFFGLSGTGKTTLSADPERCLIGDDEHGWSKNGVFNFEGGCYAKCINLSEEKEPQIWQAIRFGTVLENVVLHPDTQVADYDDATLTENTRAAYPIDYIEGAVIPGVGGQPKVIVFLTADAFGVLPPIAKLTKEQAMYHFLSGYTSKLAGTERGITEPQATFSTCFGAPFLPLAPQVYAEMLGERIDTYGTRVYLVNTGWSGGAYGVGKRIKLGYTRAMITAALQGTLEQAEFTADPNFGVLVPDHVEGVPSEVLNPRLTWQNKEAYDINARELAQRFQKNFEQFAQTAEEIRQAGPKA

SEQ ID NO: 82924 - DNA, 1656 bp, Saccharophagus degradans 2-40
  CDS (1)..(1656): transl_table=11
atggcactaaacgagcagcaaacgaattttaaaataggtgcgcctttcgcttctgatgtgtctgtgtttttagctaatctgggtataagcgcaagcgaaattgtgcgcaaccctagttacgacatgttgtacaggaatgagttagatgaaaatttacaaggctgcgagcgcggtattttaaccaaaaccggtgcagtgaatgtagatactggcgtttttactggtcggtcgccgaaggataaatatattgttaaagatgaaaaagcatcggcgaatgtttggtggcccagcgatgccgcgtctaacgataaccatcctatggatcaaagtacgtggaccagactaaaagcagtgtgtaccaatcaacttaataataagccgctgtatgttgtggatgcattttgcggtgccagcgacgatgtgcgcgtaagtgtacgatttgttacagaggtggcgtggcaggcgcactttgttactaatatgtttattcgtccgacccaggcgcagcttgatgcgtttactccagactttgttgtgttgaatgcttccaaggctgtaaatacgcaatggcagcagcaggggttaaactctgaaaattttgtagcctttaatttaactgaaaacatgcagcttattggcggcacctggtatggtggcgaaatgaaaaaaggcatgttctcggtaatgaattattacttgccactacatggccgagcctccatgcacgcctctgccaatgttggtagcgatggcgatgtggccgttttctttggcttgtctggcacgggcaaaacaacactctcagcagaccctcagcgcgctctcattggcgacgatgagttggggtgggatgacgaaggcgtatttaatttagagggcggctgctacgctaaaaccattgatttaagtgagcaaaacgaacccgatatctttcgcgcaattcggcgagatgcactgcttgaaaatgttgcagtggatgcgaatggcgaggtggattatagcgatgtaagtaaaacgcaaaatacgcgagtgtcttaccctatttatcacattccaaattgcgttaagcctgtgtcacgtggtggtcacgcgcgtaaaattatctttcttaccgccgatgcctttggtgtgtttccgccagtaagtaagcttaccgacgagcaggcgcagtaccactttttatcgggttttacctcaaaggtagcgggcaccgagctgggggtaaccgagcctagtcctactttctctgcctgctttggcgaggcgtttttatctttacaccctacggtttatgcgcgggaattgatcaagcgtatgcatgcgaatggcacgcaggcttatttggtgaatactggctggaacggcaaggggaagcgcatttcattgccagatactcgtgccataatcaacgccattatggatggctctatcgacagtgccccctgcgcgacattgccttattttaatttggcattccctacgcagttgtcaggggtagatagcgctatcttggacccgcaggtttctcataatgctggaggttgggatgtgcaggcgaaagcattggcaaaactatttgccactaattttaaaaaatataccagcgaagccttggggcagcacttacaagcggtagggccggcggggtttgaataa

SEQ ID NO: 82925 - protein, 551 aa, Saccharophagus degradans 2-40
MALNEQQTNFKIGAPFASDVSVFLANLGISASEIVRNPSYDMLYRNELDENLQGCERGILTKTGAVNVDTGVFTGRSPKDKYIVKDEKASANVWWPSDAASNDNHPMDQSTWTRLKAVCTNQLNNKPLYVVDAFCGASDDVRVSVRFVTEVAWQAHFVTNMFIRPTQAQLDAFTPDFVVLNASKAVNTQWQQQGLNSENFVAFNLTENMQLIGGTWYGGEMKKGMFSVMNYYLPLHGRASMHASANVGSDGDVAVFFGLSGTGKTTLSADPQRALIGDDELGWDDEGVFNLEGGCYAKTIDLSEQNEPDIFRAIRRDALLENVAVDANGEVDYSDVSKTQNTRVSYPIYHIPNCVKPVSRGGHARKIIFLTADAFGVFPPVSKLTDEQAQYHFLSGFTSKVAGTELGVTEPSPTFSACFGEAFLSLHPTVYARELIKRMHANGTQAYLVNTGWNGKGKRISLPDTRAIINAIMDGSIDSAPCATLPYFNLAFPTQLSGVDSAILDPQVSHNAGGWDVQAKALAKLFATNFKKYTSEALGQHLQAVGPAGFE

SEQ ID NO: 82926 - DNA, 1599 bp, Silicibacter sp. TM1040
  CDS (1)..(1599): transl_table=11
atgacatctggacgggtaaacccgaacttccgcctcgaggatcagggaatagagggtctgggcaatgtctattataacctcatggaaccggcccttgttcaagaagcgctcagccgtggcgaaggcaaccttggaaaagggggcgctttcctcgtcaccaccggcaagttcacgggtcgctcccccaaggacaaacatgtggtgaagacggcctctgttgccgatacgatctggtgggaaaacaacgccgaaatgagccccgagggctttgacgcgctttatgcggacatggtcgagcacatgaaaggccgcgactatttcgtgcaggatctcgtcgggggcgcggaccccgtgcacgcgatcaatgtgcgcatggtcaccgagctggcgtggcacaacctctttatccgccacctgctgcgtcgccccgaccgcgaagatctggatgacttcatcgccgatttcaccatcatcaactgcccctctttccaggcagaccccaataagcacaactgccgatccgaaaccgtgattgcgctgaacttcgatcgcaagatgatcctgatcggcggcaccgagtatgcgggtgagaacaagaaatccgtcttcacccttctgaactacctgctccccgaaaagggcatcatgccgatgcactgctcggccaaccatgccaagggcaacccggtcgacaccgccgtgttcttcggcctgtcaggcaccggcaaaaccacgctttcggcagacccggaccgcgtgctgatcggcgatgatgagcatggctgggcgtccaacggcaccttcaactttgagggcggctgttacgcgaagacgatcaacctcaaccccgaggcggagcctgagatttacgccacgaccgagaaattcggcaccgtgatcgagaacatgaccttcgatccggagacttttgatctcaacttcgatgatgacagcctgacggccaacatgcgctgcgcctacccgctgcattatatctcgaatgcatctgcttcggcgcgtggcggacatcccaagaacatcatcatgctcacctgtgatgcctttggcgtgctgcctccgattgcccgtctgacgccggcccaggcgatgtaccacttcctctccggcttcacttccaaggtcgccgggaccgagcgtggcgtcaccgagccggagcccacgttctccacctgctttggcgcgcccttcatgccgcgtcgccccgaggtctatggcaacctcctgcgcgaaaagatcgcggcccatggtgcaacctgctggctggtgaacaccggctggaccggcggcgcctatggcacgggttcccgcatgccgatcaaagcgacccgtgcgcttttgactgctgcgcttgatggctcgctggcaaatgcagagttccgcaaagatccgaactttggctttgacgtgccagtcgctgctcccggcgttgccgaagtgctgctcgacccgcgccgcacatgggacgacaaagccgcctatgacgcgcaggccgagaagctggtgcagatgttctctgacaacttcgaacagtacctgccctacatcgatgaggacgtgaaagcagccgccatctgctga

SEQ ID NO: 82927 - protein, 532 aa, Silicibacter sp. TM1040
MTSGRVNPNFRLEDQGIEGLGNVYYNLMEPALVQEALSRGEGNLGKGGAFLVTTGKFTGRSPKDKHVVKTASVADTIWWENNAEMSPEGFDALYADMVEHMKGRDYFVQDLVGGADPVHAINVRMVTELAWHNLFIRHLLRRPDREDLDDFIADFTIINCPSFQADPNKHNCRSETVIALNFDRKMILIGGTEYAGENKKSVFTLLNYLLPEKGIMPMHCSANHAKGNPVDTAVFFGLSGTGKTTLSADPDRVLIGDDEHGWASNGTFNFEGGCYAKTINLNPEAEPEIYATTEKFGTVIENMTFDPETFDLNFDDDSLTANMRCAYPLHYISNASASARGGHPKNIIMLTCDAFGVLPPIARLTPAQAMYHFLSGFTSKVAGTERGVTEPEPTFSTCFGAPFMPRRPEVYGNLLREKIAAHGATCWLVNTGWTGGAYGTGSRMPIKATRALLTAALDGSLANAEFRKDPNFGFDVPVAAPGVAEVLLDPRRTWDDKAAYDAQAEKLVQMFSDNFEQYLPYIDEDVKAAAIC

SEQ ID NO: 82928 - DNA, 1599 bp, Rubrobacter xylanophilus DSM 9941
  CDS (1)..(1599): transl_table=11
atggaccttgcggttcgtaagatgaccctcgaagggcttggggtctcgcaactcggcgcggtgcatgagaacctccccccggcgaggctcgtggaggcctcggtacgccgcagggagggcatgctggccgagaacggggccctggtgtgcctgaccggcaagcgcaccggccgctcgcccaaggaccgctttatagtcgagaacggcctcacccgggggcccgtggactggggcccggtgaacaagcccttccccggggagcggttcgagcggctgctcgccaaggcctcggcctatctcgagaacctcgaggaggtctacgtcgtcgacgcctacgccggggccgacccgcgctaccggctcaacgtccaggtggtctgcgagtacgcctggcaggcgctcttcacccgccagctcttccggcggccgtcccgcgaggagctggacgccttcgagccggactggaccgtcatctcggtgcccggcctcctcaccgacccggaggaggacggcacggagtccgagaccttcgtcgggatagacttcgggcggcgggtggtgctcatctgcggcacgcgctacgcgggcgagatcaagaagagcatcttctcggtgctgaacttcgtgctgcccaccgagcacggggtcttccccatgcactgctcggccaacgtggggcccgggggggacgtcgcgctctttttcggtctctccgggacgggcaagaccaccctctcctcggaccccgagcgctacctcatcggcgacgacgagcacggctggtctgacgaggggatcttcaacttcgagggcggctgctacgccaagtgcatagacctctcccgggagaaggagccccagatctacgacgccatccgcttcggggcggtcctggagaacgtggtggtggacaggatcacgcgccgggtggactactccgacgcctcgctcaccgagaacacccgggccgcctaccccctggagtacatcgagggggcggtggattccggccgggcggggcacccggccgcggtgctcttcctcaccgccgacgccttcggggtgctcccccccataagcgtcctctcgcccgagcaggccgcctactacttcctctccggctacacggcgaagctcgccggcaccgaggcggatatggaggccgacgtggaggccaccttctccgcctgcttcggggcacccttcctccccctgccggccaccacctacgccgccatgctctccgagaagctccgcgagcacggctcccgctgctacctcatcaacaccggctggtccggcggcccctacggcgtgggggagcgggtggacatcgcggcgacgcgccagatggtccgggccgtcatcgccggaaacatcgacgagtccaagacctataccgacccgttcttcgggctccaggtgccgctcgaggtgcccggggtcccctccggtatcctcaacccccgcgagacctgggccgacagggccgcctacgacgaccaggccgcaaagctcgccgacctcttccgcgagaacttcaagaagttcgaggatggggtgcccgaaggggtgcgtaaggccggacccaacgtctag

SEQ ID NO: 82929 - protein, 532 aa, Rubrobacter xylanophilus DSM 9941
MDLAVRKMTLEGLGVSQLGAVHENLPPARLVEASVRRREGMLAENGALVCLTGKRTGRSPKDRFIVENGLTRGPVDWGPVNKPFPGERFERLLAKASAYLENLEEVYVVDAYAGADPRYRLNVQVVCEYAWQALFTRQLFRRPSREELDAFEPDWTVISVPGLLTDPEEDGTESETFVGIDFGRRVVLICGTRYAGEIKKSIFSVLNFVLPTEHGVFPMHCSANVGPGGDVALFFGLSGTGKTTLSSDPERYLIGDDEHGWSDEGIFNFEGGCYAKCIDLSREKEPQIYDAIRFGAVLENVVVDRITRRVDYSDASLTENTRAAYPLEYIEGAVDSGRAGHPAAVLFLTADAFGVLPPISVLSPEQAAYYFLSGYTAKLAGTEADMEADVEATFSACFGAPFLPLPATTYAAMLSEKLREHGSRCYLINTGWSGGPYGVGERVDIAATRQMVRAVIAGNIDESKTYTDPFFGLQVPLEVPGVPSGILNPRETWADRAAYDDQAAKLADLFRENFKKFEDGVPEGVRKAGPNV

SEQ ID NO: 82930 - DNA, 1611 bp, Mesorhizobium sp. BNC1
  CDS (1)..(1611): transl_table=11
atgcaagagaccggcctccgcaaccccaccaacggcatcgagaccagtggtttgaagaccagcgggaccgttttcttcaatctcaccgagccgcaactttatgaggaggcgatccggcgcgccgaggcgcggatttccgctcacggggccctcgttgccgagacgggacagcacaccggccgctcgcccaaggacaagttcattgtgcgagatgccagcacggaaaacgagatctggtgggacaacaataagccgctatcgggcgaacattttgaagcactctacgaggacttcaagcgtcacgccgagagccttgaccttttcgtacaggatctcgtcggcggggctgatccggaaaacgcgctgccggtgcgcgtcgtcacggaatatgcctggcattcgctcttcatccgcaatctgctgatccgcccgatgcgctcggagctcaagagcttcgtgccgcagatgacggtgatcgatctgccgtccttccgcgccgatccgaagcggcatggctgccgcacggaaaccattatcgcgatggatctgaagcgcatgatcgtgctgatcggcggcacgtcctatgcgggggaaatgaaaaaatccgtcttcactgcgctcaattacctgcttccggccaagggcgtgatgcccatgcactgctcggccaatgagggatccgagggcgacgttgcgatcttcttcggcctgtcgggcacgggaaagacgaccctttccgccgaaccttcgcgcacgcttatcggcgatgacgagcacgggtgggggccgcacggcatcttcaatttcgaaggcgggtgctacgccaagacgatcaagctcagccgggaggcggagccggagattttcgccaccacggaacgcttcggcacggtgctggaaaatgtggtcgtcgacgagcacggcgttcccgatttcgacgatggcagccggaccgagaacacgcgctgcgcatatccgctgcacttcatctccaatgccagcgagacgggcagggcagggcagccaaagaacgtcatcatgctgacggcggatgcctttggcgtgatgccacccatcgccaagcttacccctgcccaggccatgtaccatttcctgtcgggctacacggcgaaagtggcgggaacggaaaaaggcgtcaccgagccggaggccaccttctccacctgtttcggcgcacccttcatgccccgccatccttcggtctacggaaatcttctcagagacctgatcgcagagcacgaggtcgactgctggctagtcaatactggttggaccggcggcgcctacggcactggccaccgcatgcccatcaaggtgacacgcgccctgctctccgctgcactcgacggctcgcttcgaacagcccagttccgtaccgaccccaattttggctttgccgtacccgtggcggtgccgggcgtagacggcaccatcctcgatccgcgctcaacctgggcagataaggccgcctatgatgtgcaggccgagcggcttgtttccatgttcgtcgccaatttcgggaaattcgagaatcacgtggaagcagacgtgatgaatgcatcgcctcagatccggcaggctgctgaatag

SEQ ID NO: 82931 - protein, 536 aa, Mesorhizobium sp. BNC1
MQETGLRNPTNGIETSGLKTSGTVFFNLTEPQLYEEAIRRAEARISAHGALVAETGQHTGRSPKDKFIVRDASTENEIWWDNNKPLSGEHFEALYEDFKRHAESLDLFVQDLVGGADPENALPVRVVTEYAWHSLFIRNLLIRPMRSELKSFVPQMTVIDLPSFRADPKRHGCRTETIIAMDLKRMIVLIGGTSYAGEMKKSVFTALNYLLPAKGVMPMHCSANEGSEGDVAIFFGLSGTGKTTLSAEPSRTLIGDDEHGWGPHGIFNFEGGCYAKTIKLSREAEPEIFATTERFGTVLENVVVDEHGVPDFDDGSRTENTRCAYPLHFISNASETGRAGQPKNVIMLTADAFGVMPPIAKLTPAQAMYHFLSGYTAKVAGTEKGVTEPEATFSTCFGAPFMPRHPSVYGNLLRDLIAEHEVDCWLVNTGWTGGAYGTGHRMPIKVTRALLSAALDGSLRTAQFRTDPNFGFAVPVAVPGVDGTILDPRSTWADKAAYDVQAERLVSMFVANFGKFENHVEADVMNASPQIRQAAE

SEQ ID NO: 82932 - DNA, 1617 bp, Haemophilus somnus 129PT
  CDS (1)..(1617): transl_table=11
atgactgacttaaacaaagtaataaatgaattaggtgaattaggcatctatgatgtaaaagagattgtccataatccgagttatgaacaactttttgaagaagaaaccaaaccgggtttagcgggcttcgagaaaggtgttgttaccacttcaggtgcggttgcggtagatacgggaatttttaccggtcgttcgccaaaagataagtacattgttttagatgaaaaaacaaaaaatacggtatggtggacgagcgatgcggcgaaaaacgacaataagccgatgaaccaagaaacttggcaaagtttgaaagggttggtcaccaaacagctttccggcaagcgtttgtttgttatcgacgctttttgcggagcaaaccctgatacacgtttagcagtgcgtattgttactgaagttgcatggcaggcacattttgtaaaaaatatgtttattcgtccgtctgatgaagaattgcaaaatttcaaaccggactttacggttatgaacggttctaaagtaactaacccgaattggaaagagcaaggattaaattcagagaactttgtggcatttaacattactgagggcgttcaattaatcggcggtacttggtacggcggtgaaatgaaaaaagggatgttctcaatgatgaactacttcttaccattaaaaggtatcgcctcaatgcactgttctgcaaacgtaggcaaagatggcgatgtggcgattttcttcggcctatccggtacaggtaaaacaacgctttcaaccgatccgaaacgtcaattaatcggtgatgatgaacatggctgggatgatgacggtgtcttcaactatgaaggtggttgttatgcaaaaacaatcaaactttccgcagaaagcgagcctgatatttatcgtgcaatcagacgtgatgcgttgttagaaaatgttgtcgttcgtgaggatggttccgttgactttgatgacggttcaaaaacggagaatactcgtgtatcttatccaatttaccacattgacaatattgttaaaccggtatcaaaagcaggacatgcaacaaaagttatcttcttaacggcagatgcgttcggtgtcttacctccggtttcaaaactcacacctgaacaaactaaatactacttcttatccggtttcactgcaaaattagctggtacagagcgtggcattactgagccgacgccaacattctctgcctgtttcggtgcggcattcttaagtttgcacccaacccaatacgcagaagtgttggtaaaacgtatgaaagattctggtgctgaagcgtacttagtcaatacaggttggaacggtacaggtaaacgcatctcaattaaagatactcgtggcattatcgacgctatcttagacggctcaattgaaagtgcggaaatgggatcattaccaatcttcgatttggccattccaaaagcattaccaggtgttgatcctgcaatcttagatcctcgtgatacttatgcggataaagcacaatggcaagcaaaagcggaagaccttgcaagtcgtttcgtgaaaaactttgaaaaatatgctacaaatgaagaaggaaaagcacttattgcggcaggtcctaaagcttaa

SEQ ID NO: 82933 - protein, 538 aa, Haemophilus somnus 129PT
MTDLNKVINELGELGIYDVKEIVHNPSYEQLFEEETKPGLAGFEKGVVTTSGAVAVDTGIFTGRSPKDKYIVLDEKTKNTVWWTSDAAKNDNKPMNQETWQSLKGLVTKQLSGKRLFVIDAFCGANPDTRLAVRIVTEVAWQAHFVKNMFIRPSDEELQNFKPDFTVMNGSKVTNPNWKEQGLNSENFVAFNITEGVQLIGGTWYGGEMKKGMFSMMNYFLPLKGIASMHCSANVGKDGDVAIFFGLSGTGKTTLSTDPKRQLIGDDEHGWDDDGVFNYEGGCYAKTIKLSAESEPDIYRAIRRDALLENVVVREDGSVDFDDGSKTENTRVSYPIYHIDNIVKPVSKAGHATKVIFLTADAFGVLPPVSKLTPEQTKYYFLSGFTAKLAGTERGITEPTPTFSACFGAAFLSLHPTQYAEVLVKRMKDSGAEAYLVNTGWNGTGKRISIKDTRGIIDAILDGSIESAEMGSLPIFDLAIPKALPGVDPAILDPRDTYADKAQWQAKAEDLASRFVKNFEKYATNEEGKALIAAGPKA

SEQ ID NO: 82934 - DNA, 1542 bp, Shewanella sp. MR-7
  CDS (1)..(1542): transl_table=11
atggcggatggattaaaccgcgttcattacaacccctcaacagcacaactggtcgaatttgccctgctacgcggcgaaggtgaattaaccgccaatggtgcgctggttgccaaaaccggtacccgcactggtcgctctcctggcgatcgttttattgttaaagaacccagttcagcggctgacatcgaatggggcccagtcaaccaagcatttgaacccggtgcttttgaaggattatgggcgcgtgtagaagcattcctcgccgataaagagttgtttgtatctgacctcgaagtcggtgcagacccagaacattaccagccagtgcgtgtgacgactcaatacgcttggcaccaactgttcgcccgcaacctttttatcatcccagaagaatttaaccgtcaagacaagcctgtatgggaaatcatcaacgcaccagacttcgtctgtgttcctgagcgtgatggcaccaattcagatgcggcggtgatcttaaactttgccgagcgcaaagtgttgctagcgggcctgaaatacgctggcgaaatgaagaagtcgatgttctctgtacaaaacttcctgctgccagcccaaggcgtattgccaatgcactgctcggctaacgtaggtaaagatggcgacactactctattcttcggtctgtcaggcacgggtaaaaccacgctgtctgcggatccaaaacgcttcctgatcggtgacgatgagcacggctgggcaccaggcggtgtattcaacatcgaaggcggctgctacgccaagtgtatcgacctgagccaaaagaacgagccagtaatttgggatgcgattcgcttcggtactgtgctggaaaacgtggtaatggacgaacaccgcgtgcctaactacaaagacagcagcctgacggaaaacacccgtgcggcttacccactcgagcatatcgctcagcgtaaagaagacaaccgtggcgccgagccgcacgcagtggtgttcttaacctgcgacgtgtctggcgtattaccaccggtttctatcctgagcaaagagcaagcggcttaccacttcctctctggttacaccgctaaagtcggttcgactgaaatcggttcaacctcagcgattcagtcaaccttctctacttgcttcggcgcgcctttcttcccacgtccagcgggcgtgtatgctgagctgctgatgaagcgtatcgagtcattcggtagccaagtgtacttagttaacactggctggactggcggcccacacggtattggtaaacgtttcgacatcccaacgacgcgcgccattgtcgatgcgattgtcagcggtgagctgaaaaacgtcgaaaccgtacacttagacacgctgaatctggccgtgcctgtcgcggtacctggtgtagacactaacctactcaacccagtgaacacttggagcgataaggcactgtacgccgaatacgctcaaaaactggccgaagccttcactaagaacttcgctaagtaccaagtgtcagatgccatccgtaacgctggcccaaaggcataa

SEQ ID NO: 82935 - protein, 513 aa, Shewanella sp. MR-7
MADGLNRVHYNPSTAQLVEFALLRGEGELTANGALVAKTGTRTGRSPGDRFIVKEPSSAADIEWGPVNQAFEPGAFEGLWARVEAFLADKELFVSDLEVGADPEHYQPVRVTTQYAWHQLFARNLFIIPEEFNRQDKPVWEIINAPDFVCVPERDGTNSDAAVILNFAERKVLLAGLKYAGEMKKSMFSVQNFLLPAQGVLPMHCSANVGKDGDTTLFFGLSGTGKTTLSADPKRFLIGDDEHGWAPGGVFNIEGGCYAKCIDLSQKNEPVIWDAIRFGTVLENVVMDEHRVPNYKDSSLTENTRAAYPLEHIAQRKEDNRGAEPHAVVFLTCDVSGVLPPVSILSKEQAAYHFLSGYTAKVGSTEIGSTSAIQSTFSTCFGAPFFPRPAGVYAELLMKRIESFGSQVYLVNTGWTGGPHGIGKRFDIPTTRAIVDAIVSGELKNVETVHLDTLNLAVPVAVPGVDTNLLNPVNTWSDKALYAEYAQKLAEAFTKNFAKYQVSDAIRNAGPKA

SEQ ID NO: 82936 - DNA, 1650 bp, Alkalilimnicola ehrlichei MLHE-1
  CDS (1)..(1650): transl_table=11
atgaatacgactctaaatgggcagcccgacaccccccaaaaaacgaggagcttgcacgtgacgttctccctggcaaagcacggcatcgaggtggcggaagtcctgcgcaaccccgccccggcgcggctctatgaagaggccctggcccacgagaagggctcggccatctcttccaccggcgcgctgatcgcccgctccggcgaaaagaccggacgcagccccaaggacaaacgggtggcccaccacccggaggtcaccgacgatgtctggtggggggacgtgaacatcgaaatggaaccggacagcttcgatgccctgcagcagcaggcggtgaactatctgaacacccgtgaccgactctatgtgatcgacgcctacgccggttgggacccacgttaccgggtgaaggtaagggtgatttgcgagcgggcctaccacgccctgttcatgcacaacatgctgatccggcccaaccgggaggagctggccgatttcggcgagcccgattacaccatctacaacgccggccggttggcggccaaccaggagctccccggcgtcacctccagcaccagcgtcagcctctgcctgagccggggtgagttcgtgatcctgggtacggaatacgccggcgagatgaaaaagggcgtgttcaccatcatgaactacatcatgcccaagcagggcgtgctctccatgcactgctcggccaacgaggggcatgacggtgatgtctcggtcttcttcggcctgtcgggcaccggcaagaccaccctgtcggccgacccgcgccgccggctgatcggcgacgatgagcactgctggaccgacgagggggtgttcaacatcgagggcggctgctacgctaaggccatcggcctggacccgcgcgccgagcccgagatctacaacgccatccgcttcggcgccgtgctggagaacgtggtctacgacccggtcacccgggaggtggactaccacgacgggtccatcaccgagaacacccgctgctcctaccccatcgagttcatccccaacgcccggctgccctgcgtgggggggaccccgaagaacgtcatcttcctgacctgtgacgccttcagcgtgctgccgccggtgagcaaacttaccccggcccaggccatgtaccacttcatcagcggttacactgccaaggtggcgggcacggagatgggggtcaccgaaccccaggccaccttctccgcctgcttcggtgctcccttcctggtgctgcacccgacccactacgcggaactgctggccgagaagatccgcgccaccggtgtccaggtctggctggtgaacaccggctggactggcggcccctacggcgagggccgccgcatgagcctggcccacacccgcgccatcatcgacgccatccatgacggctcgctgaaggaccaggagaccgtgaccgaccccaccttcggtgtgcaggtgcccctgcagtgccacggcgtgccggacgaggtgctgatcccggcgaagacctgggccgacccggccgcctatgaggagatggcccagcacctggccgggctgttccacaagaacttccaggcctacgccgaccaggccagcccggagatcgtggccgccgcgccgcgggtgggcgaaatggcctaa

SEQ ID NO: 82937 - protein, 549 aa, Alkalilimnicola ehrlichei MLHE-1
MNTTLNGQPDTPQKTRSLHVTFSLAKHGIEVAEVLRNPAPARLYEEALAHEKGSAISSTGALIARSGEKTGRSPKDKRVAHHPEVTDDVWWGDVNIEMEPDSFDALQQQAVNYLNTRDRLYVIDAYAGWDPRYRVKVRVICERAYHALFMHNMLIRPNREELADFGEPDYTIYNAGRLAANQELPGVTSSTSVSLCLSRGEFVILGTEYAGEMKKGVFTIMNYIMPKQGVLSMHCSANEGHDGDVSVFFGLSGTGKTTLSADPRRRLIGDDEHCWTDEGVFNIEGGCYAKAIGLDPRAEPEIYNAIRFGAVLENVVYDPVTREVDYHDGSITENTRCSYPIEFIPNARLPCVGGTPKNVIFLTCDAFSVLPPVSKLTPAQAMYHFISGYTAKVAGTEMGVTEPQATFSACFGAPFLVLHPTHYAELLAEKIRATGVQVWLVNTGWTGGPYGEGRRMSLAHTRAIIDAIHDGSLKDQETVTDPTFGVQVPLQCHGVPDEVLIPAKTWADPAAYEEMAQHLAGLFHKNFQAYADQASPEIVAAAPRVGEMA

SEQ ID NO: 82938 - DNA, 1593 bp, Hyphomonas neptunium ATCC 15444
  CDS (1)..(1593): transl_table=11
atgagcgataccgtagcaatcctggccgagctgggtgtgcagacaaaatccattaagaaaaactggaacgaggcacgcctgtatgaaacggccgttgccagcggcgaagcccgcgttgccaagggcggcgcgctggtggtcgaaaccgggcaacacacgggccgctccgccaaagacaagttcacggtgcgcgacgcgacgaccgagaaaaccgtctggtgggacaacaatgcctcgatgacgcccgagcagttcgacgctctgtggacggacttcaaagcgcacctcgccaagcaggacatgtattcgcaggacctcttcggcggcgcagatctcgactatcgcctgcccgtcactgtggtgaccgagtttgcctggcactctctcttcattcgccaccttctgcgccttccgacaacggatgagctctctggcttcaagaccgaattcacgatcatcaactgcccgagcttccgcgccgatccggccaagcatggctgccgcagcgagaccgtgatcgcggtgaacttcgccaagcgcctcgtgctcatcggcggcacctcctatgctggcgaaacgaagaagtcggtcttcacgatcctcaactacctgctgcccaaccagggcgtgatgccgatgcactgctcggtcaacacatctgacaaggacgatgcggcgatcttctttggcctttcaggcaccggcaagacgacgctttcggcagacgcttcgcgcacactgatcggcgatgatgagcatggctggtcggagaacggtctcttcaactttgaaggcggctgctacgccaagatgatcaagctgtcggccgaggccgagcctgaaatctttgccaccacgaaacagtggggcacggtgctcgagaacgtcgtgatggacgcgacaacgcgcgaactcgatctcgactcggcggcgctggcggaaaattcgcgcggcgcctatccgatcgaagcgattccgaacgcgtcgctgacgggccgttgcggccagccgaaaaacctcatcatgctgacggctgacgcctatggcatcatgccgccgatcgccaagctgacgccggcgcaggcgatgtatcacttcctctccggctataccgcgcgtgtcgcgggcaccgagaaaggcgtgaccgagccttcggccaccttctccacctgctttggcggcccgttcatgccgcgtcacccgtcggaatatggcaacctgctgcgcgagctgatcgcgcgttacaatgtggattgctggctggtctccaccggctggaccggcgggccttatggccagggcaaccggatgccgatcaaagcaacgcgcgcgctgctgaacgccgcgcttgatggctcgctcaacacggtcgagttccgcaaggatgagacgttcggcttcctcgtgccggtttctgtgccgggcgtggacgccaagatcctcgatccgcgttcgacctgggctgacccggccgcttatgacaagcaggcggcgaaactggccgaagagttcgtcgagaacttcaagaagttcgaagcctatgtggatgaggcggtgaaagcctcggcgcccaagccgaaggttaccgcgtaa

SEQ ID NO: 82939 - protein, 530 aa, Hyphomonas neptunium ATCC 15444
MSDTVAILAELGVQTKSIKKNWNEARLYETAVASGEARVAKGGALVVETGQHTGRSAKDKFTVRDATTEKTVWWDNNASMTPEQFDALWTDFKAHLAKQDMYSQDLFGGADLDYRLPVTVVTEFAWHSLFIRHLLRLPTTDELSGFKTEFTIINCPSFRADPAKHGCRSETVIAVNFAKRLVLIGGTSYAGETKKSVFTILNYLLPNQGVMPMHCSVNTSDKDDAAIFFGLSGTGKTTLSADASRTLIGDDEHGWSENGLFNFEGGCYAKMIKLSAEAEPEIFATTKQWGTVLENVVMDATTRELDLDSAALAENSRGAYPIEAIPNASLTGRCGQPKNLIMLTADAYGIMPPIAKLTPAQAMYHFLSGYTARVAGTEKGVTEPSATFSTCFGGPFMPRHPSEYGNLLRELIARYNVDCWLVSTGWTGGPYGQGNRMPIKATRALLNAALDGSLNTVEFRKDETFGFLVPVSVPGVDAKILDPRSTWADPAAYDKQAAKLAEEFVENFKKFEAYVDEAVKASAPKPKVTA

SEQ ID NO: 82940 - DNA, 1611 bp, Rhizobium leguminosarum bv. viciae 3841
  CDS (1)..(1611): transl_table=11
atggaaatgttcggagttcataacccggcaatagagctggcaacggtgggattgggcggcgcagccagcgttcgctacaacttttccgccgccgcgctctatgaagaagcgatccgccggggcgaagccgaactgaccgctcaaggcgcattgcgggctatcaccggccagcacaccggccgttcgccgcgcgacaagttcgtcgttcgcgatatcaataccgatggcgaaatctggtgggacaacaacaagccgatctcgccggagcatttcgccgtgctgcgcgacgatatgctggcgcatgccgcgggcaaggagcttttcgtccaggatctcgtcggcggcgccgaggaaggccatgccctgccgacccgcgtcgtgaccgaattcgcctggcattcgctgttcatccgcaatctgctgatccgccccgacactgcagcgctgtccagcttcgtgccgaagctgacgatcatcgatctgccgagcttcaaggccgatccggcccgccacggctgccgttcggaaacggtgatcgcctgcgatctcaccaacggtctcgtcctcatcggcggcacctcctatgccggcgaaatgaagaaatcggttttcaccgtgctcaactacctgctgccggccaagggcgtgatgccgatgcattgctcggccaatgtcggcccggacggggacgcggcggtcttctttggcctttccggcacgggcaagacgacgctttcggccgatccggcccggacgctgatcggcgatgacgaacacggctggagcgagaacggcatcttcaacttcgaaggcggctgctatgccaagacgatccgcctctcggccgaagccgagccggaaatctatgcgacaacgcagcgtttcggtaccgtgctggaaaacgttgtgctgaacgaaagccgcgagccggatttcaacgacgggtcgctgactgaaaacacccgttgcgcctatccgatggacttcatcccgaacgcttcgaagacgggccgcgccgggcatccgaagacgatcatcatgctgaccgccgatgcctttggcgtcatgccgccaatcgcgcgattgacgcctgatcaggcgatgtatcacttcctctccggctacaccgccaaggtggcaggcaccgaaaagggtgtcgtcgaaccggaagcgaccttctccacctgcttcggcgcgcccttcatgccgcggcatccggccgaatatggcaatctgctcaaggaactgattggtcgtcatggcgtccaatgctggcttgtcaataccggctggaccggcggcgcctacggcaccggcaagcgcatgccgatcaaggcgacgcgtgcgcttctcgctgccgccctgagcggcgaacttggacaggtggaattccgtgctgatacgaacttcggcttcgccgtgccggtctccgtccacggtgtcgatggcagcattctcgatccgcgctcgacctgggccgacaaggcagcctatgacgcgcaggccgaaaagctggtctcgatgttcatcgcgaacttcgccaagttcgaaaatcatgtcgacggcggcgtccgcgatgccgcccccggcgtgaaagtcgctgcagaataa

SEQ ID NO: 82941 - protein, 536 aa, Rhizobium leguminosarum bv. viciae 3841
MEMFGVHNPAIELATVGLGGAASVRYNFSAAALYEEAIRRGEAELTAQGALRAITGQHTGRSPRDKFVVRDINTDGEIWWDNNKPISPEHFAVLRDDMLAHAAGKELFVQDLVGGAEEGHALPTRVVTEFAWHSLFIRNLLIRPDTAALSSFVPKLTIIDLPSFKADPARHGCRSETVIACDLTNGLVLIGGTSYAGEMKKSVFTVLNYLLPAKGVMPMHCSANVGPDGDAAVFFGLSGTGKTTLSADPARTLIGDDEHGWSENGIFNFEGGCYAKTIRLSAEAEPEIYATTQRFGTVLENVVLNESREPDFNDGSLTENTRCAYPMDFIPNASKTGRAGHPKTIIMLTADAFGVMPPIARLTPDQAMYHFLSGYTAKVAGTEKGVVEPEATFSTCFGAPFMPRHPAEYGNLLKELIGRHGVQCWLVNTGWTGGAYGTGKRMPIKATRALLAAALSGELGQVEFRADTNFGFAVPVSVHGVDGSILDPRSTWADKAAYDAQAEKLVSMFIANFAKFENHVDGGVRDAAPGVKVAAE

SEQ ID NO: 82942 - DNA, 1542 bp, Pseudomonas aeruginosa UCBPP-PA14
  CDS (1)..(1542): transl_table=11
atgacgcaagccaacaacgccgtgtacaccgatatcagcgccgcccaactggtagaagaagccattcgccgcggtgagggcgaactggccgccaacggctcgctggtcgtacgcaccggccatcgcaccggccgttcgccggtcgaccgtttcatcgtcgaagagccgagcaccaaggacgcgatcgcctggggcaacatcaaccgtccgttcccggccgacaagttcgatgcgctgtgggcccgcgtggaagcgttcaacaacgcccaggaccatttcgtttcccatgttcatgtaggttccgccgaggcttactacctgccggtgaagatgaccaccgctaccgcctggcagaatctgttcggccgttgcctgttcatcgagccggagcagtacaacccggccggcaaggacgagtggcaggtcctcaatgtcgccaacttcgaatgcgtgcccgagcgcgacggcaccaactccgacggttgcgtgatcctcaatttcgcccagaagaaagtgctgatcgcaggcatgcgctatgccggcgagatgaagaaagccatgttctccgtgcagaacttcctgctgcccgagcgcgacgtgctgccgatgcactgcgctgccaacatcggcgaagcgggcgatgtgaccctgttcttcggcctgtccggcaccggcaagaccaccctgtccgctgatgaaagccgttacctgatcggtgacgacgagcacggctggggcgagggcgtggtgttcaacgtcgaaggcggttgctatgccaagtgcatcgacctgtccgagaagaacgagccggtcatctggaaagccatcaagttcggcgccgtgctggagaacgtggttctcgacgaagagcgcgtgcccaactacgccgatgacagcctgacccagaacagccgcgccgcctacccgctggagcacgtcgagaagcgttcggagaagaacctcggcggcgagcccaacgcggtgatcttcctgacctgcgacctgaccggcgtactgccgccggtatcgatcctgaacaacgagcaggcggcctaccacttcctgtccggctacaccgcgctggtcggctccaccgagatgggttccggcggcggcatcaagtcgaccttctccacctgcttcggcgctcccttcttcccgcgtccggccggtgtctacgccgagctgctgatcaagcgtatcaaggccttcggctccaaggtctacctggtcaacaccggctggaccggcggtggctacggcgtcggcaagcgcttcaacatcccgaccacccgtggcgtgatcgcggcgatccagagcggcgcgctgatcggcgcggaaaccgagcacctggacatcatcaacctggacgtgccgaaggtcgttccgggcgtcgagaccaatctgctcaacccgcgcaacacctgggccgacaaggctgcctacgacgaggcggcgaagggcctggccaagcagttcatcgaaaacttcaagaaattcgaggtttccgatgcgatcaaggccgccggcccgcagctgtaa

SEQ ID NO: 82943 - protein, 513 aa, Pseudomonas aeruginosa UCBPP-PA14
MTQANNAVYTDISAAQLVEEAIRRGEGELAANGSLVVRTGHRTGRSPVDRFIVEEPSTKDAIAWGNINRPFPADKFDALWARVEAFNNAQDHFVSHVHVGSAEAYYLPVKMTTATAWQNLFGRCLFIEPEQYNPAGKDEWQVLNVANFECVPERDGTNSDGCVILNFAQKKVLIAGMRYAGEMKKAMFSVQNFLLPERDVLPMHCAANIGEAGDVTLFFGLSGTGKTTLSADESRYLIGDDEHGWGEGVVFNVEGGCYAKCIDLSEKNEPVIWKAIKFGAVLENVVLDEERVPNYADDSLTQNSRAAYPLEHVEKRSEKNLGGEPNAVIFLTCDLTGVLPPVSILNNEQAAYHFLSGYTALVGSTEMGSGGGIKSTFSTCFGAPFFPRPAGVYAELLIKRIKAFGSKVYLVNTGWTGGGYGVGKRFNIPTTRGVIAAIQSGALIGAETEHLDIINLDVPKVVPGVETNLLNPRNTWADKAAYDEAAKGLAKQFIENFKKFEVSDAIKAAGPQL

SEQ ID NO: 82944 - DNA, 1599 bp, Solibacter usitatus Ellin6076
  CDS (1)..(1599): transl_table=11
atgcagaatctaggtattcttcccagccgttacggtctccaggaacacggcattcgcaacgccagcttcgtgtattggaatctggggacggctcagctggtcgagaaggccatccagcgccgcgagggcctgctggcttccggcgggggactcgtggtgcgcaccggcgatcagaccggccgttcgccgcgcgataaattcgtggtccgcgacgccggcaccgagaacaccgtgaactggggcagcgtaaaccagcccttcctccccgagcagttcgaccgcctctacggaaaactgctcgcctacctgcaggcgcgcgacctcttcgtgcaggattgctacgccggcgccgacccgcagtatcagattccgatccgcgtcatcaccgagctcgcctggcacaaccttttcgcgcgccagctcttcgtgcgcgcccaccccgaaaagaccgatagccatgtcccgcagtttaccgtcatcgatgcgccgggcttccgcgccgaagcgaccgacgacggcacgaattcggacgttttcgtgatcatcaatttcagcaagaagctggtgatcatcggcggcactcaatacgccggcgaaatgaagaaggccatcttcagcgtgctgaactactacctgcccacgcaggacgtgcttcccatgcattgctccgcgaacatcggcaccgataacgagaccgcgcttttcttcggcctctccggcaccggcaagaccacactgtccgccgacccctcccgccgcctgattggcgacgacgagcatggctgggcgcccagcggcgtcttcaatttcgaaggcggctgctacgccaagtgcatccggctgcggcacgaaaccgagccgcagatctgggacgcgatccgcttcggcacggtgctcgagaacgtcgccgtggatagcgagctccgcctgctcgattacgacgacaccaccttcacggaaaatacgcgcgcggcctacccggtcacgttcatcgaaaacgcggtcctgcccggactcggcggacatcccaagaacatcgtcttcctcacctgcgatgccttcggcgtcctgcctccgctctcccgccttacgcccgaccaggcgatgttccacttcctaaacggctacaccgccaaagtcgcgggcaccgaacgcggactcggcaaagagcccgaagccaccttcagctcctgctttggatcgcccttcctgccccgcaatcctgaggtttacgcggagatgctcggcaggaagatgacccagcaaggcgctgcctgctggctgatcaacaccgggtggagcggcggcccttacggcgtcggcaatcgcatgagcctcccgatcactcgcgcactggttacggaagcgctcagcggcgcgctggccaaggccgattaccgcatcgacccggtcttcaaggttcaggtcccggtggcctgccccaatgtggactccaaggcgctcgatccgcgcgccacctggagcgatcccaaagcctacgacaaggccgccgatgacctggccgcgcgctttcgcaaaaacttcgccaaattcgaaaaggccggcggcattctgaagtgcgaagaagtactggcgtaa

SEQ ID NO: 82945 - protein, 532 aa, Solibacter usitatus Ellin6076
MQNLGILPSRYGLQEHGIRNASFVYWNLGTAQLVEKAIQRREGLLASGGGLVVRTGDQTGRSPRDKFVVRDAGTENTVNWGSVNQPFLPEQFDRLYGKLLAYLQARDLFVQDCYAGADPQYQIPIRVITELAWHNLFARQLFVRAHPEKTDSHVPQFTVIDAPGFRAEATDDGTNSDVFVIINFSKKLVIIGGTQYAGEMKKAIFSVLNYYLPTQDVLPMHCSANIGTDNETALFFGLSGTGKTTLSADPSRRLIGDDEHGWAPSGVFNFEGGCYAKCIRLRHETEPQIWDAIRFGTVLENVAVDSELRLLDYDDTTFTENTRAAYPVTFIENAVLPGLGGHPKNIVFLTCDAFGVLPPLSRLTPDQAMFHFLNGYTAKVAGTERGLGKEPEATFSSCFGSPFLPRNPEVYAEMLGRKMTQQGAACWLINTGWSGGPYGVGNRMSLPITRALVTEALSGALAKADYRIDPVFKVQVPVACPNVDSKALDPRATWSDPKAYDKAADDLAARFRKNFAKFEKAGGILKCEEVLA

SEQ ID NO: 82946 - DNA, 1620 bp, Solibacter usitatus Ellin6076
  CDS (1)..(1620): transl_table=11
atgctgattgaacacaagcagattgcgaatgcggggattcggccaagccgccacggtctcgaacagcagggattccggaatctgaatgtcgcttactggaacctcggcacggcgcaactgctggaacacgcgatccagcggagggaaggctccttcgccagcggcggctcgttcgtagtccgcaccggccagttcaccgggcgctcgcccaaggataaattcattgtgcgcgatgagatcaccgatgcgcacgtgcattgggggccggtcaaccagccgctctccgaagcgcatttcgaccgcctgtataccaaaatgatggcgttctggcagggccacgacgtctatgtgcaggattgctatgtgggcgccgaccgcgagctcggcatgccgatccgggtggtcagccagctggcctggcacaacctgttcgcgcggcagttgttcatacggcccgatccggagctgaccggcgagcacaagccgcagttttcgattttcttcgcgccggacttccaggccaatccggccgaggatgggaccaactcggagacgtgcatcgtcatcaatttcaagaaaaaggtggtgctgatctgcggcacgagctacgccggggagatgaagaaatccgccttcacgatcatgaactacctgctgccggggcagggagttttccccatgcactgctcttcgaacatgggcgcggcgggcgataccgcgctcttcttcggactctcgggcaccggcaagaccacactctccgcggacccggagcgccgcctgatcggcgacgatgagcacggctggagcgacaacggcgtcttcaatttcgagggcggctgctacgccaagtgcatccggctctcggccgaaaacgagccgcagatctggaatgcgatccgcttcggcaccgtgctcgagaacgtcgcgatggattcggaaacgcggctgctcgatttcaactccgatgaagtcacggagaatacgcgtgccgcctacccgctgaagttcatcgagggcgcgatcattccgagcgtgggcggccatccgaatcacgtgatctttttgaccgccgatgccttcggcgtgctgccgccgatttcgaagctgactccggagcaggccatgtaccacttcctcagcgggtacacggcgaaggtcgccggtacggagcgcggcctcggcaaggagccgcaggccacgttcagcgcgtgcttcggcgcgcccttcctgccgcgtccggccgctgcttacgcgtccctgctcggcgagaaactccggcgccacggagcgcaggtctggttggtgaataccggctgggtaggcggcccttacggcgtgggagagcgcatgaagctgcgttacacgcgcgcgatgctgcaggccgcgttaagcggtcaactcaacgatgtggccacggagcagcacccgatcttcggcgtggccgtgcccaagagctgcccgaatgttccggcaaccttcttggatgcgcgtgggatgtggagcgataagacggcgtacgatcgcgcagcgcaggatctggcctcgcgtttcaacaagaacttcgaaaagttcagcggcgtcagccccgagattgccgcggcggctccaggtaaataa

SEQ ID NO: 82947 - protein, 539 aa, Solibacter usitatus Ellin6076
MLIEHKQIANAGIRPSRHGLEQQGFRNLNVAYWNLGTAQLLEHAIQRREGSFASGGSFVVRTGQFTGRSPKDKFIVRDEITDAHVHWGPVNQPLSEAHFDRLYTKMMAFWQGHDVYVQDCYVGADRELGMPIRVVSQLAWHNLFARQLFIRPDPELTGEHKPQFSIFFAPDFQANPAEDGTNSETCIVINFKKKVVLICGTSYAGEMKKSAFTIMNYLLPGQGVFPMHCSSNMGAAGDTALFFGLSGTGKTTLSADPERRLIGDDEHGWSDNGVFNFEGGCYAKCIRLSAENEPQIWNAIRFGTVLENVAMDSETRLLDFNSDEVTENTRAAYPLKFIEGAIIPSVGGHPNHVIFLTADAFGVLPPISKLTPEQAMYHFLSGYTAKVAGTERGLGKEPQATFSACFGAPFLPRPAAAYASLLGEKLRRHGAQVWLVNTGWVGGPYGVGERMKLRYTRAMLQAALSGQLNDVATEQHPIFGVAVPKSCPNVPATFLDARGMWSDKTAYDRAAQDLASRFNKNFEKFSGVSPEIAAAAPGK

SEQ ID NO: 82948 - DNA, 1617 bp, Magnetococcus sp. MC-1
  CDS (1)..(1617): transl_table=11
atgtccagcactttgacctataaagaacgcgtcgcagccgtcaccaaacagttggcggaacggggaatcagcaaccctggcgtcgtcaacctggatctccccacccccaaactctatgagcagattatcgcccgcggtgaagggcagattgcccacggtggttcggtcgtggtggagacaggcatctataccggtcgttctgccaaagataaatttattgtggaggagcctaccagtcaggcggatgtggattggggcacggttaaccgtcctgtttcccaagaaaattatgaaaaggtgcgcggtcgcttgatggcgtttttacaaggtcgggagctgtttgtacaagatgtgcgggttggtgccgatcctcaatttcagcgccgggtgcgggtggttaacattaaagcgtggcaaaatctgtttgcacgtaacctgtttatcacccctgagaccatggaaaatgaggttgttccccccgattttaccgtcattgcctgccccgattttaaggccgatcctgaactggatggcacccgttccgaagcctttatctacatgaacattgcccagcgcgagatcattattggtggtacggcctatgcgggagagatgaaaaagtcgatcttctccatcatgaactatctgctgcctaagcaggccgtgttccccatgcactgtagcgccaatatcggcacacaagatgatgtggccatcttctttggcctctctggtaccggcaaaaccactctctccaccgatcccaaacgccgtatgattggcgatgatgagcatggctggtccgataaaggggtgtttaactttgagggtggctgctacgccaagaccattcgtttgaacgccgtggccgagccggttatccataactgtacccaaacctttggtaccgtcttggaaaatgtggtgatggatgaggagagccgtaccctggacttggatgacgaccgcaagaccgaaaatacccgtgccgcttatcctttaagctcggtgggtaacattaaggctgacggtatggggggtcatcccagccatgtgattctgctaacggcggatgcctttggggtactccccccggtctcgcgtcttacctctgagcaggccatgtaccactttatctccggctataccgccaagctggccggtactgagcggggcgtcaaagagccccaagccaccttctcatcctgttttggtggcccgttcatggttcaccaccccacagtctatgctgaaatgctgggtaaacggctgagcgagaccggtgccaagtgctggttggtgaataccggctggaccgcaggcccttatggtgaagggcatcgcatgcccatccgcgaaacccgcgccatcattgacagcattttggccaatgagctcaacgatgtggctacccatgaagaccctgtctttgggctggccgtgcccaccgccattgatggggtggaaaccgtacgtctgacccctcgtgatacctggaaagatggtgcggcctttgatgccaaggccaaagatctggcccgtcagtttaatgaaaattttgccaactttgctgatcgcgtctccgatgccatcaagggtgctggtcccaaggtgtaa

SEQ ID NO: 82949 - protein, 538 aa, Magnetococcus sp. MC-1
MSSTLTYKERVAAVTKQLAERGISNPGVVNLDLPTPKLYEQIIARGEGQIAHGGSVVVETGIYTGRSAKDKFIVEEPTSQADVDWGTVNRPVSQENYEKVRGRLMAFLQGRELFVQDVRVGADPQFQRRVRVVNIKAWQNLFARNLFITPETMENEVVPPDFTVIACPDFKADPELDGTRSEAFIYMNIAQREIIIGGTAYAGEMKKSIFSIMNYLLPKQAVFPMHCSANIGTQDDVAIFFGLSGTGKTTLSTDPKRRMIGDDEHGWSDKGVFNFEGGCYAKTIRLNAVAEPVIHNCTQTFGTVLENVVMDEESRTLDLDDDRKTENTRAAYPLSSVGNIKADGMGGHPSHVILLTADAFGVLPPVSRLTSEQAMYHFISGYTAKLAGTERGVKEPQATFSSCFGGPFMVHHPTVYAEMLGKRLSETGAKCWLVNTGWTAGPYGEGHRMPIRETRAIIDSILANELNDVATHEDPVFGLAVPTAIDGVETVRLTPRDTWKDGAAFDAKAKDLARQFNENFANFADRVSDAIKGAGPKV

SEQ ID NO: 82950 - DNA, 1542 bp, Shewanella sp. ANA-3
  CDS (1)..(1542): transl_table=11
atggcggatggattaaaccgcgttcactacaacccctcaacagcacaactggtcgaatttgccctgctacgcggcgaaggtgaattgactgcaaacggcgcactggttgctaaaaccggtacccgcacaggtcgctctcctggcgatcgcttcattgtaaaagaagacagttcagcggctgacatcgaatggggccccgtcaaccaagcatttgaacccggtgcttttgaaggattatgggcgcgtgtagaagcattcctcgccgataaagagttgtttgtatctgacctcgaagtcggtgcagacccagaacattaccagccagtgcgtgtgacgactcaatacgcttggcaccaactgttcgcccgcaacctttttatcatcccagaagaatttaaccgtcaagacaagcctgtatggcaaatcatcaacgcgccagacttcgtctgtgttcctgagcgtgatggcaccaattcagatgcagcggtgatcttaaactttgccgagcgcaaagtgttgctagcgggcctgaaatacgctggcgaaatgaagaagtcgatgttctctgtacaaaacttcctgctgccagcccaaggcgtattgccaatgcactgctcggcaaacgtaggtaaagacggcgacactaccctattcttcggtctgtcaggcacgggtaaaaccaccctgtctgcggatccaaaacgcttcctgatcggtgacgatgagcacggctgggcaccaggcggcgtattcaacatcgaaggcggctgctacgccaagtgtatcgatctgagccaaaagaacgagccagtgatttgggatgcgattcgcttcggtactgtgctggaaaacgtggtaatggacgagcaccgcgtgcctaactacaaagacagcagcctgacggaaaacacccgtgcagcttacccactcgagcatatcgctcagcgtaaagaagacaaccgtggcgccgagccgcacgcagtggtgttcttaacctgcgacgtgtctggcgtattaccaccggtttctatcctgagcaaagagcaagcggcttaccacttcctctctggttacaccgctaaagtcggttcgactgaaatcggttcaacctcagcgattcagtcaaccttctctacttgcttcggcgcgcctttcttcccacgtcctgcgggcgtgtatgcagagctgctgatgaagcgtatcgaatcattcggtagccaagtgtacttagttaacactggctggactggcggtccacacggtattggtaaacgtttcgatatcccaacgacgcgcgcaattgtcgatgcgattgtcagcggtgagctgaaaaacgtcgaaaccgtacacttagagacactgaatctggccgtgcctgtcgcggtacccggtgtagacactaacctactcaacccagtgaacacttggagcgataaggcactctacgccgaatacgcccaaaaactggccgaagccttcactaagaacttcgctaagtaccaagtgtcagatgccatccgaaacgctggcccaaaggcataa

SEQ ID NO: 82951 - protein, 513 aa, Shewanella sp. ANA-3
MADGLNRVHYNPSTAQLVEFALLRGEGELTANGALVAKTGTRTGRSPGDRFIVKEDSSAADIEWGPVNQAFEPGAFEGLWARVEAFLADKELFVSDLEVGADPEHYQPVRVTTQYAWHQLFARNLFIIPEEFNRQDKPVWQIINAPDFVCVPERDGTNSDAAVILNFAERKVLLAGLKYAGEMKKSMFSVQNFLLPAQGVLPMHCSANVGKDGDTTLFFGLSGTGKTTLSADPKRFLIGDDEHGWAPGGVFNIEGGCYAKCIDLSQKNEPVIWDAIRFGTVLENVVMDEHRVPNYKDSSLTENTRAAYPLEHIAQRKEDNRGAEPHAVVFLTCDVSGVLPPVSILSKEQAAYHFLSGYTAKVGSTEIGSTSAIQSTFSTCFGAPFFPRPAGVYAELLMKRIESFGSQVYLVNTGWTGGPHGIGKRFDIPTTRAIVDAIVSGELKNVETVHLETLNLAVPVAVPGVDTNLLNPVNTWSDKALYAEYAQKLAEAFTKNFAKYQVSDAIRNAGPKA

SEQ ID NO: 82952 - DNA, 1611 bp, Actinobacillus pleuropneumoniae serovar 1 str. 4074
  CDS (1)..(1611): transl_table=11
atgttaagtcgtattgaacaagaactagcacaattaggtattactaacgtaaaagaaattgtacgtaatccgagttatgaacaattattcgaagaagaaatgaaacctgaattagaaggttttgaaaaaggtcgtttaacgacatccggtgccgttgccgtagatacgggtatctttaccggccgttcgcctaaagataagtatatcgtatatgatgaaacatcaaaagataatgtttggtggacatcggatgcggttaaaaatgacaataaaccgatgaatcaagcaacttggcaaagtttaaaagagctggtaactcaccaattgtcaaacaaacgtttatttgtagtggatgcattctgcggtgcgaataaagacagtcgcgtagcggtacgtattgtcacggaagtggcgtggcaagcacactttgtgaaaaatatgttcgtccgtccgtcggaagaagaattgttgaattttgtgcctgatttcgttgtaatgaacggctcgaaagtaactaacccgaattggaaagagcaaggtttaaattccgaaaacttcgttgcgtttaacttaactgaaaaaatccaacttatcggcggtacttggtacggtggcgaaatgaagaaaggtttattctctctgatgaactactggttaccgcttaaaggcattgcgtcaatgcactgttctgcaaacgtgggggcggaaggtgatgtagcggtattcttcggtttatccggtacgggtaaaacaacgctttcgaccgatcctaaacgtaaattaatcggtgacgacgaacacggttgggatgatgacggcgtattcaactacgaaggcggttgttatgcgaaaaccatcaatctttccgaagaaaacgagccggatatctatcgtgcaatccgtcgtgatgcgttattagaaaacgttgtggtgcgtgaagacggttcggttgattttgcggacggttcaaaaaccgaaaatacgcgcgtatcttatccgatccatcatatcgataatatcgttgagccggtttcaaaagcgggtcatgcgaaaaaagtgattttcttaaccgcagatgcgttcggcgtgttacctccagtttctaaattaacgccggaacaaaccaaatattacttcttatccggttttaccgctaaattagcgggtaccgaacgtggcattaccgagcctacaccgactttctcagcgtgtttcggtgcggcattcttatcacttcacccgaccaaatatgcggaagtattagtcaaacgtatggaagaagcggggtcgcaagcatacttagtaaataccggttggaacggttcgggtaaacgtatttcgattaaagatactcgcggtattatcgatgcgattttagacggttcaattgaaaaagcggaaacaaaagaattaccgattttcaatttagcgattccgaccgcattaccgaacgtagatcctgcgatccttgaccctcgcgatacttatgcggataaagcgcaatggcaaactaaagcggaagatttagcgggtcgttttgtgaagaactttgaaaaatatactacaaatgatgaaggtaaagcgttagttgcggcaggtccgaaactttaa

SEQ ID NO: 82953 - protein, 536 aa, Actinobacillus pleuropneumoniae serovar 1 str. 4074
MLSRIEQELAQLGITNVKEIVRNPSYEQLFEEEMKPELEGFEKGRLTTSGAVAVDTGIFTGRSPKDKYIVYDETSKDNVWWTSDAVKNDNKPMNQATWQSLKELVTHQLSNKRLFVVDAFCGANKDSRVAVRIVTEVAWQAHFVKNMFVRPSEEELLNFVPDFVVMNGSKVTNPNWKEQGLNSENFVAFNLTEKIQLIGGTWYGGEMKKGLFSLMNYWLPLKGIASMHCSANVGAEGDVAVFFGLSGTGKTTLSTDPKRKLIGDDEHGWDDDGVFNYEGGCYAKTINLSEENEPDIYRAIRRDALLENVVVREDGSVDFADGSKTENTRVSYPIHHIDNIVEPVSKAGHAKKVIFLTADAFGVLPPVSKLTPEQTKYYFLSGFTAKLAGTERGITEPTPTFSACFGAAFLSLHPTKYAEVLVKRMEEAGSQAYLVNTGWNGSGKRISIKDTRGIIDAILDGSIEKAETKELPIFNLAIPTALPNVDPAILDPRDTYADKAQWQTKAEDLAGRFVKNFEKYTTNDEGKALVAAGPKL

SEQ ID NO: 82954 - DNA, 1584 bp, Fusobacterium nucleatum subsp. vincentii ATCC 49256
  CDS (1)..(1584): transl_table=11
atgaaaatgtatggacttgaaaaattaggaattagtaatgtaacagctgctcactataatttgagccctgcacagcttgtagaaaaagctttggcaaataacgaaggaacattgagtgatactggtgcctttgttataacaactggaaaatacactggtcgtgcaccagatgataaattttttgtggacactccaaaagttcataaatatattgattggagtagaaatcaacctattgaaaaagaaaaatttgatgcaatttttgggaaattagttgcttatttacagaatcgtgaaatttttatttttgatggaagagctggagctgatttggaatatactagaagatttcgtattataaatgaattagctagtcaaaatttatttattcatcaactattaattagaacaaatgaagaatataatgaaaataataatattgactttactattatttctgcacctaacttccactgtgtacctgaaatagatggagttaattcagaagctgctataataattgattttgaaagtaaattagctattatttgtggtactagatattcaggagaaatcaaaaaaagtgtattctctataatgaactatatcatgcctcatgaaaatattttacctatgcactgttcagcaaatatggatccagtaactcatgaaactgcaattttctttggattatctggaactggtaaaacaactctatcagctgatcctaatcgtaaattgataggtgatgatgaacatggttggtgtgataaaggaatttttaactttgaaggtggatgttatgcaaaatgtataaatctaaaagaagaaagtgaacctgaaatttatcatgcaattaaatttggaagtttagtagaaaatgttactctaaatcctaaaacaagaaaaattaattatgaagatgcaagtataacaccaaatacaagggtaggataccctatacattatatccctaatgcagaattatcaggggtaggtggtataccaaaagtagttatatttttaacagcagattcttttggagtattgcctccaatttcaagattaagtcaagaagctgcaatgtaccactttgtaactggatttactgcaaaactagctggaacagaattaggtgttaaagaaccagtccctacattctcaacttgttttggagaaccatttatgcctatggatccaagtgtatatgctaaaatgcttggagaaagattagaaaaacataatacaaaagtgtatttaatcaatactggttggtctggtggagcctatggaacaggtaaaagaataaatttaaaatatactcgtgctatggtaacagctgtattagaaggatattttgataatgctgaatataaacatgatgaaatatttaatttagatattcctcaatcttgtccagatgttcctagtgaaattatgaatccaatagatacttgggcagatagagataaatatattgtagcagctaaaaaattagctaacttattctataataactttaaagaaaaatatccaaatatgccagaaaatatcactaatgctggtcctagatataatgactaa

SEQ ID NO: 82955 - protein, 527 aa, Fusobacterium nucleatum subsp. vincentii ATCC 49256
MKMYGLEKLGISNVTAAHYNLSPAQLVEKALANNEGTLSDTGAFVITTGKYTGRAPDDKFFVDTPKVHKYIDWSRNQPIEKEKFDAIFGKLVAYLQNREIFIFDGRAGADLEYTRRFRIINELASQNLFIHQLLIRTNEEYNENNNIDFTIISAPNFHCVPEIDGVNSEAAIIIDFESKLAIICGTRYSGEIKKSVFSIMNYIMPHENILPMHCSANMDPVTHETAIFFGLSGTGKTTLSADPNRKLIGDDEHGWCDKGIFNFEGGCYAKCINLKEESEPEIYHAIKFGSLVENVTLNPKTRKINYEDASITPNTRVGYPIHYIPNAELSGVGGIPKVVIFLTADSFGVLPPISRLSQEAAMYHFVTGFTAKLAGTELGVKEPVPTFSTCFGEPFMPMDPSVYAKMLGERLEKHNTKVYLINTGWSGGAYGTGKRINLKYTRAMVTAVLEGYFDNAEYKHDEIFNLDIPQSCPDVPSEIMNPIDTWADRDKYIVAAKKLANLFYNNFKEKYPNMPENITNAGPRYND

SEQ ID NO: 82956 - DNA, 1587 bp, Bacillus cereus G9241
  CDS (1)..(1587): transl_table=11
atgagtactgtgaatgtccaaattggtttacacgaattattgaacggaagcaatgcacagattcaactaagtgttccgcaattagtggaaaaagtattaatgcgaaatgaagggaaattaacttcgactggtgccgtttctgcttcaactggaaaatatacaggacgttctcctaaagataaatttattgtgaaagaagcatcggttgctgacaaaattgcttggggagctgtgaaccaaccgatttctgaagaacattttaataaattatatactaaagttttagaatacttaaaagaaaaagaagagttattcgtcttcaaaggatttgcaggcgctgaccgcaattaccgcctaccaattcaagttattaacgaatatgcatggcacaacttatttgtacatcaattattcattcgtccaactgaagaagaattaacaactcatgaatcagagttcacaattgtttctgcaccgaatttcaaagctgatccagctgttgacggtacaaactctgaagcattcattatggtttcattcgaaaaacgtatcgtactaattggtggtacagaatacgctggagaaatgaaaaaatcaatcttctctattatgaacttcttattacctgaacaagatatcctttctatgcattgctctgcaaacgtaggtgaagaaggcgacgtagcactattcttcggtttatctggaacaggtaaaacaacattatctgctgatccaaaccgtaaattaatcggtgatgatgagcacggttggtctgataacggtgtattcaacattgaaggcggttgctacgcaaaatgtgtaaacctttctcacgagaaagaaccacaaattttcgatgcaatcacatttggatctgttttagaaaacgttatcattaatgaccaaacgcgtatcgcagactataacgatactactttaacagaaaatactcgtgctgcataccctatgcatgcgatcgacaatatcgtactgccaagtgttgcaggacacccaaatacaatcatcttcttaactgctgatgcatcaggcgtattgcctccaatcagtaagttatcaaaagaacaagctatgtaccatttcttaagtggttacactagtaaactagcaggaacagagcgcggcgttacatctccgcaagcaacattctcaacttgcttcggttcaccattcttaccacttgatgcatctcgctatgctgaaatgcttggtgaaaaaatcgagaaacacgatgcgaaagtattcttagtaaacactggctggactggtggcgaatacggcgttggtaaacgtatgaacttaggttacactcgtgcaatgattcaatcagcattaagcggtgaacttgcgaaaactgaaaccgctaaacatgacatctttggtcttgaagttccacttcacgtaccaggtgtacctgacgaagtgttaatgcctgaacaaacttgggctgataaagctgcttacaaagcaaaagcaatcgaacttgcaaatgaattcaaagctaacttcaaaaagttcgacagcgtatctgaagatattattaacttaggcggcccaatcgcttaa

SEQ ID NO: 82957 - protein, 528 aa, Bacillus cereus G9241
MSTVNVQIGLHELLNGSNAQIQLSVPQLVEKVLMRNEGKLTSTGAVSASTGKYTGRSPKDKFIVKEASVADKIAWGAVNQPISEEHFNKLYTKVLEYLKEKEELFVFKGFAGADRNYRLPIQVINEYAWHNLFVHQLFIRPTEEELTTHESEFTIVSAPNFKADPAVDGTNSEAFIMVSFEKRIVLIGGTEYAGEMKKSIFSIMNFLLPEQDILSMHCSANVGEEGDVALFFGLSGTGKTTLSADPNRKLIGDDEHGWSDNGVFNIEGGCYAKCVNLSHEKEPQIFDAITFGSVLENVIINDQTRIADYNDTTLTENTRAAYPMHAIDNIVLPSVAGHPNTIIFLTADASGVLPPISKLSKEQAMYHFLSGYTSKLAGTERGVTSPQATFSTCFGSPFLPLDASRYAEMLGEKIEKHDAKVFLVNTGWTGGEYGVGKRMNLGYTRAMIQSALSGELAKTETAKHDIFGLEVPLHVPGVPDEVLMPEQTWADKAAYKAKAIELANEFKANFKKFDSVSEDIINLGGPIA

SEQ ID NO: 82958 - DNA, 1587 bp, Bacillus anthracis str. A2012
  CDS (1)..(1587): transl_table=11
  misc_feature (1454)..(1454): s is g or c
  misc_feature (1455)..(1455): w is a or t
atgagtactgtgaatgtccaaattggtttacacgaattattgaacggaagcaatgcacagattcaactaagtgttccgcaattagtggaaaaagtattaatgcgaaatgaagggaaattaacttcgactggtgccgtttctgcttcaactggaaaatatacaggacgttctcctaaagataaatttattgtgaaagaagcatcggttgctgacaaaattgcttggggagctgtgaatcaaccgatttctgaagaacattttaataaattatatactaaagttttagaatacttaaaagaaaaagaagagttattcgtcttcaaaggatttgcaggcgcggaccgcaattaccgtctaccaatccaagttattaatgaatatgcatggcacaatttatttgtacatcaattattcattcgtccaactgaagaagaattaacgactcatgaatcagaattcacaattgtttctgcaccaaatttcaaagctgatccagctgttgacggtacaaactctgaagcattcattatggtttcattcgaaaaacgtatcgtactaattggtggtacagaatacgctggagaaatgaaaaaatcaatcttctctattatgaacttcttactacctgaacaagatattctttctatgcattgctctgcaaacgtaggtgaagaaggcgacgtagcactattcttcggtttatctggaacaggtaaaacaacattatctgctgatccaaaccgtaaattaatcggtgatgatgagcatggttggtctgataacggtgtattcaatattgaaggcggttgctacgcaaaatgtgtaaacctttctcacgagaaagaaccacaaattttcgatgcaatcacatttggatctgttttagaaaacgttatcattaatgaccaaacgcgtatcgcagactataacgatactactttaacagaaaatactcgtgctgcataccctatgcatgcgatcgacaatatcatactgccaagtgttgctggacacccaaatacaattattttcttaactgctgatgcatctggcgtattgcctccaatcagcaagttatcaaaagaacaagctatgtaccatttcttaagtggttacactagtaaactagcaggaacagagcgcggcgttacatcaccgcaagcaacattctcaacttgcttcggttcaccattcttaccacttgatgcatctcgctatgctgaaatgcttggtgagaaaatcgagaaacacgatgcaaaagtattcttagtaaacactggctggactggtggcgaatacggcgttggtaaacgtatgaacttaggttacactcgtgcaatgattcaagcagcattaaacggtgaacttgcgaaaactgaaacagctaaacatgacatcttcggtcttgaagttccacttcacgtaccaggtgtacctgacgaagtgttaatgcswgaacaaacttgggctgataaagctgcttacaaagcaaaagcaatcgaacttgcaaatgaattcaaagcgaacttcaaaaagttcgacagcgtatctgaagacattattaacttaggcggtccaatcgcttaa

SEQ ID NO: 82959 - protein, 528 aa, Bacillus anthracis str. A2012
  misc_feature (485)..(485): The Xaa at location 485 stands for Arg, or Pro.
MSTVNVQIGLHELLNGSNAQIQLSVPQLVEKVLMRNEGKLTSTGAVSASTGKYTGRSPKDKFIVKEASVADKIAWGAVNQPISEEHFNKLYTKVLEYLKEKEELFVFKGFAGADRNYRLPIQVINEYAWHNLFVHQLFIRPTEEELTTHESEFTIVSAPNFKADPAVDGTNSEAFIMVSFEKRIVLIGGTEYAGEMKKSIFSIMNFLLPEQDILSMHCSANVGEEGDVALFFGLSGTGKTTLSADPNRKLIGDDEHGWSDNGVFNIEGGCYAKCVNLSHEKEPQIFDAITFGSVLENVIINDQTRIADYNDTTLTENTRAAYPMHAIDNIILPSVAGHPNTIIFLTADASGVLPPISKLSKEQAMYHFLSGYTSKLAGTERGVTSPQATFSTCFGSPFLPLDASRYAEMLGEKIEKHDAKVFLVNTGWTGGEYGVGKRMNLGYTRAMIQAALNGELAKTETAKHDIFGLEVPLHVPGVPDEVLMXEQTWADKAAYKAKAIELANEFKANFKKFDSVSEDIINLGGPIA

SEQ ID NO: 82960 - DNA, 1569 bp, Exiguobacterium sibiricum 255-15
  CDS (1)..(1569): transl_table=11
atgccgatgacggtcctgaatatcgaagaactactcaagaaggagcatgtgttcaaacaactgtctgttgctgaactagtcgaacatgcaattcgcaacaaagaaggagttcttgcagaaaatggtgctttgtctgtagaaacggggaaatttacaggtcgttcaccgaaagacaagttcatcgtccgtgatgactcatgtgagatgcatatcgattggggtcatgtcaatcaaccgatggagtcggacaaattcgagcaactgttacaaaaagttcttcgttatatgaacgaagcagatcaactctactacacagaagctgctgctggtgccgatacgcatttcacccttccagtgcgcgtcgtaaccgaatatgcttggcataatttgtttgcgaaacagctgtttttacgtgaatatcctacggttgcggcctttgaaccgtttacggtcgtctacgcaccacattttaaagcggatccggcggttgacggcacaaactccgagacattcatcgcgatgtcattcgaacaccggattgtcttgattggcggaacggagtatgccggagaaatcaaaaaatcaattttctctgtcatgaactatcttttaccccaacaagaagtcttgtcgatgcactgttcagcaaacgtcggacacggcggcgatgtcgccttattcttcggactctcaggaactggtaagaccacgctgtctgctgatgacagtcgccaattaatcggtgacgatgaacacggttggtctcatgacggtgtcttcaacatcgaaggtggctgctatgcgaaaacagttaatctgtcacgcgaaaaagaaccacaaatctttgatgcgatccgcttcggaaccgttcttgaaaatgtcgtcctcgatgatgcgcggattccggattatgatgatacttcattgactgaaaatacacgtgccgcttacccgattacagcaatcgacaacatcgccattccgtcacgcgccggtcacccgaaaacgattgtctttctgacggcggatgcctatggtgtcttgcctccaatcagtaaactgacgaaagaacaagcgatgtatcacttcttatccggctacacatcaaaactggctggaacggagcgcggcgttacagaaccggaagccacattctcgacgtgcttcggttcaccattcctgccgttgattccggaaaaatatgcgacgatgctcggggaactgattgatcgtcacggtgtcacagtctatctcgtcaacacaggctggaccggcggcgcttacggtacaggaagccggatgaaactctcctatacacgaacgatggtcaatgcggccgtcaacggtctgcttgcagacatcccgacagaagaacatccgattttcggtctgcatatgccgatcgaagtacctggtgttccgactgacttgctcaatccggtcaaggtctgggcggatgcatctgtttacgaacaacaagcgaccgcactcgcacaaaaattcacacagaacttcgcacgtttcgaaagtgcgaccgatgcgatcaaagcagccggtccccgcgtgtaa

SEQ ID NO: 82961 - protein, 522 aa, Exiguobacterium sibiricum 255-15
MPMTVLNIEELLKKEHVFKQLSVAELVEHAIRNKEGVLAENGALSVETGKFTGRSPKDKFIVRDDSCEMHIDWGHVNQPMESDKFEQLLQKVLRYMNEADQLYYTEAAAGADTHFTLPVRVVTEYAWHNLFAKQLFLREYPTVAAFEPFTVVYAPHFKADPAVDGTNSETFIAMSFEHRIVLIGGTEYAGEIKKSIFSVMNYLLPQQEVLSMHCSANVGHGGDVALFFGLSGTGKTTLSADDSRQLIGDDEHGWSHDGVFNIEGGCYAKTVNLSREKEPQIFDAIRFGTVLENVVLDDARIPDYDDTSLTENTRAAYPITAIDNIAIPSRAGHPKTIVFLTADAYGVLPPISKLTKEQAMYHFLSGYTSKLAGTERGVTEPEATFSTCFGSPFLPLIPEKYATMLGELIDRHGVTVYLVNTGWTGGAYGTGSRMKLSYTRTMVNAAVNGLLADIPTEEHPIFGLHMPIEVPGVPTDLLNPVKVWADASVYEQQATALAQKFTQNFARFESATDAIKAAGPRV

SEQ ID NO: 82962 - DNA, 1611 bp, Croceibacter atlanticus HTCC2559
  CDS (1)..(1611): transl_table=11
atggttacaaataccaacactacgaaatcgatttcgctagaaccttacggaatcaaggacacaacgacccattatcaacttacgccatcacaattacatgagacagcaatagcaaacggccaaggccaagaagctagcagcggcgctcttgcaattaacactggcgagtttactggacgttctcctttagaccgttttatcgttaaagacgatgttactaaagatgagatttggtggggaaatataaatatcccttttgatgcagataagtttgatgcactttatgataaagtcacagattacttatctggaaaagaagtttttgtgcgagatagctacgcttgtgcagatgaaaaatataaattaaatattcgtgttgtaaacgaatatccttggagcaatatgtttgcctataatatgtttttaagaccttcagaagatgagcttaaaaactttaaagaagaatggcttattgtaaatgcaccaggttttatggcagatcctgaagtagatggaacacgacagcacaactttgcaattttaaattttggaaagaaaatagcgcttattggtggtactggatatacaggtgaaattaaaaaagggattttctctgcgcttaattttatattgccagtacaaaaggaaactttaccaatgcactgctctgctaatgtaggagaagatggagatacttcaatcttttttggtctttctggaacaggtaaaactacattgtctgcagatcctaatagaaaacttattggagatgatgagcacggctggacaaaagaagataccatctttaattttgaaggcggttgttatgcaaaggttataaacctctcaaaagaaaacgaaccagatatttataatgcaattaaaccaggagctattcttgaaaacgttgtgttagatgaaaatggagatgtagattttgctgatactagcattactcaaaatacaagagttagttacccaatttatcatatagataatattcaggagccttcaataggaaagaatcctaaaaacatatttttcttaaccgcagatgcttttggtgtactgcctcctattagtaagctatctccaggtcaagctgcttatcactttattagtggttatacggcaaaggttgctggtacagaagctggtgtagatgagccaatgccatcgttctctgcgtgttttggagcaccatttatgcctttacacccaacacgttatgcagaaatgctaagtcagaaaatgaaagattctggcgtaaatgtttggttggtaaacacaggttggactggcggtccttatggtgttggaaaacgtatggctttaaagtatactagagctatgatttctgctgctatggatggttctttagaggaagcaaataaagataattaccacacacactcagtatttggcgttaaacaaccaagaacttgtcctaacgtgccaacagatgttttaagtcctcgtaagacttggaataatgatcaaggatactacaaaaaggcttatactttagcagaaagctttagacagaacttcttaaaatttgaagagtacgctaatgaagaaatattagcaggcgctccaaacgttaagtaa

SEQ ID NO: 82963 - protein, 536 aa, Croceibacter atlanticus HTCC2559
MVTNTNTTKSISLEPYGIKDTTTHYQLTPSQLHETAIANGQGQEASSGALAINTGEFTGRSPLDRFIVKDDVTKDEIWWGNINIPFDADKFDALYDKVTDYLSGKEVFVRDSYACADEKYKLNIRVVNEYPWSNMFAYNMFLRPSEDELKNFKEEWLIVNAPGFMADPEVDGTRQHNFAILNFGKKIALIGGTGYTGEIKKGIFSALNFILPVQKETLPMHCSANVGEDGDTSIFFGLSGTGKTTLSADPNRKLIGDDEHGWTKEDTIFNFEGGCYAKVINLSKENEPDIYNAIKPGAILENVVLDENGDVDFADTSITQNTRVSYPIYHIDNIQEPSIGKNPKNIFFLTADAFGVLPPISKLSPGQAAYHFISGYTAKVAGTEAGVDEPMPSFSACFGAPFMPLHPTRYAEMLSQKMKDSGVNVWLVNTGWTGGPYGVGKRMALKYTRAMISAAMDGSLEEANKDNYHTHSVFGVKQPRTCPNVPTDVLSPRKTWNNDQGYYKKAYTLAESFRQNFLKFEEYANEEILAGAPNVK

SEQ ID NO: 82964 - DNA, 1599 bp, Sulfitobacter sp. EE-36
  CDS (1)..(1599): transl_table=11
atgacgttaggccgcgtaaatccgcaattccgcctcgaagaccaaggcataagcgggcttggtgatgtctattacaacatgatcgaacccgcgctggtcgaagccgcgctgaaacgggaagaaggcacgttaggcaagggcggcgcgtttcttgtgacgacgggcaaattcaccggacgctcccccaaggataaacatgtcgtaaaaaccgacagcgttgcggataaaatctggtgggaaaacaacgccgagatgtcgcctgaaggctttgatgcgcttcacaaggacatgttggcgcatatgcaggggcgtgactacttcgtccaggatctggtcggtggggccgatccgaaacacgcgatcaacgtgcgtatggtgaccgagctggcttggcacggtctgttcattcgccacatgctgcgccgccccgagcgcgacgcgctggatgatttcatcgcggacttcaccgtgatcaactgcccgagcttttcggctgatccagctaaacacgattgccgctcggaaaccgtcattgcgatgaacttcgacaagaagatgatcttgatcggcggcacagaatacgcaggtgagaacaagaaatctgtattcaccctgctgaactacctgttgccggaaaaagggatcatgccgatgcattgctcggccaaccatgctaccggcaatcccgttgataccgctgtattcttcggtctgtcaggtacaggaaagaccacgctatccgccgatccgggccggacgttgattggtgacgatgaacacggctggtcggataacgggacctttaatttcgaaggtggctgctacgccaagacgatcaacctcagccgagaggcagagcccgagatttacgccactaccgaaaaattcggcaccgtgatcgagaacatgatctttgatgaagacaccaaagagcttgatttcgacgatgacagcctcaccgccaatatgcgttgcgcttacccgcttcactacatttctaacgcctcggcaaaagcgacgggtgggcaccccaagaatatcatcatgctaacctgtgatgcgttcggcgttcttccccctatcgcgcgcttgaccccggctcaggccatgtaccacttcctgtctggcttcacctccaaggttgccggtaccgaacgtggcgtgactgaacccgagcctacattctcgacctgctttggtgcgcccttcatgccgcgtcgccccgaggtttacggaaaccttctccgcgagaagatcgcggcgcatggcgcaacctgctggttggtaaacactggctggactggaggcgcctatggcacaggcagccgcatgccgatcaaagcaacgcgcgcgctgctgaccgcagcattggaagggtcgctcgccggggtagagtaccgcaaagatccaaacttcggctttgatgttcccgtggcggttacgggtgttgctgacatcctgctggatccacgccggacatgggacaaccctgaatcctacgatcgtcaggctgacaagctggtaaagatgtttgcagaaaacttcgaacaatacctcccttatattgatgacgacgtgaaagccgccgccatcggctaa

SEQ ID NO: 82965 - protein, 532 aa, Sulfitobacter sp. EE-36
MTLGRVNPQFRLEDQGISGLGDVYYNMIEPALVEAALKREEGTLGKGGAFLVTTGKFTGRSPKDKHVVKTDSVADKIWWENNAEMSPEGFDALHKDMLAHMQGRDYFVQDLVGGADPKHAINVRMVTELAWHGLFIRHMLRRPERDALDDFIADFTVINCPSFSADPAKHDCRSETVIAMNFDKKMILIGGTEYAGENKKSVFTLLNYLLPEKGIMPMHCSANHATGNPVDTAVFFGLSGTGKTTLSADPGRTLIGDDEHGWSDNGTFNFEGGCYAKTINLSREAEPEIYATTEKFGTVIENMIFDEDTKELDFDDDSLTANMRCAYPLHYISNASAKATGGHPKNIIMLTCDAFGVLPPIARLTPAQAMYHFLSGFTSKVAGTERGVTEPEPTFSTCFGAPFMPRRPEVYGNLLREKIAAHGATCWLVNTGWTGGAYGTGSRMPIKATRALLTAALEGSLAGVEYRKDPNFGFDVPVAVTGVADILLDPRRTWDNPESYDRQADKLVKMFAENFEQYLPYIDDDVKAAAIG

SEQ ID NO: 82966 - DNA, 1599 bp, Roseovarius nubinhibens ISM
  CDS (1)..(1599): transl_table=11
atgacattcggacgggtgaacccgaaattcagcctcgaagatcaagggatcaccgggctgggagaagttttttacaacctgatcgaaccggcgctggtcgaggccgcggtgaagaacggcgaaggcacgctgggccgtggcggggcgtttctcgtcaccaccggcaagttcaccggccgctcgcccaaggacaaacatgtcgtcaagaccgacagcgtcgccgacacgatctggtgggacaacaatgccgaaatgacccccgaagggtttgacgcgctctacgaggacatgatcgcccatatgcaaggcggccgctactacgtgcaggatctcaccggcggcgccgacccggcgcattcgatcaaggtccgcatggtgaccgaactggcctggcacgggctcttcatccgccacctgctgcgccgccccgaacgcgaggcgctggatcatttcgtcgcggatttcaccgtgatcaactgcccgagcttcaaggccgacccgaaaaagcacgattgccgctcggacaccgtcatcgcgatgaatttcgaccgcaagatgatcctcatcggcggcaccgaatatgctggcgagaataagaaatcggtcttctcgctgctcaactacctgctgcccgaaaaaggcatcatgccgatgcattgctcggccaaccatgccaagggcaacccggtcgacaccgccgtgttctttggcctgtcgggcaccggcaagacgacgctctcggctgatcccggccgcattctcatcggcgacgacgaacatggctggtcggatcgtggcaccttcaactttgaaggcggctgctatgccaagacgatcaacctcaaccccgaggccgagcccgagatctacgccaccacgtcgaaattcgccacggtgatcgagaacatggtctttgacgaagagaccaaggaacttgatttcgacgatgacagcctgacggccaacatgcgctgcgcctacccgctcgactatatctcgaacgcgtcggagacggccatcggcggccaccccaagaacatcatcatgctgacctgtgatgcgtttggcgtgctgcctccgatcgcccggctgaccccggcacaggcgatgtatcacttcctgtcgggctttacctccaaggtcgccgggaccgagcgcggcatcaccgagcccgagcccaccttctcgacctgctttggcgcgcccttcatgccgcgccgtcccgaggtctatggcaacctcctgcgcgaaaagatcgccaaacatggcgcgacctgctggctggtgaacaccggctggaccggcggcgcctatggcaccggctcgcggatgccgatcaaggccacccgcgccctgctcaccgccgcgctcgacggctcgctctccaaggtcaagttccgcaaggacccgaatttcggctttgacgtgcccgtggatgcgcccggcgtgcccgaggttctgctcgacccgcgccgcacctggggcaaccccgaggcctatgatgcgcaggccgcgaaactggtcgaaatgttcgcccagaatttcgagcaatacctgccgcatatcgacgaagatgtgaaagccgccgcactgggctaa

SEQ ID NO: 82967 - protein, 532 aa, Roseovarius nubinhibens ISM
MTFGRVNPKFSLEDQGITGLGEVFYNLIEPALVEAAVKNGEGTLGRGGAFLVTTGKFTGRSPKDKHVVKTDSVADTIWWDNNAEMTPEGFDALYEDMIAHMQGGRYYVQDLTGGADPAHSIKVRMVTELAWHGLFIRHLLRRPEREALDHFVADFTVINCPSFKADPKKHDCRSDTVIAMNFDRKMILIGGTEYAGENKKSVFSLLNYLLPEKGIMPMHCSANHAKGNPVDTAVFFGLSGTGKTTLSADPGRILIGDDEHGWSDRGTFNFEGGCYAKTINLNPEAEPEIYATTSKFATVIENMVFDEETKELDFDDDSLTANMRCAYPLDYISNASETAIGGHPKNIIMLTCDAFGVLPPIARLTPAQAMYHFLSGFTSKVAGTERGITEPEPTFSTCFGAPFMPRRPEVYGNLLREKIAKHGATCWLVNTGWTGGAYGTGSRMPIKATRALLTAALDGSLSKVKFRKDPNFGFDVPVDAPGVPEVLLDPRRTWGNPEAYDAQAAKLVEMFAQNFEQYLPHIDEDVKAAALG

SEQ ID NO: 82968 - DNA, 1599 bp, Oceanicola batsensis HTCC2597
  CDS (1)..(1599): transl_table=11
atgacatttggacgggtgaacccgaaattccgccttgaagatcaggggatcgagggtctgggcaatgtctattacaacctgatggagcccgcgctgatcgaagcagcgctgaagaacggcgaaggccgtctcggcaacgggggcgcctttctggtcaccaccggcaagttcacgggccgctcgcccaaggacaaacatgtcgtgaatacaacgaatgtctccgacaagatctggtgggagaacaacgccgagatgtcgccggaaggtttcgataacctgcacgccgacatgctcgatcacatgaagggcaaggactactacgtccaggatctcgtgggcggcgccgatccggcctatgcgatcaacgtccgcatggtgaccgaactggcctggcacgggctcttcatccgccacatgctgcgccgtcccgaccgggccacgctcgacaatttcatggccgacttcacggtgatcaactgcccgaccttccgggcggatcccggccgtcacgcctgccggtcggaaaccgtgatcgcgatgaacttcgacaagaagctgatcctgatcggcggcaccgaatacgcgggcgaaaacaagaaatcggtcttcaccctgctcaactacatcctgccggaaaagggcgtgatgccgatgcactgctcggccaaccacgcgcaggacaacccggtcgacaccgccgtcttcttcggcctctccgggaccggcaagaccaccctttcggccgacccgaaccgcgtcctgatcggcgacgacgaacacggctggtccgaccgcggcaccttcaacttcgaaggcggctgctacgccaagacgatctcgctcagccccgaggccgagcccgagatctacgccaccaccagcaagttcggcaccgtcatcgagaacatggtcttcgacgaagagaccttcgagctcgacttcgaggacgacagcctgaccgccaacatgcgctgcgcctatccgctggagtatatctccaacgcctcggacaccgcgctcggcggccatcccaagaacatcatcatgctgacctgcgacgccttcggggtcctgccgccgatctcgcggctcaccccggcgcaggcgatgtatcacttcctgtcggggttcacctccaaggtcgccggcaccgagcgtggcgtgaccgaacccgagcccacgttctcgacctgcttcggcgcccccttcatgccgcgtcgccccgaggaatacggcaatctcctgcgcgagaagatcgccaagcacggcgcgacctgctggctggtgaacaccggctggaccggcggcgcctacggcaccggatcgcggatgccgatcaaggccacgcgcgccctgctgaccgccgcgctggacgggtcgctgaacgaggccgagttccgcaaggatccgaacttcggcttcgacgtgccgatctcggtccccggggtcgcccaggtcctgctggacccgcgccggacatgggacgatcaggaggcctatgaccggcaggcacagaaactggtcaacatgttctccgagaacttcgcccagtacctgcccttcatcgacgaggacgtgaaggccgccgcgatcggctga

SEQ ID NO: 82969 - protein, 532 aa, Oceanicola batsensis HTCC2597
MTFGRVNPKFRLEDQGIEGLGNVYYNLMEPALIEAALKNGEGRLGNGGAFLVTTGKFTGRSPKDKHVVNTTNVSDKIWWENNAEMSPEGFDNLHADMLDHMKGKDYYVQDLVGGADPAYAINVRMVTELAWHGLFIRHMLRRPDRATLDNFMADFTVINCPTFRADPGRHACRSETVIAMNFDKKLILIGGTEYAGENKKSVFTLLNYILPEKGVMPMHCSANHAQDNPVDTAVFFGLSGTGKTTLSADPNRVLIGDDEHGWSDRGTFNFEGGCYAKTISLSPEAEPEIYATTSKFGTVIENMVFDEETFELDFEDDSLTANMRCAYPLEYISNASDTALGGHPKNIIMLTCDAFGVLPPISRLTPAQAMYHFLSGFTSKVAGTERGVTEPEPTFSTCFGAPFMPRRPEEYGNLLREKIAKHGATCWLVNTGWTGGAYGTGSRMPIKATRALLTAALDGSLNEAEFRKDPNFGFDVPISVPGVAQVLLDPRRTWDDQEAYDRQAQKLVNMFSENFAQYLPFIDEDVKAAAIG

SEQ ID NO: 82970 - DNA, 1674 bp, Erythrobacter sp. NAP1
  CDS (1)..(1674): transl_table=11
ttggcggacccacacgaaaattcggacacgaacaccatcgtaccaggagaagatacgttgatccccctcgcccagccgcttagctcccagggcatcgaaaccggagccgaaatccactcaaatcttggcacgtctgcgcttgtcgaagcgtcgatcgctgctggcgaaggcaagctttccaagcacggcgcgctcgtcgttcagaccggcgcaaaaaccggccgcagcgcgaacgacaagttcatcgttcgcgacgaaacgaccgaggacaccgtgtggtggggcaaggtcaacaagagcatgacgccggagcatttcgccaacctcaaggccgacttcatggaagcggtcgggggcaaggaaacgctctacgtcgccgacctgtttggtggttcgcagccagagcaccgcgtcaacgtgcgcgtcatcaatgagcttgcatggcacaacctgttcatccgcacgctgctggtgcgcccgactgccgaagaactcggggatttcgctcccgaatacacgattatcgacctgccgaccttcaaggccgatccagagcgccacggaaccaacagcgagaccgtgatcgcggtcaacctgaccgaaaagctgatcctgatcggcggcacgcgttatgcgggcgagatgaagaagagcgtctttggcatcctcaactacctgctcccgacaaagggcgtgatgccgatgcactgctcggccaatatcagcgccgatggcaagacggctgtgttcttcggcctgtcgggcacgggcaagacaacgctttccgcagacgcctcgcgcacccttatcggcgatgacgagcacggctggtcggacacggcggtcttcaacttcgaaggcggctgctacgccaagatgatccggctgtccgaagaggctgagcccgaaatctacgcaacgacgcgccgtttcggcactgttcttgagaacgtcgtgatggacgacgaaacgcgcgagctcgatttcgacgacaacacgctcgccgaaaacacgcgcggcgcttacccgatcgactacatcccgaacacgagcaaggataacctcggcccggtgccgagcaacgtcgtgatgctcaccgccgatgcgttcggcgtgctgcctccgattgcgcggctcacgcccgatcaggcgatgtaccacttcctgtccggctacacagccaaggttgcaggcacggaaatcggcgtgaccgagcccgaagcgaccttctcgacctgtttcggcgcgccattcatgccgcgccacccgagcgtttatggcaacctcctgaaagagcgcatcgccaagggcggcgtgcagtgctggctgctcaacactggctggaccggtggcaagtacggcgtcggcaaccgcatgccgatcaaggcaacccgtgcgctgctcaacgctgcgctcgacggtgaccttgataatgtcgaattccgcgaagatccgaatttcggtttcgacgttccggtccatgtgccggtgctggccgaggctggtatcgaccagacgatcctcgacccgcgcagcacctgggcggacaagggagattacgacgcgaccgcgcagaagctggttcagttgttcatcgacaatttcgccgagttcgaagcgcatgtcgacgaaggcgtgcgccaggctgcacccgcgtcgcccatcgctgcctga

SEQ ID NO: 82971 - protein, 557 aa, Erythrobacter sp. NAP1
MADPHENSDTNTIVPGEDTLIPLAQPLSSQGIETGAEIHSNLGTSALVEASIAAGEGKLSKHGALVVQTGAKTGRSANDKFIVRDETTEDTVWWGKVNKSMTPEHFANLKADFMEAVGGKETLYVADLFGGSQPEHRVNVRVINELAWHNLFIRTLLVRPTAEELGDFAPEYTIIDLPTFKADPERHGTNSETVIAVNLTEKLILIGGTRYAGEMKKSVFGILNYLLPTKGVMPMHCSANISADGKTAVFFGLSGTGKTTLSADASRTLIGDDEHGWSDTAVFNFEGGCYAKMIRLSEEAEPEIYATTRRFGTVLENVVMDDETRELDFDDNTLAENTRGAYPIDYIPNTSKDNLGPVPSNVVMLTADAFGVLPPIARLTPDQAMYHFLSGYTAKVAGTEIGVTEPEATFSTCFGAPFMPRHPSVYGNLLKERIAKGGVQCWLLNTGWTGGKYGVGNRMPIKATRALLNAALDGDLDNVEFREDPNFGFDVPVHVPVLAEAGIDQTILDPRSTWADKGDYDATAQKLVQLFIDNFAEFEAHVDEGVRQAAPASPIAA

SEQ ID NO: 82972 - DNA, 1542 bp, Pseudoalteromonas tunicata D2
  CDS (1)..(1542): transl_table=11
atgacttcaagcgctactcgttttgttgatttaacagttgcagaattaattgaacacgccatcgccaaaggtgaaggtactttagcagcaaatggtgcatttgttgcacaaacaggtcaccgtactggtcgttcaccgcgcgatcgttttattgtgcaagagccaagcacacaaaatgaaattcaatggggtaaagtaaaccaaccttttgatgctggtaaatttgatgcgttatggagcaaagtagaagctcatgtgcaaaaaaatgaccatttcgtctctcacttagaagtcggtgccgatcctgagcactatttaccaatcgtagttactaccgaaactgcatggcatcatgtgtttgctaacaacatgttcatcaaacctgcaacttacaacgtatcaaacttaccacagtggcaggtaatgaacgttccttcgtttgtatgtgatcctgagcgtgatggtactaacagtgatggtgttgtcgtaatcaattttgctgagcgtaaagtattacttgcgggtatgcgttatgcgggcgaaatgaaaaaatcaatgttctctgtgcaaaatttccttcttccagctaaaggtgtattaccaatgcactgctctgctaatgtgggcgaggctggcgatactgctttattcttcggtctatcaggcacaggtaaaacaacgctttctgcagatccaacacgcttcttaattggtgatgacgagcacggctgggcacctggcagtgtatttaacatcgaaggcggttgttatgctaaatgtatcgacctatcgcaaaagaatgaaccagtgatttgggatgcaatccgttttggtacaattttagagaacgtagttctagacgaaaaccgtactcctgattatcacgatacctctttaacgcaaaactctcgtgctgcatatccgcttgaacacgttgaaaaacgtaaagttgaaaatcgcgctggcgaacctcgttcagtggtatttttaacatgtgacgtaagcggcgttttaccaccagtatcaattttgactgaagaagctgctgcattccatttcttaagtggttacacagcaaaagtaggttcaactgaaattggttcaacatcagatatcgaatctacattctcaacttgttttggcgcaccattcttcccacgtccagcaggtgtttatgctgagcttctaatgaagcgtgtacgtgagtttggcgcaaaagtatatctggttaacactggttggacaggtggcccatacggcacaggcaaacgcttcgacattccaacaacgcgtgccattgttgaatcaatcgtttcaggtagcttaacgaatgttgaaacacaacatatcgatattctaaacctagatgtaccagttgcagttgaaggcgttgatagccaattactgaaccctattaatacttgggctgataaagcaaaatatgcagaatttgcacaaaaattagcagctgaatttactgctaattttgcacaatatgatgtatctgatgcaatcaaacaagcgggcccaaaagcggagtaa

SEQ ID NO: 82973 - protein, 513 aa, Pseudoalteromonas tunicata D2
MTSSATRFVDLTVAELIEHAIAKGEGTLAANGAFVAQTGHRTGRSPRDRFIVQEPSTQNEIQWGKVNQPFDAGKFDALWSKVEAHVQKNDHFVSHLEVGADPEHYLPIVVTTETAWHHVFANNMFIKPATYNVSNLPQWQVMNVPSFVCDPERDGTNSDGVVVINFAERKVLLAGMRYAGEMKKSMFSVQNFLLPAKGVLPMHCSANVGEAGDTALFFGLSGTGKTTLSADPTRFLIGDDEHGWAPGSVFNIEGGCYAKCIDLSQKNEPVIWDAIRFGTILENVVLDENRTPDYHDTSLTQNSRAAYPLEHVEKRKVENRAGEPRSVVFLTCDVSGVLPPVSILTEEAAAFHFLSGYTAKVGSTEIGSTSDIESTFSTCFGAPFFPRPAGVYAELLMKRVREFGAKVYLVNTGWTGGPYGTGKRFDIPTTRAIVESIVSGSLTNVETQHIDILNLDVPVAVEGVDSQLLNPINTWADKAKYAEFAQKLAAEFTANFAQYDVSDAIKQAGPKAE

SEQ ID NO: 82974 - DNA, 1632 bp, Photobacterium sp. SKA34
  CDS (1)..(1632): transl_table=11
atgagcacaatgtgtgtcgataataaggttgcaacgagcatggatttgtcccaatacggaatactcaatgttacagatgttattcgtaatccttcttacgaaatactattcgcagaagagacgaaaacagatttgaaagggtttgaaaaaggcattgtcaccgagctcggtgcggttgctgttgatacagggatatttaccggccgttcaccacaagataaatttattgtaaaagacaacactacccaagataccttgtggtggtcagatcaaggcaaaaacgataataagccacttagccaacaagcatggcatgatcttaaatctctcgtaacaacgcaactctctaacaagcgtctttttgtggtagatggctattgtggcgcaaatcctgatacacgtatatgtattcgggtgatcactgaagtcgcttggcaagcacacttcgttaaaaacatgtttattcgtccaacagaagctgagttagaaacatttgaacccgacttcgtgatcatgaatggctcaaagtgtactaaccctaaatggcaagagcacggcatgaattcagagaacttcacggtatttaacctctctgacaaaatacaacttattggtggtacatggtatggcggcgagatgaaaaaagggatgttcgcgatgatgaactactttttacctctcaaaggtattgcctctatgcattgctcggccaatataggagaaaatggtgataccgctatcttttttggcttatctggcacaggtaaaacaactttatcgactgatcctaaacgggcattaattggtgatgatgaacatggctgggacgataacggtgtgtttaactttgaaggtggatgttatgcaaaaaccattaacctttcaaaagaagctgaacctgatatctaccaggctattcgtcgtgatgcgttactggaaaacgtaacagtacgtaatgatggttctatcgattttaatgataattcaaaaacagaaaacacccgcgtttcttacccaatttatcatatcgataatatcgtaaaacctatctcaaaaggtggtcatgccaataaggttattttcttatcggcagatgctttcggtgttttacctccggtatcaaagctaacacccgagcaaactaaatatcacttcttgtcaggttttactgcaaaactcgcgggaacggaacgtggtattacagagccgacccccaccttctctgcgtgttttgggaatgcctttttaacacttcacccaacaaaatatgctgaagtgttagtgaaacgcatggaagcagcgggagctgaagcctatttagtcaatacaggctggaatggcacaggtaaacgtatttcgatccaagatactcgtggcattattgatgcgattttagatggctcgattgatagcgcaccaacgaaacaaattcctattttcaatttaaccgtgccgacggcattacctggtgtcgccactgagatcctagatcctcgtgatacctataccgacccactgcaatgggaaagtaaggccaaagatcttgcaagtcgatttatcgcaaacttcgataaatataccgataccgcagaaggcgaatctttagtcaaagcaggcccgcagctcgattaa

SEQ ID NO: 82975 - protein, 543 aa, Photobacterium sp. SKA34
MSTMCVDNKVATSMDLSQYGILNVTDVIRNPSYEILFAEETKTDLKGFEKGIVTELGAVAVDTGIFTGRSPQDKFIVKDNTTQDTLWWSDQGKNDNKPLSQQAWHDLKSLVTTQLSNKRLFVVDGYCGANPDTRICIRVITEVAWQAHFVKNMFIRPTEAELETFEPDFVIMNGSKCTNPKWQEHGMNSENFTVFNLSDKIQLIGGTWYGGEMKKGMFAMMNYFLPLKGIASMHCSANIGENGDTAIFFGLSGTGKTTLSTDPKRALIGDDEHGWDDNGVFNFEGGCYAKTINLSKEAEPDIYQAIRRDALLENVTVRNDGSIDFNDNSKTENTRVSYPIYHIDNIVKPISKGGHANKVIFLSADAFGVLPPVSKLTPEQTKYHFLSGFTAKLAGTERGITEPTPTFSACFGNAFLTLHPTKYAEVLVKRMEAAGAEAYLVNTGWNGTGKRISIQDTRGIIDAILDGSIDSAPTKQIPIFNLTVPTALPGVATEILDPRDTYTDPLQWESKAKDLASRFIANFDKYTDTAEGESLVKAGPQLD

SEQ ID NO: 82976 - DNA, 1548 bp, Oceanospirillum sp. MED92
  CDS (1)..(1548): transl_table=11
atgaccaaagattctgttaatattacgaaccaaaacctaagcccagctcagctggtagagaaagccattgccaacggtgaaggaacacttgctgacactggcgcattggttgtgacaacaggtaagcgtactggtcgttcgccgatggatcgtttcatcgtcgaagaaccaagtactgctgattctatcgattggggtagcattaaccgcccattcgattcagacaaatttgacgcgctatggactcgtgtagaagagttcctggcggataaagaacacttcgtggcgaatgtccatgttggttctgatcccaaccactatcttgctgtacgtatgacgacacagacggcttggcagaacctgttcggccagaatctgtttattcgtcctgcagagtacaacccaaaatcgaaagaagagtggcagatcctgaacgttgctggtttcgaatgtgaaccagagcgcgatggcactaacagcgatggctgtgtaatcatcaacttcgctaaacgcaaagtattacttgcgggtatgcgttatgcgggtgagatgaagaaggcgatgttctctgtacagaacttcctgcttcctgaaaaagacgtgctaccaatgcactgttctgcaaacgttggtgatgacaacagcacaacgttgttcttcggcctgtctggtacaggtaaaacgaccctttctgctgacccttctcgttacctgatcggtgatgatgagcacggttggggcaaaggtgtggtatttaacctggaaggtggttgctacgcgaagaccatcaacctgagccagaaaaacgaacccatcatttgggatgcgatccgctttggtgcgatcgttgagaacgttgctctgaatgatgcgcgcacagctgattacgatgacacttctctgactgagaatggtcgttgtgcatacccattgcagcacgttgagaagcgtactgtatcgaatatgggcgaagagccaaatgcgattgtcttcctgacctgtgacctgacaggtgtacttcctccagtttctgtattgactaaagaagcggctgcgtaccacttcctgtcaggttatacagcgctggtaggttctacagagatgggctctggtggtggtatcaagtcgactttctctacttgctttggtgcgccattcttcccacgcccagcacgcgtatatgctgagctgctgatgaagcgtattgaagagtttggttctaaagtttatctggttaacaccggctggacaggtggttcttacggtacgggtgagcgtttcagcatcccaactacgcgtggcatcatctctgctatccagaacggttccctgaacggtgttgaaactcagaaactggaaggcctgaacctggaagttccagttgcagtagaaggcgttgaaacagctcttcttaacccacgtgatacttgggcggataagtctggttacgatgcaactgcaaacgatctgatcggtcagttcgttgaaaacttcaagaagtttgacggcgtatctgaagagatcattgcggctggtcctcagctgtaa

SEQ ID NO: 82977 - protein, 515 aa, Oceanospirillum sp. MED92
MTKDSVNITNQNLSPAQLVEKAIANGEGTLADTGALVVTTGKRTGRSPMDRFIVEEPSTADSIDWGSINRPFDSDKFDALWTRVEEFLADKEHFVANVHVGSDPNHYLAVRMTTQTAWQNLFGQNLFIRPAEYNPKSKEEWQILNVAGFECEPERDGTNSDGCVIINFAKRKVLLAGMRYAGEMKKAMFSVQNFLLPEKDVLPMHCSANVGDDNSTTLFFGLSGTGKTTLSADPSRYLIGDDEHGWGKGVVFNLEGGCYAKTINLSQKNEPIIWDAIRFGAIVENVALNDARTADYDDTSLTENGRCAYPLQHVEKRTVSNMGEEPNAIVFLTCDLTGVLPPVSVLTKEAAAYHFLSGYTALVGSTEMGSGGGIKSTFSTCFGAPFFPRPARVYAELLMKRIEEFGSKVYLVNTGWTGGSYGTGERFSIPTTRGIISAIQNGSLNGVETQKLEGLNLEVPVAVEGVETALLNPRDTWADKSGYDATANDLIGQFVENFKKFDGVSEEIIAAGPQL

SEQ ID NO: 82978 - DNA, 1677 bp, Xanthobacter autotrophicus Py2
  CDS (1)..(1677): transl_table=11
atggcgttcatgcgccgcgcggggccggcttcaggccggcgggaacatcaggaggacgagtccttgctcgaaaccggtcaccggaacagcgcctgcggcgccgccagcttcggtctgaaacacctcaccgcggttcattggaacctgctggaacccgcgctctacgagcacgccctggcgaaccgggaagcccgcctgtcctccggcggcgcgctggtggcggaaaccggcgcccataccggccgcagccccaaggacaagttcgtggtccgcgacgccgacaccgaggccgaggtgtggtgggacaacaacggcgccatctcgccggagcagttcgagaccctctaccaggacttcctcgcggcggccgaggacaagaccctctacgcccaggacctctacggcggcgccgacccttcctgccgcatcaaggtgcgcgtctataccgagttcgcctggcactcgctgttcatccgcaccatgctgcgccggccggagcaggcggagctggacagcttcgtgccggaactcaccataatcgacctgccgtccttcaaggcggatccggaacgccacggggtccgctcggaaacggtgatcgcggtgaacttcacccgcggcatcgtgctgatcggcaattcgtcctatgcgggcgagatgaagaagtcggtgttcacggcgctgaactacatcctgccgaaaaagggcatcatgcccatgcactgctcggcgaacgtaggcgccgagggcgacgtctgcctgttcttcggcctgtccggcaccggcaagaccacgctctccgccgatcccaaccgcacccttctgggcgatgacgagcacggttggagccagagcggcgtcttcaatttcgagggcggctgctatgccaagaccatccgcctctcggccgaggccgagccggagatcttcgccgcctccaaccgcttcggcacggtgctggagaacgtggtgctggacaaggtcacccacgtccccgacttcgacgacggcagcctgaccgagaacacccgctcctgctatcccctgtcgttcattcccaatgccagcgccaccagcgtcgcgggcatgccgaagaacgtggtgatgctcacctgcgacgccttcggcgtgctgccgcccatcgcccggctgaccccggcgcaggccatgtatcacttcctgtccggctataccgccaaggtggccggcaccgagaagggggtgaaggacccggaagccaccttctccacctgcttcggcgcccccttcatgccgcgccatccctcggtgtacggcaatctgctgcgcgacctcatcgccgagcaccaggtggattgctggctggtgaacaccggctggaccggcggcaagttcggcaccgggcgccgcatgcccatcaaggtcacgcgcaccctgcttacggcggtgctggatggctctctgaaaggcgcctccttccgcaccgacccctatttcggcttcgaggtgccaacctccgtgccgggcatcgagccgcacgtgctctatccctccaagacctgggcggacaaggcggaattcgacgccacggcgcgccggctggtggagatgttccgggagaatttcacacggttcgagagccatgtggacgccgccgtccgcgacgcccagccccacgtccgcatcgccgccgagtag

SEQ ID NO: 82979 - protein, 558 aa, Xanthobacter autotrophicus Py2
MAFMRRAGPASGRREHQEDESLLETGHRNSACGAASFGLKHLTAVHWNLLEPALYEHALANREARLSSGGALVAETGAHTGRSPKDKFVVRDADTEAEVWWDNNGAISPEQFETLYQDFLAAAEDKTLYAQDLYGGADPSCRIKVRVYTEFAWHSLFIRTMLRRPEQAELDSFVPELTIIDLPSFKADPERHGVRSETVIAVNFTRGIVLIGNSSYAGEMKKSVFTALNYILPKKGIMPMHCSANVGAEGDVCLFFGLSGTGKTTLSADPNRTLLGDDEHGWSQSGVFNFEGGCYAKTIRLSAEAEPEIFAASNRFGTVLENVVLDKVTHVPDFDDGSLTENTRSCYPLSFIPNASATSVAGMPKNVVMLTCDAFGVLPPIARLTPAQAMYHFLSGYTAKVAGTEKGVKDPEATFSTCFGAPFMPRHPSVYGNLLRDLIAEHQVDCWLVNTGWTGGKFGTGRRMPIKVTRTLLTAVLDGSLKGASFRTDPYFGFEVPTSVPGIEPHVLYPSKTWADKAEFDATARRLVEMFRENFTRFESHVDAAVRDAQPHVRIAAE

SEQ ID NO: 82980 - DNA, 1611 bp, Flavobacteria bacterium BBFL7
  CDS (1)..(1611): transl_table=11
atgggttcaaataccttagttacgaaatcgatttcgttagaaaaatggggaattacaaattccaaaatcaattatcaactacctcctgcagagcttcagaaaattagtgtcgctagctttggtgggaaggagaccgcaaatggtacactcgctgttaatacaggggaatttactggtaggtcacctatggataggttcatcgtaagagatgaggttactgaagataaagtctggtggggagatattaatattccttttgaatcagataagtttgatgcgctactgactaaagttacttcttacttagatggcaaagatatatttgtaagagatgcttatgcttgtgcacatcaagattaccgtcttaatattagagttattaatgagtatccatggtctaacatgtttgcttacaatatgtttttgagaccagataatgatgagttagaaaacttttctccagagtggacagtgattaatgcacctggatttatggctgtaccggatcaagatggtacaagacaacataattttgctattcttaatttttctaggaagattgctcttataggtggaactggttatactggtgagattaagaaaggaatctttagtgcacttaattttatcttacctgtttataaagatacattgcctatgcactgtagtgcaaatgtgggaaaagatggtaatacagctatcttttttggtttaagtggtactggtaaaacgactctttctacagacccagatcgtgcattaatcggtgatgatgagcatggatggacttcaaataatgatgtattcaattttgaaggtggttgttatgcaaaggtaatcaacctcgatgcagaaggtgagccagagatatataacgccataaagcctggtgctatacttgaaaatgttattttaaattcagataaaacagttgactttaaggatactagtatcactcaaaatacgagagttagttatccaatatttcatattgagaatataaaaaaaccgtctgtagggaataatccaaagaatatctttttcttaactgcagatgcgtttggtgtattgcctcctatatcaaagttaactccaggacaagcggcatatcactttatcagtggttatactgcaaaagttgctggaacagaagctggtataacagaaccagtgcctagtttttctgcatgttttggggctccatttatgcctcttcatcctacaaagtatgctgaaatgttaagcgcgaaaatgaaggaaacaggtgtgaatgtatggttagtaaatacaggatggaccggtggaccatacggtgtcggttcacgtatgaagttaaagtatacacgagcaatgattactgctgcaatggatggtagtctagaagctgcaaataaagataactaccacgtacattcagtatttggagtagcgcagccgcgtacatgtcctaacgtgcctacggatgttttaagccctagagcgacatggaaaaatgatgacgggtattatgcgacagcttcaaaactgactaatgcttttagagataatttcaaaaagtttgaagaatatgcttcttcagagattatggctggagcgcctttgaaatattaa

SEQ ID NO: 82981 - protein, 536 aa, Flavobacteria bacterium BBFL7
MGSNTLVTKSISLEKWGITNSKINYQLPPAELQKISVASFGGKETANGTLAVNTGEFTGRSPMDRFIVRDEVTEDKVWWGDINIPFESDKFDALLTKVTSYLDGKDIFVRDAYACAHQDYRLNIRVINEYPWSNMFAYNMFLRPDNDELENFSPEWTVINAPGFMAVPDQDGTRQHNFAILNFSRKIALIGGTGYTGEIKKGIFSALNFILPVYKDTLPMHCSANVGKDGNTAIFFGLSGTGKTTLSTDPDRALIGDDEHGWTSNNDVFNFEGGCYAKVINLDAEGEPEIYNAIKPGAILENVILNSDKTVDFKDTSITQNTRVSYPIFHIENIKKPSVGNNPKNIFFLTADAFGVLPPISKLTPGQAAYHFISGYTAKVAGTEAGITEPVPSFSACFGAPFMPLHPTKYAEMLSAKMKETGVNVWLVNTGWTGGPYGVGSRMKLKYTRAMITAAMDGSLEAANKDNYHVHSVFGVAQPRTCPNVPTDVLSPRATWKNDDGYYATASKLTNAFRDNFKKFEEYASSEIMAGAPLKY

SEQ ID NO: 82982 - DNA, 1548 bp, marine gamma proteobacterium HTCC2207
  CDS (1)..(1548): transl_table=11
atgaccgacgctgctgtacacagagatcccggctccagtgagcttgttgaaatggctattaaacgcggggagggacatcttgccgatactggtgcatttgtcgcgaccacaggccatcgcagcgggagatctcccgccgatagatttatagtcgacgagcccagctcgaccgacgccatagactggggttcagtcaaccgaccctttgatgcagcccgctttgactcactctgggagcgtgtctctgaatatatcgccgaccgtgagcgtttcgtttcagagctccatgttggtcaggactcggagcactatatacccgtccaggtcactaccgagactgcttggcacagcctgttcgcccgcaatatgtttattcgcaccgacaaatataatccctccaacaaagcgccctggaaaattctccatgcggctaactttgtctgcgagccagggctcgatggcactaacagcgatggcgtagtgctgatcaactttgccctgcgcaaagttcttttggccggtatgcgctatgcaggtgaaatgaaaaaagccatgttctcagtgcagaatttcctgctccctgaaaagcaggttatgtctatgcactgtgccgccaatgtcggtgaagacggcgatactgcgctgttttttggtctctcaggcacaggtaaaaccaccctctcagcagacccagatcgctacctaatcggcgacgacgaacacggctggggcaagggcacagtatttaatattgaaggcggctgctacgccaaaacaattgatctcagtcagaaaaacgaaccggttatctgggacgccattcgctttggttcgattattgaaaatgtggtgatttcagagggtcagagaaccgctgattattcagatacatcgctaagcgagaacggccgttgcagctacccccttgaacatgtggaaaagcgctgcgtagaaaatcaatccggtgaaccgagaaatattatcttcctcacctgtgacgtgactggcgtattgcctccggtttcaatgctcagtaaagaggccgctgcctaccactttttaagtggttataccgcgcgagtgggatccactgagctgggtgcggaagccggtattcacccgaccttctcaacctgctttggctcaccctttatgccgcgccctgcaagtgtctatgcagagctacttatgaagcgtatcgaagactttggctctaaagtctatctggtcaataccggttggactggcggatctggaggtgctggcggtgaaggaaaccgattccctataccggtaacccgcgctgtagtcactgcaattactagcggctctctcgaaaactgtgagtcggaacacttggatctgttgaatcttgatattcccaccgcgattgacggcgttgatagcaagtatctcaacccacgcaatgcctgggacgacaaggacgcctatgatcaaaaggcggcaaccttggccaagctgttcgtagagaacatcgtcagctttgcaccctctcaggatattattgatgcaggtccgcagctgtaa

SEQ ID NO: 82983 - protein, 515 aa, marine gamma proteobacterium HTCC2207
MTDAAVHRDPGSSELVEMAIKRGEGHLADTGAFVATTGHRSGRSPADRFIVDEPSSTDAIDWGSVNRPFDAARFDSLWERVSEYIADRERFVSELHVGQDSEHYIPVQVTTETAWHSLFARNMFIRTDKYNPSNKAPWKILHAANFVCEPGLDGTNSDGVVLINFALRKVLLAGMRYAGEMKKAMFSVQNFLLPEKQVMSMHCAANVGEDGDTALFFGLSGTGKTTLSADPDRYLIGDDEHGWGKGTVFNIEGGCYAKTIDLSQKNEPVIWDAIRFGSIIENVVISEGQRTADYSDTSLSENGRCSYPLEHVEKRCVENQSGEPRNIIFLTCDVTGVLPPVSMLSKEAAAYHFLSGYTARVGSTELGAEAGIHPTFSTCFGSPFMPRPASVYAELLMKRIEDFGSKVYLVNTGWTGGSGGAGGEGNRFPIPVTRAVVTAITSGSLENCESEHLDLLNLDIPTAIDGVDSKYLNPRNAWDDKDAYDQKAATLAKLFVENIVSFAPSQDIIDAGPQL

SEQ ID NO: 82984 - DNA, 1578 bp, Rickettsiella grylli
  CDS (1)..(1578): transl_table=11
atgtcagcggttcaatctaaaaattcatcgaggctttttatcgatttaccagttgatgcgttaattaattatgccgtagagcgaagagaaggggtcatcgctgcgaatggtgctttatcggttgttactggccaacggacagggcgatcccctaaagataaatttattgtcacagaacccacaagtgaaaataatattgattgggattctattaaccaagctttttcagaagatcgtttccatgttttgtggcaacgtgccgaacaatatgcgaaaaaaatcgatttgtttatttctaatttacaagtgggtgctgatcctacttattttttacccgttaaagtaataacagaatacgcgtggcataacttatttgcacgacagctttttattcgtccagctcatttttatggaaaagttgctcatccggagtggaccattttaagtcttccagggttgaaaacagacccagaacgagatggcgttaatagtgacgccgctttaatcatccatttagctcagcgtagggttttattatgtggacatcgttatgcgggcgaaatcaaaaaggccatgttttcggttatgaattatttactgcctcacgttgatgttttaccgatgcattgctctgctaatgttggcgaaaaaggggatgtggctttattttttggtttatcgggaacggggaaaaccacgttgtctgctgatcccagccgttttttgattggtgatgatgaacacggctggagtaaaacaggtgtgtttaattttgagggcggttgttatgccaaatgcattgatttatccaaggaacgcgaacctttaatctggaaagcgattcgtcatggggccgtcatggaaaacgtggtgcttaaccctaaaacgttagaacccaattataacgattcaacacggactcaaaatacacgcgtcgcttatcctttagattttattgactcacgggtttttcccaaccgagttgatcgcgcgccagacgctatcatttttttgtgttgtgatttgtatggtgtattgccccctgttgcttatttgaatcatgaacaggcagcctattactttctaagcggttacacggcattagttgggagtacggaagtgggtcaaactgaacctatcaaaacaacatttagcacctgttttggcgcacctttttttccacgacctgcaaaagtctatgctgaactattaattaaacggttaaaagagagtcatgcgaaagtttatttagtcaatacaggttggacgggaggagcttatggggtgagtggaggacaacgcttttctattcctgtcacccgtgctgttataaaggctattttaaatgatgagatttccaagtcagaatccgaacgattgccagggtttgatttggctattcctaacgcgttgccaggtatagcgagcaatctattaaatcctaaaaagacatggaaagatcccgcagaatatgatcataaagcgcatgagctcatcaataaatttgttaataattttaaacagtttgatgtcagtttaacgattcgaaatgccggaccgactccctataaagaataa

SEQ ID NO: 82985 - protein, 525 aa, Rickettsiella grylli
MSAVQSKNSSRLFIDLPVDALINYAVERREGVIAANGALSVVTGQRTGRSPKDKFIVTEPTSENNIDWDSINQAFSEDRFHVLWQRAEQYAKKIDLFISNLQVGADPTYFLPVKVITEYAWHNLFARQLFIRPAHFYGKVAHPEWTILSLPGLKTDPERDGVNSDAALIIHLAQRRVLLCGHRYAGEIKKAMFSVMNYLLPHVDVLPMHCSANVGEKGDVALFFGLSGTGKTTLSADPSRFLIGDDEHGWSKTGVFNFEGGCYAKCIDLSKEREPLIWKAIRHGAVMENVVLNPKTLEPNYNDSTRTQNTRVAYPLDFIDSRVFPNRVDRAPDAIIFLCCDLYGVLPPVAYLNHEQAAYYFLSGYTALVGSTEVGQTEPIKTTFSTCFGAPFFPRPAKVYAELLIKRLKESHAKVYLVNTGWTGGAYGVSGGQRFSIPVTRAVIKAILNDEISKSESERLPGFDLAIPNALPGIASNLLNPKKTWKDPAEYDHKAHELINKFVNNFKQFDVSLTIRNAGPTPYKE

SEQ ID NO: 82986 - DNA, 1551 bp, Oceanobacter sp. RED65
  CDS (1)..(1551): transl_table=11
atggattgggcaattatgaccaccgtttacaccgatctctcttctgctgaactagtagaaaaggcactagagcgcggcgaaggccgtttacaagacactggtgcacttgttgttaccactggtaagcgcacgggtcgctcaccaatggaccgcttcattgtgcaagagccaagcacagcggatgctatcgattggggcaaagtgaaccgtccatttgatgcggacaagttcgatgcactttgggaccgtgttgaaagctatcttgatcagcatgacaaatttgtttccaatgtgcatgtgggtgccgatcctcagcattacctaccaattaaaatgacgacgcaaacagcttggcagaacctattcgggcgcaatttgtttatccgcccagatagtttcaaccctgcagataaagaagagtggcaaatcctaaacgcagctggtttcgagtgtgatccagagcgcgacggtactaattctgatggctgtgtcatcatcaatttcgctaagcgcaaagttcttttggcaggtatgcgctatgcgggcgaaatgaaaaaagccatgttctctgtacaaaacttcttactaccagaaaaagacgttctaccaatgcactgttcagccaacgtaggtgatgagggtgatacttgcttgttctttggtctatctggtaccggtaaaacaaccctttcagccgatccttcacgctacctaattggtgatgatgagcacggttggggcaaaggcactgtattcaacatcgaaggtggttgctacgcaaaaaccatcgatctctctaagaagaacgagccaattatctgggacgccattaaatttggcgcaatcgttgagaacgttgttatcaatgacgaaactcgcacagctgactacgctgataccagcctgactgaaaacggccgttgtgcgtatcctcttgagcacgttgaaaaacgtgttgaggaaaaccgtgcaggtgagccaaaagcggttatcttcttaacctgtgatatgaccggcgtattgcctcctgtttctatcctgagcaaagagcaagcggcttaccacttcctaagtggttacactgcccttgtaggctcaactgagatgggtggttctaaaggtttgaaatcaaccttctctacttgcttcggtgcgcctttcttcccacgtccagctggcgaatacgcagagcttcttatgaagcgcgtgactgaattcgattctcaggtttacctagtaaacacgggttggacaggtggtccaaatggcgctggtggcgagcgtttcagcatcccaacgactcgtgcagtgatctctgctattcagtccggagccctgcgtaatgctgaaactgagacaattcctgtatttggtttacaagtacctaaagcggttgaaggtgttgatagcaagctattgaatcctcgccaagcttgggctgaccaagacaagtacgatgaagtggcaaaaggcttagcacagcagtttgttgataacttccagaagtacgaagtttctgaagcgatccgtgcagcgggtcctcagctttaa

SEQ ID NO: 82987 - protein, 516 aa, Oceanobacter sp. RED65
MDWAIMTTVYTDLSSAELVEKALERGEGRLQDTGALVVTTGKRTGRSPMDRFIVQEPSTADAIDWGKVNRPFDADKFDALWDRVESYLDQHDKFVSNVHVGADPQHYLPIKMTTQTAWQNLFGRNLFIRPDSFNPADKEEWQILNAAGFECDPERDGTNSDGCVIINFAKRKVLLAGMRYAGEMKKAMFSVQNFLLPEKDVLPMHCSANVGDEGDTCLFFGLSGTGKTTLSADPSRYLIGDDEHGWGKGTVFNIEGGCYAKTIDLSKKNEPIIWDAIKFGAIVENVVINDETRTADYADTSLTENGRCAYPLEHVEKRVEENRAGEPKAVIFLTCDMTGVLPPVSILSKEQAAYHFLSGYTALVGSTEMGGSKGLKSTFSTCFGAPFFPRPAGEYAELLMKRVTEFDSQVYLVNTGWTGGPNGAGGERFSIPTTRAVISAIQSGALRNAETETIPVFGLQVPKAVEGVDSKLLNPRQAWADQDKYDEVAKGLAQQFVDNFQKYEVSEAIRAAGPQL

SEQ ID NO: 82988 - DNA, 1629 bp, Vibrio sp. Ex25
  CDS (1)..(1629): transl_table=11
atgaccgttatggaacatactaaggctgcaacacttgatctaaccaagcacggactgcataacgttaaagaggttattcgtaaccctagctacgaaatgttgtttgaggaagaaacgcgtgaagacctaacaggttatgagcgtggcgtggttactgaactaggtgcggttgccgttgacactggcatctttactggtcgctcaccaaaagataaatacatcgtcaaagacgctacgacagaagagcatatgtggtggacgtctgatcaagtaaaaaatgacaacaaaccaatcactccagaagtgtgggacgagctgaaagaactggtcacaaaccagctttctaacaaacgcttgtttgttgttgacggttactgtggtgcaaacccagatacgcgtttgagcattcgtgttatcacggaggtcgcatggcaagcgcacttcgttaaaaacatgtttatccgcccaacggaagaagaattggcaacatttgaaccagacttcgtggtaatgaatggcgcaaaatgcactaacccaaaatgggaagagcaaggtctgaactcagaaaacttcaccgtatttaacctaaccgagcgcatgcaacttatcggtggtacttggtacggcggtgagatgaagaaaggcatgttcgcaatgatgaactacttccttcctctaaaagacatcgcatcaatgcactgtagcgctaacatgggcaaagacggcgacgtagcggtattctttggtctctctggtacgggtaaaaccacactatcgactgatcctaaacgtgcgttaattggtgatgatgagcacggttgggatgatgacggcgtcttcaacttcgaaggtggttgttacgcgaaaaccatcaagctatcgaaagaagcggagccagacatctacaacgcaattcgccgtgatgcactgctagaaaacgtaacggtacgtagcgatggttctatcgactttgatgatggttcgaaaacagaaaacactcgtgtttcttaccctatctaccatatcgacaacatcgttaagccagtatcaaaaggcggtcacgcgaataaagtgatcttcctatcggcggacgcatttggtgtgctacctccagtgtctaaattgacacctgagcaaactaagtaccacttcctatctggctttactgcaaaattggcaggaacagagcgtggtattactgagccaacgccaaccttctctgcatgttttggcgcagcgttcctaacgcttcacccaactaaatacgcagaagtactggttaaacgtatggaagcagcaggcgctgaggcttacctagtgaacacaggttggaacggcactggcaaacgtatctcgattcaagatacgcgcggaattattgatgcgattcttgatggttcgattgaagatgcaccaactaagcacattcctatcttcaatcttgaagtaccgacttcactaccaggtgtggatccaagcattctagaccctcgtgacacgtacgttgatccacttcagtgggaaagcaaagcgaaagacttggctgaacgctttatcaataactttgataaatacacggacaatgcggaaggtaaatctctggttgccgctggccctcagattgattaa

SEQ ID NO: 82989 - protein, 542 aa, Vibrio sp. Ex25
MTVMEHTKAATLDLTKHGLHNVKEVIRNPSYEMLFEEETREDLTGYERGVVTELGAVAVDTGIFTGRSPKDKYIVKDATTEEHMWWTSDQVKNDNKPITPEVWDELKELVTNQLSNKRLFVVDGYCGANPDTRLSIRVITEVAWQAHFVKNMFIRPTEEELATFEPDFVVMNGAKCTNPKWEEQGLNSENFTVFNLTERMQLIGGTWYGGEMKKGMFAMMNYFLPLKDIASMHCSANMGKDGDVAVFFGLSGTGKTTLSTDPKRALIGDDEHGWDDDGVFNFEGGCYAKTIKLSKEAEPDIYNAIRRDALLENVTVRSDGSIDFDDGSKTENTRVSYPIYHIDNIVKPVSKGGHANKVIFLSADAFGVLPPVSKLTPEQTKYHFLSGFTAKLAGTERGITEPTPTFSACFGAAFLTLHPTKYAEVLVKRMEAAGAEAYLVNTGWNGTGKRISIQDTRGIIDAILDGSIEDAPTKHIPIFNLEVPTSLPGVDPSILDPRDTYVDPLQWESKAKDLAERFINNFDKYTDNAEGKSLVAAGPQID

SEQ ID NO: 82990 - DNA, 1539 bp, Alteromonadales bacterium TW-7
  CDS (1)..(1539): transl_table=11
atgattacaagcgctacacgttttgtcgatttaaccgcagctgaacttgtcgagcatgcgatccgccgtggcgaaggaactttagccgcaaatggtgctttcgtagccattacaggaaaacgaacaggccgttcacctcgagatcgttttattgtacaagaagctacaacacaaaatgaaattcaatggggcaatgtaaaccgccctttcgatgctgacaaatttgatgctttatgggcacgcgtagaagcacatgtgcaaagtaatgaccacttcacctctcacctagaagttggcgctgacccagagcattatttacctgtagttgttacaacagaaactgcatggcatcacatttttgccaaaaacatgtttattgaacctaaaaactataacgcttcaaacttaccacaatggcaagtgatgaacgtaccttcgtttgtatgtgaaccagaacgtgatggcactaacagcgatggcaccgtaattattaactttgcacaacgtaaagtattactggcgggaatgcgctacgccggtgaaatgaagaaatcgatgttctcagttcaaaacttcttattaccagctaagggtgtattaccaatgcactgttcggctaacgtgggggaagctggcgacacagcattattcttcggtttatctggcactggtaaaacaacgttatcagctgacccaactcgcttcctaatcggcgatgacgaacatggctgggcacctggtagtgtatttaacatcgaaggcggctgttacgcaaaatgtatcgacctttcacaaaagaatgagcctgttatttgggatgcaatccgctttggcactatcttagaaaatgttgtgcttgatgatagaggtgtgccagattttaacgatacaagtctgacccaaaatagcagagctgcgtacccattagaacatgttgaaaagcgtaaagtagaaaaccgcgcaggtgagcctaaagctgttgtattcttaacatgtgatgtgagtggcgtattacctcctgtgtctgtactgagtgaagaagccgctgcgtaccacttcctaagcggatatactgctaaagtaggttcaaccgaaattggttcaacaagcgatatagaatctacattctcaacctgttttggcgcaccgttcttcccacgtcctgcaggtgtttatgctgagcttctaatgaaacgtgtacgtgagtttggcgctaaagtttacctagtgaatactggctggactggcggtccttacggtatcggcaagcgttttgatataccaactacacgtgctgtaattgacgctatagtgtcaggtaaattagccggtgttgaaactcaacatattgatgcattgaacttaaacgtaccagttgcagtacctggtgttgatagcaaccttcttaacccaattaacacgtgggaagataaggctaaatataatgaatatgcagctaaattggctgctgactttacagaaaactttgctaaatacgacgtatctgacgatattaaaaatgcaggccctaaagcttaa

SEQ ID NO: 82991 - protein, 512 aa, Alteromonadales bacterium TW-7
MITSATRFVDLTAAELVEHAIRRGEGTLAANGAFVAITGKRTGRSPRDRFIVQEATTQNEIQWGNVNRPFDADKFDALWARVEAHVQSNDHFTSHLEVGADPEHYLPVVVTTETAWHHIFAKNMFIEPKNYNASNLPQWQVMNVPSFVCEPERDGTNSDGTVIINFAQRKVLLAGMRYAGEMKKSMFSVQNFLLPAKGVLPMHCSANVGEAGDTALFFGLSGTGKTTLSADPTRFLIGDDEHGWAPGSVFNIEGGCYAKCIDLSQKNEPVIWDAIRFGTILENVVLDDRGVPDFNDTSLTQNSRAAYPLEHVEKRKVENRAGEPKAVVFLTCDVSGVLPPVSVLSEEAAAYHFLSGYTAKVGSTEIGSTSDIESTFSTCFGAPFFPRPAGVYAELLMKRVREFGAKVYLVNTGWTGGPYGIGKRFDIPTTRAVIDAIVSGKLAGVETQHIDALNLNVPVAVPGVDSNLLNPINTWEDKAKYNEYAAKLAADFTENFAKYDVSDDIKNAGPKA

SEQ ID NO: 82992 - DNA, 1539 bp, marine gamma proteobacterium HTCC2143
  CDS (1)..(1539): transl_table=11
atgaccattcatagtaatttatccgcggcaacgctaatcgaacaagcactgatccgtggcgaaggacagctgaccgatgccggcgccctttatgttaccactggcaagcggaccggccgatcaccggctgatcgattcattgtcaaagagccgtctactgcagatagtattgactggggttcggtaaatcgtcctttcgaggccgtaaaattcgacgctctctggaatcgtgtagaagactatctctctcaaaaggatcgattcgtttcgacgctacacgtaggagctcatgaagagcactatattcctgtcaacgttaatactgaaacagcttggcaaggcctctttggtcacaatatgtttgtccgacctgaaaaatacaacccaaagtccaaagaagagtggacgattctgaatgttgccagctttgagtgcgatccggaacgcgacggcaccaactcagaaggcgtagttattcttaattttgcacaacgcaaagtgttactggcgggtatgcgttacgccggtgagatgaaaaaagcgatgttttctgtacaaaacttcttgttacctgagaaagatgtgatgcccatgcattgctcatcgaatgtcgatgaagccggtaacacaacgttgttctttggcttgtccggcaccggcaagaccacattgtctgccgatccagcttgctttctcatcggcgatgatgagcacggctggtcaaaaggcgcggtcttcaatattgaaggtggttgctacgcaaagaccattaatcttagtcaaaaaaatgaacccatcatctgggatgctattcgcttcggagccatcgttgaaaacgttgttctggatgaaaaccgcacacctgactacgacgacctttctctcagtgaaaacggtcgctgctcttaccctctggagcatgttgataaacgcatcgttgagaatgctgcgggggaaccgaagactgtcatattcctaacctgtgatgtgtcgggtgttattccaccaatatcaatactctctaaagaggcggcggcgttccactttttatcaggttacacagcacgagtaggatctacggaaatgggtgcagcagcgggtattcacccaaccttctctacctgcttcggcgccccctttatgcctcgtcccgcccgtgagtacgcggagctgctgatgaagcgtatagaagacttcgattctcaggtctaccttgttaacactggctggaccggggggtccggtggcgaaggcggtcaagggtctcgtttccctattcccgtcactcgcgcagtcatttccgctgctcaaaatggcgtattactaaagactgaaactgagcacttagatgcactaaatctggatgtgcccttatccatacccggtgttgacgacaaatacatcaatccgcgtaaagcctggggcgatgatgcgggttacgatgcgcaagcatccaaactagccaatatgtttgtcgaaaacatcaaaaattttgatgtctctgaagcaatagtagctgcgggccctaaagcatcctaa

SEQ ID NO: 82993 - protein, 512 aa, marine gamma proteobacterium HTCC2143
MTIHSNLSAATLIEQALIRGEGQLTDAGALYVTTGKRTGRSPADRFIVKEPSTADSIDWGSVNRPFEAVKFDALWNRVEDYLSQKDRFVSTLHVGAHEEHYIPVNVNTETAWQGLFGHNMFVRPEKYNPKSKEEWTILNVASFECDPERDGTNSEGVVILNFAQRKVLLAGMRYAGEMKKAMFSVQNFLLPEKDVMPMHCSSNVDEAGNTTLFFGLSGTGKTTLSADPACFLIGDDEHGWSKGAVFNIEGGCYAKTINLSQKNEPIIWDAIRFGAIVENVVLDENRTPDYDDLSLSENGRCSYPLEHVDKRIVENAAGEPKTVIFLTCDVSGVIPPISILSKEAAAFHFLSGYTARVGSTEMGAAAGIHPTFSTCFGAPFMPRPAREYAELLMKRIEDFDSQVYLVNTGWTGGSGGEGGQGSRFPIPVTRAVISAAQNGVLLKTETEHLDALNLDVPLSIPGVDDKYINPRKAWGDDAGYDAQASKLANMFVENIKNFDVSEAIVAAGPKAS

SEQ ID NO: 82994 - DNA, 1566 bp, marine gamma proteobacterium HTCC2080
  CDS (1)..(1566): transl_table=11
atgagccaagacagcaacgcaaatacgtcgcaaaaacacagtgacctccccccctctaagctcattgaacttgcccttgctcgagaggaaggcatgctgtcggacacgggtgcgttacgggtggaaactggcgcgagaaccgggcgctcacccgcagaccgattcgtagttaaagaagtgtcctcagaagatgcgattgactggggctcggtcaacctcccatttgacagcgaccggttcgacgcactttgggcccgcgttaaagcgtttgctagcgagtcaacaacgttcatccaacaccttcacgttggagagcacagcgagcattaccttccggttcgaaccacaacaacaacggcctggcagtcgctttttgcgagaaacatgtttattcggcctgacacctacaatccaacgaataagcccgagtggaagatcttaaacgtgcctggttttgtctgcgatccccttcgcgacggcacaaattctgaagccacagttatcattaattttggccagcgcaaggtgctcattgcgggtatgcgttatgccggtgaaatgaaaaaagcgatgttctcagtacagaattttctgctgccagagaaagatgtcatgccaatgcattgctccgccaatgttggcgaggatggtcaaacgacactatttttcggactctcgggcaccggtaagacaactctgtcagctgacccctctcgttatttaatcggtgacgatgaacacggatgggcgaagggcgctgtgttcaacattgagggaggctgctacgccaaaactattaacttaagtcagaaaaacgagccaatcatttgggacgccattcgatttggctcgatcgttgagaacgtcgtactcaacgacaagcgtcacgctgattataacgatacgagtctttctgaaaatggacgctgttgttaccccttagagcacgttgctcgacgcgtgccgcaaaatagcggaggcgagcccaagtgtgtgatcttcctcacctgcgacgtatccggcgtcttaccacccatttcaattttgtcaaaagaagctgcggcttttcactttctgtcgggttataccgcccgagttggatctactgaagttggtgccgcagcgggggttcaccccacattttcaacctgttttggcgcacccttcatgccgcgacccgctggagattatgccgagttactgatgaagcgcattgaagattttggcagccaagtttacctcgtcaatacgggctggactggcggctctggaggcgctgaaggccgtggcgcaaggtttccaatccccgttacccgggcagtcgtcaacgccgcacaaagcggctgtcttgtagagggagagacccagcatctcgataccctcaacctaagctttccaagctctatcccaggcgtggacgacaaatacgtcgatccaaaagctggctggggtgatgacgaggcctatgaagctcaggcgcaaaaattagccgcgcttttccaagagaatattggcaatttcgatgtgagcgacgccattattgcggcaggcccaagagcgcagtga

SEQ ID NO: 82995 - protein, 521 aa, marine gamma proteobacterium HTCC2080
MSQDSNANTSQKHSDLPPSKLIELALAREEGMLSDTGALRVETGARTGRSPADRFVVKEVSSEDAIDWGSVNLPFDSDRFDALWARVKAFASESTTFIQHLHVGEHSEHYLPVRTTTTTAWQSLFARNMFIRPDTYNPTNKPEWKILNVPGFVCDPLRDGTNSEATVIINFGQRKVLIAGMRYAGEMKKAMFSVQNFLLPEKDVMPMHCSANVGEDGQTTLFFGLSGTGKTTLSADPSRYLIGDDEHGWAKGAVFNIEGGCYAKTINLSQKNEPIIWDAIRFGSIVENVVLNDKRHADYNDTSLSENGRCCYPLEHVARRVPQNSGGEPKCVIFLTCDVSGVLPPISILSKEAAAFHFLSGYTARVGSTEVGAAAGVHPTFSTCFGAPFMPRPAGDYAELLMKRIEDFGSQVYLVNTGWTGGSGGAEGRGARFPIPVTRAVVNAAQSGCLVEGETQHLDTLNLSFPSSIPGVDDKYVDPKAGWGDDEAYEAQAQKLAALFQENIGNFDVSDAIIAAGPRAQ

SEQ ID NO: 82996 - DNA, 1803 bp, Aspergillus niger
  CDS (1)..(1803)
atgagtcctgcgacaaacattcatataccccccgtttcccccgctgaacctggtcctctcgcttcagatttcttccaacagcaactcgcaaaacaaagaaataataactatcattctacctcactaagaaacatggttgctgcttcggtgaatcgcactgctctgcaccctggtggtgttcagccaggcaagggtcacactgagctcgaggaagagcttcacgaacacgcccacattgactatgaccgcgtcgctattattgccaaccctgctgtccctgctctctacgaagatgctctggtctacgagactggtactgctatcacctccagcggtgccctgactgcctactctggagctaagactggtcgctctccttccgataagcgtatcgtcaaggaggagacctccgagaacgatgtctggtggggacctgtcaacaagcccatgactcctgatgtctggcgcatcaaccgtgagcgtgctgtcgactacctcaacacccgtaaccgcatctacgttatcgatggtttcgccggctgggacgagagataccgcatcagcgtccgtgtcgtctgcgcccgtgcctaccatgctctcttcatgcgcaacatgcttatccgcccctcccaggaggagctgaagcacttccaccccgactacgttatctacaacgctggttctttccccgccaaccgcttcactgagggtatgacctccgccacctccgtcgccatcaacttcgccgagaaggagatggtcatcctgggtaccgagtacgctggtgagatgaagaagggtgtcttcactgtcctcttctacgagatgcccgtcaagcacaacgttctgaccctccactcctcggccaacgagggcaaggacggcgacgtgaccgtcttcttcggtctttcgggtactggcaagaccactctgtctgccgaccccaaccgtgccctgatcggtgacgatgagcactgctggaccgaccgtggtgtcttcaacatcgagggtggctgctacgccaagtgcattggcctctccgctgagaaggagcccgatattttcaacgccatccgcttcggatccgtcctcgagaacgttgtctttgaccccatctcccgtgttgtcaactacgacgactccacccttactgagaacacccgctgtgcctaccccatcgagtacattgagaacgccaagatcccctgcttgtccgacaagcacccctcgaacatcatcctcctcacctgcgatgcccgtggtgtcctccccccgatctccaagctcaccaccgagcagaccatgttccacttcatctcgggttacacctccaagatggctggtactgaggacggtgtcaccgagccccaggctaccttctcctcctgcttcgcccagcccttcctggccctgcaccccatgcgctacgcccgcatgttggcggacaagatctcgcagcacaaggccaacgcctggttgctcaacaccggttgggttggtgctggcgctaccaccggtggtaagcgttgccctctcaagtacacccgtgccatcctggacgccatccacaacggctccctcaacgaggtcgagtacgagacctacgatgtgttcaacctgcacgttcccaagagctgccccggtgttccttccgagctcctcaaccccaagaacagctggaccgcctcgacgaacttctcggacgaggtcaacaagcttgccaagctgttcaacgacaacttcggcaagtacgctgaccaagcgacccccgaggtcattgcggccggtccggtgcctcagtaa

SEQ ID NO: 82997 - protein, 600 aa, Aspergillus niger
MSPATNIHIPPVSPAEPGPLASDFFQQQLAKQRNNNYHSTSLRNMVAASVNRTALHPGGVQPGKGHTELEEELHEHAHIDYDRVAIIANPAVPALYEDALVYETGTAITSSGALTAYSGAKTGRSPSDKRIVKEETSENDVWWGPVNKPMTPDVWRINRERAVDYLNTRNRIYVIDGFAGWDERYRISVRVVCARAYHALFMRNMLIRPSQEELKHFHPDYVIYNAGSFPANRFTEGMTSATSVAINFAEKEMVILGTEYAGEMKKGVFTVLFYEMPVKHNVLTLHSSANEGKDGDVTVFFGLSGTGKTTLSADPNRALIGDDEHCWTDRGVFNIEGGCYAKCIGLSAEKEPDIFNAIRFGSVLENVVFDPISRVVNYDDSTLTENTRCAYPIEYIENAKIPCLSDKHPSNIILLTCDARGVLPPISKLTTEQTMFHFISGYTSKMAGTEDGVTEPQATFSSCFAQPFLALHPMRYARMLADKISQHKANAWLLNTGWVGAGATTGGKRCPLKYTRAILDAIHNGSLNEVEYETYDVFNLHVPKSCPGVPSELLNPKNSWTASTNFSDEVNKLAKLFNDNFGKYADQATPEVIAAGPVPQ

SEQ ID NO: 82998 - DNA, 1887 bp, Arabidopsis thaliana
  CDS (1)..(1887)
atggcgggaaacggaaacgaaagtaccggtggagacttcagtttctcggctgcggcggcccgtgatgcgcttccgaggatcacgactgagaagggcggcaaatctccagggccggcagacgtctgccaggatgacatcgcaccgcgggtcaactttcagaccatcgacgagcttcacagtctccagaagaaacgatctgcccctaccactcctcttagagatggcagcgccagcggagtcagcggaactagtgctaaagtagcacacgtgccagtgactcctacgtcacttccggctgctgacgtcagcgacagtggcttgaagttcactcacatccttcacaacctctctcccgccgagttgtacgagcaagcgataaagtttgagaagggatcgtttgtgacatcgaccggtgcgttggctacattgtctggagccaaaaccggtcggtctcctaaagacaagcgtgtggttaaggatgataccactgaggccgaactctggtggggaaaaggatcaccaaacattgaaatggatgaaaaaacttttttggtgaaccgagagagagctgttgattacttaaactccttggacaaggtgtttgtgaatgatcaatacctaaactgggatccagagaacaaaatcaaagtgagaattgtttcagcaagagcttaccattcactattcatgcacaacatgtgtatccgtccaacacctgaggagttagagaatttcgggacacccgatttcacgatttacaacgcggggaaattcccgtgtaaccgtttcactcattacatgacatcttcgacgagtgtggacataaacctaggaagaagagagatggtgattctaggtacccaatatgctggagaaatgaagaaaggactctttggtgtgatgcattatttgatgcctaagagaaagattttgtctcttcactctggttgtaacatgggcaaagatggagatgttgctctctttttcggactctctggtaccggaaagactacgttgtcgactgaccataaccggtatttgatcggagatgatgaacattgttggagtgaggctggagtttcgaatatcgaaggtggttgttacgcgaaatgcattgatttggctagggacaaagagcctgatatctggaacgctatcaagtttggaaccgttttggagaatgttgtgtttgatgagcatacacgagaagtggattacactgacaaatcagtgacggagaacacacgtgcggcttatccgatagagtacattccaaactcgaagataccgtgcgttggaccacacccgaagaacgtgatcctattggcttgtgacgccttcggtgtgttgccgccaatcagcaagctcaatcttgctcagactatgtaccatttcatcagtggctacactgctctcgttgcaggaacagaggaaggagttaaggaacctcgagcgacattctcagcttgttttggtgctgctttcattatgctacacccaaccaagtacgctgctatgttggctgagaaaatgcaggctcaaggagccaccggttggcttgttaacaccggttgctacggaactggaagccgaatcaagttggcgtatacacgaaagataatcgatgctatacattcgggtagtctactgaatgcaagttaccgtaaaacagatatttttggtttggagattccaaatgaagtagaaggagttccttctgagatactggaacctattaatgcatggcctgataaaatggcttatgaggacacattgttgaaattggctggtttgtttaaaagcaattttgagacattcacaagtcataagattggtgatgatggaaaattgactgaagagattcttgcagctggtcctaacttctaa

SEQ ID NO: 82999 - protein, 628 aa, Arabidopsis thaliana
MAGNGNESTGGDFSFSAAAARDALPRITTEKGGKSPGPADVCQDDIAPRVNFQTIDELHSLQKKRSAPTTPLRDGSASGVSGTSAKVAHVPVTPTSLPAADVSDSGLKFTHILHNLSPAELYEQAIKFEKGSFVTSTGALATLSGAKTGRSPKDKRVVKDDTTEAELWWGKGSPNIEMDEKTFLVNRERAVDYLNSLDKVFVNDQYLNWDPENKIKVRIVSARAYHSLFMHNMCIRPTPEELENFGTPDFTIYNAGKFPCNRFTHYMTSSTSVDINLGRREMVILGTQYAGEMKKGLFGVMHYLMPKRKILSLHSGCNMGKDGDVALFFGLSGTGKTTLSTDHNRYLIGDDEHCWSEAGVSNIEGGCYAKCIDLARDKEPDIWNAIKFGTVLENVVFDEHTREVDYTDKSVTENTRAAYPIEYIPNSKIPCVGPHPKNVILLACDAFGVLPPISKLNLAQTMYHFISGYTALVAGTEEGVKEPRATFSACFGAAFIMLHPTKYAAMLAEKMQAQGATGWLVNTGCYGTGSRIKLAYTRKIIDAIHSGSLLNASYRKTDIFGLEIPNEVEGVPSEILEPINAWPDKMAYEDTLLKLAGLFKSNFETFTSHKIGDDGKLTEEILAAGPNF

SEQ ID NO: 83000 - DNA, 1671 bp, Aspergillus oryzae
  CDS (1)..(1671)
atggttgccacatctgtgaatcgcactgctctgcaccctggtggtgtccagcctggcaagggtcacactgagctggaggaagagcttcacgagcacgctcacattgattacgagcgtgtcgctattatcgctaaccctgccgtccctgctctttacgaagatgctcttgtctatgagactggtactgctatcacatcgtcaggtgctctgactgcatactctggtgccaaaactggtcgttccccttcggataagcgtatcgtgaaggaggaatcttctgagcaggatatttggtggggacccgttaacaagcctatgactcccgatgtctggcgtatcaaccgtgagcgtgctgtcgactacctcaacacccgcaaccgtatctatgtcattgatggtttcgccggctgggatgagagataccgcatcagcgtccgtgttgtctgcgctcgtgcctaccatgccctcttcatgaggaacatgcttatccgcccttcccaagaggagctcaagcacttccaccccgactatgtcatctacaacgccggttctttccctgccaaccgtttcactgagggtatgacctctgctacctccgtcgccatcaactttgccgagaaggaaatggttatcctgggtaccgagtatgctggagagatgaagaagggtgttttcaccgtcctgttctacgagatgcccgtcaagcacaacgtcctgaccctccactcttctgccaacgagggtaagaatggtgatgttaccgttttcttcggtctttccggaactggcaagactactctttctgccgaccctaaccgtgccctgattggtgacgacgagcactgctggaccgaccgtggtgtcttcaacattgagggtggttgctacgccaagtgcattggtctctccgccgagaaggagcccgatattttcaacgccatccgcttcggatccgtcctcgagaacgttgttttcgaccccatcagccgtgttgtcaactacgatgactcgactttgactgagaacacccgctgtgcttaccccattgagtacatcgataacgccaagattccttgcatctctgacaagcaccctacaaacatcatcctcctcacttgtgacgctcgcggtgtccttcctccgatctcgaagcttactaccgagcagaccatgttccacttcatctctggttacacctccaagatggccggtactgaggacggtgtgactgagccccaggccactttctcctcttgcttcgcccagcctttcttggctctccaccccatgcgctacgctaccatgctggctgagaagatctcgcagcacaaggccaatgcttggttgctcaacaccggctgggttggcgctggcgccaccactggcggtaagcgttgccctctcaagtacacccgtgccatcttggacgccatccacagcggcgagttggccaacgccgagtacgaggtctacgatgttttcaaccttcacgtgcccaagagctgccccaacgttccctctgagcttctgaaccccaagaacagctggactgcatccaccagcttcaaggacgaggtcaacaagctcgccaagctgttcaacgagaacttcaccaagtacgccgaccaggcaacaaaggaggtcatcgaggctggcccagtcgtggcataa

SEQ ID NO: 83001 - protein, 556 aa, Aspergillus oryzae
MVATSVNRTALHPGGVQPGKGHTELEEELHEHAHIDYERVAIIANPAVPALYEDALVYETGTAITSSGALTAYSGAKTGRSPSDKRIVKEESSEQDIWWGPVNKPMTPDVWRINRERAVDYLNTRNRIYVIDGFAGWDERYRISVRVVCARAYHALFMRNMLIRPSQEELKHFHPDYVIYNAGSFPANRFTEGMTSATSVAINFAEKEMVILGTEYAGEMKKGVFTVLFYEMPVKHNVLTLHSSANEGKNGDVTVFFGLSGTGKTTLSADPNRALIGDDEHCWTDRGVFNIEGGCYAKCIGLSAEKEPDIFNAIRFGSVLENVVFDPISRVVNYDDSTLTENTRCAYPIEYIDNAKIPCISDKHPTNIILLTCDARGVLPPISKLTTEQTMFHFISGYTSKMAGTEDGVTEPQATFSSCFAQPFLALHPMRYATMLAEKISQHKANAWLLNTGWVGAGATTGGKRCPLKYTRAILDAIHSGELANAEYEVYDVFNLHVPKSCPNVPSELLNPKNSWTASTSFKDEVNKLAKLFNENFTKYADQATKEVIEAGPVVA

SEQ ID NO: 83002 - DNA, 2048 bp, Actinobacillus succinogenes
  CDS (259)..(1875): transl_table=11
ttaatttctttaatcgggacgctatcgataaattgaaaatgcagcaatagaggaaacacggtttgtttgagtgaaaacagccgtgttttttcatttaccgccataaaaatttgaaacggatcacaaatcatgaaaaaaatacgttcaaattagaactaattatcgaaaatttgatctagttaacattttttaggtataaatagttttaaaatagatctagtttggatttttaattttaaattatcaatgaggtgaagtatgactgacttaaacaaactcgttaaagaacttaatgacttagggcttaccgatgttaaggaaattgtgtataacccgagttatgaacaacttttcgaggaagaaaccaaaccgggtttggagggtttcgataaagggacgttaaccacgcttggcgcggttgccgtcgatacggggatttttaccggtcgttcaccgaaagataaatatatcgtttgcgatgaaactacgaaagacaccgtttggtggaacagcgaagcggcgaaaaacgataacaaaccgatgacgcaagaaacttggaaaagtttgagagaattagtggcgaaacaactttccggtaaacgtttattcgtggtagaaggttactgcggcgccagtgaaaaacaccgtatcggtgtgcgtatggttactgaagtggcatggcaggcgcattttgtgaaaaacatgtttatccgaccgaccgatgaagagttgaaaaatttcaaagcggattttaccgtgttaaacggtgctaaatgtactaatccgaactggaaagaacaaggtttgaacagtgaaaactttgtcgctttcaatattaccgaaggtattcagcttatcggcggtacttggtacggcggtgaaatgaaaaaaggtatgttctcaatgatgaactacttcctgccgttaaaaggtgtggcttccatgcactgttccgccaacgtaggtaaagacggtgacgtggctattttcttcggtttatccggtacgggtaaaacaacgctttcgaccgatcctaaacgccaattaatcggtgatgacgaacacggttgggatgaatccggcgtatttaactttgaaggcggttgttacgcgaaaaccattaacttatctcaagaaaacgaaccggatatttacggcgcaatccgtcgtgacgcattattagaaaacgtcgtggttcgtgcagacggttccgttgactttgacgacggttcaaaaacagaaaatacccgtgtttcatatccgatttaccacatcgacaacatcgttcgtccggtatcgaaagccggtcatgcaaccaaagtgattttcttaaccgcggacgcattcggcgtattgccgccggtttcaaaactgactccggaacaaaccgaatactacttcttatccggctttactgcaaaattagcgggtacggaacgcggcgtaaccgaaccgactccgacattctcggcctgtttcggtgcggcattcttaagcctgcatccgattcaatatgcggacgtgttggtcgaacgcatgaaagcctccggtgcggaagcttatttggtgaacaccggttggaacggcacgggtaaacgtatttcaatcaaagatacccgcggtattatcgatgcgattttggacggttcaatcgaaaaagcggaaatgggcgaattgccaatctttaatttagcgattcctaaagcattaccgggtgttgatcctgctattttggatccgcgcgatacttacgcagacaaagcgcaatggcaagttaaagcggaagatttggcaaaccgtttcgtgaaaaactttgtgaaatatacggcgaatccggaagcggctaaattagttggcgccggtccaaaagcataaaactgtaaaagcatagtatgtgcatgattcggtaaactaccgaataaaatctgaaaaataaggctgagtatttccactcagccttttgttttggaaattagaagttgtttagaaagataaacggcgcggcttattcgtcgtattatttgggacataaaaaacccgttgataaa

SEQ ID NO: 83003 - protein, 538 aa, Actinobacillus succinogenes
MTDLNKLVKELNDLGLTDVKEIVYNPSYEQLFEEETKPGLEGFDKGTLTTLGAVAVDTGIFTGRSPKDKYIVCDETTKDTVWWNSEAAKNDNKPMTQETWKSLRELVAKQLSGKRLFVVEGYCGASEKHRIGVRMVTEVAWQAHFVKNMFIRPTDEELKNFKADFTVLNGAKCTNPNWKEQGLNSENFVAFNITEGIQLIGGTWYGGEMKKGMFSMMNYFLPLKGVASMHCSANVGKDGDVAIFFGLSGTGKTTLSTDPKRQLIGDDEHGWDESGVFNFEGGCYAKTINLSQENEPDIYGAIRRDALLENVVVRADGSVDFDDGSKTENTRVSYPIYHIDNIVRPVSKAGHATKVIFLTADAFGVLPPVSKLTPEQTEYYFLSGFTAKLAGTERGVTEPTPTFSACFGAAFLSLHPIQYADVLVERMKASGAEAYLVNTGWNGTGKRISIKDTRGIIDAILDGSIEKAEMGELPIFNLAIPKALPGVDPAILDPRDTYADKAQWQVKAEDLANRFVKNFVKYTANPEAAKLVGAGPKA

SEQ ID NO: 83004 - DNA, 1929 bp, Panicum maximum
  CDS (1)..(1929)
atggcgtcgccgaacggtctcgcgaagatcgatacgcaggggaagaccgaggtgtacgacggcgacaccgcggcgccggtgcgtgcgcagaccatcgacgagctgcacttgctgcagcggaagcggtccgctcccaccacgcccatcaaggatggcgccacctcggccttcgctgccgcgatctcggaggaggatcgcagccagcagcagctgcagtccatcagcgcgtcgttgacgtctctggcacgtgaaacgggccccaagcttgtcaagggtgacccgagcgatccggcgccgcataagcactaccagcccgccgcccccaccatcgtcgccaccgacagctccctcaagttcacccatgtcctctacaacctctcccccgctgagctgtacgagcaggcttttggccaaaagaagagttcgttcatcacgtcgaccggcgcgctggccacgctgtccggcgccaagaccggtcggtcgcccagggacaagcgtgtcgtcaaggacgaggccacggcgcaggagctctggtggggcaagggctcgcccaacatcgagatggacgagcgccagttcgtgatcaacagggagcgggccctggactacctcaactccctggacaaggtgtacgtcaacgaccagttcctcaactgggaccccgagaaccgcatcaaggtccggatcatcacctccagggcgtaccacgccctcttcatgcacaacatgtgcatccggcccacggacgaggagctggagagcttcggcacgccggacttcaccatttacaacgccggggagttcccagccaaccgttacgccaactacatgacgtcgtcgacgagtataaacatcagcctcgctaggagggagatggttatcctgggcacgcagtacgccggggagatgaagaaggggctcttcggagtcatgcactacctcatgcccaagcgcggcatcctctcgctgcactccgggtgcaacatgggcaaggacggcgatgtcgccctcttttttgggctctcaggtaccggcaagacgacgctgtcaactgaccacaacaggctcctgatcggtgatgacgagcactgctggagcgacaatggcgtctccaacattgagggaggttgctacgccaagtgcattgacctgtcccaggagaaagaacctgacatctggaacgccatcaagttcggaactgtgctggagaacgtcgtcttcaacgagcgcactcgtgaagttgactacagcgacaagtctatcaccgagaacacccgggccgcctacccgatcgagttcatccccaacgccaagatcccgtgcgtcggaccacaccccaagaacgtcatcctcctggcttgcgatgccttcggcgtgctcccgcctgtgagcaagctgaacctggcgcagaccatgtaccacttcatcagcggctacaccgccctcgtcgccggcacggtggacggcatcacggagcccacggccaccttctcggcctgcttcggcgcggccttcatcatgtaccaccccaccaagtacgccgccatgctcgccgagaagatgcagaagtacggcgccaccgggtggctcgtcaacaccggctggtccggcggcaggtacggtgtgggcaagaggatcaggctgccgcacaccaggaagatcatcgacgccatccactccggcgagctcctcactgccaactacaagaagaccgaggtgttcgggctggagatccccaccgagatcaacggcgtgccatcggaaatcctcgaccccatcaacacctggacggacaaggccgcgtacaaggagaatctcctgaacctcgccgggctcttcaagaagaacttcgaggtgttcgccagctacaagatcggcgacgacagcagcctcaccgacgagatcctcgccgcaggccccaacttctga

SEQ ID NO: 83005 - protein, 642 aa, Panicum maximum
MASPNGLAKIDTQGKTEVYDGDTAAPVRAQTIDELHLLQRKRSAPTTPIKDGATSAFAAAISEEDRSQQQLQSISASLTSLARETGPKLVKGDPSDPAPHKHYQPAAPTIVATDSSLKFTHVLYNLSPAELYEQAFGQKKSSFITSTGALATLSGAKTGRSPRDKRVVKDEATAQELWWGKGSPNIEMDERQFVINRERALDYLNSLDKVYVNDQFLNWDPENRIKVRIITSRAYHALFMHNMCIRPTDEELESFGTPDFTIYNAGEFPANRYANYMTSSTSINISLARREMVILGTQYAGEMKKGLFGVMHYLMPKRGILSLHSGCNMGKDGDVALFFGLSGTGKTTLSTDHNRLLIGDDEHCWSDNGVSNIEGGCYAKCIDLSQEKEPDIWNAIKFGTVLENVVFNERTREVDYSDKSITENTRAAYPIEFIPNAKIPCVGPHPKNVILLACDAFGVLPPVSKLNLAQTMYHFISGYTALVAGTVDGITEPTATFSACFGAAFIMYHPTKYAAMLAEKMQKYGATGWLVNTGWSGGRYGVGKRIRLPHTRKIIDAIHSGELLTANYKKTEVFGLEIPTEINGVPSEILDPINTWTDKAAYKENLLNLAGLFKKNFEVFASYKIGDDSSLTDEILAAGPNF

SEQ ID NO: 83006 - DNA, 2250 bp, Oryza sativa
  CDS (70)..(1980)
attctgaaaacttcagtctttctctcttcagcatctctactctcgctccatttctaagggatcgaaatgatggaggcgaaagacgggcaagcatggctggggacgaacggatacggcagcaggagggaggaagacggcgtgtgccacgacgacagcgcgacaccggtgagggcgaacactgtcgacgagctacactcgctgcagaggaagcctcaggtagtggaggatcgccacaggctgcagcttcagtccatcagtgcgtctttggcatcgatgacatgtgggattgggccaaaactcgtcaacggtgacccagcaaggaaaaaagaaatggctggcaaggctgtgacacatcaccaacaccatatcactgtccccacgatcactgtgagcgacagtgacctcaagttcacccatgttctgtacaacttatccccttctgaactttatgagcatgcaatcaaatatgagaaagggtcattcatcacatccagtggggcgttagcgacgctatcaggagcaaagaccggtcgatcacctagggacaagcgtgttgtcaaggatgaaacaacagatgatctgtggtggggcaagggatcaccaaacattgaaatggacgagcaaacctttctgatcaacagggagagagctgttgactacttgaactcccttgataaggtgtttgttaatgatcagttcctaaactgggaccccaacaataggataaaagttcgaatcatctctgcgagggcctaccattctctcttcatgcacaacatgtgcatccggccaacatacgaggaactagagaattttggcgagcccgacttcaccatctacaatgctggacagttcccgtgcaaccgttacacgcattacatgacatcgtcaactagcatagacttaaatcttaagcggagagaaatggtcatcctgggaacacaatatgctggagagatgaagaaaggcctcttcagtgtgatgcactacctcatgcccaaaaagcagatcctctcgttgcactctggctgcaacatgggcagagggggtgatgtagccctgttttttggattgtcaggtactggaaagacaactctgtcaacagacaggaataggatcttaattggtgatgatgaacactgctggagtgataatggtatctctaacattgagggcggctgctatgctaaatgcatagatctttctcaggagaaagaacctgacatttgggatgcaatcaagtttggcacagtgttggagaatgttgttttcgatgagcactcccgtgaagttgattatacagaaaaatctgtcacagagaatacccgtgctgcttaccctattgaatacatagctaatgctaagataccatgtgttgggccacacccaaagaatgttatcctacttgcatgtgatgcatttggtgtcctccctcctgtcagcaagttgagccatgcacaaaccatgtaccattttatcagtggctacactgcattggtcgctggaactgaagatggtatcaaggagccacaggctacattttctgcctgctttggtgcagcttttataatgctccacccaactcggtacgctgccatgctggcagataagatgaacaagcatggagctaccggatggcttgtcaacactggttggatcgggggaagttatggtgtaggtgagcgaatcagcttggcctacacaaggaaaatcatcgatgccattcactcgggtgagcttttggctagaagctacaaaaagacagatgtctttggactagacatccccacaaaagtggaaggagttccatctgaattgcttgacccaataaatacctgggaagacaaagactcatacaagttgacacttctaaagctgtcagatctgttcaagagaaatttcaaggtatttgcaaattacaagaaaggtggtgttagtgatctggctgatgagattgctgctgcaggaccaaatttctgattttaattgaatagtagtagtatgtcttaatgtataccaaataaaagggattttttatgttcctcgaggatgtatcgcaaggtaccacttattttagtgtaaatttttatacctcatggtacttctctagtgtaaagtaccaaaaagtatcataaattaacactaaaatatggtatctctcgttacctagtcttgtacggtaaaactgaacaaaatgcccattttgaggatggtgacatatatatattaaaagctatttcagagtgatgt

SEQ ID NO: 83007 - protein, 636 aa, Oryza sativa
MEAKDGQAWLGTNGYGSRREEDGVCHDDSATPVRANTVDELHSLQRKPQVVEDRHRLQLQSISASLASMTCGIGPKLVNGDPARKKEMAGKAVTHHQHHITVPTITVSDSDLKFTHVLYNLSPSELYEHAIKYEKGSFITSSGALATLSGAKTGRSPRDKRVVKDETTDDLWWGKGSPNIEMDEQTFLINRERAVDYLNSLDKVFVNDQFLNWDPNNRIKVRIISARAYHSLFMHNMCIRPTYEELENFGEPDFTIYNAGQFPCNRYTHYMTSSTSIDLNLKRREMVILGTQYAGEMKKGLFSVMHYLMPKKQILSLHSGCNMGRGGDVALFFGLSGTGKTTLSTDRNRILIGDDEHCWSDNGISNIEGGCYAKCIDLSQEKEPDIWDAIKFGTVLENVVFDEHSREVDYTEKSVTENTRAAYPIEYIANAKIPCVGPHPKNVILLACDAFGVLPPVSKLSHAQTMYHFISGYTALVAGTEDGIKEPQATFSACFGAAFIMLHPTRYAAMLADKMNKHGATGWLVNTGWIGGSYGVGERISLAYTRKIIDAIHSGELLARSYKKTDVFGLDIPTKVEGVPSELLDPINTWEDKDSYKLTLLKLSDLFKRNFKVFANYKKGGVSDLADEIAAAGPNF

SEQ ID NO: 83008 - DNA, 2154 bp, Solanum lycopersicum
  CDS (93)..(2081)
attcggcacgagtcgtgccgcacccttttcgttaaaattttattcttcaaattcagctttttcagctattcttcacttgattttcagaaaagatggcgtcgaacggagtcggaaatggagaattcagttttgataacaagaggaggactgggctgccgaagatccagacacagaagacagaggatgaaaacgtggtttgccatgacgacagtgcaacgccggtgaaagctcagacgctggaggaattgcattctcttcagaagaagaaatcggcgccgactactccgatcaagtcccctcatgtattcggcgttgccgtttctgaagaggaacgacagaaacaacagctgcaatccattagtgcatcattggcgtcattgacacgagagacggggccaaaagtggtgaaaggagacccagcaaggcaagcggagacgccaaaggtgcaacaacctgttcatcaccaccacacccctgcccttaacatcagtgacagtggcctcaagttcacccacatcctttataatctctctcctgctgagttgtatgagcaagctatcaagtatgagaagggatcattcatcacgtcaagcggtgctttagccacactttccggagccaaaactggccattccccaagagacaaacgtgttgttagagacgaaaccactgaggacgacctttggtggggaaagggttcacccaatatcgaaatggacgaacagactttcttaatcaacagagaaagagctgttgattacctatgctctttggagaaggtgtttgtgaatgatcagttcctcaactgggatccaaacaatcgtatcaaagttagaattgtatctgccagagcctatcactccttgttcatgcacaacatgtgtatccgacccactccagaagagctagaggattttggtactccggacttcacaatttacaatgctggtcaattcccatgtaaccgttacacccactatatgacttcctccactagcatagacatcaatcttgctaggagggaaatggtcatccttggcacacagtatgctggggaaatgaagaaaggtcttttcggggtaatgcactatctaatgcctaagcgccaaattctctctctacactctggctgcaatatgggaaaagaaggggatgtagccctcttctttggattatcaggaactgggaagacaacactgtctactgatcacaaccggtacctgatcggagatgatgaacactgctggagtgatcatggtgtctcaaacattgaaggaggttgctatgccaaatgcatagaccttgcaagggagaaggagcctgatatctggaatgccatcaagtttggcactgtgctggaaaacgtggtttttgaagaacatacccgagaagtggattatacagacaaattcgtaacagagaacacccgggcagcatatccaattgaatacatcccaaatgctaaaataccatgtgttggtcctcatccaaagaatgtcattctccttgcatgtgatgcattcggcgtgcttccaccagtcagcaaattgaacttggcacagacaatgtaccacttcatcagtggctacacagctttggtggcaggaaccgaagatggtattaaggagcctacagcaacattttcagcatgttttggtgcagcatttatcatgcttcatccaaccaaatatgcagccatgctggctgagaagatgctgaaacatggagctacaggatggcttgtgaacactggctggtcaggtggaagttatggatcaggcagccgaatcaagttagcatacactaggaagaacatcgatgccatccactccggcgatcttctgaaagcagaatacaagaagaccgaggtatttgggctggagattccaactgcacttgagggagtaccttccgagattctggaccccgtgaacacttggcccgacaagaaggcacacaaggataccctgttgaagctgggaggcctatttaggaagaattttgaggtgttcacaaactacaagattggaagtgatagcaacctgactgaggagatcctggcagctggtccaaacttctaattgaagaaggatttgcctgagtgatggtttggcaaaatatgactttaaaatatcaaaaaaaaaaaaaaaaaaa

SEQ ID NO: 83009 - protein, 662 aa, Solanum lycopersicum
MASNGVGNGEFSFDNKRRTGLPKIQTQKTEDENVVCHDDSATPVKAQTLEELHSLQKKKSAPTTPIKSPHVFGVAVSEEERQKQQLQSISASLASLTRETGPKVVKGDPARQAETPKVQQPVHHHHTPALNISDSGLKFTHILYNLSPAELYEQAIKYEKGSFITSSGALATLSGAKTGHSPRDKRVVRDETTEDDLWWGKGSPNIEMDEQTFLINRERAVDYLCSLEKVFVNDQFLNWDPNNRIKVRIVSARAYHSLFMHNMCIRPTPEELEDFGTPDFTIYNAGQFPCNRYTHYMTSSTSIDINLARREMVILGTQYAGEMKKGLFGVMHYLMPKRQILSLHSGCNMGKEGDVALFFGLSGTGKTTLSTDHNRYLIGDDEHCWSDHGVSNIEGGCYAKCIDLAREKEPDIWNAIKFGTVLENVVFEEHTREVDYTDKFVTENTRAAYPIEYIPNAKIPCVGPHPKNVILLACDAFGVLPPVSKLNLAQTMYHFISGYTALVAGTEDGIKEPTATFSACFGAAFIMLHPTKYAAMLAEKMLKHGATGWLVNTGWSGGSYGSGSRIKLAYTRKNIDAIHSGDLLKAEYKKTEVFGLEIPTALEGVPSEILDPVNTWPDKKAHKDTLLKLGGLFRKNFEVFTNYKIGSDSNLTEEILAAGPNF

SEQ ID NO: 83010 - DNA, 2249 bp, Flaveria pringlei
  CDS (83)..(2059)
taaaaacctctgtttgatgatcgaatcgttcgtcgttttctcctcaatcgtgttcttctaatcgttcgtatttccggtcgagatggcgtctaacggaaacggaaatgttgccggaaaaggtaacggaaggaatggattgccgaagatacagacgcagaagaggcagaacgggatatgtcacgatgacagttcggcaccggtgaaggtgcagacgatcgatgagctgcactcgctgcaacggaagaaatcggcacccacgacgccgcttgacggtgttcaaggtgcttttgctaatttctctgaagatgaacgccagaaacagcaacttcagtccatcagtgcatcattggcatctctgacgagagaaaccggacccaaagtggtaagaggcgacccggcccgaagaccagagacccccagggtggcgcacggccctgaccactatttcaccccaacatttgctgctagcgacagctctctcaaattcacccatgtcctttacaatctctctcctgctgagttgtatgagcaggcgatcaagtatgaaaaagggtcattcatcacatcgagcggtgcattggcaaccttatctggtgccaaaactggacgctctccgaaggataagcgtgttgttagggatgatgtcaccgaaaatgaactctggtggggcaagggttcacccaatatcgagatggatgagcagactttcttggtgaatagggaaagagccgtggattatttgaactctttggagaaggtgtttgtgaatgatcagttcttgaactgggaccctgagaaccggatcaaagttcgaattgtgtcggcgagagcgtaccactctttgttcatgcacaacatgtgcatccgacccagccccgaagaactggagaatttcggtactccagacttcacaatctacaatgctggccagtttccatgtaatcgttacacacactatatgacatcgtccactagcatagatttaaatcttggtagaagagaaatggttatccttggcacacagtatgccggggaaatgaagaaaggtctctttggtgtcatgcattatctcatgcctaaacgtcaaatcctgtccctacattccggatgcaatatgggcaaagatggagatgttgccctcttcttcggtctgtcaggtaccgggaaaacaactttgtctactgatcacaaccggtatttgattggagatgacgagcattgctggagtgacaagggtgtgtctaacattgagggtggttgttatgccaagtgtattgatctttcaaaagagaaagaacctgatatctggaatgccattaaattcgggaccgtgctagaaaatgttgtatttgatgagcatactagagaggtggattatctagacaaatctgtcacagaaaacacacgtgcagcataccccatcgagtacatccccaatgctaagatcccgtgtgtgggtccacacccgaagaacgttatacttttggcatgtgatgcatttggtgtgcttccaccagtgagcaaactaagccttgctcagactatgtatcacttcatcagtggctacacagcactggtggctggcaccgaggagggtgttaaggagccacgcgcaacattctcagcctgttttggtgcagcatttatcatgctacatcccacaaaatatgcggaaatgcttgccacgaaaatggagaaacatggtgctactggatggcttgttaacactggctggtcaggtggcagctatggggctgggagtcgtatgaagctagcatacactcgtaaaatcatagacgctatccattctggtaaacttctgaatgcaaactacaagaaaaccgaagtgtttgggctggagattccaactgaggttgagggtgtgccttcagagattcttgatccagtgaacacctggtcaaacaagaaggcttataaggagacactgttgaagctggctgggctgttcaagaacaactttgaagtgtttgtgaaccataagattgggaaggatgataagctgactcaggaaattcttgctgctggtcccaacttttaatcacatggtgttgaaggagaaagaagtggatggtgatatatattaagatattactagcctaacatgcaacatattatgtattaatccagttgtatgtttttagttacttttggaattattatcattttaaactctgttttgatctatatatttttaatgaaaaaagccgttcacctcatcaaaaaaaaaa

SEQ ID NO: 83011 - protein, 658 aa, Flaveria pringlei
MASNGNGNVAGKGNGRNGLPKIQTQKRQNGICHDDSSAPVKVQTIDELHSLQRKKSAPTTPLDGVQGAFANFSEDERQKQQLQSISASLASLTRETGPKVVRGDPARRPETPRVAHGPDHYFTPTFAASDSSLKFTHVLYNLSPAELYEQAIKYEKGSFITSSGALATLSGAKTGRSPKDKRVVRDDVTENELWWGKGSPNIEMDEQTFLVNRERAVDYLNSLEKVFVNDQFLNWDPENRIKVRIVSARAYHSLFMHNMCIRPSPEELENFGTPDFTIYNAGQFPCNRYTHYMTSSTSIDLNLGRREMVILGTQYAGEMKKGLFGVMHYLMPKRQILSLHSGCNMGKDGDVALFFGLSGTGKTTLSTDHNRYLIGDDEHCWSDKGVSNIEGGCYAKCIDLSKEKEPDIWNAIKFGTVLENVVFDEHTREVDYLDKSVTENTRAAYPIEYIPNAKIPCVGPHPKNVILLACDAFGVLPPVSKLSLAQTMYHFISGYTALVAGTEEGVKEPRATFSACFGAAFIMLHPTKYAEMLATKMEKHGATGWLVNTGWSGGSYGAGSRMKLAYTRKIIDAIHSGKLLNANYKKTEVFGLEIPTEVEGVPSEILDPVNTWSNKKAYKETLLKLAGLFKNNFEVFVNHKIGKDDKLTQEILAAGPNF

SEQ ID NO: 83012 - DNA, 2245 bp, Flaveria trinervia
  CDS (89)..(2077)
ctcacaatacaacctctgtttgatgatcgaatcgttcgtcgttttctcctcaatcgtgttcttctaatcgttcatatttccggtcgagatggcgtctagcggaaacggaaatgttgccggaaaaggtaacgccgttagtggcggaagaaacgggctgccgaagatacagacgcagaagaggcagaacgggatatgtcacgatgacagttcggcaccggtgaaggtgcagacgatcgatgagctgcactcgttgcaacggaagaaatcggcacccacgacgccgcttgacggtgttcaaggtgcttttgctaatatgtctgaagatgatcgccagaagcagcaactgcagtccatcagtgcatcattggcatctcttacgagagaaaccggacccaaagtggtaagaggcgacccggcccgaagacccgagacccccagggtggctcacggccccgaccactatttcaccccaacattcgctgctagcgacagttctctcaaattcacccatgtcctctacaatctctcccctgctgagctatatgagcaggcgatcaagtatgaaaaggggtcgtttatcacatctagcggtgcattggcgaccttatctggtgccaaaactggacgctctccgaaggataagcgtgttgttagggatgatgtcaccgaaaatgagctttggtggggcaagggttcacccaatatcgagatggatgagcagactttcttggtgaatagagaaagagccgtggattatttgaactctttggagaaggtgtttgtgaatgatcagttcttgaactgggacccagagaaccgaatcaaagttcgaattgtgtcagcgagagcttaccactctctgttcatgcacaacatgtgcatccgacccagccctgaagaactggagaatttcggtactccagacttcacaatctacaatgctggccagtttccatgtaatcgttacacacactatatgacatcgtccactagcatagatttaaatcttggtagaagagaaatggttatccttggcacacagtatgccggggaaatgaagaaaggtctctttggtgtcatgcattatctcatgcctaaacgtcaaatcctgtccctacattccggatgcaatatgggcaaagatggagacgttgccctcttctttggtctctcaggtaccgggaaaacaactttgtctactgatcacaaccggtatttgattggagatgacgagcattgctggagtgacaagggtgtgtctaacattgagggtggttgttatgccaagtgtattgatctttcaaaagagaaagaacctgatatctggaatgccattaaattcgggaccgtgctagaaaatgttgtatttgatgaacatactagagaggtggattatctagacaaatctgtcacagagaacacacgtgcagcataccccatcgagtacatccccaatgctaagatcccgtgtgtgggtccacacccgaagaatgttatacttttggcatgtgatgcatttggtgtgcttccaccagtgagcaaactaagccttgctcagaccatgtatcacttcatcagtggctacaccgcactggtggctggcaccgaggagggtgtaaaggaaccacgtgcaacattctcagcatgttttggggcagcattcatcatgctacatcccacaaaatatgcagaaatgcttgcctccaaaatggagaaacatggtgctactggatggcttgttaacaccggctggtcaggtggcagctacggggctgggagtcgtatgaagctagcatacactcggaaaatcatagacgctatccattccggtaaacttctgaatgcaaactacaagaaaaccgaagtgtttggtctggagattccaactgaggttgagagtgtgccttcagagattcttgatccagtgaacacctggtcaaacaagaaggcttataaggagacactgttgaagctggctgggctgttcaagaacaactttgaggtgtttgtgaaccataagattgggaaggatgataagctgactcaggaaattcttgctgctggccccaacttttaatcacatggtattgaagaagaaagaagtggatggtgatatatattaaaatttactagcctaacatgcaacatattatgtattaatccagttgcatgtttttagttacttttggaattattatcattttggactttgttttgatctatatatttttaatgaaaaaaaaaa

SEQ ID NO: 83013 - protein, 662 aa, Flaveria trinervia
MASSGNGNVAGKGNAVSGGRNGLPKIQTQKRQNGICHDDSSAPVKVQTIDELHSLQRKKSAPTTPLDGVQGAFANMSEDDRQKQQLQSISASLASLTRETGPKVVRGDPARRPETPRVAHGPDHYFTPTFAASDSSLKFTHVLYNLSPAELYEQAIKYEKGSFITSSGALATLSGAKTGRSPKDKRVVRDDVTENELWWGKGSPNIEMDEQTFLVNRERAVDYLNSLEKVFVNDQFLNWDPENRIKVRIVSARAYHSLFMHNMCIRPSPEELENFGTPDFTIYNAGQFPCNRYTHYMTSSTSIDLNLGRREMVILGTQYAGEMKKGLFGVMHYLMPKRQILSLHSGCNMGKDGDVALFFGLSGTGKTTLSTDHNRYLIGDDEHCWSDKGVSNIEGGCYAKCIDLSKEKEPDIWNAIKFGTVLENVVFDEHTREVDYLDKSVTENTRAAYPIEYIPNAKIPCVGPHPKNVILLACDAFGVLPPVSKLSLAQTMYHFISGYTALVAGTEEGVKEPRATFSACFGAAFIMLHPTKYAEMLASKMEKHGATGWLVNTGWSGGSYGAGSRMKLAYTRKIIDAIHSGKLLNANYKKTEVFGLEIPTEVESVPSEILDPVNTWSNKKAYKETLLKLAGLFKNNFEVFVNHKIGKDDKLTQEILAAGPNF

SEQ ID NO: 83014 - DNA, 2258 bp, Flaveria trinervia
  CDS (84)..(2072)
aatacaacctctgtttgatgatcgaatcgttcgtcgttttctcctcaatcgtgttcttctaatcgtttgtatttccggtcgagatggcgtctaacggaaacggaaatgttgccggaaaaggtaacgtcgttagtggcggaaggaatggattgccgaagatacagacgcagaagaggcagaacgggatatgtcacgatgacagttcggcacctgtgaaggtgcagacgatcgatgagctgcactcgttgcaacggaagaagtcggcacccaccacgccgcttgacggtgttcaaggtgcttttgctaatatgtctgaagatgatcgccagaagcagcaactgcagtccatcagtgcatcattggcatctcttacgagagaaaccggacccaaagtggtaagaggcgacccggcccgaagacccgagaccccaagggtggctcacggccccgaccactatttcaccccaacattcgctgctagcgacagttctctcaaattcacccatgttctctacaatctctcccctgctgagttgtatgagcaggcgatcaagtatgaaaaggggtcgtttattacatctagcggtgcattggcgaccttatccggtgccaaaactggacgctctccgaaggataagcgtgttgttagggatgatgtcaccgaaaatgagctttggtggggcaagggttcacccaatatcgagatggatgagcagactttcttggtgaatagagaaagagccgtggattatttgaactctttggagaaggtgtttgtgaatgatcagttcttgaactgggacccagagaaccgaatcaaagttcgaattgtgtcagcgagagcttaccactctctgttcatgcacaacatgtgcatccgacccagccctgaagaactggagaatttcggtactccagacttcacaatctacaatgctggccagtttccatgtaatcgttacacacactatatgacatcgtccactagcatagatttaaatcttggtagaagagaaatggttatccttggcacacagtatgccggggaaatgaagaaaggtctctttggtgtcatgcattatctcatgcctaaacgtcaaatcctgtccctacattccggatgcaatatgggcaaagatggagacgttgccctcttcttcggtctctcaggtaccgggaaaacaactttgtctactgatcacaatcggtatttgattggagatgacgagcattgctggagtgacaagggtgtgtctaacattgagggtggttgttatgccaagtgtattgatctttcaaaagagaaagaacctgatatctggaatgccattaaattcgggaccgtgctagaaaatgttgtatttgatgaacatactagagaggtggattatctagacaaatctgtcacagagaacacacgtgcagcataccccattgagtacatccccaatgctaagatcccgtgtgtgggtccacacccaaagaatgttatacttttggcatgtgatgcatttggtgtgcttccaccagtgagcaaactaagccttgctcagaccatgtatcacttcatcagtggctacaccgcactggtggctggtactgaagagggtgtgaaggagccacgcgcaacattctcagcctgttttggtgcagcattcatcatgctacatcccacaaagtatgcagaaatgcttgccgccaaaatggagaaacatggtgctactggatggcttgttaacaccggctggtcaggtggcagctatgggtctgggagtcgtatgaagctagcatacactcgtaaaattatagatgccatccattctggtaaacttctgaatgcaaactacaagaaaaccgaagtgtttggtctggagattccaactgatgttgagggtgtgccttcagagattcttgatccagtgaacacctggtcaaacaagaaggcttataaggagacactattgaagctggctgggctgttcaagaacaactttgaggtgtttgtgaaccataagattgggaaggatgataagctgactcaggaaattcttgcagctggccccaacttttaatcgcgtggtgttgaagaagaaagaagtggatggtgaatggtgatatatattaagatttactagcctaacatgcaacatattatgtattaatccagttgtatgtttttagttacttttggaattattgtcattttaaactttggttttgatctatatatttttaatgaaagaagccgaaaaaaaaaa

SEQ ID NO: 83015 - protein, 662 aa, Flaveria trinervia
MASNGNGNVAGKGNVVSGGRNGLPKIQTQKRQNGICHDDSSAPVKVQTIDELHSLQRKKSAPTTPLDGVQGAFANMSEDDRQKQQLQSISASLASLTRETGPKVVRGDPARRPETPRVAHGPDHYFTPTFAASDSSLKFTHVLYNLSPAELYEQAIKYEKGSFITSSGALATLSGAKTGRSPKDKRVVRDDVTENELWWGKGSPNIEMDEQTFLVNRERAVDYLNSLEKVFVNDQFLNWDPENRIKVRIVSARAYHSLFMHNMCIRPSPEELENFGTPDFTIYNAGQFPCNRYTHYMTSSTSIDLNLGRREMVILGTQYAGEMKKGLFGVMHYLMPKRQILSLHSGCNMGKDGDVALFFGLSGTGKTTLSTDHNRYLIGDDEHCWSDKGVSNIEGGCYAKCIDLSKEKEPDIWNAIKFGTVLENVVFDEHTREVDYLDKSVTENTRAAYPIEYIPNAKIPCVGPHPKNVILLACDAFGVLPPVSKLSLAQTMYHFISGYTALVAGTEEGVKEPRATFSACFGAAFIMLHPTKYAEMLAAKMEKHGATGWLVNTGWSGGSYGSGSRMKLAYTRKIIDAIHSGKLLNANYKKTEVFGLEIPTDVEGVPSEILDPVNTWSNKKAYKETLLKLAGLFKNNFEVFVNHKIGKDDKLTQEILAAGPNF

SEQ ID NO: 83016 - DNA, 2220 bp, Urochloa panicoides
  CDS (58)..(1932)
ctccacaccgcttcctcggcggccggcgcacgtcgctgctcccgacgctcgaacgagatggcgtcgccgaacggtggtgtcacgacctatgactacgacgacagcgacagcgcggcgccggtgcgcgcgcagaccatcgaggagctgcattcgctgcagcggaaggctgccgccacggccaaggatagcgcatcgcccctgcagtccatcagcgcgtcattggcgtctacggcacgtgaatatggccccaacctcgtcaagggtgacccggaagcgaagggcgcgccgccggcgccggtaaagcaccagcaggccgccgccgctgccgccatcgccgccagtgacagctccctcaagttcacccatgtcctctacaacctctcccccgctgagctgtacgagcaggctttcgggcaaaagaagagttcgttcatcacgtcgaccggcgcgctggccacgctgtccggcgccaagaccggtcggtcgcccagggacaagcgcgtcgtcaaggacgacaccaccgcgcaggagctgtggtggggcaagggctcgcccaacatcgagatggacgagcgccagttcgtgatcaacagggagcgggccctggacttcctcaactccctggacaaggtgtacgtcaacgaccagttcctcaactgggaccccgagaaccgcatcaaggtccggatcatcacctccagggcgtaccacgccctcttcatgcacaacatgtgcatccgtcccaccgaggaggagctggagaccttcggcacgccggacttcaccatttacaacgccggggagttccccgccaaccgttacgccaactacatgacgtcgtcgacgagcataaacatcagcctcgctaggagggagatggtgatcctgggcacgcagtacgctggggagatgaagaagggcctcttcggcgtcatgcactacctcatgcccaagcgcggcatcctctcgctgcactccgggtgcaacatgggcaaggaaggtgacgtcgccctcttcttcgggctctcaggtaccgggaagacgacgctgtcaactgaccacaacaggctcctgatcggtgatgacgagcactgctggagcgacaatggcgtctccaacattgagggaggttgctatgccaagtgcatcgacctgtccaaggagaaagaacctgatatctggaacgccatcacgtttggaacagtgctggaaaacgtcgtcttcaacgagcgcactcgtgaagttgactacgccgacaaatctatcaccgagaacacccgggccgcctacccgatcgagttcatccccaacgccaagatcccatgcgtcgggccgcaccccaagaacgtcatcctcctggcctgcgacgcgtacggcgtgctcccgccggtgagcaagctcaacctggcgcagaccatgtaccacttcatcagcggctacactgccatcgtcgccggcacggaggacggcgtcaaggagccgacggcgaccttctcggcctgcttcggcgcggccttcatcatgtaccaccccaccaagtacgccgccatgctcgccgagaagatgcagaagtacggccgcaccgggtggcttgtcaacaccggctggtccggcggcaggtacggtgtgggcaacaggatcaagctgccgtacaccaggaagatcatcgacgccatccactccggcgagctcctcaccgccaactacaagaagaccgaggtgttcgggctggagatccccaccgagatcaacggcgtgccgtcggaaatcctcgaccccgtcaacacctggacggacaaggccgcgtacaaggagactctcctgaagcttgccgggctcttcaagaacaacttcgaggtgttcgccagctacaagatcggggacgacaacagcctgaccgaacagatccttgccgcaggccccaacttctgattccaagcaatggatccggaacggcgaggcgttggagttggttcagaatgaaccagtggtgcgtgtgtgcgtgcgtgtgttacgatgatgatgatgatggcgaaaaaaaaactgttggactgatgatgtgccaacatggagtagaccagctctgtatgctatcatgtgtgtgtggtgttgttacctgtggtttgttctatctgggcgtggtcctggtgtaaatctgtatgcctgttcggcggcctggtcctggtgtaaatctgggcgtgctttgcatcttgcccgtgt

SEQ ID NO: 83017 - protein, 624 aa, Urochloa panicoides
MASPNGGVTTYDYDDSDSAAPVRAQTIEELHSLQRKAAATAKDSASPLQSISASLASTAREYGPNLVKGDPEAKGAPPAPVKHQQAAAAAAIAASDSSLKFTHVLYNLSPAELYEQAFGQKKSSFITSTGALATLSGAKTGRSPRDKRVVKDDTTAQELWWGKGSPNIEMDERQFVINRERALDFLNSLDKVYVNDQFLNWDPENRIKVRIITSRAYHALFMHNMCIRPTEEELETFGTPDFTIYNAGEFPANRYANYMTSSTSINISLARREMVILGTQYAGEMKKGLFGVMHYLMPKRGILSLHSGCNMGKEGDVALFFGLSGTGKTTLSTDHNRLLIGDDEHCWSDNGVSNIEGGCYAKCIDLSKEKEPDIWNAITFGTVLENVVFNERTREVDYADKSITENTRAAYPIEFIPNAKIPCVGPHPKNVILLACDAYGVLPPVSKLNLAQTMYHFISGYTAIVAGTEDGVKEPTATFSACFGAAFIMYHPTKYAAMLAEKMQKYGRTGWLVNTGWSGGRYGVGNRIKLPYTRKIIDAIHSGELLTANYKKTEVFGLEIPTEINGVPSEILDPVNTWTDKAAYKETLLKLAGLFKNNFEVFASYKIGDDNSLTEQILAAGPNF

SEQ ID NO: 83018 - DNA, 2254 bp, Urochloa panicoides
  CDS (45)..(1925)
  misc_feature (2225)..(2225): m is a or c
cctcggcggccggcgcacgtcgctgctcccgacgctcgaacgagatggcgtcgccgaacggtggtgtcacgacctacgactaccacgacagcgacagcgcggcgccggtgaacgcgcagaccatcgaagagctgcattcgctgcagcggaaggctgccaccacgaccaaggatggcgcatcgcccctgcagtccatcagcgcgtcattggcgtctctggcacgtgaatatggccccaacctcgtcaagggtgacccggaagcgaccaagggcgcgccgccggtgccgataaagcaccagcagccctccgccgccgctgccaccatcgccgccagcgacagctccctcaagttcacccatgtcctctacaacctctcccccgctgagttgtacgagcaggctttcggccaaaagaagagttcgttcatcacgtcgaccggcgcgctggccacgctgtccggcgccaagaccggccggtcgcccagggacaagcgtgtcgtcaaggacgagaccacctcacaggagctctggtggggcaagggctcgcccaacatcgagatggacgagcgccagttcgtgatcaacagggagcgggccctggactacctcaactcactggacaaggtgtacgtcaacgaccagttcctcaactgggactcggagaaccgcatcaaggtccgcatcatcacctccagggcgtaccacgccctctttatgcacaacatgtgcatccggcccacggaagaggagctggagagcttcggcacgccggacttcaccatttacaacgccggggagttccccgccaaccgttacgccaactacatgacgtcgtcgacgagcataaacatcagcctcgctaggagggagatggtaatcctgggcacgcagtacgccggggagatgaagaaggggctctttggcgtcatgcactacctcatgcccaagcgaggcatcctctcgctgcactccgggtgcaacatgggcaaggagggtgacgtcgccctcttctttgggctctcaggtaccgggaagacgacgctgtcaactgaccacaataggctcctgatcggtgatgacgagcactgctggagcgacaatggcgtctccaacattgagggaggttgctatgccaagtgcattgacctgtcccaggagaaggaacctgatatctggaacgccatcaagtttggaactgtgctggagaacgtcgtcttcaacgagcgcactcgtgaagttgactacgccgacaaatctatcaccgagaacacccgggccgcctacccgatcgagttcatccccaacgccaagatcccgtgcgtcgggccgcaccccaagaacgtcatcctcctggcgtgcgacgcgtacggcgtgctcccgccggtgagcaagctcaacctggcgcagaccatgtaccacttcatcagcggctacaccgccatcgtcgccggcacagaggacggcgtcaaggagccgacggccacattctcggcctgcttcggcgcggccttcatcatgtaccaccccaccaagtacgcagccatgctcgccgagaagatgcagaagtacggcgccaccgggtggcttgtcaacactggctggtccggcggcaggtacggtgtgggcaacaggatcaagctgccgtacaccaggaagatcatcgacgccatccactccggcgagctcctcaacgccagctacaagaagaccgaggtgttcgggctggagatccccaccgcgatcaacggcgtgccgtcggaaattctcggccccgtcaacacctggacggacaaggccgcgtacaaggagacgctcctgaagcttgccgggctcttcaagaacaacttcgaggtgttcgccagctacaagatcgggaacaacaacagcctgacagaacagatcctcgccgcagcgcccaacttctgattccaagcaatggatctggaacggcgaggcgatggagttggttcagaataaaccggtggtgcgtgcgtgcgtgtgttacgatgatgatgatggcgaaaaaaaaactgttggactgattatgtgccaacatgcagtagaccagctctgtatgctatcatgtgtgtgtggtggtgttacctgtaaggtttgttctatcagctggttcggcggcctggttctggtgtaaatctgggcgtgctttgcatcttgcccgtgtattccctcttgtttcagaatttgaatatatactatcttatttcmaaaaaaaaaaaaaaaaaaaaaaaaaaaaa

SEQ ID NO: 83019 - protein, 626 aa, Urochloa panicoides
MASPNGGVTTYDYHDSDSAAPVNAQTIEELHSLQRKAATTTKDGASPLQSISASLASLAREYGPNLVKGDPEATKGAPPVPIKHQQPSAAAATIAASDSSLKFTHVLYNLSPAELYEQAFGQKKSSFITSTGALATLSGAKTGRSPRDKRVVKDETTSQELWWGKGSPNIEMDERQFVINRERALDYLNSLDKVYVNDQFLNWDSENRIKVRIITSRAYHALFMHNMCIRPTEEELESFGTPDFTIYNAGEFPANRYANYMTSSTSINISLARREMVILGTQYAGEMKKGLFGVMHYLMPKRGILSLHSGCNMGKEGDVALFFGLSGTGKTTLSTDHNRLLIGDDEHCWSDNGVSNIEGGCYAKCIDLSQEKEPDIWNAIKFGTVLENVVFNERTREVDYADKSITENTRAAYPIEFIPNAKIPCVGPHPKNVILLACDAYGVLPPVSKLNLAQTMYHFISGYTAIVAGTEDGVKEPTATFSACFGAAFIMYHPTKYAAMLAEKMQKYGATGWLVNTGWSGGRYGVGNRIKLPYTRKIIDAIHSGELLNASYKKTEVFGLEIPTAINGVPSEILGPVNTWTDKAAYKETLLKLAGLFKNNFEVFASYKIGNNNSLTEQILAAAPNF

SEQ ID NO: 83020 - DNA, 2016 bp, Arabidopsis thaliana
  CDS (1)..(2016)
atgtcggccggtaacggaaatgctactaacggtgacggagggtttagtttccctaaaggaccggtgatgccgaagataacgaccggagcagcaaagagaggtagcggagtctgccacgacgatagtggtccgacggtgaatgccacaaccatcgatgagcttcattcgttacagaagaaacgttctgctcctaccacaccgatcaaccaaaacgccgccgctgcttttgccgccgtctccgaggaggagcgtcagaagattcagcttcaatctatcagtgcatcgttagcatcgttaacgagagagtcaggaccaaaggtggtgagaggagatccggcggagaagaagaccgatggttcaactactccggcgtacgctcacggccaacatcattctatcttttctccggctactggtgctgtcagtgatagctccttgaagtttactcacgtcctctacaatctttcgcctgcagagctttatgagcaagctattaagtatgagaaaggttcgtttatcacttctaatggagctttggcgacgctttctggtgctaagactggtcgtgctcccagagataagcgtgttgttagagatgctactactgaggatgagctttggtggggaaagggttcgccgaatatcgaaatggatgaacatactttcatggtgaacagagaaagagctgttgattacttgaattccttggaaaaggtctttgtcaatgaccaatacttaaactgggatccagagaacagaatcaaagtcaggattgtctcagctagagcttaccattcattgtttatgcacaacatgtgtatccgaccaactcaggaggagcttgagagctttggtactccggattttactatatacaatgctgggcagtttccatgtaatcgttacactcattacatgacttcgtccactagcgtagaccttaatctggctaggagggaaatggttatacttggtactcagtatgctggggaaatgaagaagggtcttttcagtgtgatgcattaccttatgcctaagcgtcgtattctctcccttcattctggatgcaatatgggaaaagatggagatgttgctctcttctttggactttcaggtaccgggaagacaacgctgtctactgatcacaacaggtatcttattggagatgatgagcattgttggactgagactggtgtttcgaacattgagggtgggtgctatgctaagtgtgttgatctttcgagggagaaggagcctgatatctggaacgctatcaagtttggaacagttttggaaaatgttgtgtttgatgagcacaccagagaagtggattactctgataaatctgttacagagaacacacgtgctgcctacccaattgagttcattccaaatgcgaaaataccttgtgttggtccacacccgacaaatgtgatacttctggcttgtgatgcctttggtgttctcccacctgtgagcaagctgaatctggcacaaaccatgtaccacttcatcagtggttacactgctctggttgctggcacagaggatggtatcaaggagccaacagcaacattctcagcttgctttggtgcagctttcataatgttgcatcccacaaagtatgcagctatgttagctgagaagatgaagtcacaaggtgctactggttggctcgtcaacactggttggtctggtggcagttatggtgttggaaacagaatcaagctggcatacactagaaagatcatcgatgcaatccattcgggcagtctcttgaaggcaaactacaagaaaaccgaaatctttggatttgaaatcccaactgagatcgaagggataccttcagagatcttggaccccgtcaactcctggtctgataagaaggcacacaaagatactctggtgaaactgggaggtctgttcaagaagaacttcgaggtttttgctaaccataagattggtgtggatggtaagcttacggaggagattctcgctgctggtcctatcttttag

SEQ ID NO: 83021 - protein, 671 aa, Arabidopsis thaliana
MSAGNGNATNGDGGFSFPKGPVMPKITTGAAKRGSGVCHDDSGPTVNATTIDELHSLQKKRSAPTTPINQNAAAAFAAVSEEERQKIQLQSISASLASLTRESGPKVVRGDPAEKKTDGSTTPAYAHGQHHSIFSPATGAVSDSSLKFTHVLYNLSPAELYEQAIKYEKGSFITSNGALATLSGAKTGRAPRDKRVVRDATTEDELWWGKGSPNIEMDEHTFMVNRERAVDYLNSLEKVFVNDQYLNWDPENRIKVRIVSARAYHSLFMHNMCIRPTQEELESFGTPDFTIYNAGQFPCNRYTHYMTSSTSVDLNLARREMVILGTQYAGEMKKGLFSVMHYLMPKRRILSLHSGCNMGKDGDVALFFGLSGTGKTTLSTDHNRYLIGDDEHCWTETGVSNIEGGCYAKCVDLSREKEPDIWNAIKFGTVLENVVFDEHTREVDYSDKSVTENTRAAYPIEFIPNAKIPCVGPHPTNVILLACDAFGVLPPVSKLNLAQTMYHFISGYTALVAGTEDGIKEPTATFSACFGAAFIMLHPTKYAAMLAEKMKSQGATGWLVNTGWSGGSYGVGNRIKLAYTRKIIDAIHSGSLLKANYKKTEIFGFEIPTEIEGIPSEILDPVNSWSDKKAHKDTLVKLGGLFKKNFEVFANHKIGVDGKLTEEILAAGPIF

SEQ ID NO: 83022 - DNA, 2408 bp, Cucumis sativus
  CDS (36)..(2048)
ctcttatccatcacaaatctccgaggatacaaaaaatggagaatgaggggaaagataacggcgaatttagctttgtgagtgatggaggagcggagacaggacggagaggactgccgaagattcacacggagaaaaacgcgccgacgacggagagagatatatgtcatgatgatagtacgacaccgatgagagctcggacgttggagcatcttcattcactgcagaaaaagcgatcgacgccgaccactccattgacggacagtcagggagttttttcccctgtttctgaagccgaacgtcaaaagcagcagcttatctcaatcagtgcttcattggcgtcgctgacaagagaaactgggccgaagttagtgaaaggcgatccagagaaaaagaaggaggcccacaaagcatcagtattggaccatcttcattttggagagcccatattgaacttgagtgacagcgccctcaagtccacccacatcctctacaatccctctcccgccgagctttacgagcaagcgatcaagtacgagaaagggtcattcataacgtcgacaggggctttggccactctttcaggagccaaaacgggaagatcgcctatagacaaaagagttgttaaagatgacaccactgaaaaggagctttggtggggcaagggatcacctaatattgagatggatgaacatactttcttaatcaatagagagagagctgtcgattacctgaactcccttgataaggtatttgtgaatgatcagttcttgaactgggatcccgaaaaccgaatcaaagtccgaatcgtttcagcccgagcctatcattccttgttcatgcacaacatgtgcattcgaccaactgctggagagctggaggactttgggactccggatttcacaatataccatgctgggcagtttccttgtaatcgttacactcactatatgacttcttccaccagtatagatatgaatcttgataggaaggaaatggtcattcttggtactcaatatgctggcgaaatgaagaaaggcctctttagtttaatgcattatctcatgccgatgcgccagattttgtctcttcattctggttgcaacatgggcaaaaatggagacgtcgcccttttctttggattatcaggtactgggaagaccacgttgtctacagatcataataggtacttaataggggatgatgaacactgctggagcgataatggtgtatcgaacattgaaggcggttgctatgccaaatgcatcgacttgtcgagggaaaaggagcctgacatttggaatgctatcaagttcgggactgttcttgagaatgtggtgtttgatgagcacactagagaagttgattactctgaaaaatccgttacagagaacactcgagcggcgtatcccattgaatacattcctaatgctaaaatcccctgcgttggccctcatccaaagaatgtaattcttcttgcttgtgatgcatttggagttctcccaccagtgagcaagctgagcttgcctcagactatgtaccattttatcagtggctacactgctttggtggctggaactgaggagggtgtgaaagagccacaggcaacattctctgcttgttttggagcagcattcataatgttgcatccatccagatatgcagcaatgctagctgagaagatgaaaaaacacggtgccacgggatggctcgtaaacaccggttggtcaggaggaagctatggaagtggtaacaggatcaagttagcctacacaaggaagattatcgatgcaatccactcaggagcgcttttggaagcaaactacagcaagactcgggtgtttggccttgagattcctgatgctattgagggagttccttcacatatcttggatccaataaacacgtggtcagacaaagatggctatcatgagacattgctgaagttgggtggtctgtttaagaagaactatgaaggaattcatacttaccaagtggagagggacagtgaattggctgaggagattcttgcagctgggcctaccttgtaataaaatggttaatggaggagcatttcatgaatttggatgaagaatgatatcatgaaatggctggcgttggttatattttacagatgaatgtgtgaaagcttcgaagttgagagtttttgcggataaacaagatattgcatagtccatagtttttttctcctgtgatttatgttgtaaaatcataacgtttatatttgtgatttgggctttcaaggcctgaacaaagtatggtcttttaaattgtaattttatagcagaatctgctattcacaatctatacatgaataatatgtcaagttgacctttaagagcattatgtttcttccaatcaatcaaatattacttcttattttagattct

SEQ ID NO: 83023 - protein, 670 aa, Cucumis sativus
MENEGKDNGEFSFVSDGGAETGRRGLPKIHTEKNAPTTERDICHDDSTTPMRARTLEHLHSLQKKRSTPTTPLTDSQGVFSPVSEAERQKQQLISISASLASLTRETGPKLVKGDPEKKKEAHKASVLDHLHFGEPILNLSDSALKSTHILYNPSPAELYEQAIKYEKGSFITSTGALATLSGAKTGRSPIDKRVVKDDTTEKELWWGKGSPNIEMDEHTFLINRERAVDYLNSLDKVFVNDQFLNWDPENRIKVRIVSARAYHSLFMHNMCIRPTAGELEDFGTPDFTIYHAGQFPCNRYTHYMTSSTSIDMNLDRKEMVILGTQYAGEMKKGLFSLMHYLMPMRQILSLHSGCNMGKNGDVALFFGLSGTGKTTLSTDHNRYLIGDDEHCWSDNGVSNIEGGCYAKCIDLSREKEPDIWNAIKFGTVLENVVFDEHTREVDYSEKSVTENTRAAYPIEYIPNAKIPCVGPHPKNVILLACDAFGVLPPVSKLSLPQTMYHFISGYTALVAGTEEGVKEPQATFSACFGAAFIMLHPSRYAAMLAEKMKKHGATGWLVNTGWSGGSYGSGNRIKLAYTRKIIDAIHSGALLEANYSKTRVFGLEIPDAIEGVPSHILDPINTWSDKDGYHETLLKLGGLFKKNYEGIHTYQVERDSELAEEILAAGPTL

SEQ ID NO: 83024 - DNA, 2338 bp, Zea mays
  CDS (58)..(2058)
gttcgaaagccgcgcacgcacgtcggtcgtcccgagcaggacctcgatcggccgaggatggcgacgccgaacgggcttgcgcggatcgagacgaccgggaagaagaagcaggacaacggcgtgtggtacgacgacagctcggcgccggtgcgcgcgcagaccatcgacgagctgcactcgctgcagcggaagcggtcggcgcccaccacgcccaatcggtcggcgcccaccacgcccatcaagggcggcgcccactcgcccttcgccgtcgcgatctccgaggaggagcgccacacgcagcagatgcagtccatcagtgcgtcgttggcgtctctgacgcgtgaaaccgggccgaaagtggtcaagggcgacccggccgcgaagggagaggccgccgcgcagggcgcgccatcgacgccgagggcgcaccagcagcaccgccaccccgccgcccccgccatcgccgtcagcgacagctccctcaagttcactcatgtgctcaacaacctctcgcctgctgagctgtacgagcaggccatcaagtacgagaaggggtcgttcatcacgtccaccggcgcgctggcgacgctgtctggtgccaagaccgggcggtctcccagggacaagcgcgtcgtcaaggacgaggtcaccgcgcaggacctgtggtggggcaagggctcgcccaacatcgagatggacgagaagacgttcctgatcaacagggagagggccgtcgactacctcaactccctgaaggtagttcgtcaacgacagctactcaactgggaccccgagaaccggatcaaggtccgcatcatctccgccagggcgtaccactccctcttcatgcacaacatgtgcatccgccccacggacgaggagctggaggactttggcacgccggacttcaccatctacaacgcagggcagttcccctgcaaccgctacacccactacatgacgtcgtccacgagcatagacctcaacctcgccaggagggagatggtgatcatgggcacgcagtacgccggcgagatgaagaaggggctcttcggcgtcatgcactacctcatgcccaagcgcggcatcctctcgctgcactccggctgcaatatgggcaaggacggcgacgtcgccctcttctttggcctctcaggtaccgggaaaacgacgctgtcgacggatcacaacgggcttctgatcggcgacgacgagcactgctggagcgacaatggcgtgtccaacatcgagggaggctgctacgccaagtgcatcgacctggcgcaggagaaagagcctgatatttggaacgccatcaagtttggaactgtgctggagaacgtggtctttgatgagcatactcgtgaagtcgactacgccgactactctgtcaccgagaacactcgggctgcctacccgatcgagtacatccccatcgccaagataccatgcgtcgggccgcaccccaagaacgtgatcctcctggcgtgcgacgccttcggcgtgctcccgccggtgagcaagctgatactggcgcagaccatgtaccacttcatcagcggctacaccgctctggtcgccggcacggaggacggcatcaaggagccgcaggccaccttctccgcctgcttcggcgcggccttcatcatgctccacccgaccaagtacgccgccatgctcgccgagaagatgcagaagtacggcgccaccgggtggctcgtcaacaccggctggtcgggtggcaggtacggcgtgggcaagaggatcaggcttccctacaccagaaagatcatcgacgccatccactccggcgagctcctcaccgccaactaccagaagaccgaggtgtttggcctggagatccccactgagatcaacggcgtgccgtcggaaatcctcgacccgatctacacctggacggacaaggccgcgtacaaggagaatctcctgaggctcggcgggctcttcaagaacaacttcgaggtgttcgccagctacaagatcggggacgacagcagcctgactgacgagatcctcgcagcaggccccaacttctgaactaaagcaatggatccggatgaataaaacgatggtgtgtgtgcgtgggtgcgtgtgaagatgattacgacgacgacgaaaaaaaaggtgttggatcgatgagccaacatagtaatagattagctgggtatattgtcatgggtgcgtctggtctctggtcttgttatctataaagctgtctcaagcagctatcatattctatttcaaattctattctgttaagcgtgtagttcaaaacaatgctttacacaaccatatgcacagtctatctaagggttgg

SEQ ID NO: 83025 - protein, 666 aa, Zea mays
MATPNGLARIETTGKKKQDNGVWYDDSSAPVRAQTIDELHSLQRKRSAPTTPNRSAPTTPIKGGAHSPFAVAISEEERHTQQMQSISASLASLTRETGPKVVKGDPAAKGEAAAQGAPSTPRAHQQHRHPAAPAIAVSDSSLKFTHVLNNLSPAELYEQAIKYEKGSFITSTGALATLSGAKTGRSPRDKRVVKDEVTAQDLWWGKGSPNIEMDEKTFLINRERAVDYLNSLKVVRQRQLLNWDPENRIKVRIISARAYHSLFMHNMCIRPTDEELEDFGTPDFTIYNAGQFPCNRYTHYMTSSTSIDLNLARREMVIMGTQYAGEMKKGLFGVMHYLMPKRGILSLHSGCNMGKDGDVALFFGLSGTGKTTLSTDHNGLLIGDDEHCWSDNGVSNIEGGCYAKCIDLAQEKEPDIWNAIKFGTVLENVVFDEHTREVDYADYSVTENTRAAYPIEYIPIAKIPCVGPHPKNVILLACDAFGVLPPVSKLILAQTMYHFISGYTALVAGTEDGIKEPQATFSACFGAAFIMLHPTKYAAMLAEKMQKYGATGWLVNTGWSGGRYGVGKRIRLPYTRKIIDAIHSGELLTANYQKTEVFGLEIPTEINGVPSEILDPIYTWTDKAAYKENLLRLGGLFKNNFEVFASYKIGDDSSLTDEILAAGPNF

SEQ ID NO: 83026 - DNA, 1578 bp, Moorella thermoacetica
  CDS (1)..(1578): transl_table=11
atgagtaatacttatggtttagagcgattgggcatcattaatcctggcactatttatcgtaacctgccgatggcccggctggttgaaatagccctggcccggggagaaggcctcctagcttccaatggggctttaagcgttaataccggcaagtacaccggccgttccccccacgacaggtatatcgtggacactcccgccgttcacgacagcatcagttggggtgccgtcaaccagcccgtgagcgaggcgacctttgaacgcctctacagtcgcctgaccgcctacctccagggaaaggatctcttcgtttttgacggctttgtcggggccgatcctgcctaccgcatgcctatcaggattgtcaatgagtatgcctggcagaacctgtttgtccaccagctttttatcaggccgacggcggaagaactggccgggcatgagccccggtttaccgttatctgcgctccgggcttcaaggccattccggaggaagacggtacccgttccgaagcctttattattttaaactttgaccggcggctggtgatcatcggcggtacctcctatgccggcgagatgaaaaaatccatttttaccgtcatgaattatttgttgccagagcaaggtgtttgccccatgcactgctcggctaacatgggcccggcaggcgatacggccctgttcttcggtctttccggtaccggcaagactaccctgtcggccgatccggaacgctaccttattggcgacgatgagcatggatggtcggacaagggcatttttaactttgaaggcggttgttatgctaagtgcatcaagctctccgccgagcatgaaccccagatctggaatgccatccgtttcggcagcgtcctggagaatgtgatggtagaccccgattgccgaatcattgactacgacagcgatgccctgacggaaaacacccgcgctgcctacccggtagattttatccctaacgccgtcatccccggggtgggtggccatccccagacggtggtttttctcaccgctgacgcctttggcgttatgccgccgatagccaaactcacccgggaacaggccatgtactatttcctgtccggttataccagcaagctagccggtaccgagcggggggttaccgagcccaaggcgactttctcgacttgtttcggggcacccttcctgcctcggtcgcccatggtttacgccaacctcctgggggaaaggatagccaggcataacgccagcgtttacctggtcaataccggctggacaggggggccctatggcactggccggcgtatgagcctgccctatactcgggccatggtcagggcggctttaaacggtgaactggataaggtggaatttacccccgaccctgttttcggcttcctggtacctaaagcctgccccggagtcccggctgaaattctcaatccacgcaacacctgggcagaaacggaaaaatatgatgccatggctcgcaagctagccagcctcttcagggagaactttgccaaatttaaggacgtaccggtcagcatccaggaggccggagtggttggttga

SEQ ID NO: 83027 - protein, 525 aa, Moorella thermoacetica
MSNTYGLERLGIINPGTIYRNLPMARLVEIALARGEGLLASNGALSVNTGKYTGRSPHDRYIVDTPAVHDSISWGAVNQPVSEATFERLYSRLTAYLQGKDLFVFDGFVGADPAYRMPIRIVNEYAWQNLFVHQLFIRPTAEELAGHEPRFTVICAPGFKAIPEEDGTRSEAFIILNFDRRLVIIGGTSYAGEMKKSIFTVMNYLLPEQGVCPMHCSANMGPAGDTALFFGLSGTGKTTLSADPERYLIGDDEHGWSDKGIFNFEGGCYAKCIKLSAEHEPQIWNAIRFGSVLENVMVDPDCRIIDYDSDALTENTRAAYPVDFIPNAVIPGVGGHPQTVVFLTADAFGVMPPIAKLTREQAMYYFLSGYTSKLAGTERGVTEPKATFSTCFGAPFLPRSPMVYANLLGERIARHNASVYLVNTGWTGGPYGTGRRMSLPYTRAMVRAALNGELDKVEFTPDPVFGFLVPKACPGVPAEILNPRNTWAETEKYDAMARKLASLFRENFAKFKDVPVSIQEAGVVG

SEQ ID NO: 83028 - DNA, 2295 bp, Anaerobiospirillum succiniciproducens
  CDS (370)..(1968): transl_table=11
aaaaagggtagaatctttttttaaattatatttaaggcatttgtagcgaagattatgtcctctttgagggcggttagggcactaaactaccagctgtgacgcttgtacgacgagtgctgcaaatttgtgcagtgatagtgcagctttgcgcaactttaaaaggcagtattttgaacaccgcatgcgatgtatagcgcctcgaatagccatttgtgcaataaaagcaaatcttttcattgcaactcatatcaaattttttaagttaaagagaatatcgtcgatccatagttgagaaaaataagctagaatgatggccggtttagaaagaattgcgtcaggattaccctggcatcattcgtggagaaaaaaatgagcttatctgaaagtttagctaaatacggcattactggtgctaccaacatcgtccacaatccttctcacgaggagttgtttgctgctgagactcaggcttctttagaaggcttcgagaagggcactgtaaccgagatgggtgcagtaaacgttatgactggcgtttacaccggccgttcccctaaggacaagttcattgttaagaacgaggcctccaaggagatctggtggacttctgatgagttcaagaacgacaacaagccagttaccgaagaggcatgggctcagttaaaggctttagcaggcaaggagctctctaacaagcctttatacgttgttgatctcttctgtggtgctaacgagaacacccgtctgaagatccgtttcgttatggaagtagcttggcaggctcacttcgtaaccaacatgttcatccgtcctactgaggaagagttaaagggcttcgagccagacttcgtagttctgaacgcttcaaaggctaaggttgagaacttcaaggagttaggcctcaactctgagactgctgttgtattcaacctcgcagagaagatgcagatcatcctcaacacctggtacggtggtgagatgaagaagggcatgttctccatgatgaacttctacttaccattacagggcatcgctgcaatgcactgctctgctaacaccgacctcgagggcaagaacactgctatcttcttcggtctgtcaggcactggtaagaccaccttatctaccgatcctaagcgtttactcatcggtgacgacgagcacggttgggacgatgatggcgtattcaacttcgaaggcggctgctacgctaaggttattaacctctctaaggaaaacgagccagacatctggggcgctatcaagcgtaacgctttattagagaacgtaactgttgatgctaacggcaaggttgactttgcagacaagtctgtaactgagaacacccgtgtttcttacccaatcttccacattaaaaacatcgttaagccagtttctaaggctccagctgctaagcgcgtaatcttcttatctgctgatgctttcggtgtattacctccagtatctatcctttctaaggagcagactaagtactacttcctctctggcttcaccgctaagttagctggtaccgagcgtggcattaccgagcctaccccaaccttctcttcatgcttcggtgctgctttcttaaccttacctccaaccaagtacgctgaagttctggttaagagaatggaagcttccggcgctaaggcttacttagtaaacactggctggaacggcactggcaagcgtatctccattaaggatacccgtggcattatcgacgcaatcttagacggttctatcgatactgcaaacaccgcaaccatcccttacttcaacttcaccgttcctactgagttaaagggcgttgacaccaagattctggacccacgtaacacctacgctgacgcttcagagtgggaagtaaaggctaaggacttagctgagcgcttccagaagaacttcaagaagttcgagtctttaggtggtgacttagttaaggctggtccacagttataattcctgtctgaccctttaagggcagaatagatgaattactaacgggcccgaggtgctatatgcgcctcgggccttttgtatttgtatagacaaggaagtctataggaggacaatttggcaaagaagccttacattacccctcaggatatgagttaaaaaggaattagattatctttggcttgaaaaacgtccagatgtaactgctaaggtttcatgggcctgcaagcttaggagatcgctccgagaacgctgactatcagtacaacaagcgtttgcttgctcagattgaccgtcgcattcgctatctacgtaagattcttaatgatc

SEQ ID NO: 83029 - protein, 532 aa, Anaerobiospirillum succiniciproducens
MSLSESLAKYGITGATNIVHNPSHEELFAAETQASLEGFEKGTVTEMGAVNVMTGVYTGRSPKDKFIVKNEASKEIWWTSDEFKNDNKPVTEEAWAQLKALAGKELSNKPLYVVDLFCGANENTRLKIRFVMEVAWQAHFVTNMFIRPTEEELKGFEPDFVVLNASKAKVENFKELGLNSETAVVFNLAEKMQIILNTWYGGEMKKGMFSMMNFYLPLQGIAAMHCSANTDLEGKNTAIFFGLSGTGKTTLSTDPKRLLIGDDEHGWDDDGVFNFEGGCYAKVINLSKENEPDIWGAIKRNALLENVTVDANGKVDFADKSVTENTRVSYPIFHIKNIVKPVSKAPAAKRVIFLSADAFGVLPPVSILSKEQTKYYFLSGFTAKLAGTERGITEPTPTFSSCFGAAFLTLPPTKYAEVLVKRMEASGAKAYLVNTGWNGTGKRISIKDTRGIIDAILDGSIDTANTATIPYFNFTVPTELKGVDTKILDPRNTYADASEWEVKAKDLAERFQKNFKKFESLGGDLVKAGPQL

SEQ ID NO: 83030 - DNA, 1626 bp, Ashbya gossypii
  CDS (1)..(1626)
atgtcgccatcaaaggtataccaaacaccagaggagaagatccgcgctgagcttgggctcagctcgggcgttttgacgattcggcgcaatgcgccggccgcggtgttgtacgaagatgcgctagcggagcgcaagacagcaatctccagcactggcgcgttgattgcgtactctggggaaaagacgggtcggtcgcctaaggacaagcggatcgtggacgagcccacgtcgtctgacaatatttggtggggtccagtgaaccgcaaggcgtcggagaagacgtggttgatcaaccgcgagcgtgccgcagacttcttgcgtacccgcgagcacctatacatcgtggatgcgtacgcgggctgggacccccgctaccgcatcaagatccggattgtgtgctgccgcgcataccacgcgttgttcatgaccaacatgttgatcaggccgaccgaagaggagcttgcggagttcggcgagccagacttcaccgtgtggaacgcgggccagttcccagcgaacacgcacactgagggtatgtcctcgaagaccactgtcgaaatcaacttcagggcgatggagatggtcatccttggcacggagtacgctggtgagatgaagaagggtatcttcacggtgatgttctacttgatgcctatcaaccacaacgtcttgacattgcactcctccgccaaccagggccccaacaacgatgtgacgctcttcttcggcttgagcggcactggtaagacgaccttgtctgcggaccagcaccggaaattgatcggcgacgacgagcactgctggtctgactacggtgtgttcaacatagaaggtgggtgctacgccaagtgtatcggcctaagcggggagaaggagccggaaatcttcaatgcaatcaagtacggctctgttttggagaacgtggtctacgacccagtaacgcgtgtcgtggactatgaggactcttcgatcaccgagaacacacgttgcgcgtacccaattgagtacatcccaagcgcgcagattccatgcttgtccgagaaccatccttctaacatcgttctattgacctgcgatgcctcaggtgtgttgccacctgtgtcccgtttgacgccggagcaggtgatgtaccacttcatctcgggctacacctccaagatggccggtactgagcagggagtcactgagcctgaggctaccttctcttcctgcttcggccagccattcctagccctacatccaatgaaatacgctacgatgttggctgaaaagatgtcgcagcataacgctagcgcctggttgattaacacgggctggactggctcctcgtatacggccggcggtaagcgctgtccattgaagtacacccgtgctatcttggactcgatccatgacggaaccttggcccaggctgaatacgagaccctacccgtctttggtttgtccattccaaaagcggtcgagggcgtgccagctgagttgctaaaccctgccaagaactgggtcgagggcgaaggcaagtacgctagcgccgtgtcggctttggcctcgaagttcacagagaactttaagatctatcaggaccaggccacagaggaggttgtccgcgctggcccacaaatatga

SEQ ID NO: 83031 - protein, 541 aa, Ashbya gossypii
MSPSKVYQTPEEKIRAELGLSSGVLTIRRNAPAAVLYEDALAERKTAISSTGALIAYSGEKTGRSPKDKRIVDEPTSSDNIWWGPVNRKASEKTWLINRERAADFLRTREHLYIVDAYAGWDPRYRIKIRIVCCRAYHALFMTNMLIRPTEEELAEFGEPDFTVWNAGQFPANTHTEGMSSKTTVEINFRAMEMVILGTEYAGEMKKGIFTVMFYLMPINHNVLTLHSSANQGPNNDVTLFFGLSGTGKTTLSADQHRKLIGDDEHCWSDYGVFNIEGGCYAKCIGLSGEKEPEIFNAIKYGSVLENVVYDPVTRVVDYEDSSITENTRCAYPIEYIPSAQIPCLSENHPSNIVLLTCDASGVLPPVSRLTPEQVMYHFISGYTSKMAGTEQGVTEPEATFSSCFGQPFLALHPMKYATMLAEKMSQHNASAWLINTGWTGSSYTAGGKRCPLKYTRAILDSIHDGTLAQAEYETLPVFGLSIPKAVEGVPAELLNPAKNWVEGEGKYASAVSALASKFTENFKIYQDQATEEVVRAGPQI

SEQ ID NO: 83032 - DNA, 1587 bp, Bacillus anthracis
  CDS (1)..(1587): transl_table=11
atgagtactgtgaatgtccaaattggtttacacgaattattgaacggaagcaatgcacagattcaactaagtgttccgcaattagtggaaaaagtattaatgcgaaatgaagggaaattaacttcgactggtgccgtttctgcttcaactggaaaatatacaggacgttctcctaaagataaatttattgtgaaagaagcatcggttgctgacaaaattgcttggggagctgtgaatcaaccgatttctgaagaacattttaataaattatatactaaagttttagaatacttaaaagaaaaagaagagttattcgtcttcaaaggatttgcaggcgcggaccgcaattaccgtctaccaatccaagttattaatgaatatgcatggcacaatttatttgtacatcaattattcattcgtccaactgaagaagaattaacgactcatgaatcagaattcacaattgtttctgcaccaaatttcaaagctgatccagctgttgacggtacaaactctgaagcattcattatggtttcattcgaaaaacgtatcgtactaattggtggtacagaatacgctggagaaatgaaaaaatcaatcttctctattatgaacttcttactacctgaacaagatattctttctatgcattgctctgcaaacgtaggtgaagaaggcgacgtagcactattcttcggtttatctggaacaggtaaaacaacattatctgctgatccaaaccgtaaattaatcggtgatgatgagcatggttggtctgataacggtgtattcaatattgaaggcggttgctacgcaaaatgtgtaaacctttctcacgagaaagaaccacaaattttcgatgcaatcacatttggatctgttttagaaaacgttatcattaatgaccaaacgcgtatcgcagactataacgatactactttaacagaaaatactcgtgctgcataccctatgcatgcgatcgacaatatcatactgccaagtgttgctggacacccaaatacaattattttcttaactgctgatgcatctggcgtattgcctccaatcagcaagttatcaaaagaacaagctatgtaccatttcttaagtggttacactagtaaactagcaggaacagagcgcggcgttacatcaccgcaagcaacattctcaacttgcttcggttcaccattcttaccacttgatgcatctcgctatgctgaaatgcttggtgagaaaatcgagaaacacgatgcaaaagtattcttagtaaacactggctggactggtggcgaatacggcgttggtaaacgtatgaacttaggttacactcgtgcaatgattcaagcagcattaaacggtgaacttgcgaaaactgaaacagctaaacatgacatcttcggtcttgaagttccacttcacgtaccaggtgtacctgacgaagtgttaatgcctgaacaaacttgggctgataaagctgcttacaaagcaaaagcaatcgaacttgcaaatgaattcaaagcgaacttcaaaaagttcgacagcgtatctgaagacattattaacttaggcggtccaatcgcttaa

SEQ ID NO: 83033 - protein, 528 aa, Bacillus anthracis
MSTVNVQIGLHELLNGSNAQIQLSVPQLVEKVLMRNEGKLTSTGAVSASTGKYTGRSPKDKFIVKEASVADKIAWGAVNQPISEEHFNKLYTKVLEYLKEKEELFVFKGFAGADRNYRLPIQVINEYAWHNLFVHQLFIRPTEEELTTHESEFTIVSAPNFKADPAVDGTNSEAFIMVSFEKRIVLIGGTEYAGEMKKSIFSIMNFLLPEQDILSMHCSANVGEEGDVALFFGLSGTGKTTLSADPNRKLIGDDEHGWSDNGVFNIEGGCYAKCVNLSHEKEPQIFDAITFGSVLENVIINDQTRIADYNDTTLTENTRAAYPMHAIDNIILPSVAGHPNTIIFLTADASGVLPPISKLSKEQAMYHFLSGYTSKLAGTERGVTSPQATFSTCFGSPFLPLDASRYAEMLGEKIEKHDAKVFLVNTGWTGGEYGVGKRMNLGYTRAMIQAALNGELAKTETAKHDIFGLEVPLHVPGVPDEVLMPEQTWADKAAYKAKAIELANEFKANFKKFDSVSEDIINLGGPIA

SEQ ID NO: 83034 - DNA, 1587 bp, Bacillus cereus
  CDS (1)..(1587): transl_table=11
atgagtactgtgaatgtccaaattggtttacacgaattattgaacggaagcaatgcacagattcaactaagtgttccgcaattagtggaaaaagtattaatgcgagatgaagggaaattaacttcgactggtgccgtttctgcttcaactggaaaatatacaggacgttctcctaaagataaatttattgtgaaagaagcatcggttgctgacaaaattgcttggggagcagtgaaccaaccgatttctgaagaacattttaataaattatatacgaaagttttagaatacttaaaagagaaagaagagttattcgtcttcaaaggatttgcaggcgctgaccgcaattaccgcctaccaattcaagttattaatgaatatgcatggcacaatctatttgtacatcaattattcattcgtccaactgaagaagaattaacaactcatgaatcagagttcacaattgtttctgcaccgaatttcaaggctgatccagctgttgacggcacaaactctgaagcatttattatggtttcattcgaaaaacgtatcgtactaattggtggtacagaatacgctggagaaatgaaaaaatcaatcttctctattatgaacttcttattacctgaacaagatattctttctatgcattgctctgcaaacgtaggtgaagaaggcgatgtagcactattcttcggtttatctggaacaggtaaaacaacattatctgctgatccaaaccgtaaattaatcggtgatgatgagcacggttggtctgataacggtgtattcaatattgaaggcggttgctacgcgaaatgtgtaaacctttctcacgagaaagaaccacaaattttcgatgcaatcacatttggatctgttttagaaaacgttatcattaatgaccaaacgcgtatcgcagactataacgatactactttaacagaaaatactcgtgctgcataccctatgcatgcgatcgacaatatcgtactgccaagtgttgcaggacacccaaatacaattatcttcttaactgctgatgcatctggcgtattgcctccaatcagtaagttatcaaaagaacaagctatgtaccacttcttaagtggttacactagtaaactagcaggaacagagcgcggtgttacatctccgcaagcaacattctcaacttgcttcggttcaccattcttaccacttgatgcatctcgctatgctgaaatgcttggtgaaaaaatcgagaaacacgatgcgaaagtattcttagtaaacactggctggactggtggcgaatacggcgttggtaaacgtatgaacttaggttacactcgtgcaatgattcaagcagcattaaacggtgaacttgcgaaaactgaaacagctaaacatgacatcttcggtcttgaagttccacttcacgtaccaggtgtacctgacgaagtgttaatgcctgaacaaacttgggctgataaagctgcttacaaagcaaaagcaatcgaacttgcaaatgaattcaaagctaacttcaaaaagttcgacagcgtatctgaagacattattaacttaggcggcccaatcgcttaa

SEQ ID NO: 83035 - protein, 528 aa, Bacillus cereus
MSTVNVQIGLHELLNGSNAQIQLSVPQLVEKVLMRDEGKLTSTGAVSASTGKYTGRSPKDKFIVKEASVADKIAWGAVNQPISEEHFNKLYTKVLEYLKEKEELFVFKGFAGADRNYRLPIQVINEYAWHNLFVHQLFIRPTEEELTTHESEFTIVSAPNFKADPAVDGTNSEAFIMVSFEKRIVLIGGTEYAGEMKKSIFSIMNFLLPEQDILSMHCSANVGEEGDVALFFGLSGTGKTTLSADPNRKLIGDDEHGWSDNGVFNIEGGCYAKCVNLSHEKEPQIFDAITFGSVLENVIINDQTRIADYNDTTLTENTRAAYPMHAIDNIVLPSVAGHPNTIIFLTADASGVLPPISKLSKEQAMYHFLSGYTSKLAGTERGVTSPQATFSTCFGSPFLPLDASRYAEMLGEKIEKHDAKVFLVNTGWTGGEYGVGKRMNLGYTRAMIQAALNGELAKTETAKHDIFGLEVPLHVPGVPDEVLMPEQTWADKAAYKAKAIELANEFKANFKKFDSVSEDIINLGGPIA

SEQ ID NO: 83036 - DNA, 1587 bp, Bacillus cereus
  CDS (1)..(1587): transl_table=11
atgagtactgtgaatgtccaaattggtttacacgaattattgaacggaagcaatgcacagattcaactaagtgttccgcaattagtggaaaaagtattaatgcgaaatgaagggaaattaacttcgactggtgccgtttctgcttcaactggaaaatatacaggacgttctcctaaagataaatttattgtgaaagaagcatcggttgctgacaaaattgcttggggagctgtgaaccaaccgatttctgaagaacattttaataaattatatactaaagttttagaatacttaaaagaaaaagaagagttattcgtcttcaaaggatttgcaggcgcggaccgcaattaccgtctaccaatccaagttattaatgaatatgcatggcacaatttatttgtacatcaattattcattcgtccaactgaagaagaattaacgactcatgaatcagaattcacaattgtttctgcaccaaatttcaaagctgatccagctgttgacggtacaaactctgaagcattcattatggtttcattcgaaaaacgtatcgtactaattggtggtacagaatacgctggagaaatgaaaaaatcaatcttctctattatgaacttcttactacctgaacaagatattctttctatgcattgctctgcaaacgtaggtgaagaaggcgacgtagcactattcttcggtttatctggaacaggtaaaacaacattatctgctgatccaaaccgtaaattaatcggtgatgatgagcatggttggtctgataacggtgtattcaatattgaaggcggttgctacgcaaaatgtgtaaacctttctcacgagaaagaaccacaaattttcgatgcaatcacattcggatctgttttagaaaacgttatcattaatgaccaaacgcgtatcgcagactataacgatactactttaacagaaaatactcgtgctgcataccctatgcatgcgatcgataatatcgtattgccaagtgttgctggacatccaaatacaattattttcttaactgctgatgcatctggcgtattgcctccaatcagtaagttatcaaaagaacaagctatgtatcatttcttaagtggttacactagtaaactagcaggaacagagcgcggtgttacatctccgcaagcaacattctcaacttgcttcggttcaccattcttaccacttgatgcatctcgctatgctgaaatgcttggtgagaaaatcgagaaacacgatgcaaaagtattcttagtaaacactggctggactggtggcgaatacggcgttggtaaacgtatgaacttaggttacactcgtgcaatgattcaagcagcattaaacggtgaacttgcgaaaactgaaacagctaaacatgacatcttcggtcttgaagttccacttcacgtaccaggtgtacctgacgaagtgttaatgcctgaacaaacttgggctgataaagctgcttacaaagcaaaagcaattgaacttgcaaatgaattcaaagctaacttcaaaaagttcgacagcgtatctgaagacattattaacttaggcggtccaatcgcttaa

SEQ ID NO: 83037 - protein, 528 aa, Bacillus cereus
MSTVNVQIGLHELLNGSNAQIQLSVPQLVEKVLMRNEGKLTSTGAVSASTGKYTGRSPKDKFIVKEASVADKIAWGAVNQPISEEHFNKLYTKVLEYLKEKEELFVFKGFAGADRNYRLPIQVINEYAWHNLFVHQLFIRPTEEELTTHESEFTIVSAPNFKADPAVDGTNSEAFIMVSFEKRIVLIGGTEYAGEMKKSIFSIMNFLLPEQDILSMHCSANVGEEGDVALFFGLSGTGKTTLSADPNRKLIGDDEHGWSDNGVFNIEGGCYAKCVNLSHEKEPQIFDAITFGSVLENVIINDQTRIADYNDTTLTENTRAAYPMHAIDNIVLPSVAGHPNTIIFLTADASGVLPPISKLSKEQAMYHFLSGYTSKLAGTERGVTSPQATFSTCFGSPFLPLDASRYAEMLGEKIEKHDAKVFLVNTGWTGGEYGVGKRMNLGYTRAMIQAALNGELAKTETAKHDIFGLEVPLHVPGVPDEVLMPEQTWADKAAYKAKAIELANEFKANFKKFDSVSEDIINLGGPIA

SEQ ID NO: 83038 - DNA, 1608 bp, Bacteroides fragilis
  CDS (1)..(1608): transl_table=11
atggcaaatttagatttaagcaagtacggtattacaggtgtaactgaaatcctgcacaacccgtcttacgatgttttgttcgctgaagaaacaaaaccaggtctggaaggctttgaaaaaggtcaagtaacagaattgggtgctgtaaacgtaatgactggcgtttacacaggccgttctcctaaagataaattcttcgttaagaatgaagcttctgaaaattcagtatggtggacttctgaagaatacaagaacgacaacaaaccttgttcagaagaagcttgggctgacctgaaagctaaagccgttaaagaactttctaacaaacgcctgttcgttgttgatactttctgtggtgctaacgaaggtactcgcatgaaagtacgtttcatcatggaagtagcttggcaggcacacttcgtaactaacatgttcatccgcccgacagctgaagaacttgctaactacggagaacctgatttcgtatgcttcaacgcttctaaagcaaaagttgataactacaaagaactgggtctgaactcagaaactgctacagttttcaacctgaagactaaagaacaagttatcctgaatacttggtacggtggtgaaatgaagaaaggtatgttctcaatcatgaactacatgaacccgcttcgtggtatcgcttctatgcactgctctgctaacacagatatggaaggaactagctctgctatcttcttcggtttgtctggtacaggtaagactactttgtctactgacccgaaacgtaaattgatcggtgacgacgaacacggatgggacaacgaaggtgtattcaactacgaaggtggttgctacgctaaggttatcaacctggataaagaaagcgaaccggatatcttcaacgctatcaaacgtgacgctctgttggagaacgtaacagtagctgctgatggcaaaatcaatttcgctgacaaatcagtaacagaaaacactcgtgtttcttatcctatctaccacatcgaaaacatcgttaaaccggtgtctaaaggtcctcacgctaaacaagttatcttcttgtcagctgatgccttcggtgtattgcctccggtatctatcttgaacccggaacaagctcagtactacttcctgtctggatttacagctaaattggctggtacagaacgtggtatcactgaaccgactccgacattctctgcttgcttcggtgctgcattcttatcattgcacccaactaaatatgcagaagaattggttaagaagatggaaatgaccggtgctaaagcatacttggttaacactggatggaacggaagcggtaaacgtatttctatcaaagatactcgtggtatcatcgacgctatccttgacggttctatcgacaaagctcctactaaggttattcctttcttcgactttgttgttcctacagaacttccgggtgttgatccgaagatccttgatcctcgtgatacttacgctgatcctgcacagtggaatgaaaaagcaaaagaccttgccggtcgctttatcaagaacttcgctaagttcactggaaacgaagctggtaagaagttggttgctgctggtccgaaactctaa

SEQ ID NO: 83039 - protein, 535 aa, Bacteroides fragilis
MANLDLSKYGITGVTEILHNPSYDVLFAEETKPGLEGFEKGQVTELGAVNVMTGVYTGRSPKDKFFVKNEASENSVWWTSEEYKNDNKPCSEEAWADLKAKAVKELSNKRLFVVDTFCGANEGTRMKVRFIMEVAWQAHFVTNMFIRPTAEELANYGEPDFVCFNASKAKVDNYKELGLNSETATVFNLKTKEQVILNTWYGGEMKKGMFSIMNYMNPLRGIASMHCSANTDMEGTSSAIFFGLSGTGKTTLSTDPKRKLIGDDEHGWDNEGVFNYEGGCYAKVINLDKESEPDIFNAIKRDALLENVTVAADGKINFADKSVTENTRVSYPIYHIENIVKPVSKGPHAKQVIFLSADAFGVLPPVSILNPEQAQYYFLSGFTAKLAGTERGITEPTPTFSACFGAAFLSLHPTKYAEELVKKMEMTGAKAYLVNTGWNGSGKRISIKDTRGIIDAILDGSIDKAPTKVIPFFDFVVPTELPGVDPKILDPRDTYADPAQWNEKAKDLAGRFIKNFAKFTGNEAGKKLVAAGPKL

SEQ ID NO: 83040 - DNA, 1584 bp, Bacillus halodurans
  CDS (1)..(1584): transl_table=11
atgaatacgatatcaactacaacacgtcttgaacaattgctgggcgaccagcacgtcttaaaaaatgcaccagcttctactttagtggagaaatcattgcttcgtggcgaaggaaggctgactgatactggtgcgttaacagtagctacaggggcttatacaggacgctcaccaaaagataaatttatcgtggatgagacttctgtccatgaaaaaatcgaatggggacaagtcaaccaagccattgaaaaggaaacgtttctacatttatacgaaaaagttcttacgtacttagctgataaagatgaattgtttgaatttcgcggttttgcaggggctgacaagacgtatcgtcttccccttcaagtcgtaaacgaatttgcatggcacaatttattcgctcaacagctgttcattcagccaacaactgaagagttaacgcaacatacacctgagtttacaatcgtctcagcgccaggttttaaagctgatccgtcggtagatggcacacgatcggaagcatttgtgatcatctcgtttgaagagcgtatcgtccttattggtggaacggaatacgcaggagaaatgaaaaagtcgattttttctgttatgaactacctccttccagagcaagatgtcttatcgatgcattgttcagccaatgttggggtagaaggtgatgtcgctctatttttcgggttgtcgggtacaggaaaaacaaccctatcagctgatccaaaccgcaaactcatcggtgatgatgagcatggctggtcggagcgtggcgtttttaacattgaaggcggctgctacgccaaatgtgttaacctatcctacgaaaaagaaccgcaaatttggaatgcgatccgctttggctccgttcttgaaaatgtcatcgttgacgaaaaaacagggctaccggattacaacgatacatcgttaaccgaaaatacacgggcagcttattctcttgaagcgattccaaacagtgtgatcccaagcgtcgcaggtcatccgaacacgattatttttttgacggctgatgcctttggcgtgctgcctccaataagcaaacttactcctgaacaagcgatgtaccatttcttatcaggatacacgagcaagcttgctggaacggaacgaggggtcacgtcacctgaagcgacattctccacttgctttggcgcaccgtttttaccattaccagcagctcgatatgcggagatgctaggggagaaaatagcccaatacgaagttcaagtgttcctcgtcaataccggttggtcaggaggaccttacggtgtcggtcaacgcatgaagctcagctacacacgggcgatggttcaagcagctcttcaaggggaattaaatacggttgaaacgatcaccgattcggtatttggcctgcatatcccaacgcgttgtcccggggtaccagactttgtcctccagcctcgaaacacatgggacgacaaagaaaagtatgacaaaaaagcacaggagctcgcaaagcaatttatcgaaaattttaaacggttcacgaacgtaagtgaagcgattcaaaaagcaggaccaagtatttag

SEQ ID NO: 83041 - protein, 527 aa, Bacillus halodurans
MNTISTTTRLEQLLGDQHVLKNAPASTLVEKSLLRGEGRLTDTGALTVATGAYTGRSPKDKFIVDETSVHEKIEWGQVNQAIEKETFLHLYEKVLTYLADKDELFEFRGFAGADKTYRLPLQVVNEFAWHNLFAQQLFIQPTTEELTQHTPEFTIVSAPGFKADPSVDGTRSEAFVIISFEERIVLIGGTEYAGEMKKSIFSVMNYLLPEQDVLSMHCSANVGVEGDVALFFGLSGTGKTTLSADPNRKLIGDDEHGWSERGVFNIEGGCYAKCVNLSYEKEPQIWNAIRFGSVLENVIVDEKTGLPDYNDTSLTENTRAAYSLEAIPNSVIPSVAGHPNTIIFLTADAFGVLPPISKLTPEQAMYHFLSGYTSKLAGTERGVTSPEATFSTCFGAPFLPLPAARYAEMLGEKIAQYEVQVFLVNTGWSGGPYGVGQRMKLSYTRAMVQAALQGELNTVETITDSVFGLHIPTRCPGVPDFVLQPRNTWDDKEKYDKKAQELAKQFIENFKRFTNVSEAIQKAGPSI

SEQ ID NO: 83042 - DNA, 1584 bp, Bacillus licheniformis
  CDS (1)..(1584): transl_table=11
atgaattctgtagatttaacaactgacttacaaacgctattaacgggcgaaaacgttcagatgaacttatccgttccccatttggttgaaaagatccttgagcgcaaagaaggagtcttgacatcttccggagccgtgcgggcaacaaccggtacatacaccggccgctcgccaaaagacaaattcattgtggaagaagcgagcacaaaggacaaaatcgattggggcgcagtaaaccagccgatttcagaagccgcctttgaccggctgtacgcaaaagtgctcggctatttaaaggaacgcgatgaattgtatgtatttgaagggtttgcaggagcagacgaaaaataccggcttccgattactgttgtcaacgagttcgcctggcacaacctgtttgcaagacagttgttcatcagacctgaagaacatgataaaaaacctgaagaacagccgtttacgattctttcagctccgcatttcaaagccgatccgctcgttgacggaaccagatctgaaacgtttatcatcgtgtcgtttgagaagcggacgatcttaatcggaggcaccgaatatgccggagagatgaaaaaatcgattttttctattatgaattttcttctgcctgaacaaaacattctaccgatgcactgttcggcaaacattggcgaggaaggcggaactgctctcttcttcggattgtcaggtacaggcaaaacgacgctttccgccgatccgaagcggaagctgatcggcgacgacgaacacggctggtccagcacaggcgttttcaacattgaaggaggctgctacgccaaatgcattaacttaagcgaagaaaaagaaccgcagatttacaatgcgatccgcttcggttccgttctcgaaaatgtcgtggttgacagcaaaaccggagagccggactattccgactcattctacacggaaaacactagagcggcttacccgattgacgcgattgacaacatcgtcaagccgagcatcgcagcgcacccgcagaccatcgtatttttgaccgcagatgctttcggcgtgcttcctccgatcagcaagttaacgaaagaacaagccatgtatcatttcctgagcggatatacaagcaagctcgccggcaccgaacgcgggatcaccactcctgaagccacattctcgacctgcttcggttcaccgttcctcccgcttccggcacatgtgtacgctgaaatgctcggaagaaaaatcgatgagcacggggtcggcgtctttctcgtcaatacaggctggaccggcggcggatacggaaccggggaaagaatgagcctcgcatatacgagagcgatggttcaggccgcaatagaaggagaactggataaagccgaaatgaggactgaccgcattttcggacttcattcacctgtccacgttccgggtgtgcctgatcaagtgcttgacccggccaaaacttggacagatgaaaacgaatacgaggaaaaagcgatccacctggcgaaagcattcaaacagaatttcaaaaagttctccaatacggaaaacatcgaaaaagccggaggaccgctcgtttaa

SEQ ID NO: 83043 - protein, 527 aa, Bacillus licheniformis
MNSVDLTTDLQTLLTGENVQMNLSVPHLVEKILERKEGVLTSSGAVRATTGTYTGRSPKDKFIVEEASTKDKIDWGAVNQPISEAAFDRLYAKVLGYLKERDELYVFEGFAGADEKYRLPITVVNEFAWHNLFARQLFIRPEEHDKKPEEQPFTILSAPHFKADPLVDGTRSETFIIVSFEKRTILIGGTEYAGEMKKSIFSIMNFLLPEQNILPMHCSANIGEEGGTALFFGLSGTGKTTLSADPKRKLIGDDEHGWSSTGVFNIEGGCYAKCINLSEEKEPQIYNAIRFGSVLENVVVDSKTGEPDYSDSFYTENTRAAYPIDAIDNIVKPSIAAHPQTIVFLTADAFGVLPPISKLTKEQAMYHFLSGYTSKLAGTERGITTPEATFSTCFGSPFLPLPAHVYAEMLGRKIDEHGVGVFLVNTGWTGGGYGTGERMSLAYTRAMVQAAIEGELDKAEMRTDRIFGLHSPVHVPGVPDQVLDPAKTWTDENEYEEKAIHLAKAFKQNFKKFSNTENIEKAGGPLV

SEQ ID NO: 83044 - DNA, 1584 bp, Bacillus clausii
  CDS (1)..(1584): transl_table=11
atgaaaatgcttcaccgttcagctttactagaacaattgctttcaagccctaaaacgttgcaccaattgcccgcttcgacactcgtcgagcatgcactccaacgaaatgaaggcatattgaccgattctggcgcacttgctgtcaaaacaggcctttacacaggccgctcgcctcaagacaagtttattgtcgatgaaccaatgtctagagattccatccattggggcgcaacgaataagcccatttcatcggaagtgttcacccggctaaaagacaaagtgctacattatttgcaacaaaaagaggtccgttacgcatccgttggcttcgctggcgctgatccttctttccaactgccgattacgtatttaaatgagtttgcttggcatcacttgtttgctagacagctatttattcgtgagcaagctccttcaaacaatggtttggaaccatttacgatcattagcgcaccgacgtttaaagccgatccatccgtcgacggcactcgctcagaagcgtttgtcatcatctcatttgagcaacgcattattttaattggcggtacggaatatgccggtgaaatgaaaaaagcgatcttttccgtgatgaattacttgctccctgaagcaggcgtgctgccaatgcactgctcagccaacacaaccgatgaaggagaaacggcactcttttttggcctctcaggtaccggcaaaacgacactgtcggcttccgaacataggcgcctaatcggcgatgacgagcacggctggtcagaaaaaggcatctttaacattgaaggaggctgctacgccaaatgcatcggcctttcaaaagaaagcgaaccacaaatttgggacgctattgctttcggggcagtccttgaaaatgtcgtcgtcgatccaaacacgggcaaacctgactttaaaagcggtgagttgacggaaaatacgcgggctgcctacccgcttgaagcgattccaaatgctttgctgcctagtgttgccgggcctccaaaagcgataatattcttgactgctgatgcatttggcgtattgccgcccattagcaagttgacaaaagaacaagcaatgtaccattttctatctggttacacaagcaaactagcaggaacggaacgaggcatcacgcaacctgaggcgacattttctacttgctttggcgctccgtttttgccacgcaaaccagaagagtacgctactatgcttggggacaaattggaaaatgacgacgtccaagtgtttcttgtaaacacaggctggacagggggtagctatggaactggcacacgcattaagcttgcttatacacgtgccatggtagaagcggctttacaaggaaaattggatgagattgaaacagtgtgcgatcccatttttggcctttatgtcccaacacactgcccaggagtccctgatgagctgttgacccctcgacgtgtttggaaggacgaagcagcttacgaggcaaccgccttacagcttgctaagcaattccacgaaaatttttctgcctttccggcagcaaaagacagcgtccgtcttgctggaccacgccttgcataa

SEQ ID NO: 83045 - protein, 527 aa, Bacillus clausii
MKMLHRSALLEQLLSSPKTLHQLPASTLVEHALQRNEGILTDSGALAVKTGLYTGRSPQDKFIVDEPMSRDSIHWGATNKPISSEVFTRLKDKVLHYLQQKEVRYASVGFAGADPSFQLPITYLNEFAWHHLFARQLFIREQAPSNNGLEPFTIISAPTFKADPSVDGTRSEAFVIISFEQRIILIGGTEYAGEMKKAIFSVMNYLLPEAGVLPMHCSANTTDEGETALFFGLSGTGKTTLSASEHRRLIGDDEHGWSEKGIFNIEGGCYAKCIGLSKESEPQIWDAIAFGAVLENVVVDPNTGKPDFKSGELTENTRAAYPLEAIPNALLPSVAGPPKAIIFLTADAFGVLPPISKLTKEQAMYHFLSGYTSKLAGTERGITQPEATFSTCFGAPFLPRKPEEYATMLGDKLENDDVQVFLVNTGWTGGSYGTGTRIKLAYTRAMVEAALQGKLDEIETVCDPIFGLYVPTHCPGVPDELLTPRRVWKDEAAYEATALQLAKQFHENFSAFPAAKDSVRLAGPRLA

SEQ ID NO: 83046 - DNA, 1608 bp, Bacteroides thetaiotaomicron
  CDS (1)..(1608): transl_table=11
atggcaaatttagatttaagcaagtacggtatcacaggtgtgaccgagattgtgcacaatccgtcttatgacgttttgttcgctgaagaaacaaaaccaggtttggaaggttttgaaaaaggccaggtaactaacatgggcgctgtaaacgtaatgactggcgtttatacaggacgttctcctaaagataaattcttcgtaaaagacgaaaccagcgaaaatacagtatggtggacttctgaagaatacaaaaacgacaacaaaccagttgacgctaaatgttgggcagctgtgaaagatttggcaactaaagaactttctaacaaaagactgttcgttgttgacgctttctgcggagctaacgaaaactctcgcttgaaactgcgcttcatcatggaagtggcatggcaagctcacttcgtaacaaacatgttcatccgtccgacagctgaagaactggctaacttcggtgaacctgatttcgttatcatgaacgcttctaaagctaaagttgaaaactacaaagaactgggcttgaactcggaaactgcagttgtattcaacttgactgaaaagatccaggttatcctgaatacttggtacggtggtgaaatgaagaaaggtatgttctcttacatgaactacttattgcctttgaacggtatggcttctatgcactgctctgctaacactgataaagaaggcaagagctcagctatcttcttcggtctgtcaggtacaggtaagactactttgtctactgacccgaaacgtttgttgatcggtgatgacgaacacggatgggatgacgaaggtgtattcaacttcgaaggtggttgctacgctaaagttatcaacttggataaagaaagcgaaccggacatctggaatgctatcaaacgcgatgctttgttggaaaactgtacagttaacgctgaaggcgaaatcaacttcgctgacaagtcagtaactgaaaacactcgtgtttcttatcctatctatcacatcgaaaacatcgttaaaccggtgtctaaaggtcctcatgctaaacaagttatcttcttgtcagctgacgcattcggtgtattgcctccggtatctatcctgaacgcagaacaaactaaatattacttcttgtctggttttacagctaaattggctggtacagaacgtggtatcactgaaccgactccgacattctcggcttgtttcggtgctgctttcttgtcactgcacccaactaaatacggtgaagaactggtgaagaagatggaaaaaactggtgctaaggcatacttggttaacactggttggaatggtactggcaaacgtatctctatcaaagatactcgtggtatcatcgacgctatccttgacggttctatcgacaaagctcctactaaggttatgccttacttcgactttgttgttcctacagaacttccgggtgttgatccgaagatccttgacccacgcgacacttacgaatgtgcttgccaatgggaagaaaaagcaaaagatttggctggacgtttcatcaagaacttcgctaaatttacaggtaacgaagctggtaaggctttagttgctgctggtccgaaactctaa

SEQ ID NO: 83047 - protein, 535 aa, Bacteroides thetaiotaomicron
MANLDLSKYGITGVTEIVHNPSYDVLFAEETKPGLEGFEKGQVTNMGAVNVMTGVYTGRSPKDKFFVKDETSENTVWWTSEEYKNDNKPVDAKCWAAVKDLATKELSNKRLFVVDAFCGANENSRLKLRFIMEVAWQAHFVTNMFIRPTAEELANFGEPDFVIMNASKAKVENYKELGLNSETAVVFNLTEKIQVILNTWYGGEMKKGMFSYMNYLLPLNGMASMHCSANTDKEGKSSAIFFGLSGTGKTTLSTDPKRLLIGDDEHGWDDEGVFNFEGGCYAKVINLDKESEPDIWNAIKRDALLENCTVNAEGEINFADKSVTENTRVSYPIYHIENIVKPVSKGPHAKQVIFLSADAFGVLPPVSILNAEQTKYYFLSGFTAKLAGTERGITEPTPTFSACFGAAFLSLHPTKYGEELVKKMEKTGAKAYLVNTGWNGTGKRISIKDTRGIIDAILDGSIDKAPTKVMPYFDFVVPTELPGVDPKILDPRDTYECACQWEEKAKDLAGRFIKNFAKFTGNEAGKALVAAGPKL

SEQ ID NO: 83048 - DNA, 1611 bp, Brucella suis
  CDS (1)..(1611): transl_table=11
atgaaagagaccggcatccacaataaggccgcttcgatttccacttcgggactgaaggaactctccgcagtcttctacaatctcgggccggcacggctttatgaagagaccattcgccggggcgaagcggagctttccgcgcagggcgcgctcgttgcccgtaccggccagcacacgggccgttcgccgaaagacaagttcgtcgtgcgcgacgccaataccgaagatcatgtgtggtgggacaacaacaagcccatgacgccggaagcttttgagcttctctatgccgatttcatcgaacatgcgaagggcagggagcttttcgttcaggatctcatcggcggcgcggatgccgacaacaagatcaacgcccgcgtcatcaccgaatatgcttggcattcgctgttcatccgcaatctgctgatccgtccgtcgcaggaagcccttgcttcctacgtgccggaaatgaccatcatcgacctgccgtccttcaaggctgacccggaacgctatggcgtgcgcaccgaaacggtgatcgcggtcgatcttacccgcaagatcgtgctgatcggcggcacgtcctatgcgggcgagatgaagaagtccgtcttcaccgcgctcaactatatcctgcctgccaagggcgttatgccgatgcactgctcggccaatgaaggcccgaacggcgacacggcggttttcttcggtctttcgggcaccggcaagaccacgctttccgccgatccgacgcgcacgctgatcggtgacgacgaacatggctggggcgaacatggcgtcttcaattttgaaggcggctgctatgccaagaccatccgtctttccgccgaagcagaaccggaaatctatgccacgacgcaacgtttcggcacggttctggaaaatgtcgtgctggacgagaatcgccagccggatttcgacgatggttcgctgacggaaaacacgcgctgcgcctatccgctggatttcatccccaacgcctcgaaatcgggcaagggcggccagccgaagaatatcatcatgctcaccgccgatgccttcggcgtgatgccgcccatcgccaagctgacgccggcgcaggccatgtatcacttcctgtccggctataccgccaaggtggcaggcacggaaaagggcgtgacggaaccggaggcaaccttctccacctgcttcggtgcgcctttcatgccgcgccatccttcggaatatggcaacctgttgcgcaagctgattgccgagcacaaggttgattgctggctggtcaataccggctggacgggcggcgcttacggcgttggcaagcggatgccgatcaaggcaacccgcgcgcttctggcagcggccctcgacggctcgctgaacaatgctgaattccgcatcgatccgaatttcggcttcgccgtccctgtcgaagtgccgggtgtggaaagctccattctcgatccgcgctcgacctgggccgacaaagttgcctatgacgcccaggccaagaagctggtcgacatgttcgtttccaacttcgagaagtttgaaagccacgtcgaccacgaggtcaaggatgccgcaccggcgatccgcatggctgctgaatag

SEQ ID NO: 83049 - protein, 536 aa, Brucella suis
MKETGIHNKAASISTSGLKELSAVFYNLGPARLYEETIRRGEAELSAQGALVARTGQHTGRSPKDKFVVRDANTEDHVWWDNNKPMTPEAFELLYADFIEHAKGRELFVQDLIGGADADNKINARVITEYAWHSLFIRNLLIRPSQEALASYVPEMTIIDLPSFKADPERYGVRTETVIAVDLTRKIVLIGGTSYAGEMKKSVFTALNYILPAKGVMPMHCSANEGPNGDTAVFFGLSGTGKTTLSADPTRTLIGDDEHGWGEHGVFNFEGGCYAKTIRLSAEAEPEIYATTQRFGTVLENVVLDENRQPDFDDGSLTENTRCAYPLDFIPNASKSGKGGQPKNIIMLTADAFGVMPPIAKLTPAQAMYHFLSGYTAKVAGTEKGVTEPEATFSTCFGAPFMPRHPSEYGNLLRKLIAEHKVDCWLVNTGWTGGAYGVGKRMPIKATRALLAAALDGSLNNAEFRIDPNFGFAVPVEVPGVESSILDPRSTWADKVAYDAQAKKLVDMFVSNFEKFESHVDHEVKDAAPAIRMAAE

SEQ ID NO: 83050 - DNA, 1575 bp, Campylobacter jejuni
  CDS (1)..(1575): transl_table=11
atgaaaaaatttgataagttaggtttggataatataaaggaaatttttcataatttaagttatgatgaattaaatgctcatgaaaaagcaaataatgaaggtttaagcacggataatgatactttttgtgtagatacagggatttttacaggtagaagtcctaaagataaatattttgtaaaacaagatccatctagtaaatatatagcttggggaaaggtaaatcagcctattacaaaagaattatttgataaacttttaactaaagcaaagcaagaattaagcggaaagaaaatttatgttcaagatgttttttgcggtgcttctttgcaaagtcgcaaagcagtaagatttgttactgaaattgcatggcaagcacattttgttaaaaatatgtttattcgcccaagtcaagaggaacttgagaattttaaagcagattttattgtttataatgcttgcaaatgcatcaatgaagattacaaacaagatggtttaaattcagaggtttttgtgatctttaatgttgaagaaaatatagcggttattggtggaacttggtatggtggagaaatgaaaaaaggtattttttctatgatgaattattggttgccactagaaaataaactttctatgcattgtagtgcaaatgtcggagaaaaagacgatgtggcacttttctttggacttagcggtacaggaaaaactacgctttcaaccgatccaaaaagaagactcataggtgatgatgagcatggctgggatgatgaaggtgtgtttaattttgagggcggttgctatgcaaaaacaatcaatcttaatcctgaacatgagcctgaaatttatggagccattaaaagaaatgcacttttagaaaatgtagttttaagagctgataagagtgttgattatgctgatgcctcaaaaacagaaaacacgagagtttcttatcctatagagcatattgaaaatcatgagcctagtctaaaagcagggcatccaaaaaatattatatttttaagtgcagatgcttttggaattttacccccggtgagcaaactaagcaaagagcaggctatgtattattttttaagtggctatacagcaaaagtagctggaactgagcgcggtataacagagcctcaagcaactttttcagcttgttttggagaaccttttatgcctttacatccaacggtttatgcgagattgcttggtgaaaagattgaaaaacatgaagttaatgtttatcttgttaatacgggttggagtggcggaagctacagtgtgggtaaaagaatgagcattaaggctactagggcttgcattaatgctattctagatggaagtattacaaaatgcgaatttgaaaattttgaagtgtttgatttagctattccaaaagctttagaaggtgtagaaagtgtacttttaaatcctataaatacttggttagataaaaatgcttatattgcaacaagagataaattagcacatatgtttatacaaaattttaaacgttatgaagatgtcaaagaaggcattgaatttagcaaatttggaccaaaaatttaa

SEQ ID NO: 83051 - protein, 524 aa, Campylobacter jejuni
MKKFDKLGLDNIKEIFHNLSYDELNAHEKANNEGLSTDNDTFCVDTGIFTGRSPKDKYFVKQDPSSKYIAWGKVNQPITKELFDKLLTKAKQELSGKKIYVQDVFCGASLQSRKAVRFVTEIAWQAHFVKNMFIRPSQEELENFKADFIVYNACKCINEDYKQDGLNSEVFVIFNVEENIAVIGGTWYGGEMKKGIFSMMNYWLPLENKLSMHCSANVGEKDDVALFFGLSGTGKTTLSTDPKRRLIGDDEHGWDDEGVFNFEGGCYAKTINLNPEHEPEIYGAIKRNALLENVVLRADKSVDYADASKTENTRVSYPIEHIENHEPSLKAGHPKNIIFLSADAFGILPPVSKLSKEQAMYYFLSGYTAKVAGTERGITEPQATFSACFGEPFMPLHPTVYARLLGEKIEKHEVNVYLVNTGWSGGSYSVGKRMSIKATRACINAILDGSITKCEFENFEVFDLAIPKALEGVESVLLNPINTWLDKNAYIATRDKLAHMFIQNFKRYEDVKEGIEFSKFGPKI

SEQ ID NO: 83052 - DNA, 1662 bp, Candida albicans
  CDS (1)..(1662): transl_table=12
  misc_feature (969)..(969): v is a, g or c
  misc_feature (970)..(970): v is a, g or c
  misc_feature (971)..(971): v is a, g or c
atggctcctcctactgctgttggatcttcaatcaatttcgaaggtcacccaactatcaaatccactcaagacccattggtccaaaagttgtctcttaataccgacactgtgatcagacacaatgctccacctccaaccttatacgaagatggtttattagaaaaaggtactactatctcatctactggtgctttaatggcttactctggtaacaaaaccggtagatctccaaaagacaagagaattgtcgacgaatccacctcatcccataacatttggtggggtccagtgaataaacaagttggcgaattaacttgggagatttctagatcaagagctttggattacttgagaactagagaaaagttgtttgttgttgacgcttatgctggttgggatccaagctacagaatcaaggtgagaattatctgtgctagagcttaccatgctttgttcatgaccaatatgttgatcagaccaactgaagaagaattaaaaaactttggtgaaccagatttcaccatctacaatgctggtcaattcccagccaacatccacactaaaggtatgacttctgccacttctgttgaaatcaactttaaagatatggaaatggttatcttgggtactgaatatgctggtgaaatgaagaaaggtatctttactgttatgttctacttgatgccaatcaaacacaaggttttgactttgcactcctcatgtaaccaaggggttgaaaaaggtgatgtcactttgttctttggtctttctggtactggtaagaccactttgtctgctgatccacaaagaaagttgattggtgatgacgaacattgttggtccgacaatggtgtgttcaacattgaaggtggttgttacgccaaatgtttggacttgtctgctgaaaaagaaccagaaattttcaactccatcaagtttggtgctattttggaaaatgttgtctacgavvvaatcaccaaggttgttgactacggagattcatcaatcactgaaaacactagatgtgcatacccaattgatttcattccatctgccaagattccatgtttgccgacacccatcccccaatattatttgttaacatgtgatgcttccggtgtgttggcaacagtctccaaattgactaatgctcaagttatgtatcatttcatttctgggtacacctccaagatggcaggttctgaagaaggtgttactgaaccacacgctacattctccgcatgtttcggtcaaccattcttggtgttgcacccaatgaaatatgctcaacaattggctgacaagatttccgaacacaatgccaacgcttggttgttgaacactggttgggttggttcttctgttgctcaaggtggtggtaagagatgtccattgaaatacaccagagctatcttggatgctatccactctggtgaattgtctaaagtcgaatacgaaaaagttccagttttcaaccttaatgttccaacttcttgtcctggtgttccaagtgaaattttgaacccaactaaagcttggactcaaggtactgattcattcaacaaggaaatcaaatctcttgctaccaagtttgctgaaaacttcaagacatacgctgatcaagctactgctgaagttaaagctgctggtccagaagcataa

SEQ ID NO: 83053 - protein, 553 aa, Candida albicans
  misc_feature (323)..(323): The Xaa at location 323 stands for Asp, or Glu.
  misc_feature (324)..(324): The Xaa at location 324 stands for Ala, Arg, Gln, Glu, Gly, Lys, Pro, or Thr.
MAPPTAVGSSINFEGHPTIKSTQDPLVQKLSLNTDTVIRHNAPPPTLYEDGLLEKGTTISSTGALMAYSGNKTGRSPKDKRIVDESTSSHNIWWGPVNKQVGELTWEISRSRALDYLRTREKLFVVDAYAGWDPSYRIKVRIICARAYHALFMTNMLIRPTEEELKNFGEPDFTIYNAGQFPANIHTKGMTSATSVEINFKDMEMVILGTEYAGEMKKGIFTVMFYLMPIKHKVLTLHSSCNQGVEKGDVTLFFGLSGTGKTTLSADPQRKLIGDDEHCWSDNGVFNIEGGCYAKCLDLSAEKEPEIFNSIKFGAILENVVYXXITKVVDYGDSSITENTRCAYPIDFIPSAKIPCLPTPIPQYYLLTCDASGVLATVSKLTNAQVMYHFISGYTSKMAGSEEGVTEPHATFSACFGQPFLVLHPMKYAQQLADKISEHNANAWLLNTGWVGSSVAQGGGKRCPLKYTRAILDAIHSGELSKVEYEKVPVFNLNVPTSCPGVPSEILNPTKAWTQGTDSFNKEIKSLATKFAENFKTYADQATAEVKAAGPEA

SEQ ID NO: 83054 - DNA, 1635 bp, Candida glabrata
  CDS (1)..(1635)
atgccatctaaatctagtgtttctgggaactccgttgaggagaggattagatccgagttgggattgtccaaggaagttactctaattagaaggaacgctccagctgctgtgttataccaggatgctctaaaggaaaagaagacggtgatctccagcgcaggtgccttgatcgcttactctggtgagaagaccggccgttctccaaaggacaagcgtatcgttgaagaagaaacctcccgtgacaacgtgtggtggggaccagttaacaagccatgctcggagagaacctgggccattaaccgtgaaagagctgctgattacttgagaaccagagagactttgtacgtggtggatgcctttgctggctgggatccaaaatacagaatcaaagtgcgtgttgtctgcgcaagagcttaccacgctttgttcatgaccaacatgctgatcagacctacagaagaagaattggccaacttcggtgagccagacttcactgtatggaacgctggccaattccccgccaatgcaagaacccaagatatgacctcaaagaccaccattgaaattaacttcaaggccatggaaatggtcatcctaggtaccgaatacgctggtgaaatgaagaaaggtatcttcacagttatgttctacttgatgcctgtccaccacaacgtgctaactttgcactcttcttgtaaccaaggtatcaagaacggtgacgttacattgttcttcggtctatcaggtaccggtaaaactactttgtccgccgaccctcacagattgttgatcggtgacgacgaacattgttggtccgacgaaggtgtcttcaacatcgaaggtggttgttacgctaagtgtattaacttgtccagagagaaggaaccagagattttcgatgccatcagattcggctctgtgctagaaaacgtcatttacgacagcgagagtcatgaagttgactacgatgactcaagcatcaccgaaaacaccagatgtgcctacccaattgacttcatcccatccgccaagatcccatgtctagcaccagctcatccaaagaacatcattctattgacctgtgatgcttccggtgtcttgccaccagtctctaagctaaccccagaacaagtcatgtaccacttcatctccggttacacttctaagatggctggcactgaacaaggcgtcaccgaaccagaaccaaccttctcttcttgtttcggtcaaccattcttgtctttgcacccaatgagatacgccacaatgttggctgaaaagatgcacgagcatagcgctaacgcttggttgattaacaccggctggactggttcctcttacgtttccggcggtaagcgttgtgctttgaaatacactagagctatcttggatgccattcacgatggctccttggctaaggctgaattcgaatccttaccaatcttcaacttgcaagttccaaaggccgttgaaggtgttccatccgagcttctaaacccagccagaaactggtctgaaggtgaggctaagtaccaatctgcagtttccaagctagctggtctgtttgttgaaaacttcaagacttaccaagacaaggccacttccgatgtcttggctgctggtccacaattgtaa

SEQ ID NO: 83055 - protein, 544 aa, Candida glabrata
MPSKSSVSGNSVEERIRSELGLSKEVTLIRRNAPAAVLYQDALKEKKTVISSAGALIAYSGEKTGRSPKDKRIVEEETSRDNVWWGPVNKPCSERTWAINRERAADYLRTRETLYVVDAFAGWDPKYRIKVRVVCARAYHALFMTNMLIRPTEEELANFGEPDFTVWNAGQFPANARTQDMTSKTTIEINFKAMEMVILGTEYAGEMKKGIFTVMFYLMPVHHNVLTLHSSCNQGIKNGDVTLFFGLSGTGKTTLSADPHRLLIGDDEHCWSDEGVFNIEGGCYAKCINLSREKEPEIFDAIRFGSVLENVIYDSESHEVDYDDSSITENTRCAYPIDFIPSAKIPCLAPAHPKNIILLTCDASGVLPPVSKLTPEQVMYHFISGYTSKMAGTEQGVTEPEPTFSSCFGQPFLSLHPMRYATMLAEKMHEHSANAWLINTGWTGSSYVSGGKRCALKYTRAILDAIHDGSLAKAEFESLPIFNLQVPKAVEGVPSELLNPARNWSEGEAKYQSAVSKLAGLFVENFKTYQDKATSDVLAAGPQL

SEQ ID NO: 83056 - DNA, 1611 bp, Colwellia psychrerythraea
  CDS (1)..(1611): transl_table=11
atgaccgccccgaaaaactcaattgatttgtcacaatacggcatcgacgatgttaacgaagttgtttataacccatcgtatgagttactttttagtgaagaaactaaagctggccttgagggctttgataaaggcatagtaactgagcttggtgcagttaatgtagacacggggatatttaccggtcgctctcctaaagataagtatattgttcgcgatgatgtaactcgcgatacagtatggtggtctgatcaaggtaaaaatgataataaggctatgactcctgaaacatgggatcacttaaaaggcttagtaactacacaactttctggccaacgtttatttgttgttgatactttttgtggtgctgatgaagcaacacgtttaaaagtacgtttcattacacaagtagcttggcaagcacatttcgttaaaaacatgttcattcgtcctaccgatgcagaacttgaaaattacgaacccgatttcgtggtaatgaatggtgcgaaaacagttaatgataaatgggaagagcaaggtttaaactcagagaactttgttgctttcaacttaactgaaaaaattcaattgattggcggtacttggtacggcggcgagatgaaaaaaggtatgttctcaatgatgaactactaccttccattacaaggcattgcttcaatgcattgtagtgcaaacgttggtgaagatggtgacactgctatcttcttcggtttgtctggcacaggtaaaacaacactttctaccgatcctaaacgtcaacttatcggtgatgatgaacacggttgggatgacaatggagtatttaactttgaaggtggctgttacgctaaaacaatcaacctaagcaaagaaaacgaacctgatatttacaatgccattcgtcgtgacgctttactagaaaacgttacggttgatgcaaatggtaaaatcgattttgatgataattcaaaaacagaaaacacacgtgtttcttacccaattcatcatattgataacattgttaagcctgtttcacgtgctggtcatgctaaaaaagttatcttcttaacggctgatgcttttggtgttttaccacccgtagctaaattaacaccagaacaaacagaatattactttctttcaggttttaccgctaaattagcaggtactgaacgtggtattactgaaccaacaccaactttctcaagttgttttggagcagcgttcttaagcttacaccctacgcaatatgctgaagttttacataagcgtatggatgatgctggcgctgaagcttaccttgtaaacactggctggaatggtactggcaaacgaatttctatcaaagcaacgcgtgctattattgatgcaatcttagatggttcaattgacaatgctgaaactgaaaccgtaccgtttttcaacttagaagtacctaaagtaattgctggcgttgagggagatatccttgatcctcgtaatacttatgaagatccaagtgtttggaatgataaagcggtagacttagcgaaacgttttgttaataactttgataagtttacagatactgataacggtaaagcgcttgttgctgctggtcctcagttataa

SEQ ID NO: 83057 - protein, 536 aa, Colwellia psychrerythraea
MTAPKNSIDLSQYGIDDVNEVVYNPSYELLFSEETKAGLEGFDKGIVTELGAVNVDTGIFTGRSPKDKYIVRDDVTRDTVWWSDQGKNDNKAMTPETWDHLKGLVTTQLSGQRLFVVDTFCGADEATRLKVRFITQVAWQAHFVKNMFIRPTDAELENYEPDFVVMNGAKTVNDKWEEQGLNSENFVAFNLTEKIQLIGGTWYGGEMKKGMFSMMNYYLPLQGIASMHCSANVGEDGDTAIFFGLSGTGKTTLSTDPKRQLIGDDEHGWDDNGVFNFEGGCYAKTINLSKENEPDIYNAIRRDALLENVTVDANGKIDFDDNSKTENTRVSYPIHHIDNIVKPVSRAGHAKKVIFLTADAFGVLPPVAKLTPEQTEYYFLSGFTAKLAGTERGITEPTPTFSSCFGAAFLSLHPTQYAEVLHKRMDDAGAEAYLVNTGWNGTGKRISIKATRAIIDAILDGSIDNAETETVPFFNLEVPKVIAGVEGDILDPRNTYEDPSVWNDKAVDLAKRFVNNFDKFTDTDNGKALVAAGPQL

SEQ ID NO: 83058 - DNA, 1554 bp, Coxiella burnetii
  CDS (1)..(1554): transl_table=11
atggagcaaattgctgcgcgagttacctatattaacctttctcctgatgagttgattcaacacgccgtaaaaaatggcgagggcgtattaagttccaccggtgctttagcggttactactgggaaacgcacgggtcgatcgccgaaagatcgttttattgtcaaagatgagcaaaccgccgatcaagtggcgtggggcaatatcaatcagcctgttgagcaacgcacctttgaccagttgtgggagcgagcgctgcggtatctttctgaacgtgctgtttatatttcgcatttgcaagtaggggcggatgataattattttctgccacttaaggtggtcaccgagtttgcgtggcacaatttatttgcgtgtgatctttttatccgtccttctggtgatcatgcgaatgggaaaccgtcctgggttattttaagtgcccccgggctgaaaactgatcctgagcgagacggcgtgaatagtgatggtgcggtaatgattaatttatcacagcgccgtgtgttattggtgggcatgccctatgcgggtgaaatgaaaaaagccatgttttccgtgctgaattatcttttgccgccgcacgatgttttaccgatgcattgcgccgctaatgctggccagtcgggcgatgttgcactatttttcggattatcaggaacgggtaagaccaccttgtcggctgaccctcatcgatttttaatcggtgacgacgaacacggttggagcgccacaagcgtttttaattttgagggcgggtgttatgccaagtgcattgatttgtcacaagaacgagagcccatgatttggaatgcgattcggcacggcgctattatggaaaatgtggttttagatgagaatggcgttcccgattatgcggatgcgcggctaacccaaaattcgcgtgccgcttatccgcgcgagtatattccgttgcgggtggaaaataatagagggcgcccccccgatgccgtcttatttctaacttgcgatctcgatggtgttttgccgcccgtggcactgctcacgaaagaacaagcggcttattattttttaagcgggtataccgctttagtgggcagcacggaagtgggcagcgtaaagggcgtcacctccaccttcagtacttgctttggcgcacccttttttccacgccctccgactgtctatgctgaattattaatgaaacgtattgaagcaacgggctgtcaagtttacctcgttaatactggctggacagggggcgcttatggtgaaggaggtgagcgtttttccattcccacgacacgagcgattgttaacgctgttctaagcggaaaactcaaagagggaccaacagaagtgttgagcggctttaatctcaccattccaaaatcggctttaggtgtggacgatcatttattaaatccccggaagacttgggaagatgttagcgcctacgatgcgcgagcccagcggttaattcaaaaattccgtgaaaattttgaaaaatttaaagtgcttgctgccattcgggaagccggaccgtctgatgtccattag

SEQ ID NO: 83059 - protein, 517 aa, Coxiella burnetii
MEQIAARVTYINLSPDELIQHAVKNGEGVLSSTGALAVTTGKRTGRSPKDRFIVKDEQTADQVAWGNINQPVEQRTFDQLWERALRYLSERAVYISHLQVGADDNYFLPLKVVTEFAWHNLFACDLFIRPSGDHANGKPSWVILSAPGLKTDPERDGVNSDGAVMINLSQRRVLLVGMPYAGEMKKAMFSVLNYLLPPHDVLPMHCAANAGQSGDVALFFGLSGTGKTTLSADPHRFLIGDDEHGWSATSVFNFEGGCYAKCIDLSQEREPMIWNAIRHGAIMENVVLDENGVPDYADARLTQNSRAAYPREYIPLRVENNRGRPPDAVLFLTCDLDGVLPPVALLTKEQAAYYFLSGYTALVGSTEVGSVKGVTSTFSTCFGAPFFPRPPTVYAELLMKRIEATGCQVYLVNTGWTGGAYGEGGERFSIPTTRAIVNAVLSGKLKEGPTEVLSGFNLTIPKSALGVDDHLLNPRKTWEDVSAYDARAQRLIQKFRENFEKFKVLAAIREAGPSDVH

SEQ ID NO: 83060 - DNA, 1692 bp, Escherichia coli O6; identical to SEQ ID NO: 82902
  CDS (70)..(1692): transl_table=11

SEQ ID NO: 83061 - protein, 540 aa, Escherichia coli O6
MRVNNGLTPQELEAYGISDVHDIVYNPSYDLLYQEELDPSLTGYERGVLTNLGAVAVDTGIFTGRSPKDKYIVRDDTTRDTFWWADKGKGKNDNKPLSPETWQHLKGLVTRQLSGKRLFVVDAFCGANPDTRLSVRFITEVAWQAHFVKNMFIRPSDEELAGFKPDFIVMNGAKCTNPQWKEQGLNSENFVAFNLTERMQLIGGTWYGGEMKKGMFSMMNYLLPLKGIASMHCSANVGEKGDVAVFFGLSGTGKTTLSTDPKRRLIGDDEHGWDDDGVFNFEGGCYAKTIKLSKEAEPEIYNAIRRDALLENVTVREDGTIDFDDGSKTENTRVSYPIYHIDNIVKPVSKAGHATKVIFLTADAFGVLPPVSRLTADQTQYHFLSGFTAKLAGTERGITEPTPTFSACFGAAFLSLHPTQYAEVLVKRMQAAGAQAYLVNTGWNGTGKRISIKDTRAIIDAILNGSLDNAETFTLPMFNLAIPTELPGVDTKLLDPRNTYASPEQWQEKAETLAKLFIDNFDKYTDTPAGAALVAAGPKL

SEQ ID NO: 83062 - DNA, 1671 bp, Emericella nidulans
  CDS (1)..(1671)
atggttgctacttctgtgaaccgtactgccctgcaccctggtggtgtccaacccggcaagggccacaccgaactcgaagaagaacttcatgaacacgcccacatcgactacgaccgcgttgctattattgccaacccttctgtcgctgccctctatgaagacgctcttgtctacgagactggtactgctatcacatcaagcggtgctctcacagcctactctggcgccaaaactggtcgctctccttcagataagcgaatcgtgaaggaggagtcttcagagaaggaggtctggtggggacccgtcaacaagcctatgaccccggatgtctggcgtatcaaccgtgagcgtgctgtcgactacctcaacacccgaaaccgtatctacgtgattgatggtttcgctggctgggatgagcgctaccgtatcagcgtccgtgtcgtctgcgcgcgcgtctaccatgctctcttcatgcgcaacatgcttatccgaccttctgccgaagaacttaagcacttccaccctgactacgtgatctacaacgctggttccttccctgccaaccgcttcactgagggtatgacatctgccacctccgtcgctatcaactttgccgagaaggagatggttatcctcggtactgagtacgccggagagatgaagaagggtgtcttcaccatcctcttctacgagatgcccgtcaagcacaatgtcctgaccttgcactcttctgccaacgagggccagaacggcgacgttactgtcttcttcggtctgtccggaactggcaaaaccaccctctccgccgaccccaagcgtgctttgatcggtgacgacgagcactgctggactgaccgtggtgtcttcaacatcgagggtggctgctacgccaagtgcattggcctctccgccgagaaggagcctgatatcttcaacgccatccgctttggttccgtcctcgagaacgtcgtcttcgaccccatcagccgcgttgttgactacgacgactccaccctcaccgaaaacacccgctgtgcctaccccatcgagtatattgagaacgccaaggttccctgcctctccgacagccacccctcaaacatcatcctcctcacatgcgatgctcgtggtgtactcccccctatctccaagcttaccaccgagcagaccatgttccacttcatctccggttacacctccaagatggccggtaccgaggacggtgtcacagagccccaggctaccttctcttcctgctttgcccagcccttccttgccctgcaccccatgcgctacgcccgcatactcgcagacaagatctctcagcacaaggccaacgcctggcttctcaacaccggatgggttggcgctggcgccaccaccggcggcaagcgttgcccgctcaagtacactcgtgccatcctcgatgccatccacagcggcgagctcgccaaggctgagtacgagacttacgacgtcttcaaccttcacgtgcccaagagctgccccggtgtgcctgatgagcttctgaaccccaagaacagctggaccgctaccaccagcttctcggacgaggtcaacaagctcgctaagctgtttaacgagaatttccaaaagtacgctgaccaagccaccaaggaagtcatcgcggccggtcccgttgtccagtaa

SEQ ID NO: 83063 - protein, 556 aa, Emericella nidulans
MVATSVNRTALHPGGVQPGKGHTELEEELHEHAHIDYDRVAIIANPSVAALYEDALVYETGTAITSSGALTAYSGAKTGRSPSDKRIVKEESSEKEVWWGPVNKPMTPDVWRINRERAVDYLNTRNRIYVIDGFAGWDERYRISVRVVCARVYHALFMRNMLIRPSAEELKHFHPDYVIYNAGSFPANRFTEGMTSATSVAINFAEKEMVILGTEYAGEMKKGVFTILFYEMPVKHNVLTLHSSANEGQNGDVTVFFGLSGTGKTTLSADPKRALIGDDEHCWTDRGVFNIEGGCYAKCIGLSAEKEPDIFNAIRFGSVLENVVFDPISRVVDYDDSTLTENTRCAYPIEYIENAKVPCLSDSHPSNIILLTCDARGVLPPISKLTTEQTMFHFISGYTSKMAGTEDGVTEPQATFSSCFAQPFLALHPMRYARILADKISQHKANAWLLNTGWVGAGATTGGKRCPLKYTRAILDAIHSGELAKAEYETYDVFNLHVPKSCPGVPDELLNPKNSWTATTSFSDEVNKLAKLFNENFQKYADQATKEVIAAGPVVQ

SEQ ID NO: 83064 - DNA, 1587 bp, Geobacillus kaustophilus
  CDS (1)..(1587): transl_table=11
atggggatcgcaaacatgacgaataagcttgatttattgctgcaaaaaccgtacgtgcatcatcaactgtccgtcgccgagctcgtcgagaaagtcctgcaacggaacgaaggacggctgacgcacaccggagccgtcgcggtgacaaccggcaagtacacagggcggtcgccgaaagacaaatacatcgtcgaagaaccgtcaacgaagcaaacgatcgactggggcgcggtcaaccagccgatgtctccggagacgtttgataaactgtacgacaaagtgctcgactatttaatgaagaaagatgaactgttcgtgtttaaaggctttgccggcgccgatccgaaataccggctgccgattcaagtcgtcaacgaattcgcctggcacaacttgttcgtccatcagctgttcattcggccgagcgccgcagagctcgccgcgcatgagccgcaattcaccgtcatttgcgcgccgaactttaaagccgacccgaaagttgacggcacgcgctcggaagcgttcatcatcatctcgtttgaacggcgcaccgtgttgatcggcggcaccgagtatgccggcgaaatgaaaaaatcgattttctcggtgatgaactatttgctgccggaacaaggcatcctgccgatgcactgctcggccaacgtcggccaggaaggcgacgtcgccctctttttcggcttgtcgggaacgggaaaaacgacgctctcgaccgacccgaaccgccgcttgatcggcgatgatgagcacggctggtcaaaccgcggcattttcaacatcgaaggcggctgctatgcgaaatgcatcaacctatcgcgcgagaaagagccgcaaatttttgacgccatcggcttcggcgcggtgctcgaaaacgtcgtcctcgacgacgcgacgcgggtgccgaattacgacgacggcacgctgacggaaaacacgcgcgccgcctacccgcttcaagcgatcaaaaacatcgtcgacccaagcgtcgccggccatccgtccacgatcgtgtttttgacggctgatgcgttcggcgtcctgccgccaatcagcaagctgacgcgcgaacaggcgatgtaccatttcttaagcggctacacaagcaaactcgccggcaccgaacgcggcgtcaccgaaccggaagcaacgttctcaacgtgctttggcgcaccgtttttgccgcgcccggccgtcgaatacgcggaaatgctcgggcaaaaaatcgccgaacacaacgtccgcgtctttttggtcaacaccggctggacagggggaccgtacggcgtcggcagccgcatgaagctcgcctacacccgggcgatggtgcaagccgccgtcgaaggggagctggacaacgtcgaaacggtgcaagacccgattttcggcctcgctatcccaagccacgtccccggcgtgccggatgacgtcctgcagccgcaaaacacatgggctgacaaacaagcgtacgaacaaaaagcaaaagagctggcgcaaaagttccgcgccaacttccgaaagttcgcccatatcgacccgacgatcgaaaaactcggcggaccgctcgtgtaa

SEQ ID NO: 83065 - protein, 528 aa, Geobacillus kaustophilus
MGIANMTNKLDLLLQKPYVHHQLSVAELVEKVLQRNEGRLTHTGAVAVTTGKYTGRSPKDKYIVEEPSTKQTIDWGAVNQPMSPETFDKLYDKVLDYLMKKDELFVFKGFAGADPKYRLPIQVVNEFAWHNLFVHQLFIRPSAAELAAHEPQFTVICAPNFKADPKVDGTRSEAFIIISFERRTVLIGGTEYAGEMKKSIFSVMNYLLPEQGILPMHCSANVGQEGDVALFFGLSGTGKTTLSTDPNRRLIGDDEHGWSNRGIFNIEGGCYAKCINLSREKEPQIFDAIGFGAVLENVVLDDATRVPNYDDGTLTENTRAAYPLQAIKNIVDPSVAGHPSTIVFLTADAFGVLPPISKLTREQAMYHFLSGYTSKLAGTERGVTEPEATFSTCFGAPFLPRPAVEYAEMLGQKIAEHNVRVFLVNTGWTGGPYGVGSRMKLAYTRAMVQAAVEGELDNVETVQDPIFGLAIPSHVPGVPDDVLQPQNTWADKQAYEQKAKELAQKFRANFRKFAHIDPTIEKLGGPLV

SEQ ID NO: 83066 - DNA, 1617 bp, Haemophilus ducreyi
  CDS (1)..(1617): transl_table=11
atgttaagccgtattgaacaagaactagcacaactaggcattactaacgtgaaagagatcgtacataatcctagttacgaacagctatttgaagaagaaatgaaacccggccttgatgggtttgaaaaaggtgtgctgacaaattctggtgcggtagcagttgatacgggtatttttacagggcgctcacccaaagataagtatattgtttatgatgaaacaacgaaagataatgtttggtggacatctgaagcggtaaaaaatgataataaaccgatgagccaaagcacttgggaaaatttaaaagatgtagtaacgcatcaattatctaacaaacgtttatttgtgattgatgctttttgtggcgcaagtaaaacgcatcgtttagcggttcgtattattactgaggtagcttggcaggcacattttgttaagaatatgtttattcgtccaacagcggacgaattaaaggtatttgaaccaaattttgtcgtgatgaacggctcaaaagtaaccaatccaaattggcaagcacaaggtttaaactcagaaaactttgttgcctttaacttgactgagcgtattcagttaattggtggtacttggtacggtggtgagatgaaaaaaggaatgttctcaatgatgaactacttgttgccacttaaaaatgttgcttcaatgcattgttctgctaacgtgggtaaagagggggatgtagcggttttctttggtttgtcgggcacaggtaaaactactctttctactgatccaaaacgtaagctaatcggtgatgatgaacatggctgggatgagcatggtgtgttcaactatgaaggtggttgttatgcgaaaacgattaatctgtctgaggaaaatgaaccagatatttatcgcgcgattcgccgtgatgcattattagaaaatgttgtggtggcggaagacggatctattgattttgctgataaatctaagactgaaaatacgcgtgtttcttatccaatctatcatattgataatattgttgaacctgtttcaaaagctggtcatgcacaaaaagttattttcttaaccgctgatgcgtttggtgtattgccaccggtggctaagttgacgccagaacagactaaatattatttcttatctggatttacggctaaattagccggcactgaacgtggtattactgaaccaacgccgactttctctgcgtgttttggtgcggcattcttatctttacatccgaccaaatatgcggaagtattagtgcaacggatggaagccgctggttcacaagcttacttggtaaataccggctggaatggaacaggtaaacgtatttcgattaaagatacgcgtggtattattgatgcgattttagatggttcaattgagaaagccacaacgcatgcgttgccagtgtttgacttgagggtgcctgatgctttaccgggtgttgatactgcaattttagatccgcgtgatacttatgcagaagcagcagaatggcatgctaaagctgaagatctagcggcacgttttgtgaaaaactttgaaaaatatactacgaacgaagagggcaaagcgttagtcgctgcggggcctcagctttcaaaatag

SEQ ID NO: 83067 - protein, 538 aa, Haemophilus ducreyi
MLSRIEQELAQLGITNVKEIVHNPSYEQLFEEEMKPGLDGFEKGVLTNSGAVAVDTGIFTGRSPKDKYIVYDETTKDNVWWTSEAVKNDNKPMSQSTWENLKDVVTHQLSNKRLFVIDAFCGASKTHRLAVRIITEVAWQAHFVKNMFIRPTADELKVFEPNFVVMNGSKVTNPNWQAQGLNSENFVAFNLTERIQLIGGTWYGGEMKKGMFSMMNYLLPLKNVASMHCSANVGKEGDVAVFFGLSGTGKTTLSTDPKRKLIGDDEHGWDEHGVFNYEGGCYAKTINLSEENEPDIYRAIRRDALLENVVVAEDGSIDFADKSKTENTRVSYPIYHIDNIVEPVSKAGHAQKVIFLTADAFGVLPPVAKLTPEQTKYYFLSGFTAKLAGTERGITEPTPTFSACFGAAFLSLHPTKYAEVLVQRMEAAGSQAYLVNTGWNGTGKRISIKDTRGIIDAILDGSIEKATTHALPVFDLRVPDALPGVDTAILDPRDTYAEAAEWHAKAEDLAARFVKNFEKYTTNEEGKALVAAGPQLSK

SEQ ID NO: 83068 - DNA, 1617 bp, Haemophilus influenzae
  CDS (1)..(1617): transl_table=11
atgacagacttaaataaagtggtaaaagaacttgaagctcttggcatttatgacgtaaaagaagttgtttacaatccaagctacgagcaattgttcgaagaagaaactaaaccaggcttagaaggctttgaaaaaggtactttaactacgactggtgcagtggcagtagatacaggtatcttcacaggtcgttctccaaaagataaatatatcgtgttagatgaaaaaaccaaagatactgtttggtggacatctgaaacagcaaaaaacgacaacaagccaatgaaccaagctacatggcaaagcttaaaagacttggtaaccaaccaactttctcgtaaacgcttatttgtagttgatggtttctgtggtgcgagcgaacacgaccgtattgcagtacgtattgtcactgaagtagcgtggcaagcacattttgtaaaaaatatgtttattcgcccaactgaagaacaactcaaaaattttgaaccagatttcgttgtaatgaacggttctaaagtaaccaatccaaactggaaagaacaaggtttaaattcagaaaactttgttgctttcaacttgactgaacgcattcaattaatcggcggtacttggtacggcggcgaaatgaaaaaaggtatgttctcaatgatgaactacttcctacctctcaaaggtgttggtgcaatgcactgctcagctaacgttggtaaagatggtgatgtagcaatcttcttcggcttatctggcacaggtaaaacaaccctttcaacggatccaaaacgtgaattaatcggtgacgatgaacacggttgggatgatgttggtatctttaactttgaaggtggttgttatgcgaaaaccattcatctttcagaagaaaatgaaccagatatttaccacgctatccgtcgcgacgcattattagaaaacgtggttgttcgttcagatggttctgttgatttcgatgatggttcaaaaacagaaaatactcgcgtgtcttacccaatttatcacatcgataacattgtaaaaccagtttctcgtgcaggtcacgcaactaaagtgattttcttaactgcagatgcgtttggtgtattacctccagtatctaaattgacaccagaacaaactaaatactacttcttatctggtttcacagcgaaattagcagggactgaacgtggtattactgaaccaacgccaactttctcagcatgtttcggtgcagcatttttaacgcttcatccaactcaatatgcagaagtgttagtaaaacgtatgcaagcagcaggtgctgaagcttacttagtgaatactggttggaatggcacaggcaaacgtatctcaatcaaagatactcgcggaatcattgatgcaatcttagatggctcaattgaaaaagctgaaatgggcgaattgccaatcttcaacttagcaattcctaaagcattaccaggtgtagattctgcaatcttagatcctcgcgatacttacgcagataaagcacaatggcaatcaaaagctgaagacttagcaggtcgttttgtgaaaaactttgttaaatatgcaactaacgaagaaggcaaagctttaattgcagctggtcctaaagcttaa

SEQ ID NO: 83069 - protein, 538 aa, Haemophilus influenzae
MTDLNKVVKELEALGIYDVKEVVYNPSYEQLFEEETKPGLEGFEKGTLTTTGAVAVDTGIFTGRSPKDKYIVLDEKTKDTVWWTSETAKNDNKPMNQATWQSLKDLVTNQLSRKRLFVVDGFCGASEHDRIAVRIVTEVAWQAHFVKNMFIRPTEEQLKNFEPDFVVMNGSKVTNPNWKEQGLNSENFVAFNLTERIQLIGGTWYGGEMKKGMFSMMNYFLPLKGVGAMHCSANVGKDGDVAIFFGLSGTGKTTLSTDPKRELIGDDEHGWDDVGIFNFEGGCYAKTIHLSEENEPDIYHAIRRDALLENVVVRSDGSVDFDDGSKTENTRVSYPIYHIDNIVKPVSRAGHATKVIFLTADAFGVLPPVSKLTPEQTKYYFLSGFTAKLAGTERGITEPTPTFSACFGAAFLTLHPTQYAEVLVKRMQAAGAEAYLVNTGWNGTGKRISIKDTRGIIDAILDGSIEKAEMGELPIFNLAIPKALPGVDSAILDPRDTYADKAQWQSKAEDLAGRFVKNFVKYATNEEGKALIAAGPKA

SEQ ID NO: 83070 - DNA, 1617 bp, Haemophilus influenzae
  CDS (1)..(1617): transl_table=11
atgacagacttaaataaagtggtaaaagaacttgaagctcttggcatttatgacgtaaaagaagttgtttacaatccaagctacgagcaattgttcgaagaagaaactaaaccaggcttagaaggctttgaaaaaggtactttaactacgactggtgcagtggcagtagatacaggtatcttcacaggtcgttctccaaaagataaatatatcgtgttagatgaaaaaacaaaagatactgtttggtggacatctgaaacagcaaaaaacgacaacaagccaatgaaccaagctacatggcaaagcttaaaagacttggtgactaaccaactttctcgtaaacgcttatttgtagttgatggtttctgtggtgcgagcgaacacgaccgtattgcagtacgtattgtcactgaagtagcgtggcaagcacattttgtaaaaaatatgtttattcgcccaactgaagaacaactcaaaaattttgaaccagatttcgttgtaatgaacggttctaaagtaaccaatccaaactggaaagaacaaggtttaaattcagaaaactttgttgctttcaacttgactgaacgcattcaattaatcggcggtacttggtacggcggcgaaatgaaaaaaggtatgtcctcaatgatgaactacttcctacctctcaaaggtgttggtgcaatgcactgctcagctaacgttggtaaagatggtgatgtagcaatcttcttcggcttatctggcacaggtaaaacaaccctttcaacggatccaaaacgtgaattaatcggtgacgatgaacacggctgggatgatgtgggtatctttaactttgaaggtggttgttatgcgaaaaccattcatctttcagaagaaaatgaaccagatatttaccgcgctatccgtcgcgacgcattattagaaaacgtggttgttcgttcagatggttctgttgatttcgatgatggttcaaaaacagaaaatactcgcgtgtcttacccaatttatcacatcgataacattgtaaaaccagtttctcgtgcaggtcacgcaactaaagtgattttcttaactgcagatgcatttggcgtattaccaccagtatctaaattgacaccagaacaaactaaatactacttcttatctggtttcactgcaaaattagcagggactgaacgtggtattactgaaccaactccaactttctcagcatgtttcggtgctgcgttcttaacccttcacccaactcaatatgctgaagtgttagtaaaacgtatgcaagcagcgggtgctgaagcttacttagtaaatactggttggaatggcacaggcaaacgtatctcaatcaaagatactcgtggaatcattgatgcaatcttagatggctcaattgaaaaagctgaaatgggcgaattgccaatcttcaacttagcaattcctaaagcattaccaggtgtagattctgcaatcttagatcctcgcgatacttacgcagataaagcacaatggcaatcaaaagctgaagacttagcaggtcgttttgtgaaaaactttgttaaatatgcaactaacgaagaaggcaaagctttaattgcagctggtcctaaagcttaa

SEQ ID NO: 83071 - protein, 538 aa, Haemophilus influenzae
MTDLNKVVKELEALGIYDVKEVVYNPSYEQLFEEETKPGLEGFEKGTLTTTGAVAVDTGIFTGRSPKDKYIVLDEKTKDTVWWTSETAKNDNKPMNQATWQSLKDLVTNQLSRKRLFVVDGFCGASEHDRIAVRIVTEVAWQAHFVKNMFIRPTEEQLKNFEPDFVVMNGSKVTNPNWKEQGLNSENFVAFNLTERIQLIGGTWYGGEMKKGMSSMMNYFLPLKGVGAMHCSANVGKDGDVAIFFGLSGTGKTTLSTDPKRELIGDDEHGWDDVGIFNFEGGCYAKTIHLSEENEPDIYRAIRRDALLENVVVRSDGSVDFDDGSKTENTRVSYPIYHIDNIVKPVSRAGHATKVIFLTADAFGVLPPVSKLTPEQTKYYFLSGFTAKLAGTERGITEPTPTFSACFGAAFLTLHPTQYAEVLVKRMQAAGAEAYLVNTGWNGTGKRISIKDTRGIIDAILDGSIEKAEMGELPIFNLAIPKALPGVDSAILDPRDTYADKAQWQSKAEDLAGRFVKNFVKYATNEEGKALIAAGPKA

SEQ ID NO: 83072 - DNA, 1602 bp, Idiomarina loihiensis
  CDS (1)..(1602): transl_table=11
atgcctaatctggatctgagccgctacggcatcacagatgtcgaagaaattgtccataatccgtcctacgacctgctattcgaagaggaaactcgcgacgacctgcaaggttatgaaaaaggaacggtaacggacctgggtgcggttgctgtcgataccggaattttcaccggacgttcccctaaagacaaatacattgtccgcgatgacacaactcgcgataccgtctggtgggctgaccaaggcaaaaacgacaacaaaccactatcgaccgaaacctggaatgaactgaaaggtttggtcactgagcagttgtcgcacaaacgtttgtttgtggttgatacctattgcggtgctaatgaagacactcgtcttgctgttcgcttcattaccgaagtggcatggcaggcacattttgtaaaaaacatgttcattcgcccaagcgaagaagagctggaaaactttgagccagacttcgttgtcatgaacggtgctaagtgcattaatcctaagtggcaggaacaggaactgaattcagaaaactttgtggcgtttaacttaactgaaaaaattcagttaattggcggcacctggtacggcggcgaaatgaaaaaaggtatgttctcaatgatgaactacttcctgccgctaaaaggcattgcttctatgcattgctctgccaacgttggtcaagaaggcgacgtagctgttttcttcggcttgtcaggcacgggtaaaaccaccctgtcgactgacccgaaacgcgcactcattggtgacgacgaacacggttgggatgacgacggcgtattcaactttgaaggcggttgttatgcgaaaaccattaacctgtcgaaagaagcggaaccggacatatacaacgcgattcgccgtgacgcactattagaaaacgttgctgttgatgacaacggtgttgtcgactttgatgacaactcgaaaaccgagaacactcgcgtgtcttaccctatttaccacattgacaacattgttaagccggtgtctaaagcgggtcacgcgaagaaagttattttcctgacggctgacgcgtttggcgtattaccgccggtgtctaagctgactaaagaacaggcgcagtatcatttcttgtccggctttactgctaaattagccggtactgagcgcggtgtcaccgagcctacgccaaccttctcaagctgttttggcgcggcgttcttaagcctgcacccaacgcagtacgcggaagttttagttaagcgtatggaagcggctggcgcagaagcttacctggttaacaccggatggaacggcactggcaagcgcatttctattaaagcgacgcgcgctattattgatgccattttagatggttcaattgaagacgctgaatttgtgcagttgcctcactttaacctcgctatgccaactgagctggccggtgttgaggacagtagcattctggacccacgtaaaacatacgaagatgacggtgagtgggacgttcgtgcgaaagacttagccgaacgttttgtcgcaaactttgagaaatttactgatactgataacggtaaagcgctggttgccgcaggccctcagttgtaa

SEQ ID NO: 83073 - protein, 533 aa, Idiomarina loihiensis
MPNLDLSRYGITDVEEIVHNPSYDLLFEEETRDDLQGYEKGTVTDLGAVAVDTGIFTGRSPKDKYIVRDDTTRDTVWWADQGKNDNKPLSTETWNELKGLVTEQLSHKRLFVVDTYCGANEDTRLAVRFITEVAWQAHFVKNMFIRPSEEELENFEPDFVVMNGAKCINPKWQEQELNSENFVAFNLTEKIQLIGGTWYGGEMKKGMFSMMNYFLPLKGIASMHCSANVGQEGDVAVFFGLSGTGKTTLSTDPKRALIGDDEHGWDDDGVFNFEGGCYAKTINLSKEAEPDIYNAIRRDALLENVAVDDNGVVDFDDNSKTENTRVSYPIYHIDNIVKPVSKAGHAKKVIFLTADAFGVLPPVSKLTKEQAQYHFLSGFTAKLAGTERGVTEPTPTFSSCFGAAFLSLHPTQYAEVLVKRMEAAGAEAYLVNTGWNGTGKRISIKATRAIIDAILDGSIEDAEFVQLPHFNLAMPTELAGVEDSSILDPRKTYEDDGEWDVRAKDLAERFVANFEKFTDTDNGKALVAAGPQL

SEQ ID NO: 83074 - DNA, 1632 bp, Kluyveromyces lactis
  CDS (1)..(1632)
atgtcaccaactaagacacaaaattctgctgaagagaatattagggctgagcttggcctttctgcagaagtcgtcaccatcagacgtaatgctccagctgctttgttatatgaagatgctttaaaagaaagagacacagccatttccaatgctggtgccttgattgcctactctggtgataagaccggaagatctccacgtgataagcgtatcgttgaagaagaaacttcaaaggataacgtttggtggggtccagtaaataagccatgttccgaaagaacttgggaaattaacagagaaagagctgctgattacttgagaactagggatcacatttacattgttgatgcttatgctggctgggatcctcgttacagaatcaaggtcagagtggtttgtgctagagcttaccatgccttattcatgacgaacatgttgatcagaccatcaaaggaagaactagaaaatttcggtgaacctgacttcaccgtctggaatgctggtcaattccctgctaacacacatacctccggtatgacttctaagactactgtggaaattaacttcaagcaaatggaaatggtcatcttgggtaccgaatacgctggtgaaatgaagaagggtattttcactgtgatgttctacttgatgcctgtaaatcacaatgtcctcaccttacattctagtgccaaccaaggtattcaagataatgacgttactttgttcttcggtttgagtggtactggtaagactaccttgtccgctgatcctcatagactgttgatcggtgacgatgaacactgttggtccgatcatggtgttttcaacattgaaggtggctgttacgctaagtgtttgggattgtctgccgagaaggaaccagaaattttcaacgctatcaagttcggttctgttttggaaaacatcatttacgatcctaacactagagaagttgattacgaagattctacaatcacagaaaacactagatgcgcttacccaatcgaatacatcccaagtgctaaaatcccatgtctagctgatcaccatccaaagaacattgtcctgttgacttgtgacgcttcaggtgttttgcctccagtatccaagttgacccctgaccaagttatgtaccacttcatctctggttacacttccaagatggctggtactgaacaaggtgtcactgaaccagaagcaactttctcctcttgtttcggtcaaccattcttgtctctacatccaatgaaatatgctacaatgttggctgaaaagatggccgaacataacgctaacgcttggttaatcaacactggttggactggttcctcttacgttgctggtggtaagcgttgtcctttgaagtacaccagagctatcctagatgccatccacgatggctctttggctaaggaagagtatgaagttttgccaatcttcaacttgcaaattccaaaggctgtgggtgacaaggttccagcttctctactaaatccaagtaagaactgggctgaaggtgaagctaagtacacttcaaatgtcaagtcattggctaatttgtttgtagaaaacttcaagacctaccaagataaggctaccgaacaagtcttagctgctggtccgcaattataa

SEQ ID NO: 83075 - protein, 543 aa, Kluyveromyces lactis
MSPTKTQNSAEENIRAELGLSAEVVTIRRNAPAALLYEDALKERDTAISNAGALIAYSGDKTGRSPRDKRIVEEETSKDNVWWGPVNKPCSERTWEINRERAADYLRTRDHIYIVDAYAGWDPRYRIKVRVVCARAYHALFMTNMLIRPSKEELENFGEPDFTVWNAGQFPANTHTSGMTSKTTVEINFKQMEMVILGTEYAGEMKKGIFTVMFYLMPVNHNVLTLHSSANQGIQDNDVTLFFGLSGTGKTTLSADPHRLLIGDDEHCWSDHGVFNIEGGCYAKCLGLSAEKEPEIFNAIKFGSVLENIIYDPNTREVDYEDSTITENTRCAYPIEYIPSAKIPCLADHHPKNIVLLTCDASGVLPPVSKLTPDQVMYHFISGYTSKMAGTEQGVTEPEATFSSCFGQPFLSLHPMKYATMLAEKMAEHNANAWLINTGWTGSSYVAGGKRCPLKYTRAILDAIHDGSLAKEEYEVLPIFNLQIPKAVGDKVPASLLNPSKNWAEGEAKYTSNVKSLANLFVENFKTYQDKATEQVLAAGPQL

SEQ ID NO: 83076 - DNA, 1617 bp, Mannheimia succiniciproducens
  CDS (1)..(1617): transl_table=11
atgacagatcttaatcaattaactcaagaacttggtgctttaggtattcatgatgtacaagaagttgtgtataacccgagctatgaacttctttttgcggaagaaaccaaaccaggtttagaaggttatgaaaaaggtactgtgactaatcaaggagcggttgctgtaaataccggtattttcaccggtcgttctccgaaagataaatatatcgttttagacgacaaaactaaagataccgtatggtggaccagcgaaaaagttaaaaacgataacaaaccaatgagccaagatacctggaacagtttgaaaggtttagttgccgatcaactttccggtaaacgtttatttgttgttgacgcattctgcggcgcgaataaagatacgcgtttagctgttcgtgtggttactgaagttgcatggcaggcgcattttgtaacaaatatgtttatccgcccttcagcggaagaattaaaaggtttcaaacctgatttcgtggtaatgaacggtgcaaaatgtacaaatcctaactggaaagaacaagggttaaattccgaaaacttcgttgcgttcaacattacagaaggcgttcaattaatcggcggtacttggtacggtggtgaaatgaaaaaaggtatgttctcaatgatgaactacttcttaccgcttcgtggtattgcatcaatgcactgttccgcaaacgttggtaaagacggcgataccgcaattttcttcggtttgtcaggcacaggtaaaacgacattatcaacagatcctaaacgtcaactaatcggtgatgacgaacacggttgggacgatgaaggcgtatttaacttcgaaggtggttgctacgcgaaaaccattaacttatccgctgaaaacgagccggatatctatggcgctatcaaacgtgacgcattattggaaaacgtggttgttttagataacggtgacgttgactatgcagacggttccaaaacagaaaatacacgtgtttcttatccgatttatcacattcaaaatatcgttaaacctgtttctaaagctggtccggcaactaaagttatcttcttgtctgccgatgcattcggtgtattaccgccggtgtctaaattaactccggaacaaaccaaatactatttcttatccggtttcactgcgaaattagcgggtacggaacgcggtattacagagcctacaccaacattctctgcatgttttggtgcggcttttttaagcttgcatccgacacaatatgccgaagtgttagtaaaacgtatgcaagaatcaggtgcggaagcgtatcttgttaatacaggttggaacggtaccggcaaacgtatctcaattaaagatacccgtggtattattgatgcaattttagacggctcaattgataaagcggaaatgggctcattaccaatcttcgatttctcaattcctaaagcattacctggtgttaaccctgcaatcttagatccgcgcgatacttatgcggataaagcgcaatgggaagaaaaagctcaagatcttgcaggtcgctttgtgaaaaactttgaaaaatataccggtacggcggaaggtcaggcattagttgctgccggtcctaaagcataa

SEQ ID NO: 83077 - protein, 538 aa, Mannheimia succiniciproducens
MTDLNQLTQELGALGIHDVQEVVYNPSYELLFAEETKPGLEGYEKGTVTNQGAVAVNTGIFTGRSPKDKYIVLDDKTKDTVWWTSEKVKNDNKPMSQDTWNSLKGLVADQLSGKRLFVVDAFCGANKDTRLAVRVVTEVAWQAHFVTNMFIRPSAEELKGFKPDFVVMNGAKCTNPNWKEQGLNSENFVAFNITEGVQLIGGTWYGGEMKKGMFSMMNYFLPLRGIASMHCSANVGKDGDTAIFFGLSGTGKTTLSTDPKRQLIGDDEHGWDDEGVFNFEGGCYAKTINLSAENEPDIYGAIKRDALLENVVVLDNGDVDYADGSKTENTRVSYPIYHIQNIVKPVSKAGPATKVIFLSADAFGVLPPVSKLTPEQTKYYFLSGFTAKLAGTERGITEPTPTFSACFGAAFLSLHPTQYAEVLVKRMQESGAEAYLVNTGWNGTGKRISIKDTRGIIDAILDGSIDKAEMGSLPIFDFSIPKALPGVNPAILDPRDTYADKAQWEEKAQDLAGRFVKNFEKYTGTAEGQALVAAGPKA

SEQ ID NO: 83078 - DNA, 1584 bp, Oceanobacillus iheyensis
  CDS (1)..(1584): transl_table=11
atgaaaactgttgataagtcttatatgaaagaattacaaacaaatcatattcaccacaatctatcggtagcacagctcgttgaaaaaattctgtatagacaagaaggaattcttacatctaccggagcagtacgcgccactacaggaacttatactggtcgatctccggaagataaatttaccgttaaagatgaagtttcggatcaacatgttaactggggtaaagttaataaacccatccaggaggaagtattcaaccaattattatctaaagtgatttcttatttaaatgaaaaacaagaaatatttaaatttcaaggatttgcggggtctgatcatacttaccgactccctattcaagtgattaatgaatatgcttggcataatttattttctagacaactattcattactccaacggaagaggaattaaacaatcaccaagcagaatttacagttatttcagctccaggatttaaggctgatccagctattgatggaacaaattcagaaacatttatattaatttcttttaagaaaagaattgtacttatcggtggtactgaatatgccggagaaattaaaaagtccattttttctgtgatgaattatttattaccacagcaagatgtgctttctatgcattgctccgctaatgtaggccaggaaggtgacgttgcattatttttcgggttatcaggtaccgggaaaacgacattatccgcagacccctaccgaaaattaatcggtgatgacgaacatggttggagtccaaatggtgtattcaatattgaaggcggttgttatgcgaaatgtatcaatctctcagaagaaaaggaaccacaaatttataacgcaatccgttacggtactgtgttagagaatgtgattttaaatgacaatagcagagaacccgattatgatgatacttcattaacagaaaacacacgtgctgcttatcctttagagaatatagacaatattattaatcctagtgttgcagggcatccaaatacaattattttcttaactgctgacgcatcaggcacattgcctccgattagcaaactgacaaaagaacaagcgatgtatcattttctaagcggatatacaagtaaattagcaggaacagaacgaggagtaacagaaccactagctactttctctgcttgttttggttctccattcttaccattagctccatctaaatatgcagaaatgcttggaaagaaaattgatatgtttgatacaaatgtatttttgattaataccggatggactggcggatcatatggagtgggtgaccgtattaaactttccttcaccagagcaatggttcactctgcattagaaggagaattaaattctatagaaacaatcactgatgaaattttcggtttacagattcctgctcatgttcctggagtccctgatgaattattagtacctaaacagacatggggtaataaagaagcatatatgaaagaagcacaaacacttgcattaaaattccacgaaaactttaagaaattcactctagctagtgaaacgattaagcaagctggtcctttatataaaggataa

SEQ ID NO: 83079 - protein, 527 aa, Oceanobacillus iheyensis
MKTVDKSYMKELQTNHIHHNLSVAQLVEKILYRQEGILTSTGAVRATTGTYTGRSPEDKFTVKDEVSDQHVNWGKVNKPIQEEVFNQLLSKVISYLNEKQEIFKFQGFAGSDHTYRLPIQVINEYAWHNLFSRQLFITPTEEELNNHQAEFTVISAPGFKADPAIDGTNSETFILISFKKRIVLIGGTEYAGEIKKSIFSVMNYLLPQQDVLSMHCSANVGQEGDVALFFGLSGTGKTTLSADPYRKLIGDDEHGWSPNGVFNIEGGCYAKCINLSEEKEPQIYNAIRYGTVLENVILNDNSREPDYDDTSLTENTRAAYPLENIDNIINPSVAGHPNTIIFLTADASGTLPPISKLTKEQAMYHFLSGYTSKLAGTERGVTEPLATFSACFGSPFLPLAPSKYAEMLGKKIDMFDTNVFLINTGWTGGSYGVGDRIKLSFTRAMVHSALEGELNSIETITDEIFGLQIPAHVPGVPDELLVPKQTWGNKEAYMKEAQTLALKFHENFKKFTLASETIKQAGPLYKG

SEQ ID NO: 83080 - DNA, 1617 bp, Pasteurella multocida
  CDS (1)..(1617): transl_table=11
atgactgacttaaataaagtaatcaatgaacttggtgcacttggtattcatgatgtaaaagaaatcgtttataacccaagttatgagcaattgttcgaagaggaaaccaaaccaggtttagaaggttacgaaaaaggtatcgtgacacaatcaggcgcggtggcggttgataccggtatctttacaggtcgttcgccaaaagataaatacattgtgcttgatgacaaaaccaaagacactgtttggtggacaagcgatgcggcgaaaaacgataacaaaccaatgacacaagatacgtggaaaagcttaaaaggcttagtgacagaacaactttctggcaaacgtttatttgtgatcgacgcattctgtggtgcaaacgctgacacccgtttatcagtgcgtatcgtgacagaagtagcatggcaagcacactttgtgaaaaacatgttcattcgtccaacagaagcagaattagttggcttcaaaccagatttcgtagtaatgaacggttctaaagtaaccaacccgaactggaaagaacaaggtctaaattctgaaaactttgtggcatttaacttaactgaaggcgtgcaattaatcggtggtacttggtacggcggtgaaatgaaaaaaggtatgttctcaatgatgaactacttcttaccattaaaaggcatcgcatctatgcactgttcagccaacgtgggtgaaaaaggcgacgttgctgtgttcttcggtttatcaggtacaggtaaaaccaccctttcaacagatccaaaacgtcaattaatcggtgacgatgagcacggttgggatgatgatggcgtattcaactacgaaggtggttgctatgcgaaaacgatcaaactgtctccagaaaacgaaccagatatctataaagccatcaaacgtgatgccttattagaaaacgttgtagtacgtgcagatggttcagtggattacgatgatggttcaaaaacagaaaacacccgtgtttcttacccaatttaccacatcgacaacatcgtaacaccggtatcaaaagcaggtcatgcgaaaaaagtgatcttcttaactgcggacgcattcggtgtgttaccaccagtatctaaattaacgccagaacaaactaaatactacttcttatctggtttcaccgcgaaattagccggtactgagcgtggtatcacagaaccaacaccaacgttctctgcatgtttcggtgcagcgttcttatcacttcacccaacacaatatgcggaagtgttagtgaaacgtatggaagcagcgggtgcggaagcttacttagtgaacacaggttggaacggtacaggtaaacgtatctcaatcaaagatacgcgcggtatcatcgatgcaatcttagacggttcaatcgaaaaagcagaaatgggcaaattaccaatctttgatttagcgatcccaactgcattaccaggtgttgaccctgcaatcttagatccacgtgatacttatgcagacaaagcacaatggcaagcgaaagcagaagacttagctggtcgtttcgtgaaaaacttcgaaaaatacaccactaacgatgaaggtaaagcattagtggcagcaggtccaaaagcgtaa

SEQ ID NO: 83081 - protein, 538 aa, Pasteurella multocida
MTDLNKVINELGALGIHDVKEIVYNPSYEQLFEEETKPGLEGYEKGIVTQSGAVAVDTGIFTGRSPKDKYIVLDDKTKDTVWWTSDAAKNDNKPMTQDTWKSLKGLVTEQLSGKRLFVIDAFCGANADTRLSVRIVTEVAWQAHFVKNMFIRPTEAELVGFKPDFVVMNGSKVTNPNWKEQGLNSENFVAFNLTEGVQLIGGTWYGGEMKKGMFSMMNYFLPLKGIASMHCSANVGEKGDVAVFFGLSGTGKTTLSTDPKRQLIGDDEHGWDDDGVFNYEGGCYAKTIKLSPENEPDIYKAIKRDALLENVVVRADGSVDYDDGSKTENTRVSYPIYHIDNIVTPVSKAGHAKKVIFLTADAFGVLPPVSKLTPEQTKYYFLSGFTAKLAGTERGITEPTPTFSACFGAAFLSLHPTQYAEVLVKRMEAAGAEAYLVNTGWNGTGKRISIKDTRGIIDAILDGSIEKAEMGKLPIFDLAIPTALPGVDPAILDPRDTYADKAQWQAKAEDLAGRFVKNFEKYTTNDEGKALVAAGPKA

SEQ ID NO: 83082 - DNA, 1608 bp, Porphyromonas gingivalis
  CDS (1)..(1608): transl_table=11
atgagcaaattagatttgacaaagtatggcattctcaatgccactgagattatccacaacccatcttacgagttcctttttgaagaagagaccaaagccggtctcgaaggctttgagaaaggacagcttaccgaactgggagcagtcaatgtgatgaccggtgtctatacgggtcgttcgcccaaggataagttcttcgtcatggacgatacaaccaaaaacaccatctggtggacgtcggacgaatacaagaacgacaacaaaccggtgactccggaggcgtggaagagtatcaaaaagctggccgtggagcagctctccggcaagcgtcttttcgtcgtggacacgttctgcggcgccaacgaaagctctcggttgaaaatccgctttatcatggaggtggcctggcaggcccacttcgtcaagaatatgtttatccgccccacggaagaggagctggccaactacggcgagcccgacttcgtggtgatgactgcttccaaagcgaaggtggaaaactacaaagagctgggactgaactccgagacggccgtcgtattcaacctgaccgagaaggtgcaagtgatcctgaacacatggtacggcggtgagatgaagaaaggtatgttctcctacatgaactacctgctccctctgcgcggtatggcttcgatgcactgctccgccaatacgagcatggacgagaaggagacggctatcttcttcggtctgtccggtacgggcaagaccacgctcagtacggatccgaagcgcaagctgatcggcgatgacgagcacggctgggacaaggacggtatcttcaacttcgaaggcggatgctacgccaaggtgatcaacctgagccgcgagaacgaaccggacatctacaatgccattcgtcgcaatgcgctgctggagaacgtgaccgtggatgctgccggtaagatcgacttcggtgacaaatccgtgacggagaatactcgcgtctcttatccgatctaccacatcgagaacatcgtgaagcccgtgtccaaagccggccatgccaagaaggtgatcttcctctcggccgatgctttcggcgtattgcctcccgtttccatcctgactccggagcagaccaagtattacttcctctcgggctttaccgccaagctggccggtaccgagcgtggcatcacggagcctacgcctacgttctccgcttgcttcggagcggctttcctctcgcttcatcctacgaagtatgccgaggagctggtgaagaaaatggagatggtgggagctacggcttacctcgtcaatacgggttggaacggtacgggcaagcgcatctctatcaaggatacgcgtggtatcatcgatgccatcctcgacggctccatcgacaaggctccgaccaaggctattcctttcttcgacttcaaggtgccgacggctctgcccggtgtggatccgaatatcctcgatccgcgcgacacctatgccgatgccgccgagtggacgacgaaagcgaaggatctggccgaacgtttcatcaaaaacttcgtcaagttcacgggcaatgatgccggcaaggctctcgtagcagcagggccgaagctctaa

SEQ ID NO: 83083 - protein, 535 aa, Porphyromonas gingivalis
MSKLDLTKYGILNATEIIHNPSYEFLFEEETKAGLEGFEKGQLTELGAVNVMTGVYTGRSPKDKFFVMDDTTKNTIWWTSDEYKNDNKPVTPEAWKSIKKLAVEQLSGKRLFVVDTFCGANESSRLKIRFIMEVAWQAHFVKNMFIRPTEEELANYGEPDFVVMTASKAKVENYKELGLNSETAVVFNLTEKVQVILNTWYGGEMKKGMFSYMNYLLPLRGMASMHCSANTSMDEKETAIFFGLSGTGKTTLSTDPKRKLIGDDEHGWDKDGIFNFEGGCYAKVINLSRENEPDIYNAIRRNALLENVTVDAAGKIDFGDKSVTENTRVSYPIYHIENIVKPVSKAGHAKKVIFLSADAFGVLPPVSILTPEQTKYYFLSGFTAKLAGTERGITEPTPTFSACFGAAFLSLHPTKYAEELVKKMEMVGATAYLVNTGWNGTGKRISIKDTRGIIDAILDGSIDKAPTKAIPFFDFKVPTALPGVDPNILDPRDTYADAAEWTTKAKDLAERFIKNFVKFTGNDAGKALVAAGPKL

SEQ ID NO: 83084 - DNA, 1545 bp, Pseudomonas fluorescens
  CDS (1)..(1545): transl_table=11
atgacgcaagccaataacgccgtgtacaccgatctgagtgtggatgatctggtcaaagaagccctgaaccgcggtgagggcgagcttgccgataccggcgctctggtggttcgcaccggtcatcgtaccggccgttcgccagtggatcgtttcatcgtagaagagcccagcacccaggacgctatcgcctggggcccgatcaaccgcaagttcccggcggccaagttcgacgccctgtgggaccgcgttgaagcctacctgggcgagcgcgagcgttttgtttcccatgtgcatgtaggttccgatccggcgcactacctgccggtgaaaatgaccaccgagaccgcctggcacaacctgttcggccgctgcctgttcatcaaccccgagcagtacaacgccggtggcaaggatgagtggcagatcctcaacgcgccgaacttcgtctgcgagccagagcgcgacggcaccaactccgatggcaccgtgatcctcaacttcgcggccaagaaagtgctgatcgccggcatgcgctacgccggtgaaatgaagaaagccctgttctccgtgcagaacttcctgctgccggctgccgacgtactgccgatgcactgcgccgccaacatgggcgaagaaggcgacgtgaccctgttcttcggtctgtcgggcaccggcaagaccaccctgtccgctgacgaaagccgttacctgatcggtgacgacgaacacggttggggcgtgggcgtggtgttcaacatcgaaggcggttgctatgccaagtgcatcgacctgtcggaaaagaacgagccggtgatctggaaagccatccagcacggtgccgttctggaaaacgtggtgatcgacccggtcaccaagaaagccgactacgccgacgacagcctgacccagaacagccgcgccgcctacccgcgcgagctgatcgaaaaacgcgcaccgaagaacctcggtggcgagcctaacgccgtgatcttcctgacctgcgacctgaccggcgtactgccgccggtgtcgatcctcagcgaagaacaagccgcctaccacttcctgtccggctacaccgctctggtgggctcgactgaaatgggttcgggctcgggcatcaagtcgaccttctccacctgcttcggcgcaccgttcttcccgcgtccggcgggcgaatacgccgagctgctgatcaagcgcatccgcggcttcggctccaaggtctacctggtcaacaccggctggaccggcggtggctacggcgtgggcaaacgcttcaacatccccaccacccgtggcgtgattgcagcgatccagagcggcgcgctgatcggtgccgagaccgagcacctggacatcgtcaacctggacgtgccaaaagccgtaccgggcgtcgagaccggcctgctcaacccacgcaacacctgggctgacaaagctgcctacgacgaagccgccaaggccctggccggcctgttcatcgagaacttcaagaagttcgacgtgagcgacgcgatcaaggctgctggtccgaagctgtaa

SEQ ID NO: 83085 - protein, 514 aa, Pseudomonas fluorescens [sequence omitted]

SEQ ID NO: 83086 - DNA, 1542 bp, Pseudomonas fluorescens
  CDS (1)..(1542): transl_table=11
atgacgcaagccaataacgccgtgtacaccgatctgagtgttgatgatctggtaaaagaagctctgaaccgcggtgagggcgagcttgccgataccggcgctctggttgttcgcaccggtcatcgcaccggccgttcgccagtcgaccgtttcatcgttgaagagccttccacccaggctgccatcgcctggggcccgatcaaccgcaagttcccggccgacaagttcgacgcgctgtgggctcgtgttgaagcattcaacaacgcgcaagagcatttcgtttcccacgtgcatgtaggcgcggccgaagatcactacctggccgtgaagatgaccacccagactgcctggcagaacctgttcggtcgttgcctgttcatcaacccggcccagtacaacccggccggtcgcgaagagtggcaagtgctgaacgtcgccaacttcgagtgcgtgcctgagcgtgacggcaccaactccgatggttgcgtgatcatcaacttcgcccagaagaaagtgctgatcgccggcatgcgttacgccggtgaaatgaagaaagccatgttctccgtgcagaacttcctgctgccggccgctgacgtgctgccgatgcactgcgctgccaacatcggcgaagaaggcgacgtgaccctgttcttcggtctgtcgggcaccggcaagaccaccctgtccgccgacgaaagccgttacctgatcggtgacgacgaacacggctggggcgaaggcgttgtcttcaacatcgaaggcggctgctacgccaagtgcatcgacttgtccgagaagaacgagccggtcatctggaaagccatcaagcacggcgcggtgctggaaaacgtcgtgatcgacgatgccaagcacgccgactacgccgatgtcagcctgacccagaacagccgcgcggcctacccgctggagcacgttgccaagcgttccgagaagaacctgggcggcgagccgaacgctgtgatcttcctgacctgcgacctgaccggcgtgctgccgccagtgtcgatcctcaacgaagaacaagcggcctaccacttcctgtccggctacaccgcactggtgggctcgactgaaatgggttcgggcagcggcatcaagtcgaccttctccacctgcttcggcgcaccgttcttcccgcgtccggccggcgaatacgctgaactgctgatcaagcgcatccgcggcttcggctccaaggtctacctggtcaacaccggctggaccggcggtggctacggcgtcggcaaacgcttcaacatcccgaccacccgcgcggtgatcgcagcgatccagagcggcgcgctgatcggtgcagccaccgagcacctggacaccatcaacctggacgtgccactggccgtaccgggcgtcgaaaccaacctgctcaacccacgcaacacctgggctgacaaggctgcgtacgacgaagctgccaaagcactggccggtctgttcatcgagaacttcaagaagttcgaagtgagcgacgcgatcaaggctgccgggcctaagttgtaa

SEQ ID NO: 83087 - protein, 513 aa, Pseudomonas fluorescens
MTQANNAVYTDLSVDDLVKEALNRGEGELADTGALVVRTGHRTGRSPVDRFIVEEPSTQAAIAWGPINRKFPADKFDALWARVEAFNNAQEHFVSHVHVGAAEDHYLAVKMTTQTAWQNLFGRCLFINPAQYNPAGREEWQVLNVANFECVPERDGTNSDGCVIINFAQKKVLIAGMRYAGEMKKAMFSVQNFLLPAADVLPMHCAANIGEEGDVTLFFGLSGTGKTTLSADESRYLIGDDEHGWGEGVVFNIEGGCYAKCIDLSEKNEPVIWKAIKHGAVLENVVIDDAKHADYADVSLTQNSRAAYPLEHVAKRSEKNLGGEPNAVIFLTCDLTGVLPPVSILNEEQAAYHFLSGYTALVGSTEMGSGSGIKSTFSTCFGAPFFPRPAGEYAELLIKRIRGFGSKVYLVNTGWTGGGYGVGKRFNIPTTRAVIAAIQSGALIGAATEHLDTINLDVPLAVPGVETNLLNPRNTWADKAAYDEAAKALAGLFIENFKKFEVSDAIKAAGPKL

SEQ ID NO: 83088 - DNA, 1611 bp, Rhizobium loti
  CDS (1)..(1611): transl_table=11
atgtcggaagtcggcaaacgcaatcctgcttgcccgatcgatcgtatcggcctgaaaaccaccggtatggtgcgctataattttggcgcggccgccctttacgaggaggcgatccggcgtggcgaggcccggttgaccgcgcatggcgcgctggtcgccgagaccggccagcacacaggccgttcgcccaaggacaagttcgtcgtccgtgacgccgccacggagcctgaagtctggtgggacaacaacaaggcgatctcgccggcccagttcgaaacgctgttcgccgatttccttgcccacgccgcgaacaaggatctctatgttcaggacctcgtcggcggcgccgacgccgagctgaaactgccgacgcgcgtaatcaccgagtttgcctggcactcgctgttcatccgcaatctgctcatccgtccggacaaggccgaactcggacagttcgtgcctgagatgacgatcatcgacctgccgtccttccgcgccgaccccgcccgccacggcagccgcacggaaacggtgatcgctgtcgacctcacccgccagatcgtgctgatcggcggcacctcctatgccggcgagatgaagaagtcggtattcaccatgctcaactatatcctgccgcagaagggcgtgatgccgatgcactgttcggccaatgaggggccggccggcgatgcggccgtcttcttcgggctttccggaaccggcaagacgacgctgtcggccgatccgtcgcgcacgctgatcggcgacgatgagcatggctggggcccgcacggcatcttcaatttcgaaggcggctgctacgccaagacgatcaagctgtcggccgaagccgagccggagatattcgccaccacgcagcgctttggcacggtgctggaaaatgtcgtgctcgacgccgacggcgtgccggacttcaacgacggccgcctcaccgaaaacacacgctgcgcctacccgctcgacttcatccccaatgcctcgaagaccgggcgcgccagtcatcccaaaaacatcatcatgctgaccgccgatgccttcggcgtgatgccgccgatcgcgcggctgacccctgcgcaggcgatgtatcatttcctctccggctatacggccaaggtggccggaaccgaaaagggcgtcaccgaacccgaggcgacgttctcgacctgcttcggtgccccgttcatgccgcgccatccgtcggaatacggcaatctgctgcgcgagctcatcgccagccacggcgccgattgctggctggtcaacaccggctggaccggcggcgcctacggcaccggcaagcgcatgccgatcaaggcgacgcgcgctctgctgaccgccgcgctcgacggatcgctgaagacaggcgaattccgcaccgacgccaatttcggcttcgaggtgccggtggcggtgcctggcgtcgacagcgccattctcgacccgcgctcgacctgggccgacaagcctgcctatgaccgccaggcggcaagactggtcggcatgttcgccgtcaacttcgaaaaattcgagccgcatgtcgatgccaccgtcatgggcgcggcgccccggatgcaggaagcggcggagtag

SEQ ID NO: 83089 - protein, 536 aa, Rhizobium loti
MSEVGKRNPACPIDRIGLKTTGMVRYNFGAAALYEEAIRRGEARLTAHGALVAETGQHTGRSPKDKFVVRDAATEPEVWWDNNKAISPAQFETLFADFLAHAANKDLYVQDLVGGADAELKLPTRVITEFAWHSLFIRNLLIRPDKAELGQFVPEMTIIDLPSFRADPARHGSRTETVIAVDLTRQIVLIGGTSYAGEMKKSVFTMLNYILPQKGVMPMHCSANEGPAGDAAVFFGLSGTGKTTLSADPSRTLIGDDEHGWGPHGIFNFEGGCYAKTIKLSAEAEPEIFATTQRFGTVLENVVLDADGVPDFNDGRLTENTRCAYPLDFIPNASKTGRASHPKNIIMLTADAFGVMPPIARLTPAQAMYHFLSGYTAKVAGTEKGVTEPEATFSTCFGAPFMPRHPSEYGNLLRELIASHGADCWLVNTGWTGGAYGTGKRMPIKATRALLTAALDGSLKTGEFRTDANFGFEVPVAVPGVDSAILDPRSTWADKPAYDRQAARLVGMFAVNFEKFEPHVDATVMGAAPRMQEAAE

SEQ ID NO: 83090 - DNA, 1976 bp, Rhizobium meliloti
  CDS (206)..(1816): transl_table=11
gatccggtttccccgcaattggcctcgcaggtgggtttccggaagctgcgattcaaccgattaaaaaatgcatatttttctttaaatcgattaatatactgaattcattatccttttagaattggctatcttgtcttgggtcagccttgccggtatgttccgacgaaattcaacgccaatggccaaacacgaaggaagcttgaccatggatgagctcggcagccgcaatccctctatcggactggaatcgatcggattttccgacctgtcggtggtccgctacaacttcgaggcggcgcagctttacgaagaagccctggcccgcggtgaagccgaattgacggcccatggcgcgctttgcgcccgcaccggccagcacacgggccgctcgcccaaggacaagtatgtcgtgcgcgacgccaacacggccgaccagatctggtgggacaacaacagcgcgatttcgccggagcatttcgaggttcttcgtcgggacatgctcgcgcatgcaaagggcatgtcgctgtatgtccaggacctcgtcggcggtgccgacccggagaacgcgctgccgacgcgcgtcgttaccgagttcgcctggcactcgctgttcatccgcaatctgttgatccgcccggagcgcgaggcgcttccgtcttttcagccgaagctcacgatcatcgacctgccgagcttcaaggccgatcccgtacgccacggctgccgcagcgagacggtcatcgcctgcgacctgaccaacggcctcgtgctgatcggcggtacttcctatgcgggcgagatgaagaagtcggttttcaccgttctcaattacctgctgcccgagaagtcggtgatgccgatgcactgctcggccaatgtcgggcccgccggcgacacggcgatcttcttcggcctctcgggcaccggcaagacgacgctctccgccgatccgaaccgtaccctgatcggtgacgacgagcacggctggagcgaaaagggcgtcttcaatttcgagggcggctgctatgccaaggcgatccgcctttcggaagcggccgagcccgagatctttgcgacgacgcggcgcttcggtaccgtgatggagaacgtcgtcctcgacgagcggcgccttcctgacttcgacgacggctcgctgacggagaacacccgctgcgcctatccgctgcacttcattccgaacgccagcaagaccggcacggcgccgcagccgcgcacgatcatcatgctgacggcggacgccttcggggttctgccgccgatcgccaagctgacgccggaacaggccatgtatcacttcctctccggctacaccgccaaggttgccggcaccgaaaagggcgtgacggagccggaggcgactttctcgacctgcttcggcgcacccttcatgccgcgccatccgtccgaatacggcaatcttctcaaggacctcatcgccaggaacggcgtcacctgctggctcgtcaacaccggctggaccggcggcgcctttggcacgggaagccgcatgccgatcaaggtgacgcgcgcgcttctttcggcagcgctcgacggctcgctgaacaacgcctcgttccgcacggatgcgaatttcggcttcgcggtgccggtgtcggtaccgggcgtcgaggccggcattctcgacccgcgctcgacctgggcggatggcgtggcttatgacacccaggcacggcgcctcgtcgacatgttcattgccaacttcgccaagttcgagcgccatgtcgacggcagcgtgcgcgacgcagccccgggcgcgagggtggccgccgaataaaccggtctcttgccatgattcacgtgaaacccggctgcctgcggccgggttttgcatttgcggctggttttcaggcatgcgatagaacggccgaggaagaaccatggcaagcgaaccgctttacatcaacgaaaacatcgtgatcgccggatgggagctc

SEQ ID NO: 83091 - protein, 536 aa, Rhizobium meliloti
MDELGSRNPSIGLESIGFSDLSVVRYNFEAAQLYEEALARGEAELTAHGALCARTGQHTGRSPKDKYVVRDANTADQIWWDNNSAISPEHFEVLRRDMLAHAKGMSLYVQDLVGGADPENALPTRVVTEFAWHSLFIRNLLIRPEREALPSFQPKLTIIDLPSFKADPVRHGCRSETVIACDLTNGLVLIGGTSYAGEMKKSVFTVLNYLLPEKSVMPMHCSANVGPAGDTAIFFGLSGTGKTTLSADPNRTLIGDDEHGWSEKGVFNFEGGCYAKAIRLSEAAEPEIFATTRRFGTVMENVVLDERRLPDFDDGSLTENTRCAYPLHFIPNASKTGTAPQPRTIIMLTADAFGVLPPIAKLTPEQAMYHFLSGYTAKVAGTEKGVTEPEATFSTCFGAPFMPRHPSEYGNLLKDLIARNGVTCWLVNTGWTGGAFGTGSRMPIKVTRALLSAALDGSLNNASFRTDANFGFAVPVSVPGVEAGILDPRSTWADGVAYDTQARRLVDMFIANFAKFERHVDGSVRDAAPGARVAAE

SEQ ID NO: 83092 - DNA, 1599 bp, Rhodobacter sphaeroides
  CDS (1)..(1599): transl_table=11
atgaatttcggacgcgtgaacccagcgcagacgctggacgcacaaggcatcactggacttggcgaggtgcattacaacctcatcgagcccgcgctggtcgaagcggccgtgacgcgcggcgaaggccggctgggccgcggaggcgcgttcctctgctcgaccggtgccttcacgggccgctcgcccaaggacaagttcgtcgtgcgcacgccgtcggtggaagacacgatctggtgggagaacaacgctcccatggatccggccgccttcgaccggctccatgccgacatgctcgagcacatgaagggccgcacctacttcgtgcaggacctgttcgccggcgccgaccccgagctgcgcctcgacgtgcggatggtgaccgaactcgcctggcacggcctcttcatccgccacatgctgcgccgccccgagcgcgccgagctcgacagcttcgtgcccgactggacggtcatcaactgcccgtccttcaaggccgaccccgagcgccacggctgccgcaccgacacggtgatcgtgctcaacttcgagcgcaagctgatcctgatcgccaacaccgaatatgccggcgagaacaagaagtcggtcttcacgctgctgaactacatcctgcccggcaagggcgtcatggcgatgcactgctcggccaaccacgcgctcggcgacacggacgatgcggcagtgttcttcgggctctccggcaccggcaagaccacgctctcggccgatccctcccgcacgctgatcggcgacgacgagcacggctggtcggaccggggaaccttcaacttcgagggcggctgctacgccaagacgatcaatctctcggccgaagccgaacccgagatctatgccacgacctcgaagttcgcgaccgtggtcgagaacatggtctatgacgaagagacgctcgagctcgacttcaacgacgacagcctgacggcgaacacgcgctgcgcctatccgctcgactatatctcgaacgcgtccgagagcgggctcggcgggcatccgaagaacgtcatcatgctgacctgcgacgccttcggcgtgctgccgcccatcgcgcggctgacgcccgcgcaggccatgtatcacttcctgtcgggcttcacctcgaaggtggccggcaccgaacgtggcgtgaccgagccgcagccgaccttctcgacctgcttcggcgcgcccttcatgccgcggcgccccgaggtttacggcaagctcctgcaggagaagatcgccaagcacggcgcaacctgctggctcgtgaacaccggctggaccggcggcgcctacggcaccggcaagcggatgccgatcaaggccacccgcgcgctgctgaccgcggcgctcgacggctcgctctcgggcgttcagttccgccgcgatccgaacttcggcttcgaggtgccggtggacctgcatggggtagatgcgaagctgctcgatccgcgctcgacctgggccgatccggcggcctacgatcagcaggcgaagaagctggtggagatgttcgccaacaacttcgcgcaatatgtccccttcatcgatgcggatgtgaaggcggccgcgatcggctga

SEQ ID NO: 83093 - protein, 532 aa, Rhodobacter sphaeroides
MNFGRVNPAQTLDAQGITGLGEVHYNLIEPALVEAAVTRGEGRLGRGGAFLCSTGAFTGRSPKDKFVVRTPSVEDTIWWENNAPMDPAAFDRLHADMLEHMKGRTYFVQDLFAGADPELRLDVRMVTELAWHGLFIRHMLRRPERAELDSFVPDWTVINCPSFKADPERHGCRTDTVIVLNFERKLILIANTEYAGENKKSVFTLLNYILPGKGVMAMHCSANHALGDTDDAAVFFGLSGTGKTTLSADPSRTLIGDDEHGWSDRGTFNFEGGCYAKTINLSAEAEPEIYATTSKFATVVENMVYDEETLELDFNDDSLTANTRCAYPLDYISNASESGLGGHPKNVIMLTCDAFGVLPPIARLTPAQAMYHFLSGFTSKVAGTERGVTEPQPTFSTCFGAPFMPRRPEVYGKLLQEKIAKHGATCWLVNTGWTGGAYGTGKRMPIKATRALLTAALDGSLSGVQFRRDPNFGFEVPVDLHGVDAKLLDPRSTWADPAAYDQQAKKLVEMFANNFAQYVPFIDADVKAAAIG

SEQ ID NO: 83094 - DNA, 1620 bp, Salmonella paratyphi
  CDS (1)..(1620): transl_table=11
atgcgcgttaacaatttaaccccgcaagatctcaaggcttatggtatcaacgacgtccaggatatcgtttacaatcccagctacgacaccctttatcaggaagaacttaatcctggtctggaaggctatgagcgtggcgtgttaactaacctgggcgctgttgccgttgataccggtatttttaccggtcgttcgcctaaggataagtatattgttcgcgacgacaccacgcgtgatacgctgtggtggtccgataagggtaaaggtaaaaacgataataagccgctttcccaggaaacctggcaacacctgaaaggtctggtgacgcatcagctttccggtaaacgcttattcattgttgatgcgttctgcggcgcaaatgccgatacgcgtctttccgtgcgctttattacggaagtcgcctggcaggcccacttcgttaaaaatatgttcattcgcccaacggacgaagagctggtaggcttcaaacctgactttattgtcatgaacggcgcgaagtgcaccaacccgcagtggaaagagcaagggctgaactcggaaaacttcgtggcgttcaacctgactgaacgtattcagcttattggcggcacctggtacggcggcgaaatgaaaaaagggatgttctcggtaatgaactacctgctgccgctcaaaggtatcgcctcaatgcactgttccgccaacgtgggtgaaaaaggcgatgtcgcggtcttcttcggcctttccggtaccggaaaaaccactctctccaccgacccgaaacgtcgtctgattggcgatgatgagcacggttgggatgacgacggcgtgttcaactttgaaggcggctgctacgccaaaaccatcaaactgtcgaaagaagcggagccagaaatttatcatgcgattcgccgtgatgcgttgctggaaaacgtcaccgtgcgcgaagacggcaccgttgatttcgacgatggttccaaaaccgaaaacacccgcgtctcttacccgatctatcatatcgataacatcgttaagcccgtatccaaagcaggtcacgccaccaaggttatcttcctgacggcggatgctttcggcgtgttgccgccggtttcccgtttaaccgctaaccagacgcagtaccacttcctgtcgggtttcaccgctaaactggccggcaccgaacgcggcgtcaccgaaccgacccccaccttctccgcctgcttcggcgccgcgttcctgacgctgcacccgacgcagtatgctgaggtgctggtgaaacgtatgcaggcagcaggcgcgcaggcttatctggttaacaccggctggaatggcaccggcaaacgtatctccatcaaagatacgcgcgcgattattgacgccattctgaacggttctcttgataacgcggaaaccttccgtctgccgctgttcgatctggcgatcccgactgaactgcctggcgtggatacccacattctcgacccgcgtaacacctacgcgtcgccggaacaatggcaggaaaaagccaccgcgctggcgaaactgttcattgagaacttcgagaagtatacggataccccggcaggcgaagcgctggttagcgccggaccgaagctgtaa

SEQ ID NO: 83095 - protein, 539 aa, Salmonella paratyphi
MRVNNLTPQDLKAYGINDVQDIVYNPSYDTLYQEELNPGLEGYERGVLTNLGAVAVDTGIFTGRSPKDKYIVRDDTTRDTLWWSDKGKGKNDNKPLSQETWQHLKGLVTHQLSGKRLFIVDAFCGANADTRLSVRFITEVAWQAHFVKNMFIRPTDEELVGFKPDFIVMNGAKCTNPQWKEQGLNSENFVAFNLTERIQLIGGTWYGGEMKKGMFSVMNYLLPLKGIASMHCSANVGEKGDVAVFFGLSGTGKTTLSTDPKRRLIGDDEHGWDDDGVFNFEGGCYAKTIKLSKEAEPEIYHAIRRDALLENVTVREDGTVDFDDGSKTENTRVSYPIYHIDNIVKPVSKAGHATKVIFLTADAFGVLPPVSRLTANQTQYHFLSGFTAKLAGTERGVTEPTPTFSACFGAAFLTLHPTQYAEVLVKRMQAAGAQAYLVNTGWNGTGKRISIKDTRAIIDAILNGSLDNAETFRLPLFDLAIPTELPGVDTHILDPRNTYASPEQWQEKATALAKLFIENFEKYTDTPAGEALVSAGPKL

SEQ ID NO: 83096 - DNA, 1617 bp, Salmonella typhimurium
  CDS (1)..(1617): transl_table=11
atgcgcgttaacaatttaaccccgcaagatctcaaggcttatggtatcaacgacgtccaggatatcgtttacaatcccagctacgacaccctttatcaggaagaacttaatcctggtctggaaggctatgagcgtggcgtgttaactaacctgggcgctgttgccgttgataccggtatttttaccggtcgttcgcctaaggataagtatattgttcgcgacgacaccacgcgtgatacgctgtggtggtccgataagggtaaaggtaaaaacgataataagccgctttcccaggaaacctggcaacacctgaaaggtctggtgacgcatcagctttctggtaaacgcttattcattgttgatgcgttctgcggcgcaaatgccgatacgcgtctttccgtgcgctttattacggaagtcgcctggcaggcccacttcgttaaaaatatgttcattcgcccaacggacgaagagctggtaggcttcaaacctgactttattgtcatgaacggcgcgaagtgcaccaacccgcagtggaaagagcaagggctgaactcggaaaacttcgtggcgttcaacctgactgaacgtattcagcttattggcggcacctggtacggcggcgaaatgaaaaaagggatgttctcggtaatgaactacctgctgccgctcaaaggtatcgcctcaatgcactgttccgccaacgtgggtgaaaaaggcgatgtcgcggtcttcttcggcctttccggtaccggaaaaaccactctctccaccgacccgaaacgtcgtctgattggcgatgatgagcacggttgggatgacgacggcgtgttcaattttgaaggcggctgctacgccaaaaccatcaaactgtcgaaagaagcggagccagaaatttatcatgcgattcgccgtgatgcgctgctggaaaacgtcaccgtgcgcgaagacggcaccgttgatttcgacgatggttccaaaaccgaaaacacccgcgtctcttacccgatctatcatatcgataacatcgttaagcccgtgtccaaagcaggtcacgccaccaaggttatcttcctgacggcggacttcggcgtgttgccgccggtttcccgtttaaccgctaaccagacgcagtaccacttcctgtcaggtttcaccgctaaactggccggcaccgaacgcggcgtcaccgaaccgacccccaccttctccgcctgcttcggcgccgcgttcctgacgctgcacccaacgcagtatgctgaggtgctggtgaaacgtatgcaggcagcaggcgcgcaggcttatctggttaacaccggctggaatggcaccggcaaacgtatctccatcaaagatacgcgcgcaattatcgacgccattctgaacggttctcttgataacgcggaaaccttccgtctgccgctgttcgatctggcgatcccgactgaactgccaggcgtggatacccacattctcgacccgcgtaacacctacgcgtcgccggaacaatggcaggaaaaagccaccgcgctggcgaaactgttcattgagaacttcgagaagtatacggataccccggcaggcgaagcgctggttagcgccggaccgaagctgtaa

SEQ ID NO: 83097 - protein, 538 aa, Salmonella typhimurium
MRVNNLTPQDLKAYGINDVQDIVYNPSYDTLYQEELNPGLEGYERGVLTNLGAVAVDTGIFTGRSPKDKYIVRDDTTRDTLWWSDKGKGKNDNKPLSQETWQHLKGLVTHQLSGKRLFIVDAFCGANADTRLSVRFITEVAWQAHFVKNMFIRPTDEELVGFKPDFIVMNGAKCTNPQWKEQGLNSENFVAFNLTERIQLIGGTWYGGEMKKGMFSVMNYLLPLKGIASMHCSANVGEKGDVAVFFGLSGTGKTTLSTDPKRRLIGDDEHGWDDDGVFNFEGGCYAKTIKLSKEAEPEIYHAIRRDALLENVTVREDGTVDFDDGSKTENTRVSYPIYHIDNIVKPVSKAGHATKVIFLTADFGVLPPVSRLTANQTQYHFLSGFTAKLAGTERGVTEPTPTFSACFGAAFLTLHPTQYAEVLVKRMQAAGAQAYLVNTGWNGTGKRISIKDTRAIIDAILNGSLDNAETFRLPLFDLAIPTELPGVDTHILDPRNTYASPEQWQEKATALAKLFIENFEKYTDTPAGEALVSAGPKL

SEQ ID NO: 83098 - DNA, 1620 bp, Selenomonas ruminantium
  CDS (1)..(1620): transl_table=11
atggcaaacatcgatcttagccaatatggcatcactggtactaccggaattctccacaatccgtcttacaagacgctttttgaagaagagactaaagaaggtttaacaggctacgaacagggtcaggtttccgaactgggcgctgttaacgtaaagactggtattttcaccggccgttctcctaaagataaattcatcgtggatgatgaaacttcccatgacactgtatggtgggattccgaagattatcacaacgataaccacagagctacgccggaaacctggaacgctctgaaagaaatcgctaaaaaggaactgtccaacaagaaactctacgttgtagatgctttctgcggtgccaacaaagacacccgcatggctgtccgcttcatcgtagaagttgcttggcaggcacatttcgtaacgaatatgttcatccagccgacggaagaagagctggctaacttcaagccggacttcgtagtttacaacgcttccaaggctaaagttgaaaactacaaggaacttggtctccattccgaaacggcagtagtatttaacctcacgagccgcgaacaggttatcatcaacacctggtacggcggtgaaatgaagaagggtatgttttccatgatgaactacttcctgccgctcaaggggattgctgctatgcattgctccgctaatacggacaagcagggccagaacacggctatcttcttcggcctctccggcacgggtaaaaccaccctgtccacggacccgaaacgtctcctgattggtgatgatgaacacggctgggatgatgaaggcgtattcaacttcgaaggcggctgctatgctaaggttatcaacctcgacatggaatccgaaccggacatctatggcgccatcaaacgtaacgctctgctcgaaaacgttaccctcgacgacaagggcaacatcgactttgccgataagaccatcacggaaaacacccgtgtatcctatcctatcgaccacatcaaaggcaccgttaagggctttgttaacgacaagagcgcagctccggcagctaagagtgttatcttcctgtccgctgatgctttcggcgtactgcccccggtttccatcctgactccggaacagacgaagtattacttcctctccggcttcacggctaaactggctggtacggaacgcggcatcaccgaaccgacaccgaccttctccgcttgcttcggtcaggcattcctcgaactgcatccgaccaagtacgcagaagaactcgttaagaagatggaggctaacggcacgaaggcatacctcgtgaacacgggctggaatggttccggcaagcgtatctccatcaaagatacccgtggcatcatcgatgctatccatagcggcgctatcaaaaaagctccgaccaagaagattccgttcttcaacctcgaagtaccgacggaacttgagggcgttgacaccaacatcctcgacccgaaggatacctatgctaacccggctgattgggaagcaaaagcaaaagacctcgctcagcgcttcatcaagaacttcgacaaatacacgaagaacaatgaagctggtaaggctctcgttgccgctggtccgcagctctaa

SEQ ID NO: 83099 - protein, 539 aa, Selenomonas ruminantium
MANIDLSQYGITGTTGILHNPSYKTLFEEETKEGLTGYEQGQVSELGAVNVKTGIFTGRSPKDKFIVDDETSHDTVWWDSEDYHNDNHRATPETWNALKEIAKKELSNKKLYVVDAFCGANKDTRMAVRFIVEVAWQAHFVTNMFIQPTEEELANFKPDFVVYNASKAKVENYKELGLHSETAVVFNLTSREQVIINTWYGGEMKKGMFSMMNYFLPLKGIAAMHCSANTDKQGQNTAIFFGLSGTGKTTLSTDPKRLLIGDDEHGWDDEGVFNFEGGCYAKVINLDMESEPDIYGAIKRNALLENVTLDDKGNIDFADKTITENTRVSYPIDHIKGTVKGFVNDKSAAPAAKSVIFLSADAFGVLPPVSILTPEQTKYYFLSGFTAKLAGTERGITEPTPTFSACFGQAFLELHPTKYAEELVKKMEANGTKAYLVNTGWNGSGKRISIKDTRGIIDAIHSGAIKKAPTKKIPFFNLEVPTELEGVDTNILDPKDTYANPADWEAKAKDLAQRFIKNFDKYTKNNEAGKALVAAGPQL

SEQ ID NO: 83100 - DNA, 1542 bp, Shewanella oneidensis
  CDS (1)..(1542): transl_table=11
atggcggatggattaaaccgcgttcattacaacccctctacagcacaactggtcgaatttgccctgctacgcggcgaaggtgaattgacggctaacggcgcactggttgctaaaacgggtacacgtacaggtcgctctcctggcgatcgttttattgttaaagaacccggttcagcggcagatattgaatggggaccagttaaccaagcatttgaacccggcgcgtttgaaggtttatgggcacgtgtagaagcattcctcgccgataaagagctgtttgtatctgacctcgaagtcggtgcagacccagaacattaccagccagtgcgcgtgacgactcaatacgcttggcaccaactgttcgcccgcaacctttttatcatcccagaagaatttaatcgtcaaaacaaacctgtatggcaaatcatcaacgcgccggacttcgtctgtatgcctgagcgtgatggcaccaattcagatgcggcggtgatcttaaactttgctgaacgcaaagtgttgttagcgggcctgaaatacgctggcgaaatgaaaaagtcgatgttctcggtgcaaaacttcctattgccagcacaaggtgtattaccaatgcactgctcggctaacgtaggtaaagacggcgacaccaccctattcttcggtctgtcaggtacaggaaaaaccaccctgtctgccgatccaaaacgcttcctgatcggtgacgatgagcacgggtgggcaccgggcggcgtattcaatatcgaaggcggttgctacgctaaatgtatcgatttaagccaaaagaacgagcctgtgatttgggatgcgattcgctttggtactgtgcttgaaaacgtggtaatggacgagcaccgcgtgcccaactacaaagacagcagcctgacggaaaacacccgtgcagcttacccactggagcatattgctcagcgtaaagaagataatcgcggcgccgagccacatgctgtggtgttcttaacctgcgacgtgtctggtgtgttgcctccggtgtctatcctgagcaaggagcaagcggcttaccacttcctctctggttacaccgcgaaagtgggttcaactgaaatcggttcaacttctgcaattcagtcaaccttctcaacttgcttcggcgcacctttcttcccacgtccagcaggtgtatatgctgagctgctgatgaagcgtatcgagtcattcggtagccaagtgtacttagtcaacactggctggactggcggtccacacggtattggtaaacgtttcgacatcccaactacccgcgctatcatcgatgcgatcgtcagcggcgagctgaaaaacgttgaaaccgtgcatttagataccttaaacctcgcggtgcctgtggcggttagcggtgtcgacagtaacttactcaatccagtaaacacgtggagcgataaagcactgtacgctgaatacgcgcaaaaactggccgcagctttcactaaaaactttgctaagtatcaagtgtcagacgcgattcgcaacgctggcccaaaggcttaa

SEQ ID NO: 83101 - protein, 513 aa, Shewanella oneidensis
MADGLNRVHYNPSTAQLVEFALLRGEGELTANGALVAKTGTRTGRSPGDRFIVKEPGSAADIEWGPVNQAFEPGAFEGLWARVEAFLADKELFVSDLEVGADPEHYQPVRVTTQYAWHQLFARNLFIIPEEFNRQNKPVWQIINAPDFVCMPERDGTNSDAAVILNFAERKVLLAGLKYAGEMKKSMFSVQNFLLPAQGVLPMHCSANVGKDGDTTLFFGLSGTGKTTLSADPKRFLIGDDEHGWAPGGVFNIEGGCYAKCIDLSQKNEPVIWDAIRFGTVLENVVMDEHRVPNYKDSSLTENTRAAYPLEHIAQRKEDNRGAEPHAVVFLTCDVSGVLPPVSILSKEQAAYHFLSGYTAKVGSTEIGSTSAIQSTFSTCFGAPFFPRPAGVYAELLMKRIESFGSQVYLVNTGWTGGPHGIGKRFDIPTTRAIIDAIVSGELKNVETVHLDTLNLAVPVAVSGVDSNLLNPVNTWSDKALYAEYAQKLAAAFTKNFAKYQVSDAIRNAGPKA

SEQ ID NO: 83102 - DNA, 1623 bp, Shigella flexneri
  CDS (1)..(1623): transl_table=11
atgcgcgttaacaatggtttgcccccgcaagaactcgaggcttatggtatcagtaacgtacatgatatcgtttacaacccaagctacgacctgctgtatcaggaagagctcgatccgagcctgacaggttatgagcgcggggtgttaactaatctgggtgccgttgccgtcgataccgggatcttcaccggtcgttcaccaaaagataagtatatcgtccgtgacgataccactcgcgatactttctggtgggcagacaaaggcaaaggtaagaacgacaacaaacctctctctccggaaacctggcagcatctgaaaggcctggtgaccaggcagctttccggcaaacgtctgttcgttgtcgacgctttctgtggtgcgaacccggatactcgtctttccgtccgtttcatcaccgaagtggcctggcaggcgcattttgtcaaaaacatgtttattcgcccgagcgatgaagagctggcaggtttcaaaccagactttatcgttatgaacggcgcgaagtgcactaacccgcagtggaaagaacagggtctgaactccgaaaacttcgtggcgtttaacctgaccgagcgcatgcagctgattggcggcacctggtacggcggcgaaatgaagaaagggatgttctcgatgatgaactacctgctgccgctgaaaggtatcgcttctatgcactgctccgccaacgttggcgagaaaggcgatgttgcggtgttcttcggcctttccggcaccggtaaaaccaccctttccaccgacccgaaacgccgcctgattggcgatgacgaacacggctgggacgatgacggcgtgtttaatttcgaaggcggctgctacgcaaaaactatcaagctgtcgaaagaagcggaacctgaaatctacaacgctatccgtcgtgatgcgctgctggaaaacgtcaccgtgcgtgaagatggcactatcgactttgatgatggttcaaaaaccgagaacacccgcgtttcttatccaatctatcacatcgataacatcgttaagccggtttccaaagcgggccacgcgactaaggttatcttcctgactgctgatgctttcggcgtgttgccgccggtttctcgcctgactgccgatcaaacccagtatcacttcctctctggcttcaccgccaaactggccggtactgagcgtggcatcaccgaaccgacgccaaccttctccgcttgcttcggcgcggcgttcctgtcgctgcacccgactcagtacgcagaagtgctggtgaaacgtatgcaggcggcgggcgcgcaggcttatctggttaacactggctggaacggcactggcaaacgtatctcgattaaagatacccgcgccattatcgacgccatcctcaacggttcgctggataatgcagaaaccttcactctgccgatgtttaacctggcgatcccaaccgaactgccgggcgtagacacgaagattctcgatccgcgtaacacctacgcttctccggaacagtggcaggaaaaagccgaaaccctggcgaaactgtttatcgacaacttcgataaatacaccgacacccctgcgggtgccgcgctggtagcggctggtccgaaactgtaa

SEQ ID NO: 83103 - protein, 540 aa, Shigella flexneri
MRVNNGLPPQELEAYGISNVHDIVYNPSYDLLYQEELDPSLTGYERGVLTNLGAVAVDTGIFTGRSPKDKYIVRDDTTRDTFWWADKGKGKNDNKPLSPETWQHLKGLVTRQLSGKRLFVVDAFCGANPDTRLSVRFITEVAWQAHFVKNMFIRPSDEELAGFKPDFIVMNGAKCTNPQWKEQGLNSENFVAFNLTERMQLIGGTWYGGEMKKGMFSMMNYLLPLKGIASMHCSANVGEKGDVAVFFGLSGTGKTTLSTDPKRRLIGDDEHGWDDDGVFNFEGGCYAKTIKLSKEAEPEIYNAIRRDALLENVTVREDGTIDFDDGSKTENTRVSYPIYHIDNIVKPVSKAGHATKVIFLTADAFGVLPPVSRLTADQTQYHFLSGFTAKLAGTERGITEPTPTFSACFGAAFLSLHPTQYAEVLVKRMQAAGAQAYLVNTGWNGTGKRISIKDTRAIIDAILNGSLDNAETFTLPMFNLAIPTELPGVDTKILDPRNTYASPEQWQEKAETLAKLFIDNFDKYTDTPAGAALVAAGPKL

SEQ ID NO: 83104 - DNA, 1599 bp, Silicibacter pomeroyi
  CDS (1)..(1599): transl_table=11
atgacatctggacgggttaacccgcaattccgcctcgaggatcagggcatcgagggtctgggcaatgtctattacaacttcatggaaccggcgctgatcgaagcggcgttgaagcggggcgagggaacgctgggcaatggcggggctttccttgtcaccaccggcaagttcaccggccgctcgcccaaggacaagcatgtggtcaagaccgccagcgttgccgacagcatctggtgggacaacaacgccgcaatgacccccgaagggttcgacgcgctttatgacgacatgctggcccatatgaagggcaaggactatttcgtgcaggatctggtcggcggcgccgacccggcctattcgatcaacgtgcgcatggtcaccgaactggcctggcacaacctgttcatccgtcacctgctgcgccgtcccgcgcgcgaggatctgaacgagttcgtggccgatttcaccgtcatcaactgccccagcttccaggccgacccggccaagcacggctgccgcagcgagaccgtgatcgcgatgaatttcgaccgcaagctgatcctgatcggcggcaccgagtatgcgggcgagaacaagaagtcggtgttcaccctgctgaactacatgctgccggaaaaaggcgtgatgccgatgcactgctcggccaaccacgcggtcggcaacccggtcgacaccgccgtgttctttggccttagcggcaccggcaagaccacgctgtcggccgacccggcgcgcgtgctgatcggcgatgacgaacatggctggtcggatcgcggcaccttcaacttcgaaggcggctgctatgccaagaccatcaacctcaaccccgaggccgagccggaaatctacgccaccaccaccaagttcgcgaccgtgatcgagaacatggtgtttgacgaagagaccaaggaactggatttcgacgatgacagcctgacggccaacatgcgttgcgcctatccgctggaatacatctcgaacgcctccgtctcggcactgggcgggcatcccaagaacatcatcatgctgacctgtgatgcctttggcgtgctgccgccgatcgcgcggctgaccccggcgcaggcgatgtatcacttcctgtcgggcttcacctcgaaggtggcgggaaccgagcgcggcgtgaccgagccgcagccgaccttttcgacctgcttcggcgcccccttcatgccgcgccgtcccgaggtctatggcaacctgctgcgtgacaagatcgcccgtcacggcgcgacctgctggctggtcaataccggctggaccggcggcgcctacggcgttggcagccggatgccgatcaaggccacccgcgccctgctgaccgccgcgctgaacggctcgctcaacaatgccgagttccgcaaggacggcaatttcggctttgacgtgccggtgtcggtgccgggcgtggccgaggttctgctggacccgcgccgcacctgggacgaccagggcgcctttgacaagcaggcggccaagctggtgcagatgttcgccgacaatttcgaacaatatgtcccctatatcgacgaggacgtgaaggccgtcgccatcggctga

SEQ ID NO: 83105 - protein, 532 aa, Silicibacter pomeroyi
MTSGRVNPQFRLEDQGIEGLGNVYYNFMEPALIEAALKRGEGTLGNGGAFLVTTGKFTGRSPKDKHVVKTASVADSIWWDNNAAMTPEGFDALYDDMLAHMKGKDYFVQDLVGGADPAYSINVRMVTELAWHNLFIRHLLRRPAREDLNEFVADFTVINCPSFQADPAKHGCRSETVIAMNFDRKLILIGGTEYAGENKKSVFTLLNYMLPEKGVMPMHCSANHAVGNPVDTAVFFGLSGTGKTTLSADPARVLIGDDEHGWSDRGTFNFEGGCYAKTINLNPEAEPEIYATTTKFATVIENMVFDEETKELDFDDDSLTANMRCAYPLEYISNASVSALGGHPKNIIMLTCDAFGVLPPIARLTPAQAMYHFLSGFTSKVAGTERGVTEPQPTFSTCFGAPFMPRRPEVYGNLLRDKIARHGATCWLVNTGWTGGAYGVGSRMPIKATRALLTAALNGSLNNAEFRKDGNFGFDVPVSVPGVAEVLLDPRRTWDDQGAFDKQAAKLVQMFADNFEQYVPYIDEDVKAVAIG

SEQ ID NO: 83106 - DNA, 1593 bp, Staphylococcus aureus
  CDS (1)..(1593): transl_table=11
atgtcagtagacacatacactgaaacaactaaaattgacaaattactgaaaaaaccaacgtcacattttcaactttcgacgacacaactttataataaaatcttagacaataacgaaggggtattaacagaacttggtgctgttaatgcaagtactggaaaatatactggtcgttcgcctaaagacaaattttttgtctcagaaccttcatatagagataacattgactggggagaaattaatcaacctatcgatgaagaaactttcttgaagttataccataaagtactagactatttagataaaaaagatgaattatacgtatttaaaggctacgctggtagcgataaagatacaatgttaaaacttacagtcatcaatgaattagcatggcataatttatttgctaaaaatatgtttattagacctgaatcaaaagaagaagctacaaagattaaacctaacttcactatcgtttctgccccacattttaaagcagatccagaagttgatggtactaaatctgaaacctttgtcattatttcatttaaacacaaagtcattttaatcggcggtactgaatacgctggtgaaatgaaaaaaggtatcttctctgtaatgaattatctcttaccgatgcaagatattatgagcatgcattgctcagcaaacgttggtgaaaaaggcgatgttgcattattctttggtctatctggcacaggtaaaacaaccttatcggctgacccacaccgtaaactaatcggtgatgatgaacacggctggaataaaaacggggtctttaatatcgaaggtggctgctatgcaaaagcaattaatctttccaaagaaaaagaaccacagatttttgacgcaatcaaatatggtgcaattttagagaacactgtagttgcagaagatggttcagtggactttgaagacaatcgttatacagaaaacacgcgtgccgcttatccaattaatcacattgacaatattgtagtaccatctaaagcagcacatccaaatacaattattttcttaactgcggatgcatttggtgttattccaccgatttcaaagttaaataaagaccaagcaatgtatcatttcttgagtggtttcacttctaaattagctggcacagagcgtggtgtgacagaacctgaaccatcattctcaacatgtttcggcgcaccgttcttcccgttacaccctactgtttacgctgatttattaggtgaacttatcgatttacatgatgttgatgtttatcttgttaatactggatggactggcggaaaatatggtgtaggacgtagaatcagcttacattacacacgtcaaatggtaaaccaagcgatttctggcaaattgaaaaatgcagaatatacaaaggatagtacgtttggtttaagcattcctgtagaaattgaagatgtaccgaaaactattttaaatccaattaatgcttggagcgacaaagagaaatataaaacacaagcagaagatttaattcaacgttttgaaaagaacttcgaaaaatttggtgaaaaagttgaacatattgccgaaaaaggtagcttcaacaaataa

SEQ ID NO: 83107 - protein, 530 aa, Staphylococcus aureus
MSVDTYTETTKIDKLLKKPTSHFQLSTTQLYNKILDNNEGVLTELGAVNASTGKYTGRSPKDKFFVSEPSYRDNIDWGEINQPIDEETFLKLYHKVLDYLDKKDELYVFKGYAGSDKDTMLKLTVINELAWHNLFAKNMFIRPESKEEATKIKPNFTIVSAPHFKADPEVDGTKSETFVIISFKHKVILIGGTEYAGEMKKGIFSVMNYLLPMQDIMSMHCSANVGEKGDVALFFGLSGTGKTTLSADPHRKLIGDDEHGWNKNGVFNIEGGCYAKAINLSKEKEPQIFDAIKYGAILENTVVAEDGSVDFEDNRYTENTRAAYPINHIDNIVVPSKAAHPNTIIFLTADAFGVIPPISKLNKDQAMYHFLSGFTSKLAGTERGVTEPEPSFSTCFGAPFFPLHPTVYADLLGELIDLHDVDVYLVNTGWTGGKYGVGRRISLHYTRQMVNQAISGKLKNAEYTKDSTFGLSIPVEIEDVPKTILNPINAWSDKEKYKTQAEDLIQRFEKNFEKFGEKVEHIAEKGSFNK

SEQ ID NO: 83108 - DNA, 1593 bp, Staphylococcus aureus
  CDS (1)..(1593): transl_table=11
atgtcagtagacacatacactgaaacaactaaaattgacaaattactgaaaaaaccaacgtcacattttcaactttcgacgacacaactttataataaaatcttagacaataacgaaggggtattaacagaacttggtgctgttaatgcaagtactggaaaatatactggtcgttcgcctaaagacaaattttttgtctctgaaccttcatatagagataacattgattggggagaaattaatcaacctatcgatgaagaaactttcttgaagttataccataaagtactagactatttagataaaaaagatgaactatacgtatttaaaggctacgctggtagcgataaagatacaatgttaaaacttacagtcatcaatgaattagcatggcataatttatttgctaaaaatatgtttattagacctgaatcaaaagaagaagctacaaagattaaacctaacttcactatcgtttctgccccacattttaaagcagatccagaagttgatggtactaaatctgaaacctttgtcattatttcatttaaacacaaagtcattttaatcggcggtactgaatacgctggtgaaatgaaaaaaggtatcttctctgtaatgaattatctcttaccgatgcaagatattatgagcatgcattgctcagcaaacgttggtgaaaaaggcgatgttgcattattctttggtctatctggcactggtaaaacaaccttatcggctgatccacaccgaaaactaatcggtgatgatgaacacggctggaataaaaacggggtctttaatatcgaaggtggctgctatgcaaaagcaattaatctttccaaagaaaaagaaccacagatttttgacgcaatcaaatatggtgcgattttagagaacactgtagttgcagaagatggttcagtggactttgaagacaatcgttatacagaaaacactcgtgccgcttatccaattaatcacattgacaatattgtagtaccatcaaaagcagcacatccaaatacaattattttcttaactgcggatgcatttggtgttattccaccgatttcaaagttaaataaagaccaagcaatgtatcatttcttgagtggtttcacttctaaattagctggtacagagcgtggtgtgacagaacctgaaccatcattctcaacatgtttcggagcaccgttcttcccgttacaccctactgtttacgctgatttattaggtgaacttatcgatttacatgatgttgatgtttatcttgttaatactggatggactggcggaaaatatggtgtaggacgtagaatcagcttacattacacacgtcaaatggtaaaccaagcgatttctggcaaattgaaaaatgcagaatatacaaaagatagtacgtttggtttaagcattcctgtaaaaattgaagatgtaccgaaaacaattttaaatccaattaatgcttggagcgacaaagagaaatataaagcacaagcagaagatttaattcaacgttttgaaaagaacttcgaaaaatttggtgaaaaagttgaacatattgctgaaaaaggtagcttcaacaaataa

SEQ ID NO: 83109 - protein, 530 aa, Staphylococcus aureus
MSVDTYTETTKIDKLLKKPTSHFQLSTTQLYNKILDNNEGVLTELGAVNASTGKYTGRSPKDKFFVSEPSYRDNIDWGEINQPIDEETFLKLYHKVLDYLDKKDELYVFKGYAGSDKDTMLKLTVINELAWHNLFAKNMFIRPESKEEATKIKPNFTIVSAPHFKADPEVDGTKSETFVIISFKHKVILIGGTEYAGEMKKGIFSVMNYLLPMQDIMSMHCSANVGEKGDVALFFGLSGTGKTTLSADPHRKLIGDDEHGWNKNGVFNIEGGCYAKAINLSKEKEPQIFDAIKYGAILENTVVAEDGSVDFEDNRYTENTRAAYPINHIDNIVVPSKAAHPNTIIFLTADAFGVIPPISKLNKDQAMYHFLSGFTSKLAGTERGVTEPEPSFSTCFGAPFFPLHPTVYADLLGELIDLHDVDVYLVNTGWTGGKYGVGRRISLHYTRQMVNQAISGKLKNAEYTKDSTFGLSIPVKIEDVPKTILNPINAWSDKEKYKAQAEDLIQRFEKNFEKFGEKVEHIAEKGSFNK

SEQ ID NO: 83110 - DNA, 2862 bp, Staphylococcus epidermidis
  CDS (297)..(1889): transl_table=11
tatagatagagagaaggctcttaaacgtccattcgctcttatcgttcagaccatatttgtctgcaaacggtttggcacctttctttaaataaagaggttgctgggtttcattgggtccatgtccctccaccactcaggataagagaatccgttaaacttaataatatctaattcaaagtatgttgtcaattttatacattgtcactatttctattttaaagtggataaattcaatctgtatgttatactatctaaatgtaagggcttacataaattatcgtatggagggattgggtatgtctatagatacatacacagaaacacttaagataaataagctaatagaaaaagctacatcacattttcaactatcatcaacacaattatacaaaaaaattttaaaaaatcatgagggtgagttaactgaactgggggcaataaatgttaaaacaggtaagtacactggtcgttcacctaaagataaatttatagtcactgaaccatcgtataaggataatataaattggggagatatcaatcagcccatggatgaagaaacatttctaaaactttacaataaagtactcgattatttaaatcagaaagaggaactttacatatttagtggatatgcagggagcgataaagagtcacgtcttaaacttaaggtgataaatgaattagcttggcataatttatttgctcgtaacatgtttattcgtccagaatctatagatgaagctcaaaatataaaacccaacttcacaattgtttcagcacctcactttaaagctaatcccaaattagatgggacacatagtgaaacatttgtcattatatcttttaaacataaagtgattttaattggtggcacagaatatgctggtgaaatgaaaaaaggtattttctctgtaatgaactatttgcttccaatacaggatatcatgagtatgcattgttcagctaatgttggagaaaaaggagatgtagcactattctttggattatcaggaactggtaagacgacgctttctgccgatccaaaacgtaagttaattggtgacgatgaacatggttggaataaaaatggcgtttttaatattgagggtgggtgttatgcaaaagcaattcatttatctaaacagaaagagcctcaaatttataatgctattaaatacggaacaatattagaaaacacagttacaaatgatgacggtacggtagattttgatgataacacctatactgaaaacactcgcgccgcctaccctattgactatatagagaatattgttacaccttcaaaggcagcacatccgaatacgattatattcttaaccgctgatgcatttggagttatccctcctatttctaagctaactaaagatcaagcaatgtatcatttcttaagtggattcacgtctaaactagctggaacagaacgtggtgttactgaacctcaaccttcgttttcaacttgctttggtgcaccattcttacctttgagtccaacaaagtacgctgatctacttggaaatttaatcgatattcatgatgtagatgtatatctagtaaatactggatggacaggtggtaaatatggtgtagggcgaagaattagtctacactatactcgtgaaatggtagatcaagcaatatcaggtaaattaaaaaatactaaatatattaaagatgatacatttggcttaaatattccagttcaaattgacagtgtacctacaactattctgaatcctatcaatgcttggaacaataaagataactacaaagcacaagcttacgatttgattcaacgctttaataataattttaaaaaattcggcaaggaagtcgaacatattgccaacaaaggtgcatttaatcaataattaatataagcatttattacgctaaatttaaaagcattgtgcctgagaaagcttttaatatctcgggcacttaaatttttatttaaatgacgatggaaataataatacatttatttgaggatatctagatatgatattacatttctagagtttcaaacagtctctttatttaataactaattattcctaatatctacattgctatcatcaacttgtataatccattgttactatatatttaaatttttattttcgacgtcgttcatccattgatgtatatatcgaattacgtctctcatcgcaggaggtcgtggtacatgaccttcatccaattgataataggtttgataataaattcctttggattttaattttttttctaaatcataagcttgatgtattccaacttgaatatctttgccaccatgaataatgagaataggaggactatctttttttataaattgcattgcatctctgcttttataagctttcgcatctttttttggatgtccaaccattcgtcgtagcatacctctcaagtcaactcgttcttcatacattaaatgtatatcagatacgccaccccaaatcatataactatctacaggcaaatcattaaaagtaagtaatccttgtagacctccacgtgaaaatcctaccatatgtataaatgcagaaggatagttttgatttaaaagtcgaatcaaatgcgttacatcatttaaatcaccgcggtaaaattcatctcttccttcacttccattatttcctctatagtaaggacctataactaaagtatattcatttgcaaattgcataagtcttgcagctctctcccttagcttttctttttataattcattcaatttattttatttcatatcatgaacagctttttcatattgtctaacgatatcaaagtctgaatctttagtatcaacataaccttcatgagaatatacctcgctaa

SEQ ID NO: 83111 - protein, 530 aa, Staphylococcus epidermidis
MSIDTYTETLKINKLIEKATSHFQLSSTQLYKKILKNHEGELTELGAINVKTGKYTGRSPKDKFIVTEPSYKDNINWGDINQPMDEETFLKLYNKVLDYLNQKEELYIFSGYAGSDKESRLKLKVINELAWHNLFARNMFIRPESIDEAQNIKPNFTIVSAPHFKANPKLDGTHSETFVIISFKHKVILIGGTEYAGEMKKGIFSVMNYLLPIQDIMSMHCSANVGEKGDVALFFGLSGTGKTTLSADPKRKLIGDDEHGWNKNGVFNIEGGCYAKAIHLSKQKEPQIYNAIKYGTILENTVTNDDGTVDFDDNTYTENTRAAYPIDYIENIVTPSKAAHPNTIIFLTADAFGVIPPISKLTKDQAMYHFLSGFTSKLAGTERGVTEPQPSFSTCFGAPFLPLSPTKYADLLGNLIDIHDVDVYLVNTGWTGGKYGVGRRISLHYTREMVDQAISGKLKNTKYIKDDTFGLNIPVQIDSVPTTILNPINAWNNKDNYKAQAYDLIQRFNNNFKKFGKEVEHIANKGAFNQ

SEQ ID NO: 83112 - DNA, 1593 bp, Staphylococcus epidermidis
  CDS (1)..(1593): transl_table=11
atgtctatagatacatacacagaaacacttaagataaatcagctaatagaaaaagctacatcacattttcaactatcatcaacacaattatacaaaaaaattttaaaaaatcatgagggtgagttaactgaactgggggcaataaatgttaaaacaggtaagtacactggtcgttcacctaaagataaatttatagtcactgaaccatcgtataaggataatataaattggggagatatcaatcagcccatggatgaagaaacatttctaaaactttacaataaagtactcgattatttaaatcagaaagaggaactttacatatttagtggatatgcagggagcgataaagagtcacgtcttaaacttaaggtgataaatgaattagcttggcataatttatttgctcgtaacatgtttattcgtccagaatctatagatgaagctcaaaatataaaacccaacttcacaattgtttcagcacctcactttaaagctaatcccaaattagatgggacacatagtgaaacatttgtcattatatcttttaaacataaagtgattttaattggtggcacagaatatgctggtgaaatgaaaaaaggtattttctctgtaatgaactatttgcttccaatgcaggatataatgagtatgcattgttcagctaatgttggagaaaaaggagatgtagcactattctttggattatcaggaactggtaagacgacgctttctgccgatccaaaacgtaagttaattggtgacgatgaacatggttggaataaaaatggcgtttttaatattgagggtgggtgttatgcaaaagcaattcatttatctaaacagaaagagcctcaaatttataatgctattaaatacggaacaatattagaaaacacagttacaaatgatgacggtacgatagattttgatgataacacctatactgaaaacactcgcgccgcctaccctattgactatatagagaatattgttacaccttcaaaggcagcacatccgaatacgattatattcttaaccgctgatgcatttggagttatccctcctatttctaagctaactaaagatcaagcaatgtatcatttcttaagtggattcacgtctaaactagctggaacagaacgtggtgttactgaacctcaaccttcgttttcaacttgctttggtgcaccattcttacctttgagtccaacaaagtacgctgatctacttggaaatttaatcgatattcatgatgtagatgtatatctagtaaatactggatggacaggtggtaaatatggtatagggcgaagaattagtctacactatactcgtgaaatggtagatcaagcaatatcaggtaaattaaaaaatactaaatatattaaagatgatacatttggcttaaatattccagttcagattgacagtgtacctacaactattctaaatcctatcaatgcttggaacaataaagataactacaaagcacaagcttacgatttgattcaacgctttaataataattttaaaaaattcggcaaggaagtcgaacatattgccaacaaaggtgcatttaatcaataa

SEQ ID NO: 83113 - protein, 530 aa, Staphylococcus epidermidis
MSIDTYTETLKINQLIEKATSHFQLSSTQLYKKILKNHEGELTELGAINVKTGKYTGRSPKDKFIVTEPSYKDNINWGDINQPMDEETFLKLYNKVLDYLNQKEELYIFSGYAGSDKESRLKLKVINELAWHNLFARNMFIRPESIDEAQNIKPNFTIVSAPHFKANPKLDGTHSETFVIISFKHKVILIGGTEYAGEMKKGIFSVMNYLLPMQDIMSMHCSANVGEKGDVALFFGLSGTGKTTLSADPKRKLIGDDEHGWNKNGVFNIEGGCYAKAIHLSKQKEPQIYNAIKYGTILENTVTNDDGTIDFDDNTYTENTRAAYPIDYIENIVTPSKAAHPNTIIFLTADAFGVIPPISKLTKDQAMYHFLSGFTSKLAGTERGVTEPQPSFSTCFGAPFLPLSPTKYADLLGNLIDIHDVDVYLVNTGWTGGKYGIGRRISLHYTREMVDQAISGKLKNTKYIKDDTFGLNIPVQIDSVPTTILNPINAWNNKDNYKAQAYDLIQRFNNNFKKFGKEVEHIANKGAFNQ

SEQ ID NO: 83114 - DNA, 1590 bp, Thermus thermophilus
  CDS (1)..(1590): transl_table=11
atgcaacgtttggaagccctcggtattcaccccaagaagcgggtcttctggaacaccgtctcccccgtcctcgtggaacacaccctcctccggggagaaggccttctcgcccaccacggccccctggtggtggacaccaccccctacacggggagaagccccaaggacaagttcgtggtgcgggagccggaggtggaaggggagatctggtggggagaggtgaaccaacccttcgccccggaggcctttgaagccctctaccagagggtggtccagtacctctccgagcgggacctctacgtccaggacctctacgccggggcggaccggcgctaccggctcgccgtgcgggtggtgacggaaagcccctggcacgccctcttcgcccgcaacatgttcatcctcccccgccgcttcggcaacgacgacgaggtggaggccttcgtccccggcttcaccgtggtccacgccccctacttccaggcggaccccgagcgggacgggacgaggagcgaggtcttcgtggggatcagcttccagaggaggctcgtcctcatcgtgggcaccaagtacgccggggagatcaagaagagcatcttcaccgtcatgaactacctcatgcccaagcggggggtcttccccatgcacgcctcggccaacgtggggaaggaaggggacgtggcggtcttcttcggcctctccggcaccggcaagaccaccctctccaccgacccggaccgccccctcatcggcgacgacgagcacggctggagcgaggatggggtcttcaactttgagggcgggtgctacgccaaggtgatccgcctctccccggagcacgagcccctgatctacaaggcctccaaccagtttgaggccatcctggagaacgtggtggtcaacccggaaagccgccgggtccagtgggacgacgactccaagacggagaacacccgctcctcctaccccatcgcccacctgaagaacgtggtggagtcgggcgtggcgggccaccccagggccatcttcttcctctccgccgacgcctacggggtccttccccccatcgcccggctttccccggaggaggccatgtactacttcctctccggctacaccgcccgggtggcggggacggagcggggcgtgaccgagcccagggccaccttctccgcctgcttcggcgcccccttcctccccatgcaccccggggtgtacgcgaggatgctgggggagaagatcaggaagcacgcgccccgggtctacctggtgaacacgggctggaccggcggaccctacggggtggggtaccgcttccccctccccgtgacccgggcccttctgaaggccgccctctccggggccttggagaacgtcccctaccgcagggaccccgtcttcgggtttgaggtgcccctcgaggcccccggcgtgccccaggagctcttaaacccccgggagacctgggcggacaaggaggcctacgaccagcaggcgcggaagctcgcccgcctcttccaggaaaacttccagaaatacgcctcaggggtggccaaggaggtggccgaagccggtccccgcaccgagtga

SEQ ID NO: 83115 - protein, 529 aa, Thermus thermophilus [sequence omitted]

SEQ ID NO: 83116 - DNA, 1566 bp, Thermoanaerobacter tengcongensis
  CDS (1)..(1566): transl_table=11
atgcttaaccttgaaagattgggtttaatcaattttaaaaacgtttaccgaaatttgcccgtagcaaaactgatagaagaagctgtaaaaagagaggaaggagtacttgtaaataacggcgcctttaatgtgtacactggaaaatacacaggtcgatctccaaatgacaagttcattgtagacgaaccagaagttcatgaggatatatggtgggaaaataacaagcctatttccgtagaaaagtttgaaaagctgtacaataggcttattgcctatttacaaaacagagacctttttattttcgacggatttgtaggtgcagaccctcaatatagagtctccataagagtgataacagaatacgcttatcaaagtttaatggcaagacagcttttcatacgccccactgaaaaagaattacaaaattttgtcccggaatatactttaatcgcagcacctcgctttaaagcaatccccgaaattgacggtgttaactctgaggcttttatcatcttaagttttacaaaaaagctcataattattggaggcacccagtacggtggagaaatcaaaaaatccatattcaccttaatgaactaccttatgcctaaaaaaggcgtgctttccatgcattgttctgctaatataggaaaagacggtgacacagcccttttcttcggcctctccggtacaggaaagaccactctctctgcagaccctgaaagatttttaattggcgatgatgaacacggttggtctgaaagagggatttttaattttgaaggtggctgttatgctaagtgcatcaatctttcaagagaaaaagagcctcaaatatgggattcaataaggtttggcgcaattcttgaaaacgttgtatacgatgaagccacaagggaacttgactacacaagtgacaaaatcactgaaaacacgcgagcagcatatccaattgactttatacctggggcagttcaaagcgggataggaggacatcctaagactataatatttttgactgcagatgcgtttggagtactgcctcctatagcaaaactcacaaaagagcaggcaatgtactactttctgtccggatataccagtaaactcgctggaacagaaaggggaattacagagccacaagccactttttccacttgctttggtgctcccttcttacctttacctccaatggtatatgctaaaatgcttggagaaaaaattgaaaaatacgacacaaaagtctttttggtgaatactggatggtcaggaggcccttatggaattggaaagcgaataaacttagaatacaccagaaaaatggtatctgctgccttaaaaggagaattagataaagtagaatttaccaaagaccctatatttaatcttaacatccctgcttcttgtcccggagtaccttctgaaatcttaaaccccagaaatacatggaaagataaagaagagtatgacaaaacggcaaaaagactagcccaaaggtttatagaaaattttcaaaaatacaaagaggtaagtgaagaaataaaaaatgctggcccgaaagggtaa

SEQ ID NO: 83117 - protein, 521 aa, Thermoanaerobacter tengcongensis
MLNLERLGLINFKNVYRNLPVAKLIEEAVKREEGVLVNNGAFNVYTGKYTGRSPNDKFIVDEPEVHEDIWWENNKPISVEKFEKLYNRLIAYLQNRDLFIFDGFVGADPQYRVSIRVITEYAYQSLMARQLFIRPTEKELQNFVPEYTLIAAPRFKAIPEIDGVNSEAFIILSFTKKLIIIGGTQYGGEIKKSIFTLMNYLMPKKGVLSMHCSANIGKDGDTALFFGLSGTGKTTLSADPERFLIGDDEHGWSERGIFNFEGGCYAKCINLSREKEPQIWDSIRFGAILENVVYDEATRELDYTSDKITENTRAAYPIDFIPGAVQSGIGGHPKTIIFLTADAFGVLPPIAKLTKEQAMYYFLSGYTSKLAGTERGITEPQATFSTCFGAPFLPLPPMVYAKMLGEKIEKYDTKVFLVNTGWSGGPYGIGKRINLEYTRKMVSAALKGELDKVEFTKDPIFNLNIPASCPGVPSEILNPRNTWKDKEEYDKTAKRLAQRFIENFQKYKEVSEEIKNAGPKG

SEQ ID NO: 83118 - DNA, 1629 bp, Vibrio cholerae
  CDS (1)..(1629): transl_table=11
atgaccgttatggaacatactaaggctgcacaaatcgacctagcccaatatgggatcaccggcgtaactgaactggttcgtaacccgagctatgaaatgttatttgccgaagaaacccgttcagatctcgaaggttatgaacgtggtgtggtgactgaattgggtgctgttgcggttgatactggcatcttcactggccgctcaccaaaagataagtttatcgttaaagatgataccactcgcgatacgctgtggtggacgtcagacaaagcgaaaaacgacaacaaaccgatcaatcaagaagtgtggaatgacctgaaagccttggtgaccaagcagctttctggtaaacgcgtatttgtgctcgatggctactgtggtgccaacgccgatactcgcttaagtgttcgcttcatcaccgaagtagcatggcaagcacactttgtgaaaaacatgttcattcgtccaagcgaagaagagctggcacactttaaaccagactttgtcgtaatgaacggcgcaaaatgtaccaatgcgaagtggaaagagcacggtctgaactcagaaaacttcactgtgtttaacctgaccgagcgcatgcagctcatcggcggtacttggtacggcggtgagatgaaaaaaggtatgttcgcgatgatgaactacttcctgccgctacaaggcattgcctctatgcactgctctgccaacatgggtaaagcgggcgatgtcgccatcttcttcggtctttctggtacgggtaaaaccaccctatccaccgatccaaaacgtgcgttaattggtgacgatgagcacggctgggatgatgatggcgtgttcaactttgaaggcggctgctacgcgaaaaccatcaagctgtctaaagaagcagagccggatatctataacgcgatccgccgtgatgctctactggaaaacgtcacggttcgtagtgatggttcgattgattttgatgatggttcaaaaaccgagaacacccgtgtttcttaccctatttatcacatcgacaacatcgtaaaaccagtttccaaaggcggtcatgcgactaaggtgatcttcctgtctgccgatgcgtttggcgtattgcctccagtttcaaaactgacgccagagcaaaccaagtaccacttcttgtctggctttacggctaaactggcaggtactgagcgtggcattactgaacctaccccaaccttctccgcctgttttggcgcagcgttcctcactctgcacccaactcagtatgcagaagtgctggtaaaacgtatggaagcagcgggcgccgaagcctatctggttaacacaggttggaacggcagcggtaagcgcatctcaattaaagatacgcgcggtattatcgatgcgattttggatggttcgatcgaaaaagcggaaaccaaacatatcccaatctttaatctgcaagtgcccaccgcactgcccggcgtcgatcctatgatcctcgacccacgtgatacttatgttgacccactgcagtgggaaagcaaagccaaagacttggcaacgcgcttcatcaacaacttcgacaagtacacagataacgccgaaggtaaagcactggttgccgcgggcccaaagctcgactaa

SEQ ID NO: 83119 - protein, 542 aa, Vibrio cholerae
MTVMEHTKAAQIDLAQYGITGVTELVRNPSYEMLFAEETRSDLEGYERGVVTELGAVAVDTGIFTGRSPKDKFIVKDDTTRDTLWWTSDKAKNDNKPINQEVWNDLKALVTKQLSGKRVFVLDGYCGANADTRLSVRFITEVAWQAHFVKNMFIRPSEEELAHFKPDFVVMNGAKCTNAKWKEHGLNSENFTVFNLTERMQLIGGTWYGGEMKKGMFAMMNYFLPLQGIASMHCSANMGKAGDVAIFFGLSGTGKTTLSTDPKRALIGDDEHGWDDDGVFNFEGGCYAKTIKLSKEAEPDIYNAIRRDALLENVTVRSDGSIDFDDGSKTENTRVSYPIYHIDNIVKPVSKGGHATKVIFLSADAFGVLPPVSKLTPEQTKYHFLSGFTAKLAGTERGITEPTPTFSACFGAAFLTLHPTQYAEVLVKRMEAAGAEAYLVNTGWNGSGKRISIKDTRGIIDAILDGSIEKAETKHIPIFNLQVPTALPGVDPMILDPRDTYVDPLQWESKAKDLATRFINNFDKYTDNAEGKALVAAGPKLD

SEQ ID NO: 83120 - DNA, 1629 bp, Vibrio parahaemolyticus
  CDS (1)..(1629): transl_table=11
atgaccgttatggaacatacaaaggctgcaacacttgatctaaccaaacacggactgcataacgttaaagaggttgttcgcaacccaagctacgaattgctgtttgaggaagaaacgcgcgctgacctaactggttacgaacgcggtgtggttactgaattaggtgcggttgctgttgatacaggcatctttactggtcgctcaccaaaagataaatacatcgttaaagatgcgacgacagaagaacacatgtggtggacttctgacaccgtaaaaaatgacaacaaaccaatcactcaggaagtgtggaacgacctaaaagagttggtgactaaccagttgtctggcaaacgcctatttgtcgttgacggttattgtggtgctaacccagatactcgcttgagcattcgtgtgatcacggaagtagcatggcaagcacacttcgtaaaaaacatgttcattcgtcctaccgaagaagaacttgcaacgtttgaacctgacttcgtagtaatgaacggcgcgaaatgcaccaacccgaaatgggaagagcaaggtctgaactctgaaaacttcacggtcttcaaccttactgagcgtacacaactgatcggtggtacgtggtacggcggcgagatgaagaaaggcatgttcgcgatgatgaactacttccttcctctgaaagacatcgcttcgatgcactgtagtgccaacatgggcaaagacggcgacgtagcagtattcttcggcctatctggtacaggtaaaacaacactctctaccgaccctaaacgcgctctaattggtgatgatgagcacggctgggatgacgatggtgtcttcaacttcgaaggcggttgttacgcgaaaaccatcaagctatcgaaagaagcggagccagacatctacaacgcgatccgccgcgatgcgctgctagaaaacgtaacggttcgtagcgatggctctatcgattttgatgacggttctaagacagaaaacacacgtgtttcttaccctatctaccacatcgaaaacatcgttaagccagtatcaaaaggcggtcacgcaaacaaagtgatcttcctatcggcagacgcatttggcgtgttaccgccagtatctaagttgactccagagcaaaccaaataccacttcctatctggctttactgcaaaactggctggcacagagcgaggcattactgagccaacaccaacattctctgcatgttttggcgcagcgttcttaacgcttcacccaactaaatacgcagaagtactggtaaaacgtatggaagccgcaggtgcagaagcatacctagtgaacaccggctggaacggcacaggtaaacgtatctctatccaagatacgcgcggcatcattgatgcgatcctagatggctcgattgaagatgcgccaactaagcacatcccaatcttcaaccttgaagtaccgacttcactaccaggtgtggatccaagcatccttgaccctcgtgacacgtacgttgacccactacaatgggaaagcaaagcgaaagacttggctgagcgctttatcaataactttgataagtacacagacaacgcggaaggtaaagcactggttgcggctggtcctcaactggactaa

SEQ ID NO: 83121 - protein, 542 aa, Vibrio parahaemolyticus
MTVMEHTKAATLDLTKHGLHNVKEVVRNPSYELLFEEETRADLTGYERGVVTELGAVAVDTGIFTGRSPKDKYIVKDATTEEHMWWTSDTVKNDNKPITQEVWNDLKELVTNQLSGKRLFVVDGYCGANPDTRLSIRVITEVAWQAHFVKNMFIRPTEEELATFEPDFVVMNGAKCTNPKWEEQGLNSENFTVFNLTERTQLIGGTWYGGEMKKGMFAMMNYFLPLKDIASMHCSANMGKDGDVAVFFGLSGTGKTTLSTDPKRALIGDDEHGWDDDGVFNFEGGCYAKTIKLSKEAEPDIYNAIRRDALLENVTVRSDGSIDFDDGSKTENTRVSYPIYHIENIVKPVSKGGHANKVIFLSADAFGVLPPVSKLTPEQTKYHFLSGFTAKLAGTERGITEPTPTFSACFGAAFLTLHPTKYAEVLVKRMEAAGAEAYLVNTGWNGTGKRISIQDTRGIIDAILDGSIEDAPTKHIPIFNLEVPTSLPGVDPSILDPRDTYVDPLQWESKAKDLAERFINNFDKYTDNAEGKALVAAGPQLD

SEQ ID NO: 83122 - DNA, 1629 bp, Vibrio vulnificus
  CDS (1)..(1629): transl_table=11
atgaccgttatggaacatacaaaggctgcatcaattgatctaaccaagcatggtcttcgcaacgtaaaagaggttgtgcgcaacccaagttacgaaatgctgtttgcagaagagactcgagctgatctcgaaggctacgaaaaaggcgtagtgacagagctcggcgcggtggctgtagacacaggcatcttcactggccgctcaccaaaagacaaatacattgtgaaagatgcgacaaccgaagaacatatgtggtggacaacaccagccgtcccgaacgataacaagccaatcacacaagaagtgtggaatgacctaaaacaactggtcactaaccagctttctggcaagcgcgtttttgtcattgatggttattgtggtgccaaccctgatacccgtcttagcattcgagtcatcaccgaagtggcgtggcaagcgcatttcgttaagaacatgttcatccgcccaaccgaagaagaattggccagctttgagcctgatttcgtggtgatgaacggtgcaaaatgcaccaaccaaaagtggaaagagcacggtctgaactctgaaaacttcacggtgtttaacctaactgagcgcatgcagttgatcggcggtacttggtacggcggtgagatgaagaaaggcatgttcgcgatgatgaactacttcctgcctcttaaaggcattgcgtcgatgcactgttctgccaacatgggcaaagaaggtgatgtggcgatcttcttcggtctatctggtacgggtaaaacaacgctgtcgaccgatccaaaacgcgcgctgattggcgatgacgagcacggctgggatgacgacggtgtgtttaacttcgaaggtggttgttacgcgaaaaccatcaagctgtcgaaagaagctgagcctgatatttacaatgccatccgccgcgatgcactgcttgaaaacgtaactgttcgcaatgacggctcgatcaactttgatgatggttcgaaaaccgagaacactcgcgtttcttacccaatccatcacattgaaaacatcgttaagccagtatcaaaaggcggtcatgccaacaaagtgatcttcctttctgccgatgcgtttggcgtgttacctccggtgtctaaactgaccccagaacaaactaagtatcacttcctatctggctttactgcgaagttggctggtactgagcgtggtattactgaaccaacaccaactttctctgcgtgttttggtgccgcgttcctgacgcttcacccaaccaagtacgctgaagtactggtaaaacgtatggaagaagcaggggcagaagcctacctcgtcaataccggttggaacggtagcggcaagcgtatctcaatccaagatacgcgcggtattatcgatgcgatccttgatggttctattgaagaagcgccaaccaaacacgtgcctatcttcaatctagaagtaccaacatcacttcctggtgtggatccaaccatccttgatccacgtgacacttacgttgacccgctacagtgggaaagcaaagcgcaagatcttgctcaacgctttatcaacaacttcgctaagtacaccgacaacgcggaaggtcaatcacttgtggctgcaggcccacaactcgattag

SEQ ID NO: 83123 - protein, 542 aa, Vibrio vulnificus
MTVMEHTKAASIDLTKHGLRNVKEVVRNPSYEMLFAEETRADLEGYEKGVVTELGAVAVDTGIFTGRSPKDKYIVKDATTEEHMWWTTPAVPNDNKPITQEVWNDLKQLVTNQLSGKRVFVIDGYCGANPDTRLSIRVITEVAWQAHFVKNMFIRPTEEELASFEPDFVVMNGAKCTNQKWKEHGLNSENFTVFNLTERMQLIGGTWYGGEMKKGMFAMMNYFLPLKGIASMHCSANMGKEGDVAIFFGLSGTGKTTLSTDPKRALIGDDEHGWDDDGVFNFEGGCYAKTIKLSKEAEPDIYNAIRRDALLENVTVRNDGSINFDDGSKTENTRVSYPIHHIENIVKPVSKGGHANKVIFLSADAFGVLPPVSKLTPEQTKYHFLSGFTAKLAGTERGITEPTPTFSACFGAAFLTLHPTKYAEVLVKRMEEAGAEAYLVNTGWNGSGKRISIQDTRGIIDAILDGSIEEAPTKHVPIFNLEVPTSLPGVDPTILDPRDTYVDPLQWESKAQDLAQRFINNFAKYTDNAEGQSLVAAGPQLD

SEQ ID NO: 83124 - DNA, 1629 bp, Vibrio vulnificus
  CDS (1)..(1629): transl_table=11
atgaccgttatggaacatacaaaggctgcatcaattgatctaaccaagcatggtcttcgcaacgtaaaagaggttgtgcgcaacccaagttacgaaatgctgtttgcagaagagactcgagctgatctcgaaggctacgaaaaaggcgtagtgacagagctcggcgcggtggctgtagacacaggcatcttcactggccgctcaccaaaagacaaatacattgtgaaagatgcgacaaccgaagaacatatgtggtggacaacaccagccgtcccgaacgataacaagccaatcacacaagaagtgtggaatgacctaaaacaactggtcactaaccagctttctggcaagcgcgtttttgtcattgatggttattgtggtgctaaccctgatacccgtcttagcattcgagtcatcaccgaagtggcgtggcaagcgcatttcgttaagaacatgttcattcgtccgaccgaagaagaattggccagctttgagcctgatttcgtggtgatgaatggtgcgaaatgcaccaaccaaaagtggaaagagcacggtctgaactctgaaaacttcacggtgtttaacctaactgagcgcatgcagttgatcggcggtacttggtacggcggtgagatgaagaaaggcatgttcgcgatgatgaactacttcctgcctcttaaaggcattgcgtcgatgcactgttctgccaacatgggcaaagaaggtgatgtggcgatcttcttcggtctatctggtacgggtaaaacaacgctgtcgaccgatccaaaacgcgcactaattggcgatgacgagcacggctgggatgacgacggcgtgtttaacttcgaaggcggttgttacgcgaaaaccatcaagctgtcaaaagaagctgagcctgatatttacaatgccatccgccgcaatgcactgcttgaaaacgtgaccgttcgcaatgacggctcgatcaactttgatgatggttcgaaaaccgagaacactcgcgtttcttacccaatccatcacattgaaaacatcgttaagccagtatcaaaaggcggtcatgccaacaaagtgatcttcctttctgccgatgcgtttggcgtgttgcctccggtgtctaaactgaccccagaacaaactaagtatcacttcctatctggctttactgcgaagttggctggtactgagcgtggtattactgaaccaacaccaactttctctgcgtgttttggtgccgcgttcctgacgcttcacccaaccaagtacgctgaagtactggtaaaacgtatggaagaagcaggggcagaagcctacctcgtcaatactggttggaacggtagcggcaagcgcatctcaatccaagatacgcgcggtattatcgatgcgatccttgatggttctattgaagaagcgccaaccaaacacgtgcctatcttcaatctagaagtaccaacatcacttcctggtgtggatccaaccatccttgatccacgtgacacttacgttgacccgctacagtgggaaagcaaagcgcaagatcttgctcaacgctttatcaataacttcgctaagtacaccgacaacgcggaaggtcaatcacttgtggctgcaggcccacaactcgattag

SEQ ID NO: 83125 - protein, 542 aa, Vibrio vulnificus
MTVMEHTKAASIDLTKHGLRNVKEVVRNPSYEMLFAEETRADLEGYEKGVVTELGAVAVDTGIFTGRSPKDKYIVKDATTEEHMWWTTPAVPNDNKPITQEVWNDLKQLVTNQLSGKRVFVIDGYCGANPDTRLSIRVITEVAWQAHFVKNMFIRPTEEELASFEPDFVVMNGAKCTNQKWKEHGLNSENFTVFNLTERMQLIGGTWYGGEMKKGMFAMMNYFLPLKGIASMHCSANMGKEGDVAIFFGLSGTGKTTLSTDPKRALIGDDEHGWDDDGVFNFEGGCYAKTIKLSKEAEPDIYNAIRRNALLENVTVRNDGSINFDDGSKTENTRVSYPIHHIENIVKPVSKGGHANKVIFLSADAFGVLPPVSKLTPEQTKYHFLSGFTAKLAGTERGITEPTPTFSACFGAAFLTLHPTKYAEVLVKRMEEAGAEAYLVNTGWNGSGKRISIQDTRGIIDAILDGSIEEAPTKHVPIFNLEVPTSLPGVDPTILDPRDTYVDPLQWESKAQDLAQRFINNFAKYTDNAEGQSLVAAGPQLD

SEQ ID NO: 83126 - DNA, 1626 bp, Wigglesworthia glossinidia brevipalpis
  CDS (1)..(1626): transl_table=11
atgaaaaataaagaaaatattttgattactttaaatcaagtcggcatagagcaatattctaatattatttataatccaaattatgacactttatttaaagaagaaactaataaaaatttaaaaggattagaaagatgtatattgactaaattacaagcaattgctgtagacacaggaaaatttactggaagatctccaaaagataaatattatgtaagagatgaaaaaacaaaaaacattatttggtggtcagacgataataatcacaaaagtaataatcatcctataaacaacgaaacatggaaagatctaaaaaaattaattgcaaataatttaaataataaaaaattatttgtaatagacgctttttgcggtgctaataaaaaaaatagattaaaagtaagatttattactgatatcgcatggcaagctcatttttttaaaaacatgtttatagaaccaatcgaacaagaattaaataaatttttacaagattttaccgtatttagtgttccaaaagcaattaataaaaaatggaaagatcataaattaaattcagaaaattttattgcaataaatttaactgaaaatactttgttgataggtggaacatggtatggaggtgaaataaaaaaaggtttattttctgtaatgaattacatattacctttaaaaaatatagcatctatgcattgttctgccaatgagggatttaaaaaagacgtagctttattttttggactatcaggaactggaaaaactacattatctactgactcaaaaagatatttaataggagatgatgagcatggatggtgtaaggatggtgtttttaattttgaaggaggatgttatgctaaaactattaacttatctgaagaaaaagaaccagaaatttttaatgctataaaaaaaaatgctattttagaaaatgttatggtattgaaagattcaaacataaacttttttgatggaacaaaaacagaaaattctagagtatcatatccaattaatcatattaaaaatatagttaagcctatttcccagtcaggacatcctaagaatattatatttttaacagcagatgcatttggagtattcccatttgtttctaaattatcatattttcaaggacaatattattttttatctggatttacatctaaattatctggaacagaacgtggaataattgatccagaacctactttttcctcttgttttggtgaagcttttttatctttacatcctactgtttatgctaaaatattattaagatatataaaatattataattcaaaaatatttttagttaatacaggatggaatggtaaaagagaaagatattctcttgaatatacaagatcaataataaacgctattctagatgataaaatagaatttattgatgaaaattatataccaattttcaatttgaaaattccaaagaaaattgaaggagtgcctgatctatttttagatcctagaaattttttttcttcaaatgaagaatggatcaaacaagcaactattttatctaaaaaatttattaaaaattttaaaaaattttcacatacaaagttaggaaaaaaattaattaaatttgaaccaaaaattaatttttaa

SEQ ID NO: 83127 - protein, 541 aa, Wigglesworthia glossinidia brevipalpis
MKNKENILITLNQVGIEQYSNIIYNPNYDTLFKEETNKNLKGLERCILTKLQAIAVDTGKFTGRSPKDKYYVRDEKTKNIIWWSDDNNHKSNNHPINNETWKDLKKLIANNLNNKKLFVIDAFCGANKKNRLKVRFITDIAWQAHFFKNMFIEPIEQELNKFLQDFTVFSVPKAINKKWKDHKLNSENFIAINLTENTLLIGGTWYGGEIKKGLFSVMNYILPLKNIASMHCSANEGFKKDVALFFGLSGTGKTTLSTDSKRYLIGDDEHGWCKDGVFNFEGGCYAKTINLSEEKEPEIFNAIKKNAILENVMVLKDSNINFFDGTKTENSRVSYPINHIKNIVKPISQSGHPKNIIFLTADAFGVFPFVSKLSYFQGQYYFLSGFTSKLSGTERGIIDPEPTFSSCFGEAFLSLHPTVYAKILLRYIKYYNSKIFLVNTGWNGKRERYSLEYTRSIINAILDDKIEFIDENYIPIFNLKIPKKIEGVPDLFLDPRNFFSSNEEWIKQATILSKKFIKNFKKFSHTKLGKKLIKFEPKINF

SEQ ID NO: 83128 - DNA, 2150 bp, Saccharomyces cerevisiae
  CDS (501)..(2150)
ataggaaaaaaccgagcttcctttcatccggcgcggctgtgttctacatatcactgaagctccgggtattttaagttatacaagggaaagatgccggctagactagcaagttttaggctgcttaacattatggataggcggataaagggcccaaacaggattgtaaagcttagacgcttctggttggacaatggtacgtttgtgtattaagtaaggcttggctggggatagcaacattgggcagagtatagaagaccacaaaaaaaaggtatataagggcagagaagtctttgtaatgtgtgtaacttctcttccatgtgtaatcagtatttctacttacttcttaaatatacagaagtaagacagataaccaacagcctttcccagatatacatatatatctttatttcagcttaaacaataattatatttgtttaactcaaaaataaaaaaaaaaaaccaaactcacgcaactaattattccataataaaataacaacatgtccccttctaaaatgaatgctacagtaggatctacttccgaagttgaacaaaaaatcagacaagaattggctcttagtgacgaagtcaccaccatcagacgcaatgctccagctgccgttttgtatgaagatggtctaaaagaaaataaaactgtcatttcatcaagcggtgcattgatcgcttattccggtgttaaaaccggaagatctccaaaggacaaacgtattgttgaagaacctacctcgaaagacgaaatttggtggggtccggtcaataaaccatgttctgaaagaacatggtctatcaaccgtgaaagagctgcagattacttgagaacaagagaccacatttatattgtcgatgcatttgcaggatgggatccaaaatacagaatcaaagtccgcgttgtttgtgccagggcttaccacgctttattcatgacaaatatgcttattagacctacagaagaagaattagcccattttggagaacctgattttactgtctggaacgctggtcagttcccagccaatttacacacccaggatatgtcttcaaagagtactatagaaattaacttcaaagcaatggaaatgatcattttaggtaccgaatacgccggtgaaatgaaaaaaggtattttcacagttatgttttacttgatgcctgtgcaccataacgttttaactttgcactcttccgccaaccagggtattcaaaacggtgacgttactttattctttggcctaagtggtaccgggaaaaccactttatccgcagacccacatagattgttgatcggcgatgatgaacattgttggtccgaccatggtgtcttcaatatcgaaggtggttgttacgccaagtgtattaatttatctgccgaaaaggagcctgaaattttcgacgctatcaagtttggttctgtattagaaaacgttatctatgacgagaagtcgcatgtagtcgactatgacgactcttctattactgaaaatactagatgtgcctacccaattgactacattccaagtgccaagattccatgtttggcggactctcatccaaagaacattatcctgctaacttgtgatgcttcgggtgttttaccaccagtatctaaattgactcctgaacaagtcatgtaccatttcatctctggttacacttctaaaatggctggtactgagcaaggtgtcactgaacctgaaccaacattttcatcttgtttcggacaacccttcctagccttgcaccctattagatacgcaaccatgttagctacaaagatgtctcaacataaagctaatgcgtacttaatcaacaccggctggactggttcttcctacgtatctggtggtaaacgttgcccattgaagtacacaagggccattctggattctattcatgatggttcgttagccaatgaaacgtacgaaactttaccgattttcaatcttcaagtacctaccaaggttaacggtgttccagctgagcttttgaatcctgctaaaaactggtctcaaggtgaatccaaatacagaggtgcagttaccaacttggccaacttgtttgttcaaaatttcaagatttatcaagacagagccacaccagatgtattagccgctggtcctcaattcgagtaa

SEQ ID NO: 83129 - protein, 549 aa, Saccharomyces cerevisiae
MSPSKMNATVGSTSEVEQKIRQELALSDEVTTIRRNAPAAVLYEDGLKENKTVISSSGALIAYSGVKTGRSPKDKRIVEEPTSKDEIWWGPVNKPCSERTWSINRERAADYLRTRDHIYIVDAFAGWDPKYRIKVRVVCARAYHALFMTNMLIRPTEEELAHFGEPDFTVWNAGQFPANLHTQDMSSKSTIEINFKAMEMIILGTEYAGEMKKGIFTVMFYLMPVHHNVLTLHSSANQGIQNGDVTLFFGLSGTGKTTLSADPHRLLIGDDEHCWSDHGVFNIEGGCYAKCINLSAEKEPEIFDAIKFGSVLENVIYDEKSHVVDYDDSSITENTRCAYPIDYIPSAKIPCLADSHPKNIILLTCDASGVLPPVSKLTPEQVMYHFISGYTSKMAGTEQGVTEPEPTFSSCFGQPFLALHPIRYATMLATKMSQHKANAYLINTGWTGSSYVSGGKRCPLKYTRAILDSIHDGSLANETYETLPIFNLQVPTKVNGVPAELLNPAKNWSQGESKYRGAVTNLANLFVQNFKIYQDRATPDVLAAGPQFE

SEQ ID NO: 83130 - DNA, 1620 bp, Yersinia pestis
  CDS (1)..(1620): transl_table=11
atgagtgttaaaggaattaccccgcaggagctcgccgcctatggcatccataacgtcagcgagattgtttacaacccaagctatgatttactgtttgaagaagagactaaacccacgttggaaggatacgagcgtggcacactgacgactaccggcgcaatagcggtagataccggtatttttaccgggcgttcacccaaagataaatatattgtccgcgatgctatcactcaggataccgtgtggtgggccgatcagggcaaaggtaaaaatgataataagcctctgagccaagagatctggaaccatttgaaaggtctggtgacggaacaactctctggcaaacgcctctttgttgtcgatacattctgcggtgctaatgcggatacccgcctgcaagtccgctttatcacggaagtcgcttggcaggcacacttcgtcaaaaatatgtttatccgtccatcagatgaagaactggctcggtttgaacctgactttatcgtgatgaacggtgccaaatgcactaacccacaatggaaagagcagggcctgaattcagaaaactttgtcgcctttaatctgacagaacgtatgcagttgattggtggcacgtggtatggcggcgaaatgaagaaagggatgttctcaatgatgaactacctgctgccactgaaaggcattgcttcaatgcattgttcagctaacgtcggcgaaaaaggcgatgttgccatcttcttcggtctgtcgggtaccggtaaaaccactttatctaccgatccaaaacgcaagttgatcggtgatgatgaacatggctgggatgatgatggcgtctttaacttcgagggggggtgctacgctaaaaccatcaagttatctgaagaagcagagccagatatttaccacgccattaaacgcgacgccttgctggaaaacgtggtggtgctagcagacggtaccgttgattttaatgacggttctaaaactgaaaacacccgtgtctcttatccgatttaccacattgataacattgttaaaccggtgtccaaagcaggccatgcgaccaaggttatcttcctgactgccgatgcctttggtgtgctccccccagtatctcgtctgaccgcaaaccagactcaatatcacttcctctctggctttactgccaaactggcagggacagagcgtggcgtcacggagccaacaccaaccttctctgcttgctttggtgcggccttcctgtcgctgcacccaacgcagtacgctgaagtgctggttaagcgtatgcaagcggttggcgcacaagcctatctggtcaataccggttggaacgggacaggtaagcgtatttccatcaaggatacccgcgccattattgacgcaatcctaaacggggagattgataaggcagaaacctttacgctgccaatctttgatctggcagtccctatggcgttacccggtgtgaatcccgatatcctcgatcctcgcgacacctacgccgataaagcgcaatggcaagagaaagccgaagatttggcgaaacgctttgcgactaactttgataaatacactgatacccctgcgggggccgcgttggttagcgcggggccaaagatctaa

SEQ ID NO: 83131 - protein, 539 aa, Yersinia pestis
MSVKGITPQELAAYGIHNVSEIVYNPSYDLLFEEETKPTLEGYERGTLTTTGAIAVDTGIFTGRSPKDKYIVRDAITQDTVWWADQGKGKNDNKPLSQEIWNHLKGLVTEQLSGKRLFVVDTFCGANADTRLQVRFITEVAWQAHFVKNMFIRPSDEELARFEPDFIVMNGAKCTNPQWKEQGLNSENFVAFNLTERMQLIGGTWYGGEMKKGMFSMMNYLLPLKGIASMHCSANVGEKGDVAIFFGLSGTGKTTLSTDPKRKLIGDDEHGWDDDGVFNFEGGCYAKTIKLSEEAEPDIYHAIKRDALLENVVVLADGTVDFNDGSKTENTRVSYPIYHIDNIVKPVSKAGHATKVIFLTADAFGVLPPVSRLTANQTQYHFLSGFTAKLAGTERGVTEPTPTFSACFGAAFLSLHPTQYAEVLVKRMQAVGAQAYLVNTGWNGTGKRISIKDTRAIIDAILNGEIDKAETFTLPIFDLAVPMALPGVNPDILDPRDTYADKAQWQEKAEDLAKRFATNFDKYTDTPAGAALVSAGPKI

SEQ ID NO: 83132 - DNA, 1620 bp, Yersinia pseudotuberculosis
  CDS (1)..(1620): transl_table=11
atgagtgttaaaggaattaccccgcaggagctcgccgcctatggcatccataacgtcagcgagattgtttacaacccaagctatgatttactgtttgaagaagagaccaaacccacgttggaaggatacgaacgtggcacactgacgactaccggcgcaatagcggtagataccggtatttttaccgggcgttcacccaaagataaatatattgtccgcgatgctatcactcaggataccgtgtggtgggccgatcagggcaaaggtaaaaatgataataagcctctgagccaagagatctggagccatttgaaaggtctggtgacggaacaactctctggcaaacgcctctttgttgtcgatacattctgcggtgctaatgcggatacccgcctgcaagtccgctttatcacagaagtcgcttggcaggcacacttcgtcaaaaatatgtttatccgtccatcagatgaagaactggctcggtttgaacctgactttatcgtgatgaacggtgccaaatgcactaacccacaatggaaagagcagggcctgaattcagaaaactttgtcgcctttaatctgacagaacgtatgcagttgattggtggcacgtggtatggcggcgaaatgaagaaagggatgttctcaatgatgaactacctgctgccactgaaaggcattgcttcaatgcattgttcagctaacgtcggcgaaaaaggcgatgttgccatcttcttcggtctgtcgggtaccggtaaaaccactttatctaccgatccaaaacgcaagttgatcggtgatgatgaacatggctgggatgatgatggcgtctttaacttcgagggggggtgctacgctaaaaccatcaagttatctgaagaagcagagccagatatttaccacgccattaaacgcgacgccttgctggaaaacgtggtggtgctagcagacggtaccgttgattttaatgacggttctaaaactgaaaacacccgtgtctcttatccgatttaccacattgataacattgttaaaccggtgtccaaagcaggccatgcgaccaaggttatcttcctgactgccgatgcctttggtgtgctccccccagtatctcgtctgaccgcaaaccagacgcaatatcacttcctctctggctttactgccaaactggcagggacagagcgtggcgtcacggagccaacaccaaccttctctgcttgctttggtgcggccttcctgtctctgcacccaacgcagtacgctgaagtgctggttaagcgtatgcaagcggttggcgcacaagcctatctggtcaataccggttggaacgggacaggtaagcgtatttccatcaaggatacccgcgccattattgacgcaatcctaaacggggagattgataaggcagaaacctttacgctgccaatctttgatctggcagtccctatggcgttacccggtgtgaatcccgatatcctcgatcctcgcgacacctacgccgataaagcgcaatggcaagagaaagccgaagatttggcgaaacgctttgcgactaactttgataaatacactgatacccctgcgggggccgcgttggttagcgcggggccaaagatctaa

SEQ ID NO: 83133 - protein, 539 aa, Yersinia pseudotuberculosis
MSVKGITPQELAAYGIHNVSEIVYNPSYDLLFEEETKPTLEGYERGTLTTTGAIAVDTGIFTGRSPKDKYIVRDAITQDTVWWADQGKGKNDNKPLSQEIWSHLKGLVTEQLSGKRLFVVDTFCGANADTRLQVRFITEVAWQAHFVKNMFIRPSDEELARFEPDFIVMNGAKCTNPQWKEQGLNSENFVAFNLTERMQLIGGTWYGGEMKKGMFSMMNYLLPLKGIASMHCSANVGEKGDVAIFFGLSGTGKTTLSTDPKRKLIGDDEHGWDDDGVFNFEGGCYAKTIKLSEEAEPDIYHAIKRDALLENVVVLADGTVDFNDGSKTENTRVSYPIYHIDNIVKPVSKAGHATKVIFLTADAFGVLPPVSRLTANQTQYHFLSGFTAKLAGTERGVTEPTPTFSACFGAAFLSLHPTQYAEVLVKRMQAVGAQAYLVNTGWNGTGKRISIKDTRAIIDAILNGEIDKAETFTLPIFDLAVPMALPGVNPDILDPRDTYADKAQWQEKAEDLAKRFATNFDKYTDTPAGAALVSAGPKI

SEQ ID NO: 83134 - DNA, 2010 bp, Brassica napus
  CDS (1)..(2010)
atgtcggcaggtaacggaaatgctaacggtgacggaggcttcagcttcccgaaaggaccagcgatgccgaagataacgacgggagctaagaggggtagcgaaatatgccacgatgacagtggtccgacggtgaaggcaacgacgatcgatgagcttcactcgttgcagaagaagcgttctgctcccaccacacctattaaccagagcggcgccgccgctttcgccgccgtctcggaggaggagcgccagaagattcaactccagtctatcagtgcatcattggcgtcgttgacgagagagtctggacccaaagtggtgagaggagatccggcggagaagaaggccgacggttccactactccggcgtacgcacacggccagcatcactccatcttctctccggacttaggagcagtcagtgacagctccttgaaattcacccacgtcctctacaacctctcccctgcagagctctacgagcaagctatcaagtacgagaaaggctcgttcatcacttctaatggagctttggcgacgctttctggtgccaagactggtcgtgctccgagggataagcgtgtcgttagagatgccacgacagagggcgagctttggtggggaaagggttcgcctaatatcgagatggatgaacataccttcatggtgaacagagaaagagccgttgattacttgaactccttggaaaaggtgtttgtgaatgatcagttcttgaactgggacccggagaacagaatcaaagtcagaatcgtctcagctagagcttaccactctctcttcatgcacaacatgtgtatccgaccaactccagaggagcttgagagcttcggtactccggacttcactatatacaacgctgggcagtttccgtgtaaccgttacactcactacatgacttcctccactagcgtagacctgaatctcagtaggagggagatggttatactgggaactcagtatgctggtgagatgaagaagggtctcttcagtgtgatgcactaccttatgcctaagcgtcggatcctctcccttcactctggttgcaatatgggcaaagagggagatgttgctctcttctttggactctcagggactgggaagacaacgctgtctactgatcacaacaggtacctgattggagatgatgagcattgttggactgagactggtgtctcgaacattgagggtggatgctatgccaagtgcgttgatctttcgagggagaaggagcctgatatctggaacgctatcaagtttggaacagttttggaaaatgttgtgtttgatgagcacaccagagaagtggattattctgataaatccgttacagagaacacgcgtgccgcctacccgattgagttcattccaaatgcgaaaataccttgcgttggtccacaccctaaaaacgtgattcttctggcatgtgatgcctttggtgttctcccgcctgtgagcaagctgaacctggcgcaaaccatgtaccacttcattagtggttacactgctctggttgctgggacagaggacggtatcaaggagccaacagcaacattctcagcatgctttggtgcagctttcataatgctgcatcctaccaagtacgcagctatgttagccgagaagatgaagacgcaaggtgctactggatggctcgttaacactggctggtctggtggcagctatggagttggaaacaggatcaagctggcgtatactaggaagatcatcgatgcaatccattcaggtagcttgttgaaggcgaactacaagaaaaccgagatatttgggtttgaaatcccaactgagatcgaagggataccttcagagatcttggatccgatcaactcgtggtctgataagaaagcacacaaggagactctgttgaagctgggaggtttgttcaagaagaactttgagacgttcgctaaccacaagattggtgtggatggtaagctcacggaggagattctcgctgctggtcctatcttttaa

SEQ ID NO: 83135 - protein, 669 aa, Brassica napus
MSAGNGNANGDGGFSFPKGPAMPKITTGAKRGSEICHDDSGPTVKATTIDELHSLQKKRSAPTTPINQSGAAAFAAVSEEERQKIQLQSISASLASLTRESGPKVVRGDPAEKKADGSTTPAYAHGQHHSIFSPDLGAVSDSSLKFTHVLYNLSPAELYEQAIKYEKGSFITSNGALATLSGAKTGRAPRDKRVVRDATTEGELWWGKGSPNIEMDEHTFMVNRERAVDYLNSLEKVFVNDQFLNWDPENRIKVRIVSARAYHSLFMHNMCIRPTPEELESFGTPDFTIYNAGQFPCNRYTHYMTSSTSVDLNLSRREMVILGTQYAGEMKKGLFSVMHYLMPKRRILSLHSGCNMGKEGDVALFFGLSGTGKTTLSTDHNRYLIGDDEHCWTETGVSNIEGGCYAKCVDLSREKEPDIWNAIKFGTVLENVVFDEHTREVDYSDKSVTENTRAAYPIEFIPNAKIPCVGPHPKNVILLACDAFGVLPPVSKLNLAQTMYHFISGYTALVAGTEDGIKEPTATFSACFGAAFIMLHPTKYAAMLAEKMKTQGATGWLVNTGWSGGSYGVGNRIKLAYTRKIIDAIHSGSLLKANYKKTEIFGFEIPTEIEGIPSEILDPINSWSDKKAHKETLLKLGGLFKKNFETFANHKIGVDGKLTEEILAAGPIF

SEQ ID NO: 83136 - DNA, 2004 bp, Zea mays
  CDS (1)..(2004)
atggcgacgccgaacgggcttgcgcggatcgagacgaccgggaagaagaagcaggacaacggcgtgtggtacgacgacagctcggcgccggtgcgcgcgcagaccatcgacgagctgcactcgctgcagcggaagcggtcggcgcccagcacgcccaagcggtcggcgcccaccacgcccatcaagggcggtgcccactcgcccttcgccgtcgcgatctccgaggaggagcgccacacgcagcagatgcagtccatcagtgcgtcgttggcgtctctgacgcgtgaaaccgggccgaaagtggtcaagggcgacccggccgcgaagggcgaggccgccgcgcagggcgcgccatcgacgccgagggcgcaccagcagcaccgccaccccgccgcccccgccatcgccgtcagcgacagctccctcaagttcactcatgtgctcaacaacctctcgcctgctgagctgtacgagcaggccatcaagtacgagaaggggtcgttcatcacgtccaccggcgcgctggcgacgctgtccggtgccaagaccgggcggtctcccagggacaagcgcgtcgtcaaggacgaggtcaccgcgcaggacctgtggtggggcaagggctcgcccaacatcgagatggacgagaagacgttcctgatcaacagggagagggccgtcgactacctcaactccctggagaaggtgttcgtcaacgaccagtacctcaactgggaccccgagaaccggatcaaggtccgcatcatctccgccagggcgtaccactccctcttcatgcacaacatgtgcatccgccccacggacgaggagctggaggacttcggcacgccggacttcaccatctacaacgcagggcagttcccctgcaaccgctacacccactacatgacgtcgtccacgagcatagacctcaacctcgccaggagggagatggtgatcatgggcacgcagtacgccggcgagatgaagaaggggctcttcggcgtcatgcactacctcatgcccaagcgcggcatcctctcgctgcactccggctgcaatatgggcaaggacggcgacgtcgccctcttctttggcctctcaggtaccgggaagacgacgctgtcgacggatcacaacaggcttctgatcggcgacgacgagcactgctggagcgacaatggcgtgtccaacatcgagggcggctgctacgccaagtgcatcgacctggcgcaggagaaagaacctgatatttggaacgccatcaagtttggaactgtgctggagaacgtggtctttgatgagcatactcgtgaagtcgactacgccgacaactctgtcaccgagaacactcgggctgcctacccgatcgagtacatccccaacgccaagataccatgcgtcggcccgcaccccaagaacgtgatcctcctggcgtgcgacgccttcggcgtgctcccgccggtgagcaagctgaacctggcgcagaccatgtaccacttcatcagcggctacaccgctctggtcgccggcacggaggacggcatcaaggagccgcaggccaccttctccgcctgcttcggcgcggccttcatcatgctccacccgaccaagtacgccgccatgctcgccgagaagatgcagaagtacggcgccaccgggtggctcgtcaacaccggctggtcgggtggcaggtacggcgtgggcaagaggatcaggcttccctacaccagaaagatcatcgacgccatccactccggcgagctcctcaccgccaactaccagaagaccgaggtgtttggcctggagatccccactgagatcaacggcgtgccgtcggaaatcctcgacccgatcaacacctggacggacaaggccgcgtacaaggagaatctcctgaggctcggcgggctcttcaagaagaacttcgaggtgttcgccagctacaagatcggggacgacagcagcctgactgacgagatcctcgccgcaggccccaacttctga

SEQ ID NO: 83137 - protein, 667 aa, Zea mays
MATPNGLARIETTGKKKQDNGVWYDDSSAPVRAQTIDELHSLQRKRSAPSTPKRSAPTTPIKGGAHSPFAVAISEEERHTQQMQSISASLASLTRETGPKVVKGDPAAKGEAAAQGAPSTPRAHQQHRHPAAPAIAVSDSSLKFTHVLNNLSPAELYEQAIKYEKGSFITSTGALATLSGAKTGRSPRDKRVVKDEVTAQDLWWGKGSPNIEMDEKTFLINRERAVDYLNSLEKVFVNDQYLNWDPENRIKVRIISARAYHSLFMHNMCIRPTDEELEDFGTPDFTIYNAGQFPCNRYTHYMTSSTSIDLNLARREMVIMGTQYAGEMKKGLFGVMHYLMPKRGILSLHSGCNMGKDGDVALFFGLSGTGKTTLSTDHNRLLIGDDEHCWSDNGVSNIEGGCYAKCIDLAQEKEPDIWNAIKFGTVLENVVFDEHTREVDYADNSVTENTRAAYPIEYIPNAKIPCVGPHPKNVILLACDAFGVLPPVSKLNLAQTMYHFISGYTALVAGTEDGIKEPQATFSACFGAAFIMLHPTKYAAMLAEKMQKYGATGWLVNTGWSGGRYGVGKRIRLPYTRKIIDAIHSGELLTANYQKTEVFGLEIPTEINGVPSEILDPINTWTDKAAYKENLLRLGGLFKKNFEVFASYKIGDDSSLTDEILAAGPNF

SEQ ID NO: 83138 - DNA, 1980 bp, Zea mays
  CDS (1)..(1980)
atggcgacgccgaacgggcttgctcggatcgagacgaacggggcgaccaagcccgacaacggcgtgtgccacgacgacagctcggcgccggtgcgcgcgcagaccatcgacgagctgcactcgctgcagcggaagcggtcggcgccaaccacgcccatcaaggacggcgccgcctcgaccttcgccgccgcgctctccgaggaggagcgccacaggcagcagctgcagtccatcagcgcgtcgttggcgtctctgacacgtgaaaccgggccgaaagtggtcaagggcgacccggcccggaggggcgaggcccccgcgacgggtgcaccgccgacgccgcaggcgcaccaccagcaccaccaccccgccgcccccaccatcgccgtcagcgacagctccctcaagttcacccatgtcctctacaacctctcgcctgctgagctgtacgagcaggccatcaagtacgagaaggggtcgttcatcacgtccaccggcgcgctggcgacgctgtccggcgccaagaccgggcggtcgcccagggacaagcgcgtcgtcaaggacgaggtcgcggcgcgggacctgtggtggggcaagggctcgcccaacatcgagatggacgagcacacgttcctgaccaacagggagagggccgtggactacctcaactccctggacaaggtgttcgtgaacgaccagttcctcaactgggaccccgagaaccggatcaaggtccgcatcatctccgccagggcgtaccactccctcttcatgcacaatatgtgcatccggcccacggacgaggagctggagagcttcggcacgccggacttcaccatctacaacgccggccagttcccctgtaaccgctacacgcactacatgacgtcgtccaccagcgtagacatcaacctcgccaggagggagatggtgatcctgggcacgcagtacgccggcgagatgaagaaggggctgttcggcgtcatgcactacctcatgcccaagcgcggcatcctctcgctgcactccggctgcaatatgggcaaggacggcgacgtcgccctcttctttggcctctcaggtaccgggaagacgacgctgtcgacggatcacaacaggcttctgatcggcgacgacgagcactgctggagcgagaatggcgtgtccaacatcgagggcggctgctatgccaagtgcatagacctgtcgcaggagaaagagcctgatatctggaacgccatcaagttcggagccgtgctggagaacgttgtcttcgatgagcatactcgtgaagttgactacaccgacaaatctgtcaccgagaacactcgggctgcctacccgatcgagtacatccccaacgccaagataccatgcgtcggtccacaccccaagaacgtgatcctgctggcgtgcgacgccttcggcgtgctcccgccggtgagcaagctggacctggcgcagaccatgtaccacttcatcagcggatacaccgccctggtcgccggcacggaggacggcatcaaggagccacaggccaccttctccgcctgcttcggcgcggccttcatcatgctccacccgaccaagtacgccgccatgctcgccgagaagatgcagaagtacggcgccacagggtggctcgtcaacaccggctggtctggcggcaggtacggtgtgggcaagaggatccggcttccctacaccaggaagatcatcgacgccatccactccggcgagcttctcaccgccaactaccagaagaccgaggtctttggcctggagatcccgactgagatcaagggcgtgccgtcggaaatcctcgacccaatcaacacctggacggacaaggccgcgtacaaggagacgctcctgaggcttgccgggctcttcaagaagaacttcgaggtgttcgccagctacaagatcggggacgacagcaacctgaccgacgagatcctcgccgcaggccccaacttctga

SEQ ID NO: 83139 - protein, 659 aa, Zea mays
MATPNGLARIETNGATKPDNGVCHDDSSAPVRAQTIDELHSLQRKRSAPTTPIKDGAASTFAAALSEEERHRQQLQSISASLASLTRETGPKVVKGDPARRGEAPATGAPPTPQAHHQHHHPAAPTIAVSDSSLKFTHVLYNLSPAELYEQAIKYEKGSFITSTGALATLSGAKTGRSPRDKRVVKDEVAARDLWWGKGSPNIEMDEHTFLTNRERAVDYLNSLDKVFVNDQFLNWDPENRIKVRIISARAYHSLFMHNMCIRPTDEELESFGTPDFTIYNAGQFPCNRYTHYMTSSTSVDINLARREMVILGTQYAGEMKKGLFGVMHYLMPKRGILSLHSGCNMGKDGDVALFFGLSGTGKTTLSTDHNRLLIGDDEHCWSENGVSNIEGGCYAKCIDLSQEKEPDIWNAIKFGAVLENVVFDEHTREVDYTDKSVTENTRAAYPIEYIPNAKIPCVGPHPKNVILLACDAFGVLPPVSKLDLAQTMYHFISGYTALVAGTEDGIKEPQATFSACFGAAFIMLHPTKYAAMLAEKMQKYGATGWLVNTGWSGGRYGVGKRIRLPYTRKIIDAIHSGELLTANYQKTEVFGLEIPTEIKGVPSEILDPINTWTDKAAYKETLLRLAGLFKKNFEVFASYKIGDDSNLTDEILAAGPNF

SEQ ID NO: 83140 - DNA, 24 bp, Artificial sequence
  primer
atgcgcgttaacaatggtttgacc

SEQ ID NO: 83141 - DNA, 22 bp, Artificial sequence
  primer
ttacagtttcggaccagccgct

SEQ ID NO: 83142 - protein, 551 aa, Artificial sequence
  consensus sequence
  Variant (2)..(6): Xaa in position 2 to 6 is any amino acid
  Variant (8)..(22): Xaa in position 8 to 22 is any amino acid
  Variant (23)..(27): Xaa in position 23 to 27 is any or no amino acid
  Variant (30)..(34): Xaa in position 30 to 34 is any amino acid
  Variant (36)..(37): Xaa in position 36 to 37 is any amino acid
  Variant (43)..(43): Xaa in position 43 is any amino acid
  Variant (46)..(47): Xaa in position 46 to 47 is any amino acid
  Variant (49)..(57): Xaa in position 49 to 57 is any amino acid
  Variant (58)..(58): Xaa in position 58 is any or no amino acid
  Variant (60)..(61): Xaa in position 60 to 61 is any amino acid
  Variant (62)..(68): Xaa in position 62 to 68 is any or no amino acid
  Variant (70)..(87): Xaa in position 70 to 87 is any amino acid
  Variant (89)..(94): Xaa in position 89 to 94 is any amino acid
  Variant (95)..(95): Xaa in position 95 is any or no amino acid
  Variant (97)..(110): Xaa in position 97 to 110 is any amino acid
  Variant (111)..(111): Xaa in position 111 is any or no amino acid
  Variant (113)..(117): Xaa in position 113 to 117 is any amino acid
  Variant (119)..(122): Xaa in position 119 to 122 is any amino acid
  Variant (124)..(128): Xaa in position 124 to 128 is any amino acid
  Variant (132)..(160): Xaa in position 132 to 160 is any amino acid
  Variant (161)..(165): Xaa in position 161 to 165 is any or no amino acid
  Variant (167)..(180): Xaa in position 167 to 180 is any amino acid
  Variant (182)..(182): Xaa in position 182 is any amino acid
  Variant (185)..(185): Xaa in position 185 is any amino acid
  Variant (187)..(187): Xaa in position 187 is any amino acid
  Variant (193)..(194): Xaa in position 193 to 194 is any amino acid
  Variant (196)..(199): Xaa in position 196 to 199 is any amino acid
  Variant (201)..(202): Xaa in position 201 to 202 is any amino acid
  Variant (204)..(210): Xaa in position 204 to 210 is any amino acid
  Variant (211)..(211): Xaa in position 211 is any or no amino acid
  Variant (213)..(215): Xaa in position 213 to 215 is any amino acid
  Variant (217)..(217): Xaa in position 217 is any amino acid
  Variant (219)..(221): Xaa in position 219 to 221 is any amino acid
  Variant (222)..(223): Xaa in position 222 to 223 is any or no amino acid
  Variant (225)..(227): Xaa in position 225 to 227 is any amino acid
  Variant (241)..(241): Xaa in position 241 is any amino acid
  Variant (243)..(244): Xaa in position 243 to 244 is any amino acid
  Variant (246)..(246): Xaa in position 246 is any amino acid
  Variant (254)..(254): Xaa in position 254 is any amino acid
  Variant (256)..(258): Xaa in position 256 to 258 is any amino acid
  Variant (259)..(259): Xaa in position 259 is any or no amino acid
  Variant (262)..(262): Xaa in position 262 is any amino acid
  Variant (264)..(264): Xaa in position 264 is any amino acid
  Variant (272)..(272): Xaa in position 272 is any amino acid
  Variant (274)..(274): Xaa in position 274 is any amino acid
  Variant (277)..(277): Xaa in position 277 is any amino acid
  Variant (279)..(279): Xaa in position 279 is any amino acid
  Variant (282)..(282): Xaa in position 282 is any amino acid
  Variant (284)..(285): Xaa in position 284 to 285 is any amino acid
  Variant (288)..(292): Xaa in position 288 to 292 is any amino acid
  Variant (293)..(293): Xaa in position 293 is any or no amino acid
  Variant (298)..(305): Xaa in position 298 to 305 is any amino acid
  Variant (306)..(306): Xaa in position 306 is any or no amino acid
  Variant (308)..(309): Xaa in position 308 to 309 is any amino acid
  Variant (311)..(313): Xaa in position 311 to 313 is any amino acid
  Variant (319)..(320): Xaa in position 319 to 320 is any amino acid
  Variant (323)..(325): Xaa in position 323 to 325 is any amino acid
  Variant (327)..(338): Xaa in position 327 to 338 is any amino acid
  Variant (339)..(346): Xaa in position 339 to 346 is any or no amino acid
  Variant (348)..(348): Xaa in position 348 is any amino acid
  Variant (350)..(351): Xaa in position 350 to 351 is any amino acid
  Variant (354)..(354): Xaa in position 354 is any amino acid
  Variant (360)..(360): Xaa in position 360 is any amino acid
  Variant (362)..(362): Xaa in position 362 is any amino acid
  Variant (364)..(366): Xaa in position 364 to 366 is any amino acid
  Variant (368)..(369): Xaa in position 368 to 369 is any amino acid
  Variant (373)..(373): Xaa in position 373 is any amino acid
  Variant (376)..(376): Xaa in position 376 is any amino acid
  Variant (378)..(380): Xaa in position 378 to 380 is any amino acid
  Variant (385)..(385): Xaa in position 385 is any amino acid
  Variant (387)..(388): Xaa in position 387 to 388 is any amino acid
  Variant (389)..(389): Xaa in position 389 is any or no amino acid
  Variant (392)..(393): Xaa in position 392 to 393 is any amino acid
  Variant (397)..(397): Xaa in position 397 is any amino acid
  Variant (401)..(402): Xaa in position 401 to 402 is any amino acid
  Variant (404)..(407): Xaa in position 404 to 407 is any amino acid
  Variant (409)..(410): Xaa in position 409 to 410 is any amino acid
  Variant (413)..(414): Xaa in position 413 to 414 is any amino acid
  Variant (416)..(427): Xaa in position 416 to 427 is any amino acid
  Variant (434)..(434): Xaa in position 434 is any amino acid
  Variant (436)..(436): Xaa in position 436 is any amino acid
  Variant (437)..(440): Xaa in position 437 to 440 is any or no amino acid
  Variant (442)..(442): Xaa in position 442 is any amino acid
  Variant (443)..(445): Xaa in position 443 to 445 is any or no amino acid
  Variant (447)..(451): Xaa in position 447 to 451 is any amino acid
  Variant (454)..(457): Xaa in position 454 to 457 is any amino acid
  Variant (459)..(461): Xaa in position 459 to 461 is any amino acid
  Variant (463)..(474): Xaa in position 463 to 474 is any amino acid
  Variant (475)..(477): Xaa in position 475 to 477 is any or no amino acid
  Variant (479)..(482): Xaa in position 479 to 482 is any amino acid
  Variant (484)..(487): Xaa in position 484 to 487 is any amino acid
  Variant (488)..(492): Xaa in position 488 to 492 is any or no amino acid
  Variant (495)..(498): Xaa in position 495 to 498 is any amino acid
  Variant (499)..(499): Xaa in position 499 is any or no amino acid
  Variant (501)..(501): Xaa in position 501 is any amino acid
  Variant (503)..(517): Xaa in position 503 to 517 is any amino acid
  Variant (518)..(519): Xaa in position 518 to 519 is any or no amino acid
  Variant (521)..(523): Xaa in position 521 to 523 is any amino acid
  Variant (525)..(526): Xaa in position 525 to 526 is any amino acid
  Variant (529)..(539): Xaa in position 529 to 539 is any amino acid
  Variant (540)..(548): Xaa in position 540 to 548 is any or no amino acid
NXXXXXLXXXXXXXXXXXXXXXXXXXXGAXXXXXGXXTGRSPXDKXXVXXXXXXXXXXWXXXXXXXXXNXXXXXXXXXXXXXXXXXXLXXXXXXXVXXXXXXXXXXXXXXXRXXXXXAXXXXFXXXXXIRPXXXXXXXXXXXXXXXXXXXXXXXXXXXXXXXXXXSXXXXXXXXXXXXXXIXGTXYXGEMKKXXFXXXXYXXPXXXXXXXXHXXXNXGXXXXXDXXXFFGLSGTGKTTLSXDXXRXLIGDDEHXWXXXXGVXNXEGGCYAKXIXLSXEXEPXIXXAIXXXXXXLENVXXXXXXXXXDXXDXXXTENTRXXYPXXXIXXXXXXXXXXXXXXXXXXXXIXLXXDAXGVLPPXSXLXXXQXXYHFXSGXTXXXAGTEXGXXXEPXXTFSXCFGXXFXXXXPXXYAXXLXXXXXXXXXXXXLVNTGWXGXXXXXGXXXXRXXXXXTRXXXXAXXXGXXXXXXXXXXXXXXXFXXXXPXXXXXXXXXGVXXXXXLXPXXXXXXXXXXXXXXXXXLXXXFXXNFXXXXXXXXXXXXXXXXXXXXAGP

SEQ ID NO: 83143 - protein, 32 aa, Artificial sequence
  protein pattern
  Variant (2)..(2): Xaa in position 2 is Thr or Val
  Variant (3)..(3): Xaa in position 3 is Ala, Cys, Ser or Thr
  Variant (4)..(4): Xaa in position 4 is Ile, Leu or Val
  Variant (18)..(18): Xaa in position 18 is Ala, Ser or Thr
  Variant (20)..(21): Xaa in position 20 to 21 is any amino acid
  Variant (23)..(23): Xaa in position 23 is any amino acid
  Variant (31)..(31): Xaa in position 31 is Cys, Gly or Val
DXXXFFGLSGTGKTTLSXDXXRXLIGDDEHXW

SEQ ID NO: 83144 - protein, 36 aa, Artificial sequence
  protein pattern
  Variant (2)..(3): Xaa in position 2 to 3 is any amino acid
  Variant (4)..(4): Xaa in position 4 is any or no amino acid
  Variant (7)..(7): Xaa in position 7 is any amino acid
  Variant (8)..(8): Xaa in position 8 is Gly or Ser
  Variant (10)..(10): Xaa in position 10 is Phe, Ile, Leu or Met
  Variant (13)..(13): Xaa in position 13 is Ile or Val
  Variant (14)..(14): Xaa in position 14 is Ala or Ser
  Variant (15)..(15): Xaa in position 15 is any amino acid
  Variant (17)..(19): Xaa in position 17 to 19 is any amino acid
  Variant (21)..(21): Xaa in position 21 is Ala, Thr or Val
  Variant (22)..(22): Xaa in position 22 is any amino acid
  Variant (23)..(23): Xaa in position 23 is Phe or Tyr
  Variant (24)..(24): Xaa in position 24 is His or Tyr
  Variant (26)..(26): Xaa in position 26 is Ile or Leu
  Variant (29)..(29): Xaa in position 29 is Phe or Tyr
  Variant (31)..(31): Xaa in position 31 is Ala or Ser
  Variant (32)..(32): Xaa in position 32 is any amino acid
  Variant (33)..(33): Xaa in position 33 is Leu, Met or Val
LXXXDAXXVXPPXXXLXXXQXXXXFXSGXTXXXAGT

SEQ ID NO: 83145 - protein, 21 aa, Artificial sequence
  protein pattern
  Variant (2)..(2): Xaa in position 2 is any amino acid
  Variant (4)..(4): Xaa in position 4 is any amino acid
  Variant (12)..(12): Xaa in position 12 is Ala, Cys, Thr or Val
  Variant (13)..(13): Xaa in position 13 is Ile, Leu or Val
  Variant (14)..(14): Xaa in position 14 is any amino acid
  Variant (16)..(19): Xaa in position 16 to 19 is any amino acid
VXNXEGGCYAKXXXLXXXXEP

SEQ ID NO: 83146 - protein, 21 aa, Artificial sequence
  protein pattern
  Variant (3)..(3): Xaa in position 3 is any amino acid
  Variant (5)..(5): Xaa in position 5 is Ala, Gly or Thr
  Variant (8)..(8): Xaa in position 8 is any amino acid
  Variant (11)..(11): Xaa in position 11 is Ala, Gly or Ser
  Variant (12)..(12): Xaa in position 12 is Ile, Leu, Met or Val
  Variant (14)..(14): Xaa in position 14 is Ala, Gly, Ser or Thr
  Variant (15)..(15): Xaa in position 15 is any amino acid
  Variant (16)..(16): Xaa in position 16 is Leu or Met
  Variant (17)..(17): Xaa in position 17 is any amino acid
  Variant (18)..(18): Xaa in position 18 is Phe or Tyr
  Variant (19)..(19): Xaa in position 19 is any amino acid
  Variant (20)..(20): Xaa in position 20 is Leu or Met
GTXYXGEXKKXXFXXXXXXXP

SEQ ID NO: 83147 - protein, 18 aa, Artificial sequence
  protein pattern
  Variant (2)..(2): Xaa in position 2 is any amino acid
  Variant (3)..(3): Xaa in position 3 is Ala or Pro
  Variant (7)..(7): Xaa in position 7 is Ala, Ser or Thr
  Variant (10)..(10): Xaa in position 10 is Ala or Gly
  Variant (11)..(11): Xaa in position 11 is Ala, Glu, Gln or Ser
  Variant (12)..(12): Xaa in position 12 is Ala or Pro
  Variant (14)..(14): Xaa in position 14 is any amino acid
  Variant (15)..(17): Xaa in position 15 to 17 is any or no amino acid
PXXTFSXCFXXXFXXXXP

SEQ ID NO: 83148 - protein, 19 aa, Artificial sequence
  protein pattern
  Variant (2)..(2): Xaa in position 2 is any amino acid
  Variant (4)..(4): Xaa in position 4 is any amino acid
  Variant (6)..(6): Xaa in position 6 is Phe, Ile or Met
  Variant (7)..(7): Xaa in position 7 is any amino acid
  Variant (8)..(8): Xaa in position 8 is Ile or Leu
  Variant (9)..(10): Xaa in position 9 to 10 is any amino acid
  Variant (13)..(16): Xaa in position 13 to 16 is any amino acid
  Variant (17)..(17): Xaa in position 17 is any or no amino acid
  Variant (19)..(19): Xaa in position 19 is Ala, Ile, Leu or Val
GXGXRXXXXXTRXXXXXAX

SEQ ID NO: 83149 - protein, 13 aa, Artificial sequence
  protein pattern
  Variant (2)..(2): Xaa in position 2 is Glu or Gln
  Variant (6)..(6): Xaa in position 6 is Ala, Cys, Ser or Val
  Variant (7)..(7): Xaa in position 7 is Ala or Ser
  Variant (10)..(12): Xaa in position 10 to 12 is any or no amino acid
TXNTRXXYPXXXI

SEQ ID NO: 83150 - protein, 21 aa, Artificial sequence
  protein pattern
  Variant (3)..(3): Xaa in position 3 is Phe, Leu or Val
  Variant (4)..(4): Xaa in position 4 is any amino acid
  Variant (5)..(5): Xaa in position 5 is Ala, Cys, Thr or Val
  Variant (6)..(6): Xaa in position 6 is any amino acid
  Variant (7)..(7): Xaa in position 7 is Ser or Thr
  Variant (9)..(10): Xaa in position 9 to 10 is any amino acid
  Variant (16)..(16): Xaa in position 16 is any amino acid
  Variant (18)..(18): Xaa in position 18 is Lys or Arg
  Variant (19)..(19): Xaa in position 19 is any amino acid
  Variant (20)..(20): Xaa in position 20 is Phe, Ile or Val
GAXXXXXGXXTGRSPXDXXXV

SEQ ID NO: 83151 - protein, 14 aa, Artificial sequence
  protein pattern
  Variant (2)..(2): Xaa in position 2 is Phe, Trp or Tyr
  Variant (3)..(3): Xaa in position 3 is any amino acid
  Variant (4)..(4): Xaa in position 4 is Ala or Ser
  Variant (6)..(7): Xaa in position 6 to 7 is any amino acid
  Variant (8)..(8): Xaa in position 8 is Asp, Gly or Asn
  Variant (9)..(9): Xaa in position 9 is Ala, Ser or Thr
  Variant (10)..(10): Xaa in position 10 is Ile, Leu or Val
  Variant (11)..(11): Xaa in position 11 is Leu or Val
IXXXIXXXXXXENV

SEQ ID NO: 83152 - protein, 18 aa, Artificial sequence
  protein pattern
  Variant (2)..(4): Xaa in position 2 to 4 is any amino acid
  Variant (5)..(5): Xaa in position 5 is Asp, Glu, Asn or Pro
  Variant (6)..(6): Xaa in position 6 is Asp, Gly, Asn or Ser
  Variant (8)..(11): Xaa in position 8 to 11 is any amino acid
  Variant (13)..(13): Xaa in position 13 is any amino acid
  Variant (15)..(16): Xaa in position 15 to 16 is any amino acid
  Variant (17)..(17): Xaa in position 17 is Ala, Asn, Ser, Thr or Val
  Variant (18)..(18): Xaa in position 18 is Trp or Tyr
PXXXXXVXXXXLXPXXXX

SEQ ID NO: 83153 - DNA, 2667 bp, Escherichia coli
  CDS (1)..(2667): transl_table=11
atgcctgttgaactactccgggctgaaaacgccagtcgggagtgcatcatgagtatcctgacccggtggttgcttatcccgccggtcaacgcgcggcttatcgggcgttatcgcgattatcgtcgtcacggtgcgtcggctttcagcgcgacgctcggctgtttctggatgatcctggcctggatttttattccgctggagcacccgcgctggcagcgtattcgcgcagaacataaaaacctgtatccgcatatcaacgcctcgcgtccgcgtccgctggacccggtccgttatctcattcaaacatgctggttattgatcggtgcatcgcgcaaagaaacgccgaaaccgcgcaggcgggcattttcaggtctgcaaaatattcgtggacgttaccatcaatggatgaacgagctgcctgagcgcgttagccataaaacacagcatctggatgagaaaaaagagctcggtcatttgagtgccggggcgcggcggttgatcctcggtatcatcgtcaccttctcgctgattctggcgttaatctgcgttactcagccgtttaacccgctggcgcagtttatcttcctgatgctgctgtggggggtagcgctgatcgtacggcggatgccggggcgcttctcggcgctaatgttgattgtgctgtcgctgaccgtttcttgccgttatatctggtggcgttacacctctacgctgaactgggacgatccggtcagcctggtgtgcgggcttattctgctcttcgctgaaacgtacgcgtggattgtgctggtgctcggctacttccaggtagtatggccgctgaatcgtcagccggtgccattgccgaaagatatgtcgctgtggccgtcggtggatatctttgtcccgacttacaacgaagatctcaacgtggtgaaaaataccatttacgcctcgctgggtatcgactggccgaaagataagctgaatatctggatccttgatgacggcggcagggaagagtttcgccagtttgcgcaaaacgtgggggtgaaatatatcgcccgcaccactcatgaacatgcgaaagcaggcaacatcaacaatgcgctgaaatatgccaaaggcgagttcgtgtcgattttcgactgcgaccacgtaccaacgcgatcgttcttgcaaatgaccatgggctggttcctgaaagaaaaacagctggcgatgatgcagacgccgcaccacttcttctcaccggacccgtttgaacgcaacctggggcgtttccgtaaaacgccgaacgaaggcacgctgttctatggtctggtgcaggatggcaacgatatgtgggacgccactttcttctgcggttcctgtgcggtgattcgtcgtaagccgctggatgaaattggcggcattgctgtcgaaaccgtgactgaagatgcgcatacttctctgcggttgcaccgtcgtggctatacctccgcgtatatgcgtattccgcaggcggcggggctggcgaccgaaagtctgtcggcgcatatcggtcagcgtattcgctgggcgcgcgggatggtacaaatcttccgtctcgataacccgctcaccggtaaagggctgaagtttgctcagcggctatgttacgtcaacgccatgttccacttcttgtcgggcattccacggctgatcttcctgactgcgccgctggcgttcctgctgcttcatgcctacatcatctatgcgccagcgttgatgatcgccctattcgtgctgccgcatatgatccatgccagcctgaccaactccaagatccagggcaaatatcgccactctttctggagtgaaatctacgaaacggtgctggcgtggtatatcgcaccaccgacgctggtggcgctgattaacccgcacaaaggcaaatttaacgtcaccgccaaaggtggactggtggaagaagagtacgtcgactgggtgatctcgcggccctacatcttccttgtcctgctcaacctggtgggcgttgcggtaggcatctggcgctacttctatggcccgccaaccgagatgctcaccgtggtcgtcagtatggtgtgggtgttctacaacctgattgttcttggcggcgcagttgcggtatcggtagaaagcaaacaggtacgccgatcgcaccgcgtggagatgacgatgcccgcggcaattgcccgcgaagatggtcacctcttctcgtgtaccgttcaggatttctccgacggtggtttggggatcaagatcaacggtcaggcgcagattctggaagggcagaaagtgaatctgttgcttaaacgcggtcagcaggaatacgtcttcccgacccaggtggcgcgcgtgatgggtaatgaagttgggctgaaattaatgccgctcaccacccagcaacatatcgattttgtgcagtgtacgtttgcccgtgcggatacatgggcgctctggcaggacagctacccggaagataagccgctggaaagtctgctggatattctgaagctcggcttccgtggctaccgccatctggcggagtttgcgccttcttcggtgaagggcatattccgtgtgctgacttctctggtttcctgggttgtatcgtttattccgcgccgcccggagcggagcgaaacggcacaaccatcggatcaggctttggctcaacaataa

SEQ ID NO: 83154 - protein, 888 aa, Escherichia coli
MPVELLRAENASRECIMSILTRWLLIPPVNARLIGRYRDYRRHGASAFSATLGCFWMILAWIFIPLEHPRWQRIRAEHKNLYPHINASRPRPLDPVRYLIQTCWLLIGASRKETPKPRRRAFSGLQNIRGRYHQWMNELPERVSHKTQHLDEKKELGHLSAGARRLILGIIVTFSLILALICVTQPFNPLAQFIFLMLLWGVALIVRRMPGRFSALMLIVLSLTVSCRYIWWRYTSTLNWDDPVSLVCGLILLFAETYAWIVLVLGYFQVVWPLNRQPVPLPKDMSLWPSVDIFVPTYNEDLNVVKNTIYASLGIDWPKDKLNIWILDDGGREEFRQFAQNVGVKYIARTTHEHAKAGNINNALKYAKGEFVSIFDCDHVPTRSFLQMTMGWFLKEKQLAMMQTPHHFFSPDPFERNLGRFRKTPNEGTLFYGLVQDGNDMWDATFFCGSCAVIRRKPLDEIGGIAVETVTEDAHTSLRLHRRGYTSAYMRIPQAAGLATESLSAHIGQRIRWARGMVQIFRLDNPLTGKGLKFAQRLCYVNAMFHFLSGIPRLIFLTAPLAFLLLHAYIIYAPALMIALFVLPHMIHASLTNSKIQGKYRHSFWSEIYETVLAWYIAPPTLVALINPHKGKFNVTAKGGLVEEEYVDWVISRPYIFLVLLNLVGVAVGIWRYFYGPPTEMLTVVVSMVWVFYNLIVLGGAVAVSVESKQVRRSHRVEMTMPAAIAREDGHLFSCTVQDFSDGGLGIKINGQAQILEGQKVNLLLKRGQQEYVFPTQVARVMGNEVGLKLMPLTTQQHIDFVQCTFARADTWALWQDSYPEDKPLESLLDILKLGFRGYRHLAEFAPSSVKGIFRVLTSLVSWVVSFIPRRPERSETAQPSDQALAQQ

SEQ ID NO: 83155 - DNA, 2280 bp, Aquifex aeolicus VF5
  CDS (1)..(2280): transl_table=11
atgacagagcgctttactttattcgagtttaaccttcacatagacgaaaacttatttataaaagctcttaagtacacctttattttcggacttctcacttacctcagtgtcatagtagccccttctcccttagaatttcaattttacatagcctactccacactccttgcgggagcttttctcattgtatggaaacggtttaatttcggctatacccattaccttaccgtgtacctgctcgtctttataatgctgaggtacttctggtggagaactttcaacactataaacacggacaacgtgtggaactttatcttctcaacagccctttactttgcagaattctacagtgtaacaatagcacttctcggtattttcttctctataagacctatagatagaaaagccataaaagtggatatggaatctttgcccacggttgacgtgttcatacctacctacaacgaaccgcccgaaattccagaaactaccgcacttgctgcgattaatatggactatccttcggataagtttaacgtttacatactcgacgacgggggaacgaaacaaagactaaatgatcccgatcctgaaaggagggagtacttcagaaagagggctgaggaattaaagtcctttgtagaaagactgaggaaactcggttacaaaaatatacactaccttacaagggagaagaacgtacacgcaaaggcaggtaacataaacgaagccctgaagaaaacaaaaggagaccttatccttatattggatgcagatcacgttccttcaaaggactttttaaaagaaactgtgggattcttcgttaaaaacccaaaagtatttctcgtacagacccctcacaccttttacaatcccgaccctatagagaaaaacctcggtgttttcggaaggatgcccggagagaacgaaatgttttacttcctcattcagaagggctttgacctgtggaattcctcctttttctgcggttcagctgcactcttgaggagaaagtaccttgaagaagtggggggaatacagacaacaacagttacagaggacgcagaaacagcgttagagttacactctaggggctacgaaagtgtttactacgacagacctttaatattcggtttgaaccctgaaacgctgtcgggaatgatagtccaaaggataaggtgggcacagggaatgatccagatattcatactcaaaaaccctatacttaaaaagggcttgaagtggtatcaaaaactcgcttactttaacgctagctttttctggttcttcggacttgcaaggactatattccttatagctcccctcgcttacctccttttcggacttcacatatacgacgcttctttagctgaagtcctagcctatcccataccccactttcttgcaagcttgttactcttttactacttattcagcagggttaggtggccttttatatccgagatatacgaaagcatactcggtatatttatctttattccatctatacttacccttttaaatcccaagaaccccaccttcagggttacaccaaagggcgaactcctagacagggactatatcagtcccttttacaaaccttactttatcctgtatcaccttatcctgctcggttatttattcggcatatacaggtggatacagtaccccgacgagaggggaacggttctgattaccttgtggtggaacacttttaacttctttgttatgacggtagcactctatgtttcttacgaaagaaggcagagaaggaaattccacagaataccatcaaacgaccagataataatttacagggactctgaaacccttctgggaagggtgattgatatatccctcggaggacttgcggtaaaacttgaaactaaaccaaaggaagaattcaaggaaggtgaagaagtaaaaggagtaataaggaatgtagaaaataagctggtgtacataaaaccgaaagtggttcgctacgaaaaggacaggaatatcctcagaatgaagtttgaatggaaacctgaagatgtggaaactgtaagtaagatagtagatatagtttacgctccaagcagcaggtgggtaatcctccttgaaagggaaagggaattaacaccctttgagggttttgtagtacttacgaaacaaattttacgtgacttcggacaggtttacatatccatatacaactacttcaaaaatgatatcctaaatacagtatggaattacataaggaggggaattaaatgggggttatccttctcctcttaa

SEQ ID NO: 83156 - protein, 759 aa, Aquifex aeolicus VF5
MTERFTLFEFNLHIDENLFIKALKYTFIFGLLTYLSVIVAPSPLEFQFYIAYSTLLAGAFLIVWKRFNFGYTHYLTVYLLVFIMLRYFWWRTFNTINTDNVWNFIFSTALYFAEFYSVTIALLGIFFSIRPIDRKAIKVDMESLPTVDVFIPTYNEPPEIPETTALAAINMDYPSDKFNVYILDDGGTKQRLNDPDPERREYFRKRAEELKSFVERLRKLGYKNIHYLTREKNVHAKAGNINEALKKTKGDLILILDADHVPSKDFLKETVGFFVKNPKVFLVQTPHTFYNPDPIEKNLGVFGRMPGENEMFYFLIQKGFDLWNSSFFCGSAALLRRKYLEEVGGIQTTTVTEDAETALELHSRGYESVYYDRPLIFGLNPETLSGMIVQRIRWAQGMIQIFILKNPILKKGLKWYQKLAYFNASFFWFFGLARTIFLIAPLAYLLFGLHIYDASLAEVLAYPIPHFLASLLLFYYLFSRVRWPFISEIYESILGIFIFIPSILTLLNPKNPTFRVTPKGELLDRDYISPFYKPYFILYHLILLGYLFGIYRWIQYPDERGTVLITLWWNTFNFFVMTVALYVSYERRQRRKFHRIPSNDQIIIYRDSETLLGRVIDISLGGLAVKLETKPKEEFKEGEEVKGVIRNVENKLVYIKPKVVRYEKDRNILRMKFEWKPEDVETVSKIVDIVYAPSSRWVILLERERELTPFEGFVVLTKQILRDFGQVYISIYNYFKNDILNTVWNYIRRGIKWGLSFSS

SEQ ID NO: 83157 - DNA, 2667 bp, Escherichia coli O157:H7 EDL933
  CDS (1)..(2667): transl_table=11
  misc_feature (1743)..(1743): m is a or c
gtgcctgttgaactattccgggctgaaaacgccagtcgggagtgcatcatgagtatcctgacccggtggttgcttatcccgccggtcaacgcgcggcttatcgggcgttatcgcgattatcgtcgtcacggtgcgtcggctttcagcgcgacgctcggctgtttctggatgatcctggcctggatttttattccactggagcacccgcgctggcagcgtattcgcgcagaacataaaaacctgtatccgcatatcaacgcctcgcgtccgcgtccgctggacccggtccgttatctcattcaaacatgctggttactgatcggtgcatcgcgcaaagaaacgccgaaaccgcgcaggcgggcattttcaggtctgcagaatattcgtggacgttaccatcaatggatgaacgagctgcctgagcgcgttagccataaaacacagcatcttgatgagaaaaaagagctcggtcatttgagtgccggggcgcggcggttgatcctcggtatcatcgtcaccttctcgctgattctggcgttaatctgcgttactcagccgtttaacccgctggcgcagtttatcttcctgatgctgctgtgggggggagcgctgatcgtacggcggatgccggggcgcttctcagcgctaatgttgattgtgctgtcgctgactgtttcttgccgttatatctggtggcgatatacctctacgctgaactgggacgatccggtcagcctggtgtgcgggcttattctgctcttcgctgaaacgtacgcgtggattgtgctggtgctcggctacttccaggtagtatggccgctgaatcgtcagccggtgccattgccgaaagatatgtcgctgtggccgtcggtggatatctttgtcccgacttacaacgaagatctcaacgtggtgaaaaataccatttacgcctcgctgggtatcgactggccgaaagacaagctgaacatctggatcctcgatgatggcggcagggaagagtttcgccagtttgcgcaaaacgtgggggtgaagtatatcgcccgtaccactcatgaacatgcgaaagcgggcaacatcaacaatgcgctgaaatatgccaaaggcgagttcgtgtcgattttcgactgcgaccacgtaccaacgcgatcgttcctgcaaatgaccgtgggctggttcctgaaagagaaacagctggcgatgatgcagaccccacaccatttcttctcgccggacccgtttgaacgcaacctggggcgttttcgtaaaacaccgaacgaaggcacgctgttctatggtctggtgcaggatggcaacgatatgtgggacgccactttcttctgcggttcctgtgcggtgattcgccgtaagccgctggatgaaattggcggcattgctgtcgaaactgtgactgaagatgcgcatacttctctgcgtttgcaccgtcgtggctatacctccgcgtatatgcgtattccgcaggcggcggggctggcgaccgaaagtctgtcggcgcatatcggtcagcgtattcgctgggcgcgcgggatggtgcaaatcttccgtctcgataacccgctcaccggtaaagggctgaagtttgctcagcggctgtgctacgtcaacgccatgttccacttcttgtcgggcattccacggctgatcttcctgactgcgccgctggcgttcctgctgcttcatgcctacatcatctatgcgccagcgttgatgatcgccctgttmgtgctgccgcatatgatccatgccagcctgaccaactccaagatccagggcaaatatcgccactctttctggagtgaaatctacgaaacggtgctggcgtggtatatcgcaccaccgacgctggtggcgctgattaacccgcacaaaggcaaatttaacgtcaccgccaaaggtggactggtggaagaagagtacgtcgactgggtgatctcgcggccctacatcttccttgttctgctcaacctggtgggcgttgcggtaggcatctggcgctacttctatggcccgccaaccgagatgctcaccgtggtcgtcagtatggtgtgggtattctacaacctgattgttcttggcggcgcagttgcggtatcggtagaaagcaaacaggtacgccgatcgcaccgcgtggagatgacgatgcccgcggcaattgcccgcgaagatggtcacctcttctcgtgtaccgttcaggatttctccgacggtggtttggggatcaagatcaacggtcaggcgcagattctggaagggcagaaagtgaatctgttgcttaaacgcggtcagcaggaatacgtcttcccgacccaggtggcgcgcgtgatgggtaatgaagttgggctgaaattaatgccgctcaccacccagcaacatatcgattttgtgcagtgtacgtttgcccgtgcggatacatgggcgctctggcaggacagctacccggaagataagccgctggaaagtctgctggatattctgaagctcggcttccgtggctaccgccatctggcggagtttgcgccttcttcggtgaagggcatattccgtgtgctgacttctctggtttcctgggttgtatcgtttattccgcgccgcccggagcggagcgaaacggcacaaccatcggatcaggctttggctcaacaatga

SEQ ID NO: 83158 - protein, 888 aa, Escherichia coli O157:H7 EDL933
  misc_feature (581)..(581): The Xaa at location 581 stands for Leu, or Phe.
MPVELFRAENASRECIMSILTRWLLIPPVNARLIGRYRDYRRHGASAFSATLGCFWMILAWIFIPLEHPRWQRIRAEHKNLYPHINASRPRPLDPVRYLIQTCWLLIGASRKETPKPRRRAFSGLQNIRGRYHQWMNELPERVSHKTQHLDEKKELGHLSAGARRLILGIIVTFSLILALICVTQPFNPLAQFIFLMLLWGGALIVRRMPGRFSALMLIVLSLTVSCRYIWWRYTSTLNWDDPVSLVCGLILLFAETYAWIVLVLGYFQVVWPLNRQPVPLPKDMSLWPSVDIFVPTYNEDLNVVKNTIYASLGIDWPKDKLNIWILDDGGREEFRQFAQNVGVKYIARTTHEHAKAGNINNALKYAKGEFVSIFDCDHVPTRSFLQMTVGWFLKEKQLAMMQTPHHFFSPDPFERNLGRFRKTPNEGTLFYGLVQDGNDMWDATFFCGSCAVIRRKPLDEIGGIAVETVTEDAHTSLRLHRRGYTSAYMRIPQAAGLATESLSAHIGQRIRWARGMVQIFRLDNPLTGKGLKFAQRLCYVNAMFHFLSGIPRLIFLTAPLAFLLLHAYIIYAPALMIALXVLPHMIHASLTNSKIQGKYRHSFWSEIYETVLAWYIAPPTLVALINPHKGKFNVTAKGGLVEEEYVDWVISRPYIFLVLLNLVGVAVGIWRYFYGPPTEMLTVVVSMVWVFYNLIVLGGAVAVSVESKQVRRSHRVEMTMPAAIAREDGHLFSCTVQDFSDGGLGIKINGQAQILEGQKVNLLLKRGQQEYVFPTQVARVMGNEVGLKLMPLTTQQHIDFVQCTFARADTWALWQDSYPEDKPLESLLDILKLGFRGYRHLAEFAPSSVKGIFRVLTSLVSWVVSFIPRRPERSETAQPSDQALAQQ

SEQ ID NO: 83159 - DNA, 2196 bp, Xanthomonas axonopodis pv. citri str. 306
  CDS (1)..(2196): transl_table=11
atgcgcttgccgcttgttgtgccgcacgccgccatgcctgaaggacgattgatgaccgctgccagccgccgttccgcatcaccgctgcccacgctggcgacctgggcgctgtggttgctgggtgcgttgctgctggtgttcgtggtggccgtgccgatggatgtgacgcagcagctggtgttttccggcgtgttgttcgcggtggcgttggcggtgcgcaaccgcggcgggcgggtggtcatcctgatgatgatggggatgtcgctagcggtgtcgtgccgttacatctggtggcgcatgacccagaccatgggcgtgggcagcgcggtggatttcatcctcggcctgggcctgcttggcgccgagctgtatgccttcgtgatcctggtgctgggctatttccaggtgctgtggccgctcaaccgcaagccggtgccgctgccggccgaccagcgcctgtggcccagcgtggacgtgttcatcccgacctacaacgagccgctgtcggtggtgcgcaccaccgtgctggcggccagcgtgatcgattggccggccggcaagatcaccatccatttgctggacgacggccgtcgcgacgagtttcgcgcgttctgcgccgaggtcggcatcaactacgtcacccgcaccaataacgcgcatgccaaggccggcaacatcaatgccgcgttgaagaagtgcagcggcgattatgtggccatcttcgattgcgaccacattcccacccgcagttttctgcaggtggcgatgggctggttcctgcacgacaccaagctggcactggtgcagatgccgcactatttcttttcgccggacccgttcgaacgcaacctggacacgcatggcaaggtgcccaacgaaggcgagttgttctacggcctgctgcaggatggcaacgaccagtggaatgccacgttcttctgtggttcgtgtgcggtcatcaagcgcaccgcgctggaagaagtgggcggcgtggcggtggaaacggtcaccgaagatgcgcacaccgcgctcaagctgcagcgccgcggttaccgcaccgcctacctggccgtgccgcaggccgcgggcctggccaccgaaagcctgtccggccacgtggcgcagcgcatccgctgggcgcgcggcatggcgcagatcgcacgcatcgacaaccccttgctgggtcgcgggctcaaactgtcgcagcggctgtgctacctcaacgcgatgctgcacttcttctacggcgtgccgcgcatcatctatctcactgcgccgctggcctatctgttcttcggcgcgcacgtgatccaggcctcggcgttgatgatcctggcctacgccttgccgcatattttgcaggccaacctgaccaacctgcgcgtgcagagccgcttccgccatctgctgtggaacgaggtctacgaaaccacgctggcctggtacatcttccgtcccactctggtggccttgctcaatcccaaactcggcaagttcaacgtcacgcccaagggggggctggtggcgcgcagctatttcgacgcgcagatcgccaaaccctatctgttcctgttgttgctcaacgtggtgggcatggtggccggtgtgctgcggctgatctatgtgggtggcagcggcgagcagcagaccatctggttcaacctggcctggacgctctacaacatggtgctgctgggcgccacgattgccaccgccagcgaaacgcgccaggtgcgcagcgcccaccgtgtgccgctggatgtgccggtcaccctgtatctgcccgatggcgatgtgctgccgagtcgctcggtgaatttttccacgggcggcatggcgatcatgctcgcgcagccgcagccgatcgagcctggcttgccggtgcagatcggcctgagccatcgcggcgtggagcagaccttgccggcggtggtgcgccaggatcgcgatggacaggtcagcatccagttcacgcagatgtcgatggaacaggagcgctggctggtggcgtcgaccttcgcgcgcgccgacatctggctgtcgcagtggggccagcacgaccgcgatgcgttctggcgctcgatggggcaggtgttggaagccagtgcacgcggattcgggcgactgggcgggcatatcgtggacagcgcgcggcagggctttcgtccgaggcgcgcggtggatctggagtcgtga

SEQ ID NO: 83160 - protein, 731 aa, Xanthomonas axonopodis pv. citri str. 306
MRLPLVVPHAAMPEGRLMTAASRRSASPLPTLATWALWLLGALLLVFVVAVPMDVTQQLVFSGVLFAVALAVRNRGGRVVILMMMGMSLAVSCRYIWWRMTQTMGVGSAVDFILGLGLLGAELYAFVILVLGYFQVLWPLNRKPVPLPADQRLWPSVDVFIPTYNEPLSVVRTTVLAASVIDWPAGKITIHLLDDGRRDEFRAFCAEVGINYVTRTNNAHAKAGNINAALKKCSGDYVAIFDCDHIPTRSFLQVAMGWFLHDTKLALVQMPHYFFSPDPFERNLDTHGKVPNEGELFYGLLQDGNDQWNATFFCGSCAVIKRTALEEVGGVAVETVTEDAHTALKLQRRGYRTAYLAVPQAAGLATESLSGHVAQRIRWARGMAQIARIDNPLLGRGLKLSQRLCYLNAMLHFFYGVPRIIYLTAPLAYLFFGAHVIQASALMILAYALPHILQANLTNLRVQSRFRHLLWNEVYETTLAWYIFRPTLVALLNPKLGKFNVTPKGGLVARSYFDAQIAKPYLFLLLLNVVGMVAGVLRLIYVGGSGEQQTIWFNLAWTLYNMVLLGATIATASETRQVRSAHRVPLDVPVTLYLPDGDVLPSRSVNFSTGGMAIMLAQPQPIEPGLPVQIGLSHRGVEQTLPAVVRQDRDGQVSIQFTQMSMEQERWLVASTFARADIWLSQWGQHDRDAFWRSMGQVLEASARGFGRLGGHIVDSARQGFRPRRAVDLES

SEQ ID NO: 83161 - DNA, 2610 bp, Pseudomonas putida KT2440
  CDS (1)..(2610): transl_table=11
gtgaccctgaaccctctgtcggcctatacctggttcactgtccgtggtgcgcgtctgccggtcgcgtggctgttcaccctcggcgtgtggctggccttcctgttcctgcgcctggaatcacccgcctggcaggcgctgctggccgagcgccaacgcctgtacccgcagctggcgggcaagcgcccgaccctgggtgacccgctgcgtctgttgatccagagcctgtggttgttgctgcggcgccaaccgcaggtgcgtacagcaaggcctggccgccgcgcattgggcgcggtgcgcatgcacctgcgggcggcaggcggggtggcgcgccactaccgcggcctgctgatcgatgcattgcaacaggtacccgcgcgctaccgcgccagtgctttcaaacaccaggcctcggcacgcctgcgcggcctgagcgtgtttgcccggcgggcgttctatagcgtgctgacggtattcgccctcagcctcgccctgctgtgcgtgaccgaaccgttcggctacctggcgcagctgatgttcatctgcctgctgctggtcatcgccttgctggtgcgacacatgccggggcgtttcccgactttgatgctgatcgtgctgtcgaccattatctcgtgccgctatctgtggtggcgctacacctcgaccctgaactggaacgacaccaccgacttggtattcggggtgatcctgttggcggcagaaacctattcgtggttcgtgctgatcctgggttacatccagaccagctggccattgcagcgcaagccggcaaacctcccggccaacaccaggcactggccaaccgtcgatttgctgatccccacctacaacgaagacctgtcagtggtgcgcaccacggtaatggccgcgctgggcctggactggccacgcgagtgcctgcgcatctacattctcgatgatggccgccgcgacgcgtttcgtgcctttgccgacgaagtcggggtagggtatatcgtgcggcccgacagcaagcatgccaaggccggtaacctcaatcatgcgctgggcgtcaccgacagcgagttgatcgccatcttcgactgcgaccatgtgccggtgcgctccttcctgcaactgaccgtgggctggttcctcaaggacgctaaactggcgctggtgcagacaccgcaccatttcttctcgcctgacccgttcgagcgcaacctcggttcgttccgccgccgccccaacgaaggggagctgttctacggcctgatccaggacggcaacgatatgtggaacgcggcgtttttctgcggctcgtgtgccgtgctgcgccgcaccgcgctggagagcatcggtggttttgccgtcgagaccgtgaccgaggatgcccacaccgccctgcgcctgcatcgtcaagggtggacatcagcctacctgagcattccgcaggctgcgggcctggccactgaaagcctgtcggcgcacatcggccagcgcattcgctgggcccgtgggatggtgcagatcttccgcaccgacaacccgctgttcgggcgtggccttagcctgttccagcgggtgtgctacgccaacgcgatgctgcactttctggccggcctgccgcggctggtgttcctgacggcgccactggcgttcctgttgctgcatgcctacatcatctacgcaccggcattgatgattctgctgtacgtgctgccacacatgatccacgccagcctgaccaactcgcgcatgcagggcaggtaccgacaaaccttctggggcgaggtctacgagaccgtactggcctggtacatcgcccgcccaaccacggtggcgctgttcgcgccgaaaaaaggcacgttcaacgtcaccgccaagggcggcttgatggagcaggaacagttcgactggcgaatcgcccaaccttacctgtggctggcggcgctcaacgtggtgggtctgggctttgcggtgtggcgcctggtcaccggcccgacggcagaaatcggcacggtgatcgtcagctcgctgtgggtgatctacaacctgctgattatcggtgccgcagttgcggtggccgccgaagtgcgccaggtgcgccgcgcccatcgggtgcagatgcgcttgccggcggggctgatgcttgccagcggtcatgcctacccctgcaccctggtcgactactccgacggcggtatcggcctgcaggtacagcccggtctggagctgaaaccgggggagcaggtacgcctgctgctcaaccgcggccagcgcgagttcgccttccaggcgtgcgtcacccgtaccgtcgggcaacacgtgggcctggtgttccgcgacctcgccctgcagcagcgtatcgacctggtccactgcacctttgcccgcgccgatgcctggcttggctggaacgagcagcacgaggtcgagcgcccgctgcgcagcctgatcgatgtgttgaagctgggtggcgtcggttacgtgcgcctggtcgagcacatgccgccatggctgcgggcgtggttgcgcccgttgcgttcgctggcgtcgtggctggccagctactggccccgcacaccgcaggcaatcccttccatgaaccctgttgatcgagacgcatga

SEQ ID NO: 83162 - protein, 869 aa, Pseudomonas putida KT2440
MTLNPLSAYTWFTVRGARLPVAWLFTLGVWLAFLFLRLESPAWQALLAERQRLYPQLAGKRPTLGDPLRLLIQSLWLLLRRQPQVRTARPGRRALGAVRMHLRAAGGVARHYRGLLIDALQQVPARYRASAFKHQASARLRGLSVFARRAFYSVLTVFALSLALLCVTEPFGYLAQLMFICLLLVIALLVRHMPGRFPTLMLIVLSTIISCRYLWWRYTSTLNWNDTTDLVFGVILLAAETYSWFVLILGYIQTSWPLQRKPANLPANTRHWPTVDLLIPTYNEDLSVVRTTVMAALGLDWPRECLRIYILDDGRRDAFRAFADEVGVGYIVRPDSKHAKAGNLNHALGVTDSELIAIFDCDHVPVRSFLQLTVGWFLKDAKLALVQTPHHFFSPDPFERNLGSFRRRPNEGELFYGLIQDGNDMWNAAFFCGSCAVLRRTALESIGGFAVETVTEDAHTALRLHRQGWTSAYLSIPQAAGLATESLSAHIGQRIRWARGMVQIFRTDNPLFGRGLSLFQRVCYANAMLHFLAGLPRLVFLTAPLAFLLLHAYIIYAPALMILLYVLPHMIHASLTNSRMQGRYRQTFWGEVYETVLAWYIARPTTVALFAPKKGTFNVTAKGGLMEQEQFDWRIAQPYLWLAALNVVGLGFAVWRLVTGPTAEIGTVIVSSLWVIYNLLIIGAAVAVAAEVRQVRRAHRVQMRLPAGLMLASGHAYPCTLVDYSDGGIGLQVQPGLELKPGEQVRLLLNRGQREFAFQACVTRTVGQHVGLVFRDLALQQRIDLVHCTFARADAWLGWNEQHEVERPLRSLIDVLKLGGVGYVRLVEHMPPWLRAWLRPLRSLASWLASYWPRTPQAIPSMNPVDRDA

SEQ ID NO: 83163 - DNA, 2220 bp, Pseudomonas syringae pv. tomato str. DC3000
  CDS (1)..(2220): transl_table=11
atgactaacctgtcgctcgacgcgtccccatcccggacgcgctcatcgctgtggctgaatgctttgtcggaaaggttcggccagcagtccagaaccctgcgccgcgcactgaaaaccgtggccattgttgtaggcctgctgctgatggcactggtcgtcacggtgcctctggatctctacgcgcagtgcttttttgccttggcatgttttgccgcgatgctggtgattcgcaagataccagggcgcatttcggtgctggcgctggtgacgctgtcgttgctggcgtcgttgcggtacatgtactggcggctgacctcgactctggattttgataactggctggacagcctgctgggctacgggctgatcgtcgccgagttctacacgctgatcgtcatcgtgctgggttacgtgcagacggcctggccgctgcaccgcaagcctgtgatcatgccgagcgattccagccagtggccgactgtggatgtctttatcccttcgtacaacgaagcgctgagcatcgtcaaactgaccatttttgctgcgcagtccatcgattggccgcgagacaaactgcgtgtttacgtgctcgatgacggccgccgggaagactttcgcgagttctgcgagcaggtcggtgttggctacctgacccgtgaaaacaattatcacgccaaggccggtaacctgaacgaagcgctcaagtccaccgatggcgaatacattgccatgttcgatgccgatcacgtgccgacccgctcgtttctgcaggtcgccatgggctggttcctcaaggactcaaagcttgcgatgttgcagacgccgcactttttcttctcgccagacccgttcgaaaagaacctcgacaccttccgcagtgtgcccaacgaaggcgaactgttttacggcctgttgcaggacggcaacgacctgtggaacgcaaccttcttctgtggctcgtgtgcggtgctgcggcgttcgtcgctgctggaaatcggcggcgtggccaccgaaaccgtgaccgaagatgcgcacaccgcgctgaagcttaaccgcgccggttacaacacggcgtacctggcgattccgcaagcggcggggctggcgactgaaagcctgtcgcgccacgtggcccagcgcattcgctgggcgcgtggcatggcgcagatctttcgcaccgacaatccgttgctgggcaagggcctgtcgatcggccagcggctgtgctacgccaactccatgctgcacttcttctatggcttgccgcgtctggtatttctcactgcgccactggcctacctgctgttcggtgccgaggtcatgcacgcctcggcgctgatgatcaccgcttacgtattgccgcacctggcgcacgccagcctgaccaactccaggattcaggggcgtttccgccattcgttctggaacgaggtctacgaggccgtgctggcctggtacatcatgggcccggtattgatggccctgatcaacccgaaattcgggggcttcaacgtcaccgacaaaggcggcgtggtcgaggagaagttctttgactggacgctggcgcggccctatatcgtgctgctgacgctcaatgccgtggttttcgcgctcggtatctacagcctgtatcaactgggctggaacaacgatgcgatcaccctgaccatcatcatcaacatggcctggacgatctacaacatcatcatcaccagcgccgcgattgcggtggccagcgagatccgccaggtgcgcactgaaccgcgggtgcaggccagactgccgattcgcgtcacccgcgccgatggcgtggtgttcaacgctgtgacgcaggacttttcgcagaccggcctggggcttgtcctgcctgtcgatgccggtatcgacagtggcgacagcatcacggtgtcactgtatcgcggcgcgcagaccagccattttcccgccacggtgatgttctgccgtgatggctatctgggcacccgtttcgatgatctttcactgcgccagcagagtgaactggtacgcctgacgtttgggcgggccgacacctgggcatcgacctgggggcatggcaaaccggatacaccgctggccgcgctgcgcgaagtcagccatgtcggcgttcgtggcgttgtcgagctgctcaaggccacccgcaaggatttcggccgcctgttacccacacgtaaaaaaacctccccacctcccgcaaactga

SEQ ID NO: 83164 - protein, 739 aa, Pseudomonas syringae pv. tomato str. DC3000
MTNLSLDASPSRTRSSLWLNALSERFGQQSRTLRRALKTVAIVVGLLLMALVVTVPLDLYAQCFFALACFAAMLVIRKIPGRISVLALVTLSLLASLRYMYWRLTSTLDFDNWLDSLLGYGLIVAEFYTLIVIVLGYVQTAWPLHRKPVIMPSDSSQWPTVDVFIPSYNEALSIVKLTIFAAQSIDWPRDKLRVYVLDDGRREDFREFCEQVGVGYLTRENNYHAKAGNLNEALKSTDGEYIAMFDADHVPTRSFLQVAMGWFLKDSKLAMLQTPHFFFSPDPFEKNLDTFRSVPNEGELFYGLLQDGNDLWNATFFCGSCAVLRRSSLLEIGGVATETVTEDAHTALKLNRAGYNTAYLAIPQAAGLATESLSRHVAQRIRWARGMAQIFRTDNPLLGKGLSIGQRLCYANSMLHFFYGLPRLVFLTAPLAYLLFGAEVMHASALMITAYVLPHLAHASLTNSRIQGRFRHSFWNEVYEAVLAWYIMGPVLMALINPKFGGFNVTDKGGVVEEKFFDWTLARPYIVLLTLNAVVFALGIYSLYQLGWNNDAITLTIIINMAWTIYNIIITSAAIAVASEIRQVRTEPRVQARLPIRVTRADGVVFNAVTQDFSQTGLGLVLPVDAGIDSGDSITVSLYRGAQTSHFPATVMFCRDGYLGTRFDDLSLRQQSELVRLTFGRADTWASTWGHGKPDTPLAALREVSHVGVRGVVELLKATRKDFGRLLPTRKKTSPPPAN

SEQ ID NO: 83165 - DNA, 2559 bp, Chromobacterium violaceum ATCC 12472
  CDS (1)..(2559): transl_table=11
atgagccgcgctcgttgggccgcgtgggcggttcgctgcgggcttcttcaccgagcggaccggccggctgtcgggttggctctgctatccctgctgttcgtgacgcctgacaacggttgggaagcttggggccgccgccagaaaggctgtttcccccatgtcgacttctcccatccgggccccgccgacgcgttgcgcatcccgttgcagcttttatggttggcgctggtgcggccgccatccgcgcggggcggggtatcgactgcctggcgtgagctgcggaggcgcgcggcgcgcgcgcggtccgcgttgcgcgcccatcgggcgcggttggcggctcggcatctggcctggcttgtcccggaacgattgaaccgcgcctcagcgcgcgtggccggcaacgccgcctggcagagcgccgcgctgcgctatgcctgcggcctggtggcgatggcgctggtggcggtttgcgtcaccaccccgttcgacgacgcgtcgcaggccttgttcttcgcggcgctgctgttgatcgcgctatgggtgaaccgcgttcccggacaggcgtgcacgctgatgctgatggtgttttccatggtgatgtccacccgttacatctggtggcgggccaccagcaccatcaacgacgatacttggctgaacctcgctttcggcctgatgctgctggctgccgagatcttcgcctggatcgtgttgtcgctgggctttttccagtcgtcctgggcgctcaagcgccgggtcgcgccgttgcccgatgaccgcgccctgtggcctgcggtggatgtgttcattccgatctacaacgagcccttgcgggtgctgaggccgaccgtgatgtcggcgctggaaatggactggccgcccgacaagctgcgcgtccacatcctggacgacggctgccgcgaggaggtgcgcgaattcgccgccgggatcggggccggctatatcaccaggccggtgcacaagcacgcgaaggcgggcaacatcaaccacgctctgacggtgacctccgccggcttcatcgccgtcttcgactgcgaccacattcccacccgttccttcctgcggtccacgatgggcggcttcctgagcgacggcaagcttgccctggtgcagacgcctcaccatttcttttccgccgacccgttcgaacgcaacctggaaacccacggcaaaatgccgaacgagggcgaactgttctacggccgggtgcaggatggcaacgatttatggaacgcgaccttcttctgcggttcctgcgcggtgctgcggcggtctcatctggtagaggcgggcggcatcgcggtggacaccgtcaccgaagacgcgcacacctcgctcaggctgcaccggctcggctaccgttccgcctacatcaacgtggtgcaggcggcgggcctggccaccgagagcctgtccgcccacatcggccagcgcatacgctgggcgcgcggcatggcgcagattttccgcagcgacaatcccgtgctcggcaaggggctgaccctgccgcagcgtttctgctacctgaacgcgatgctgcatttcctgaatggcgcgccccggctgatcttcctgaccgcgcccatggtcttcctgatcttccatgtctacaccatctatgcgcaggcgctgagcatcgtgctgtacgtggtgccgcacatggcgttctcggtgctggccaattcgcggctgaacggacggttccgccgctcattctggggcgaagtctacgagacggtgctggcctggtacatcgtgatcccgaccacggccgcgctgttgttccccggtctgggcacgttcaatgtcaccgccaagggcggcgtgatggacgaagatttcgtcgactggcgcattgccaaaccctatctggtcctgctgggcttcaacttgctgggcataggcttcggcgcttggcggatggcggcgggcccgcatttcgagatgggcaccgccgtcatcaacatgctctgggcgggctacaacgccatgctgctgggcgtggcgctggcggtcgcgcgcgagctgcgccaggtgcgcgccgcccatcgggtgcgcgccagccggcaggccgcgctgcatctcccggatggccgggttcaccgctgccggatgcttgactattccgagggcggcatggccctgcaactggcgcgggagcccaggtccggcatggatggcgatgccgaattgacggtgtcgctgcgtcaggacgggcgcagctacgccttcccctgccggatggcgttttccagcggcgacagggtgagcgtgcggttccccgacttgaccttggcgcagcggagcgaactgatgcagtgcactttcggccggcccgacgcctgggccgagagggagacgcgcaagcgggagcgcaatccgctgggcagcgcgctggatattttccacttgggatggctgggtctgaagggcttgtggctgcttgcggcatccagccttggcatcgggcgccggcccgcttctgtgctgtggctgctgagcctgctgcccaggcagcccatatcgattcgggactga

SEQ ID NO: 83166 - protein, 852 aa, Chromobacterium violaceum ATCC 12472
MSRARWAAWAVRCGLLHRADRPAVGLALLSLLFVTPDNGWEAWGRRQKGCFPHVDFSHPGPADALRIPLQLLWLALVRPPSARGGVSTAWRELRRRAARARSALRAHRARLAARHLAWLVPERLNRASARVAGNAAWQSAALRYACGLVAMALVAVCVTTPFDDASQALFFAALLLIALWVNRVPGQACTLMLMVFSMVMSTRYIWWRATSTINDDTWLNLAFGLMLLAAEIFAWIVLSLGFFQSSWALKRRVAPLPDDRALWPAVDVFIPIYNEPLRVLRPTVMSALEMDWPPDKLRVHILDDGCREEVREFAAGIGAGYITRPVHKHAKAGNINHALTVTSAGFIAVFDCDHIPTRSFLRSTMGGFLSDGKLALVQTPHHFFSADPFERNLETHGKMPNEGELFYGRVQDGNDLWNATFFCGSCAVLRRSHLVEAGGIAVDTVTEDAHTSLRLHRLGYRSAYINVVQAAGLATESLSAHIGQRIRWARGMAQIFRSDNPVLGKGLTLPQRFCYLNAMLHFLNGAPRLIFLTAPMVFLIFHVYTIYAQALSIVLYVVPHMAFSVLANSRLNGRFRRSFWGEVYETVLAWYIVIPTTAALLFPGLGTFNVTAKGGVMDEDFVDWRIAKPYLVLLGFNLLGIGFGAWRMAAGPHFEMGTAVINMLWAGYNAMLLGVALAVARELRQVRAAHRVRASRQAALHLPDGRVHRCRMLDYSEGGMALQLAREPRSGMDGDAELTVSLRQDGRSYAFPCRMAFSSGDRVSVRFPDLTLAQRSELMQCTFGRPDAWAERETRKRERNPLGSALDIFHLGWLGLKGLWLLAASSLGIGRRPASVLWLLSLLPRQPISIRD

SEQ ID NO: 83167 - DNA, 2568 bp, Ralstonia eutropha JMP134
  CDS (1)..(2568): transl_table=11
atgagactgccatcggtatccggcatgtgggaggccttgcgccgccagctcgcgcgggaactcggcatctctgtcagcgcgcccgcgggcctgtggtggctgcggctgctgttccgtgccccgccgccgggacggcccgacgtgccgctgcactgcgcggtctggctgagcgagcgcgcgcacgtgcgcctcgagatcggccgcgcgcatggtgctcgcatctggctgcaacggctgctgttacgcgcaccgcgtgcgatccgcccgctcgcggcagatttgcggcagcgccgccagccgcaggccgcgcccgaacccagcgcattgcggcgctggttccgcagctggctggaaccggcctacttccgcgtgaagcggctgcggcaccggctgatggcgcgcctgcccacggtggactggcacggcatcgccaaccgactggaagcgctgtcgcccacactcggacaggtccctctgctgatgccgatcctgctggtgctggccgcggtctcgggcatcctgctctgcaccacccccctgccgctgcgcgaccagttcctgctggtcgtgctgatcctgaccggcctctttttcctgcgccgcattccgggccggctcgccacgttgtcgatggctgcgctgtcggtgctgatggcgggccgctacatctggtggcgactgacaaccacgctgcgcttcgagaccaccgtcgaagccgtgttcggctacctgctgctgattgcggaactctacacgtggatcgtgctgttcctcgggtaccttcagaccatctggccgctgaaccgcaggccggcagcgctgtcgccggatccggccgactggcctaccgtggatgtgttcatcccgacctacaacgaaccgttgcgcgtgctgcagcccaccgtctatgccgcacgcagcatggactggcccgccggcaagatgaacgtctatgtgctcgacgacggcggccgcgaagagatccgcgccttcgccgaggaagcgggcgtgcactacctggcgcgcgatgaacactcgcacgccaaagccggcaacatcaactccgcgctgaagcagaccgcgggcgagtacgtggcgatcttcgactgcgaccacattcccacgcgctccttcctgcagatgacgatgggcgagttcctggcagacccgaattgcgccatggtgcagacgccgcaccacttcttctcgccggacccgttcgagcgcaacttcgatacgttccgccgcgtgcccaatgaaggcagcctgttctacggcctgatccaggatggcaacgatttctggaacgcgacgttcttctgcggctcctgcgctgtcatcaagcgcgcgccgctgaccgagatcggcggcattgcagtcgagaccgtgaccgaggatgcgcataccgcgctcaagctgcaccggctcggctacaacagcgcctacctgcgcacggtgcaggccgccggcctggccaccgaaaacctggccgggcacatcggccagcgcatccgctgggcgcgcggcatggcgcagatcttccgcatcgacaacccgatgttcggcaaaggcctgcacctgttccagcggctgtgctacagcaacgccatgctgcatttcttctacggcattccgcggctgatcttcctgaccatgccgattgcctacctgtatttcgggctgcacgtgatccacacctcagcggtactgctcatggcttacgtgatcccatacctgatggtcgccagcatcacgaattcgcggctgcagggccggtaccggcattcgttctgggccgaggtctatgaatcggtgctggcgtggtacatcgtgctgcccacgaccatggccttcgtcaacccgcgcctcggcaagttcaacgtgaccgccaagggcggacagatcgaggaagactaccttgactggactatctccaagccttacgtgctgctgctggcgctgaacgtcgtaggcctggcgctcggtgcgggccgtgtgctgttcgacgacagcttcgaggcctcggcagtgatcatgaacatgggatgggcactgttcaacctggtgatgctgggcgcggccatcggcgtcgcgcgcgaggcgcggcaggtgcggatttcgcaccgcattcccatgcgcgtgccggccacgctgctgctgcccgatggacgcacgctggcctgccggaccgagaactattcgctgggcggactcggcctgatgttgcctgtcgagacccgcgtcgatccaggggaacaggtcggcgtctgcctgtcgcgcggcaagcgcagctaccacttccccgccgtggtgacgcgcaatgcggaccgccatctcggcgtgcgctttgaagacatggacgcgctggccgaacagcagctgatccaatgcacgttcggccgcgccgacgcgtggatcaactggatcgacgagcagcccgtggacgtaccgctgaatggactgaaggaagtcatcgagatgggataccagggcctgctgcgactggtcgacgccgcgcgcgcctcggtcgccggcatcttcggccgcgtggggccgcggcaaccctga

SEQ ID NO: 83168 - protein, 855 aa, Ralstonia eutropha JMP134
MRLPSVSGMWEALRRQLARELGISVSAPAGLWWLRLLFRAPPPGRPDVPLHCAVWLSERAHVRLEIGRAHGARIWLQRLLLRAPRAIRPLAADLRQRRQPQAAPEPSALRRWFRSWLEPAYFRVKRLRHRLMARLPTVDWHGIANRLEALSPTLGQVPLLMPILLVLAAVSGILLCTTPLPLRDQFLLVVLILTGLFFLRRIPGRLATLSMAALSVLMAGRYIWWRLTTTLRFETTVEAVFGYLLLIAELYTWIVLFLGYLQTIWPLNRRPAALSPDPADWPTVDVFIPTYNEPLRVLQPTVYAARSMDWPAGKMNVYVLDDGGREEIRAFAEEAGVHYLARDEHSHAKAGNINSALKQTAGEYVAIFDCDHIPTRSFLQMTMGEFLADPNCAMVQTPHHFFSPDPFERNFDTFRRVPNEGSLFYGLIQDGNDFWNATFFCGSCAVIKRAPLTEIGGIAVETVTEDAHTALKLHRLGYNSAYLRTVQAAGLATENLAGHIGQRIRWARGMAQIFRIDNPMFGKGLHLFQRLCYSNAMLHFFYGIPRLIFLTMPIAYLYFGLHVIHTSAVLLMAYVIPYLMVASITNSRLQGRYRHSFWAEVYESVLAWYIVLPTTMAFVNPRLGKFNVTAKGGQIEEDYLDWTISKPYVLLLALNVVGLALGAGRVLFDDSFEASAVIMNMGWALFNLVMLGAAIGVAREARQVRISHRIPMRVPATLLLPDGRTLACRTENYSLGGLGLMLPVETRVDPGEQVGVCLSRGKRSYHFPAVVTRNADRHLGVRFEDMDALAEQQLIQCTFGRADAWINWIDEQPVDVPLNGLKEVIEMGYQGLLRLVDAARASVAGIFGRVGPRQP

SEQ ID NO: 83169 - DNA, 2538 bp, Burkholderia thailandensis E264
  CDS (1)..(2538): transl_table=11
atgacggcggcgcgcgcggcattgcgacgattgacgggcgacgcggccgcgcgcgcgcgcggctggatcgcgcgcggcctcggcgtgcccgacgagggttcgacgttcgactggctcgtgcgcgcgttctttcatgcgcccgcgccgggcgcgcgcgacgtcgcgcgcgactggctgcgcgcggcgattctatgggccgccgcgcaatggggcgtggcgcgaccgcgccgcgcgcgcgactggctctggcgcgcgttcgtgcgcgcgccgcatgaaaggcgcgcgcgcgatccgttcgcgtggatcgacgcgacgctcgtgccggcgttcgcgcttgcgcggcgcgcgcagcggcgagtcgacgaagggctcgcccgcttgccgtggcatcgctggggcgagcgcatcgagcgcggcgcgcggcgcgccggcgcgcatcgccggctgctgccggcgagcggcgcggcggggctcgcgttgtggctcgcggccggcacgtcgccgctcgcgccggcgggccagttcgcgttcttcgcgacggtcgccgcgctcgcgctcgcgctgcgccgcgtgccgggccgcctgcccacgctcgcgctcgcgacgttcgcgctgctcgcgatggcgcgctacatctggtggcgcagcaccgaaacgctcgacttccgcacgccggtcgaagcgtgcgtcggctatctgctgtacgcggccgaggcgtacacgtggctcatcctcgtgctcggcttcgtgcagaccgcgtggccgctcgagcgtccggtcgcgcgcctgccggacgattccgcgtgctggccgagcgtcgacgtctacattccgacgtacaacgagccgctcgccgtcgtgaagccgacgatcttcgccgcgcaaagcctcgactggcccgccggcaagctcaacgtgtacctgctcgacgacggccgacgcccggagttcgaggcgttcgcgcgcgacgcgggcatcggctatctgacacgcgaggacaatcgccacgcgaaggcgggcaacatcaacagcgcgctcgcgcgcacgcacggcgaatacgtcgcgatcttcgactgcgatcacgtgccgacgcgctcgttcctgcagacgacgatgggcgcgttccttcgcgatccgaactgcgcgctcgtgcagacgccgcatcacttcttttcgccggacccgttcgagcgcaacctcggcacgttccgccgtgtgccgaacgagggcagcctgttctacgggctcgtgcaggcgggcaacgacttgtggaacgccgcgttcttctgcggctcgtgcgcggtgctcaagcgcggcccgctcgaagaggtgggcggcgtcgcgaccgaaaccgtcaccgaggatgcgcataccgcgctcaagctgcatcgccgcggctacaagagcgcctatctgccgaccgtgcaggccgcgggcctcgcgaccgaaagcctcgcgggccacatccggcagcgcgcgcgctgggcgcgcgggatggcgcagatcttccggatcgacaatccgttcgtcggccgcgggctcggcttcttccagcgcctctgctacggcaacgcgatgctgcacttcttctacggcattccgcggctcgtgttcctgacgatgccgatcgcgtacctgttctttcatttgtatttcatcaacgcgtcggcgctcgcgctcgcgagttacgtgctgccgtacatggcgctcgcgcatgtcgcgaacgcgcggatgcaggggcgcttccggcattcgttctgggccgaggtgtacgaatcggtgctcgcgtggtacatcgcgctgccgacgacgatcgcgttcctgagcccgaagcacggcaggttcaacgtgaccgcgaagggcggacggatcgacgaaggctacgtcgactgggcgacgtcgaagccctatctcgcgctcttcgtgctgaacgtcgcggcgatcttcgcgggcggcgtgcgccttgccgcgggcggcgtcgacgaggcgtcgacgatcctgatgaacatcacgtgggcgctgtacaacctcgcgatgctcggcgcggcgctcgcggtcgcgcgcgaggcgaagcaggtgcgcgtcacgcaccggatcgcgatgcgggtgccggcgacgctgcttcttcccgacggcacgacgctcgcgtgccgcacgaaagactattcggcgggcggcctcgggctcgacgcggtgccgctcgcgcgcatcgcgctcggcgacacgctcgacgtctgcgtgagccgcggcgaccggccgttccatttcccggtgcgcgtgacccgcgtcgacgcgacgcatctcggcgtgcagttcgagcggctgacgctcgagcaggagcgccagctcgtggagtgcacgttcggccgcgcggacgcgtggctcggctggcgcgacgcgagcgccgagcccgacgacgcgccgctgcgcgggctgaaggaggtgctgtcgatgggattcgaaggctacgcgcggatgctgcgggccgcgacgagcgcggtgcgggcaagacgcacggccgaccggacgcgtcactga

SEQ ID NO: 83170 - protein, 845 aa, Burkholderia thailandensis E264
MTAARAALRRLTGDAAARARGWIARGLGVPDEGSTFDWLVRAFFHAPAPGARDVARDWLRAAILWAAAQWGVARPRRARDWLWRAFVRAPHERRARDPFAWIDATLVPAFALARRAQRRVDEGLARLPWHRWGERIERGARRAGAHRRLLPASGAAGLALWLAAGTSPLAPAGQFAFFATVAALALALRRVPGRLPTLALATFALLAMARYIWWRSTETLDFRTPVEACVGYLLYAAEAYTWLILVLGFVQTAWPLERPVARLPDDSACWPSVDVYIPTYNEPLAVVKPTIFAAQSLDWPAGKLNVYLLDDGRRPEFEAFARDAGIGYLTREDNRHAKAGNINSALARTHGEYVAIFDCDHVPTRSFLQTTMGAFLRDPNCALVQTPHHFFSPDPFERNLGTFRRVPNEGSLFYGLVQAGNDLWNAAFFCGSCAVLKRGPLEEVGGVATETVTEDAHTALKLHRRGYKSAYLPTVQAAGLATESLAGHIRQRARWARGMAQIFRIDNPFVGRGLGFFQRLCYGNAMLHFFYGIPRLVFLTMPIAYLFFHLYFINASALALASYVLPYMALAHVANARMQGRFRHSFWAEVYESVLAWYIALPTTIAFLSPKHGRFNVTAKGGRIDEGYVDWATSKPYLALFVLNVAAIFAGGVRLAAGGVDEASTILMNITWALYNLAMLGAALAVAREAKQVRVTHRIAMRVPATLLLPDGTTLACRTKDYSAGGLGLDAVPLARIALGDTLDVCVSRGDRPFHFPVRVTRVDATHLGVQFERLTLEQERQLVECTFGRADAWLGWRDASAEPDDAPLRGLKEVLSMGFEGYARMLRAATSAVRARRTADRTRH

SEQ ID NO: 83171 - DNA, 2205 bp, Burkholderia xenovorans LB400
  CDS (1)..(2205): transl_table=11
atgagcacgacttcaacgcccgggctcgagcccgcggagccgtcgcggctcgaacgcttcgtcgacgcgcgcttctggaacagccgcatcatcaccggcctcgtcacgctgttcgcactggtgatgctgtacttcgtcttcacggtgccgctcgcgttctaccaacagttgacgttcgcgacctgctgcttcgttaccgcgctcatgttccgccgcctgcaaggccggtacgcgacaatggtgatgatcatgctgtccgtgctcacctcgggccgctacatgtactggcggctgaccgcgacgacttactgggagcatccgctcgacgcctggtggggtttgctgctggtatccgccgaactctattcgaccgtcgtgctgatgctcggctacttccagaccgcgtggccgctcaagcgcacgccgatgccgctgcccgtctcgcgcgacgaatggccgaccgtcgacgtgttcattccgacctacaacgaaccgctctcggtggtgaagccgaccatctacgccgcgctcgcgctcgactatccggccgagaagatctcgatccacgtgctcgacgacggccgccgccccgagttcaaggcgttctgcgaagaggtcggcgtcaactggacgatccgcacgcacaaccgccacgcgaaagccggcaacatcaacgaagcgctgaagatcaccagcggcgaatacctcgcgattttcgactgcgatcacattccgacccgctcgttcctgcagatcggcctcggctggttcctgcgcgacaagctgctgtcgatgctgcaaacgccgcaccatttcttttccgccgatccgttcgaacgcaacctcggcacgttccgcaaggtgccgaacgaaggcgaactgttctacgggctcgtgcaggacggcaacgatctgtggaacgccacgttcttctgcggctcgtgcgcgttgctgcgccggaccatggtcgaggagatcggcggcattgcggtcgaaaccgtgaccgaagacgcgcacaccgcgttgaagctgcaccgtctcggctacaccaccgcgtatctggcgattccgcaagccgcgggactcgccacggaaagtctctccggccacatcggccagcggattcgctgggcgcgcggcatgacgcagattttccggatcgacaatccgctcaccggcaagggtctgaaaatcggtcagcggctgtgctatctgaacgcgatgatgcacttcttctacggcattccgcgtctggtgttcctgaccgcgccgctgtcgtatctgttcttcggcgcgcacgtgatcgaagccgccgccagcaccatcgcgatctacgcgctgccgcacatgatgcacgcgagcatcaccaactcgcgcatgcagcgctcgttccgccattcgttctgggccgaagtgtatgagtccgtgctggcctcgtacatcaccgcgcccaccctgctcgcgctgatcaacccgaagctcggcaagttcaacgtgacggccaagggcggccagatcgaaaagaactacttcgactgggccatctcgcggccgtatctgttcctgctgttgctgaacctgatcggcttctgcgtgggcgtcgtgcacatctatttcaactggcacattcgcagtgtggtgcagaccaccatcctcaatctcggctggaccacctacaacatgctgattctcggcgcgagcgtggccgccgcgagcgagcgccggcagattcgcgcggtgcaccgcgtggcgatgcagatgcccgtgatgctcaaattctcgaccggccgcacgctcgcctgcgaaaccatcgactactcggaaggcggcgtcggcgtggcgctgcccgcctcgatccaggtgccgatgcacgaacgcgtgagcgtctccctctttcgcggcgacgaggaatacgcgttcccggcaatggtcagcttcaccgcaccgggtcgcgtgggtctgcgcttctccaccatgacgcgcgagcaggagtacgagttcgtcaagaccacctttgcacgcgccgacgcctggaccggctgggcggaaggacgccagcaggacacgccgctgcgcggcctgtcgcatgtgctgacggtcggcgtacgcggcatcgcgggtctgttcgagcatctctatgccgaccttcgcagttcgatgaaaagccgtccgatggacgtcaagaagctaaaaacgaaagactga

SEQ ID NO: 83172 - protein, 734 aa, Burkholderia xenovorans LB400
MSTTSTPGLEPAEPSRLERFVDARFWNSRIITGLVTLFALVMLYFVFTVPLAFYQQLTFATCCFVTALMFRRLQGRYATMVMIMLSVLTSGRYMYWRLTATTYWEHPLDAWWGLLLVSAELYSTVVLMLGYFQTAWPLKRTPMPLPVSRDEWPTVDVFIPTYNEPLSVVKPTIYAALALDYPAEKISIHVLDDGRRPEFKAFCEEVGVNWTIRTHNRHAKAGNINEALKITSGEYLAIFDCDHIPTRSFLQIGLGWFLRDKLLSMLQTPHHFFSADPFERNLGTFRKVPNEGELFYGLVQDGNDLWNATFFCGSCALLRRTMVEEIGGIAVETVTEDAHTALKLHRLGYTTAYLAIPQAAGLATESLSGHIGQRIRWARGMTQIFRIDNPLTGKGLKIGQRLCYLNAMMHFFYGIPRLVFLTAPLSYLFFGAHVIEAAASTIAIYALPHMMHASITNSRMQRSFRHSFWAEVYESVLASYITAPTLLALINPKLGKFNVTAKGGQIEKNYFDWAISRPYLFLLLLNLIGFCVGVVHIYFNWHIRSVVQTTILNLGWTTYNMLILGASVAAASERRQIRAVHRVAMQMPVMLKFSTGRTLACETIDYSEGGVGVALPASIQVPMHERVSVSLFRGDEEYAFPAMVSFTAPGRVGLRFSTMTREQEYEFVKTTFARADAWTGWAEGRQQDTPLRGLSHVLTVGVRGIAGLFEHLYADLRSSMKSRPMDVKKLKTKD

SEQ ID NO: 83173 - DNA, 2574 bp, Ralstonia metallidurans CH34
  CDS (1)..(2574): transl_table=11
atgagcgcgcgccgcttctcgctaagcgaactgttctccggtgcccgcgaccgcgtggcgcgggcgctcggcgtgacgcgcaccgcgaatgccggcaactggctgctccgcctgttctttcgtccaccgcgaccgggcaagcgcgacatcccggcggaatgggccgcgcaggttcacagacgcgccatgacccggctcggcattggcaagcgccagggcacaggcacgtggatgtggcgcctgttcatccgccccccaagacctcgatttcgactggcggccgatccacgcaaacaacgttcgatggccgagccggagcgcgacaactggctgcgccgctggctcgatcgggtactcgagcccgtctggaatacgacatcgcgactgcaccaccagttcttgtcgatcctgcctcgaccggactggaatcgagtggcctattcgctcgagtcgcttgccgcgcaggtcgggcgtattccatttgtcctgccgatctccatggtcatcgcagccatcgccaccgtcgtcatcggcaccacgccactgacgttcgcgagccagatgctgatgttcgccgtggtctgggccatactgatcgtcgtgcggcgcattcctgggcggctggccacgatcacgatgatcgccgtctccatgctgatggccgtgcgttatatctggtggcgctccacacagacactgcagttcgccaccacgaccgaggccgtgatcggttacctgctctacgcagccgagtgctacacgtggctggtgctcgcgctgagctacctgcagaccgcctggccgctgcatcgcaagccaaagccgctgccggctgactcgtccctatggcctaccgtcgatgtcttcatcccgacgtacaacgaatcactcgccgtggtccagccgacggtgtacgcggcacgcagcatggactggccccccgacaagctgcgcgtctacatcctcgacgacagccaccggccggcgatgcgcgagttcgccgaagcggcgggcgtgggctacatcacgcgcgataacaatcgccacgccaaggccggcaatatcaatcaggcgctaccgcgcaccagcggggactacatcgcgattttcgactgcgaccacatccccacgcgctcgttcctgcagatgaccatgggcgagttcctggatgatccgaagtgcgcgttggtccagacaccccaccacttcttctcgcccgatccgttcgaacgcaatttcgacaccttccggcgcgtgccgaatgaaggcagccttttctacggcctgatccaggacggcaatgacctctggaacgccaccttcttctgcggctcctgcgcggtaatcaagcgcgcgccgctgctcgagatcggtggcatcgcagtagagaccgtcaccgaggactcgcacaccgcactgaaactacaccgccgtggctacaacagcgcatacctgcgtaccgtgcaggccgccgggctggccaccgaaagcctgtccagccacatcggccagcgcatccggtgggcacgcggcatggcgcagatcttccgtctggacaatccgctgcttggcaagggcctgacgttgttccagcgcctgtgctacagcaatgcgatgctgcacttcttctacggcattccacggctgatcttcctgaccatgccgatcgcgtatctgtacttcgggctgcacgtgatcaatacgtcggcgctgatgatcatggcctacgtgttgccatacctgctgatcgccaacgtaaccaactcgcggcttcagggtcgctaccgacattcgttctgggcggaggtctacgagtccgtgctggcgtggtacatcgtgctgcccaccacagtggccttcatcaatccgcgcgccggcaagttcaacgtaacggccaagggcgggcagatcgccgacgactatctggactggaccatctccaagccctatctggtactgctggcgctgaacgtggccggccttgtcttcggcgtgctccgcctgctgttctggggcaccgacgagcccgccaccgtgctgatgaacatgggatgggcaacgtttaacctcatcatgctcggcgctgccgttggcgtggcccgcgaggcacggcaggtgcgcgtatcgcaccgtatcccgatgcgcgtgccggcgaccctgctgctgcccgatggccgcacgatcgcgtgcaagaccgagaactattcgatgggcggcctgggcatggtgctgccaatcgacgtgccactggtcgaaggcgcgccggtgggcgtatgtctgtcgcgcggctcgcggacctatcacttccccgcggtggtcacgcgcaatatcaatcgccaccttggggtgcgcatggacgatctgagcgttgagcgcgaagcacagctgatccagtgcacgttcggccgtgccgacgcgtggatcgactggctcgacgacgagcgcgtcgatgctccgctgcgcagcttcaaggaagtcgttgaaatgggctaccagggcctgctacggctctacgatgccttcgtcgatgccgtcgagctggtgaccgcgcgacgccgctcacgtctgccctga

SEQ ID NO: 83174 - protein, 857 aa, Ralstonia metallidurans CH34
MSARRFSLSELFSGARDRVARALGVTRTANAGNWLLRLFFRPPRPGKRDIPAEWAAQVHRRAMTRLGIGKRQGTGTWMWRLFIRPPRPRFRLAADPRKQRSMAEPERDNWLRRWLDRVLEPVWNTTSRLHHQFLSILPRPDWNRVAYSLESLAAQVGRIPFVLPISMVIAAIATVVIGTTPLTFASQMLMFAVVWAILIVVRRIPGRLATITMIAVSMLMAVRYIWWRSTQTLQFATTTEAVIGYLLYAAECYTWLVLALSYLQTAWPLHRKPKPLPADSSLWPTVDVFIPTYNESLAVVQPTVYAARSMDWPPDKLRVYILDDSHRPAMREFAEAAGVGYITRDNNRHAKAGNINQALPRTSGDYIAIFDCDHIPTRSFLQMTMGEFLDDPKCALVQTPHHFFSPDPFERNFDTFRRVPNEGSLFYGLIQDGNDLWNATFFCGSCAVIKRAPLLEIGGIAVETVTEDSHTALKLHRRGYNSAYLRTVQAAGLATESLSSHIGQRIRWARGMAQIFRLDNPLLGKGLTLFQRLCYSNAMLHFFYGIPRLIFLTMPIAYLYFGLHVINTSALMIMAYVLPYLLIANVTNSRLQGRYRHSFWAEVYESVLAWYIVLPTTVAFINPRAGKFNVTAKGGQIADDYLDWTISKPYLVLLALNVAGLVFGVLRLLFWGTDEPATVLMNMGWATFNLIMLGAAVGVAREARQVRVSHRIPMRVPATLLLPDGRTIACKTENYSMGGLGMVLPIDVPLVEGAPVGVCLSRGSRTYHFPAVVTRNINRHLGVRMDDLSVEREAQLIQCTFGRADAWIDWLDDERVDAPLRSFKEVVEMGYQGLLRLYDAFVDAVELVTARRRSRLP

SEQ ID NO: 83175 - DNA, 2673 bp, Alteromonadales bacterium TW-7
  CDS (1)..(2673): transl_table=11
atgagctttactcttttttataaaaggcctatacacagtacattgtatattcttctgagtatattattcactgataagcttgtgcgctatattttatttaaatttcatagttactttaatcaacacaaagtaaatgtaattgaagcctttttaatgccctttataactttgttcggttcattatttgtgaatataaaaaagaacaaagaaaactttgagttagcgttatataactattatccacacttaaggttgccatacagaacttatatctattctaatattatacgctttgttattcagagcatatttctgctttttgctgttcataaaccaaaaaaaaaatcagtgtctataaaaaagcatgctgtaaattacttttatgatggagtcagttatagcctaaggcaacttcgttggtacgaccttaaattaggccgattaataaggcgccttttttccaaaaacaacaagcctaaaaaaagtgcttttaaaacaatggccgacgctcgtatttggcagaacaaactaattaaatacatcgttgttgcactgatattattcttgcttgccatatttgttaccattccgtttagccttgaagcgcaagcagtgtttattagctttattttactggttgcttacgcgctcaaacgcgtaaaaggccatatggccacgattgtaatgatcaccttatctgtcactacatcttcgcggtacttgtggtggcgatacactgaaacacttaattgggatgaccctttagcacttacattaggtgcaggcttgttactagcagaaacatacgcatggatggtacttattttaggtttttttcaaaccattaatccacttgaaagaaaaccggtcatgttgccaaaaaatactgacttatggccaacggtagatatttacattcctacttacaacgagcctttaagtgttgtaaggccgactacccttgctgcattaagcatagattggccagcagataaactaaaagtctatattttagatgatggtaaacgccctgagtttggtgaatttgctaaacaagttggtgcgggttatttaacaagaccagataataaccatgcaaaagccggtaacatgaatagtgctatgcgctacacagatggtgattatattgccatttttgattgcgaccacgtacctgctcgttcgtttttgcaaatgaccatgggacagtttttaaaagacagtaaagtgtgtttagtacaaacaccacatcattttttctcagcagatccatttgagagaaacttaaataaccacagtcaaattccaaacgaaaacatgttgttttacgggcttattcaagacggaaacgatatgtgggatgctacgttcttttgtggttcgtgtgcggtactaaaaagagaagcgcttgatgaaataggtggctttgcttttgaaaccgtcaccgaagatgctcatactgcactgcgaatgcaacgcgcaggttataaaactgcctatataaatattcctcaagctgctggccttgccactgatagtttatcggctcatattggccagcgaattcgttgggcacggggcatggcgcaaatatttaggctcgataacccgctgttaggcaaaggcttgaacatccctcagcgactttgctacttaaacgctatgctgcattttctatcaggtattccgcgcattgtatttttaaccgcgcccctggcacttatatactttaatgcatacattatttacgcgccatttttagctatttttatctacgttgtacctacacttattcagataaaagcaactaactcacgaatacaaggtaagtatcgctattcgttttggggcgaagtttacgaatctgtgcttgcttggtacatattaaagccaacaacagttgctttgtttaatccaaacaaaggtaaatttaacgttaccgaaaaaggtggattaaacgataaagagcattatgactggggtatttctaagccatatttggttttactcgctattaatttagtcggtatgttagttggtattttgcgcctgttttttggcgaccctacgcaagttggtgtactgctgattagtatggggtgggcgctttataatattatcattttaggtgctgcggttgccgtggcagcagaagcacgccaagtgaggcattcacaccgcattaaagcgaacttcccagcgggagttcgtttagcaaatggccacacattaaaagtaaaaattacagattactccgataacggcgtaggaatagaaaccgaccatgcacatgcttgtcgtgtaaacgataaaatagaattattaatgagccgcggtaataagcaattttcgtttactacccatgtttgtaatactcggggtaatcaaattggcttaaccattaaagatttatctcttgaaaaacagcgcgcgtttatacaatgtacattttcacgagctgatgcgtggcttgactggcaaaataactttagacatgaccgcccatcttacagtttcaaagaagtgcaaaaaacaagcctcagagggtttagtaacttgctcttccacgcaccaagagtgcttcaacctatcattcagtttatgactaatttagttgtatacgtaaactcatttactccaaaaagaccaatagtgcataataattatgattaa

SEQ ID NO: 83176 - protein, 890 aa, Alteromonadales bacterium TW-7
MSFTLFYKRPIHSTLYILLSILFTDKLVRYILFKFHSYFNQHKVNVIEAFLMPFITLFGSLFVNIKKNKENFELALYNYYPHLRLPYRTYIYSNIIRFVIQSIFLLFAVHKPKKKSVSIKKHAVNYFYDGVSYSLRQLRWYDLKLGRLIRRLFSKNNKPKKSAFKTMADARIWQNKLIKYIVVALILFLLAIFVTIPFSLEAQAVFISFILLVAYALKRVKGHMATIVMITLSVTTSSRYLWWRYTETLNWDDPLALTLGAGLLLAETYAWMVLILGFFQTINPLERKPVMLPKNTDLWPTVDIYIPTYNEPLSVVRPTTLAALSIDWPADKLKVYILDDGKRPEFGEFAKQVGAGYLTRPDNNHAKAGNMNSAMRYTDGDYIAIFDCDHVPARSFLQMTMGQFLKDSKVCLVQTPHHFFSADPFERNLNNHSQIPNENMLFYGLIQDGNDMWDATFFCGSCAVLKREALDEIGGFAFETVTEDAHTALRMQRAGYKTAYINIPQAAGLATDSLSAHIGQRIRWARGMAQIFRLDNPLLGKGLNIPQRLCYLNAMLHFLSGIPRIVFLTAPLALIYFNAYIIYAPFLAIFIYVVPTLIQIKATNSRIQGKYRYSFWGEVYESVLAWYILKPTTVALFNPNKGKFNVTEKGGLNDKEHYDWGISKPYLVLLAINLVGMLVGILRLFFGDPTQVGVLLISMGWALYNIIILGAAVAVAAEARQVRHSHRIKANFPAGVRLANGHTLKVKITDYSDNGVGIETDHAHACRVNDKIELLMSRGNKQFSFTTHVCNTRGNQIGLTIKDLSLEKQRAFIQCTFSRADAWLDWQNNFRHDRPSYSFKEVQKTSLRGFSNLLFHAPRVLQPIIQFMTNLVVYVNSFTPKRPIVHNNYD

SEQ ID NO: 83177 - DNA, 2610 bp, Pseudomonas putida GB-1
  CDS (1)..(2610): transl_table=11
gtgaccttgactcctctgtcggcctatacgtggttcaccgcccgtggtgcgcggctaccggttgcctggctgtttaccttgggcgtgtggctggcctttctgttcctgcgcctggagtcacccgcctggcaggcattgctggccgaacgccaacgcctgtacccgcagctttcaggcaagcgcccgagcctgggtgacccgctacggctgctgatccagagcctgtggttgctggtgcgccgtcaaccggtggcacgcacaacagggcctggccgccgagcatggggcgcagcgcgcttgcgactgcggggtgttggccaggttgggcgccattaccgagggctgctgatcgatgcactgcatcgggtgcccgcgcgctaccgcgccagtgctttcaggcacgaagcctcggcacgcctgcgcggccttagcgtgctcgccaggcgggtgttctacagcgtgttgacggtgtgcgccgcaagcctggccctgctgtgcgtgactgaaccgttcggctacctggcgcaactgatgttcatctgcctgttgctgggcattgccatgctggtgcgacacatgccggggcgcttcccgaccctgatgctgatcgtgctgtcgaccattatctcgtgccgctacctgtggtggcgctacacctcgaccctgaactggaacgacaccaccgacctggtgttcggggtgattctgttggcggccgaaacctattcgtggttcgtattgatcctgggttacatccagaccagctggccgttgcagcgcaaaccggccaacctgccggccaacccgcagcactggccgactgtcgatttgttgattcctacctacaacgaagacctgtcggtggtgcgcaccacggtactggccgcgctgggcctggactggccgcgcgagtgcctgcgcatctacatcctcgatgacggccgccgtgatgcgtttcgtgcttttgccgacgaagccggggtgggctacatcgtgcggcccgacagcaagcacgccaaggccggcaacctcaaccatgcgctgggtgtgaccgacagcgagctgatcgccatcttcgactgcgaccacgtgccggtgcgctccttcctgcaaatgaccgtgggctggttcctcaaagacccgaagttggcgctggtgcagacaccgcaccatttcttctcgcccgacccgttcgagcgcaacctcggctcgttccgccgtcgccccaatgaaggcgaactgttctacggcttgattcaggatggcaacgacatgtggaacgcggcgtttttctgcggctcgtgtgccgtgctgcgccgcaccgcattggaaagcatcggcggttttgccgtcgagaccgtgaccgaagacgcccacaccgccctgcgcatgcaccgccaggggtggtcgtcggcttacctgagcattccgcaggccgcgggcctggccaccgaaagcctgtcggcgcacattggccaacgcattcgctgggcccgtggcatggtgcagatcttccgcaccgacaacccgttgttcgggcgtgggctcagcctgttccagcgggtgtgctatgccaacgccatgctgcacttcctggccggcttgccacggctgatattcctgaccgcgccgctggcgttcctgttgctgcatgcctacatcatctacgcaccggcgttgatgattctgctgtacgtgctgccgcacatgatccacgccagcctgaccaactcgcgcatgcagggcaagtaccggcaaaccttctggggcgaggtgtacgagaccgtgctggcctggtacatcgcccgcccgaccacggtggcgctgttcgcgccgaaaaagggcaagttcaacgtcaccgccaaaggcggcctgatggagcaggcgcagttcgactggcgtatcgcccagccttacctgtggttggcggcgctcaacgtggttggcctgggctttgccgtgtggcgcctgttcaccggccccacggcagaaatcggcacggtgatcgtcagctcgctgtgggtgatctacaacctgctgatcattggcgccgccgttgccgtggccgccgaagtgcgccaggtgcgccgtgcccaccgcgtgcagatgcgcttgccggcggggctggtactggccagcggtcatgcctacccctgcaccctggtcgattactccgatggcggtgtcggcctgcaggtgcagcaagacctagagctgaaaccgggggaacaggtacgtctgctgctcaatcgcggccagcgtgagttcgccttccaggcgtgtgtcacccgtaccgtcgggcaacacgtgggcctggtgttccatgcacttgaccagcaacagcgcatcgatctggtccactgcacctttgcccgtgccgatgcctggcttggctggagcgagcagcatgaggtggagcgcccgctgcgcagcctgatcgatgtactgaagctgggcggtgtcggttacctgcgcctgttcgagcacatgccaccctggctgagggcgcgcttgcgcccactgcgtacgctggcgctgtggttggccagctatgggccccgcacaccgcgggcaatcccttccatgaaccctgttgatcgagacgcatga

SEQ ID NO: 83178 - protein, 869 aa, Pseudomonas putida GB-1
MTLTPLSAYTWFTARGARLPVAWLFTLGVWLAFLFLRLESPAWQALLAERQRLYPQLSGKRPSLGDPLRLLIQSLWLLVRRQPVARTTGPGRRAWGAARLRLRGVGQVGRHYRGLLIDALHRVPARYRASAFRHEASARLRGLSVLARRVFYSVLTVCAASLALLCVTEPFGYLAQLMFICLLLGIAMLVRHMPGRFPTLMLIVLSTIISCRYLWWRYTSTLNWNDTTDLVFGVILLAAETYSWFVLILGYIQTSWPLQRKPANLPANPQHWPTVDLLIPTYNEDLSVVRTTVLAALGLDWPRECLRIYILDDGRRDAFRAFADEAGVGYIVRPDSKHAKAGNLNHALGVTDSELIAIFDCDHVPVRSFLQMTVGWFLKDPKLALVQTPHHFFSPDPFERNLGSFRRRPNEGELFYGLIQDGNDMWNAAFFCGSCAVLRRTALESIGGFAVETVTEDAHTALRMHRQGWSSAYLSIPQAAGLATESLSAHIGQRIRWARGMVQIFRTDNPLFGRGLSLFQRVCYANAMLHFLAGLPRLIFLTAPLAFLLLHAYIIYAPALMILLYVLPHMIHASLTNSRMQGKYRQTFWGEVYETVLAWYIARPTTVALFAPKKGKFNVTAKGGLMEQAQFDWRIAQPYLWLAALNVVGLGFAVWRLFTGPTAEIGTVIVSSLWVIYNLLIIGAAVAVAAEVRQVRRAHRVQMRLPAGLVLASGHAYPCTLVDYSDGGVGLQVQQDLELKPGEQVRLLLNRGQREFAFQACVTRTVGQHVGLVFHALDQQQRIDLVHCTFARADAWLGWSEQHEVERPLRSLIDVLKLGGVGYLRLFEHMPPWLRARLRPLRTLALWLASYGPRTPRAIPSMNPVDRDA

SEQ ID NO: 83179 - DNA, 2619 bp, Enterobacter sakazakii
  CDS (1)..(2619): transl_table=11
atgataagcctctccgcgctggtgctcgcgccgccggttcgcgcgcggctgcgcgagcgttatatcacgtatcgccgcaacggcgcgccgccgttcagcgcggcgctgggctgtttctggctgacgctcgcctggctctttttgccgctggaaaacccgcgctggcaggcgatccgcgcgcagcacgcgctgctgttcccgcatattcatcccgaccgcccgcgtccgctcgataccgtgcgttatctgctccaggcgctgtggctggtggcgctgcgtccctggcgcgctgtcggcacaccgcgctggcggcctgtttcgaaactgcaggtctggcgcgagcgttttaacctctggctggagacgctcccgcaacgcttcagcgatgaaaccgaccaccttaacgagcagaaagagctcggccacattaacgaacaactgcgacgcgtcgtgctgggcgtggtggttattttctcgctggtgctggcgcttatctgtgtgacgcagccgttcaacccgctctcgcagtttattttcctgctgctgctctggggcgtggcgctgctggtgcgccgtatgccgggccgcttctcggcgctgatgctgattgtgctgtcgctgaccgtctcctgccgttacatctggtggcgctacacctcgacgctgaactggaacgatccggtcagcctggtgtgtggtctggtgctgctggtggcggaaacctacgcgtgggtggtgctggtgcttggctacttccaggtgatctggccgcttaaccgccagccggtgccgctgccgaaagatctcaaagcgtggccttccgtcgatattttcgtgccgacctataacgaagatctgcacgtggtgaaaaacaccatttacgcctcgcttggcatcgactggccgaaagacaagctcaaaatctggatactggatgatggcaaccgcgaggagtttcgccgcttcgcgcaatccgttggcgtggagtatgtggcgcgtcctacgcacgagcacgccaaagcgggcaacattaacaacgcgctgaagctcgcgaaaggggagttcgtgtcgattttcgactgcgaccacgtcccgacgcgctctttcctgcaactgacgctcggctggttcctgaaagataaaaagctcgcgatgatgcagacgccgcatcacttcttctcgccggacccgtttgagcgcaacctcgggcgttttcgtaaaacgccgaacgaaggaacgctgttttacgggctggtgcaggacggtaacgacatgtgggacgcgacctttttctgcggctcctgcgctgtgatccgccgcggcccgctggatgaaatcggcggcatcgcggtagaaaccgtcaccgaagacgcccacacgtcgctgcgtctgcaccggcgcggctacacctccgcctatatgcgtattccgcaggcggcggggctcgcgacggaaagcctgtcggcgcatatcggccagcgtatccgctgggcgcgcggcatggtgcagattttccgcctcgataacccgctctttggtaaagggcttaagctcggccagcggctgtgctacgtcaacgcgatgctgcacttcctctccggcgtgccgcggcttatcttcctgaccgcgccgctggcgttcctgttgctgcacgcctacatcatctacgcgcccgcgctgatgattgcgctgtttgtgctgccgcacatggcgcacgcgagcctgacgaactccaaaattcagggcaaatatcgccactcgttctggagtgaaatctacgaaacggtgctcgcctggtacattacgcggcccacgatggtggcgttgttcaacccgcacaaagggaagtttaacgtcaccgccaaaggcgggctggtggaagaagagtacgtggactgggtgatttcgcgtccgtacctgatgctggtgttgattaacctgctcggcgtgctggtcggcgtctggcgttatttctacggcccggccaatgaaatgctgacggttatcgtgagtatcgtctgggtcttctacaacctgattatcctcggcggcgcggtggcggtgtcggtggaaagtaaacaggtgcgccgctcccatcgtgtcgagatggtgatgccggcggcgattgcccgtgaagacggtcacctcttctcctgcacggtgcaggattactccgacggtggcctcggcattaaggtacacggcggggcgcagtggttacaggggcaaaaagtgaacctgctgatgaaacgcggcgcgcaggagtatgtcttcccggcgaaagtggtacgcgtcttcggcgacgaaatcggcctcaacctcgacggcctgaccacgcgccagcacatcgattttgtacagtgtaccttcgcgcgcgccgacacctgggcgctctggcaggacagtttcccggaagacaaaccgctggaaagcatgctcgatatcctcaagctcggtttcagaggctatcgccacctggcggaattcgcgccagcgtcacttaaaattgtctttcgcacccttaccacgctggtttcctggatagtgtcgtttatcccccgtcgtccggagcggacggcgctgggggagcgtgcgctcccggttatggctcaacaatga

SEQ ID NO: 83180 - protein, 872 aa, Enterobacter sakazakii
MISLSALVLAPPVRARLRERYITYRRNGAPPFSAALGCFWLTLAWLFLPLENPRWQAIRAQHALLFPHIHPDRPRPLDTVRYLLQALWLVALRPWRAVGTPRWRPVSKLQVWRERFNLWLETLPQRFSDETDHLNEQKELGHINEQLRRVVLGVVVIFSLVLALICVTQPFNPLSQFIFLLLLWGVALLVRRMPGRFSALMLIVLSLTVSCRYIWWRYTSTLNWNDPVSLVCGLVLLVAETYAWVVLVLGYFQVIWPLNRQPVPLPKDLKAWPSVDIFVPTYNEDLHVVKNTIYASLGIDWPKDKLKIWILDDGNREEFRRFAQSVGVEYVARPTHEHAKAGNINNALKLAKGEFVSIFDCDHVPTRSFLQLTLGWFLKDKKLAMMQTPHHFFSPDPFERNLGRFRKTPNEGTLFYGLVQDGNDMWDATFFCGSCAVIRRGPLDEIGGIAVETVTEDAHTSLRLHRRGYTSAYMRIPQAAGLATESLSAHIGQRIRWARGMVQIFRLDNPLFGKGLKLGQRLCYVNAMLHFLSGVPRLIFLTAPLAFLLLHAYIIYAPALMIALFVLPHMAHASLTNSKIQGKYRHSFWSEIYETVLAWYITRPTMVALFNPHKGKFNVTAKGGLVEEEYVDWVISRPYLMLVLINLLGVLVGVWRYFYGPANEMLTVIVSIVWVFYNLIILGGAVAVSVESKQVRRSHRVEMVMPAAIAREDGHLFSCTVQDYSDGGLGIKVHGGAQWLQGQKVNLLMKRGAQEYVFPAKVVRVFGDEIGLNLDGLTTRQHIDFVQCTFARADTWALWQDSFPEDKPLESMLDILKLGFRGYRHLAEFAPASLKIVFRTLTTLVSWIVSFIPRRPERTALGERALPVMAQQ

SEQ ID NO: 83181 - DNA, 2292 bp, Candidatus Kuenenia stuttgartiensis
  CDS (1)..(2292): transl_table=11
atgcttcctattggaaatatgccaaaaataaaaaccggaaagtttgacgccgaaaaatccattttttatctgatgtgtatttttgcgggtgtgggggcttttttttttattttcatggcgggatgttatctggatatttattaccagcttgggatattctgggggcttataggttttatcatagttgctggtaaaatagaggtatttaaacgtccacccttgcgaatcctcttcatcctgatcattgtgtttattaccctgcggtatttgctctggcgtactttccagagtttggtgtacacggggccattggattatgcggcaaccattttgctttatcttgcggaggcatatgcggttgccattcactttttcggtttatttgtcaatatatggccgcttaaccacaagatagcgcccttgcctgccgactcccggctgtatcccacggtggatatttttatccccacttaccatgaacctgaagatgttataagaactactgccctttcgtgtacgcagattgactacccaaaggacaagtttaatgtttatatactggatgacggcggcactgtcgccaaaaggaatcatcccgaaaagggaatggatgcgtggaaaaggcattattccctgaagaggatggcgaaggaactgggtatcagttatattacgcggcagcaaaatgtgcatgccaaggcggggaatctgaaccatgccctgcagcacacaagcgctgagcttgtactcatattggattgcgaccatgtacccacaagggatattttacggaatacggcaggatggtttctgaaagatgaaatgctttttcttgtgcaaacacctcattttttcataaatcctgacccgtttgaaaaaaatcttgcgatatttggcgaagcccccggcgagaatgagatgttttatcacggtatccatcatggccttgattcctggaatgcttcgtatttctgcggttccgccgcccttttgcgtagaaaatatttaatggaggttgggggaattgccggcgaaacgataactgaagacgcggaaacaaccgttgctttacatagcaagggctataatagcgtgtatatcgacaggccaatggtatgcggattgtcgcctgagaactttgatgatatgcttgtacaaaggagccgctgggcgcagggtatgatacaaattttcatactgaagaatcccttattcgcaaaaggaatgaaatggtatcagcgtctctgttatatgagcgcttccctattctggttttttgggttttcgaggtttattttttatattgtccctgcggcatttttattattcggattgaaggtataccatgcatcttttgcagagatagtggcatatgcattgccccacgttattgggtgtattgttgtgacggactttctccacggcaaattcagatggccgtttttttccgagatatatgaaagcgtgttgtccatattccttatgcccgtgatattttccgttatcagaaacccacggcatcccacctttaaggttaccccgaaaggacagagtctggacgaaacggttctcaccatgcaggcaattccattccttctcatggtactggtaattgcagcgtgtgttccagtggggataataaagtggatacaattcccattataccgggatattatccttattaccctgttttggacgatgtttaatctttttatcgctgtggcgtcgctgggtgcgtttgtagagagaaggcagatacgccgtcatcatcgcatgtgggcgcgaggcgaggtcaatgtgtattttccgcgcatgaagtatattttgcagggtgaaataaaggatatctcgtattcagggatgggggtgcagttgaaaacgccgtttcctataaaaccggaagaggatgttgtattaaacgtcagagatatttatggggaaaaatatgcatttgatgcaagaatattccgtaagataaaaaagaaagagtatgttttctgcggatgtgattttgttgcaaaaggaaaagcggcgcaattgcgtttgattaaatatgtgtatggcgacagtcaaagatgggaagattttttgcagaagcggtttaagcgtgtaagtccgtgggggatcttctattttattgtgcgtatgggtataaaggggagcagggactgcgttacactttcgtcgaaattattgtatagcgtactgaaaaaaagtttttttgtaatatatgggaaaatgcagtcattgtggctgaaaaagatgaagcttgagggattgcatacaaaatga

SEQ ID NO: 83182 - protein, 763 aa, Candidatus Kuenenia stuttgartiensis
MLPIGNMPKIKTGKFDAEKSIFYLMCIFAGVGAFFFIFMAGCYLDIYYQLGIFWGLIGFIIVAGKIEVFKRPPLRILFILIIVFITLRYLLWRTFQSLVYTGPLDYAATILLYLAEAYAVAIHFFGLFVNIWPLNHKIAPLPADSRLYPTVDIFIPTYHEPEDVIRTTALSCTQIDYPKDKFNVYILDDGGTVAKRNHPEKGMDAWKRHYSLKRMAKELGISYITRQQNVHAKAGNLNHALQHTSAELVLILDCDHVPTRDILRNTAGWFLKDEMLFLVQTPHFFINPDPFEKNLAIFGEAPGENEMFYHGIHHGLDSWNASYFCGSAALLRRKYLMEVGGIAGETITEDAETTVALHSKGYNSVYIDRPMVCGLSPENFDDMLVQRSRWAQGMIQIFILKNPLFAKGMKWYQRLCYMSASLFWFFGFSRFIFYIVPAAFLLFGLKVYHASFAEIVAYALPHVIGCIVVTDFLHGKFRWPFFSEIYESVLSIFLMPVIFSVIRNPRHPTFKVTPKGQSLDETVLTMQAIPFLLMVLVIAACVPVGIIKWIQFPLYRDIILITLFWTMFNLFIAVASLGAFVERRQIRRHHRMWARGEVNVYFPRMKYILQGEIKDISYSGMGVQLKTPFPIKPEEDVVLNVRDIYGEKYAFDARIFRKIKKKEYVFCGCDFVAKGKAAQLRLIKYVYGDSQRWEDFLQKRFKRVSPWGIFYFIVRMGIKGSRDCVTLSSKLLYSVLKKSFFVIYGKMQSLWLKKMKLEGLHTK

SEQ ID NO: 83183 - DNA, 9148 bp, Acetobacter xylinus
  CDS (88)..(4740): transl_table=11
gctttgccccgatgtgaccgcagatggtcggggtcaggtttttttgacgtaatttttctgttttacagcatttcggacgagttgtttatgccagaggttcggtcgtcaacgcagtcagagtcaggaatgtcacagtggatggggaaaattctctccattcgcggtgctgggctgattattggtgtttttggcctgtgtgcgctgattgcggctacgtccgtgaccctgccgccagaacagcagttgattgtggcatttgtatgtgtcgtgatcttttttattgtcggtcataagcccagccgtcggtcccagattttccttgaagtgctgtcagggctggtttcgctgcgctatctgacatggcgcctgacggaaacgctttcattcgatacatggttgcagggtctgcttgggacaatgcttctggtggcggaactttacgccctgatgatgctgttcctcagctacttccagacgatcgcgccgctgcatcgtgcgcctctgccgctgccgccgaaccctgacgaatggcccacggtcgatatcttcgtcccgacctataacgaagaactgagcattgtccgcctgacggtgctgggatcactggggattgactggccaccggaaaaggtgcgggttcatatccttgatgacggccgtcgtcctgaattcgccgcctttgccgctgaatgtggcgcgaattatatcgcccgcccgacgaacgaacatgcaaaggccggtaatcttaactatgccattggtcataccgatggtgattacatcctgatctttgactgcgaccacgtcccgacccgcgccttcctgcagttgacaatgggctggatggtcgaagacccgaagatcgcgctgatgcagaccccgcatcacttctattcccccgacccgttccagcggaacctgtcggctggttatcgtaccccgcccgagggcaacctgttttatggcgtggtgcaggatggcaacgatttctgggatgcgaccttcttttgcgggtcatgtgcaatcctgcgtcgcacggcgattgagcagatcggcggctttgcgacccagaccgtgaccgaagacgcgcataccgcactcaagatgcagcgtctgggctggtccacggcctatctgcgtatcccgcttgccggtggtctcgcgacggaacgcctgatcctgcatatcggacagcgcgtgcgctgggcgcgtgggatgctgcagatcttccgcatcgacaatcctctgttcgggcgtggcctgtcatgggggcagcggctttgttacctgtcggccatgacgtcgttcctgttcgctgtcccgcgcgtcatcttcctgagctccccgctggcgttcctgttctttgggcagaacatcattgccgcgtcgccgctcgcgctgctggcctatgccatcccgcatatgttccacgccgtcggcacggcgtcgaagatcaacaagggctggcgctactccttctggagtgaggtctatgaaaccaccatggcgctgttcctggtgcgcgtgacgattgtcaccctgctcagcccttcacgtgggaagttcaacgtgacggacaagggcgggttgcttgaaaaaggttatttcgaccttggcgccgtctatccgaacatcatccttggcctgatcatgttcggcggtctggcgcgtggtgtctatgaactgtctttcggccatctcgaccagatcgccgaacgtgcctacctgctgaactccgcttgggcgatgctcagcctcatcatcatccttgcggccatcgccgtggggcgtgaaacacagcagaaacgcaacagtcatcgcatccccgcaaccatcccggtggaagtggcgaatgccgatgggtccatcatcgtgacgggcgtgaccgaggacctgtccatgggtggggccgcggtaaagatgtcatggcctgcgaagctgtcggggccgacgccggtttatatccgtactgtccttgatggagaggaactgatcctgcccgccaggatcatccgtgctggcaacgggcgggggatcttcatctggacgattgataacctgcagcaggaattctcggttatccgcctggtgttcggccgtgccgacgcatgggttgactggggcaattacaaggccgaccgcccgctgctcagcctcatggacatggttctcagcgtcaagggcctgttccgttcaagcggcgacatcgtccatcgcagttccccaaccaagccttcggctggcaatgccctgtctgacgatacgaacaacccgtcacgcaaggagcgtgtgctgaagggaaccgtgaaaatggtttcgcttctggcgctgctgacatttgcttcctcggcacaggcggcgtcagcgcccagggccgtcgcggcgaaggccccggcccatcagcccgaagcctctgacctgccgccgttgcccgcgctcctgccggccaccagcggtgcggcgcaggcgggttcgggcgatgccggcgccgatggacccggcagccccacgggccagcccctggcggccgacagtgccgatgcgctggtggaaaatgcggaaaatacgtccgatacggcgactgtccataattataccctcaaggatcttggcgccgcagggtccatcacaatgcgtggccttgccccgttgcaggggatcgagttcgggattccctctgaccagcttgtgacgtccgcgcgccttgtgctgtcgggttcgatgtcgcccaacctgcgtccggaaaccaattcggtcacaatgacgctgaacgagcagtatatcggcacgttgcgtcccgacccggcgcacccgacattcggccccatgtcgttcgagatcaacccgatcttcttcgtcagcggaaaccgtctgaacttcaacttcgcctccgggtcgaagggatgttcggacatcacgaacgatacgctgtgggccacgatctcgcagaactcgcagcttcagatcacgacaatcgcgctgccgccgcgtcgcctgctgtcacgtctgccgcagcccttctatgacaagaacgtgcgccagcatgttacggtcccgatggtgctggcgcagacctatgacccgcagatactcaagtccgcggggattctcgcttcgtggtttggcaagcagacggacttcctcggcgtgacgttcccggtgtcgtccaccatcccacagagtggcaacgccatcctgatcggcgtggccgatgaactgccgaccagcttcgggcggccgcaggtcaatggcccggcggttctggaactgccgaacccgtcggatgcaaatgccacgatcctggtggtgacggggcgtgaccgtgatgaggttattaccgcgagcaagggcatcgccttcgcgtctgctcccctgccgaccgacagccatatggatgtcgcgccggtcgatatcgccccgcgcaagcccaatgacgcgccatcttttatcgcgatggaccatccggtgcgctttggcgaccttgtaacggcaagcaagctacagggaaccggctttacgtccggtgtgctgtcggttccgttccgcattccgcccgacctttatacgtggcgtaaccgcccgtacaagatgcaggtacgtttccgttcccccgcgggggaggcgaaggatgtcgagaagtcacgtctcgatgtcgggatcaacgaggtttacctgcattcctatccgctgcgcgaaacgcatggcctgattggcgcggttttgcagggtgtcggccttgcccgccctgcaagcggcatgcaggtgcatgatctcgacgtaccgccgtggaccgtgttcgggcaggatcagttgaacttctactttgacgcgatgccccttgcgcgcggaatctgtcaaagtggcgcggcaaacaatgcattccatcttgggcttgacccggattccaccattgatttttcccgtgcccatcacatcgcccagatgcccaaccttgcctatatggcgacggtcggttttcctttcaccacctatgccgatctgtcgcagacggcggttgttctgcctgaacacccgaatgccgcgactgttggcgcctatcttgacctgatggggttcatgggcgcggcgacgtggtatccggttgcgggcgtggacattgtgtcggccgatcatgtcagtgacgttgcggaccgtaacctgctggtgatttcgacgctggcgacaagtggcgagatcgcgccgctgctgtcacgttcatcctacgaagtggcggatggtcatttgcgcacggtgtcgcatgcgtccgcgctggataacgcgatcaaggcggtcgacgatccgctgacggctttccgcgaccgtgacagcaagccgcaggatgtcgatacccccctgacgggtggtgtcggcgcgatgatcgaggcggaatcccccctgacggcgggccgcaccgttctggcgctgctgtcgtctgacggtgcggggctgaacaacctccttcagatgttgggggagcgcaagaagcaggcgaatatccagggggacctggttgttgcccatggcgaggacctgtcttcgtaccgcacttcgccggtctatacgatcggcaccctgccgctctggctgtggccggactggtatatgcacaacagaccggttcgtgtgctgcttgtcggcctgttgggatgtattctgatcgtcagtgttcttgcacgggctctggcgcggcatgcggcccggcgtttcaagcagcttgaggatgagaggcgcaagtcgtgacccataaacgatatgcttcgtccctgtccgccggtcttctcgcaacgacctgcgtcgcaggtctgttgctgcaggcgaacggcgcacgggcacagcaggcggcagaggcgcaggccccggccagcagcaccaccatgatgcaggcagctaccgttgcccccgcccagagtgggcaggccgcggtggtgcagcggctggtgcagcaggcccgtttctggatgcagcagcaccagtatgaaaatgcgcgccagtccctgcagagtgctgcgcgacttgcaccggattccgttgatctgctggaggccgagggcgaatatcagtcgcatatcggcaatcgtgatgccgcccttgatacgcagcgtcgcctgcatcaggccgcaccaggcagcacgtatgaaagccagttgaacgacctgctgcatgaacaggcgatttcccagccggaccttgcgcatgcgcgctcgcttgccgcatccgggcacagcgatcaggcggtggaagcgtaccagcacctgttcaacggttcgacgcccacgccctcgctcgcggttgaatattaccagacgctggctgacgtctcggggcaggccggcacggcacaggatgggctgatccgtctggtcaaggccaatccttccgatttccgggcgcaactggcccttgcgcaggtcctgacctatcagcccggcacccggatggaggggctgcagcggcttcaggcgctccagaagtaccagtcttccgccccggtggaggctgcgacggcggaaaaatcatatcgccagacgctgtcatggttaccggttacacccgaaacactgccgttgatgcagaaatggctggacgcacatccatccgacagcgcattgcggacccatatggcagaaccggcaggcgggccgccggataaaggcgcgttggcgcggcaggacgggttcaaggcgttgaacgccggacgtctgtccgcagcccaggccgcgttccagagcgcactgaacctgaatgccaaggacggcgatgccctgggcggccttggccttgtcgccatgcgcgcgggccataacgaggaagcgcatcgttacctcgaagacgcgatcgcggctgatcccaagaatgcggcgcactggcgtccggcactggctggcatggccgtgggcgaggaatatggcagcgtccgtcgcctgatcgccagtggacagacacaggaagccgaacagcgcctgatgacgctggcgcgtcagcccggacagtccgagggcgcgacccttatgctggcggatttgcagcgcagcacgggccagaccggcgaggccgagcgcaattaccgggcgatcctggcgcgcaatggtgacaatcccatcgcactgatgggactggcccgtgtgctgatgggggaaggccaggagaacgaagcgaacgccctgctgtcgcgccttggtggtcgctatagcgatcaggtgcagcagatcgaggtttcgggtatcatggccgaagctgcccgcacgtcggattcagcgcagaaggtcagccttctgcggcaggccatgaccaaggccccggatgacccgtggttgcgcatcaaccttgccaatgcgctgcaacagcaaggtgacagcgcggaagcggccaatgtcatgcgtccgcttctgaccagcccgcgtacgccggccgattatcaggcggcgatcctgtatgcgtccggcaatggcaatgatacgctggcacgccgtttgcttgcgggactgtcgccggatgactattccccggccatccgcaccattgccgatgaaatggcgatcaaggccgatctggccagccgcctttcgatggtttcgaatcccacgccgcttgtgcgcgaggctctggcggcgccggacccgacgggcgcgcgtggtgtggcggtggccgacctgttccggcagcgtggtgacatgctgcatgcgcatatggcgctgcgcatcgcctccacgcgcaatattgacctgacgaccgaacagcggctggcctatgccaccgaatatatgaagatcagcaatcccgttgccgcagcgcgcctgcttgcaccgttgggcgatggtagtggaaccgcaaccggttccgcgatgtcgccggatcagcggcagacgctgatgcagttgcgcatgggcatttcggtggcacagtcggacctgctgaaccagcgtggcgatcaggcggcggcgtgtgaccaccttgcgcccgcgttgcaggccgatccagaggcgacatcccccaagcttgcgttggcgcgactgtataacgggcgtggcaagtatgggcacgcgctggacatcgaccttgctgttcttcggcataatccgcaggaccttgatgcgcggcaggccgccgtgcaggccgcggcgaatgacggcaaggacaacctggccatgcaactggcgcaagatggggtccagcagtcgccgatggatgcgcgcagctggcttggcatggcggtggcggaccacgctgtgggccatggcgaccggacgcttgctgacctgcgccgggcgtatgaattgcgcctgcagcagctcaagatcagtcggggtgatgccatcggcggtgatgaaacgcaggcgaccgcgccgccgacggccaatccgttccgtcgcgatgcatacgggcatgcgctgtcgctgggtgcgcccccgggtgagaacgggtacagcacggcaggaagcgtgcccgagatttcggaccagatgctgtcctccatcaacgggcagatccataccctgtccgaagacatggcgccgtctgttgatgccggccttggcttccgtgtccgttccggcaccccgggcatgggcgcgttgaccgaggcatccgtgccgatcgtcgggcgcatcccgctgcaggctggtacttcggcgctgacattcacggccacgccaaccttcctgacgtcggggcacctgccgcagaccgggtatgatataccgcgtttcggcaccaacctgttcgcgctggaacggaacctgcagaaccagaacaacagcgcggaacatcgcatcaataccgatacgatcgggcgcgaggcaggtgtggcgcctgatgtccgctttgccaataactgggtcagtgccgatgtcggtgcctcgcctctgggctttacgctgccgaacgtgatcggtggtgttgaattcgccccgcgtgtcgggcctgtgaccttccgtgtcagtggggaacgccgttccattaccaacagcgtcctgtcctatggcgggatgaccgatgccctgaccggcaagaagtggggcggtgttgtcaccaaccacttccatggacaggtcgaggctacgctgggcaataccattgtgtatggtggtggtggttatgccatccagaccggccatcatgtccagagcaataccgaagtggaaggcgggctgggggcgaataccctggtttatcgcaaccgcaagcacgaagtgcgtgtcggcgtgaacctgacctatctcggctataagcataacgaggacttctatacttacgggcagggtggctacttctcgccgcagtcctattttgcggcaacggtgcccgtccggtattccgggcatagtggcctgtttgactgggatgtcaccgggtccatcgggtatcagttgtttcatgaacacagttcggccttcttcccgaccaatcctgtgtatcaggcccttgcgaacgggctggcgggtgtatctactgctgaactatccttggaatcggccaggtatcccggcgatgatgtcggtagccttgttggtggtttcgatggcagggtgggttatcgcgtcagccattcgctgcgccttgatctgtccggtcgtttccagaaggctggaaactgggatgagggcggcgccatgatctcggctcactatcttattatggaccagtaatgacaatttttgagaaaaaaccggatttcaccctgtttcttcagaccctgtcatgggaaattgatgatcaggtcgggatcgaggtcaggaacgagctcctgcgtgaggtcggacggggcatgggcacgcgcatcatgccgccgccgtgccagaccgtggacaagctgcagatcgaactgaacgcgcttctggccctgatcggctggggcaccgtgacgctcgaactcctcagcgaggaccagtccctgcgcatcgtgcatgaaaacctgccgcaggttggcagcgcgggcgaaccttcgggcacgtggctggctccggtgctggaggggctgtatggccgctgggtgacgtcgcaggcgggtgcgtttggtgattatgtcgttacacgcgatgtggacgccgaggatctgaatgctgttccgcgtcagaccatcatcatgtacatgcgcgtgcgcagttccgcgacctgaggcaggacaacggcggtctggtccgccgctgtt

SEQ ID NO: 83184 - protein, 1550 aa, Acetobacter xylinus
MPEVRSSTQSESGMSQWMGKILSIRGAGLIIGVFGLCALIAATSVTLPPEQQLIVAFVCVVIFFIVGHKPSRRSQIFLEVLSGLVSLRYLTWRLTETLSFDTWLQGLLGTMLLVAELYALMMLFLSYFQTIAPLHRAPLPLPPNPDEWPTVDIFVPTYNEELSIVRLTVLGSLGIDWPPEKVRVHILDDGRRPEFAAFAAECGANYIARPTNEHAKAGNLNYAIGHTDGDYILIFDCDHVPTRAFLQLTMGWMVEDPKIALMQTPHHFYSPDPFQRNLSAGYRTPPEGNLFYGVVQDGNDFWDATFFCGSCAILRRTAIEQIGGFATQTVTEDAHTALKMQRLGWSTAYLRIPLAGGLATERLILHIGQRVRWARGMLQIFRIDNPLFGRGLSWGQRLCYLSAMTSFLFAVPRVIFLSSPLAFLFFGQNIIAASPLALLAYAIPHMFHAVGTASKINKGWRYSFWSEVYETTMALFLVRVTIVTLLSPSRGKFNVTDKGGLLEKGYFDLGAVYPNIILGLIMFGGLARGVYELSFGHLDQIAERAYLLNSAWAMLSLIIILAAIAVGRETQQKRNSHRIPATIPVEVANADGSIIVTGVTEDLSMGGAAVKMSWPAKLSGPTPVYIRTVLDGEELILPARIIRAGNGRGIFIWTIDNLQQEFSVIRLVFGRADAWVDWGNYKADRPLLSLMDMVLSVKGLFRSSGDIVHRSSPTKPSAGNALSDDTNNPSRKERVLKGTVKMVSLLALLTFASSAQAASAPRAVAAKAPAHQPEASDLPPLPALLPATSGAAQAGSGDAGADGPGSPTGQPLAADSADALVENAENTSDTATVHNYTLKDLGAAGSITMRGLAPLQGIEFGIPSDQLVTSARLVLSGSMSPNLRPETNSVTMTLNEQYIGTLRPDPAHPTFGPMSFEINPIFFVSGNRLNFNFASGSKGCSDITNDTLWATISQNSQLQITTIALPPRRLLSRLPQPFYDKNVRQHVTVPMVLAQTYDPQILKSAGILASWFGKQTDFLGVTFPVSSTIPQSGNAILIGVADELPTSFGRPQVNGPAVLELPNPSDANATILVVTGRDRDEVITASKGIAFASAPLPTDSHMDVAPVDIAPRKPNDAPSFIAMDHPVRFGDLVTASKLQGTGFTSGVLSVPFRIPPDLYTWRNRPYKMQVRFRSPAGEAKDVEKSRLDVGINEVYLHSYPLRETHGLIGAVLQGVGLARPASGMQVHDLDVPPWTVFGQDQLNFYFDAMPLARGICQSGAANNAFHLGLDPDSTIDFSRAHHIAQMPNLAYMATVGFPFTTYADLSQTAVVLPEHPNAATVGAYLDLMGFMGAATWYPVAGVDIVSADHVSDVADRNLLVISTLATSGEIAPLLSRSSYEVADGHLRTVSHASALDNAIKAVDDPLTAFRDRDSKPQDVDTPLTGGVGAMIEAESPLTAGRTVLALLSSDGAGLNNLLQMLGERKKQANIQGDLVVAHGEDLSSYRTSPVYTIGTLPLWLWPDWYMHNRPVRVLLVGLLGCILIVSVLARALARHAARRFKQLEDERRKS

SEQ ID NO: 83185 - DNA, 3040 bp, Enterobacter sakazakii
  CDS (189)..(2780): transl_table=11
gtcagcgtcgcctgctacccattgtgattcaccgggatgaaggaatggcaggaattccctggcctccaagcagccgctcggcgaggtaccgcagcgattccctggcggcagaagagatcctcacgctggctaacctggtgtctgctgaactttcgccaacgcggcggagccggcaggggaggttcgatatgagtcgactcgccagttggttccttatcccgccggttaatgcgcgtctgaggcgaacgctaccgaccaattttcgtcggcaatggtgcgtcggcaattcagtgccgcgctttggctgttttctggatgatattggcctggagtgttcaattccgcttgaacaatccgcgctggcagcgcataccgtgcgcaccataatgaattatatccacacattaacccctgaccggccgcggccctttggatccggcgcgttatctcaaggccgtctggctggtcgtcaccctcgtcacagcgagaacgccagacgccgcactggcgcatgtttctcccgcgttcaacagctgcgcgagcgctatcaccagtggctggataaattgcctgacagcgtgaccgacaaaaccagccatctggataatcaaaaagagctcgggcacctccacccgggcctgcggcgttttatcctcggcgtgattgtcgtgttctcactgattctggcgctggtctgtattacgcaacccttcaatcccctggcgcagttcaccttcctgatcctgctgtggggcgtggcgttgctggtgcgtcggattccgggccgcttctcttgcgctgatgctgattgtgctgtcccttaccgtttcctgccgctatatctggtggcgttacacctcaacgctataactgggacgaccggtgagtatggtctgcggctgattctgctgtttgccgaaacatatcctggattgtcttgggtggggtatttccaaggccatctggccgcctgcacgcttctgatcatggagatcgcgctgggggcatttttaggcccaagcctgaccaactcgaagattcagatgtttgcgctcggcatcgactggccgaaagataaactcaaggtctggatcctggatgacggcaaccgcccagcgttccgccagttcgcggaagaggtcggcgtcgaatacatcgcccgtccgacgcacgaacatgcaaaagccggtaacatcaataacgcgctgaagtatgccaccggggagtttgtctcgatctttgactgcgaccacgtacctacgcgatcgttcctgcagatgaccatgggctggttcctgaaagagaaagagctggcgatgatgcagacgccgcaccacttcttctcgccggaccgtttgagcgcaaccttggccgtttccgtaagaccccgaacgaaggcacgctgttctatggtctggtgcaagacggtaacgacatgtgggacgccaccttcttctgcggctcctgtgcggttatccgcccgtaaaccgctggatgaaattggcggtattgccgtcgaaacggtgactgaagatgcgcacacctcgttgcgtctgcaccgtcggggttatacctcggcctatatgcgtattcctcaggccgccggtctggcgacggaatcgctctcggcgcacattggtcagcgtattcgctgggcgcgcggcatggtgcagattttccgtctcgataatccactgatagggaaagggctcaagctggcgcagcgtctctgctacgtcaacgcgatgttccacttcttatccggcatcccgcggctgatcttcctgaccgcgccgctggcgttcctgctccttcacgcctatatcatctacgccccggcgctgatgattgcgctgtttgttcagccgcacatgatccacgcgagcctgacgaactcgaagattcagggtaaatatcgccattccttctggagtgaaatctacgaaacggcgctggcctggtacattgcgccgccaacgatggtggcgctgatcaacccgcataaagggaaattcaacgtcaccgcgaagggggggctggtggaagaggagtacgtcgactgggtgatctctcgtccgtatatcttcctggtgttgctgaacatcgttggcgtcatcgccggtatctggcgttacttctacggcccggaaaacgaaatcctgaccgtctttgtgagtatggcctgggtcttctacaacctgattattcttggcggcgcggtggcggtgtcggtggagagtaaacaggttcgtcgcgcgcatcgcgttgaaatctgcatgcccgcggcgattgcccgtgaagatggtcacctcttctcctgtaccgtgcacgacttctctgacggtggtctggggatcaaaatcaacggccaggcgaaagtgctggaagggcaaaaagttaacctgctgcttaagcgcggacagcaggagtatgtcttcccgacgcaggtagcgcgtgtggcgggcaatgaagtcggtctgcaactgatgccgttgaccaaaaagcaacacattgattttgtgcagtgtacgtttgcccgtgcggatacatgggctctctggcaggacagcttcccggaagataaacctctggaaagcctgctggatattctgaagctggggttccgtggctatcgtcaccttgcagaatttgccccgtcgtcggtgaaattaattttccggtcacttacttcgctggtttcctgggtcgtatcgttcattcctcgtcgtcctgagcgggatgaggcgaagcaggcggacccggttatggctcaacaatgatgataacgcgatgaaaacaaaactttcctggttatgtgcagtggcaatggggatgagtgcgctccccgcaacaatggctaacgcagagcctgataacgcagcggcaacgcctgcgcctacagtgcctgtggtcgcgcaggcaaccgatccggttattactgccgcgcccggtcaaacagaaaatgtcattccgaaccagccaacggaggggaacactctacccgccgagaacccggttatcggacaggtgatgccgggtg

SEQ ID NO: 83186 - protein, 863 aa, Enterobacter sakazakii
MSRLASWFLIPPVNARLRRTLPTNFRRQWCVGNSVPRFGCFLDDIGLECSIPLEQSALAAHTVRTIMNYIHTLTPDRPRPFGSGALSQGRLAGRHPRHSENARRRTGACFSRVQQLRERYHQWLDKLPDSVTDKTSHLDNQKELGHLHPGLRRFILGVIVVFSLILALVCITQPFNPLAQFTFLILLWGVALLVRRIPGRFSCADADCAVPYRFLPLYLVALHLNAITGTTGEYGLRLILLFAETYPGLSWVGYFQGHLAACTLLIMEIALGAFLGPSLTNSKIQMFALGIDWPKDKLKVWILDDGNRPAFRQFAEEVGVEYIARPTHEHAKAGNINNALKYATGEFVSIFDCDHVPTRSFLQMTMGWFLKEKELAMMQTPHHFFSPDRLSATLAVSVRPRTKARCSMVWCKTVTTCGTPPSSAAPVRLSARKPLDEIGGIAVETVTEDAHTSLRLHRRGYTSAYMRIPQAAGLATESLSAHIGQRIRWARGMVQIFRLDNPLIGKGLKLAQRLCYVNAMFHFLSGIPRLIFLTAPLAFLLLHAYIIYAPALMIALFVQPHMIHASLTNSKIQGKYRHSFWSEIYETALAWYIAPPTMVALINPHKGKFNVTAKGGLVEEEYVDWVISRPYIFLVLLNIVGVIAGIWRYFYGPENEILTVFVSMAWVFYNLIILGGAVAVSVESKQVRRAHRVEICMPAAIAREDGHLFSCTVHDFSDGGLGIKINGQAKVLEGQKVNLLLKRGQQEYVFPTQVARVAGNEVGLQLMPLTKKQHIDFVQCTFARADTWALWQDSFPEDKPLESLLDILKLGFRGYRHLAEFAPSSVKLIFRSLTSLVSWVVSFIPRRPERDEAKQADPVMAQQ

SEQ ID NO: 83187 - DNA, 2622 bp, Citrobacter sp
  CDS (1)..(2622)
atgagtgtcctgtcccggtggttgcttattccgccggtgagcgcccgcttaagcgagcgctatcagggttatcgtcgacatggcgcgtcgcctttcagcgcggcgctgggttgcctgtgggtgattctcgcatgggtcttcatcccgctggagcacccgcgctggcagcgtatccgtgccgagcgtaaagcgctctatcctcatatcaatgccgcgcgcccgcgcccgttagatcctgcccgttatgccattcagaccctctggctgatggcgacctcgccgcgtcaggagacgacgcagcctcgctggcaaaccttctcccgtctgcaaggcgtcagagggcgttatcaccagtggatggatgcgctaccgggacgcgtgacgcaaaacaccacgcacctggataaacaaaaagagcttggtcacctgagctctggcgcgcgtcgctttatcatcgggattattgtcactttttcgttgattctggcgctgatatgcgtgacccagccgtttaacccgctggcgcaattcatcttcctgatactgctgtggggcgttgcgctgatcgtgcgccgcatgccggggcgcttctccgcgctgatgctgattgtgctgtcgctgacggtatcgtgccgctatatctggtggcgctatacctccacgctgaactgggacgatccggtgagtctggtctgcgggttgatcctgctgtttgccgaaacctatgcgtggattgtgctggtgctgggttacttccaggtcgtctggccgctgaaccgccagccggtgccgctgccaaaatatatgtcgcagtggccgtcggtcgatatctttgtgccgacttacaacgaagatctgcacgtagtgaagaacaccatttacgcgtcgctgggtatcgactggccgaaagataagctcaatatctggatcctcgacgatggcgggcgtgaagagttccgccagttcgcccagaccgtgggggtgaaatatatcgcccgtaccacccatgagcacgccaaagccgggaacattaacaatgcgctgaaatacgccaaaggcgagttcgtttcgatctttgactgcgaccacgtgccgacacgttcgttcctgcaaatgacgatgggctggttcctgaaagacaagaagctggcgatgatgcagacgccgcaccacttcttctccccggacccgtttgaacgtaacctcggacgttttcgcaagacgccaaacgaaggcacgctgttttacggtctggtacaggacggtaatgacatgtgggatgccaccttcttctgcggttcctgtgcggtgattcgccgtaaaccgctcgatgaaattggtggtattgccgttgagacggtgactgaggatgcgcatacgtcgctgcgtctgcaccgtcgcggttatacctccgcgtacatgcgcattccgcaggcggcaggtctggcgaccgaaagtttgtctgcccacatcggtcaacgtattcgctgggcgcgcgggatggtacagattttccgactcgataacccgttgaccggcaaggggctgaagttcgctcagcgattatgttacgtcaatgccatgttccacttcctgtcaggtgttccacggctgatcttcctgaccgccccgctggcgttcctgctactgcatgcttacatcatctatgcgcccgcgctgatgattgcgctgttcgtcctgccgcacatggttcacgccagcctgaccaactcgaagattcagggcaagtaccgccactccttctggagtgagatctacgaaacggtgctggcctggtacattgcgccgccgacgctggtggcgctgatcaacccgcacaaagggaagtttaacgtcactgcaaagggcggactggtagaagaagagtatgtcgactgggtgatttcccgtccgtacatctacctggtactgcttaacctgttcggtgtggcggtcggcgtctggcgttacttctacgggccggaaaacgaaatgctgactgttatcgtcagcctggtgtgggtgttctacaacctgattatcctcggcggcgcggtggcggtatcggttgaaagtaaacaggttcgccgctcacaccgtgttgaaatttctatgccagcggcgattgcccgtgaggatggacatctgttctcgtgcaccgtccatgatttctccgacggcggtctggggatcaagatcaacggtcaggcccaggtgctggaagggcagaaggtgaatttactgctcaaacgcggccagcaggaatatgtcttcccgacacaggtagcgcgcgtttggggtgaacaggtggggctgcaactgatgcagctgaccaccaaacagcatatcgattttgtgcagtgtacgtttgctcgtgctgatacatgggcgctctggcaggacagctatccggaagataagccgctggaaagcctgttggatattctgaagctgggtttccgtggctatcgccatcttgcggaattctccccatcttccgtgaaaatagttttccggtctctgacttctctggtttcctgggttgtgtcgttcattccacgccgtccggagcaggacgaggtggcggtgcaacagccggatcaggttatggctcaacaatga

SEQ ID NO: 83188 - protein, 873 aa, Citrobacter sp
MSVLSRWLLIPPVSARLSERYQGYRRHGASPFSAALGCLWVILAWVFIPLEHPRWQRIRAERKALYPHINAARPRPLDPARYAIQTLWLMATSPRQETTQPRWQTFSRLQGVRGRYHQWMDALPGRVTQNTTHLDKQKELGHLSSGARRFIIGIIVTFSLILALICVTQPFNPLAQFIFLILLWGVALIVRRMPGRFSALMLIVLSLTVSCRYIWWRYTSTLNWDDPVSLVCGLILLFAETYAWIVLVLGYFQVVWPLNRQPVPLPKYMSQWPSVDIFVPTYNEDLHVVKNTIYASLGIDWPKDKLNIWILDDGGREEFRQFAQTVGVKYIARTTHEHAKAGNINNALKYAKGEFVSIFDCDHVPTRSFLQMTMGWFLKDKKLAMMQTPHHFFSPDPFERNLGRFRKTPNEGTLFYGLVQDGNDMWDATFFCGSCAVIRRKPLDEIGGIAVETVTEDAHTSLRLHRRGYTSAYMRIPQAAGLATESLSAHIGQRIRWARGMVQIFRLDNPLTGKGLKFAQRLCYVNAMFHFLSGVPRLIFLTAPLAFLLLHAYIIYAPALMIALFVLPHMVHASLTNSKIQGKYRHSFWSEIYETVLAWYIAPPTLVALINPHKGKFNVTAKGGLVEEEYVDWVISRPYIYLVLLNLFGVAVGVWRYFYGPENEMLTVIVSLVWVFYNLIILGGAVAVSVESKQVRRSHRVEISMPAAIAREDGHLFSCTVHDFSDGGLGIKINGQAQVLEGQKVNLLLKRGQQEYVFPTQVARVWGEQVGLQLMQLTTKQHIDFVQCTFARADTWALWQDSYPEDKPLESLLDILKLGFRGYRHLAEFSPSSVKIVFRSLTSLVSWVVSFIPRRPEQDEVAVQQPDQVMAQQ

SEQ ID NO: 83189 - DNA, 2625 bp, Salmonella typhimurium
  CDS (1)..(2625): transl_table=11
atgagcgccctttcccggtggctgcttatcccgccggttagctcgcgtttgagcgagcgctatcagggttaccgccgccacggggcgtcgccgtttagcgcagcgctcggctgcctgtggacgattctggcgtggatagtgtttccgcttgagcatccgcgctggcagcgtattcgcgacgggcataaagcgctttatccgcatattaacgccgcacgcccgcgcccgctggacccggcccgttacctcattcagaccctctggctggtgatgatctcgtcgactaaagaacgtcatgaaccgcgctggcggtcatttgcgcgcctgaaggacgttcgtggacgttaccatcaatggatggataccttaccggaacgggtgcgccaaaagacaacgcacctggaaaaggaaaaagagctgggacatcttagcaacggcgcccggcgttttattctgggcgttatcgtgaccttttcactgatactggcgctgatctgtattacgcagccatttaacccgctatcgcaatttatctttctgctgttgctgtggggcgttgcgctgttggtacgacgtatgccgggacgcttttccgcgctgatgctcatcgtgctgtcgttaacggtctcctgtcgttatatctggtggcgctatacctcgacgctaaattgggacgacccggtcagtctggtgtgcgggctgattctgctgtttgcggaaacctacgcctggattgtgctggtgctggggtacttccaggtggtgtggccgttaaatcgtcaaccggtgccgttgccgaaagaaatgtcgcagtggccgacggtggatatttttgtaccgacctataacgaagaccttaatgtggtcaaaaataccatttacgcttcgcttggcattgactggccgaaggacaagctgaatatctggatccttgatgacggcgggcgtgaatcatttcgtcattttgcccgacatgttggcgtgcattacattgcccgcaccacgcatgaacacgccaaagccggcaacatcaacaatgcgctaaaacacgcgaaaggcgagtttgtggcgatcttcgattgcgaacatgtgccgacacgctcgtttctgcaaatgacaatgggctggttcctgaaagaaaaacagctggcgatgatgcagacgccgcatcatttcttctcccccggaccgtttgagcgcaacctgggacgttttcgtaaaacgcctaacgaaggcacgctgttttacggactggtgcaggacggtaacgatatgtgggacgccactttcttttgcggatcgtgcgcggtgattcgccgtaagccgctggatgagattggcggtatcgccgttgagacggtgacggaagatgcgcatacttcgctccggctgcaccggcgaagttatacctcagcgtatatgcgcattccgcaggcggtggggctggcgacggaaagcctgtcggcgcatatcgggcagcgtattcgttgggcgcggggtatggtgcaaattttccgcctcgataaccctctgtttggtaaaggcttaaaactggcgcagcggctgtgctacctcaacgcgatgttccatttcttgtccggcattccgcgcctgatctttctgaccgcgccgctggcttttctgctgctgcacgcctatatcatttatgcgcctgcgttgatgattgcgctatttgtgataccgcacatggtccacgccagcctgactaactcgaaaattcagggcaagtatcgtcactctttctggagtgaaatctatgaaacggtactggcatggtatatcgcaccgccgactctggtcgcgttgatcaatccgcacaaagggaaatttaacgtcacggcgaaaggcgggctggtggaagagaagtacgtcgactgggtaatctcgcgtccgtatatcttccttgtcttgcttaacctgctcggcgtggcggcgggcgtatggcgatactattacgggccggaaaatgaaacgctgaccgtcatcgttagcctggtgtgggtcttctataacctggtcattctcggcggcgcggttgcggtttcggtagagagtaaacaggtcaggcgcgcgcatcgggtcgagattgccatgccgggggccatcgcccgcgaagatggacatttgttctcctgtaccgtacatgacttctccgacggcgggttaggcatcaagatcaacggtcaggcgcaggtgctggaagggcagaaagtgaatctgttgcttaaacgcgggcagcaggaatatgtctttccaacgcaggtggtgcgcgtaacgggcaatgaggtcgggctacaactgatgccgctcaccaccaaacaacatattgattttgtgcagtgtaccttcgcgcgcgccgatacgtgggcgctttggcaagatagcttcccggaagataaaccgctggaaagcttgctggatattctgaagctgggcttccgcggatatcgccacctcgcggaattcggcccgccttcagtaaaagtaattttccgatcgttgacggcgttaattgcctggattgtatcgtttattcccgcgtcgcccggagcggacacggcgatacagccgtcggatcgggttatggctcaggctcaacaatga

SEQ ID NO: 83190 - protein, 874 aa, Salmonella typhimurium
MSALSRWLLIPPVSSRLSERYQGYRRHGASPFSAALGCLWTILAWIVFPLEHPRWQRIRDGHKALYPHINAARPRPLDPARYLIQTLWLVMISSTKERHEPRWRSFARLKDVRGRYHQWMDTLPERVRQKTTHLEKEKELGHLSNGARRFILGVIVTFSLILALICITQPFNPLSQFIFLLLLWGVALLVRRMPGRFSALMLIVLSLTVSCRYIWWRYTSTLNWDDPVSLVCGLILLFAETYAWIVLVLGYFQVVWPLNRQPVPLPKEMSQWPTVDIFVPTYNEDLNVVKNTIYASLGIDWPKDKLNIWILDDGGRESFRHFARHVGVHYIARTTHEHAKAGNINNALKHAKGEFVAIFDCEHVPTRSFLQMTMGWFLKEKQLAMMQTPHHFFSPGPFERNLGRFRKTPNEGTLFYGLVQDGNDMWDATFFCGSCAVIRRKPLDEIGGIAVETVTEDAHTSLRLHRRSYTSAYMRIPQAVGLATESLSAHIGQRIRWARGMVQIFRLDNPLFGKGLKLAQRLCYLNAMFHFLSGIPRLIFLTAPLAFLLLHAYIIYAPALMIALFVIPHMVHASLTNSKIQGKYRHSFWSEIYETVLAWYIAPPTLVALINPHKGKFNVTAKGGLVEEKYVDWVISRPYIFLVLLNLLGVAAGVWRYYYGPENETLTVIVSLVWVFYNLVILGGAVAVSVESKQVRRAHRVEIAMPGAIAREDGHLFSCTVHDFSDGGLGIKINGQAQVLEGQKVNLLLKRGQQEYVFPTQVVRVTGNEVGLQLMPLTTKQHIDFVQCTFARADTWALWQDSFPEDKPLESLLDILKLGFRGYRHLAEFGPPSVKVIFRSLTALIAWIVSFIPASPGADTAIQPSDRVMAQAQQ

SEQ ID NO: 83191 - DNA, 2265 bp, Acetobacter xylinus
  CDS (1)..(2265): transl_table=11
atgtcagaggttcagtcgccagtacccgcggagagtaggctagaccgcttttccaacaagatactgtcactgcgtggggccaactatatagttggagcgctggggctttgtgcacttatcgccgcaaccacggtcacgctgtccattaatgagcagctgattgtggcacttgtgtgtgtgctcgtcttttttattgtcgggcgcggcaagagccgccgcacccagatctttctcgaggtgctctcggcgctggtctccctgcgttacctgacatggcgcctgaccgaaacgttggacttcgatacatggattcagggcgggctgggcgtgaccctgctcatggccgaactctatgccctgtacatgctgtttctcagctatttccagacaatccagccacttcatcgcgcgccgctgcccctgccggacaatgttgatgactggccaaccgtcgacatcttcatcccgacctatgatgaacagctcagcatcgtgcgcctgaccgtgctgggcgcgctgggcatcgactggccgcccgataaagtgaatgtctatatccttgatgatggtgtgcgccccgaatttgaacagtttgccaaggattgcggcgctctctacatcgggcgcgtcgacagttcacacgccaaggcgggtaacctcaaccacgccattaagcggacaagcggcgattacatcctcatcctggattgtgaccatattccgacacgcgcgttcctgcagatcgcgatgggctggatggtcgcagaccgcaagatcgccctgatgcagacgccgcatcacttctactcccccgatccgttccagcgtaacttggccgtggggtatcgcaccccgccggaaggcaacctgttctacggcgtcattcaggatggtaacgacttctgggatgccaccttcttctgcggctcgtgcgccatcctgcggcgtgaagccattgaatcgatcggcggcttcgcggttgaaaccgtgacggaagatgcccataccgccctgcgcatgcagcgccgtggctggtccaccgcctacctgcgcattcccgttgccagtggactggccaccgagcgactgacaacccatatcggccagcgcatgcgctgggcacgcggcatgatccagatcttccgcgtggacaacccgatgctcgggggcggcctgaagcttgggcagcggctgtgctatctctcggccatgacgtcgttcttcttcgccattccgcgcgtcatcttccttgcctcgccgctggcgttcctgtttttcggccagaacatcatcgccgcctcgccgctggccgtgctggcctacgccattccgcacatgttccactccatcgcgaccgccgccaaggtgaacaagggctggcgctattcgttctggagtgaagtgtacgaaaccaccatggcgctgttcctggtgcgcgtaaccatcatcaccctgatgttcccctccaagggcaagttcaacgtgacggaaaagggtggcgtgctggaggaggaagagttcgaccttggcgcgacctaccccaacatcatttttgccggcatcatgacgttggggctgctgatcggtctgttcgaactgaccttccacttcaaccagctcgcgggcattgccaagcgtgcttacctgctgaactgcatctgggcgatgatcagtctcatcatcctccttgccgccattgccgtggggcgtgagaccaagcaggtccgttacaaccatcgtgtcgaggcgcatatcccggtaacggtttatgaagcaccggtcgcggggcagcccaatacctaccataatgcgacaccgggcatgacccaggatgtctccatgggtggcgttgccgtccacatgccctggccagatgtcagcacaggaccagtcaagacacgcattcatgccgtgctcgatggcgaggagatcgatattcccgccaccatgctgcgctgcaagaatggcaaggccgtgttcacatgggacaataatgaccttgatacggaacgcgatattgtccgcttcgtgttcgggcgggccgatgcctggctgcaatggaataattatgaggatgacagaccgctacgcagtctgtggagcctgctgctcagcattaaggcgctgttccgcaaaaaaggcaaaatgatggccaatagtcgtccaaaaagaaaaccacttgccctaccggttgagcgcagggagcccacaaccatccagagtggacagacacaggaaggaaagatcagccgtgcggcctcgtga

SEQ ID NO: 83192 - protein, 754 aa, Acetobacter xylinus
MSEVQSPVPAESRLDRFSNKILSLRGANYIVGALGLCALIAATTVTLSINEQLIVALVCVLVFFIVGRGKSRRTQIFLEVLSALVSLRYLTWRLTETLDFDTWIQGGLGVTLLMAELYALYMLFLSYFQTIQPLHRAPLPLPDNVDDWPTVDIFIPTYDEQLSIVRLTVLGALGIDWPPDKVNVYILDDGVRPEFEQFAKDCGALYIGRVDSSHAKAGNLNHAIKRTSGDYILILDCDHIPTRAFLQIAMGWMVADRKIALMQTPHHFYSPDPFQRNLAVGYRTPPEGNLFYGVIQDGNDFWDATFFCGSCAILRREAIESIGGFAVETVTEDAHTALRMQRRGWSTAYLRIPVASGLATERLTTHIGQRMRWARGMIQIFRVDNPMLGGGLKLGQRLCYLSAMTSFFFAIPRVIFLASPLAFLFFGQNIIAASPLAVLAYAIPHMFHSIATAAKVNKGWRYSFWSEVYETTMALFLVRVTIITLMFPSKGKFNVTEKGGVLEEEEFDLGATYPNIIFAGIMTLGLLIGLFELTFHFNQLAGIAKRAYLLNCIWAMISLIILLAAIAVGRETKQVRYNHRVEAHIPVTVYEAPVAGQPNTYHNATPGMTQDVSMGGVAVHMPWPDVSTGPVKTRIHAVLDGEEIDIPATMLRCKNGKAVFTWDNNDLDTERDIVRFVFGRADAWLQWNNYEDDRPLRSLWSLLLSIKALFRKKGKMMANSRPKRKPLALPVERREPTTIQSGQTQEGKISRAAS

SEQ ID NO: 83193 - DNA, 2619 bp, Escherichia coli
  CDS (1)..(2619): transl_table=11
atgagtatcctgacccggtggttgcttatcccgccggtcaacgcgcggcttatcgggcgttatcgcgattatcgtcgtcacggtgcgtcggctttcagcgcgacgctcggctgtttctggatgatcctggcctggatttttattccgctggagcacccgcgctggcagcgtattcgcgcagaacataaaaacctgtatccgcatatcaacgcctcgcgtccgcgtccgctggacccggtccgttatctcattcaaacatgctggttattgatcggtgcatcgcgcaaagaaacgccgaaaccgcgcaggcgggcattttcaggtctgcaaaatattcgtggacgttaccatcaatggatgaacgagctgcctgagcgcgttagccataaaacacagcatctggatgagaaaaaagagctcggtcatttgagtgccggggcgcggcggttgatcctcggtatcatcgtcaccttctcgctgattctggcgttaatctgcgttactcagccgtttaacccgctggcgcagtttatcttcctgatgctgctgtggggggtagcgctgatcgtacggcggatgccggggcgcttctcggcgctaatgttgattgtgctgtcgctgaccgtttcttgccgttatatctggtggcgttacacctctacgctgaactgggacgatccggtcagcctggtgtgcgggcttattctgctcttcgctgaaacgtacgcgtggattgtgctggtgctcggctacttccaggtagtatggccgctgaatcgtcagccggtgccattgccgaaagatatgtcgctgtggccgtcggtggatatctttgtcccgacttacaacgaagatctcaacgtggtgaaaaataccatttacgcctcgctgggtatcgactggccgaaagataagctgaatatctggatccttgatgacggcggcagggaagagtttcgccagtttgcgcaaaacgtgggggtgaaatatatcgcccgcaccactcatgaacatgcgaaagcaggcaacatcaacaatgcgctgaaatatgccaaaggcgagttcgtgtcgattttcgactgcgaccacgtaccaacgcgatcgttcttgcaaatgaccatgggctggttcctgaaagaaaaacagctggcgatgatgcagacgccgcaccacttcttctcaccggacccgtttgaacgcaacctggggcgtttccgtaaaacgccgaacgaaggcacgctgttctatggtctggtgcaggatggcaacgatatgtgggacgccactttcttctgcggttcctgtgcggtgattcgtcgtaagccgctggatgaaattggcggcattgctgtcgaaaccgtgactgaagatgcgcatacttctctgcggttgcaccgtcgtggctatacctccgcgtatatgcgtattccgcaggcggcggggctggcgaccgaaagtctgtcggcgcatatcggtcagcgtattcgctgggcgcgcgggatggtacaaatcttccgtctcgataacccgctcaccggtaaagggctgaagtttgctcagcggctatgttacgtcaacgccatgttccacttcttgtcgggcattccacggctgatcttcctgactgcgccgctggcgttcctgctgcttcatgcctacatcatctatgcgccagcgttgatgatcgccctattcgtgctgccgcatatgatccatgccagcctgaccaactccaagatccagggcaaatatcgccactctttctggagtgaaatctacgaaacggtgctggcgtggtatatcgcaccaccgacgctggtggcgctgattaacccgcacaaaggcaaatttaacgtcaccgccaaaggtggactggtggaagaagagtacgtcgactgggtgatctcgcggccctacatcttccttgtcctgctcaacctggtgggcgttgcggtaggcatctggcgctacttctatggcccgccaaccgagatgctcaccgtggtcgtcagtatggtgtgggtgttctacaacctgattgttcttggcggcgcagttgcggtatcggtagaaagcaaacaggtacgccgatcgcaccgcgtggagatgacgatgcccgcggcaattgcccgcgaagatggtcacctcttctcgtgtaccgttcaggatttctccgacggtggtttggggatcaagatcaacggtcaggcgcagattctggaagggcagaaagtgaatctgttgcttaaacgcggtcagcaggaatacgtcttcccgacccaggtggcgcgcgtgatgggtaatgaagttgggctgaaattaatgccgctcaccacccagcaacatatcgattttgtgcagtgtacgtttgcccgtgcggatacatgggcgctctggcaggacagctacccggaagataagccgctggaaagtctgctggatattctgaagctcggcttccgtggctaccgccatctggcggagtttgcgccttcttcggtgaagggcatattccgtgtgctgacttctctggtttcctgggttgtatcgtttattccgcgccgcccggagcggagcgaaacggcacaaccatcggatcaggctttggctcaacaatga

SEQ ID NO: 83194 - protein, 872 aa, Escherichia coli
MSILTRWLLIPPVNARLIGRYRDYRRHGASAFSATLGCFWMILAWIFIPLEHPRWQRIRAEHKNLYPHINASRPRPLDPVRYLIQTCWLLIGASRKETPKPRRRAFSGLQNIRGRYHQWMNELPERVSHKTQHLDEKKELGHLSAGARRLILGIIVTFSLILALICVTQPFNPLAQFIFLMLLWGVALIVRRMPGRFSALMLIVLSLTVSCRYIWWRYTSTLNWDDPVSLVCGLILLFAETYAWIVLVLGYFQVVWPLNRQPVPLPKDMSLWPSVDIFVPTYNEDLNVVKNTIYASLGIDWPKDKLNIWILDDGGREEFRQFAQNVGVKYIARTTHEHAKAGNINNALKYAKGEFVSIFDCDHVPTRSFLQMTMGWFLKEKQLAMMQTPHHFFSPDPFERNLGRFRKTPNEGTLFYGLVQDGNDMWDATFFCGSCAVIRRKPLDEIGGIAVETVTEDAHTSLRLHRRGYTSAYMRIPQAAGLATESLSAHIGQRIRWARGMVQIFRLDNPLTGKGLKFAQRLCYVNAMFHFLSGIPRLIFLTAPLAFLLLHAYIIYAPALMIALFVLPHMIHASLTNSKIQGKYRHSFWSEIYETVLAWYIAPPTLVALINPHKGKFNVTAKGGLVEEEYVDWVISRPYIFLVLLNLVGVAVGIWRYFYGPPTEMLTVVVSMVWVFYNLIVLGGAVAVSVESKQVRRSHRVEMTMPAAIAREDGHLFSCTVQDFSDGGLGIKINGQAQILEGQKVNLLLKRGQQEYVFPTQVARVMGNEVGLKLMPLTTQQHIDFVQCTFARADTWALWQDSYPEDKPLESLLDILKLGFRGYRHLAEFAPSSVKGIFRVLTSLVSWVVSFIPRRPERSETAQPSDQALAQQ

SEQ ID NO: 83195 - DNA, 2220 bp, Pseudomonas fluorescens
  CDS (1)..(2220): transl_table=11
atgaccgacactacgtcctccacgcccttcgtcgaagggcgcgctgaacagcgcctaaatggcgccatcgcgcgcttcaatcggtggccttcggcgccgcgtacggtactggttgttgccagttgcgtgctcggcgccatgctgctgctgggcattatcagcgcgccgctcgacctctacagccaatgcctgtttgccgccgtgtgcttcctggcggtgctggtactgcgcaagatcccggggcgcctggcgatcctcgccttggtggtgttgtcgctggtggcgtcgttgcgctacatgttctggcgcctcacctccaccctcggctttgaaacctgggtcgacatgttcttcggctacggcctggtcgcggccgagttctacgccctgatcgtgctgatcttcggctacgtgcaaaccgcctggccgctgcgccgcacgccggtgtggctcaagactgagccggaagagtggccgacggtcgacgtgttcatcccgacgtataacgaggcgctgagcatcgtaaagctgaccattttcgccgcccaggcgatggactggcccaaggacaagctgcgcgtccacgtgctcgacgacggtcgccgcgacgacttccgcgaattctgccgcaaggtcggcgtgaactacatccggcgcgacaataacttccacgccaaggccggtaacctcaacgaagcgttgaaggtcaccgacggcgaatacatcgccctgttcgacgccgaccacgtgccgacgcgttccttcctgcaagtgagcctgggctggttcctgaaagatccgaagctggcgatgctgcaaacgccgcacttcttcttctcgccggacccgtttgaaaagaacctcgacacgttccgcgccgtgcccaacgaaggtgagctgttctacggcctggtgcaggacggcaacgacctgtggaacgccaccttcttctgtggctcctgtgccgtgattcgccgtgagccgctgctggaaatcggcggcgtagccgttgagaccgtgaccgaagacgcccacaccgcgctcaagctcaaccgcctgggctacaacaccgcttacctggccatcccacaagccgcgggcctggccactgaaagcctgtcgcgccacatcaaccagcgcattcgctgggcacggggcatggcgcagattttccgcaccgacaacccgctgctgggcaaaggcctgaagtggggccagcgcatctgttatgccaacgccatgcagcacttcttctatggtttgccgcgcctggtgtttttgaccgcgccgttggcctacctgattttcggcgccgaaatcttccacgcatcggcgctgatgatcgtcgcctatgtgttgccgcacttggtgcactccagcctgaccaactcgcggatccaggggcgcttccgtcactcgttctggaacgaggtgtacgagaccgtactggcctggtacatcctgccgccggtgctggtcgcgctggtcaatcccaaggcgggtggcttcaacgtcaccgacaagggcggcatcatcgacaagcagttcttcgactggaaactcgcccggccctacctggtgttgttggcggtcaacctgatcggcctcggcttcggtatccaccagttgatctggggcgatgcgtccactgccgtgacggtggcgatcaacctgacctggaccctctataacctgatcatcaccagtgccgccgtggccgtggcctcggaagcacgccaagtgcgttccgagccgcgtgtcagcgccaagctgccagtgagcatcatttgcgccgacggccgcgtgcttgatggcaccacccaggacttctcgcaaaacggcttcggcttgatgctttccgatggtcactcgatcacccagggtgaacgcgtgcaattggtactgtcgcgcaacggccaggacagcctgaaagacgcccgcgtggtgttcagcaagggcgcgcagatcggcgcccaattcgaagccctcagcctgcgccagcaaagcgaactggttcgcctgactttctcccgcgccgatacctgggccgcgagttggggcgccggtcagccggatacgccgctggcggccctgcgcgaagtcggctccatcggcatcggcggcttgttcaccctcggccgcgccaccctacacgaactgcgtctggccttgagccgcacccccacaaaaccgctagatacgctgatggacaagccatga

SEQ ID NO: 83196 - protein, 739 aa, Pseudomonas fluorescens
MTDTTSSTPFVEGRAEQRLNGAIARFNRWPSAPRTVLVVASCVLGAMLLLGIISAPLDLYSQCLFAAVCFLAVLVLRKIPGRLAILALVVLSLVASLRYMFWRLTSTLGFETWVDMFFGYGLVAAEFYALIVLIFGYVQTAWPLRRTPVWLKTEPEEWPTVDVFIPTYNEALSIVKLTIFAAQAMDWPKDKLRVHVLDDGRRDDFREFCRKVGVNYIRRDNNFHAKAGNLNEALKVTDGEYIALFDADHVPTRSFLQVSLGWFLKDPKLAMLQTPHFFFSPDPFEKNLDTFRAVPNEGELFYGLVQDGNDLWNATFFCGSCAVIRREPLLEIGGVAVETVTEDAHTALKLNRLGYNTAYLAIPQAAGLATESLSRHINQRIRWARGMAQIFRTDNPLLGKGLKWGQRICYANAMQHFFYGLPRLVFLTAPLAYLIFGAEIFHASALMIVAYVLPHLVHSSLTNSRIQGRFRHSFWNEVYETVLAWYILPPVLVALVNPKAGGFNVTDKGGIIDKQFFDWKLARPYLVLLAVNLIGLGFGIHQLIWGDASTAVTVAINLTWTLYNLIITSAAVAVASEARQVRSEPRVSAKLPVSIICADGRVLDGTTQDFSQNGFGLMLSDGHSITQGERVQLVLSRNGQDSLKDARVVFSKGAQIGAQFEALSLRQQSELVRLTFSRADTWAASWGAGQPDTPLAALREVGSIGIGGLFTLGRATLHELRLALSRTPTKPLDTLMDKP

SEQ ID NO: 83197 - DNA, 2625 bp, Salmonella typhi
  CDS (1)..(2625): transl_table=11
atgagcgccctttcccggtggctgcttatcccgccggttagcgcgcgcttgagcgagcgctatcagggttaccgccgccacggcgcgtcgccgtttagcgcagcgctcggctgcctgtggacgattctggcgtggatagtgtttccgcttgagcatccgcgctggcagcgtattcgcgacgggcataaagcgctttatccgcatattaacgccgcccgcccgcgcccgctggacccggcccgttacctcattcagaccctctggctggtgatgatctcgtcgactaaagaacgtcatgaaccgcgctggcggtcatttgcgcgcctgaaggacgttcgtggacgttaccatcaatggatggataccttaccggaacgggtgcgccaaaagacaacgcacctggaaaaggaaaaagagctgggacatcttagcaacggcgcccggcgttttattctgggcgttatcgtgaccttttcactgatactggcgctgatctgtattacgcagccatttaacccgctatcgcaatttatctttctgctgttgctgtggggcgttgcgctgttggtacgacgtatgccgggacgcttttccgcgctgatgctcatcgtgctgtcgctaacggtctcctgtcgttatatctggtggcgctatacctcgacgctaaattgggacgacccggtcagtctggtgtgcggactgattctgctgtttgcggaaacctacgcctggattgtgctggtgctggggtacttccaggtggtgtggccgttaaatcgtcaaccggtgccgttgccgaaagagatgtcgcagtggccgacggtggatatttttgtaccgacctataacgaagaccttaatgtggtcaaaaataccatttacgcttcgcttggcattgactggccgaaggacaagctgaatatctggatccttgatgacggcgggcgcgaatcatttcgtcagtttgcccggcatgttggcgtgcattacattgcccgcgctacgcatgaacacgccaaagccggcaacatcaacaatgcgttaaaacacgcgaaaggcgagtttgtggcgatcttcgattgcgaccatgtaccgacgcgctcgtttctgcaaatgacaatgggctggttcctgaaagagaaacagctggcgatgatgcagacgccgcatcatttcttctccccggacccgtttgagcgcaacctgggacgttttcgtaaaacgcctaacgaaggcacgctgttttacggactggtgcaggacggtaacgatatgtgggatgccactttcttttgcggatcgtgcgcggtgattcgccgtaagccgctggatgagattggcggtatcgccgttgagacggtgacggaagatgcgcatacttcgctccggctgcaccggcgaggttatacctcagcgtatatgcgcattccgcagtcggcggggctggcgacggaaagcctgtcggcgcatatcgggcagcgtattcgttgggcgcggggcatggtgcaaattttccgcctcgataaccctctgtttggtaaaggcttaaaactggcgcagcggctgtgctacctcaacgcgatgttccatttcttgtccggcattccgcgcctgatctttctgaccgcgccgctggcttttctgctgctgcacgcctatatcatttatgcgcctgcgttgatgattgcgctatttgtgataccgcacatggtccacgccagcctgactaactcgaagattcagggcaagtatcgtcactctttctggagtgaaatctatgaaacggtactggcatggtatatcgcaccaccgactctggtcgcgttgatcaatccgcacaaagggaaatttaacgtcacggcgaaaggcggactggtggaagagaagtacgtcgactgggtaatctcgcgtccgtatatcttccttgtcttgcttaacctgctcggcgtggcggcgggcgtatggcgatactattatgggccggaaaatgaaacgctgaccgtcatcgttagcctggtgtgggtcttctataacctggtcattctcggcggcgcggttgcggtttcggtagagagtaaacaggtcaggcgcgcgcatcgggtcgagattgccatgccgggggccatcgcccgcgaagatggacatttgttctcctgtaccgtacatgacttctccgacggcgggttaggcatcaagatcaacggtcaggcgcaggtgctggaagggcagaaagtgaatctgttgcttaaacgcgggcagcaggaatatgtctttccaacgcaggtagtgcgcgtaacgggcaatgaggtcgggctgcaactgatgccgctcaccaccaaacaacatattgattttgtgcagtgtaccttcgctcgcgccgatacgtgggcgctttggcaagatagcttcccggaagataaaccgctggaaagcttgctggatattctgaagctgggcttccgcggatatcgccacctcgcggagttcgcgccgccttcagtaaaagtaattttccgatcgttgacggcgttaattgcctggattgtatcgtttattccgcgtcgcccggagcggcaagcggcgatacagccgtcggatcgggttatggctcaggctcaacaatga

SEQ ID NO: 83198 - protein, 874 aa, Salmonella typhi
MSALSRWLLIPPVSARLSERYQGYRRHGASPFSAALGCLWTILAWIVFPLEHPRWQRIRDGHKALYPHINAARPRPLDPARYLIQTLWLVMISSTKERHEPRWRSFARLKDVRGRYHQWMDTLPERVRQKTTHLEKEKELGHLSNGARRFILGVIVTFSLILALICITQPFNPLSQFIFLLLLWGVALLVRRMPGRFSALMLIVLSLTVSCRYIWWRYTSTLNWDDPVSLVCGLILLFAETYAWIVLVLGYFQVVWPLNRQPVPLPKEMSQWPTVDIFVPTYNEDLNVVKNTIYASLGIDWPKDKLNIWILDDGGRESFRQFARHVGVHYIARATHEHAKAGNINNALKHAKGEFVAIFDCDHVPTRSFLQMTMGWFLKEKQLAMMQTPHHFFSPDPFERNLGRFRKTPNEGTLFYGLVQDGNDMWDATFFCGSCAVIRRKPLDEIGGIAVETVTEDAHTSLRLHRRGYTSAYMRIPQSAGLATESLSAHIGQRIRWARGMVQIFRLDNPLFGKGLKLAQRLCYLNAMFHFLSGIPRLIFLTAPLAFLLLHAYIIYAPALMIALFVIPHMVHASLTNSKIQGKYRHSFWSEIYETVLAWYIAPPTLVALINPHKGKFNVTAKGGLVEEKYVDWVISRPYIFLVLLNLLGVAAGVWRYYYGPENETLTVIVSLVWVFYNLVILGGAVAVSVESKQVRRAHRVEIAMPGAIAREDGHLFSCTVHDFSDGGLGIKINGQAQVLEGQKVNLLLKRGQQEYVFPTQVVRVTGNEVGLQLMPLTTKQHIDFVQCTFARADTWALWQDSFPEDKPLESLLDILKLGFRGYRHLAEFAPPSVKVIFRSLTALIAWIVSFIPRRPERQAAIQPSDRVMAQAQQ

SEQ ID NO: 83199 - DNA, 2625 bp, Salmonella typhimurium
  CDS (1)..(2625): transl_table=11
atgagcgccctttcccggtggctgcttatcccgccggttagcgcgcgtttgagcgagcgctatcagggttaccgccgccacggcgcgtcgccgtttagcgcagcgctcggctgcctgtggacgattctggcgtggatagtgtttccgcttgagcatccgcgctggcagcgtattcgcgacgggcataaagcgctttatccgcatattaacgccgcacgcccgcgcccgctggacccggcccgttacctcattcagaccctctggctggtgatgatctcgtcgactaaagaacgtcatgaaccgcgctggcggtcatttgcgcgcctgaaggacgttcgtggacgttaccatcaatggatggataccttaccggaacgggtgcgccaaaagacaacgcacctggaaaaggaaaaagagctgggacatcttagcaacggcgcccggcgttttattctgggcgttatcgtgaccttttcactgatactggcgctgatctgtattacgcagccatttaacccgctatcgcaatttatctttctgctgttgctgtggggcgttgcgctgttggtacgacgtatgccgggacgcttttccgcgctgatgctcatcgtgctgtcgttaacggtctcctgtcgttatatctggtggcgctatacctcgacgctaaattgggacgacccggtcagtctggtgtgcgggctgattctgctgtttgcggaaacctacgcctggattgtgctggtgctggggtacttccaggtggtgtggccgttaaatcgtcaaccggtgccgttgccgaaagaaatgtcgcagtggccgacggtggatatttttgtaccgacctataacgaagaccttaatgtggtcaaaaataccatttacgcttcgcttggcattgactggccgaaggacaagctgaatatctggatccttgatgacggcgggcgtgaatcatttcgtcattttgcccgacatgttggcgtgcattacattgcccgcaccacgcatgaacacgccaaagccggcaacatcaacaatgcgctaaaacacgcgaaaggcgagtttgtggcgatcttcgattgcgaccatgtgccgacacgctcgtttctgcaaatgacaatgggctggttcctgaaagaaaaacagctggcgatgatgcagacgccgcatcatttcttctccccggacccgtttgagcgcaacctgggacgttttcgtaaaacgcctaacgaaggcacgctgttttacggactggtgcaggacggtaacgatatgtgggacgccactttcttttgcggatcgtgcgcggtgattcgccgtaagccgctggatgagattggcggtatcgccgttgagacggtgacggaagatgcgcatacttcgctccggctgcaccggcgaggttatacctcagcgtatatgcgcattccgcaggcggcggggctggcgacggaaagcctgtcggcgcatatcgggcagcgtattcgttgggcgcggggtatggtgcaaattttccgcctcgataaccctctgtttggtaaaggcttaaaactggcgcagcggctgtgctacctcaacgcgatgttccatttcttgtccggcattccgcgcctgatctttctgaccgcgccgctggcttttctgctgctgcacgcctatatcatttatgcgcctgcgttgatgattgcgctatttgtgataccgcacatggtccacgccagcctgactaactcgaagattcagggcaagtatcgtcactctttctggagtgaaatctatgaaacggtactggcatggtatatcgcaccgccgactctggtcgcgttgatcaatccgcacaaagggaaatttaacgtcacggcgaaaggcgggctggtggaagagaagtacgtcgactgggtaatctcgcgtccgtatatcttccttgtcttgcttaacctgctcggcgtggcggcgggcgtatggcgatactattacgggccggaaaatgaaacgctgaccgtcatcgttagcctggtgtgggtcttctataacctggtcattctcggcggcgcggttgcggtttcggtagagagtaaacaggtcaggcgcgcgcatcgggtcgagattgccatgccgggggccatcgcccgcgaagatggacatttgttctcctgtaccgtacatgacttctccgacggcgggttaggcatcaagatcaacggtcaggcgcaggtgctggaagggcagaaagtgaatctgttgcttaaacgcgggcagcaggaatatgtctttccaacgcaggtggtgcgcgtaacgggcaatgaggtcgggctacaactgatgccgctcaccaccaaacaacatattgattttgtgcagtgtaccttcgcgcgcgccgatacgtgggcgctttggcaagatagcttcccggaagataaaccgctggaaagcttgctggatattctgaagctgggcttccgcggatatcgccacctcgcggaattcgcgccgccttcagtaaaagtaattttccgatcgttgacggcgttaattgcctggattgtatcgtttattccgcgtcgcccggagcggcaagcggcgatacagccgtcggatcgggttatggctcaggctcaacaatga

SEQ ID NO: 83200 - protein, 874 aa, Salmonella typhimurium
MSALSRWLLIPPVSARLSERYQGYRRHGASPFSAALGCLWTILAWIVFPLEHPRWQRIRDGHKALYPHINAARPRPLDPARYLIQTLWLVMISSTKERHEPRWRSFARLKDVRGRYHQWMDTLPERVRQKTTHLEKEKELGHLSNGARRFILGVIVTFSLILALICITQPFNPLSQFIFLLLLWGVALLVRRMPGRFSALMLIVLSLTVSCRYIWWRYTSTLNWDDPVSLVCGLILLFAETYAWIVLVLGYFQVVWPLNRQPVPLPKEMSQWPTVDIFVPTYNEDLNVVKNTIYASLGIDWPKDKLNIWILDDGGRESFRHFARHVGVHYIARTTHEHAKAGNINNALKHAKGEFVAIFDCDHVPTRSFLQMTMGWFLKEKQLAMMQTPHHFFSPDPFERNLGRFRKTPNEGTLFYGLVQDGNDMWDATFFCGSCAVIRRKPLDEIGGIAVETVTEDAHTSLRLHRRGYTSAYMRIPQAAGLATESLSAHIGQRIRWARGMVQIFRLDNPLFGKGLKLAQRLCYLNAMFHFLSGIPRLIFLTAPLAFLLLHAYIIYAPALMIALFVIPHMVHASLTNSKIQGKYRHSFWSEIYETVLAWYIAPPTLVALINPHKGKFNVTAKGGLVEEKYVDWVISRPYIFLVLLNLLGVAAGVWRYYYGPENETLTVIVSLVWVFYNLVILGGAVAVSVESKQVRRAHRVEIAMPGAIAREDGHLFSCTVHDFSDGGLGIKINGQAQVLEGQKVNLLLKRGQQEYVFPTQVVRVTGNEVGLQLMPLTTKQHIDFVQCTFARADTWALWQDSFPEDKPLESLLDILKLGFRGYRHLAEFAPPSVKVIFRSLTALIAWIVSFIPRRPERQAAIQPSDRVMAQAQQ

SEQ ID NO: 83201 - DNA, 23 bp, Artificial sequence
  primer
atgcctgttgaactactccgggc

SEQ ID NO: 83202 - DNA, 25 bp, Artificial sequence
  primer
ttattgttgagccaaagcctgatcc

SEQ ID NO: 83203 - protein, 702 aa, Artificial sequence
  consensus sequence
  Variant (2)..(6): Xaa in position 2 to 6 is any amino acid
  Variant (8)..(25): Xaa in position 8 to 25 is any amino acid
  Variant (28)..(36): Xaa in position 28 to 36 is any amino acid
  Variant (37)..(39): Xaa in position 37 to 39 is any or no amino acid
  Variant (41)..(45): Xaa in position 41 to 45 is any amino acid
  Variant (48)..(49): Xaa in position 48 to 49 is any amino acid
  Variant (52)..(52): Xaa in position 52 is any amino acid
  Variant (54)..(54): Xaa in position 54 is any amino acid
  Variant (56)..(66): Xaa in position 56 to 66 is any amino acid
  Variant (68)..(69): Xaa in position 68 to 69 is any amino acid
  Variant (71)..(72): Xaa in position 71 to 72 is any amino acid
  Variant (75)..(75): Xaa in position 75 is any amino acid
  Variant (77)..(80): Xaa in position 77 to 80 is any amino acid
  Variant (82)..(82): Xaa in position 82 is any amino acid
  Variant (85)..(86): Xaa in position 85 to 86 is any amino acid
  Variant (88)..(90): Xaa in position 88 to 90 is any amino acid
  Variant (93)..(93): Xaa in position 93 is any amino acid
  Variant (95)..(95): Xaa in position 95 is any amino acid
  Variant (96)..(98): Xaa in position 96 to 98 is any or no amino acid
  Variant (101)..(103): Xaa in position 101 to 103 is any amino acid
  Variant (104)..(105): Xaa in position 104 to 105 is any or no amino acid
  Variant (108)..(108): Xaa in position 108 is any amino acid
  Variant (111)..(113): Xaa in position 111 to 113 is any amino acid
  Variant (119)..(119): Xaa in position 119 is any amino acid
  Variant (121)..(125): Xaa in position 121 to 125 is any amino acid
  Variant (127)..(128): Xaa in position 127 to 128 is any amino acid
  Variant (130)..(132): Xaa in position 130 to 132 is any amino acid
  Variant (133)..(133): Xaa in position 133 is any or no amino acid
  Variant (137)..(138): Xaa in position 137 to 138 is any amino acid
  Variant (140)..(144): Xaa in position 140 to 144 is any amino acid
  Variant (149)..(149): Xaa in position 149 is any amino acid
  Variant (150)..(168): Xaa in position 150 to 168 is any or no amino acid
  Variant (170)..(174): Xaa in position 170 to 174 is any amino acid
  Variant (176)..(179): Xaa in position 176 to 179 is any amino acid
  Variant (181)..(182): Xaa in position 181 to 182 is any amino acid
  Variant (183)..(188): Xaa in position 183 to 188 is any or no amino acid
  Variant (190)..(191): Xaa in position 190 to 191 is any amino acid
  Variant (193)..(196): Xaa in position 193 to 196 is any amino acid
  Variant (203)..(203): Xaa in position 203 is any amino acid
  Variant (205)..(205): Xaa in position 205 is any amino acid
  Variant (208)..(211): Xaa in position 208 to 211 is any amino acid
  Variant (213)..(216): Xaa in position 213 to 216 is any amino acid
  Variant (223)..(223): Xaa in position 223 is any amino acid
  Variant (231)..(233): Xaa in position 231 to 233 is any amino acid
  Variant (235)..(235): Xaa in position 235 is any amino acid
  Variant (238)..(242): Xaa in position 238 to 242 is any amino acid
  Variant (244)..(245): Xaa in position 244 to 245 is any amino acid
  Variant (250)..(250): Xaa in position 250 is any amino acid
  Variant (259)..(259): Xaa in position 259 is any amino acid
  Variant (262)..(267): Xaa in position 262 to 267 is any amino acid
  Variant (269)..(269): Xaa in position 269 is any amino acid
  Variant (272)..(272): Xaa in position 272 is any amino acid
  Variant (277)..(278): Xaa in position 277 to 278 is any amino acid
  Variant (284)..(284): Xaa in position 284 is any amino acid
  Variant (286)..(286): Xaa in position 286 is any amino acid
  Variant (288)..(288): Xaa in position 288 is any amino acid
  Variant (296)..(298): Xaa in position 296 to 298 is any amino acid
  Variant (300)..(301): Xaa in position 300 to 301 is any amino acid
  Variant (303)..(303): Xaa in position 303 is any amino acid
  Variant (305)..(305): Xaa in position 305 is any amino acid
  Variant (308)..(308): Xaa in position 308 is any amino acid
  Variant (310)..(310): Xaa in position 310 is any amino acid
  Variant (320)..(320): Xaa in position 320 is any amino acid
  Variant (322)..(322): Xaa in position 322 is any amino acid
  Variant (324)..(324): Xaa in position 324 is any amino acid
  Variant (326)..(326): Xaa in position 326 is any amino acid
  Variant (329)..(330): Xaa in position 329 to 330 is any amino acid
  Variant (333)..(335): Xaa in position 333 to 335 is any amino acid
  Variant (339)..(339): Xaa in position 339 is any amino acid
  Variant (345)..(345): Xaa in position 345 is any amino acid
  Variant (347)..(348): Xaa in position 347 to 348 is any amino acid
  Variant (351)..(351): Xaa in position 351 is any amino acid
  Variant (361)..(361): Xaa in position 361 is any amino acid
  Variant (366)..(366): Xaa in position 366 is any amino acid
  Variant (370)..(371): Xaa in position 370 to 371 is any amino acid
  Variant (373)..(373): Xaa in position 373 is any amino acid
  Variant (376)..(378): Xaa in position 376 to 378 is any amino acid
  Variant (384)..(384): Xaa in position 384 is any amino acid
  Variant (388)..(388): Xaa in position 388 is any amino acid
  Variant (391)..(392): Xaa in position 391 to 392 is any amino acid
  Variant (394)..(394): Xaa in position 394 is any amino acid
  Variant (397)..(398): Xaa in position 397 to 398 is any amino acid
  Variant (402)..(402): Xaa in position 402 is any amino acid
  Variant (404)..(404): Xaa in position 404 is any amino acid
  Variant (406)..(406): Xaa in position 406 is any amino acid
  Variant (408)..(413): Xaa in position 408 to 413 is any amino acid
  Variant (415)..(415): Xaa in position 415 is any amino acid
  Variant (417)..(418): Xaa in position 417 to 418 is any amino acid
  Variant (420)..(426): Xaa in position 420 to 426 is any amino acid
  Variant (429)..(434): Xaa in position 429 to 434 is any amino acid
  Variant (437)..(443): Xaa in position 437 to 443 is any amino acid
  Variant (445)..(446): Xaa in position 445 to 446 is any amino acid
  Variant (449)..(449): Xaa in position 449 is any amino acid
  Variant (451)..(451): Xaa in position 451 is any amino acid
  Variant (454)..(455): Xaa in position 454 to 455 is any amino acid
  Variant (458)..(458): Xaa in position 458 is any amino acid
  Variant (461)..(462): Xaa in position 461 to 462 is any amino acid
  Variant (465)..(466): Xaa in position 465 to 466 is any amino acid
  Variant (469)..(470): Xaa in position 469 to 470 is any amino acid
  Variant (472)..(473): Xaa in position 472 to 473 is any amino acid
  Variant (475)..(475): Xaa in position 475 is any amino acid
  Variant (480)..(480): Xaa in position 480 is any amino acid
  Variant (484)..(490): Xaa in position 484 to 490 is any amino acid
  Variant (492)..(495): Xaa in position 492 to 495 is any amino acid
  Variant (496)..(496): Xaa in position 496 is any or no amino acid
  Variant (499)..(500): Xaa in position 499 to 500 is any amino acid
  Variant (502)..(504): Xaa in position 502 to 504 is any amino acid
  Variant (506)..(507): Xaa in position 506 to 507 is any amino acid
  Variant (509)..(511): Xaa in position 509 to 511 is any amino acid
  Variant (513)..(531): Xaa in position 513 to 531 is any amino acid
  Variant (532)..(536): Xaa in position 532 to 536 is any or no amino acid
  Variant (538)..(540): Xaa in position 538 to 540 is any amino acid
  Variant (542)..(547): Xaa in position 542 to 547 is any amino acid
  Variant (549)..(549): Xaa in position 549 is any amino acid
  Variant (552)..(553): Xaa in position 552 to 553 is any amino acid
  Variant (555)..(556): Xaa in position 555 to 556 is any amino acid
  Variant (560)..(561): Xaa in position 560 to 561 is any amino acid
  Variant (564)..(568): Xaa in position 564 to 568 is any amino acid
  Variant (570)..(575): Xaa in position 570 to 575 is any amino acid
  Variant (576)..(576): Xaa in position 576 is any or no amino acid
  Variant (578)..(585): Xaa in position 578 to 585 is any amino acid
  Variant (586)..(593): Xaa in position 586 to 593 is any or no amino acid
  Variant (595)..(595): Xaa in position 595 is any amino acid
  Variant (597)..(597): Xaa in position 597 is any amino acid
  Variant (600)..(632): Xaa in position 600 to 632 is any amino acid
  Variant (633)..(635): Xaa in position 633 to 635 is any or no amino acid
  Variant (637)..(662): Xaa in position 637 to 662 is any amino acid
  Variant (663)..(666): Xaa in position 663 to 666 is any or no amino acid
  Variant (669)..(669): Xaa in position 669 is any amino acid
  Variant (673)..(673): Xaa in position 673 is any amino acid
  Variant (675)..(684): Xaa in position 675 to 684 is any amino acid
  Variant (685)..(687): Xaa in position 685 to 687 is any or no amino acid
  Variant (690)..(701): Xaa in position 690 to 701 is any amino acid
PXXXXXQXXXXXXXXXXXXXXXXXXGRXXXXXXXXXXXXSXXXXXRYXXWRXTXTXXXXXXXXXXXGXXLXXAEXYXXXXLXLGXXQXXXPLXRXXXXLPXXXXXWPXVDXXXPTYNEXLXXXXXTXXAXXXXDWPXXKXXXXXLDDGXXXXXXXXXXXXXXXXXXXXRXXXXXFXXXXGXXXXXXXXYXXRXXXXHAKAGNXNXALXXXXGXXXXIFDCDHXPTRSFLQXXXGXFLXXXXXAXXQTPHXFFSPDPFEXNLXXXXXXPXEGXLFYGXXQDGNDXWXAXFFCGSCAXXXRXXLXEXGGXAXETVTEDAHTXLXLXRXGYXXAYXXXPQAXGLATEXLXXHIXQRIRWARGMXQIFRXDNPXXGXGLXXXQRLCYXNAMXHFXXGXPRXXFLTXPXAXLXXXXXXIXAXXLXXXXXXXPHXXXXXXTNXXXXXXXRXXFWXEXYEXXLAXYIXXPTXXALXXPXXGXFNVTXKGGXXXXXXXDXXXXXPYXXLXXXNXXGXXXGXXXXXXXXXXXXXXXXXXXXXXXXWXXXNXXXXXXAXAVXXEXXQVRXXHRXXXXXPXXXXXXXGXXXXXXXXXXXXXXXXDXSXGGXXXXXXXXXXXXXXXXXXXXXXXXXXXXXXXXXXXXVXXXXXXXXXXXXXXXXXXXXXXXXXXXXXXTFXRADXWXXXXXXXXXXXXXPLXXXXXXXXXXXXG

SEQ ID NO: 83204 - protein, 59 aa, Artificial sequence
  protein pattern
  Variant (2)..(2): Xaa in position 2 is any amino acid
  Variant (7)..(7): Xaa in position 7 is Ile or Leu
  Variant (9)..(9): Xaa in position 9 is any amino acid
  Variant (12)..(13): Xaa in position 12 to 13 is any amino acid
  Variant (14)..(14): Xaa in position 14 is Ala, Cys or Thr
  Variant (15)..(15): Xaa in position 15 is any amino acid
  Variant (16)..(16): Xaa in position 16 is Ala, Gly or Ser
  Variant (17)..(17): Xaa in position 17 is Asp, Glu or Gly
  Variant (18)..(18): Xaa in position 18 is any amino acid
  Variant (19)..(19): Xaa in position 19 is Ile, Leu or Val
  Variant (20)..(20): Xaa in position 20 is any amino acid
  Variant (21)..(21): Xaa in position 21 is Ile, Leu, Met or Val
  Variant (22)..(22): Xaa in position 22 is Phe or Leu
  Variant (24)..(24): Xaa in position 24 is Ala or Cys
  Variant (27)..(27): Xaa in position 27 is Ile or Val
  Variant (29)..(29): Xaa in position 29 is Ser, Thr or Val
  Variant (30)..(30): Xaa in position 30 is Lys or Arg
  Variant (31)..(31): Xaa in position 31 is Asp or Ser
  Variant (32)..(32): Xaa in position 32 is Phe or Ile
  Variant (34)..(35): Xaa in position 34 to 35 is any amino acid
  Variant (36)..(36): Xaa in position 36 is Ala, Gly, Ser or Thr
  Variant (37)..(37): Xaa in position 37 is any amino acid
  Variant (39)..(39): Xaa in position 39 is any amino acid
  Variant (41)..(41): Xaa in position 41 is Leu or Val
  Variant (42)..(42): Xaa in position 42 is any amino acid
  Variant (43)..(43): Xaa in position 43 is Asp, Glu or Asn
  Variant (44)..(47): Xaa in position 44 to 47 is any amino acid
  Variant (48)..(48): Xaa in position 48 is Leu or Met
  Variant (49)..(49): Xaa in position 49 is Leu, Met or Val
  Variant (51)..(51): Xaa in position 51 is any amino acid
  Variant (54)..(54): Xaa in position 54 is any amino acid
  Variant (56)..(56): Xaa in position 56 is any amino acid
  Variant (57)..(57): Xaa in position 57 is Asn or Ser
  Variant (58)..(58): Xaa in position 58 is Ala or Pro
HXKAGNXNXALXXXXXXXXXXXDXDHXPXXXXLXXXXGXFXXXXXXXXXQXPHXFXXXD

SEQ ID NO: 83205 - protein, 60 aa, Artificial sequence
  protein pattern
  Variant (2)..(3): Xaa in position 2 to 3 is any or no amino acid
  Variant (11)..(11): Xaa in position 11 is Ala or Ser
  Variant (13)..(13): Xaa in position 13 is Lys or Arg
  Variant (14)..(14): Xaa in position 14 is Leu or Met
  Variant (15)..(15): Xaa in position 15 is any amino acid
  Variant (17)..(17): Xaa in position 17 is any amino acid
  Variant (19)..(19): Xaa in position 19 is Trp or Tyr
  Variant (20)..(20): Xaa in position 20 is any amino acid
  Variant (21)..(21): Xaa in position 21 is Ser or Thr
  Variant (24)..(24): Xaa in position 24 is Ile, Leu or Met
  Variant (25)..(26): Xaa in position 25 to 26 is any amino acid
  Variant (27)..(27): Xaa in position 27 is Pro or Val
  Variant (28)..(28): Xaa in position 28 is any amino acid
  Variant (29)..(29): Xaa in position 29 is Ala or Ser
  Variant (30)..(30): Xaa in position 30 is Ala, Gly or Ser
  Variant (35)..(35): Xaa in position 35 is Asp or Glu
  Variant (36)..(36): Xaa in position 36 is Asn, Arg or Ser
  Variant (38)..(39): Xaa in position 38 to 39 is any amino acid
  Variant (41)..(41): Xaa in position 41 is Ile or Val
  Variant (42)..(42): Xaa in position 42 is any amino acid
  Variant (45)..(45): Xaa in position 45 is any amino acid
  Variant (52)..(52): Xaa in position 52 is any amino acid
  Variant (55)..(55): Xaa in position 55 is any amino acid
  Variant (57)..(57): Xaa in position 57 is any amino acid
TXXVTEDAHTXLXXXRXGXXXAYXXXXXXXGLATXXLXXHXXQRXRWARGMXQIXRXDNP

SEQ ID NO: 83206 - protein, 58 aa, Artificial sequence
  protein pattern
  Variant (2)..(9): Xaa in position 2 to 9 is any amino acid
  Variant (11)..(11): Xaa in position 11 is any amino acid
  Variant (12)..(12): Xaa in position 12 is Lys or Arg
  Variant (13)..(13): Xaa in position 13 is Ile, Leu, Met or Val
  Variant (14)..(14): Xaa in position 14 is Asn or Gln
  Variant (15)..(16): Xaa in position 15 to 16 is any amino acid
  Variant (17)..(17): Xaa in position 17 is Phe or Tyr
  Variant (19)..(20): Xaa in position 19 to 20 is any amino acid
  Variant (21)..(21): Xaa in position 21 is Phe or Leu
  Variant (23)..(23): Xaa in position 23 is Ala, Gly, Asn or Ser
  Variant (25)..(25): Xaa in position 25 is Ile or Val
  Variant (28)..(28): Xaa in position 28 is Ala, Ser or Thr
  Variant (29)..(29): Xaa in position 29 is Ala, Thr or Val
  Variant (32)..(32): Xaa in position 32 is any amino acid
  Variant (35)..(35): Xaa in position 35 is any amino acid
  Variant (36)..(36): Xaa in position 36 is any or no amino acid
  Variant (38)..(40): Xaa in position 38 to 40 is any amino acid
  Variant (41)..(41): Xaa in position 41 is any or no amino acid
  Variant (43)..(43): Xaa in position 43 is Phe or Leu
  Variant (44)..(44): Xaa in position 44 is Phe, Ile, Leu or Val
  Variant (45)..(45): Xaa in position 45 is any amino acid
  Variant (47)..(48): Xaa in position 47 to 48 is any amino acid
  Variant (50)..(50): Xaa in position 50 is any amino acid
  Variant (55)..(55): Xaa in position 55 is any amino acid
PXXXXXXXXNXXXXXXXRXXXWXEXYEXXLAXYIXXPXXXXAXXXPXXGXFNVTXKGG

SEQ ID NO: 83207 - protein, 29 aa, Artificial sequence
  protein pattern
  Variant (2)..(2): Xaa in position 2 is Asn or Pro
  Variant (4)..(4): Xaa in position 4 is Gly or Asn
  Variant (5)..(5): Xaa in position 5 is any amino acid
  Variant (10)..(10): Xaa in position 10 is any amino acid
  Variant (11)..(11): Xaa in position 11 is Ile, Leu or Val
  Variant (17)..(17): Xaa in position 17 is any amino acid
  Variant (19)..(19): Xaa in position 19 is Asp or Asn
  Variant (21)..(21): Xaa in position 21 is Ala or Thr
  Variant (29)..(29): Xaa in position 29 is Ile, Leu or Val
PXEXXLFYGXXQDGNDXWXAXFFCGSCAX

SEQ ID NO: 83208 - protein, 31 aa, Artificial sequence
  protein pattern
  Variant (3)..(3): Xaa in position 3 is Phe, Ile, Leu or Val
  Variant (6)..(6): Xaa in position 6 is any amino acid
  Variant (8)..(8): Xaa in position 8 is Ala or Ser
  Variant (10)..(11): Xaa in position 10 to 11 is any or no amino acid
  Variant (13)..(14): Xaa in position 13 to 14 is any amino acid
  Variant (15)..(16): Xaa in position 15 to 16 is any or no amino acid
  Variant (18)..(18): Xaa in position 18 is Ala, Ile, Leu or Val
  Variant (21)..(21): Xaa in position 21 is Ile or Leu
  Variant (22)..(22): Xaa in position 22 is Ile or Val
  Variant (23)..(23): Xaa in position 23 is Phe or Tyr
  Variant (26)..(26): Xaa in position 26 is any amino acid
  Variant (28)..(28): Xaa in position 28 is Ile, Leu or Met
  Variant (29)..(29): Xaa in position 29 is Ala, Ser or Val
  Variant (30)..(30): Xaa in position 30 is any amino acid
  Variant (31)..(31): Xaa in position 31 is Ile or Leu
QRXCYXNXMXXFXXXXGXPRXXXLTXPXXXX

SEQ ID NO: 83209 - protein, 20 aa, Artificial sequence
  protein pattern
  Variant (4)..(4): Xaa in position 4 is any amino acid
  Variant (5)..(5): Xaa in position 5 is Asp, Glu or Gly
  Variant (6)..(6): Xaa in position 6 is any amino acid
  Variant (7)..(7): Xaa in position 7 is Ile, Leu, Met or Val
  Variant (8)..(8): Xaa in position 8 is any amino acid
  Variant (9)..(9): Xaa in position 9 is Ile or Val
  Variant (10)..(10): Xaa in position 10 is His, Trp or Tyr
  Variant (11)..(11): Xaa in position 11 is Ile, Leu or Val
  Variant (16)..(16): Xaa in position 16 is any amino acid
  Variant (18)..(18): Xaa in position 18 is Asp, Glu or Pro
  Variant (19)..(19): Xaa in position 19 is Ala, Asp, Glu or Ser
  Variant (20)..(20): Xaa in position 20 is Phe, Ile or Val
DWPXXXXXXXXLDDGXRXXX

SEQ ID NO: 83210 - protein, 20 aa, Artificial sequence
  protein pattern
  Variant (3)..(4): Xaa in position 3 to 4 is any or no amino acid
  Variant (6)..(7): Xaa in position 6 to 7 is any or no amino acid
  Variant (11)..(11): Xaa in position 11 is Asp or Asn
  Variant (13)..(13): Xaa in position 13 is any amino acid
  Variant (14)..(14): Xaa in position 14 is Leu or Pro
  Variant (15)..(15): Xaa in position 15 is any amino acid
  Variant (16)..(16): Xaa in position 16 is Ile or Val
  Variant (17)..(17): Xaa in position 17 is Leu, Pro or Val
  Variant (18)..(19): Xaa in position 18 to 19 is any amino acid
VDXXIXXPTYXEXXXXXXXT

SEQ ID NO: 83211 - protein, 42 aa, Artificial sequence
  protein pattern
  Variant (2)..(2): Xaa in position 2 is any amino acid
  Variant (3)..(3): Xaa in position 3 is any or no amino acid
  Variant (5)..(5): Xaa in position 5 is any or no amino acid
  Variant (7)..(7): Xaa in position 7 is any amino acid
  Variant (9)..(9): Xaa in position 9 is Ala, Glu, Gln, Ser or Thr
  Variant (11)..(17): Xaa in position 11 to 17 is any amino acid
  Variant (18)..(18): Xaa in position 18 is Ala, Asp, Glu, Gln or Ser
  Variant (19)..(21): Xaa in position 19 to 21 is any amino acid
  Variant (23)..(24): Xaa in position 23 to 24 is any amino acid
  Variant (26)..(27): Xaa in position 26 to 27 is any amino acid
  Variant (30)..(30): Xaa in position 30 is any amino acid
  Variant (32)..(32): Xaa in position 32 is Ala, Ser or Thr
  Variant (33)..(34): Xaa in position 33 to 34 is any amino acid
  Variant (35)..(35): Xaa in position 35 is Ile, Met or Val
  Variant (36)..(36): Xaa in position 36 is Ile or Leu
  Variant (37)..(37): Xaa in position 37 is any amino acid
  Variant (38)..(38): Xaa in position 38 is Phe or Leu
  Variant (39)..(39): Xaa in position 39 is Gly or Ser
  Variant (40)..(40): Xaa in position 40 is Phe or Tyr
  Variant (41)..(41): Xaa in position 41 is Phe, Ile, Leu or Val
YXXWXRXTXTXXXXXXXXXXXGXXLXXAEXYXXXXXXXXXXQ

SEQ ID NO: 83212 - protein, 14 aa, Artificial sequence
  protein pattern
  Variant (2)..(2): Xaa in position 2 is Ala or Cys
  Variant (3)..(4): Xaa in position 3 to 4 is any amino acid
  Variant (5)..(5): Xaa in position 5 is Ala, Cys or Val
  Variant (7)..(7): Xaa in position 7 is Ala, Ile or Val
  Variant (8)..(8): Xaa in position 8 is any amino acid
  Variant (10)..(10): Xaa in position 10 is Ile, Leu or Val
  Variant (11)..(11): Xaa in position 11 is any amino acid
  Variant (13)..(13): Xaa in position 13 is any amino acid
  Variant (14)..(14): Xaa in position 14 is Asp, Glu, Asn or Thr
FXXXXGXXYXXRXX

SEQ ID NO: 83213 - DNA, 822 bp, Escherichia coli
  CDS (1)..(822): transl_table=11
atgtcgtgtgaagaactggaaattgtctggaacaatattaaagccgaagccagaacgctggcggactgtgagccaatgctggccagtttttaccacgcgacgctactcaagcacgaaaaccttggcagtgcactgagctacatgctggcgaacaagctgtcatcgccaattatgcctgctattgctatccgtgaagtggtggaagaagcctacgccgctgacccggaaatgatcgcctctgcggcctgtgatattcaggcggtgcgtacccgcgacccggcagtcgataaatactcaaccccgttgttatacctgaagggttttcatgccttgcaggcctatcgcatcggtcactggttgtggaatcaggggcgtcgcgcactggcaatctttctgcaaaaccaggtttctgtgacgttccaggtcgatattcacccggcagcaaaaattggtcgcggtatcatgcttgaccacgcgacaggcatcgtcgttggtgaaacggcggtgattgaaaacgacgtatcgattctgcaatctgtgacgcttggcggtacgggtaaatctggtggtgaccgtcacccgaaaattcgtgaaggtgtgatgattggcgcgggcgcgaaaatcctcggcaatattgaagttgggcgcggcgcgaagattggcgcaggttccgtggtgctgcaaccggtgccgccgcataccaccgccgctggcgttccggctcgtattgtcggtaaaccagacagcgataagccatcaatggatatggaccagcatttcaacggtattaaccatacatttgagtatggggatgggatctaa

SEQ ID NO: 83214 - protein, 273 aa, Escherichia coli
MSCEELEIVWNNIKAEARTLADCEPMLASFYHATLLKHENLGSALSYMLANKLSSPIMPAIAIREVVEEAYAADPEMIASAACDIQAVRTRDPAVDKYSTPLLYLKGFHALQAYRIGHWLWNQGRRALAIFLQNQVSVTFQVDIHPAAKIGRGIMLDHATGIVVGETAVIENDVSILQSVTLGGTGKSGGDRHPKIREGVMIGAGAKILGNIEVGRGAKIGAGSVVLQPVPPHTTAAGVPARIVGKPDSDKPSMDMDQHFNGINHTFEYGDGI

SEQ ID NO: 83215 - DNA, 1528 bp, Glycine max
  CDS (72)..(1142)
tacggctgctattcttcccttggagtggatagccttcaagcttgttcttccgatcccctgaaaacaaaaccatgatgagaaggcactcccttgtgactgcatcaccaaaacaagtgtccctcttctttgttggccacaaaagcaacccaacaacaattcatcctcacactcacacccttctgactccatcacccaaacaagacccacaaaaccataatcagtggtggggccaccccaaaaccatcaaacccagtttcaatcacagtaggatcaggttcaacaccttgcacactggttccaccgaagaacaagttgaaacgggtgaggttgaagtcgatgtgtggacgaagatgcaggaagaagctaaactcgatgtcaccgaggaacccattttgtctaattactacaacacttccattctctctcacaagacacttgaaaccgcgttggccaatcaccttgcaatcaacctcagcagcacaagccttccaagcagcacactttctgatctttttgtgacggttttggagaccgaccaagccatcatggatgctgtgaagtgtgacctgagagcggtgaaggagagagaccctgcttgcataagccacgtgcactgcttcttgaatttcaaaggctttctggcgtgccaggctcacagggtggctcacaagctgtggcttcagggaaggaagattcttgctgtgatgattcagaaccgggtttcggagattttcgcggtggatgttcatccaggggctaggattggaagtgggattttgctggatcatgcaactgggattgtggtgggagagactgctgtcatagggaacaatgtgtcaattctgcatagtgtcactttgggagggactggtaaggtttctggggataggcacccaaagattggtgatggggtgctgataggtgctggaacttgtatcttggggaatattaaggttggtgatggggctaagattggtgctggttctgtggttattaaggatgttcctccaaggactactgttgtggggaacccggctaagttggtaggagggaagaacaaccctgttaagttggataagattcctagcttcaccatggaccatacttcacatattgctgacttttatgattattgtgtttagactttagagtgtagtgtaatgtaataatcctcaagcatgctttggaattttgtgtttagcattttaggtgaagtgattttgatttttgattggggctgttttttttcatttgtgcttgtacaattgcaacaatgggatttgaacctaggacttcacgtagactactcaaatcccttaaccactaggccgactttggtggctaaaagggctgtttttgtttgtaagtaagacataattcatgttttcctgctgacaataataaaagccaaaatgaaagtaacggcctaacaggaccccttgattacatgatgatgtatttgtgtatgtatgattgtgttgctgtaaggtgctatgtatgaatttcgcttttagtgctttcattatct

SEQ ID NO: 83216 - protein, 356 aa, Glycine max
MMRRHSLVTASPKQVSLFFVGHKSNPTTIHPHTHTLLTPSPKQDPQNHNQWWGHPKTIKPSFNHSRIRFNTLHTGSTEEQVETGEVEVDVWTKMQEEAKLDVTEEPILSNYYNTSILSHKTLETALANHLAINLSSTSLPSSTLSDLFVTVLETDQAIMDAVKCDLRAVKERDPACISHVHCFLNFKGFLACQAHRVAHKLWLQGRKILAVMIQNRVSEIFAVDVHPGARIGSGILLDHATGIVVGETAVIGNNVSILHSVTLGGTGKVSGDRHPKIGDGVLIGAGTCILGNIKVGDGAKIGAGSVVIKDVPPRTTVVGNPAKLVGGKNNPVKLDKIPSFTMDHTSHIADFYDYCV

SEQ ID NO: 83217 - DNA, 1293 bp, Sorghum bicolor
  CDS (116)..(1060)
cctcgaagtctgcgctgcgcgcgagccacaccgcccgcacaggcacaggagatcccatccccgcacacggcacaccccaccggccacacacgcaggcaccgacggcgactcgaggatgacggccggccagccgctgcgcaccgagccagcagcccagcccccgcgggtgtaccacagcaccccgcccccgcccccgccgccggcgctccaagcggacatcgtgccgtcgtacccgccccccgagtctgacggcgacgagtcctgggtctggtcccagatcaaggccgaggcgcggcgcgacgcggacgcggagccggcgctggcgtcgttcctctacgccacggtgctgtcgcacccgtccctggaccgctccctcgccttccacctcgccaacaagctctgctcctccacgctgctctccacgctgctctacgacctcttcgtcgccacgctcgcggcgcacccgtccctccgcgccgccgccgccgccgacctactcgcggcccggtcgcgcgaccccgcctgcgccggcttctcccactgcctcctcaactacaagggcttcctcgccatccaggcccaccgcgtcgcgcacgtgctgtgggcgcagcaccgccggccccttgcgctcgcgctccagtcccgcgtcgctgacgtcttcgctgtcgacatccaccccgccgccatcgtcgggaagggaatcctcctcgaccacgccacgggcgtcgtcatcggtgagacggccgtcgtcggcgacaacgtctccatcctccaccacgtcacgctgggcgggacgggcaaggcggtgggcgaccggcaccccaagatcggcgacggcgtgctcatcggcgccggcgcgaccatcctcggcaacgtcaggatcggcgccggcgccaaggtcggagctgggtccgtggtgctcatcgacgtgccgcccaggagcaccgccgtggggaaccccgccaggctgatcggcgggaagaagggggaggatgtcatgccaggggagtccatggaccacacctccttcatacagcagtggtcggactacatcatttgagcttcagccccgcaaccgcaaagctgcaaaagagcgagctcgtcttgctactgctattgcgtatcgtgtgtatgtgccgtttttagctgtaatttctttttgcagtgaggtgatcaggtgaaccgtgttggacatggtgtctagctcatctctggaacctgacatggagaaagatgtgctgaaagttcgctctgtaattttcgaagcagatgaacaatattctttttactctt

SEQ ID NO: 83218 - protein, 314 aa, Sorghum bicolor
MTAGQPLRTEPAAQPPRVYHSTPPPPPPPALQADIVPSYPPPESDGDESWVWSQIKAEARRDADAEPALASFLYATVLSHPSLDRSLAFHLANKLCSSTLLSTLLYDLFVATLAAHPSLRAAAAADLLAARSRDPACAGFSHCLLNYKGFLAIQAHRVAHVLWAQHRRPLALALQSRVADVFAVDIHPAAIVGKGILLDHATGVVIGETAVVGDNVSILHHVTLGGTGKAVGDRHPKIGDGVLIGAGATILGNVRIGAGAKVGAGSVVLIDVPPRSTAVGNPARLIGGKKGEDVMPGESMDHTSFIQQWSDYII

SEQ ID NO: 83219 - DNA, 1353 bp, Zea mays
  CDS (94)..(1026)
acgcctgcaccattggggccctcgacgctgtgcgagccacaccgcccgcacaccccaccggccggccacacaggccccgacagcgactcgaagatgacggccgggcagcttctgcgcaccgagccatcagcccagccccagcgggtgcgccacagcaccccgccggcggcactccaagcggacatcgtgccgtcgtacccgccgcccgagtcggacggtgacgagtcgtgggtctggtcccagatcaaggcggaggcgcggcgcgacgcggacgcggagccggcgctggcctccttcctctacgcgacggtgctgtcgcacgcgtccctggaccggtccctggccttccacctggccaacaagctgtgctcctccacgctgctgtcgacgctcctctacgacctcttcgtggcgtcgctcgcggagcacccgtccgtccgcgcggcggcggtggccgacctgatcgccgcgcggtcgcgggacccggcctgcgcgggcttcgcgcactgcctcctcaactacaaggggttcctggccgtgcaggcgcaccgcgtggcgcacgtgctgtgggcgcagggccggcgcgcgctggcgctggcgctccagtcccgcgtcgccgaggtcttcgccgtggacatccacccggccgccaccgtcggcaggggcatcctgctcgaccacgccacgggcgtcgtcgtcggggagacggccgtcgtgggcgacaacgtctccatactccaccacgtgacgctgggcggcaccggcaaggcggtgggcgaccggcaccccaagatcggggacggcgtgctcatcggcgccggcgcgaccgtcctcggaaacgtcaggatcggcgccggcgccaaggtcggcgccgggtccgtcgtgctcatcgacgtgccgcccaggagcaccgccgtggggaaccccgccaggctgatcggcgggaagaagggcgaggaggtgatgccgggggagtccatggaccacacctccttcatacagcagtggtcggactacatcatttgagcccgcaagctagaaaaaaaaagagctcgtcttgctactgttgttatactgctgttgcgttttctgtgtatgtgcgtggatgtgttagctgtatgctcttgttccagtgaggtgaaccgtggacatgctggtgtggtgtccagaaagatatgctcaaagttcgctctgtaattttcgaagcagatgaactgtgttactactttttactctagtaaaaactgtttctttggctcaaaaaaaaaaaaaaaaaaaaaaaaaaaaaaaaaaaaaaaaaaaaaaaaaaaaaaaaaaaaaaaaaaaaaaaaaaaaaaaaaaaaaaaaaaaaaa

SEQ ID NO: 83220 - protein, 310 aa, Zea mays
MTAGQLLRTEPSAQPQRVRHSTPPAALQADIVPSYPPPESDGDESWVWSQIKAEARRDADAEPALASFLYATVLSHASLDRSLAFHLANKLCSSTLLSTLLYDLFVASLAEHPSVRAAAVADLIAARSRDPACAGFAHCLLNYKGFLAVQAHRVAHVLWAQGRRALALALQSRVAEVFAVDIHPAATVGRGILLDHATGVVVGETAVVGDNVSILHHVTLGGTGKAVGDRHPKIGDGVLIGAGATVLGNVRIGAGAKVGAGSVVLIDVPPRSTAVGNPARLIGGKKGEEVMPGESMDHTSFIQQWSDYII

SEQ ID NO: 83221 - DNA, 1348 bp, Zea mays
  CDS (90)..(1061)
gcggctcgcaagtggcctgcgttcctcttccacgctccgcccacccgtcccggggcccgccgcaacccgatccctccccgcgcccaacgatgccggccggccagccgcacgcgcacgaagccgctgccgccgcctgcgtcggcagcggcgcgaaccactccaaccaccgagtgccggcgcactcgccaccgccgctccccgcggaggtggtgccggcgtacccgcccccggagtcggaggacgacgagacctgggtgtggacgcagatcaaggcggaggcccgccgcgacgcggacgcggagccggcgctcgcctccttcctctacgccaccgtgttgtcccacccgtccctgccccgctccctctccttccacctcgccaacaagctctgctcctccacgctcctctccacgctcctctacgacctcttcctcgccacgctcaccgcgcacccctctctccgcgccgccgtcgtcgccgacctcctcgcggcccactcccgcgaccccgcctgcgtcggcttctcccactgcctcctcaactacaagggcttcctcgccatccaggcccaccgcgtcgcgcacgtgctctgggcgcagcagcgacggcccctcgcgctcgcgctccagtcccgcgtcgccgacgtcttcgccgttgacatccaccccgccgccgtcgtcgggaagggaatcctcctcgaccacgccaccggcgtcgtcatcggtgagacggccgtcgtcggcgacaacgtctccatcctccaccacgtcaccttgggcgggaccgggaaggcggtgggtgaccggcaccccaagattggggatggcgtgctgattggagcaggggccaccattcttggtaacgtgaaaattggtgccggggctaagattggagccggatccgtggtgctgatagatgtgccggcgaggagcacggcggttgggaaccctgccaggctgattggtgggaagaaggccgagggtgcgaatgacgaggacatgccaggggagtccatggatcacacgtccttcatacgtcaatggtcggactacaccatttgagagcggttatccaaggtctattgctcttcttttgtatcactagtaatggtgatgtaccaaataccgagtacttgctctttgttgtgtgctatggtttgtgtattgtacttagaagcctagtggtgtttatgatcattgtcagctgagtgtgccatgcccgaatactggtaaatttcgattgatggatggacaaatctgtattctaacattccttatgaaacaaattctgaggacagaatgaagcatgtaaagcgattatctcgaaaaaaaaaaaaaaaaagccccta

SEQ ID NO: 83222 - protein, 323 aa, Zea mays
MPAGQPHAHEAAAAACVGSGANHSNHRVPAHSPPPLPAEVVPAYPPPESEDDETWVWTQIKAEARRDADAEPALASFLYATVLSHPSLPRSLSFHLANKLCSSTLLSTLLYDLFLATLTAHPSLRAAVVADLLAAHSRDPACVGFSHCLLNYKGFLAIQAHRVAHVLWAQQRRPLALALQSRVADVFAVDIHPAAVVGKGILLDHATGVVIGETAVVGDNVSILHHVTLGGTGKAVGDRHPKIGDGVLIGAGATILGNVKIGAGAKIGAGSVVLIDVPARSTAVGNPARLIGGKKAEGANDEDMPGESMDHTSFIRQWSDYTI

SEQ ID NO: 83223 - DNA, 1131 bp, Glycine max
  CDS (37)..(897)
gcacgagctgaaccacacaaacatcaccaccgaacaatgccgacggggttaccggcggcgaattccttagtggcgccggacgaagaggggtgggtgtgggggcagatcaaggcggaggcgcgccgcgacgccgagtcggagcctgctttggcgagctacctctactcgacgatcctctcgcactcgtcgctcgagcgttctctgtcttttcacctcggaaataagctctgttcctccacgcttctctcgacgctcctttacgacctgttcctcaacgccttctcctccgacccctccctccgctccgccgccgtcgccgatctccgcgctgcccgcgaacgcgaccccgcctgcgtctcctactcccactgcctcctcaattacaaaggcttcctcgcttgccaggcgcaccgtgtggcgcatctgttgtggcggcaatcacggcggccattggctttagcgctgcactctcgcatcgcagatgtgtttgcggtggacattcacccgccggcaaggattgggaaggggattttgttcgaccatgccactggggttgttgttagggagacagcgtcaatcgggaacaatgtgtcgatcctgcaccatgttactctgggtgggactggcaaggttggtggagaccggcatcctaagattggggatggggtgcttattggtgctggtgctaccattctggggaatattaagattggggaaggtgcaaaggttggtgctggttcggtggttttaattgatgtgccaccacggacaacagcagttgggaacccggcgaggttggttggtgggaaggagaagccctctaagcatgaggatgtgcctggggagtctatggaccatacttcctttatctctgagtggtcagattatatcatttgaatttctaaggttaatcaattaatgaatgaatacttcaaatcaaatgctatgtgttctgctgttctagagttttgtaattttatatttggattgagattttgtagagaccacactctgcttaattatactgtattatgactggaaattttggcagcctgcaatatagtgacatattgtgcaacagattatataaagctggttttgttggttaaaaaaaaaaaaaaaaaaaaaaaa

SEQ ID NO: 83224 - protein, 286 aa, Glycine max
MPTGLPAANSLVAPDEEGWVWGQIKAEARRDAESEPALASYLYSTILSHSSLERSLSFHLGNKLCSSTLLSTLLYDLFLNAFSSDPSLRSAAVADLRAARERDPACVSYSHCLLNYKGFLACQAHRVAHLLWRQSRRPLALALHSRIADVFAVDIHPPARIGKGILFDHATGVVVRETASIGNNVSILHHVTLGGTGKVGGDRHPKIGDGVLIGAGATILGNIKIGEGAKVGAGSVVLIDVPPRTTAVGNPARLVGGKEKPSKHEDVPGESMDHTSFISEWSDYII

SEQ ID NO: 83225 - DNA, 1294 bp, Triticum aestivum
  CDS (57)..(1010)
gcccacacacccacccaccagcagcaatccatccatccctcgcagctccggcggcgatgccggcgggccagcagccaccggcgcgcgagcccgacggcggcgactccaaccaccacccccacccgccgccccccacgcccgcgctcccgtccgaggtggtgccggcctacccgccgccggagtcggaggacgacgagtcctgggtgtggacgcagatcaaggcggaggcccggcgcgacgccgacgccgagccggcgctcgcctccttcctctacgccacggtgctctcccacccctccctgccccgctccctctccttccacctcgccaacaagctctgctcctccaccctcctctccacgctcctctacgacctcttcctcgcctccctcaccgcgcacccctccctccgcgccgccgtcgtcgccgacctcctcgccgcgcgcgcccgcgaccccgcctgcgtcggattctcccactgcctcctcaactacaagggcttcctcgccatccaggcgcaccgcgtcgcgcacgtgctctgggcgcagaaccgccgcccgctcgcgctcgccctccagtcccgcgtcgccgacgtcttcgccgtcgacatccaccccgccgccgtcgtcggcaaggccatcctcctcgaccacgccaccggcgtcgtcatcggggagaccgccgtcgtcggtgacaacgtctccatcctccaccacgtcaccctgggtgggactggcaaggcggtcggcgaccgccaccccaagattggggacggcgtgctcataggtgccggcgccacaatcctcggcaacgtcatgattggagccggggccaagattggggctggctccgtggtgctgatagatgtgccggcgcggagcacggcggtggggaaccctgccaggctcatcggagggaggaagggcgagtccgacaaggacgaggacatgcccggagagtccatggatcacacctccttcatacggcagtggtccgactacaccatctgagagagccattgtccaaggtctattactcatcctctgtatcagtaaccgtgttgtgctaccaaatacgtagtgattttgttttggtattgttcgcttgtggatgaacatcaactgtagtctaatgtcaagtgtgtatggccaattgtttcttcagctgagcgaccatgctcggatactgatagtggatgattgatcaatgaataattttgtgatctacaatggatttggttgtattttcaatcatttgctggattaaaaaaaaaaaaaaaaaaaaaaaaaaaaaa

SEQ ID NO: 83226 - protein, 317 aa, Triticum aestivum
MPAGQQPPAREPDGGDSNHHPHPPPPTPALPSEVVPAYPPPESEDDESWVWTQIKAEARRDADAEPALASFLYATVLSHPSLPRSLSFHLANKLCSSTLLSTLLYDLFLASLTAHPSLRAAVVADLLAARARDPACVGFSHCLLNYKGFLAIQAHRVAHVLWAQNRRPLALALQSRVADVFAVDIHPAAVVGKAILLDHATGVVIGETAVVGDNVSILHHVTLGGTGKAVGDRHPKIGDGVLIGAGATILGNVMIGAGAKIGAGSVVLIDVPARSTAVGNPARLIGGRKGESDKDEDMPGESMDHTSFIRQWSDYTI

SEQ ID NO: 83227 - DNA, 1048 bp, Arabidopsis thaliana
  CDS (31)..(1041)
gagagaggatcccctcctcctcctcctcctatggctgcgtgcatcgacacctgccgcactggtaaaccccagatttctcctcgcgattcttctaaacaccacgacgatgaatctggctttcgttacatgaactacttccgttatcctgatcgatcttccttcaatggaacccagaccaaaaccctccatactcgtcctttgcttgaagatctcgatcgcgacgctgaagtcgatgatgtttgggccaaaatccgagaagaggctaaatctgatatcgccaaagaacctattgtttccgcttattatcacgcttcgattgtttctcagcgttcgttggaagctgcgttggcgaatactttatctgttaaactcagcaatttgaatcttccaagcaacacgcttttcgatttgttctctggtgttcttcaaggaaacccagatattgttgaatctgtcaagctagatcttttagctgttaaggagagagatcctgcttgtataagctacgttcattgtttccttcactttaaaggcttcctcgcttgtcaagcgcatcgtattgctcatgagctttggactcaggacagaaaaatcctagctttgttgatccagaacagagtctctgaagccttcgctgttgatttccaccctggagctaaaatcggtaccgggattttgctagaccatgctacggctattgtgatcggtgagacggcggttgtggggaacaatgtttcgattctccataacgttacgcttggaggaacggggaaacagtgtggagataggcacccgaagattggcgatggggttttgattggagctgggacttgtattttggggaatatcacgattggtgaaggagctaagattggtgcggggtcggtggtgttgaaagacgtgccgccgcgtacgacggctgttggaaatccggcgaggttgcttggtggtaaagataatccgaaaacgcatgacaagattcctggtttgactatggaccagacgtcgcatatatccgagtggtcggattatgtaatttgaaaaagtc

SEQ ID NO: 83228 - protein, 336 aa, Arabidopsis thaliana
MAACIDTCRTGKPQISPRDSSKHHDDESGFRYMNYFRYPDRSSFNGTQTKTLHTRPLLEDLDRDAEVDDVWAKIREEAKSDIAKEPIVSAYYHASIVSQRSLEAALANTLSVKLSNLNLPSNTLFDLFSGVLQGNPDIVESVKLDLLAVKERDPACISYVHCFLHFKGFLACQAHRIAHELWTQDRKILALLIQNRVSEAFAVDFHPGAKIGTGILLDHATAIVIGETAVVGNNVSILHNVTLGGTGKQCGDRHPKIGDGVLIGAGTCILGNITIGEGAKIGAGSVVLKDVPPRTTAVGNPARLLGGKDNPKTHDKIPGLTMDQTSHISEWSDYVI

SEQ ID NO: 83229 - DNA, 927 bp, Zea mays
  CDS (1)..(927)
atgacggccgggcagcttctgcgcaccgagccatcagcccagccccagcgggtgcgccacagcaccccgccggcggcactccaagcagacatcgtgccgtcgtacccgccgcccgagtcggacggtgacgagtcgtgggtctggtcccagatcaaggcggaggcgcggcgcgacgcggacgcggagccggcgctggcctccttcctctacgcgacggtgctgtcgcacgcgtccctggaccggtccctggccttccacctggccaacaagctgtgctcctccacgctgctgtcgacgctctctaacgacctcttcgtggcgtcgctcgcggagcacccgtcgtccgcgcggcggcggtggcgacctgatcgccgcgcggtcgcgggacccggctgcgcgggcttcgcgcactgcctcctcaactacaaggggttcctggccgtgcaggcgcaccgcgtggcgcacgtgctgtgggcgcagggccggcgcgcgctggcgctggcgctccagtcccgcgtcgccgaggtcttcgccgtggacatccacccggccgccaccgtcggcaggggcatcctgctcgaccacgccacgggcgtcgtcgtcggggagacggccgtcgtgggcgacaacgtctccatactccaccacgtgacgttggcggcaccggcaaggcgttggcgaccggcaccccaagatcgggacggcgtgctcatcggcgccggcgcgaccgtcctcggaaacgtcaggatcggcgccggcgccaaggtcggcgccgggtccgtcgtgctcatcgacgtgccgcccaggagcaccgccgtggggaaccccgccaggctgatcggcgggaagaagggcgaggaggtgatgccgggggagtccatggaccacacctccttcatacagcagtggtcggactacatcatttga

SEQ ID NO: 83230 - protein, 308 aa, Zea mays
MTAGQLLRTEPSAQPQRVRHSTPPAALQADIVPSYPPPESDGDESWVWSQIKAEARRDADAEPALASFLYATVLSHASLDRSLAFHLANKLCSSTLLSTLSNDLFVASLAEHPSSARRRWRPDRRAVAGPGCAGFAHCLLNYKGFLAVQAHRVAHVLWAQGRRALALALQSRVAEVFAVDIHPAATVGRGILLDHATGVVVGETAVVGDNVSILHHVTLAAPARRWRPAPQDRDGVLIGAGATVLGNVRIGAGAKVGAGSVVLIDVPPRSTAVGNPARLIGGKKGEEVMPGESMDHTSFIQQWSDYII

SEQ ID NO: 83231 - DNA, 822 bp, Erwinia chrysanthemi
  CDS (1)..(822): transl_table=11
atgtcgaatgatgagctggaactggtttggaaaaacattaaggaagaggcgcgcagtctggcggaatgcgaaccgatgctggccagtttctttcacgcgacgctgctgaaacatgagaatctgggcagcgcattgagctacatgctggcgaataagctggctaacgccatcatgccggcgattgccatccgtgaagtggtggaagaggcctaccgcgccgaaccgcagatgattgcgtccgctgcccgcgacattctggcggtgcgtttgcgcgatccggcggtggataaatactcgacgccgctgctctacctgaaaggatttcatgctctgcaggcttaccgtatcggccactggctgtggcggcaggagcggcaggcgctggcgatttacctgcaaaaccagatttccgtgtcatttggggtggatatccacccggcggcgcgcatcggttgcggcatcatgctggaccatgccaccggtatcgtaatcggtgaaaccgccgtggtggaaaacgacgtttccattctgcaatcggtcaccctgggggggaccggcaagaccaacggcgaccgccatcccaagattcgggaaggggtgatgatcggcgctggcgccaagattctcggcaatatcgaagtgggctgcggcgccaagattggcgcgggttcggtggtgttgcagccggtgccgccgcataccactgccgctggcgtgccggcgcgaattgttggccgcccggaaagcgataaaccctcgctggatatggatcagtacttcaacggttcgttgcgcggtttcgaagacggcgacggcatctga

SEQ ID NO: 83232 - protein, 273 aa, Erwinia chrysanthemi
MSNDELELVWKNIKEEARSLAECEPMLASFFHATLLKHENLGSALSYMLANKLANAIMPAIAIREVVEEAYRAEPQMIASAARDILAVRLRDPAVDKYSTPLLYLKGFHALQAYRIGHWLWRQERQALAIYLQNQISVSFGVDIHPAARIGCGIMLDHATGIVIGETAVVENDVSILQSVTLGGTGKTNGDRHPKIREGVMIGAGAKILGNIEVGCGAKIGAGSVVLQPVPPHTTAAGVPARIVGRPESDKPSLDMDQYFNGSLRGFEDGDGI

SEQ ID NO: 83233 - DNA, 912 bp, Oryza sativa (japonica cultivar-group)
  CDS (1)..(912)
atgactgcgggccagcctctccgggacgatccccagccacgccggcacagcccgccggcgctccacccggccgtcgtgccggcgtacccgcccccggagtcggacgccgacgagtcgtgggtctggtcccagatcaaggccgaggcgcgccgcgacgccgacgccgagccggcgctcgcgtcgttcctctacgccaccgtgctctcccacccctccctcgaccgctcgctcgccttccacctcgccaacaagctctgctcctccacgctgctctccacgctcctctacgacctcttcgtcgcctccctcgccgcgcaccccaccctccgcgccgccgtcgtcgccgacctcctcgccgcgcgctccagggaccccgcctgcgtcggcttctcccactgcctcctcaactacaagggcttcctcgccatccaggcccagcgcgtcgcgcacgtgctctgggcgcaggaccgccgcgccctcgcgctcgcgctccagtcccgcgtcgccgaggtgttcgccgtcgacatccaccccgccgccgcgatcggcaagggcgtcctcctcgaccacgccacgggcgtcgtcatcggagagaccgccgtcatcggcgacaacgtctccatcctccaccacgtcacgctgggcgggacaggcaaggccgtgggcgaccggcaccccaagatcggcgacggcgtcctcattggcgccggcgcgacgatcctcggcaatgtcaggatcggcgccggggccaagatcggggccgggtcgctggtgctcatcgacgtgccgccgaggaccacggcggtggggaatccggcgaggctgctcggcgggaagaagggcgacgacatgccgggtgaatccatggaccacacctccttcatccagcaatggtcggactacagcatctga

SEQ ID NO: 83234 - protein, 303 aa, Oryza sativa (japonica cultivar-group)
MTAGQPLRDDPQPRRHSPPALHPAVVPAYPPPESDADESWVWSQIKAEARRDADAEPALASFLYATVLSHPSLDRSLAFHLANKLCSSTLLSTLLYDLFVASLAAHPTLRAAVVADLLAARSRDPACVGFSHCLLNYKGFLAIQAQRVAHVLWAQDRRALALALQSRVAEVFAVDIHPAAAIGKGVLLDHATGVVIGETAVIGDNVSILHHVTLGGTGKAVGDRHPKIGDGVLIGAGATILGNVRIGAGAKIGAGSLVLIDVPPRTTAVGNPARLLGGKKGDDMPGESMDHTSFIQQWSDYSI

SEQ ID NO: 83235 - DNA, 897 bp, Oryza sativa (japonica cultivar-group)
  CDS (1)..(897)
atgaccaccgcccagccactccagcacgagcatgacccgtccccgccggagccggacgccgacgccgacgacgaggaggaggagtcgcgggtgtggtcccagatcaaggccgaggcgcgccgcgacgccgacggcgagccggcgctggcgtcgttcgtgtacgccaccgtgctctcccaccccaccctcgccggctccctcgccttccacctcgccaacaagctcgcctcctcctccacgctgctctcctccacgctcctctacgacctcttcgccgccgcccacgccgcgcgccccgacctccgcgccgccgccgccgccgacctcctagccgcgggcgcccgcgacccggcctgcgcgggccgcctctcccactgcctcctcgactacaagggcttcctcgccgtccaggcccaccgcgtcgcgcacgcgctctgggcgcagggccgccgcgccctggcgctcgcgctccagtcccgcgtcgccgaggtcttcgccgtcgacatccacccggccgccgccgtggggagcggcgtcctcctggaccacgccaccggggtggtcatcggcgagaccgccgtcgtcggcgacggcgtgtccatcctccaccacgtcacgctgggcgggaccggcgaggccgtcggcgaccggcaccccaaggtcggcgacggcgtgctcatcggcgccggcgcgaccatcctcgggaacgtcaggatcggcgccggcgccaagatcggggccgggtcgctggtgctcgccgacgtgccgccgggggccacggcggtggggaacccggcgaggctgctgctcggcggggaccagcgcggcggcgcgccggccggtgaatccatggaccatgcctccttcatgctggagtggtcggattacaccatttga

SEQ ID NO: 83236 - protein, 298 aa, Oryza sativa (japonica cultivar-group)
MTTAQPLQHEHDPSPPEPDADADDEEEESRVWSQIKAEARRDADGEPALASFVYATVLSHPTLAGSLAFHLANKLASSSTLLSSTLLYDLFAAAHAARPDLRAAAAADLLAAGARDPACAGRLSHCLLDYKGFLAVQAHRVAHALWAQGRRALALALQSRVAEVFAVDIHPAAAVGSGVLLDHATGVVIGETAVVGDGVSILHHVTLGGTGEAVGDRHPKVGDGVLIGAGATILGNVRIGAGAKIGAGSLVLADVPPGATAVGNPARLLLGGDQRGGAPAGESMDHASFMLEWSDYTI

SEQ ID NO: 83237 - DNA, 1065 bp, Oryza sativa (japonica cultivar-group)
  CDS (1)..(1065)
atgacgtcgtgcgggtgcctggtgctcgagaaggtggaggaccacggcggcgaggcggcggggagggggagagggaggctcgcgcagggtggcggcggcggcggcggtggctgcggatcgtgcgcgggggagtggaggagccggtcggagaccatgttccccatctacgtgatggggagctcgcgggccagctccgccgcggcggcgcggggcatagtcgacgccgccggggaccccatatgggaggccgtcaagtcggaggccaagtctgaggcagagaaggaacctattttaagtagcttcttgtacgccagcgtactatctcatgactgtctcgagagggcgttgagtttcgtccttgcaaacaggctcgaagatccaacattgcttgcaactcagttaatagacattttcaatgatgttatgatgaacaacaaagatatacgccgttctattcgccttgatgctcaggcctttaaagacagagatcctgcctgtgcacaatacagttgggcattgttgtacctcaagggttaccattccgtgcaatcctataggatagctcatgtattatggaatcaaggtcgtaaagttctggcattggcactgcagagccgtatcagtgaggtttttgcagtggatatacacccagcggccagaattggagagggaatattgttggatcatggaacgggtctagttattggtgaaactgccattgttggaaactgggtttcattaatgcagggtgttacacttggtggtactggcaaggaaaatggagatagacaccccaagattggtcagggggctcttcttggagctggtgctactatcctcggcaacataaacgtaggcgaaggtgccatgattgctgctggttcccttgttttaaaggatgtacctccccacagtatggcagtaggaaaccctgcaaaggtagttgggtataaagataaggaagacccttctttaactatgaaacatgatgccagaagagattattttgagcatgttgccgttagtttttcagatgacaaagctaatggaagtgttgtgaagtaa

SEQ ID NO: 83238 - protein, 354 aa, Oryza sativa (japonica cultivar-group)
MTSCGCLVLEKVEDHGGEAAGRGRGRLAQGGGGGGGGCGSCAGEWRSRSETMFPIYVMGSSRASSAAAARGIVDAAGDPIWEAVKSEAKSEAEKEPILSSFLYASVLSHDCLERALSFVLANRLEDPTLLATQLIDIFNDVMMNNKDIRRSIRLDAQAFKDRDPACAQYSWALLYLKGYHSVQSYRIAHVLWNQGRKVLALALQSRISEVFAVDIHPAARIGEGILLDHGTGLVIGETAIVGNWVSLMQGVTLGGTGKENGDRHPKIGQGALLGAGATILGNINVGEGAMIAAGSLVLKDVPPHSMAVGNPAKVVGYKDKEDPSLTMKHDARRDYFEHVAVSFSDDKANGSVVK

SEQ ID NO: 83239 - DNA, 882 bp, Oryza sativa (japonica cultivar-group)
  CDS (1)..(882)
atggcagcctgcgtcgataagtggccggcggcgtacccgtgccgcctgccggataagttctactgcgccttgccggactgcaccaccacggaccgtccggtggcgccggcgccggcggctagcgggagcagcggcgactacgtgtgggacgcgctgcgcgccgaggcgcaggacgacgcggacgacgagccgctcctccgcaagttctaccacgacctcgtcctgtcgcggccgtcgctggagtccgcgctcgcctcgctgctggcggccaagctctgcatccccggcgcgctgccgcaggaccagctccgggacctcctcgccggcgcgctcgccgcgcacccggaggccgggcgcgccgcgcgcgccgacctcgccgcggcgcgcgaccgcgacccggcctgcgccaagatggtccactgcttcctctactacaggggcttcctggcactgcaggcccaccgcgcggcgcacgcgctctggtccgacaaccgcagggcgccggccctccttctccagagccgcgcctccgaggtgttcggcgtcgacatccaccccggggcgcgcattggcggcggcatcctgctcgaccacgccacgggcgtcgtcatcggcgagacggccgtcgtcggctacggcgtgtccatcctgcacgccgtgacgctgggcggcacggggaaggagtccggcgaccggcaccccaaggtcggggacggtgtgctgatcggcgccggggcgagcgtgctcggcaatgtgcacattggcgacggagcggagatcggagccggtgcaatcgtgctacgggacgtggcggacggaaccacggccaagccgatcatcggcaagaaggcggagccgcaacgagagcttcccggggaataa

SEQ ID NO: 83240 - protein, 293 aa, Oryza sativa (japonica cultivar-group)
MAACVDKWPAAYPCRLPDKFYCALPDCTTTDRPVAPAPAASGSSGDYVWDALRAEAQDDADDEPLLRKFYHDLVLSRPSLESALASLLAAKLCIPGALPQDQLRDLLAGALAAHPEAGRAARADLAAARDRDPACAKMVHCFLYYRGFLALQAHRAAHALWSDNRRAPALLLQSRASEVFGVDIHPGARIGGGILLDHATGVVIGETAVVGYGVSILHAVTLGGTGKESGDRHPKVGDGVLIGAGASVLGNVHIGDGAEIGAGAIVLRDVADGTTAKPIIGKKAEPQRELPGE

SEQ ID NO: 83241 - DNA, 1578 bp, Oryza sativa (japonica cultivar-group)
  CDS (1)..(1578)
atggcagcctgcgtcgacaagtggccgccggcggcgtacctgtgccgcctgccggagaagttctactgcgtcttgccggactgcaccgctacggaccgtccggtggtcaccgcatcggcggcgccggcgccggccgctagcgggagcagcggcgactacgtgtgggacgtgctgcgcgccgaggcgcaggacgacgcggacgacgagccgctcctccgcaagttctaccacgacctcgtcctgtcgcggccgtcgctggagtccgcgctcgcctcgctgctggcggccaagctctgcatccccggcgcgctgccgcaggaccagctccgggacctcctcgccggcgcgctcgccgcgcacccggaggccgggcgcgccgcgcgcgccgacctcgtcgcggcgcgcgaccgcgacccggcctgcgccaagatggtccactgcttcctctactacaagggcttcctggcactgcaggcccaccgcgcggcgcacgcgctctggtccgacaaccgcagggcgccggctctcctcctccagagccgcgcctccgaggtgttcggcgtcgacatccaccccggtgcgcgcattggctgcggcatcctgctcgaccacgccacgggcgtcgtcatcggcgagacggccgtcgtcggctacgacgtgtccatcctgcacggggtgacgctgggcggcacggggaaggagtccggcgaccggcaccccaaggtcggggacggtgtgctgatcggcgccggggcgagcgtgctcggcaatgtgcacattggcgacggagcgaagatcggagccggcgcagtcgtgctacgggacgtggcggacggaaccacggccgtcgggaacccagcgaagccgatcatcggcaagaaggcggcgccgcaacggcggccggaagagcttcccgggcaaaggccaaggtggtcgtcatggccaccaacctccaaccacggccaagccgctcctctagctcggccgtgcagcggcggcagcatcgagctcgacctgtgcgccatcgctggcatccagcgcggctcaaatctggtcgctgtcgatcccgtcgacggcatgcctcgacaggaggacggcgacgcggtcagagtcgttgacttgggcggggacgacgcggaggaggtggagacaggcggtggtgacctcgtcggtgagatagcgaggcgaaaggagctcccggccaccccctcgttggtggcggcaccgagacgtccgccgccagccaccgtcgcccatgccagattcgccgcaccgtcgccggatccacgcgtgtgggcgcggagcggcggccagatccgctcgggaagaaggcggtggagcctccgccccttgcgcccacccgcttggcctcccggccacctcctcattagcagcggcgccgcccgaggccgtcgagccggcgaagccccccgccgccgccgccgctccacggccgcgcccacatcctcaacgcgcgccacagccccgccgcccccacgacatgagaggagaaagaaggaagaagatggagaaggaaggagatggatggaaaacgtgacggtattggcacggttctaa

SEQ ID NO: 83242 - protein, 525 aa, Oryza sativa (japonica cultivar-group)
MAACVDKWPPAAYLCRLPEKFYCVLPDCTATDRPVVTASAAPAPAASGSSGDYVWDVLRAEAQDDADDEPLLRKFYHDLVLSRPSLESALASLLAAKLCIPGALPQDQLRDLLAGALAAHPEAGRAARADLVAARDRDPACAKMVHCFLYYKGFLALQAHRAAHALWSDNRRAPALLLQSRASEVFGVDIHPGARIGCGILLDHATGVVIGETAVVGYDVSILHGVTLGGTGKESGDRHPKVGDGVLIGAGASVLGNVHIGDGAKIGAGAVVLRDVADGTTAVGNPAKPIIGKKAAPQRRPEELPGQRPRWSSWPPTSNHGQAAPLARPCSGGSIELDLCAIAGIQRGSNLVAVDPVDGMPRQEDGDAVRVVDLGGDDAEEVETGGGDLVGEIARRKELPATPSLVAAPRRPPPATVAHARFAAPSPDPRVWARSGGQIRSGRRRWSLRPLRPPAWPPGHLLISSGAARGRRAGEAPRRRRRSTAAPTSSTRATAPPPPRHERRKKEEDGEGRRWMENVTVLARF

SEQ ID NO: 83243 - DNA, 945 bp, Oryza sativa (japonica cultivar-group)
  CDS (1)..(945)
atgccggccggccagccgcacgcgcacgagcccgacggcggcggcgcgagccaccgccggccccagtcgccgccgtcgctccccgcggaggtggtcccggcgttcgcgccgccggagtcggaggacgaggagtcctgggtctggtcccagatcaaggccgaggcgcgccgcgacgccgacgccgagccggcgctcgcgtccttcctctacgccaccgtgctctcccacccctccctcccgcgctccatctccttccacctcgccaacaagctctgctcctccaccctcctctccacgctcctctacgacctcttcctggcttccttcaccgcgcacccctccctccgcgccgccgtcgtcgccgacctcctcgccgcccgctcccgcgacccggcctgcgtcggcttctcccagtgcctcctcaacttcaagggcttcctcgccatccaggcgcaccgcgtgtcgcacgtcctctgggcgcagcagcgacgcccccttgccctcgccctccagtcccgcgtcgccgacgtcttcgccgtcgacatccaccccgcggccgtcgtcggcaagggcatcctcctcgaccacgccaccggcgtcgtcatcggcgagaccgccgtcgtcggcgacaacgtctccatcctccaccacgttacactgggtggcacaggcaaggctgtcggtgaccggcaccccaagattggggatggtgttctgattggcgccggggcgacgattcttggcaacgtcaagattggagccggggccaagattggtgccgggtcagtggtgctgatagatgtgccggcgaggaacacggcggtggggaatccagccaggttgattggcaggaagaacggtgaggttgagaaggatgaggacatgcccggggaatccatggatcacacatccttcattcgacagtggtcggactacaccatttga

SEQ ID NO: 83244 - protein, 314 aa, Oryza sativa (japonica cultivar-group)
MPAGQPHAHEPDGGGASHRRPQSPPSLPAEVVPAFAPPESEDEESWVWSQIKAEARRDADAEPALASFLYATVLSHPSLPRSISFHLANKLCSSTLLSTLLYDLFLASFTAHPSLRAAVVADLLAARSRDPACVGFSQCLLNFKGFLAIQAHRVSHVLWAQQRRPLALALQSRVADVFAVDIHPAAVVGKGILLDHATGVVIGETAVVGDNVSILHHVTLGGTGKAVGDRHPKIGDGVLIGAGATILGNVKIGAGAKIGAGSVVLIDVPARNTAVGNPARLIGRKNGEVEKDEDMPGESMDHTSFIRQWSDYTI

SEQ ID NO: 83245 - DNA, 816 bp, Mesorhizobium loti MAFF303099
  CDS (1)..(816): transl_table=11
ttgcagccggtcgatccgatctggcgttcgatccgcgacgaagcgatggacgcggtcaaccgcgaccccctgctggccgctttcctctattcgacgatcctcaaccaggagagcctggaagaggccgtcatccaccggatcgccgagcggcttgcccatcaggatatcggctccgatctgatccgccagaccttcaagaccatgctggccgacgacaaggaatggccgaccactgtgcgtgtcgacatccaggcctattacgaccgcgacccggcttgcgaccgtttcatcatgccggtgctctatttcaagggctttcacgccatccagacccacaggctggcgcattggctgtggaatcagggccgcaaggatttcgcgctctatctgcaaagccgctcgtcctcggtcttccagaccgacatcaacccggccgcgcggatcggcaagggcatcttcatcgaccacgccaccggcctcgtcgtcggcgagaccgcggtcatcgaggacgatgtgtcgatcctgcatggcgtgacgctgggcggcaccggcaaggctggcggcgaccgccatcccaagatccgccgtggcgtgctgatcggcgccggcgccaagattctcggcaatatcgagattggccattgctccaaggtcgccgccgggtcggtggtgctgtcgcccgtgccgcacaacaagactgtggccggcgtgccggcccgcgtggtcggtgagaccggctgcgaccagccttcgcgccagatggaccagctcctgccgtcgcagtcgatggaccaggtggtcagcttcgatatctga

SEQ ID NO: 83246 - protein, 271 aa, Mesorhizobium loti MAFF303099
MQPVDPIWRSIRDEAMDAVNRDPLLAAFLYSTILNQESLEEAVIHRIAERLAHQDIGSDLIRQTFKTMLADDKEWPTTVRVDIQAYYDRDPACDRFIMPVLYFKGFHAIQTHRLAHWLWNQGRKDFALYLQSRSSSVFQTDINPAARIGKGIFIDHATGLVVGETAVIEDDVSILHGVTLGGTGKAGGDRHPKIRRGVLIGAGAKILGNIEIGHCSKVAAGSVVLSPVPHNKTVAGVPARVVGETGCDQPSRQMDQLLPSQSMDQVVSFDI

SEQ ID NO: 83247 - DNA, 1176 bp, Arabidopsis thaliana
  CDS (1)..(1176)
atgttgccggtcacaagtcgccgccacttcacaatgtccctatatatgctccgttcatcttctccacacatcaatcatcactctttccttcttccttcttttgtttcctccaaattcaaacaccatactttatctcctcctccttctcctcctcctcctcctcctatggctgcgtgcatcgacacctgccgcactggtaaaccccagatttctcctcgcgattcttctaaacaccacgacgatgaatctggctttcgttacatgaactacttccgttatcctgatcgatcttccttcaatggaacccagaccaaaaccctccatactcgtcctttgcttgaagatctcgatcgcgacgctgaagtcgatgatgtttgggccaaaatccgagaagaggctaaatctgatatcgccaaagaacctattgtttccgcttattatcacgcttcgattgtttctcagcgttcgttggaagctgcgttggcgaatactttatctgttaaactcagcaatttgaatcttccaagcaacacgcttttcgatttgttctctggtgttcttcaaggaaacccagatattgttgaatctgtcaagctagatcttttagctgttaaggagagagatcctgcttgtataagctacgttcattgtttccttcactttaaaggcttcctcgcttgtcaagcgcatcgtattgctcatgagctttggactcaggacagaaaaatcctagctttgttgatccagaacagagtctctgaagccttcgctgttgatttccaccctggagctaaaatcggtaccgggattttgctagaccatgctacggctattgtgatcggtgagacggcggttgtggggaacaatgtttcgattctccataacgttacgcttggaggaacggggaaacagtgtggagataggcacccgaagattggcgatggggttttgattggagctgggacttgtattttggggaatatcacgattggtgaaggagctaagattggtgcggggtcggtggtgttgaaagacgtgccgccgcgtacgacggctgttggaaatccggcgaggttgcttggtggtaaagataatccgaaaacgcatgacaagattcctggtttgactatggaccagacgtcgcatatatccgagtggtcggattatgtaatttga

SEQ ID NO: 83248 - protein, 391 aa, Arabidopsis thaliana
MLPVTSRRHFTMSLYMLRSSSPHINHHSFLLPSFVSSKFKHHTLSPPPSPPPPPPMAACIDTCRTGKPQISPRDSSKHHDDESGFRYMNYFRYPDRSSFNGTQTKTLHTRPLLEDLDRDAEVDDVWAKIREEAKSDIAKEPIVSAYYHASIVSQRSLEAALANTLSVKLSNLNLPSNTLFDLFSGVLQGNPDIVESVKLDLLAVKERDPACISYVHCFLHFKGFLACQAHRIAHELWTQDRKILALLIQNRVSEAFAVDFHPGAKIGTGILLDHATAIVIGETAVVGNNVSILHNVTLGGTGKQCGDRHPKIGDGVLIGAGTCILGNITIGEGAKIGAGSVVLKDVPPRTTAVGNPARLLGGKDNPKTHDKIPGLTMDQTSHISEWSDYVI

SEQ ID NO: 83249 - DNA, 795 bp, Pasteurella multocida subsp. multocida str. Pm70
  CDS (1)..(795): transl_table=11
atgccattagcggtttggactgacatccgtcaggaagcaaaaaccttagcagaaaatgagccaattttggccagtttttttcacgcaacgattttgaaacatcataatcttggtaatgcattaagctatattttagccaacaaattggcaaatacgattatgcccgccattgctttgcgagaaattattgaggaagcttatcaggcggatcctgacatcattgccagtgctgcctgtgatattcgtgcggtgcgtcaacgcgatcccgcggtggaattatattctacgccactgttatatttaaaaggttttcatgccttgcaaagttatcggattacccattatttatggcaacaagagcggaaagccttagctgtttatttacaaaaccaaatctcggtcgcctttgatgtggatatccatcctgcggctaaaattggttgtggcattatgtttgaccatgcgacaggcatcgtggtgggagaaacctcggtgattgaaaatgatgtgtcgattttacaaggcgtcaccttgggggggacgggtaaagagtgtggcgatcgtcatcctaaagtacgcgaaggtgtaatgattggtgctggggcgaaaatcttgggtaacattgaagtgggacgttatgccaaaattggggcaaactcggttgttttacaacctgtccctgaatataccaccgcagcgggggtaccggcacgtgtgattgctcgcgatcaagcggcgaaacccgcttttgatatgaaccaatattttaatgacgatcatgcctctaaggtgtaa

SEQ ID NO: 83250 - protein, 264 aa, Pasteurella multocida subsp. multocida str. Pm70
MPLAVWTDIRQEAKTLAENEPILASFFHATILKHHNLGNALSYILANKLANTIMPAIALREIIEEAYQADPDIIASAACDIRAVRQRDPAVELYSTPLLYLKGFHALQSYRITHYLWQQERKALAVYLQNQISVAFDVDIHPAAKIGCGIMFDHATGIVVGETSVIENDVSILQGVTLGGTGKECGDRHPKVREGVMIGAGAKILGNIEVGRYAKIGANSVVLQPVPEYTTAAGVPARVIARDQAAKPAFDMNQYFNDDHASKV

SEQ ID NO: 83251 - DNA, 828 bp, Sinorhizobium meliloti 1021
  CDS (1)..(828): transl_table=11
atggtcgccaagacagaacttcgtcatacggaatcgctcgaagcgatcgatccgatctgggatagcctgcgcgaggaggcgcgtctggcggccgagcgcgacccgatgctggcggcctttctctattcgacggtggtcaatcagcattccctggaagattgcgtcatctaccggatctgcgagaggctggaccatcccgacctacaggcgagcctcctgcaccagaccttcgccgaaatgctcgaggactggcccgaatggggcgccgtcctgcgcgtcgatatacaggcggtctacgaccgcgacccggcctgcacgcgcttcatggagcccgtgctttatttcaagggcttccatgccatacagacgcaccgtctggctcactggctgtggaaccgcggccggaaagactttgcgctctatctccagagccgctcctccagtgttttccaaaccgacatcaacccggccgcccgcatcgggcgcggcatcttcctcgatcatgcaacggggctcgtcgtcggcgaaaccgcggtcatcggcgacaacgtatctatcttgcatggcgtgacgcttggcggcaccggcaaggaaggcagcgaccgtcatccgaagatcggcaacggcgtgctgatcggcgccggcgcaaagattctcggcaacatccacatcggccactgctcgcgcgtggccgccggttccgtcgtgctgaaggcggtccctcccaaatcgacggttgccggggtgccggcgaaggtcgtcggcgaggccggctgttccgagccgtcgcgtcaaatggaccagatcctggcgtcgttcgatatctga

SEQ ID NO: 83252 - protein, 275 aa, Sinorhizobium meliloti 1021
MVAKTELRHTESLEAIDPIWDSLREEARLAAERDPMLAAFLYSTVVNQHSLEDCVIYRICERLDHPDLQASLLHQTFAEMLEDWPEWGAVLRVDIQAVYDRDPACTRFMEPVLYFKGFHAIQTHRLAHWLWNRGRKDFALYLQSRSSSVFQTDINPAARIGRGIFLDHATGLVVGETAVIGDNVSILHGVTLGGTGKEGSDRHPKIGNGVLIGAGAKILGNIHIGHCSRVAAGSVVLKAVPPKSTVAGVPAKVVGEAGCSEPSRQMDQILASFDI

SEQ ID NO: 83253 - DNA, 822 bp, Yersinia pestis CO92
  CDS (1)..(822): transl_table=11
atgtcgtcagaagagttagaacaggtctggagcaacataaaatcagaagcaagggcactggctgaatgtgaaccgatgctggctagcttttttcatgcaacactcttgaagcatgagaatttgggcagtgcgctgagttatattctcgcgaataagttggctaatcctatcatgccagcgattgctatccgtgaagtggttgaagaagcttatcgttcagatgcgcatatgatcgtttccgctgcccgcgatattctggccgtccggttacgcgatccagccgttgataaatactccacaccgttactgtatctcaaaggttttcatgctttgcaggcttatcgtattggccattggttgtgggcgcaggatcgtaaagcgctggcgatttatctgcaaaatcaagtctctgtcgcatttggtgtggatatccaccctgcggcaaccattggttgtggcatcatgctggaccacgctaccggtatcgttattggtgaaacggctgtggttgagaatgacgtgtctattctgcaatctgtcacgcttggggggacgggcaaaaccagtggcgaccgccatccaaaaatccgtgaaggtgtcatgattggcgcaggcgcgaaaattctcggcaatatcgaggtgggccgtggtgcgaagattggtgccggttcagttgtactacaatcggtacccgctcacacgacggctgccggtgtacctgcccgtatcgttggtaaaccagagagtgataaaccctcgttggatatggatcagcatttcaatggcagcattcagggctttgaatatggcgatggtatttaa

SEQ ID NO: 83254 - protein, 273 aa, Yersinia pestis CO92
MSSEELEQVWSNIKSEARALAECEPMLASFFHATLLKHENLGSALSYILANKLANPIMPAIAIREVVEEAYRSDAHMIVSAARDILAVRLRDPAVDKYSTPLLYLKGFHALQAYRIGHWLWAQDRKALAIYLQNQVSVAFGVDIHPAATIGCGIMLDHATGIVIGETAVVENDVSILQSVTLGGTGKTSGDRHPKIREGVMIGAGAKILGNIEVGRGAKIGAGSVVLQSVPAHTTAAGVPARIVGKPESDKPSLDMDQHFNGSIQGFEYGDGI

SEQ ID NO: 83255 - DNA, 840 bp, Caulobacter crescentus CB15
  CDS (1)..(840): transl_table=11
atgccgaagcatctcgaagtggtgacgtccgacaccgaaacgccggtgtgggtcgcgctgcgcaaccaggccgaacacgccgccaaggccgaaccggcgctggcgtcgctgctgaacgcggtgatcctcagccacgacaacctcgccgacgccctgacgttccagctggcccgaaagctgggcgaccaggaaatgcgggcgatgacggcgcgcgagttcgccgccgacgccttcgaggatgacctctcgatcgtcgaagccgccgaggccgacctcaaggccgtgttcgagcgcgatccggcctgcaagggctatgtccagccgttcctgttcttcaagggctttctggcgctgcagacccaccgcgtgtcgcactggctgtggaaccagggccgcgagaccctggccttctatctgcagagccgctctagcgaggtcttccaggtcgacatcaatcccgccgccaagatcggcaagggcgtgttcatcgaccacggcaccggcatcgtcatcggcgagacggcggtcgtcggcgacgacgtctcgatgctgcatggcgtgaccctgggcggcaccggcgccgagcgcggcgatcgccaccccaagatcggcaagggcgtgctgctgggcgcgggcgccaaggtgctgggtaacatcaccgtcggcgactacgccaaggtggcctcgggctcggtggtcctgcgacccgtgccggcccactgcacggcggccggcgtgcccgcgcgcctggtcaactgcccgacctgcgaagaacccgccaagaccatggaccacaccctggccgaagcggtgtattcgacctccagctacgagatctga

SEQ ID NO: 83256 - protein, 279 aa, Caulobacter crescentus CB15
MPKHLEVVTSDTETPVWVALRNQAEHAAKAEPALASLLNAVILSHDNLADALTFQLARKLGDQEMRAMTAREFAADAFEDDLSIVEAAEADLKAVFERDPACKGYVQPFLFFKGFLALQTHRVSHWLWNQGRETLAFYLQSRSSEVFQVDINPAAKIGKGVFIDHGTGIVIGETAVVGDDVSMLHGVTLGGTGAERGDRHPKIGKGVLLGAGAKVLGNITVGDYAKVASGSVVLRPVPAHCTAAGVPARLVNCPTCEEPAKTMDHTLAEAVYSTSSYEI

SEQ ID NO: 83257 - DNA, 816 bp, Ralstonia solanacearum GMI1000
  CDS (1)..(816): transl_table=11
gtgagccaagatcaattaccagagtggttcgagctgcgcggagcgcttgagcgaatggcatccgagggcacgcttttaaagagcgtggtggatcggtttctgaatcagcctcggtttgagggtgccttgtccattctgcttgccgatcaattggcgagtgcgcgggcaagcgcggcgcaactgttgccggtgatcgagcaggcctatcgggatcacgccgaactgagccgcctcgcggtgtcggacatgcgggcgaccatggagcgcgatcccgccacggattgcctgagcaccgtattcctcttctccaagggctttcatgcgctcgaggcgtatcgggtcgcgcaccattactggtgcgccgggcgtcagggcacggcgctgtcgctgtcgcacgcatgttcctgtttgctgggcgtcgacatccatccggccgcgaagatcggcgcggccgtgatgttcgaccacgccagcggaatcgtcatcggcgaaaccgccgaaatcggcgacgaagccacgctgcttcatggcgtcacgctcggcgggaacgggcggcatcgctgcgatcgtcatcccaagatcggcgccggcacgttcatcggcgcgcacgcatccatcatcggcaacatccggatcgggaaggattccatcatcggcgccggcgcggtggtcctggcggacgtgccggacaactcggtcgcggtcggtgtgccggcaaagggcaaggccagggagcgcaagcccgatgccgagttccagcccgtgcttgcggcggcgggcgtcgccggcagtcccagtcctgttttcctcggttga

SEQ ID NO: 83258 - protein, 271 aa, Ralstonia solanacearum GMI1000
MSQDQLPEWFELRGALERMASEGTLLKSVVDRFLNQPRFEGALSILLADQLASARASAAQLLPVIEQAYRDHAELSRLAVSDMRATMERDPATDCLSTVFLFSKGFHALEAYRVAHHYWCAGRQGTALSLSHACSCLLGVDIHPAAKIGAAVMFDHASGIVIGETAEIGDEATLLHGVTLGGNGRHRCDRHPKIGAGTFIGAHASIIGNIRIGKDSIIGAGAVVLADVPDNSVAVGVPAKGKARERKPDAEFQPVLAAAGVAGSPSPVFLG

SEQ ID NO: 83259 - DNA, 846 bp, Agrobacterium tumefaciens str. C58
  CDS (1)..(846): transl_table=11
atgcaaacgaggagaccattcatggtcgcacgtactgaggcccgtcagcctgaacagctggcgatcgttgatccgatctggggcagcctgctgaatgaggcccgaagcgctgcggcgcaggacccgctgctgtcagcctttctctattcgacgatcctcaatcaccgctctctcgaagaatgtgtgatctaccgtatctgcgagctccttgatcatcccgacatgcaggcagttcttctgcgccagaccttccaggacatgctggaggactggccggaatggggaagtgtgctgcgcgtcgatatccaggccgtttacgaccgcgaccccgcctgcacgcgcttcatggagccgctgctttatttcaaggggttccaagctatccagacgcatcgccttgcccactggctgctgcagaagggccgcaaggatttggcgctttatctgcaaagccgctcgtcgagcattttccagacggatatcaatccggccgcgcgcatcggcaagggcatcttcctcgaccatgccaccggactggtggttggtgagaccgccgttatcggcgacaacgtttcgatcctgcatggcgtgacgcttggcggcaccggcaaggagggggcagaccgccatccgaagatcgccaatggggtgatgatcggggcaggcgcaaagattctcggcaatatcgagattggcagctgctcgcgtattgccgccggatcggtggtgctgaaacccgttccgccgaagaccacggttgccggcgtgccggcgcgggtggtgggagaagcagggtgttcggaaccctcgcgtctgatggaccagctcatcggggccgatatctga

SEQ ID NO: 83260 - protein, 281 aa, Agrobacterium tumefaciens str. C58
MQTRRPFMVARTEARQPEQLAIVDPIWGSLLNEARSAAAQDPLLSAFLYSTILNHRSLEECVIYRICELLDHPDMQAVLLRQTFQDMLEDWPEWGSVLRVDIQAVYDRDPACTRFMEPLLYFKGFQAIQTHRLAHWLLQKGRKDLALYLQSRSSSIFQTDINPAARIGKGIFLDHATGLVVGETAVIGDNVSILHGVTLGGTGKEGADRHPKIANGVMIGAGAKILGNIEIGSCSRIAAGSVVLKPVPPKTTVAGVPARVVGEAGCSEPSRLMDQLIGADI

SEQ ID NO: 83261 - DNA, 891 bp, Brucella melitensis 16M
  CDS (1)..(891): transl_table=11
ttgcggtgcgactggcgaaaatttgacttttgccggacctgcacgatgcaaaactggagtatggatatgtccgttcgcatgtcttcaaaagtgaatgccggtctcgatcaggtcgatcccatctggcattccatccgtgccgaagcggaggaggcgaccaggaatgacccggttctgggcgcctttctctacgccacgattctcaaccagccgagccttgaagaagcggtgatgcatcgtatcgccgaacgccttggccatcccgatgtgagcgcggatatcctgcgccagaccttcgatacgatgcttgaggcaaacccggaatggtcgcacgtcctgcgtgtggatattcaggctgtttatgaccgcgatccggcctatagccgctttatggatccggttctttacctgaagggcttccatgcgatccagacacaccgtctggcgcactggctttacaagcaaggtcgcaaggatttcgcctattatcttcagagccgctcgtcatcgatctttcagaccgatattcacccggcggccaggcttggcagcgggctgtttctcgaccatgctacagggcttgtggtgggtgaaacggccgttgtagaagataatgtctcgatcctgcatggggttacgctgggcggaaccggcaaatcgagcggtgatcgccatccgaaaatccgtcagggcgtgctgattggggcaggcgcaaaaatcctcggcaacatccaggtagggcagtgctccaagatcgcggctggttccgttgtgctgaagtccgtgccgcataatgtaaccgtggcgggcgtgcctgcgcgcatcatcggcgaaacgggctgcacggagccatcccgcgtgatggaccagatgctgggtgacggcatctaa

SEQ ID NO: 83262 - protein, 296 aa, Brucella melitensis 16M
MRCDWRKFDFCRTCTMQNWSMDMSVRMSSKVNAGLDQVDPIWHSIRAEAEEATRNDPVLGAFLYATILNQPSLEEAVMHRIAERLGHPDVSADILRQTFDTMLEANPEWSHVLRVDIQAVYDRDPAYSRFMDPVLYLKGFHAIQTHRLAHWLYKQGRKDFAYYLQSRSSSIFQTDIHPAARLGSGLFLDHATGLVVGETAVVEDNVSILHGVTLGGTGKSSGDRHPKIRQGVLIGAGAKILGNIQVGQCSKIAAGSVVLKSVPHNVTVAGVPARIIGETGCTEPSRVMDQMLGDGI

SEQ ID NO: 83263 - DNA, 813 bp, Schizosaccharomyces pombe 972h-
  CDS (1)..(813)
atgactgtgcagacagcggagaggacaataacacttgtccaggctatctggccaaaactacgaaaagaggctgaaaagcaatgtgaagttaatccatggttagccaaagaccttgcgagaaaaatcttgagtaaaaaaactttgagggagtctttgagctgtgttttagctcttccacttgaccatgttactgggagttcagaatcaatggaaaactggttctacagtattctagggctcaatgatgaaaagataattcgatcggccatgatagacttggatagattgtatacgacgaatcctgcgtgcccggatctcattagtgcatttctctcatttcgaggatttcatgccttgcaattgtatcgcatagctcacggtctttggagcgaaggagataaaacatccgccgtgcttgttcaaaattggacggccgtggcatatggtgttgacatccatccggctgccagcattggagatggcttgtttcttgaccacgccttgggtatagtgattggtgagacagcgattgtagaggatggtgttagtatttggcacaatgtgacattgggaagcacatttaaggatagtggagctcgtcatcccgtcatacgcaagaatgctatgctttgcactggagccacagtgcttggtagagttgaagtaggtgagaatgctgttgtagcagcaggtgctttagtgacaaaagatgtagcacctaaccgacttgcccttggttctcctgcgcgcgatgtaggacctgtaccgcaatacttcggtgcccttacaaatccaaactgtacaaataaatag

SEQ ID NO: 83264 - protein, 270 aa, Schizosaccharomyces pombe 972h-
MTVQTAERTITLVQAIWPKLRKEAEKQCEVNPWLAKDLARKILSKKTLRESLSCVLALPLDHVTGSSESMENWFYSILGLNDEKIIRSAMIDLDRLYTTNPACPDLISAFLSFRGFHALQLYRIAHGLWSEGDKTSAVLVQNWTAVAYGVDIHPAASIGDGLFLDHALGIVIGETAIVEDGVSIWHNVTLGSTFKDSGARHPVIRKNAMLCTGATVLGRVEVGENAVVAAGALVTKDVAPNRLALGSPARDVGPVPQYFGALTNPNCTNK

SEQ ID NO: 83265 - DNA, 753 bp, Buchnera aphidicola str. Sg (Schizaphis graminum)
  CDS (1)..(753): transl_table=11
atgataaaacacaaagctcaaaaaatattaaaaaaagagccaattttatcaaatttttatcaaaaaagtatattaaatcataaaaaattaagtcattctttaagttgtatattatctgataaattatcaacatcaatgatatctgaaaaagatatatacaatatttttaataaaatatatgcaaataatatatctataattaattcggtagttaaagatataaaagcagcatcacaacgtgatccagttgtaaaacattatttaactcctcttttgtatttaaaaggtttccatgctttagaagcgtatagactaagtcattatctttggaatattaaaagatatgagttatctgcatacttacaaagtagaatatcgactgttttttcagtagacattcatcctgctgcttctattggttctggaattatgttagatcatgcaactggtattgttattggagaaggtgtaataatagaaaatgatgtatcgatttttcattccgtaactttaggtggaacaggtagtaataccggtaaaaataggcatcctataattagaaaaaacgtcactataggagctggagcaaaaatattaggtaatattgaagttggtcagggagtaaaagtaggtgctggatctatagttttaaaaaatattcctccatttgttacggttgtgggtgttcctgctaaaattataaaaaaaattaaaaatagtaataaaaatctttttcaaaaagaaaaaaaataa

SEQ ID NO: 83266 - protein, 250 aa, Buchnera aphidicola str. Sg (Schizaphis graminum)
MIKHKAQKILKKEPILSNFYQKSILNHKKLSHSLSCILSDKLSTSMISEKDIYNIFNKIYANNISIINSVVKDIKAASQRDPVVKHYLTPLLYLKGFHALEAYRLSHYLWNIKRYELSAYLQSRISTVFSVDIHPAASIGSGIMLDHATGIVIGEGVIIENDVSIFHSVTLGGTGSNTGKNRHPIIRKNVTIGAGAKILGNIEVGQGVKVGAGSIVLKNIPPFVTVVGVPAKIIKKIKNSNKNLFQKEKK

SEQ ID NO: 83267 - DNA, 822 bp, Chlorobium tepidum TLS
  CDS (1)..(822): transl_table=11
atgagtgtacaggatatctggtcattgattcgtgaagaagcgtgcctcgagtgcgagcgtgagccggagatccggctgtttctggaacagcacattttgcgatatgaggagttcgctccggcgctggcgatgctgctttcggtgaagcttgggtcgaagcactttccgccgccggtgcttgaaggaatcttcgaggatttttatcggcaaagccccgaatctgtccggtgcgcagcctgcgacatggaggctacccgtgagcgtgacccggcagcggtgaactatttcgagatcatgctttttctcaagggctaccaggcgcttcagtcttaccggctggctcactggctgtggcagaatgaccgcaaatcgctggcctatttcctccagaaccgcatgtcggaggttttcgcggtagatattcatcctgcggctaaaatcggcaagggcattctgcttgatcatgccacgagccttgtcatcggcgagaccgccgtggtagaggataatgtttcgcttctgcacgaggtgacgcttggtggcaccggcaaggattcgggtgaccggcatccgaaagtcggtaagtcggtgatgattggcgccggggccaagattctcggaaacatcaaaatcggagaaggtgcgaaggtcggggcgggcagcgtggtgctcgatgatgttccgccgcactacacggttgctggtgtgccagcacatatcgtggggcgcactgaagttcccgaaccctctctcgatatgaaccagcgcctcatttttccggaaaaacaaaagccgaaaggcgagcagcactcgtgcttataa

SEQ ID NO: 83268 - protein, 273 aa, Chlorobium tepidum TLS
MSVQDIWSLIREEACLECEREPEIRLFLEQHILRYEEFAPALAMLLSVKLGSKHFPPPVLEGIFEDFYRQSPESVRCAACDMEATRERDPAAVNYFEIMLFLKGYQALQSYRLAHWLWQNDRKSLAYFLQNRMSEVFAVDIHPAAKIGKGILLDHATSLVIGETAVVEDNVSLLHEVTLGGTGKDSGDRHPKVGKSVMIGAGAKILGNIKIGEGAKVGAGSVVLDDVPPHYTVAGVPAHIVGRTEVPEPSLDMNQRLIFPEKQKPKGEQHSCL

SEQ ID NO: 83269 - DNA, 825 bp, Yersinia pestis KIM
  CDS (1)..(825): transl_table=11
atgatgtcgtcagaagagttagaacaggtctggagcaacataaaatcagaagcaagggcactggctgaatgtgaaccgatgctggctagcttttttcatgcaacactcttgaagcatgagaatttgggcagtgcgctgagttatattctcgcgaataagttggctaatcctatcatgccagcgattgctatccgtgaagtggttgaagaagcttatcgttcagatgcgcatatgatcgtttccgctgcccgcgatattctggccgtccggttacgcgatccagccgttgataaatactccacaccgttactgtatctcaaaggttttcatgctttgcaggcttatcgtattggccattggttgtgggcgcaggatcgtaaagcgctggcgatttatctgcaaaatcaagtctctgtcgcatttggtgtggatatccaccctgcggcaaccattggttgtggcatcatgctggaccacgctaccggtatcgttattggtgaaacggctgtggttgagaatgacgtgtctattctgcaatctgtcacgcttggggggacgggcaaaaccagtggcgaccgccatccaaaaatccgtgaaggtgtcatgattggcgcaggcgcgaaaattctcggcaatatcgaggtgggccgtggtgcgaagattggtgccggttcagttgtactacaatcggtacccgctcacacgacggctgccggtgtacctgcccgtatcgttggtaaaccagagagtgataaaccctcgttggatatggatcagcatttcaatggcagcattcagggctttgaatatggcgatggtatttaa

SEQ ID NO: 83270 - protein, 274 aa, Yersinia pestis KIM
MMSSEELEQVWSNIKSEARALAECEPMLASFFHATLLKHENLGSALSYILANKLANPIMPAIAIREVVEEAYRSDAHMIVSAARDILAVRLRDPAVDKYSTPLLYLKGFHALQAYRIGHWLWAQDRKALAIYLQNQVSVAFGVDIHPAATIGCGIMLDHATGIVIGETAVVENDVSILQSVTLGGTGKTSGDRHPKIREGVMIGAGAKILGNIEVGRGAKIGAGSVVLQSVPAHTTAAGVPARIVGKPESDKPSLDMDQHFNGSIQGFEYGDGI

SEQ ID NO: 83271 - DNA, 801 bp, Brucella suis 1330
  CDS (1)..(801): transl_table=11
gtgaatgccggtctcgatcaggtcgatcccatctggcattccatccgtgccgaagcggaggaggcgaccaggaatgacccggttctgggcgcctttctctacgccacgattctcaaccagccgagccttgaagaagcggtgatgcatcgtatcgccgaacgccttggccatcccgatgtgagcgcggatatcctgcgccagaccttcgatacgatgcttgaggcaaacccggaatggtcgcacgtcctgcgtgtggatattcaggctgtttatgaccgcgatccggcctatagccgctttatggatccggttctttacctgaagggcttccatgcgatccaggcacaccgtctggcgcactggctttacaagcaaggtcgcaaggatttcgcctattatcttcagagccgctcgtcatcgatctttcagaccgatattcacccggcggccaggcttggcagcgggctgtttctcgaccatgctacagggcttgtggtgggtgaaacggccgttgtagaagataatgtctcgatcctgcatggggttacgctgggcggaaccggcaaatcgagcggtgatcgccatccgaaaatccgtcagggcgtgctgattggggcaggcgcaaaaatcctcggcaacatccaggtagggcagtgctccaagatcgcggctggttccgttgtgctgaagtccgtgccgcataatgtaaccgtggcgggcgtgcctgcgcgcatcatcggcgaaacgggctgcacggagccatcccgcgtgatggaccagatgctgggtgacggcatctaa

SEQ ID NO: 83272 - protein, 266 aa, Brucella suis 1330
MNAGLDQVDPIWHSIRAEAEEATRNDPVLGAFLYATILNQPSLEEAVMHRIAERLGHPDVSADILRQTFDTMLEANPEWSHVLRVDIQAVYDRDPAYSRFMDPVLYLKGFHAIQAHRLAHWLYKQGRKDFAYYLQSRSSSIFQTDIHPAARLGSGLFLDHATGLVVGETAVVEDNVSILHGVTLGGTGKSSGDRHPKIRQGVLIGAGAKILGNIQVGQCSKIAAGSVVLKSVPHNVTVAGVPARIIGETGCTEPSRVMDQMLGDGI

SEQ ID NO: 83273 - DNA, 954 bp, Bradyrhizobium japonicum USDA 110
  CDS (1)..(954): transl_table=11
gtgtttcaacgcgttggcggctttcgcggggcaaggtgctgttcactctcaggcaagcccgtcaggactttgtcgcctagactgtgctatagaaccaacaaaacgagcccattcgaaagagcagatcccatggcagtgcatcaggtcaatccgggaggaaagctcgcatccctcgatccgatctgggaccggatccggagcgaagcggaggacatcgtccatcgcgagccggagcttgcgaccttcatctattcgacggtgctgcatcacagccgtctcgaggattcggtgatccatcgtctcgccgaccggctcgatcattccgcgctgtcgggcgatctcgtgcgccagacctatgacgaggcgctgcgcgacgatcccgatctcggcaacgccttccgcgccgacctcgtcgccgtctacgatcgcgatcccgcgacctcccgcttcatcgatccgttgctctacttcaagggcttccacgcgatccagacccatcgccttgcgcactggctctggctgaagggccgcaaggatttcgcgtattatctccagagccgcgcctctgcggtgttccagaccgacatcaatcccgccgcgcgcatcggccgcggcatcttcctcgaccatgccaccggcttcgtctgcggcgagacggcggtgatcgaggacgacgtctcgatcctgcacggcgtcacgctcggcggcaccggcaaggagaacgaggaccgtcatccgaagattcgccatggcgtgctgatcggcgcgggcgcgaaaatcctcggcaacatcgagatcggccattgcgcgcgcatcgcggcgggctcggtcgtggtcaagcccgtgccgcacaacgtcacggtcgcgggcgtgcccgccaagatcgtcggcgaggccggctgcgccgagccgtcgcgcaccatggatcagatgatcaacgcgatggggctttga

SEQ ID NO: 83274 - protein, 317 aa, Bradyrhizobium japonicum USDA 110
MFQRVGGFRGARCCSLSGKPVRTLSPRLCYRTNKTSPFERADPMAVHQVNPGGKLASLDPIWDRIRSEAEDIVHREPELATFIYSTVLHHSRLEDSVIHRLADRLDHSALSGDLVRQTYDEALRDDPDLGNAFRADLVAVYDRDPATSRFIDPLLYFKGFHAIQTHRLAHWLWLKGRKDFAYYLQSRASAVFQTDINPAARIGRGIFLDHATGFVCGETAVIEDDVSILHGVTLGGTGKENEDRHPKIRHGVLIGAGAKILGNIEIGHCARIAAGSVVVKPVPHNVTVAGVPAKIVGEAGCAEPSRTMDQMINAMGL

SEQ ID NO: 83275 - DNA, 822 bp, Vibrio parahaemolyticus RIMD 2210633
  CDS (1)..(822): transl_table=11
atgaaacactgcgaaaaacaaaaagtctggaacaaaattgtctcagaagcccgtgaaatgtcagagcaagagcctatgttggcgagcttttaccacgcaaccatcatcaagcatgaaagtttgtgtgcggcactgagttacattttggccaacaaattaaacacggcgtcgatgccagcaatggccgttcgtgaagtggtcgaagaggcatttgccgcagaccctaccatcacggattttgctgcgtgtgacatttgtgcgacggtcaaccgcgaccctgctgtttccatgtactcaatgccattattgtatttgaaaggttaccacgcgctgcaaggctatcgcgtggcaaactggttgtggaaacaaggccgtcatgcccttgcaacgtatttgcaaaaccaaatttctgtggcgtgtcaggtagacattcacccagcagcacgtattggtagcggcatcatgctcgaccatgcgacgggcatcgtgatcggtgaaacagcggtgattgataacgatgtgtcgatcctacaagacgtcaccctaggtggtacaggtaaagagtgcggcgatcgtcacccgaaaatccgtgaaggcgtgatgattggtgcaggtgccaaaattcttggtaatatcgaagtgggcgaaggggcgaaaatcggctcttgctccgtagtattgcaagcggtgccaccgcacacgaccgtagcaggcgtacccgcgaaaatcgttggtcgaccaaaaacagacaaaccgtctctcgatatggaccaaggctttaacggtaaatcacaaagctttatccatggagatggcatttaa

SEQ ID NO: 83276 - protein, 273 aa, Vibrio parahaemolyticus RIMD 2210633
MKHCEKQKVWNKIVSEAREMSEQEPMLASFYHATIIKHESLCAALSYILANKLNTASMPAMAVREVVEEAFAADPTITDFAACDICATVNRDPAVSMYSMPLLYLKGYHALQGYRVANWLWKQGRHALATYLQNQISVACQVDIHPAARIGSGIMLDHATGIVIGETAVIDNDVSILQDVTLGGTGKECGDRHPKIREGVMIGAGAKILGNIEVGEGAKIGSCSVVLQAVPPHTTVAGVPAKIVGRPKTDKPSLDMDQGFNGKSQSFIHGDGI

SEQ ID NO: 83277 - DNA, 822 bp, Salmonella enterica subsp. enterica serovar Typhi Ty2
  CDS (1)..(822): transl_table=11
atgccgtgtgaagaactggaaatcgtctggaagaatattaaagctgaagcccgcgctttagctgactgtgagcctatgttggccagtttttatcacgccacgctactcaagcatgaaaatctgggcagtgcgctgagctatatgctggcaaataaactggcttcgcccatcatgcccgctatcgctatccgtgaagtagttgaagaagcctatgccgccgacccggaaatgatcgcgtcggcagcctgcgatattcaggccgtgcgcactcgcgatccggcggtggataaatactccacgccgctgttatatctgaaaggctttcatgcgctacaggcctaccgcattggtcactggttgtggaataaaggtcgccgcgcgctggctatcttcctgcaaaatcaggtttcggtctcgtttcaggtggatattcacccggcagcgaaaattggccgcgggattatgctcgaccatgccaccggtattgtggtgggggagacggcggttattgaggatgatgtgtcgatcctgcaatccgtcaccctgggcggtaccgggaaaacgagcggcgatcgccatcctaaaatccgcgaaggcgtgatgattggcgcgggcgcgaaaattctcggcaatatcgaggtggggcgcggcgcgaaaattggcgcaggctccgtcgttttacagcctgtcccgccgcacactaccgccgcaggcgttccggcgcgtattgtcggcaagccgggcagcgataagccgtcgatggatatggaccagcatttcaacgggctacaccatacgtttgagtatggcgacggcatctga

SEQ ID NO: 83278 - protein, 273 aa, Salmonella enterica subsp. enterica serovar Typhi Ty2
MPCEELEIVWKNIKAEARALADCEPMLASFYHATLLKHENLGSALSYMLANKLASPIMPAIAIREVVEEAYAADPEMIASAACDIQAVRTRDPAVDKYSTPLLYLKGFHALQAYRIGHWLWNKGRRALAIFLQNQVSVSFQVDIHPAAKIGRGIMLDHATGIVVGETAVIEDDVSILQSVTLGGTGKTSGDRHPKIREGVMIGAGAKILGNIEVGRGAKIGAGSVVLQPVPPHTTAAGVPARIVGKPGSDKPSMDMDQHFNGLHHTFEYGDGI

SEQ ID NO: 83279 - DNA, 816 bp, Haemophilus ducreyi 35000HP
  CDS (1)..(816): transl_table=11
atgaagcacatcgaacttaatcaaatgtggcaaaaaatccggcaagaagcccaacaattagccgatcaagaaccgatattggccagtttttttcatgctacaatccttactcaccataatttgggtagcgcgcttagctacattttagccaataaactagctaatgcaattatgcccgctattgcattaaaagaaattattgagcaggcttatgaagcagatccccaaattattgaaagtgccgcttatgatattaatgcagtcacaacacgagatcccgccgtagatagatggacaacaccactcctttatttaaaaggtttccacgccttacagagctatcgtgttacccattatctttggcaacaaggacgtcgcgatcttgcagtttatctacaaaatcaaatttccgtcgcgtttgatgtcgatattcaccctgccgcacgcttagggcatagcattatgtttgaccacgcaactgccatcgttattggcgaaaccgctgtcattgaaaatgatgtttctattttacaaggcgtaacattaggtgggacaggcaaagaacacggcgatcgccaccccaaaatccgtgaaggcgtaatgatcggtgcaggcgccaaaatcctaggcaatattgaaattggccgttattctaaaattggggctaactcagtagtcttacaagccgtaccggatcacactaccgcagcaggaatccccgctcgcattataggacgagcgccacaacaaaaacccgcattcgatatgaaccaatattttgaagaaattgaaggtacagatggtgatggcatttaa

SEQ ID NO: 83280 - protein, 271 aa, Haemophilus ducreyi 35000HP
MKHIELNQMWQKIRQEAQQLADQEPILASFFHATILTHHNLGSALSYILANKLANAIMPAIALKEIIEQAYEADPQIIESAAYDINAVTTRDPAVDRWTTPLLYLKGFHALQSYRVTHYLWQQGRRDLAVYLQNQISVAFDVDIHPAARLGHSIMFDHATAIVIGETAVIENDVSILQGVTLGGTGKEHGDRHPKIREGVMIGAGAKILGNIEIGRYSKIGANSVVLQAVPDHTTAAGIPARIIGRAPQQKPAFDMNQYFEEIEGTDGDGI

SEQ ID NO: 83281 - DNA, 735 bp, Candidatus Blochmannia floridanus
  CDS (1)..(735): transl_table=11
atgtcttcgaataaagttgatatagtttggaataatatgataattgaggcaagattgttgattgattcagagcctatattaaaaaaatttttaaatgtaactttattgaatcatgataattttcaagatgctttagtttatttgttatttaaaaagttaaataatttagatatgatgacgattgatttaattgatatattgaaagatatatatagaactaatgatattattgatgcggcagctcaagatatttgtacgatacgtttacgtgatccgtctgtacaaaaatatctcactccttttttgtatttaaaaggatttcatgccttacaagcatatcgtattacgaactggttgtggaatcataattatccaggattggctatgtatttatataatcgtatttctattatttttaatgtagatattcatcctgctgctaaaattggttgtggaattatgttagatcatgcgactggagtggtaattggagaaactgctgtcatagatgataatgtatctattatgcagtctgttacgttaggaagtactggaaaaatagatggtaatcggcatccaaaaataaaaaaaggggttttaattggggcaggatctattattttaggtaatatcgaaataggttgtggatcaaaaattggtgctggatctattgtggtacactcagtaccgccttattcaacggtggttggaaggcctgctagattagtacaataa

SEQ ID NO: 83282 - protein, 244 aa, Candidatus Blochmannia floridanus
MSSNKVDIVWNNMIIEARLLIDSEPILKKFLNVTLLNHDNFQDALVYLLFKKLNNLDMMTIDLIDILKDIYRTNDIIDAAAQDICTIRLRDPSVQKYLTPFLYLKGFHALQAYRITNWLWNHNYPGLAMYLYNRISIIFNVDIHPAAKIGCGIMLDHATGVVIGETAVIDDNVSIMQSVTLGSTGKIDGNRHPKIKKGVLIGAGSIILGNIEIGCGSKIGAGSIVVHSVPPYSTVVGRPARLVQ

SEQ ID NO: 83283 - DNA, 783 bp, Chromobacterium violaceum ATCC 12472
  CDS (1)..(783): transl_table=11
atgagttccaccctggttgatccgctgtggtcggccatccgcgacgaaacgctggcggcggtcaacgacgagccgctgctggccagtttcctgcacatgaccgtattgcgccacgccacgctggaagacgtgctggccttccacctgtccaccaagctcgccagtccggtgatggatccccgcgcgctgcaggagctgttccgcgaggccttccaggccgatccggcgatcagcgccgcgctgcgcgccgacatccgcgcctgtttcgagcgcgatcccgcctgcgaccgctactccacgccgctgctgtacttcaagggcttccacgcgatccagagtcagcgcgtcacccactggctgtggcagcaggggcggaccacgctggcgctgttcctgcagaaccgcatttccgaggtgaccggcgccgacatccaccccgccgcgcgcgtcggccagggcgtgatgctggaccacggcaccggcctggtggtcggcgaaaccgccgtcatcggcaataacgtctccatcctgcacggcgtcaccctgggcggctccggcaaggatcgcggcgaccgccatcccaagataggcgacggcgtgatgctgggcgcgggcgccgcggtgctgggcaacatccgcgtcggcgaatgcgcgaaagtgggcgccggcagcgtggtgctggaagacgtgccgccgcacgcgaccgtggccggcgtgccggcgcgggtggtggcccaggcctgtccgggcaccccggcgctggacatggaccagcgagtgtga

SEQ ID NO: 83284 - protein, 260 aa, Chromobacterium violaceum ATCC 12472
MSSTLVDPLWSAIRDETLAAVNDEPLLASFLHMTVLRHATLEDVLAFHLSTKLASPVMDPRALQELFREAFQADPAISAALRADIRACFERDPACDRYSTPLLYFKGFHAIQSQRVTHWLWQQGRTTLALFLQNRISEVTGADIHPAARVGQGVMLDHGTGLVVGETAVIGNNVSILHGVTLGGSGKDRGDRHPKIGDGVMLGAGAAVLGNIRVGECAKVGAGSVVLEDVPPHATVAGVPARVVAQACPGTPALDMDQRV

SEQ ID NO: 83285 - DNA, 822 bp, Photorhabdus luminescens subsp. laumondii TTO1
  CDS (1)..(822): transl_table=11
atgtcgctagaagaattggacgaagtttggaagaacataaaaacagaagcgagagcactggctgaatgtgaaccgatgttggccagtttttttcatgcaacattactcaagcatgaaaatcttggtagtgctttaagttatatgctggcgaataagctggctacgccgattatgccggctattgctgttagagagatcgtagaagaggcttatggctcggatcaaaaaatgattgtctctgctgcccgcgacatcatagcggtacgtctacgcgatcccgccgtagataaatactcaacacctctgctgtacctcaaagggtttcatgctctccaagcctatcgtattgcccattggatctggggagaagaccgtaaagcattggctatttatctgcaaaaccaaatctcgatgtcttttggcgttgatattcacccggcagcaaagattggttgtggcattatgcttgaccacgccactggcattgtgattggcgaaacggcggtagtggaaaatgacgtttctatcctgcaatccgtcacccttggtggtacgggtaaaaccgggggtgatcgtcatccgaaagtcagggaaggggtgatgattggtgcaggttcgaaaatattgggtaatattgaaattggtcgtggggctaaaattggcgcaggttcagttgtccttcgctctgttccaccgcacacaacagccgctggagtgcctgcccgtattgtcggtaaacctgaaagcgaaaagccatcattggatatgaaccagcattttaatggtatcaaccatggctttgagtatggggatgggatttaa

SEQ ID NO: 83286 - protein, 273 aa, Photorhabdus luminescens subsp. laumondii TTO1
MSLEELDEVWKNIKTEARALAECEPMLASFFHATLLKHENLGSALSYMLANKLATPIMPAIAVREIVEEAYGSDQKMIVSAARDIIAVRLRDPAVDKYSTPLLYLKGFHALQAYRIAHWIWGEDRKALAIYLQNQISMSFGVDIHPAAKIGCGIMLDHATGIVIGETAVVENDVSILQSVTLGGTGKTGGDRHPKVREGVMIGAGSKILGNIEIGRGAKIGAGSVVLRSVPPHTTAAGVPARIVGKPESEKPSLDMNQHFNGINHGFEYGDGI

SEQ ID NO: 83287 - DNA, 822 bp, Vibrio vulnificus YJ016
  CDS (1)..(822): transl_table=11
atgaaacactgtgaaaaacaaaaagtctggcagagcattgtcaaagaagcccgtgagctatcggagcaagagccgatgcttgccagtttttatcacgccaccatcatcaagcatgaaagcttgtgtgctgcgttgagctacattttagccaataagctgaacacagcctccatgccggcgatggcagtgcgtgaagtggttgaagaagcctttgcggctgaccctaacatcaccgattctgccgcctgcgatatctgtgcgacggtgaatcgtgacccggctgtttctatgtattctatcccactgctttacctaaagggttaccatgccttgcaaggctatcgcgtggcaaattggttgtggaaacaaggccgctacgcgctggcgacctatctgcaaaatcaaatctcggtggcatgccaagtggatattcaccctgcggctcgtatcggcaaaggcatcatgctggatcacgcaacaggtatcgtgatcggggaaactgctgtcgtcgaaaatgatgtatccatcctgcaagacgtaacgttaggtggtactggtaaagagtgcggcgaccgacatcctaagatccgcgaaggggtgatgatcggagctggggcaaaaatccttggcaatatcgaagttggagaaggtgcaaaaattggctcctgctccgttgtacttcaacccgttccaccgcatactaccgtcgctggtgtacccgcacgaattgtagggagaccgcaatccgacaagccttctctcgatatggatcaaggctttaacgggaaataccctaacttcattgacggtgacggcatctaa

SEQ ID NO: 83288 - protein, 273 aa, Vibrio vulnificus YJ016
MKHCEKQKVWQSIVKEARELSEQEPMLASFYHATIIKHESLCAALSYILANKLNTASMPAMAVREVVEEAFAADPNITDSAACDICATVNRDPAVSMYSIPLLYLKGYHALQGYRVANWLWKQGRYALATYLQNQISVACQVDIHPAARIGKGIMLDHATGIVIGETAVVENDVSILQDVTLGGTGKECGDRHPKIREGVMIGAGAKILGNIEVGEGAKIGSCSVVLQPVPPHTTVAGVPARIVGRPQSDKPSLDMDQGFNGKYPNFIDGDGI

SEQ ID NO: 83289 - DNA, 828 bp, Rhodopseudomonas palustris CGA009
  CDS (1)..(828): transl_table=11
atggtgatgcatcagatcaatccgcagagtgcgaacgtgacggcgctcgatccgatctgggagcgggtgcggaacgaagccgaagacatcgttcggcgcgagcccgagctggcatccttcatctttgcgagcgtgctgcatcacgatcgtctggaagacgcggtggtgcatcgcgtggcggagcggctcgatcatgcggcgctgtccggcgatctgatccgccagacttacgaagacgccctgcgcgatcaacctgacatcggcaacgcgtttcgcgccgatatggtggcggtgttcgatcgcgatccggcgacctcgcgcttcatcgacccgctgctgtactacaagggcttccacgccattcagacgcatcgtctggcgcattggctgttcggcaagggtcgcaaggatttcgcgctctatttgcagagccgcgcatcggcggtgtttcagaccgacatcaatccagcggcaaagatcggccgcggcatcttcctcgatcatgccaccggcctagtggtcggcgagaccgctgtcatcgacgacgacgtttcgatcctgcacggcgtcacgctcggtggtaccggcaaggagcacgaggatcgccatccgaagatcaggcgcggcgtcatgatcggcgccggcgcaaagattctcggcaacatcgaagtcgggcactgcgcgcgcattgctgcggggtcggtggtgctgaagtcggtgccgcacaatatgactgtcgccggtgtgccggccaaggtggtcggcgaggccggctgcgccgagccgtcacgcaccatggatcagatgatcaacgcgatcgggctctaa

SEQ ID NO: 83290 - protein, 275 aa, Rhodopseudomonas palustris CGA009
MVMHQINPQSANVTALDPIWERVRNEAEDIVRREPELASFIFASVLHHDRLEDAVVHRVAERLDHAALSGDLIRQTYEDALRDQPDIGNAFRADMVAVFDRDPATSRFIDPLLYYKGFHAIQTHRLAHWLFGKGRKDFALYLQSRASAVFQTDINPAAKIGRGIFLDHATGLVVGETAVIDDDVSILHGVTLGGTGKEHEDRHPKIRRGVMIGAGAKILGNIEVGHCARIAAGSVVLKSVPHNMTVAGVPAKVVGEAGCAEPSRTMDQMINAIGL

SEQ ID NO: 83291 - DNA, 840 bp, Apis mellifera
  CDS (1)..(840)
atgatgaaaaaaaaatttggtcaatctcttcatccaattgcacctactcaaaacgcaatgaatgatccgaataacctattagcgagcggccccgacagccacgaaataaaccttcaagccttgtgggaaaaaatggttcaagaaagcaatggatgttgtgatcctttgttatccagtttttttgatacatgcattcacagccatcatgatttcaaaaccgccctgacttgtatgataggacgcaaattagaggatgcctccatcccctatcaggcattaactgatttaatcaaacaagtgtacagaaccaatccgcctctcatttccatagctgcagccgatttgatcgcggttatgatgagagacgcagcatgctccgatttaattacaccatttctatttttcaagggattccactccattcaggcccatcgcatttcccattggctatggcataatcaaagacgctatctggcacttcatttacaaagccgtatttcggaagtgtttggggttgatatacatcctgccgcccgtctgggacagcgaatcatgatagatcacgccacttctgttattattggggaaaccgctgttgtagaagatgacgtttcaatattacaagaagttacccttgggggaacgggcaaagatgaaaaagaccgtcatcccaaaatccgtcggggagtcttaatcggtgcaggtgcaaaagtattaggaaatgtggaaattggagaaggagccaagattggtgcagggtcaattgttttagaagcagtcaaaccttacacaaccgtagttggcaatcctgcccgacaaatcgggtcttccccctattga

SEQ ID NO: 83292 - protein, 279 aa, Apis mellifera
MMKKKFGQSLHPIAPTQNAMNDPNNLLASGPDSHEINLQALWEKMVQESNGCCDPLLSSFFDTCIHSHHDFKTALTCMIGRKLEDASIPYQALTDLIKQVYRTNPPLISIAAADLIAVMMRDAACSDLITPFLFFKGFHSIQAHRISHWLWHNQRRYLALHLQSRISEVFGVDIHPAARLGQRIMIDHATSVIIGETAVVEDDVSILQEVTLGGTGKDEKDRHPKIRRGVLIGAGAKVLGNVEIGEGAKIGAGSIVLEAVKPYTTVVGNPARQIGSSPY

SEQ ID NO: 83293 - DNA, 828 bp, Bradyrhizobium sp. ORS278
  CDS (1)..(828): transl_table=11
atggctatgcatcagacccatcctcagagcggaaagctggcgacgctcgatccgatctgggatcggatccggaccgaggccgaagagatcgtccgccgggagccggagctcgcgaccttcatctattcgacggtgctgcatcacagcaggctggaggattcggtcgttcatcgggtcgccgaccgtctcgatcattcggcgctgtcgggcgatctgatccgccagaccttcgacgatgccctgcgcgacgagccggatctcggccacgccttccgcgccgatctcgtcgccgtctatgaccgcgatcccgcgacgtcgcgcttcatcgatcccttgctctacttcaagggctttcacgcgctgcagacgcatcgtctcgcgcattggctttatcgcaagaaccgcaaggatttctcgttctatctgcagagccgctcctcggcggtgttccagaccgacatcaatccggccgcacgcatcggccgcggcatcttcctcgatcacgccaccggcttcgtctgcggcgagaccgcggtcatcgaggacaacgtctcgatcctgcacggcgtgacgctcggcggcaccggcaaggagaatgaggaccgtcatccgaagattcgccacggcgtgctgatcggtgccggcgccaaggtgctcggcaacatcgaggtcggtcattgcgcgcgcatcgcggccggatcggtggtcgtgaagccggtgccgaacaacgtcacggtggcgggcgtgccggccaagatcgtcggcgaggccggctgcgccgagccgtcgcgcaccatggaccagatgatcaacgcgatcggtatctga

SEQ ID NO: 83294 - protein, 275 aa, Bradyrhizobium sp. ORS278
MAMHQTHPQSGKLATLDPIWDRIRTEAEEIVRREPELATFIYSTVLHHSRLEDSVVHRVADRLDHSALSGDLIRQTFDDALRDEPDLGHAFRADLVAVYDRDPATSRFIDPLLYFKGFHALQTHRLAHWLYRKNRKDFSFYLQSRSSAVFQTDINPAARIGRGIFLDHATGFVCGETAVIEDNVSILHGVTLGGTGKENEDRHPKIRHGVLIGAGAKVLGNIEVGHCARIAAGSVVVKPVPNNVTVAGVPAKIVGEAGCAEPSRTMDQMINAIGI

SEQ ID NO: 83295 - DNA, 822 bp, Erwinia carotovora subsp. atroseptica SCRI1043
  CDS (1)..(822): transl_table=11
atgtcgacagaagaactggcactggtctggaccaatatcaaagcagaagcgcgcagtctcgcagactgtgaaccgatgctggccagcttttttcacgccacattgctgaagcatgagaatctgggtagcgccctgagctacatgttggcgaataagttagccaattcgattatgcctgcgattgctattcgtgaggtggtggaagaagcttacagcgccgatccgcatatgatcgtttctgctgcgcgcgatattcaggccgtctgcctgcgcgatcctgcggtggataaatactctacgccgctgctctacctgaaagggtttcatgcgttgcaggcttatcgcattggtcactggctttggtcgcaggatcgtaaagcactggcggtctatttccagaatcagatctcagtttcttttggtgtcgatattcacccagcggcgagaatcggttgtgggatcatgctcgatcacgcaacaggtattgtgatcggtgaaacggccgtggttgaaaacgatgtctccattctacaatccgttacgcttggcggtacgggcaaaaccagcggcgatcgtcaccctaaaattcgtgaaggtgtgatgattggcgcaggcgctaaaattttggggaacattgaagttggctgtggcgcgaaaattggtgctggttctgtcgtgctgcaatccgttcctccacatacgacggcggcaggggttccggcccgtatcgtcggtcgaccagaaagcgataagcccgccatggatatggatcagtatttcaacggtatcaaccgcggctttgaatacggcgacggcatctaa

SEQ ID NO: 83296 - protein, 273 aa, Erwinia carotovora subsp. atroseptica SCRI1043
MSTEELALVWTNIKAEARSLADCEPMLASFFHATLLKHENLGSALSYMLANKLANSIMPAIAIREVVEEAYSADPHMIVSAARDIQAVCLRDPAVDKYSTPLLYLKGFHALQAYRIGHWLWSQDRKALAVYFQNQISVSFGVDIHPAARIGCGIMLDHATGIVIGETAVVENDVSILQSVTLGGTGKTSGDRHPKIREGVMIGAGAKILGNIEVGCGAKIGAGSVVLQSVPPHTTAAGVPARIVGRPESDKPAMDMDQYFNGINRGFEYGDGI

SEQ ID NO: 83297 - DNA, 798 bp, Mannheimia succiniciproducens MBEL55E
  CDS (1)..(798): transl_table=11
atgttacgtgaagtctggaataatatccgcaatgaagcaaaagaacttgttgaacatgagcccgttctagccagcttcttccattccactattctaaaacataaaaatttaggcggtgcattgagttatattttagccaacaaattggcaacctctaccatgccggcaattaccttgcgtgaaattattgaagaaacttatcaagacgacccgcgtattatcgacagcgccgcttgcgacattcatgccgtgcgtcaacgtgaccctgcagtcggcttatgggcgacgccgttactttatttaaaaggttttcatgctattcagagttatcgtattactcatcatctttggcaacaaaaccgcaaatcgcttgccatttatctgcaaaaccagatttccgtggcgtttgacgtggatattcatccggcggcgcgtgtgggttgcggcattatgtttgaccatgccaccggcattgtggtgggggaaaccgcagtaattgaaaatgacgtatctattttgcagggcgtaacccttggcggtacggggaaagaatccggcgatcgccacccgaaaatccgcgagggcgtgatgattggtgcgggtgcgaaaattttaggtaatattgaagtgggtaaatacgctaaaatcggcgctaattccgtggttttgcaacccgtaccggaatatgccactgcagcgggtgtgccggcgaagattatcagcaaagaccgcagtgcaaaaccggcttttgatatgaaccaatattttattgatgatgcggaagctttgaatatttag

SEQ ID NO: 83298 - protein, 265 aa, Mannheimia succiniciproducens MBEL55E
MLREVWNNIRNEAKELVEHEPVLASFFHSTILKHKNLGGALSYILANKLATSTMPAITLREIIEETYQDDPRIIDSAACDIHAVRQRDPAVGLWATPLLYLKGFHAIQSYRITHHLWQQNRKSLAIYLQNQISVAFDVDIHPAARVGCGIMFDHATGIVVGETAVIENDVSILQGVTLGGTGKESGDRHPKIREGVMIGAGAKILGNIEVGKYAKIGANSVVLQPVPEYATAAGVPAKIISKDRSAKPAFDMNQYFIDDAEALNI

SEQ ID NO: 83299 - DNA, 813 bp, Silicibacter pomeroyi DSS-3
  CDS (1)..(813): transl_table=11
atgatggaaacgcgcaagaaacttgcccccgtggacccggtctgggaccggattaccgccgaagcacaggacgctgtggacagagagcccctgatgggtgggctggtgcatgcctgtatcctgcaccacaagaatctcgaccgggcgctgtcctatcgcatttccgccaagctgtgctcgaacgaaatgtcgatgatggtgctgcgcgagatcgtcgatgacgcctatgacagtgcgcccgagctgatcgaggctgcgcgtgccgatctgatggccgtttacgagcgtgatccggcctgccaccggctgttgcagccgatcctctatttcaaggggtaccaggcgatgcaggcctatcgcgtggcgcattggctgtggacgcgcaagcgctatgatctggcctatttcttccagatgcgggtttccgagattttcggcgtcgatatccacccggcggcccggatcggcaaggggatcatgatcgaccatgcccattccatcgtgatcggcgaaacggcagtggtcggcgacaatgtctcgatgctgcattcggtgacgctgggcggcaccggcaaggaggaagaggatcgccaccccaagatcggcgatggtgtgctgatcggagcaggcgccaaggtgctgggcaatatcaaggtcggtcattgcagccgtatcgccgccggttcggtggtgctgagcgaagtgcccccctgcaagaccgtggcaggtatcccggccaagatcgtgggcgaggcgggctgcgatcagccctcggtcagtatggaccagaggttcccgaacggctcggactag

SEQ ID NO: 83300 - protein, 270 aa, Silicibacter pomeroyi DSS-3
MMETRKKLAPVDPVWDRITAEAQDAVDREPLMGGLVHACILHHKNLDRALSYRISAKLCSNEMSMMVLREIVDDAYDSAPELIEAARADLMAVYERDPACHRLLQPILYFKGYQAMQAYRVAHWLWTRKRYDLAYFFQMRVSEIFGVDIHPAARIGKGIMIDHAHSIVIGETAVVGDNVSMLHSVTLGGTGKEEEDRHPKIGDGVLIGAGAKVLGNIKVGHCSRIAAGSVVLSEVPPCKTVAGIPAKIVGEAGCDQPSVSMDQRFPNGSD

SEQ ID NO: 83301 - DNA, 819 bp, Neisseria gonorrhoeae FA 1090
  CDS (1)..(819): transl_table=11
atgaaaaaaaaccatttgaacacaaccggtttcgacctctggcacaccatccgcgaagaaaccgcggccgctgccgccgccgaaccgatgctggcaagttttttgcaccaaaccgtgttgcgccacgagtccctcggctccgtccttgcctaccacctttccagcaaactcggcagcccgattatggacgtgcgcgcgctgtttgaaatttaccagcaggcattgggcagcgacacccaaatcagcaaatgtgtcgaagcagacttaaaagccatctacgaacgcgatcccgcctgcgacgaatattcgctgccgcttttatatttcaaaggcttccacgcgattcaggcacaccgcatcaaccaccggctgtatctcgacggacgcaaaacgctggcgtatttcctacaaaaccgtatgtccgaagtattcggcgtggacatccatcccgccgcccgtttaggatacgggctgatgctcgaccacgccaccggctttgttgccggagaaaccgccgtgttgggcaacaatatttcgattttgcacggcgtaacgctcggcggttcgggcaaagaaggcggcgaccgccaccccaaaatcggcgacggcgtgatgatcggcgcaaacgcctcgatattgggcaatatccgcatcggcagcaatgccaaaatcggcgcgggcagcgtcgtggtttcagacgtgccgccgtccatcacggttgtcggcgtacccgccaaacccgtggcgcgatcgctcaaaaccccgtcggcggatatggatcaaaatatccagtttgccgaaatcgactttatgatttga

SEQ ID NO: 83302 - protein, 272 aa, Neisseria gonorrhoeae FA 1090
MKKNHLNTTGFDLWHTIREETAAAAAAEPMLASFLHQTVLRHESLGSVLAYHLSSKLGSPIMDVRALFEIYQQALGSDTQISKCVEADLKAIYERDPACDEYSLPLLYFKGFHAIQAHRINHRLYLDGRKTLAYFLQNRMSEVFGVDIHPAARLGYGLMLDHATGFVAGETAVLGNNISILHGVTLGGSGKEGGDRHPKIGDGVMIGANASILGNIRIGSNAKIGAGSVVVSDVPPSITVVGVPAKPVARSLKTPSADMDQNIQFAEIDFMI

SEQ ID NO: 83303 - DNA, 765 bp, Pseudomonas syringae pv. phaseolicola 1448A
  CDS (1)..(765): transl_table=11
atgagccctctttggcagcgccttcgcgatcaagcccggcaactgaccgagcgcaacccggtactcggcgattatgcgacaagccacctgctggtctattcgactttcgaggatgcgctcgctgcgaaccttgcccgacagatgcaggcccaagcgagtaacgtggcgctggaagactggttcaaggcgatcataaaggccagcccgtccgtcgctcagtcagcggctgccgatatcaaccatctggaaaccgtcaatcctgcctgcccggatcacctcaccgcctttctgaccttccgtggcatacaggccgttcaggcataccgcatcgcccatgcactgtgggctgagggcgatgagcaaagcgcggtgctagtacagaactgggcggccaacacctggagcatcgatattcacccggcggcacgcctcggcaaatccttgtttgtcgaccatggcatcggccttgttatcggggaaaccgctgtagtcgaagatcaagtgagcctctggcacggtgtcacgctgggcagcaccctcaacgaagcaggcgaccgacacccgaaaatccgcagaggcgcacttatttgcgccggagcaaccgttctgggaaacatcgaagtaggagccaatgccattgtggcggccaactcggtcgtactcaaagctgtgggcgctggaacggtcgtcgctggcacaccggcaaaggtggtgggtaatgcccctgcttttctggcgacctttacgacaaaatccaaaggctaa

SEQ ID NO: 83304 - protein, 254 aa, Pseudomonas syringae pv. phaseolicola 1448A
MSPLWQRLRDQARQLTERNPVLGDYATSHLLVYSTFEDALAANLARQMQAQASNVALEDWFKAIIKASPSVAQSAAADINHLETVNPACPDHLTAFLTFRGIQAVQAYRIAHALWAEGDEQSAVLVQNWAANTWSIDIHPAARLGKSLFVDHGIGLVIGETAVVEDQVSLWHGVTLGSTLNEAGDRHPKIRRGALICAGATVLGNIEVGANAIVAANSVVLKAVGAGTVVAGTPAKVVGNAPAFLATFTTKSKG

SEQ ID NO: 83305 - DNA, 807 bp, Rhodobacter sphaeroides 2.4.1
  CDS (1)..(807): transl_table=11
atggctgaggcaagaccccgtgttgcgacagtggacccggtctggcaacggatcgtggaagagggccatgccgccatccttgccgagcctcttctcggcggactcgttcattcgagcctcctgcaccatccgtccatggaacgggcgctcgcctaccgcttttcgctgaagctcgcttcgggcgagatgagcgagcagatcctgcgcgagatcgcggacgaggcctatgcgtcggatccggagctcgggcagatggcgcgggccgacatggtcgccgtctacgagcgcgaccccgcctgccatcgcttcctgcagccgatcctcttcttcaagggctatcaggcggttcaggcctatcgcgtgggccactggctctggacgaacggacggcaggacctggcctatttcgtgcagatgcgcgtgtcggaagccttcggcgtcgatgtccacccagccgcccggatcgggcgcggcatcatgatcgaccatgcgcattccatcgtcatcggcgagacggccgtcgtgggcgacaatgtctcgatgctccattcggtcacgctcggcggcaccggcaaggaggatggcgaccgccatccgaagatcggcaacggggtgctgattggggcaggggccaaggtgctcggcaacatccatgtgggccattgcagccggatcgcggccggctcggtcgtgctgcaggacgtgccgccctgcacgacggtggcgggcgtgccagcccgcgtggtgggggaagcgggctgcgcacagcccgccgtcacgatggaccatctgctcagcgacgggtga

SEQ ID NO: 83306 - protein, 268 aa, Rhodobacter sphaeroides 2.4.1
MAEARPRVATVDPVWQRIVEEGHAAILAEPLLGGLVHSSLLHHPSMERALAYRFSLKLASGEMSEQILREIADEAYASDPELGQMARADMVAVYERDPACHRFLQPILFFKGYQAVQAYRVGHWLWTNGRQDLAYFVQMRVSEAFGVDVHPAARIGRGIMIDHAHSIVIGETAVVGDNVSMLHSVTLGGTGKEDGDRHPKIGNGVLIGAGAKVLGNIHVGHCSRIAAGSVVLQDVPPCTTVAGVPARVVGEAGCAQPAVTMDHLLSDG

SEQ ID NO: 83307 - DNA, 867 bp, Rhodospirillum rubrum ATCC 11170
  CDS (1)..(867): transl_table=11
atgcgctcaacccttggacgactgaccgtcatcgccggcacggggggcgatggggtgccaccgagtgaaggctttctcgacgccctgtggctgcgcctgcgccaggaagcgcgcgaggcctatgcccatgccccgatgctggcgccgctgttcgtcgagtccatcctcaatcagccaaccctggaggccgccgcctttcaccgcatcgctgcccgcctgaaaaacgatttggtcggcctgggcatcatcatcgatgccttcaaccgcgcggtcgaggccatgcccgagattgcccaggacctgcgcaccgatatcgccgccgttgtcgaacgtgatccggcctgcgcgcgcttcatcgagcccttcttgtatttcaagggcttccacgccatccagacccaccgtttggcccattggctgtggcatcacgacgaacgcgacttcgccctttatctgcaaagccgctcgtcggatgtttttcaaaccgacatccaccccgccgcccgcttcggccgcggcattttccttgatcacgccaccggccttgtcgtcggtgaaacggcggtggtcgaaaacgacgtctgcctgttgcagaacgtgacgctgggcggcaccggcaaggacagcggcgaccgtcaccccaaggttcgccagggggcgatgatcggcgccggggccaagatcctcggcaatatcgaaatcggcgccagcgcccgggtcgccgccggatcggtggtgctgcgctcggtcgaagccggaaccaccgtggccggcgtccccgccaagctcatcacccgcgccgccgcgccaaccgaagaccagatcctcaacgacctgctttatgagtcgttcgcctataccatctga

SEQ ID NO: 83308 - protein, 288 aa, Rhodospirillum rubrum ATCC 11170
MRSTLGRLTVIAGTGGDGVPPSEGFLDALWLRLRQEAREAYAHAPMLAPLFVESILNQPTLEAAAFHRIAARLKNDLVGLGIIIDAFNRAVEAMPEIAQDLRTDIAAVVERDPACARFIEPFLYFKGFHAIQTHRLAHWLWHHDERDFALYLQSRSSDVFQTDIHPAARFGRGIFLDHATGLVVGETAVVENDVCLLQNVTLGGTGKDSGDRHPKVRQGAMIGAGAKILGNIEIGASARVAAGSVVLRSVEAGTTVAGVPAKLITRAAAPTEDQILNDLLYESFAYTI

SEQ ID NO: 83309 - DNA, 834 bp, Saccharophagus degradans 2-40
  CDS (1)..(834): transl_table=11
atgcacaaaacaacacccatttcgacccttgcggaccaaaagtctcaggagttggacccagtttggcaaaccatccgccaagaaactcgggaacaagtggaagaagaacccgcattggcgagtttcttacacgcaactattttaaatcacgatacactagaaagcgccttgagctttcacttggcccacaaactggcaaaccctgcgatatcggccctgcaaattcgtgagattattgaagagtcgatgagccacgacagctgcattagcgaagccgtgcgcgcagatattcgcgccgttttcgatcgcgattcggcctgcaattcgtatgcattgccctttttatactttaaaggttttcacgcgttgcaagcattccgcgtggcccactgcctgtacaaacgcggtcgtaaatctttggcctatttcttacaaagccatattgcgcttacctttggggtagacattcaccctgctgcgcgcataggtaaaggcattatgatggaccacgccacaggaatagtaattggtgaaactaccgtcgtcgaagatgatgtatcgctaatgcaaggcgtcacccttggcggaaccggcaaagaagccagcgatcgtcaccccaaagtacgcaagggcgtgttggtgggcgccggcgctaaaattcttggcaatatagaaattggcgaaggggcaaaggtaggcgctggcagtgtggtgcttgaagctgtgcctccacacactacggttgttggtgtgcctgcacgcgtcgtcggtgtaccacagtcgcaaagcccagcactagatatgaaccacggtattcagtgcgattgcgagtaa

SEQ ID NO: 83310 - protein, 277 aa, Saccharophagus degradans 2-40
MHKTTPISTLADQKSQELDPVWQTIRQETREQVEEEPALASFLHATILNHDTLESALSFHLAHKLANPAISALQIREIIEESMSHDSCISEAVRADIRAVFDRDSACNSYALPFLYFKGFHALQAFRVAHCLYKRGRKSLAYFLQSHIALTFGVDIHPAARIGKGIMMDHATGIVIGETTVVEDDVSLMQGVTLGGTGKEASDRHPKVRKGVLVGAGAKILGNIEIGEGAKVGAGSVVLEAVPPHTTVVGVPARVVGVPQSQSPALDMNHGIQCDCE

SEQ ID NO: 83311 - DNA, 819 bp, Mesorhizobium sp. BNC1
  CDS (1)..(819): transl_table=11
atgacggccagacaagcggttcgttcgaatgcgccgcaacagatcgacccgatttggtccgagatccgggccgaggcacggactgcggtcgagaatgacgcattgctcgcagctttcctttattccacgatcctcaatcaggcgacccttgaagacgccgtcattcatcggatttcgcagcggctcgatcatgcggatctcagcgcggatcttctccagcagacgttccttgccatgtgggaagatcagccggactggagcagcattctgcgagtcgacattcaggcctattacgatcgggatccggcctgcgaccggtttttgatgccggtgctctatttcaagggattccacgccattcagacacatcgtctggcccattggctttggggcaagggccgcaaggatttcgcgctttacctgcaaagccgctcctccgccgtgttccagacggacattaaccccgcagcgacaatcgggcgcgggatcttcctcgaccatgccacgggcctcgtcgtcggcgagacagccgtcatagaagacgatgtatcaatcctccaggacgtaacgctgggcggaaccggcaaggaaacgggcgaccgtcatccgaagatccgtcacggagtgctgattggcgccggcgccaaaatcctcggaaatatcgagatcggccactgcacgaaggtcgccgccggatctgtcgtcgtcaagcccgtgccgcccaacaagacggtggcgggcgtccccgcacgtatcatcggagaggctggctgcaacgagccgtcacgcgctatggatcagcttctgcttgaggaatag

SEQ ID NO: 83312 - protein, 272 aa, Mesorhizobium sp. BNC1
MTARQAVRSNAPQQIDPIWSEIRAEARTAVENDALLAAFLYSTILNQATLEDAVIHRISQRLDHADLSADLLQQTFLAMWEDQPDWSSILRVDIQAYYDRDPACDRFLMPVLYFKGFHAIQTHRLAHWLWGKGRKDFALYLQSRSSAVFQTDINPAATIGRGIFLDHATGLVVGETAVIEDDVSILQDVTLGGTGKETGDRHPKIRHGVLIGAGAKILGNIEIGHCTKVAAGSVVVKPVPPNKTVAGVPARIIGEAGCNEPSRAMDQLLLEE

SEQ ID NO: 83313 - DNA, 798 bp, Haemophilus somnus 129PT
  CDS (1)..(798): transl_table=11
atgtcaatagaagtatggagtcttattcgtgctgaagcagcaaaactcgctgaaaatgaaccaatgctagccagtttctttcatgcaactatcttaaaacataacaatctaggcagtgcattaagctatattcttgcgaacaaattagctaatccaattatgcccgctattgcattgcgagaaattattgaagaagcacatcaaaatcaaccgcaaattatcgaaagtgcggcttgcgatatccgggccgtgcgtcagcgagatcctgccgtagaacaatactctacaccgttactttatttgaaaggcttccacgcattgcaaagttatcgtattacccattatttatggcaacaaggacgaaaagcattggcgatctatttacaaaaccaaatatccgttgcctttgatgtagatatccatcccgcagcaagaatcggttgtggcattatgttcgatcatgccacaggtattgtgataggagaaacatctgtcattgaaaatgatgtatctattttgcaaggtgtaactttagggggaacgggtaaagaaagcggcgatcgtcatcctaaaattcgagaaggtgtgatgattgggtccggagctaaagtgttaggaaatatcgaaattgggcgttacgctaaaattggtgcaaactccgtagtgttacaatccgtttcagaatacactactgtcgctggtgtgccttctcaaatagtaggcaaaaataaaggggcgaaacctgcatttgatatggaccaatactttattgatgatgcaattaacttaaatatctaa

SEQ ID NO: 83314 - protein, 265 aa, Haemophilus somnus 129PT
MSIEVWSLIRAEAAKLAENEPMLASFFHATILKHNNLGSALSYILANKLANPIMPAIALREIIEEAHQNQPQIIESAACDIRAVRQRDPAVEQYSTPLLYLKGFHALQSYRITHYLWQQGRKALAIYLQNQISVAFDVDIHPAARIGCGIMFDHATGIVIGETSVIENDVSILQGVTLGGTGKESGDRHPKIREGVMIGSGAKVLGNIEIGRYAKIGANSVVLQSVSEYTTVAGVPSQIVGKNKGAKPAFDMDQYFIDDAINLNI

SEQ ID NO: 83315 - DNA, 810 bp, Hyphomonas neptunium ATCC 15444
  CDS (1)..(810): transl_table=11
atggaaaatcctgacatcggcgccccccctccgccctggaaaaggctgcgttttgaggcgcaggcggctgcggccgaggagccaacgctggcgagctatctcaacgccgcgatcctttcgcatgccactttggggcaagcattgtcctttcatctggcggagaagctctccgggccgggcatgggcccccagcaggtgcggcacattctttcggccgtttatgacagcgcgccgggcctgatcgagtttgccgaaagcgatatgcaggccgttctggagcgtgacccggcagcacgcgggatgttgcagcctttcctgtttttcaagggcttcctggcgcttcagacgcaccggattgcacacgagctgtggcggcagggcagggagacgctggcgtttcatttccagagccgggcgtcggagcttttcgatgtggatattcacccggcagcgcggatcgggcgcgcggtaatgctggatcatgcctccggcatcacgatcggtgagacggcgattgttggcgatggctgctcgttgcttcatggggttacgctcggcggaaccggcaaggaagtgggtgatcgccaccccaagatcgggcgcggtgtgctgctttcggtgggcgcgaagatcctcggcaatatctccattggcgacgaggccaaggtggcagccggcagtgtggtgctcaaagatgttccggcgcggtgcaccgttgccggtgtgccagcaaagattgttgcgggaccggcgtgctgccagcctgcgcagagcatggatcaggcaatccccgaaacttcggcagaataa

SEQ ID NO: 83316 - protein, 269 aa, Hyphomonas neptunium ATCC 15444
MENPDIGAPPPPWKRLRFEAQAAAAEEPTLASYLNAAILSHATLGQALSFHLAEKLSGPGMGPQQVRHILSAVYDSAPGLIEFAESDMQAVLERDPAARGMLQPFLFFKGFLALQTHRIAHELWRQGRETLAFHFQSRASELFDVDIHPAARIGRAVMLDHASGITIGETAIVGDGCSLLHGVTLGGTGKEVGDRHPKIGRGVLLSVGAKILGNISIGDEAKVAAGSVVLKDVPARCTVAGVPAKIVAGPACCQPAQSMDQAIPETSAE

SEQ ID NO: 83317 - DNA, 879 bp, Pseudomonas aeruginosa UCBPP-PA14
  CDS (1)..(879): transl_table=11
ctggcaggcaggaccatcaggaaccgccagaatcatgctgaaaaccccgttatcgtccgaccggcagcctgccgaacagcagcaaagggtatctgtatgaggaacagtcccgcagaggcgctggccgcggcttgcaccccgacagcgtcagtcaggtgcgtctggcaacagcttcaggcggaggccaggcgcgcgccgcaggaagactctgtattggggccgctcatcgatagatccattctctgccgcagctcattctggcaggcgctgtcctccctgctgagcgctaagctgtccatccaaacggtgtccatggacatatggctggagtgctttgccgatgctcatggaccggaggccgaggaggcggcgaaagacgacttggccgcgaccctccttcgggatccggcagcggagaacctgttggtgccctttctctgctacaagggcttccacgcactgcagtgccaccgggttgcccaccagctatggaacgcccgcagaaggacactcgcgcgtctgttgcagagccgggtttctgaagtcttcggtgtggatatccatcctgccgttccggtggggcggcgcgtcttcatagatcacgcaacaggaatcgtcatcggcgagactgccagcatcggtaacgacgtctcgattctccagaaagttactctgggtggaaccggcaaggagtatggggaccgccatccgaagatacgggaccgagccttcattgcagcaggcgcgacgatactgggcaacattgaaatcggctttgcctccaccgtcggcgctggaagcgtcgtgcttgagccggttccgccttactccacggtcgttggcgtacctgctcgcattctttgcacgaatggactttga

SEQ ID NO: 83318 - protein, 292 aa, Pseudomonas aeruginosa UCBPP-PA14
MAGRTIRNRQNHAENPVIVRPAACRTAAKGICMRNSPAEALAAACTPTASVRCVWQQLQAEARRAPQEDSVLGPLIDRSILCRSSFWQALSSLLSAKLSIQTVSMDIWLECFADAHGPEAEEAAKDDLAATLLRDPAAENLLVPFLCYKGFHALQCHRVAHQLWNARRRTLARLLQSRVSEVFGVDIHPAVPVGRRVFIDHATGIVIGETASIGNDVSILQKVTLGGTGKEYGDRHPKIRDRAFIAAGATILGNIEIGFASTVGAGSVVLEPVPPYSTVVGVPARILCTNGL

SEQ ID NO: 83319 - DNA, 861 bp, Magnetospirillum magnetotacticum MS-1
  CDS (1)..(861): transl_table=11
atgtccgccagcccgtcgctcagcccggcctccgggcgcgaggtgatcgccggcatcgtcgacccgctctggacgcgcgtgcgcaccgaggcggaaacggtgctgcgcgacgagccgcaactcgcctcgttcttcgtcgctacgatcctcaaccatccgactctggaagcggcggtatcccaccgggtcgccgcccgcctcgggcacggatcgctgccgacggaactcgtcgcccacggctttcacgaggcgttgcaggacgatccccgcatcggccagagcatgcgcgccgacatcctggcggtgatggaccgcgacccggcgacgacgcgggcgatcgaaccgctgctctatttcaagggcttccacgccctccaggcacaccgtctggcccattggtactggggccagggccggcgtgacctcgccctctacctccagagccggtcctcggaagtgttccagaccgacatccatccggcggcccggatcgggcgcggcgtgttcctcgatcacgccaccggtgtcgtggtcggctccactgcggtgatcgaggacgacgtctcgatcctgcaagcggtgacgctcggcggcaccggcaagcatggcggcgaccgccatcccaagatccgccgcggcgtgatgatcggtgcgggcgccaagatcctcggcaatatcgaggtcggggcctgcgcccgggtcgcggcgggctctgtcgtgcttcggccggtgccgccgcacaccaccgtcgtcggggtgccggcccgcgtcgtcggcgctgccggctgcgccgagcccgcccgctcgatggatcaactcgtggcgatgagcgagttcgtcgacatcgccggcggcatctga

SEQ ID NO: 83320 - protein, 286 aa, Magnetospirillum magnetotacticum MS-1
MSASPSLSPASGREVIAGIVDPLWTRVRTEAETVLRDEPQLASFFVATILNHPTLEAAVSHRVAARLGHGSLPTELVAHGFHEALQDDPRIGQSMRADILAVMDRDPATTRAIEPLLYFKGFHALQAHRLAHWYWGQGRRDLALYLQSRSSEVFQTDIHPAARIGRGVFLDHATGVVVGSTAVIEDDVSILQAVTLGGTGKHGGDRHPKIRRGVMIGAGAKILGNIEVGACARVAAGSVVLRPVPPHTTVVGVPARVVGAAGCAEPARSMDQLVAMSEFVDIAGGI

SEQ ID NO: 83321 - DNA, 795 bp, Prosthecochloris aestuarii DSM 271
  CDS (1)..(795): transl_table=11
atggcagcagaggaaatttgggatagaatatgtgctgaggctttgcgcgaggggcagcgggagccttatatgcgaaattttctggagcagcatatcctgcgcttcgatcgctttgtggatgctctttcgatgcttctgtctgtcaagctggcatctaaacattttcctccccaggtcctgcaggagctgttcgatgatttctattcccgcagccctgaggatctcgacaatgccgtagccgatcttacagcaacgcttcagcgagatcctgcggcggtgaattatttcgagattatgctttttctgaagggctatcaggcgttgcagtcttatcggttgtcgcactggctgtggaaccatgatcgcaaatcgatggcgtatctcctgcagaacaggatgtctgaagtctatgctgtcgatatccatcctgcagcgcggatcggcaagggtattctgcttgatcatgcgaccagtctggtgatcggtgaaaccgctgttgtcgaggataatgtatcgatcctgcatgaagtgacgcttggcggtacgggtaaggagagcggtgatcgtcatccgaaagtgaggaaatcggttctgatcggggcaggagcgaagattctcggtaatgtggagatcggggagggggcaaaggtcggcgctggcagtgtggtgcttgagaatgtgccacctcattacacggttgccggtgttccggcccagattgtcggtcgtaccgaggttgccgagccgtcgctcgatatgaaccagcgactgcagaacagtcgccggctcgaatga

SEQ ID NO: 83322 - protein, 264 aa, Prosthecochloris aestuarii DSM 271
MAAEEIWDRICAEALREGQREPYMRNFLEQHILRFDRFVDALSMLLSVKLASKHFPPQVLQELFDDFYSRSPEDLDNAVADLTATLQRDPAAVNYFEIMLFLKGYQALQSYRLSHWLWNHDRKSMAYLLQNRMSEVYAVDIHPAARIGKGILLDHATSLVIGETAVVEDNVSILHEVTLGGTGKESGDRHPKVRKSVLIGAGAKILGNVEIGEGAKVGAGSVVLENVPPHYTVAGVPAQIVGRTEVAEPSLDMNQRLQNSRRLE

SEQ ID NO: 83323 - DNA, 822 bp, Sulfitobacter sp. EE-36
  CDS (1)..(822): transl_table=11
atggcaaatgcacgcacgaatatcgccacggtggatccggtttgggatcagatccagacggaagcacagaatgctgtccgcgatgagccgctgattggcggttttgtccacgccacaattctgcaccataaatccatcgagaaagcgctatcctaccgtatcgcggcgaagctggcctcgaatgaaatgtcgatgatggtggtccatgagatggtggaggaggcctttgccagtgatcccgacctgatcaaggcggcacgggccgatctggtggcgatttacgagcgtgaccccgcctgccaccggctgttgcaaccgatcctgtatttcaaaggctatcaggccgtgcaggcctaccgtgtgggccatcacctgtggaaacaaggtaaacgggatctggcctatttcgtgcagatgcgcgtgagcgagatttttggcgtcgatatccaccctgccgcgacgatcggcaagggaatcatgatcgaccatgcccattccgtcgtgattggcgaaaccgcggtcgtgggcgacaacgtgtcgatgctgcactcggtcactttgggcgggacgggcaaggaagagcaggaccgtcacccgaagattggcaacggcgtgttgatcggcgcgggggcgaaagtgttgggcaatatctctatcgggcattgctcgcgcattgcggcggggtctgtcgtgctggaatccgtgccgccctgcaagaccgtcgcgggcatccctgcgcgggtcgtgggggaggcgggttgcgatcagccgtcggtcctgatggaccacatgctggggccgcagggcgatattaacatgtaa

SEQ ID NO: 83324 - protein, 273 aa, Sulfitobacter sp. EE-36
MANARTNIATVDPVWDQIQTEAQNAVRDEPLIGGFVHATILHHKSIEKALSYRIAAKLASNEMSMMVVHEMVEEAFASDPDLIKAARADLVAIYERDPACHRLLQPILYFKGYQAVQAYRVGHHLWKQGKRDLAYFVQMRVSEIFGVDIHPAATIGKGIMIDHAHSVVIGETAVVGDNVSMLHSVTLGGTGKEEQDRHPKIGNGVLIGAGAKVLGNISIGHCSRIAAGSVVLESVPPCKTVAGIPARVVGEAGCDQPSVLMDHMLGPQGDINM

SEQ ID NO: 83325 - DNA, 807 bp, Roseovarius nubinhibens ISM
  CDS (1)..(807): transl_table=11
atggccaaagcacatgcaaaactctcggaactcgacccggtctggaagcagatcaccgaggaagccaaggacacgatcgcccaggagccgctcatgggcgggctggttcatagttcgatcctgcaccacaaaaccatcgaatcggcgctcgcctatcggatctctctgaaactcgcctcgagcgagatgcccgagcagatcctgcgcgaaatctgtgattgggcgctggccgcagatcccaatatttcgctggcctcgcgcgccgatatcgtcgccgtgaacgaccgtgacccggcctgtgaccggttcatcctgccgatgcttttcttcaaggggtttcaggcggtgcaggcgcatcgcgtggcgcattggctctggcataacgaacgcaaggatatggcgcggttcttccagatgcgctgttccgaggtgtttggcatcgacattcaccccgccgcccggatgggcaagggcatcatgatcgatcatgcgcattccatcgtgatcggggaaaccgccgtggtcggcgacaatgtctcgatgctgcattctgtgacgctcggcggcaccggcaaggaagaagaagaccgccatcccaagatcggcgacggtgttctgatcggcgcgggggccaaggttctcggcaatatcaaggttggccattgctcgcgcatcgcggcgggctcggtcgtgctatccgaagtgccgccctgcaagacggtggcgggtgttccggccaagatcgtcggcgaagcgggctgtgatcagccctcggtggcgatggatcagctgctcggcgtgcgctaa

SEQ ID NO: 83326 - protein, 268 aa, Roseovarius nubinhibens ISM
MAKAHAKLSELDPVWKQITEEAKDTIAQEPLMGGLVHSSILHHKTIESALAYRISLKLASSEMPEQILREICDWALAADPNISLASRADIVAVNDRDPACDRFILPMLFFKGFQAVQAHRVAHWLWHNERKDMARFFQMRCSEVFGIDIHPAARMGKGIMIDHAHSIVIGETAVVGDNVSMLHSVTLGGTGKEEEDRHPKIGDGVLIGAGAKVLGNIKVGHCSRIAAGSVVLSEVPPCKTVAGVPAKIVGEAGCDQPSVAMDQLLGVR

SEQ ID NO: 83327 - DNA, 804 bp, Oceanicola batsensis HTCC2597
  CDS (1)..(804): transl_table=11
atggcccatacgcaaccctcggtcaccgcggtcgaccccgtctgggatcgcatgacgcaggaagccgaagacgccatctcggaggaaccgctcctgggcgggcagatccattccgccctgctgcatcatccgtcgatcgagaacgcgctggcctatcgcatcgcgatgaagctgaccaattccgagatgtccgagcagcttttgcgggagatctgcgacgaggcctatcgcgcggatcccgatctggcggcctcggcccgggcggatatcgtggcgacctacgaccgcgacccggcctgtcaccggttcatccagccgttgctgtatttcaagggcttccaggcggtgcaggcctatcgcgtggcgcattggctgtggcgggagggccggcaggacctggcctatttcttccagatgcgctgttccgaggtctacgggatcgacatccacccggcggcccggatcgggcaggggatcatgatcgaccacgcccattccatcgtcatcggcgagacggcggtggtcggcaacaacgtgtcgatgctgcattcggtgacactcggcgggaccggcaaggaagaggaggaccggcaccccaagatcggcgacggagtcctgatcggtgcgggggccaaggtgctgggcaacatccgcatcggccactgttcgcggatcgcggcgggatcggtcgttctgcacgacgtggactcctgcaagacggtggccggcgttcccgcgaaggtggtgggcgaggcgggctgcgaccagccctcgctgacgatggatcacctgttcggggggtga

SEQ ID NO: 83328 - protein, 267 aa, Oceanicola batsensis HTCC2597
MAHTQPSVTAVDPVWDRMTQEAEDAISEEPLLGGQIHSALLHHPSIENALAYRIAMKLTNSEMSEQLLREICDEAYRADPDLAASARADIVATYDRDPACHRFIQPLLYFKGFQAVQAYRVAHWLWREGRQDLAYFFQMRCSEVYGIDIHPAARIGQGIMIDHAHSIVIGETAVVGNNVSMLHSVTLGGTGKEEEDRHPKIGDGVLIGAGAKVLGNIRIGHCSRIAAGSVVLHDVDSCKTVAGVPAKVVGEAGCDQPSLTMDHLFGG

SEQ ID NO: 83329 - DNA, 816 bp, Pseudoalteromonas tunicata D2
  CDS (1)..(816): transl_table=11
atggtattgatgcgacatcaaatttggcagcaactaaaagtagaagcgactgagctagtaaaaaaagaacctttactcgcaagtcacgtttattcatgtattttgaatcatgaatgtttaggatctgcgcttagttttattgtcgctaataagctctcggatgcggtggtttcaccttttacttttcgtgaattatttgatcaggcttttgttgattgtgaccgcatgcttacccatgtttcacacgatattaaagcagtaaaagaccgcgatcctgctgctgatagttacttaagtattttgttaaatttaaagggctttcaagcaatccaagttcaccgacttgctcattgtttatggcgccaagaccgtaaagagcttgctcgttttatccaatcacgtaattcagaagtgtttggtgttgacattcatccagcctgtaaaatcggccatggcattatgtttgaccatgcaacaggcattgttattggtgaaacagcagtgattgaagataatgtatcgattctacaaggtgtaaccttaggtggtacaggcaatgagcaaggtgatcgtcatcctaaaattcgcgaaggcgtgatgataggtgctggcgccaaggttttaggtaatatagaagttggccaaggcgctcgaataggtgcgggctctgttgttttaagcgctgttgcaccccataccacggttgtaggtgtgcctgcaaaagttgtgggcaggccctgtaatcgtccagctgaaaccatggatcaaaatgtacttgagcaatccgatgactctttgaccagcgcactgctttaa

SEQ ID NO: 83330 - protein, 271 aa, Pseudoalteromonas tunicata D2
MVLMRHQIWQQLKVEATELVKKEPLLASHVYSCILNHECLGSALSFIVANKLSDAVVSPFTFRELFDQAFVDCDRMLTHVSHDIKAVKDRDPAADSYLSILLNLKGFQAIQVHRLAHCLWRQDRKELARFIQSRNSEVFGVDIHPACKIGHGIMFDHATGIVIGETAVIEDNVSILQGVTLGGTGNEQGDRHPKIREGVMIGAGAKVLGNIEVGQGARIGAGSVVLSAVAPHTTVVGVPAKVVGRPCNRPAETMDQNVLEQSDDSLTSALL

SEQ ID NO: 83331 - DNA, 822 bp, Photobacterium sp. SKA34
  CDS (1)..(822): transl_table=11
gtgaagcaatgtcaacaacaccagctttggccagcgatcaagcaggaagcacgagagcagtcagagcatgagcaaatgctcgcgagcttttatcatgccacgattattaagcatgatgaccttgctgctgcattgagttatatacttgcaaataaattggcaacaccatcgatgccagcgatggctgttcgtgaggtcatcgaagaagcgtatgctagcgattgttcgatagttgaatcggcagcacgtgatatttgtgctgttgttgaacgtgatcctgctattaatatgtattctattccattactttatctcaaaggttgtcacgctcttcaaggatatcgcgtagctaactggttatggaaacaagatcgaaaagccttagcggtttatctacaaaaccaaatctctgtagcttgccaagtcgatgtgcatccagcggcaaaaattggtcaagggatcatgtttgatcacgcgacgggtattgtgattggtgaaaccgcagtcattgaaaatgatgtctcaatccttcaggacgtcacattaggtggtacggggaaagagagcggcgatcgtcatccaaagatccgtgaaggggtgatgataggtgctggcgctaaagtgttaggcaatatcgaagttggtgaaggggcgaaaattggctcttgttcggtggtgttaaatcatgtgcctccccatacaactgttgccggtattcctgctaaagttgttgggcgaccaaattcagataaaccatcgatggatatggatcagcaatttaatggtaactcgcaaacgtttattgaaggtgatggtatttag

SEQ ID NO: 83332 - protein, 273 aa, Photobacterium sp. SKA34
MKQCQQHQLWPAIKQEAREQSEHEQMLASFYHATIIKHDDLAAALSYILANKLATPSMPAMAVREVIEEAYASDCSIVESAARDICAVVERDPAINMYSIPLLYLKGCHALQGYRVANWLWKQDRKALAVYLQNQISVACQVDVHPAAKIGQGIMFDHATGIVIGETAVIENDVSILQDVTLGGTGKESGDRHPKIREGVMIGAGAKVLGNIEVGEGAKIGSCSVVLNHVPPHTTVAGIPAKVVGRPNSDKPSMDMDQQFNGNSQTFIEGDGI

SEQ ID NO: 83333 - DNA, 807 bp, Oceanospirillum sp. MED92
  CDS (1)..(807): transl_table=11
atgagccagaatccagaatgcccaacctggctttgggatgaaatttctgctgaagcagagcgagaagtgatagaggagcctgtactggctggcttctaccatgcgaatattcttggtcatcagagcttatgttcggcattagcttatctgctaagtcgcaagctttatgatgatgctgtgcctgcggtaacttttcgattagtgatcgaagaagtattccgtgaagcacctgagatcctgcaggcggtctgtgcagatattgcagccgttcgcaaccgtgatccggcgatcgataaatactcgacggtacttctctacctgaaaggcttccatgcgatacaggcgtatcgtgtggctcatcatatgtggaatcagggccgtaagagcatggcgctctatatccagagccgggttagctgtgttttgcaggttgatattcatcctgcggcgaagatcggtcagggggtaatgttcgaccacgcgacaggtatcgttgtaggtgagaccagtgtgattgaaaatgacgtttctattctgcagtcggtaacgctcggtggtaccggtaaagagtgcggtgatcgtcatccaaaaatccgcgaaggtgttatgatcgcagcgggtgctaagattttcggcaatattgagatcggtagcggcgctaaagttggtggtggcagtgttgtcttagacggtgttccagcacatacaacggtggtaggtgtgcctgcgagagcggttggtcatcctcagtgcgataagcctgcactggatatggatcagaatattctgcacgacaaagaaaagtaa

SEQ ID NO: 83334 - protein, 268 aa, Oceanospirillum sp. MED92
MSQNPECPTWLWDEISAEAEREVIEEPVLAGFYHANILGHQSLCSALAYLLSRKLYDDAVPAVTFRLVIEEVFREAPEILQAVCADIAAVRNRDPAIDKYSTVLLYLKGFHAIQAYRVAHHMWNQGRKSMALYIQSRVSCVLQVDIHPAAKIGQGVMFDHATGIVVGETSVIENDVSILQSVTLGGTGKECGDRHPKIREGVMIAAGAKIFGNIEIGSGAKVGGGSVVLDGVPAHTTVVGVPARAVGHPQCDKPALDMDQNILHDKEK

SEQ ID NO: 83335 - DNA, 897 bp, Xanthobacter autotrophicus Py2
  CDS (1)..(897): transl_table=11
atgccccaatctcccacgcctgcccccatgcccgcgcccgttgccgacgcgttcgctccgaagctcaccaaggcaggcacggaacgctggcacgacgtggtcgatccggtctgggcgcgcctgcgcaacgaggcggaggaagccgccgagcgagagccgctgctcgccgccttcctcatcggcgccgtgctgggccagccgagcttggaggcggtgattggcgaacgcatcgccgcccgcctcgaccatgcggacgttccggccagcgccatccgcgccgcctggcttgaggccgccgcccgcgacaagaccattccccaggccctgcgcgccgacatcatggcggtggtggaccgcgaccctgcagccacccgcacgcttgagccggtgctgtatttcaagggcttccacgccatccagacccaccgcctgtcccacttcctgtgggccagcggccagcgcgacttcgccctctatctccagagccgggcctcctccgtgttcgccgtggacatccacccgcaggtgcccatgggccggggcatcttcctcgaccacgccaccggcgtcgtcatcggcgccacggcggtgatcgaggacgacgtgtccatcctgcagggggtgacgctgggcggcaccggcaaggagaccggcgaccgccatcccaagatccgccggggcgtgctcatcggcgctggcgccaaggtgctcggcaacatcgaggtcggccgctgcgcccgcatcgccgccggctcggtggtgctgaagccggtgccgcgcaataccacggtggcgggcatcccggccaaggtagtgggcgaagccggctgcgccgaaccctcgcgctccatggaccagatgttcgaggacaacatctggtctggcgccgatatctga

SEQ ID NO: 83336 - protein, 298 aa, Xanthobacter autotrophicus Py2
MPQSPTPAPMPAPVADAFAPKLTKAGTERWHDVVDPVWARLRNEAEEAAEREPLLAAFLIGAVLGQPSLEAVIGERIAARLDHADVPASAIRAAWLEAAARDKTIPQALRADIMAVVDRDPAATRTLEPVLYFKGFHAIQTHRLSHFLWASGQRDFALYLQSRASSVFAVDIHPQVPMGRGIFLDHATGVVIGATAVIEDDVSILQGVTLGGTGKETGDRHPKIRRGVLIGAGAKVLGNIEVGRCARIAAGSVVLKPVPRNTTVAGIPAKVVGEAGCAEPSRSMDQMFEDNIWSGADI

SEQ ID NO: 83337 - DNA, 843 bp, marine gamma proteobacterium HTCC2207
  CDS (1)..(843): transl_table=11
atggtgtctatgaataaaccgatcacagcatctatgacacccccttcaaaagagcccgcaattaaagggcctgacggcgtctggcagcaaatacgccgcgaagcgcaatctgcagcgactgacgaacccgcactggcaaacttctttaacgcgacagttatcagccacagcagtctcggcaacgcgctaagctactatctggccagcaaactcgccagcgatgaagtgccagaacccatgctgcgaacactaatggatagcgcattttcgacaacagatatcattgatgccgtggccgcggatattgccgctaccgttgatcgagactcggcatgcacattgtatttaacgccattcctctattttaaggggtttcttgcgctgcaagcgtatcgcgtggctcaccaactctggaatcaagagcgtcaatctttagccctattggtgcaataccggatttcgctgatctttgctgtcgatattcatcccgcagccgttattggcagcggcattttaatcgatcacgccaccggcctagtaatcggtgaaaccgcagtgatcgaggactgtgtatcgattatgcagtcggtgacccttggcggcaccggcaaagtctcaggagatcgtcacccaaaaattcgcaaaggcgtgctgcttggtcccggggcaaaaatactcggcaatattgaagtgggtgaaggcgccatggtcgctgcatccagcgtcgtcttaaaagccgtaccagctcatgcagtggtcgccggcgtgccagcagcagtggtcggtgatacgcgctgtgacgagccctcgcaggctatggatcattactttaagtgcgactaa

SEQ ID NO: 83338 - protein, 280 aa, marine gamma proteobacterium HTCC2207
MVSMNKPITASMTPPSKEPAIKGPDGVWQQIRREAQSAATDEPALANFFNATVISHSSLGNALSYYLASKLASDEVPEPMLRTLMDSAFSTTDIIDAVAADIAATVDRDSACTLYLTPFLYFKGFLALQAYRVAHQLWNQERQSLALLVQYRISLIFAVDIHPAAVIGSGILIDHATGLVIGETAVIEDCVSIMQSVTLGGTGKVSGDRHPKIRKGVLLGPGAKILGNIEVGEGAMVAASSVVLKAVPAHAVVAGVPAAVVGDTRCDEPSQAMDHYFKCD

SEQ ID NO: 83339 - DNA, 822 bp, Vibrio sp. Ex25
  CDS (1)..(822): transl_table=11
atgaaacactgcgaaaaacaaaaagtctggaacagaattgtctcagaagcccgcgaaatgtcagagcaagagccaatgctggccagcttttaccatgccaccatcatcaagcatgaaagtttctgtgccgcgctcagctacattttggcaaacaagttaaacacggcatcgatgccagcaatggcagtacgtgaagtggtagaagaagcgttctctgccgacccaaccattaccgattgtgccgcttgtgacatttgtgccacggttaatcgcgacccagcagtttcgatgtactctatgccgctgctgtacttaaagggctaccacgctctgcaaggctaccgcgtggcaaactggctatggaaacaagggcgccatgcactggcaacctacctacaaaaccaaatttcggttgcgtgtcaggtagacattcacccggcagcacgcattggtagcggcatcatgctcgaccacgcaacggggatcgtcatcggtgaaactgcggttatcgataatgacgtctcaattctacaagacgttaccttaggcggtacgggtaaagagtgcggcgatcgtcacccgaaaatccgtgaaggtgtgatgattggtgcaggtgcaaaaattcttggcaatatcgaagtgggcgaaggcgcgaaaatcggctcttgctctgtggtattgcaagcagtgccaccacacacaaccgtggcgggggttcctgcgaaaatcgtcggtcgtccaaaaacggacaaaccttctctcgatatggatcaaggctttaatggtaaatcacaaagctttatccatggagatggtatttaa

SEQ ID NO: 83340 - protein, 273 aa, Vibrio sp. Ex25
MKHCEKQKVWNRIVSEAREMSEQEPMLASFYHATIIKHESFCAALSYILANKLNTASMPAMAVREVVEEAFSADPTITDCAACDICATVNRDPAVSMYSMPLLYLKGYHALQGYRVANWLWKQGRHALATYLQNQISVACQVDIHPAARIGSGIMLDHATGIVIGETAVIDNDVSILQDVTLGGTGKECGDRHPKIREGVMIGAGAKILGNIEVGEGAKIGSCSVVLQAVPPHTTVAGVPAKIVGRPKTDKPSLDMDQGFNGKSQSFIHGDGI

SEQ ID NO: 83341 - DNA, 819 bp, Alteromonadales bacterium TW-7
  CDS (1)..(819): transl_table=11
atgcgtcatgaaatttggcaacagcttcgaagtgaagcaaatgaagtcgtcactcgcgaaccacttttagcaagtcatgtgtattcatgtattttgaaccatgagtgtttaggttcggcgttaagctttattgttgctaacaaattggccgatgctgttgtatctgcatttactattcgtgaattattcgatcaatcatttgtaaaatgcgatcgcatgctgtcttttgtcgcagaagacattaaagctgtaaaagatagagacccagccgcagaaacctacctgactgttattttaaatttaaaggggtttcatgctattcaggctcatcgtttagctaactgcttgtggcaacaaaaccgtaaagaactggcgcgttttattcaaagccgtacttctgaagtgtttggtgtagatattcaccctgcttgtcaggttggtaaaggcataatgtttgaccacgcaacgggtattgttattggtgaaacggcagtcattgaagataatgtatcgatactgcaatcggttacgcttggcggtacaggtaatgagcaaggtgatcgtcatcctaaaatcagagcgggtgtgttaattggcgcaggtgcaaaagtgctgggtaatattgaagtgggtgagggcgcacgtattggtgcagggtcggtggtattaactgctgtgccacctcatacaacggccgttggcgtaccggccaaaattattggcagacctgaatgcccgtgtcctgcgcaaagtatgaaccaaaactttttagctacaccagagccagaaaacgaatcgcataccagcgctatgctgtga

SEQ ID NO: 83342 - protein, 272 aa, Alteromonadales bacterium TW-7
MRHEIWQQLRSEANEVVTREPLLASHVYSCILNHECLGSALSFIVANKLADAVVSAFTIRELFDQSFVKCDRMLSFVAEDIKAVKDRDPAAETYLTVILNLKGFHAIQAHRLANCLWQQNRKELARFIQSRTSEVFGVDIHPACQVGKGIMFDHATGIVIGETAVIEDNVSILQSVTLGGTGNEQGDRHPKIRAGVLIGAGAKVLGNIEVGEGARIGAGSVVLTAVPPHTTAVGVPAKIIGRPECPCPAQSMNQNFLATPEPENESHTSAML

SEQ ID NO: 83343 - DNA, 816 bp, marine gamma proteobacterium HTCC2143
  CDS (1)..(816): transl_table=11
atggcaacgcaacctattgcgattagccctgaaaatgatgccatatggcaaagtattcagacagaaacccaagctgccattaataaagagcctgttttggcgagttttttgcactctaccatcctcaatcataagaccctggaacgtgcccttagctttcatctggctaataaactggacagcccaacagtatcagcactgttggttcgggaagtcattgaggatgctctggcgtctgattcaaccattgccaaagccgttcgctgtgatatccgcgcggtcaaagagcgtgattctgcctgtagcttatactctgtgccttttctctattttaaaggctttcatgcgctgcaggcctaccgtgttgcgcattggctgtggaatcagggacgggaagatttagccttatttttccagaactgtatttctaccgaatttggcgtagacattcaccccgcggcgaagataggacacggtattctgatcgatcatgcaacgggtgtggtgatcggagaaactgcaaccgttggcaacaatgtgtcgctcatgcactcggtaacattgggtggcacgggtaaagaaggcggagaccgtcatccaaaagtgggcgacggcgtattgatcagtgccggcgccaaaattcttggtaacatccgcattggcagtggcgctaaagtgggatccggtagtgtcgtattacaagatgtgcccgctcatactaccgttgctggcgtacccgcaaaggtgattggcaaaccaggcagtgatcaaccggcactggatatgaatcacggcattaactgtgatatgggctag

SEQ ID NO: 83344 - protein, 271 aa, marine gamma proteobacterium HTCC2143
MATQPIAISPENDAIWQSIQTETQAAINKEPVLASFLHSTILNHKTLERALSFHLANKLDSPTVSALLVREVIEDALASDSTIAKAVRCDIRAVKERDSACSLYSVPFLYFKGFHALQAYRVAHWLWNQGREDLALFFQNCISTEFGVDIHPAAKIGHGILIDHATGVVIGETATVGNNVSLMHSVTLGGTGKEGGDRHPKVGDGVLISAGAKILGNIRIGSGAKVGSGSVVLQDVPAHTTVAGVPAKVIGKPGSDQPALDMNHGINCDMG

SEQ ID NO: 83345 - DNA, 837 bp, marine gamma proteobacterium HTCC2080
  CDS (1)..(837): transl_table=11
atggtgaccgttatgacggcagttcattcagtaccaataaaaaaactacagggcggtgaccctatctgggagcaaatgcgcgcagagaccgagcgcgctgccagccaagaaccggtcttggtgagctttctgcatgcaaccattttgcatcatgacgaactggaatgcgccctaagctttcacctggccaaccagctcgatagcccaacagttccggccatgatgcttcgagaaatcatgctggcggcctttagcagtgacgccaccctgcgcagcgctatacgtgacgatttacaggcggttcttgatcgcgactcggcctgtcaggaatatcatctgcctttcctctatttcaaaggttttcaagccttacaaacccaccgcgttgcccattggctttggcaggaaaatcgacattcgctggctctatttctacaaagccaggtatcacaaaagtttggcatagacattcatcctgcagcacgttttggtcatggcatcatgctcgatcacgccactggcttagtgattggtgaaacggccgtagtaggcaaccacgtctcgatacttcagtcggtcactctggggggtactggaaaacaagatggcgaccgccacccaaaaattggcgatggcgtcctcatttcagccggtgccaaaattttgggcaatattatcgttggggaaggtgccaaggtcggcgctggttccgtagtgctgcatgacgtgccatcccacacaactgtggcaggagtacctgcaaaagtcgtgggcgtccccgactcggagacacccgcgctagatatggatcatgcgcttcctgaatcggactggtga

SEQ ID NO: 83346 - protein, 278 aa, marine gamma proteobacterium HTCC2080
MVTVMTAVHSVPIKKLQGGDPIWEQMRAETERAASQEPVLVSFLHATILHHDELECALSFHLANQLDSPTVPAMMLREIMLAAFSSDATLRSAIRDDLQAVLDRDSACQEYHLPFLYFKGFQALQTHRVAHWLWQENRHSLALFLQSQVSQKFGIDIHPAARFGHGIMLDHATGLVIGETAVVGNHVSILQSVTLGGTGKQDGDRHPKIGDGVLISAGAKILGNIIVGEGAKVGAGSVVLHDVPSHTTVAGVPAKVVGVPDSETPALDMDHALPESDW

SEQ ID NO: 83347 - DNA, 819 bp, Rhodobacter capsulatus
  CDS (1)..(819): transl_table=11
atgtccaaaacccgtgcgaaggtcgctgccatcgatccggtgtggatgcggatctgtgaggaggcgcatgatgccgtggggcaggaaccgcttctgggcgccttgatccatgccgggcttttgcatcatgcgacgatggaaaaggcgctggcctatcggttttcgctcaaactcgcctcgggcgagatgagcgagcagttgctgcgcgagattgcggatgacgcttatgggtcggaccccgatctggggcaggcggcgcgggcggatctggtggcggttttcgatcgtgacccggcctgccaccggttcttgcagccgatcctgttcttcaagggctatcaggcgctgcaaagctatcgcgtcgcgcattggctgtggcggcaggggcgcaaggacatggcctatttcgtgcagatgcgcacctcggaggcgttcggggtcgacattcacccggcggcgcggatcgggcgcggggtgatgatcgaccacgcccattcgatcgtgatcggggaaacggcggtggtgggcgacaatgtctcgatgctgcattcggtgacactgggcggcaccggcaaggaagaacaggaccgccatccgaagatcggcaatggcgtcttgatcggggccggggcgaaggtgctgggcaatattcacgtcggcgacaattcgcggatcgcggcggggtccgtggtgctggccgatgtgccgcgctgcaagaccgtggccggggtgcccgcgaagatcgtgggcgaggcgggctgtgcgcagccctcggtcaacatggatcagcagttgcgcggctgcgactgcgagggctga

SEQ ID NO: 83348 - protein, 272 aa, Rhodobacter capsulatus
MSKTRAKVAAIDPVWMRICEEAHDAVGQEPLLGALIHAGLLHHATMEKALAYRFSLKLASGEMSEQLLREIADDAYGSDPDLGQAARADLVAVFDRDPACHRFLQPILFFKGYQALQSYRVAHWLWRQGRKDMAYFVQMRTSEAFGVDIHPAARIGRGVMIDHAHSIVIGETAVVGDNVSMLHSVTLGGTGKEEQDRHPKIGNGVLIGAGAKVLGNIHVGDNSRIAAGSVVLADVPRCKTVAGVPAKIVGEAGCAQPSVNMDQQLRGCDCEG

SEQ ID NO: 83349 - DNA, 1269 bp, Oryza sativa subsp
  CDS (1)..(1269)
atgccacccggtggggaacagctcaacgtgggagatgatgaaacacgacactgccgagtggtcacactaggtgttgcaccggatccaaatccgttagtttctgttggctatcaaggttgctgtcgaccagagtctgccgctgcgtgccctcagcctaggtgcagctcgcgccgttggatcacttggtcgaagcgtgtccgtgtgccacgtcatcgtgtacaccacaccacaccagcttcgagctctgattggttggctgacgtgtccgtctccacgcctatttattcgctcttcccgcgcgcgtcccgcccggcgacggcgacctcaccggcgtcgacgtcaccggccgacgacgacgagacttcagcgatgaccaccgcccagccactccagcacgagcatgacccgtccccgccggagccggacgccgccgccgacgccgacgacgaggaggagtcgcgggtgtggtcccagatcaaggccgaggcgcgccgcgacgccgacggcgagccggcgctggcgtcgttcgtgtacgccaccgtgctctcccaccccaccctcgccggctccctcgccttccacctcgccaacaagctcgcctcctcctccacgctgctctcctccacgctcctctacgacctcttcgccgccgcccacgccgcgcgccccgacctccgcgccgccgccgccgccgacctcctagccgcgggcgcccgcgacccggcctgcgcgggccgcctctcccactgcctcctcgactacaagggcttcctcgccgtccaggcccaccgcgtcgcgcacgcgctctgggcgcagggccgccgcgccctggcgctcgcgctccagtcccgcgtcgccgaggtcttcgccgtcgacatccacccggccgccgccgtggggagcggcgtcctcctggaccacgccaccggggtggtcatcggcgagaccgccgtcgtcggcgacggcgtgtccatcctccaccacgtcacgctgggcgggaccggcgaggccgtcggcgaccggcaccccaaggtcggcgacggcgtgctcatcggcgccggcgcgaccatcctcgggaacgtcaggatcggcgccggcgccaagatcggggccgggtcgctggtgctcgccgacgtgccgccgggggccacggcggtggggaacccggcgaggctgctgctcggcggggaccagcgcggcggcgcgccggccggtgaatccatggaccatgcctccttcatgctggagtggtcggattacaccatttga

SEQ ID NO: 83350 - protein, 422 aa, Oryza sativa subsp
MPPGGEQLNVGDDETRHCRVVTLGVAPDPNPLVSVGYQGCCRPESAAACPQPRCSSRRWITWSKRVRVPRHRVHHTTPASSSDWLADVSVSTPIYSLFPRASRPATATSPASTSPADDDETSAMTTAQPLQHEHDPSPPEPDAAADADDEEESRVWSQIKAEARRDADGEPALASFVYATVLSHPTLAGSLAFHLANKLASSSTLLSSTLLYDLFAAAHAARPDLRAAAAADLLAAGARDPACAGRLSHCLLDYKGFLAVQAHRVAHALWAQGRRALALALQSRVAEVFAVDIHPAAAVGSGVLLDHATGVVIGETAVVGDGVSILHHVTLGGTGEAVGDRHPKVGDGVLIGAGATILGNVRIGAGAKIGAGSLVLADVPPGATAVGNPARLLLGGDQRGGAPAGESMDHASFMLEWSDYTI

SEQ ID NO: 83351 - DNA, 954 bp, Oryza sativa subsp
  CDS (1)..(954)
atggcagcctgcgtcgacaagtggccgccggcggcgtacctgtgccgcctgccggagaagttctactgcgtcttgccggactgcaccgctacggaccgtccggtggtcaccgcatcggcggcgccggcgccggcgccggccgctagcgggagcagcggcgactacgtgtgggacgtgctgcgcgccgaggcgcaggacgacgcggacgacgagccgctcctccgcaagttctaccacgacctcgtcctgtcgcggccgtcgctggagtccgcgctcgcctcgctgctggcgaccaagctctgcatccccggcgcgctgccgcaggaccagctccgggacctcctcgccggcgcgctcgccgcgcacccggaggccgggcgcgccgcgcgcgccgacctcgtcgcggcgcgcgaccgcgacccggcctgcgccaagatggtccactgcttcctctactacaagggcttcctggcactgcaggcccaccgcgcggcgcacgcgctctggtccgacaaccgcagggcgccggctctcctcctccagagccgcgcctccgaggtgttcggcgtcgacatccaccccggtgcgcgcattggctgcggcatcctgctcgaccacgccacgggcgtcgtcatcggcgagacggccgtcgtcggctacgacgtgtccatcctgcacggggtgacgctgggcggcacggggaaggagtccggcgaccggcaccccaaggtcggggacggtgtgctgatcggcgccggggcgagcgtgctcggcaatgtgcacattggcgacggagcgaagatcggagccggcgcagtcgtgctacgggacgtggcggacggaaccacggccgtcgggaacccagcgaagccgatcatcggcaagaaggcggcgccgctacggcggccggaagagcttcccggggtaaccatggagcagagatggtcggattga

SEQ ID NO: 83352 - protein, 317 aa, Oryza sativa subsp
MAACVDKWPPAAYLCRLPEKFYCVLPDCTATDRPVVTASAAPAPAPAASGSSGDYVWDVLRAEAQDDADDEPLLRKFYHDLVLSRPSLESALASLLATKLCIPGALPQDQLRDLLAGALAAHPEAGRAARADLVAARDRDPACAKMVHCFLYYKGFLALQAHRAAHALWSDNRRAPALLLQSRASEVFGVDIHPGARIGCGILLDHATGVVIGETAVVGYDVSILHGVTLGGTGKESGDRHPKVGDGVLIGAGASVLGNVHIGDGAKIGAGAVVLRDVADGTTAVGNPAKPIIGKKAAPLRRPEELPGVTMEQRWSD

SEQ ID NO: 83353 - DNA, 945 bp, Oryza sativa subsp
  CDS (1)..(945)
atgccggccggccagccgcacgcgcacgagcccgacggcggcggcgcgagccaccgccggccccagtcgccgccgtcgctccccgcggaggtggtcccggcgttcgcgccgccggagtcggaggacgaggagtcctgggtctggtcccagatcaaggccgaggcgcgccgcgacgccgacgccgagccggcgctcgcgtccttcctctacgccagcgtggctcttcccacccctccctcccgcgctccatctccttccacctcgccaacaagctctgctcctccaccctcctctccacgctcctctacgacctcttcctggcttccttcaccgcgcacccctccctccgcgcgcgtcgtcgccgacctcctcgccgcccgctcccgcgacccggcctgcgtcggcttctcccagtgcctcctcaacttcaagggcttcctcgccatccaggcgcaccgcgtgtcgcacgtcctctgggcgcagcagcgacgcccccttgccctcgccctccagtcccgcgtcgccgacgtcttcgccgtcgacatccaccccgcggccgtcgtcggcaagggcatcctcctcgaccacgccaccggcgtcgtcatcggcgagaccgccgtcgtcggcgacaacgtctccatcctccaccacgtcacactgggtggcacaggcaaggctgtcggtgaccggcaccccaagattggggatggtgttctgattggcgccggggcgacgattcttggcaacgtcaagattggagccggggccaagattggtgccgggtcagtggtgctgatagatgtgccggcgaggaacacggcggtggggaatccagccaggttgattggcaggaagaacggtgaggttgagaaggatgaggacatgcccggggaatccatggatcacacatccttcattcgacagtggtcggactacaccatttga

SEQ ID NO: 83354 - protein, 314 aa, Oryza sativa subsp
MPAGQPHAHEPDGGGASHRRPQSPPSLPAEVVPAFAPPESEDEESWVWSQIKAEARRDADAEPALASFLYASVALPTPPSRAPSPSTSPTSSAPPPSSPRSSTTSSWLPSPRTPPSARVVADLLAARSRDPACVGFSQCLLNFKGFLAIQAHRVSHVLWAQQRRPLALALQSRVADVFAVDIHPAAVVGKGILLDHATGVVIGETAVVGDNVSILHHVTLGGTGKAVGDRHPKIGDGVLIGAGATILGNVKIGAGAKIGAGSVVLIDVPARNTAVGNPARLIGRKNGEVEKDEDMPGESMDHTSFIRQWSDYTI

SEQ ID NO: 83355 - DNA, 1158 bp, Spinacia oleracea
  CDS (21)..(1064)
caaaagtgtcgtccagacggatgttggcggtttcatatgccattccgtcttgctgcattaacagattttatatccgagaattttcaagttctcttcaaccggccctccaccacccctggtacaagaagagattcgggtgctgctccaccaatcaggaaaattgcagtttaggttctcccacacatctccctagaatgccaggaggggatttgagtgttgcaccatcagtgggtcatttaacagcaaataacgaggcgtggttgtgggatcagataaagggtgaagcccgtcgtgatgctgattcagagcctgcacttgcctcttatctatactccacaatcctttcacactcctctctagaacggtcactctccttccacctaggaaacaagctgtgttcctccactttgctgtcaactcttctttatgatctcttccttaacatcttatcatctgattcttctctgcttgatgctgttgttgctgatttacgtgctgccagagtacgtgacccagcttgtgtatccttttctcactgccttctaaactacaaggggttcttagcatgtcaatcacaccgtgtggcccacaaactatggaatcaagatagacggcctcttgcacttgcacttcactccagaatatctgatgtatttgctgttgatatccaccctgctgctagaattgggaaggggatactctttgatcatgctactggtgttgttattggagagacagcaataattggtgacaactgttcgatattacatcacgtgacacttggtggaacaggaaaagctggaggtgaccgtcacccaaaagtcggtgatggagttttaataggtgctggggcaacaatcctgggtaatgttaggattggtgatggagcaaagataggtgcaggatcagtagtgctcattgatgttcctcctagaacaacagctgtgggtaatccagctagattaatcggtggcaaagagaaaccgtcacagaattcagatgttcctggagagtctatggatcacacttcatttatttcagagtggtccgattatatcatttaataatatcatagatacaatcaatatatgtataaattattaattatttgctgagaatttggactgttactttggatcaaaaaaaaaaaaaaaaaaa

SEQ ID NO: 83356 - protein, 347 aa, Spinacia oleracea
MLAVSYAIPSCCINRFYIREFSSSLQPALHHPWYKKRFGCCSTNQENCSLGSPTHLPRMPGGDLSVAPSVGHLTANNEAWLWDQIKGEARRDADSEPALASYLYSTILSHSSLERSLSFHLGNKLCSSTLLSTLLYDLFLNILSSDSSLLDAVVADLRAARVRDPACVSFSHCLLNYKGFLACQSHRVAHKLWNQDRRPLALALHSRISDVFAVDIHPAARIGKGILFDHATGVVIGETAIIGDNCSILHHVTLGGTGKAGGDRHPKVGDGVLIGAGATILGNVRIGDGAKIGAGSVVLIDVPPRTTAVGNPARLIGGKEKPSQNSDVPGESMDHTSFISEWSDYII

SEQ ID NO: 83357 - DNA, 855 bp, Ostreococcus tauri
  CDS (1)..(855)
atgtcgcgcacgcgcatcgacctgagcaaggtggcgatggaacgcgcgacgtcgacgacgcgggcgtcgagcggggacgagatatgggcctcgctgcgacagggagggcaggagttggtggaaaaggagccgctcatgggggggttcgtgtacgcgacgattctgaaccagccgacgtttgagcgcgcgttggcgtttttggtggcgtctaaaatcgcgaacgcgacgatacttcagggacagtggaacgatttgatcatggaggcgctcaacgcgacgaatgaggaggggaatcgcgtgcagaacggaccggggacgggttcgatctcagaggcggcgagggaggatttgaaggctatcgtcgagcgggacccggcgtgtccttcgtacacgcacgcattctgcttcttcaaggggtttcagggcttacaggcccagcgcgtctctcactggctctggggtcatcaccgaaaagttttggcgtgcaagatgcagagcttggtctcggaggttttcaacatggatctgcacccagctgcaaagtttggaagaggaatcatgatagaccacggacacggggtcgtcgtcggcgagacggcggtcgtcgacgacggctgcacgctcctgcacggcgtcaccctcggtggcactggaaaggttaggggcgaccgccatcccaagctcggtaaacgagtcgtcgtgggttcgaacgcgagcgtgctcggaaacattaccgtcggacatgattgtaaaattggcgcgggcgcggcgctcatgcatgacttgccgccgaacaccaccgtggtcggccacaagggacgcgtcgtgacgaagaagacgatgtcaaagctctaa

SEQ ID NO: 83358 - protein, 284 aa, Ostreococcus tauri
MSRTRIDLSKVAMERATSTTRASSGDEIWASLRQGGQELVEKEPLMGGFVYATILNQPTFERALAFLVASKIANATILQGQWNDLIMEALNATNEEGNRVQNGPGTGSISEAAREDLKAIVERDPACPSYTHAFCFFKGFQGLQAQRVSHWLWGHHRKVLACKMQSLVSEVFNMDLHPAAKFGRGIMIDHGHGVVVGETAVVDDGCTLLHGVTLGGTGKVRGDRHPKLGKRVVVGSNASVLGNITVGHDCKIGAGAALMHDLPPNTTVVGHKGRVVTKKTMSKL

SEQ ID NO: 83359 - DNA, 1047 bp, Ostreococcus tauri
  CDS (1)..(1047)
atgttctccgcgcgatgcgcccgggcgggagcgaggacgagcgcgcgcgaggcggtgggggggcgacgaggatggattccgcgcgagggcgcggcggcgtggacgcgcgcgcgaacgaccggcgcgcgcgccgtgagcgatggacgcgagctcgacgacgcggcgaaggcgaagaaagagcgagagtacgcggtgaagtggacgggatcaccggcgggggacgaggacgggagggcggacgcggagcggacgcggagcggggacgacgcgagcgcgcgaggggagagctgtttgctcggagatggaatctggatgcgtctgcgcgaggaggcgaagagcgacatcgatggtgaaccggcgctggcgagttacctgtactccaccgtgctcgcgcacaggagcatcgaggacgtgttggctttcgtgttggcgaacaagctgcggaacaacgtcttgctcgattcgcaattgctcgagctcttcagttcgcagtacaaaaagtatcccgagctcggaaagatgtgccttgcggacatgcaggcggtgttcgagcgcgatcccgcgtgcgaccggtacctgtgcgtcgtgctcttcttcaaggggttccaagcgattcaggcgcacgcgtgcgcactcctgtggctaaggatcgcaaggcgctcagtttctgttgcagaatcgcatatccgaggtggaatgatgatggatcacgccacgggcgtcgtcatcggcgagacagccgtcgtgggcgaaaacgtctcgattctgcacggcgtcaccctcggcggtacggggacgaacaaaggcgatcgtcacccgaagatcggcgacggcgtcgtcatcggggctaacgtcaccattctgggtcccatacatgtcggaagcgacagtaaaattggcgccggttccgtcgtcttggacaacattcccgacggctccaccgccgtcggcatcccggccaaggttatcaatcgcagctcgccgcagcaatcccagccgtcgctttcgatggatcaaacgtcgtatatcaccgattacttcatctga

SEQ ID NO: 83360 - protein, 348 aa, Ostreococcus tauri
MFSARCARAGARTSAREAVGGRRGWIPREGAAAWTRARTTGARAVSDGRELDDAAKAKKEREYAVKWTGSPAGDEDGRADAERTRSGDDASARGESCLLGDGIWMRLREEAKSDIDGEPALASYLYSTVLAHRSIEDVLAFVLANKLRNNVLLDSQLLELFSSQYKKYPELGKMCLADMQAVFERDPACDRYLCVVLFFKGFQAIQAHACALLWLRIARRSVSVAESHIRGGMMMDHATGVVIGETAVVGENVSILHGVTLGGTGTNKGDRHPKIGDGVVIGANVTILGPIHVGSDSKIGAGSVVLDNIPDGSTAVGIPAKVINRSSPQQSQPSLSMDQTSYITDYFI

SEQ ID NO: 83361 - DNA, 822 bp, Klebsiella pneumoniae
  CDS (1)..(822): transl_table=11
atgccgtgtgaagaactggatatcgtctggaataatattaaagccgaagcccgggctttggctgactgtgagccgatgctcgccagtttttaccacgcaacgctactcaagcatgaaaatctcggcagcgcgctgagctatatgctggccaacaagctggcttccccgattatgccggcgatcgccattcgcgaagtggtggaagaggcctacgccgccgatccggaaatgatcgcctccgccgcctgcgatattcaggcggtgcgcacgcgcgacccggcggtggataaatactccacgccgttgctctatctgaagggtttccatgccctgcaggcctatcgtatcggccactggctgtggactcaggggcgacgcgcgctggcgattttcctgcaaaatcaggtctccgtctctttccaggtggatatccacccggcggcgaaaatcggccgcgggatcatgctcgaccatgccaccggcattgtggtcggcgaaacggcggtgattgaagatgacgtctctattctgcagtcggtcaccctcggcgggaccggtaaaaccagcggcgaccgtcatccgaaaattcgcgaaggcgtaatgattggcgccggggcgaagatcctcggcaatattgaagtcgggcgtggcgcgaagattggcgccggttcggtggtattgcagccggttccgccgcacaccaccgcggcgggcgtaccggcgcgtatcgtcggcaagccggagagcgacaagccggcgatggatatggatcagcatttcaacggcatccaccacaccttcgagtacggcgacgggatttga

SEQ ID NO: 83362 - protein, 273 aa, Klebsiella pneumoniae
MPCEELDIVWNNIKAEARALADCEPMLASFYHATLLKHENLGSALSYMLANKLASPIMPAIAIREVVEEAYAADPEMIASAACDIQAVRTRDPAVDKYSTPLLYLKGFHALQAYRIGHWLWTQGRRALAIFLQNQVSVSFQVDIHPAAKIGRGIMLDHATGIVVGETAVIEDDVSILQSVTLGGTGKTSGDRHPKIREGVMIGAGAKILGNIEVGRGAKIGAGSVVLQPVPPHTTAAGVPARIVGKPESDKPAMDMDQHFNGIHHTFEYGDGI

SEQ ID NO: 83363 - DNA, 948 bp, Oryza sativa subsp
  CDS (1)..(948)
atggcagcctgcgtcgacaagtggccgccggcggcgtacctgtgccgcctgccggagaagttctactgcgtcttgccggactgcaccgctacggaccgtccggtggtcaccgcatcggcggcgccggcgccggccgctagcgggagcagcggcgactacgtgtgggacgtgctgcgcgccgaggcgcaggacgacgcggacgacgagccgctcctccgcaagttctaccacgacctcgtcctgtcgcggccgtcgctggagtccgcgctcgcctcgctgctggcggccaagctctgcatccccggcgcgctgccgcaggaccagctccgggacctcctcgccggcgcgctcgccgcgcacccggaggccgggcgcgccgcgcgcgccgacctcgtcgcggcgcgcgaccgcgacccggcctgcgccaagatggtccactgcttcctctactacaagggcttcctggcactgcaggcccaccgcgcggcgcacgcgctctggtccgacaaccgcagggcgccggctctcctcctccagagccgcgcctccgaggtgttcggcgtcgacatccaccccggtgcgcgcattggctgcggcatcctgctcgaccacgccacgggcgtcgtcatcggcgagacggccgtcgtcggctacgacgtgtccatcctgcacggggtgacgctgggcggcacggggaaggagtccggcgaccggcaccccaaggtcggggacggtgtgctgatcggcgccggggcgagcgtgctcggcaatgtgcacattggcgacggagcgaagatcggagccggcgcagtcgtgctacgggacgtggcggacggaaccacggccgtcgggaacccagcgaagccgatcatcggcaagaaggcggcgccgcaacggcggccggaagagcttcccggggtaaccatggagcagagatggtcggattga

SEQ ID NO: 83364 - protein, 315 aa, Oryza sativa subsp
MAACVDKWPPAAYLCRLPEKFYCVLPDCTATDRPVVTASAAPAPAASGSSGDYVWDVLRAEAQDDADDEPLLRKFYHDLVLSRPSLESALASLLAAKLCIPGALPQDQLRDLLAGALAAHPEAGRAARADLVAARDRDPACAKMVHCFLYYKGFLALQAHRAAHALWSDNRRAPALLLQSRASEVFGVDIHPGARIGCGILLDHATGVVIGETAVVGYDVSILHGVTLGGTGKESGDRHPKVGDGVLIGAGASVLGNVHIGDGAKIGAGAVVLRDVADGTTAVGNPAKPIIGKKAAPQRRPEELPGVTMEQRWSD

SEQ ID NO: 83365 - DNA, 906 bp, Oryza sativa subsp
  CDS (1)..(906)
atggcagcctgcgtcgataagtggccggcggcgtacccgtgccgcctgccggataagttctactgcgccttgccggactgcaccaccacggaccgtccggtggcgccggcgccggcggctagcgggagcagcggcgactacgtgtgggacgcgctgcgcgccgaggcgcaggacgacgcggacgacgagccgctcctccgcaagttctaccacgacctcgtcctgtcgcggccgtcgctggagtccgcgctcgcctcgctgctggcggccaagctctgcatccccggcgcgctgccgcaggaccagctccgggacctcctcgccggcgcgctcgccgcgcacccggaggccgggcgcgccgcgcgcgccgacctcgccgcggcgcgcgaccgcgacccggcctgcgccaagatggtccactgcttcctctactacaggggcttcctggcactgcaggcccaccgcgcggcgcacgcgctctggtccgacaaccgcagggcgccggccctccttctccagagccgcgcctccgaggtgttcggcgtcgacatccaccccggggcgcgcattggcggcggcatcctgctcgaccacgccacgggcgtcgtcatcggcgagacggccgtcgtcggctacggcgtgtccatcctgcacgccgtgacgctgggcggcacggggaaggagtccggcgaccggcaccccaaggtcggggacggtgtgctgatcggcgccggggcgagcgtgctcggcaatgtgcacattggcgacggagcggagatcggagccggtgcaatcgtgctacgggacgtggcggacggaaccacggccaagccgatcatcggcaagaaggcggagccgcaacgagagcttcccggggtaaccatggagcagagatggtcggattga

SEQ ID NO: 83366 - protein, 301 aa, Oryza sativa subsp
MAACVDKWPAAYPCRLPDKFYCALPDCTTTDRPVAPAPAASGSSGDYVWDALRAEAQDDADDEPLLRKFYHDLVLSRPSLESALASLLAAKLCIPGALPQDQLRDLLAGALAAHPEAGRAARADLAAARDRDPACAKMVHCFLYYRGFLALQAHRAAHALWSDNRRAPALLLQSRASEVFGVDIHPGARIGGGILLDHATGVVIGETAVVGYGVSILHAVTLGGTGKESGDRHPKVGDGVLIGAGASVLGNVHIGDGAEIGAGAIVLRDVADGTTAKPIIGKKAEPQRELPGVTMEQRWSD

SEQ ID NO: 83367 - DNA, 918 bp, Musa balbisiana
  CDS (1)..(918)
atgccgacggagaagacgaaccagaacggcctcgccgcctcggccccggcggcagctgcgcggcacgcgatcccgacgtacccgccgccggagtcggagtcggaggagtcgtgggtgtgggcgcagattaaggcggaggcccaccgggacgcggagtcggagccggcgctggcgagcttcctctacgccacggtgctctcccacaactccctggccttctccctcgccttccacctcgccaacaaactctgctcctccactctcctctccaccctcctctacgacctcttcctccagtccttttcctccaagccctccctcatctccgctgttgtcgcggacctcctcgctgttcgccaccgcgaccccgcctgcgtctccttctcccactgcctcctcaactacaagggcttcctcgccgtccaggctcaccgcgtgtcccacctcctctggggccagcaccgccgccccctcgccctcgccctccagtcccgcatcgccgacgttttcgccgtcgacatccaccccgccgcccgtatcggcaagggcatcctcctcgaccacgccaccggcgtcgtcgtcggcgagaccgccgtgatcggcaacaacgtctccatcctccaccacgtcaccctcggtggcaccggcaaggccgtcggcgaccgccacccgaagatcggcgacggcgtcctcatcggagccggcgctaccatcctcggcaacatccggataggggagggggccaagatcggtgccgggtccgtcgtcctcatcgacgtgcccccgaggaccacggtcgtcgggaaccctgcccggctcgtcggggggaaggacaagcccgcgaggcacgacgatgtgccaagcgaatccatggatcacacttccttcatccaggagtggtccgactacatcatctga

SEQ ID NO: 83368 - protein, 305 aa, Musa balbisiana
MPTEKTNQNGLAASAPAAAARHAIPTYPPPESESEESWVWAQIKAEAHRDAESEPALASFLYATVLSHNSLAFSLAFHLANKLCSSTLLSTLLYDLFLQSFSSKPSLISAVVADLLAVRHRDPACVSFSHCLLNYKGFLAVQAHRVSHLLWGQHRRPLALALQSRIADVFAVDIHPAARIGKGILLDHATGVVVGETAVIGNNVSILHHVTLGGTGKAVGDRHPKIGDGVLIGAGATILGNIRIGEGAKIGAGSVVLIDVPPRTTVVGNPARLVGGKDKPARHDDVPSESMDHTSFIQEWSDYII

SEQ ID NO: 83369 - DNA, 1140 bp, Citrullus lanatus
  CDS (43)..(927)
cgaacaccctggcagcagcgtttttctctctttcgacaagtcatgccagttggtgagcttcgattttcgtctcagtcttcaacgacggtggtggagtctactacaaacaacgacgagacatggttgtgggggcagattaaagcagaggcgcggcgagatgccgagtcagagccggcattggctagctatctttactcgacgattttgtcacattcatcgctcgagagatcgctttcgtttcatttggggaacaaactttgctcctccacgcttctttctactctcctttacgatcttttcctcaatgctttctccactgattactgtctaagatcagctgttgtcgcggatttgcaagcagctcgtgaacgtgacccagcctgtgtttcattctcacattgcctcctcaattacaaaggattcttagcctgccaggctcatcgtgtggctcacaagctgtggaatcaatcacgtaggccgctagcactggcacttcaatctcgcattgctgatgtcttcgccgttgacattcaccctgcagcaagaattgggaaaggcattctgtttgatcatgctaccggtgtagtggtgggtgagacggcagtgataggcaacaatgtctcaattcttcatcatgtcactcttggagggacaggaaagatgtgtggagacaggcatccaaagattggggatggtgttttaatcggtgctggagcgaccattcttggcaatgttaagattggagaaggagccaagatcggggcaggatcggtggtgctcattgatgtgccaccacgaactactgccgtgggcaatcccgcaaggctggtggggggaaaggagaagccatcacagctcgaggatattcctggagagtccatggaccatacatctttcatatccgaatggtcagattacataatttgatagtattttatacgagtgttctagattttcatctctctaccacttcaacagtggattttaatttccattatgcccttgtcattaccgtagagctatcagagatacgtcgaccctctttttggtttcccctgtagtatattcactcttctgcccctgcttatcagactctaaattttggcaaataaataaaatgcagtaacttgacaactaaaa

SEQ ID NO: 83370 - protein, 294 aa, Citrullus lanatus
MPVGELRFSSQSSTTVVESTTNNDETWLWGQIKAEARRDAESEPALASYLYSTILSHSSLERSLSFHLGNKLCSSTLLSTLLYDLFLNAFSTDYCLRSAVVADLQAARERDPACVSFSHCLLNYKGFLACQAHRVAHKLWNQSRRPLALALQSRIADVFAVDIHPAARIGKGILFDHATGVVVGETAVIGNNVSILHHVTLGGTGKMCGDRHPKIGDGVLIGAGATILGNVKIGEGAKIGAGSVVLIDVPPRTTAVGNPARLVGGKEKPSQLEDIPGESMDHTSFISEWSDYII

SEQ ID NO: 83371 - DNA, 1111 bp, Thlaspi goesingense
  CDS (52)..(987)
aaaaaatacaggtgggagagaaatcagatttttgtcgccgtcgtcattaagatgccgccggccggagaactccgtcatcaacctccttcagaggatacacagtctacagatactccatctgccgaagcagcagctgcggcagcgatattagcggcagctgcagattcggaggctgctggattatggacacagatcaaagcggaagctcgccgcgacgctgaggcggagccggcgttagctagctatctctactcgacgattctctctcattcttctctcgagcgatcgatctcgttccatttgggaaacaagctctgctcctcgacgcttctctccacgcttttatacgatcttttcttaaacaccttcacctccgatccatctctgcgcaacgccaccgtcgcagatcttcgcgctgctcgcgttcgtgatccggcttgcatctcgttctcgcattgcctcctcaattataaaggcttcttagcaattcaggcgcatcgtgtgtcacacaagctatggacgcaatcgcggaagccattagcgttagctctccactcgagaatctccgacgtattcgccgtcgatatccatcccgcggcgaggatcggaaaagggatacttctcgaccacgcaacgggagtcgtcatcggagaaacagctgtgatagggaacaacgtatcgatcctccaccacgtgacgctcggtggaaccggtaaagcttgcggagacagacatccgaagatcggcgacggttgcttgatcggagctggggcgactattctcgggaacgtgaagatcggcgcaggagctaaagtaggagctggatccgtggtcctgatcgacgtgcctccgcgagctacggcggttgggaatccggcgaggctcgtgggagggaaagagaaaccaacgattcatgatgaggaatgtcccggagaatcgatggatcacacttccttcatctcggaatggtcagattacattatttgaagttatatgaaagcgaagacttttcgagctattcgcttgtagagtgtttggatgagaatgtataagcgagctttgttgaatttatataagtattaggatgttcaatacaatataagtttttgtt

SEQ ID NO: 83372 - protein, 311 aa, Thlaspi goesingense
MPPAGELRHQPPSEDTQSTDTPSAEAAAAAAILAAAADSEAAGLWTQIKAEARRDAEAEPALASYLYSTILSHSSLERSISFHLGNKLCSSTLLSTLLYDLFLNTFTSDPSLRNATVADLRAARVRDPACISFSHCLLNYKGFLAIQAHRVSHKLWTQSRKPLALALHSRISDVFAVDIHPAARIGKGILLDHATGVVIGETAVIGNNVSILHHVTLGGTGKACGDRHPKIGDGCLIGAGATILGNVKIGAGAKVGAGSVVLIDVPPRATAVGNPARLVGGKEKPTIHDEECPGESMDHTSFISEWSDYII

SEQ ID NO: 83373 - DNA, 1100 bp, Thlaspi goesingense
  CDS (46)..(1005)
tttcatagaagtgcttcttccaaaaccaaatcttcatctccatcaatggcaccgtgcatcgacacttccagaaccggaaaaacccagctctctcaaaacgatgattctggtttccgttacctgaatttctgtggacccggtttctctgagcggatttcacgcgggaaccacacgaaaacccaaacagacgacgatgtctggcttaagatgcgagaagaagctaaatctgacgtcgagcaagaacccattttgtcgagctactatgacgcttccattacatcgcatccatcgttggatcatgctttggcgagcatcctctccgtaaagctcagtaatctgaccttaccaagcgacacgctttttgaattgttcatcagcgttttacaagaaagccctgaaactgaaatcattgactcggtgaagcaagatctactagcagccaaggaaagagacccagcttgtgtaagctacgtccactgcttcctgagcttcaagggcttcctcgcgtgtcaagctcatcgaatcgctcacaaactctggactcaggacagaaaaatgctagctttactgatccagaacagagtatcggaggttttcgccgtcgattttcacccaggggcgaggatcggaaaagggattttgttagaccacgcgacggccgtggtgatcggcgagacggcggtggttggagacaatgtttcgattctccacggcgtgacgctcggaggaacagggaaacagtgcggcgaccggcatccgaagattggtgatggagtcttgatcggagccgggacttgtatattggggaatataacaatcggtgagggagttaaaattgggtcgggttcggtggtgctgaaggacgtgccgccgcgtacgacggcggtaggaaatccggcgagattgattggtgggaaagagaatccgacaaaacacgacaagattcccggtctgaccatggaccaaacatcgcatatgaccgagtggtctgattacgttatctaaaactaaaagaaagtgtataaatttgttcttttgtttttgtaactaaaagcaggtaatgtctgtactttgattaaaaacagccgactgtctaaagc

SEQ ID NO: 83374 - protein, 319 aa, Thlaspi goesingense
MAPCIDTSRTGKTQLSQNDDSGFRYLNFCGPGFSERISRGNHTKTQTDDDVWLKMREEAKSDVEQEPILSSYYDASITSHPSLDHALASILSVKLSNLTLPSDTLFELFISVLQESPETEIIDSVKQDLLAAKERDPACVSYVHCFLSFKGFLACQAHRIAHKLWTQDRKMLALLIQNRVSEVFAVDFHPGARIGKGILLDHATAVVIGETAVVGDNVSILHGVTLGGTGKQCGDRHPKIGDGVLIGAGTCILGNITIGEGVKIGSGSVVLKDVPPRTTAVGNPARLIGGKENPTKHDKIPGLTMDQTSHMTEWSDYVI

SEQ ID NO: 83375 - DNA, 1353 bp, Thlaspi goesingense
  CDS (34)..(1221)
aaggaaaaaagagttttcccgagaaaatttccaatgttcccggtcacaagtcgccgccacttctctttctccctatatatgctccgttcatcttctccacacacccatgtcctctactcttcctctttcctcccttcatttgtctcatccaggtcctctgcacccaaacataaccgaaaaaccttaccccctccaatggcggcgtgtatcgacacgtgcagaaccgggaaacctcagatttcttctcgcgattctaccaggtctcacgacgatgaatccggtttccgttacctgaattactaccgtaccggttacccggaccgagtttcgcgagctccgatcaacgggatccagaccagaaccctccacacccgcccgctcgttgaagatctcgaccgagacgccgaaatcgacgatgtctgggagaaaatccgcgaagaagccaagtccgatatccagcgagaacctattgtttccggctattatcacgcatcgattgtctcccagcgatccttggaggcggcgttggcgaacactctatcggttaaactcagcaacttgaaccttcccagcaacacgctcttcgatttgttcaacggcgttctcgaagaacacccagaaatcgttgaatgtgtgaagcaagatctgatagcggtcaaggaaagagacccagcttgcataagctacgtccattgtttcctacacttcaaaggcttcctcgcctgccaagcgcatcgaattgctcatgagctctggacgcaggaccggaaaatcctcgctttgttgatccagaacagagtatcggaggccttcgccgttgatttccaccctggggccaaaatcggaaccgggattttgctcgaccacgctaccgccatcgtcatcggcgagacggcggtggtggggaacaacgtctctatcctccacaacgtaacgctcggaggaacggggaaacagtgcggagacaggcacccgaagatcggcgacggggtcttgattggagctgggacgtgtattttggggaatataacgattggagagggagccaagatcggtgctggctcggtggtgctgaaggacgtgccgccgcgtacgacggctgtgggaaatccggcgagattgcttggtggcaaagataatccgaaaaagcacgacaagatacctggcctgaccatggaccagacgtcgcatatatccgagtggtcggattatgtaatttgagaaagtcttcgtttttgttgtttattgcttctcctgtaatcgaagctgtagaataatatatgttatgcggtggctagtgcaaccctgtttctataatcacagatcatttgtctctaaaaaaaaaaaaaaaaa

SEQ ID NO: 83376 - protein, 395 aa, Thlaspi goesingense
MFPVTSRRHFSFSLYMLRSSSPHTHVLYSSSFLPSFVSSRSSAPKHNRKTLPPPMAACIDTCRTGKPQISSRDSTRSHDDESGFRYLNYYRTGYPDRVSRAPINGIQTRTLHTRPLVEDLDRDAEIDDVWEKIREEAKSDIQREPIVSGYYHASIVSQRSLEAALANTLSVKLSNLNLPSNTLFDLFNGVLEEHPEIVECVKQDLIAVKERDPACISYVHCFLHFKGFLACQAHRIAHELWTQDRKILALLIQNRVSEAFAVDFHPGAKIGTGILLDHATAIVIGETAVVGNNVSILHNVTLGGTGKQCGDRHPKIGDGVLIGAGTCILGNITIGEGAKIGAGSVVLKDVPPRTTAVGNPARLLGGKDNPKKHDKIPGLTMDQTSHISEWSDYVI

SEQ ID NO: 83377 - DNA, 1189 bp, Beta vulgaris
  CDS (97)..(978)
gaattcggcacgagcaaacacactttcaggtgccattccaccaataatcagcgggaaaattgtaataatataagttctcccacccatcttcctacaatgccaggaggggaagtcagtgcgccttcatcagtggttctgccgacagcagaatccattgaaaatgacgaggcctgggtgtggggccagatcaaggctgaagcccgtcgtgatgctgactcagaacctgcacttgcctcctacctctactccacaatcctttctcattcctctttggaaagatcgctatccttccacctaggcaataaactgtgctcctccactttgctgtcgaccctcctgtacgacctcttccttaacatcttctcgtccgattcttctctgcgtgttgctgttgttgcagatttacgtgctgccagagtccgtgacccagcatgtgtctccttctctcactgtcttctcaactataaaggttttttggcttgtcaggctcaccgtgtggcccacaggctctggaatcaggaacgacagccccttgcacttgctcttcactcccgaatatccgatgtctttgctgtcgatatccaccctgcagctcgaattggaaaggcaattctctttgaccatgccactggggtggttattggagagacagcagtaataggtgacaactgctcgattttacaccatgtgaccctcgggggaacaggaaaagctgtgggtgatcgtcacccaaaggttggtgatggagttctaattggtgctggggcaacaattttgggtaacattaagattggtgatggggcgaagattggggcgggatcagtggtgctgattgatgttcctccaagggcaacagcagtgggaaacccagcacggttgctcggagggaaagagaaaccgtcgaggaatgtggatgtgccaggagagtctatggatcacacttcttttatttcagagtggtccgattacattatatgattatatattgctagtagaatagttattgtacaatatattctgcatccttcatgtagttgctaacatatgaagtcttttctttagtctaatactagttaggtctttccttggatgtttgccttctgcatgatgaactttccatctgtttgttgtctgtatttttcttgcattgagtacatgtggtgtcaaaaaaaaaaaaaaaaaactcgag

SEQ ID NO: 83378 - protein, 293 aa, Beta vulgaris
MPGGEVSAPSSVVLPTAESIENDEAWVWGQIKAEARRDADSEPALASYLYSTILSHSSLERSLSFHLGNKLCSSTLLSTLLYDLFLNIFSSDSSLRVAVVADLRAARVRDPACVSFSHCLLNYKGFLACQAHRVAHRLWNQERQPLALALHSRISDVFAVDIHPAARIGKAILFDHATGVVIGETAVIGDNCSILHHVTLGGTGKAVGDRHPKVGDGVLIGAGATILGNIKIGDGAKIGAGSVVLIDVPPRATAVGNPARLLGGKEKPSRNVDVPGESMDHTSFISEWSDYII

SEQ ID NO: 83379 - DNA, 1172 bp, Zea mays
  CDS (6)..(947)
cacgcatggctgcctgtgtcgacaagtggcaccccacgcacgccggccgcctcaccggcgccatctaccgctacttgccggacggcgccacggaccgcgcggtggccgccgccgccgccgcgccggcgtccgcgagcggcggcgacgacgacgacgtctgggacgagctgcgcgcggaggccgaggccgacggcgacgccgagcctctgctccgcaagtactacgccgacctcgtcctgtcgcgcccgtcgctggaggccgccctcgccgcgcacctgtcggccaacgtctgcgtccccggcgcgctgccgcaggacgcgctccgggacctcctggccgccgcactggccgcgcgcccggagtccggcccggccgcgcgcgccgacctcccggcggcgcgcgaccgcgacggctgcggccggatggtgcactgcttcctctactacaagggcttcctcgccctgcaggcgcaccgcgccgcgcacgggctgtggtgcgagggcccgtccgcgccggccttcctcctccagagccgcgcgtccgaggtgttcggcgtcgacatccaccccggcgcgcgcattggttcggggatcctgttcgaccacgccacgggcatcgtcatcggcgagacggccgtcgttgggaacgacgtctccatcctgcacggcgtcaccctcggcggcacgggaaaggagtccggcgaccggcacccgaaggtcggggacggggtgctgatcggcgccggcgccagcgtgctcggcaatgtgcgcgttggagccggggcgaagattggagcaggggcggtcgtgctacgggacgtgccggaggggaccacggccgtcgggaaccccgccaaggcggtcgggaagaaggcggcgccgcagcggcggccggaagagcagcctggggtcaccatggagcaagggtggtcggcatacgtgatttgataacttccagagggtctgtttgcaaatatttagtgcaggagagtttccctcccagaagatatttagtcaagtcgttattgagagataggtgcattgccgttgctgcattgcataaagagggagctcaattaggcattgagccctagagcaactccatatttttctttgttttgcgtgaggggaataacaatactatatgcatctgataagttatcggttgcttgt

SEQ ID NO: 83380 - protein, 313 aa, Zea mays
MAACVDKWHPTHAGRLTGAIYRYLPDGATDRAVAAAAAAPASASGGDDDDVWDELRAEAEADGDAEPLLRKYYADLVLSRPSLEAALAAHLSANVCVPGALPQDALRDLLAAALAARPESGPAARADLPAARDRDGCGRMVHCFLYYKGFLALQAHRAAHGLWCEGPSAPAFLLQSRASEVFGVDIHPGARIGSGILFDHATGIVIGETAVVGNDVSILHGVTLGGTGKESGDRHPKVGDGVLIGAGASVLGNVRVGAGAKIGAGAVVLRDVPEGTTAVGNPAKAVGKKAAPQRRPEEQPGVTMEQGWSAYVI

SEQ ID NO: 83381 - DNA, 1162 bp, Zea mays
  CDS (63)..(995)
gcgagccacaccgcccgcacaccccaccggccggccacataggccccgacggcgactcgaagatgacggccgggcagcttctgcgcaccgagccatcagcccagccccagcgggtgcgccacagcaccccgccggcggcactccaagcagacatcgtgccgtcgtacccgccgcccgagtcggacggtgacgagtcgtgggtctggtcccagatcaaggcggaggcgcggcgcgacgcggacgcggagccggcactggcctccttcctctacgcgacggtgctgtcgcacgcgtccctggaccggtccctggccttccacctggccaacaagctgtgctcctccacgctgctgtcgacgctcctctacgacctcttcgtggcgtcgctcgcggacgacccgtccgtccgcgcggcggcggtggccgacctgatcgccgcgcggtcgcgggacccggcctgcgcgggcttcgcgcactgcctcctcaactacaaggggttcctggccgtgcaggcgcaccgcgtggcgcacgtgctgtgggcgcagggccggcgcgcgctggccgtggcgctccagtcccgcgtcgccgaggtcttcgccgtggacatccacccggccgccaccgtcggcaggggcatcctgctcgaccacgccacgggcgtcgtcgtcggggagacggccgtcgtgggcgacaacgtctccatactccaccacgtgacgctgggcggcaccggcaaggcggtgggcgaccggcaccccaagatcggggacggcgtgctcatcggcgccggcgcgaccgtcctcggaaacgtcaggatcggtcgcggcgccaaggtcggcgcggggtccgtcgtcgtcatcgacgtgccgcccaggagcaccgccgtggggaaccccgccaggctgatcgcgcggaagaagggcgaggaggtgatgccgggggagtccatggaccacacctccttcatacagcagtggtcggactacatcatttgagcccgcaagctagaaaaaaaaaagagctccaattgctcatgttgttatcatgctgttgcgttttctgtgtatgtgcgtggatgtgttagctgtatgctcttgttccagtgacgtgaaccgtggacatgctggtgtggtgtccagaaagatatgctcaaagttcgctc

SEQ ID NO: 83382 - protein, 310 aa, Zea mays
MTAGQLLRTEPSAQPQRVRHSTPPAALQADIVPSYPPPESDGDESWVWSQIKAEARRDADAEPALASFLYATVLSHASLDRSLAFHLANKLCSSTLLSTLLYDLFVASLADDPSVRAAAVADLIAARSRDPACAGFAHCLLNYKGFLAVQAHRVAHVLWAQGRRALAVALQSRVAEVFAVDIHPAATVGRGILLDHATGVVVGETAVVGDNVSILHHVTLGGTGKAVGDRHPKIGDGVLIGAGATVLGNVRIGRGAKVGAGSVVVIDVPPRSTAVGNPARLIARKKGEEVMPGESMDHTSFIQQWSDYII

SEQ ID NO: 83383 - DNA, 1225 bp, Zea mays
  CDS (10)..(879)
ggcccaacgatgccggccggccagccgcacgcgcacgaagccgctgccgccgcctgcgtcggcagcggcgcgaaccactccaaccaccgagtgccggcgcactcgccaccgccgctccccgcggaggtggtgccggcgtacccgcccccggagtcggaggacgacgagacctgggtgtggacgcagatcaaggcggaggcccgccgcgacgcggacgcggagccggcgctcgcctccttcctctacgccaccgtgttgtcccacccgtccctgccccgctccctctccttccacctcgccaacaagctctgctcctccacgctcctctccacgctcctctacgacctcttcctcgccacgctcaccgcgcacccctctctccgcgccgccgtcgtcgccgacctcctcgcggcccactcccgcgaccccgcctgcgtcggcttctcccactgcctcctcaactacaagggcttcctcgccatccaggcccaccgcgtcgcgcacgtgctctgggcgcagcagcgacggcccctcgcgctcgcgctccagtcccgcgtcgccgacgtcttcgccgttgacatccaccccgccgccgtcgtcgggaagggaatcctcctcgaccacgccaccggcgtcgtcatcggtgagacggccgtcgtcggcgacaacgtctccatcctccaccacgtcaccttgggcgggaccgggaaggcggtgggtgaccggcaccccaagattggggatggcgtgctgattggagcaggggccaccattcttggtaacgtgaaaattggtgccggggctaagattggagccggatccgtggtgctgatagatgtgccggcgaggagcacggcggttggaaccctgccaggctgatggtggaagaaggccgaggtgcgaatgaggaggacatgccaggggagtccatggatcacacgtccttcatacgtcaatggtcggactacaccatttgagagcggttatccaaggtctattgctcttcttttgtatcactagtaatggtgatgtaccaaataccgagtacttgctctttgttgtgtgtctatggtttgtgtattgtacttagaagcctagtggtgtttatgatcattgtcagctgagtgtgccatgcctgaatactggtaaatttcgattgatggatggacaaatctgtatgagagttggttggaatttgtcacattccttatgaaaaaaaaaaaaa

SEQ ID NO: 83384 - protein, 289 aa, Zea mays
MPAGQPHAHEAAAAACVGSGANHSNHRVPAHSPPPLPAEVVPAYPPPESEDDETWVWTQIKAEARRDADAEPALASFLYATVLSHPSLPRSLSFHLANKLCSSTLLSTLLYDLFLATLTAHPSLRAAVVADLLAAHSRDPACVGFSHCLLNYKGFLAIQAHRVAHVLWAQQRRPLALALQSRVADVFAVDIHPAAVVGKGILLDHATGVVIGETAVVGDNVSILHHVTLGGTGKAVGDRHPKIGDGVLIGAGATILGNVKIGAGAKIGAGSVVLIDVPARSTAVGTLPG

SEQ ID NO: 83385 - DNA, 1215 bp, Oryza sativa subsp
  CDS (1)..(1215)
atgacgtcgtgcgggtgcctggtgctcgagaaggtggaggaccacggcggcgaggcggcggggagggggagagggaggctcgcgcagggtggcggcggcggcggcggtggctgcggatcgtgcgcgggggagtggaggagccggtcggagaccatgttccccatctacgtgatggggagctcgcgggccagctccgccgcggcggcgcggggcatagtcgacgccgccggggaccccatatgggaggccgtcaagtcggaggccaagtctgaggcagagaaggaacctattttaagtagcttcttgtacgccagcgtactatctcatgactgtctcgagagggcgttgagtttcgtccttgcaaacaggctcgaagatccaacattgcttgcaactcagttaatagacattttcaatgatgttatgatgaacaacaaagatatacgccgttctattcgccttgatgctcaggcctttaaagacagagatcctgcctgtgcacaatacagttgggcattgttgtacctcaagggttaccattccgtgcaatcctataggatagctcatgtattatggaatcaaggtcgtaaagttctggcattggcactgcagagccgtatcagtgaggtttttgcagtggatatacacccagcggccagaattggagagggaatattgttggatcatggaacgggtctagttattggtgaaactgccattgttggaaactgggtttcattaatgcagggtgttacacttggtggtactggcaaggaaaatggagatagacaccccaagattggtcagggggctcttcttggagctggtgctactatcctcggcaacataaacgtaggcgaaggtgccatgattgctgctggttcccttgttttaaaggatgtacctccccacagtatggcagtaggaaaccctgcaaaggtagttgggtataaagataaggaagacccttctttaactatgaaacatgatgccagaagagattattttgagcatgttgccgttagtttttcagatgacaaagctaatgcaaaggaggaatctaaaatcatcgatttgacaattccactcgggacaccgaatccatctgatgctgaagtgctcgtgaccagaaagcaacaagtcgccgttgtacacactccggcttgccaagtaggccgcgccaatgaaaggctcaaagcccaccacagcaattag

SEQ ID NO: 83386 - protein, 404 aa, Oryza sativa subsp
MTSCGCLVLEKVEDHGGEAAGRGRGRLAQGGGGGGGGCGSCAGEWRSRSETMFPIYVMGSSRASSAAAARGIVDAAGDPIWEAVKSEAKSEAEKEPILSSFLYASVLSHDCLERALSFVLANRLEDPTLLATQLIDIFNDVMMNNKDIRRSIRLDAQAFKDRDPACAQYSWALLYLKGYHSVQSYRIAHVLWNQGRKVLALALQSRISEVFAVDIHPAARIGEGILLDHGTGLVIGETAIVGNWVSLMQGVTLGGTGKENGDRHPKIGQGALLGAGATILGNINVGEGAMIAAGSLVLKDVPPHSMAVGNPAKVVGYKDKEDPSLTMKHDARRDYFEHVAVSFSDDKANAKEESKIIDLTIPLGTPNPSDAEVLVTRKQQVAVVHTPACQVGRANERLKAHHSN

SEQ ID NO: 83387 - DNA, 2194 bp, Chlamydomonas reinhardtii
  CDS (58)..(1236)
gcacgagcctgaatacactccatcataaccagggcttcggcagacggccatcgcaccatgcggagcgtcttcagtgatacttgctcggcggcgccaagcacttctcggccgcacgcagtatcagtaattccatcacggccgcggcgctatgctggtggccgcacgcttggtggacacacgctcctaagcagtcggaatgtcggcagcgttgctgtcaacactatggcccgggaccggttgtcagcccaggagcgggaggagctcgaggccgtgcgggcacgcctgaaccagcagctacagcttgtaacgggggtatctccctcggcatcatctgatctctcagtggatgagcggccaacactgctggcgaaagcgaacaactgcccatgcgaggacgaggtgcacccctccaacgggtggcggcccatgccccaccacctatcaaagccggagctgtgggagcggatacggcaggaggcgcagatggatgcgtcctcggagcctgcccttgccagcaacctgttcagcaccatcctggcccaccccagcctggagaagtccatggcgttcctgctggccaacaagctagccaaccccaccatgctgggcatgcagctcatgcgcctcatcagcgaggcgtacgaggacgatgctggactcatcgaggcgtgcatggcggacttgcaggccgtgtacgaccgcgaccccgcctgcgacagcttctcgcaggccatgctgtacttcaagggcttccaggccatccagtgccaacgagtggcgcactggctatggcagaaaggccgcaaggccctggcgctggccatccagagccgcatgtctgaggccttccacgtggacatccaccccgcggcgcagctggggcgcgggctgttgatagaccacgccacgggtgtggtgatcggcgagacggcggtggtgggcgacaacgtgtccatgctgcaccacgtcacgctgggcggcagcggcacggggcgcggcgtgcgccaccccacggtgggcaacggcgtgctgctgggcgcgggtgtgacggtgctggggcccatcaccgtgggcgccggcagcaaggtgggcgcgggcagtgtggtggtcagcgacatcccctgccacagcgtggcggtgggtgtgccggcccgcatcatcaagcgcgacatcgtgaaggagccggtcaaggagatggaccagtgcactgactacatccttgactacaccatctaggtggcactacatagactgacaggagatagtagatctgaacatcgcccagcttaggtgcctggcaggcaagaactggacaggctgtgtatgctggcgcgaggcagctggcaggcagtgtgtacgtacgcggcgctctgcattgtgttgcggagtgttgggctcgccctacttattgttaggacgtgggcagtcgtgtcccggcgctaacttgcccgaagagcactcgggtgagagtgcggcaccctttcccagagcattttattggttgtacgcgcgcaaccggtctggctcctgcgagcacttgcgtctttgtggcccaaccggctgctgagctggatcccagttggcggccgggaggtgttgaggtcagctgctacctctattgagttgtcagctgtacaccagttgaaaggtcaatgggtcggggcatcgtttggacggaccttgcacaggcgtttcaggagcacgaccagtgaagtttgcgtgtgatcgggtggaaccatgtacaactgggctgtctctgtgttgtcaaccctattgcgcgtggaggcagggtggtgcaagggcctgacgtgcgtaagtgcggctttgttgcgtggtccaggataaaagtctgtgacaagtatccacctggtagttggaatctaggggttgtcccttgctggtggcacaccgtacggtggcacggccgcaagtagtaggaatgagcaggaatggcaatggctgtactgtgcaaggaatgagttggaggacattgccggtgggtgtatcactattgctgattgaggcggatgcgaggggcgtgggtatggccggactgcgcagccgcaggcacaagtgccattttttaacctagctgaaggaggggcagcggccctggtcggtcaaagtctgcaacgactgcttgacgaaaaaaaaaaaaaaaaaaaaaaaaaaaaaaaaaaaaaaaaaaaaaaaa

SEQ ID NO: 83388 - protein, 392 aa, Chlamydomonas reinhardtii
MRSVFSDTCSAAPSTSRPHAVSVIPSRPRRYAGGRTLGGHTLLSSRNVGSVAVNTMARDRLSAQEREELEAVRARLNQQLQLVTGVSPSASSDLSVDERPTLLAKANNCPCEDEVHPSNGWRPMPHHLSKPELWERIRQEAQMDASSEPALASNLFSTILAHPSLEKSMAFLLANKLANPTMLGMQLMRLISEAYEDDAGLIEACMADLQAVYDRDPACDSFSQAMLYFKGFQAIQCQRVAHWLWQKGRKALALAIQSRMSEAFHVDIHPAAQLGRGLLIDHATGVVIGETAVVGDNVSMLHHVTLGGSGTGRGVRHPTVGNGVLLGAGVTVLGPITVGAGSKVGAGSVVVSDIPCHSVAVGVPARIIKRDIVKEPVKEMDQCTDYILDYTI

SEQ ID NO: 83389 - DNA, 1044 bp, Glycine max
  CDS (28)..(885)
ggcacgagcaaacatcaccaccgaacaatgccgacggggttaccggcggcgaattccttagtggcgccggacgaagaggggtgggtgtgggggcagatcaaggcggaggcgcgccgcgacgccgagtcggagcctgctttggcgagctacctctactcgacgatcctctcgcactcgtcgctcgagcgttctctgtcttttcacctcggaaataagctctgttcctccacgcttctctcgacgctcctttacgacctgttcctcaacgccttctcctccgacccctccctccgctccgccgccgtcgccgatctccgcgctgcccgcgaacgcgaccccgcctgcgtctcctactcccactgcctcctcaattacaaaggcttcctcgcttgccaggcgcaccgtgtggcgcatctgttgtggcggcaatcacggcggccgttggctttagcgctgcactctcgcatcgcaaatgtgtttgcggtggacattcacccggcggcaaggattgggaaggggattctgttcgaccatgccactggggtggtggaggggagacaccggaatcgggaacaatgtgtcgatcctgcaccatgttctctgggtgggactggcaaggttggtggagaccggcatcctaagattggggatggggtgcttattggtgctggtgctaccattctggggaatattaagattggggaaggtgcaaaggttggtgctggttcagtggttttaattgatgtgccaccacggacaacagcagttgggaacccggcgaggttggttggtgggaaggagaagccctctaagcatgaggatgtgcctggggagtctatggaccatacttcctttatctctgagtggtcagattatatcatttgaatttctaaggttaatcaattaatgaatgaatacttcaaatcaaatgctatgtgttctgctgttctagagttttgtaattttatatttggattgagattttgtagagaccacactctgcttaattatactgtattatgactggaaattttggctcgtgcc

SEQ ID NO: 83390 - protein, 285 aa, Glycine max
MPTGLPAANSLVAPDEEGWVWGQIKAEARRDAESEPALASYLYSTILSHSSLERSLSFHLGNKLCSSTLLSTLLYDLFLNAFSSDPSLRSAAVADLRAARERDPACVSYSHCLLNYKGFLACQAHRVAHLLWRQSRRPLALALHSRIANVFAVDIHPAARIGKGILFDHATGVVEGRHRNREQCVDPAPCSLGGTGKVGGDRHPKIGDGVLIGAGATILGNIKIGEGAKVGAGSVVLIDVPPRTTAVGNPARLVGGKEKPSKHEDVPGESMDHTSFISEWSDYII

SEQ ID NO: 83391 - DNA, 939 bp, Rhizobium leguminosarum
  CDS (1)..(939): transl_table=11
atgctaaaaaaccatggcgacggcacccatatatgttattggcgttttcctctatatattggcattccgaaaacggcattccttccggcaacgaggagagcggcgatggtcgcaaagactgacatccgtgcttttgagacaggccatccgctgaaggtgatggatcccatctgggacagcctgcgcgaggaagcccggctcgccgccgaacgggacccggttctcgcggccttcctctattcgaccgtgatcaactaccactcgctcgaggaatgcgtcatccaccgcatctgcgagcgtctcgatcaccccgacatgcaggcgaacctgcttcgccagaccttcgaggaaatgctcctcgactggccggactggagctccatcctgcgcgtcgatatccaggcgatctatgaccgcgatcccgcctgcctgcgcttcatggaggcggtgctttatttcaagggcttccacgcgctgcagacacatcgtctcgcccattggctgctgaaccgcggccggcgtgattttgcgctctatctgcagagccgctcctccagcgtctttcagaccgacatcaatccggccgcccgtatcggcaagggcatcttcctcgatcacgccaccggcctcgtcgtcggcgagacggccgtcatcggcgacaacgtttcgatcctgcacggcgtcacactcggaggcaccggcaaggagggcgctgaccgccatcccaagatcggctccggcgtcatgatcggcgccggcgccaagatcctcggcaatatcgagatcggctactgctcacgagtcgccgcaggctccgtcgtattgaaggcggtgccgcccaagaagacggtggcgggcgtgccggccaaggtcgtcggtgaggccggttgttccgagccgtcgcgcaacatggaccaggtgattggcgccgatatctga

SEQ ID NO: 83392 - protein, 312 aa, Rhizobium leguminosarum
MLKNHGDGTHICYWRFPLYIGIPKTAFLPATRRAAMVAKTDIRAFETGHPLKVMDPIWDSLREEARLAAERDPVLAAFLYSTVINYHSLEECVIHRICERLDHPDMQANLLRQTFEEMLLDWPDWSSILRVDIQAIYDRDPACLRFMEAVLYFKGFHALQTHRLAHWLLNRGRRDFALYLQSRSSSVFQTDINPAARIGKGIFLDHATGLVVGETAVIGDNVSILHGVTLGGTGKEGADRHPKIGSGVMIGAGAKILGNIEIGYCSRVAAGSVVLKAVPPKKTVAGVPAKVVGEAGCSEPSRNMDQVIGADI

SEQ ID NO: 83393 - DNA, 1010 bp, Allium tuberosum
  CDS (56)..(925)
ggactttacttcaacaaaagaaattgaagtgaaggaagaaaatacgccgcaaaaaatgccatgctcaacggttccatttcctacatttccgccaccagaatcggaatctgacgaatcctgggtttggaaccaaatcaaagctgaggcacgccgcgacgccgaatctgaacccgctttggccagctacttatactctactatcatttctcatccctctcttgctcgatctctatccttccatttggccaataagttgtgttcctcaactttgctttccacttcgctttacgatttgtttttgaacgctctctcaacttttcctaccattctgtcggcgacggttgcggatttgattgcggccaggcatcgcgatcccgcttgtatcggtttcagtcactgcttgttgaattttaaggggtttcttgccgtgcagactcaaaggatagcacacgtgctgtggtcccaatcacggcgaccccttgccctagccctacactctcgtgtggcggacgtcttatcggtggacatccaccctgcagctagaatcggcaaaggcatcctcctcgaccatgccaccggcgtagtaatcggcgaaactgcagtcataggcaacaacgtatccatcctccatcacgtgaccctgggcggcacaggaaaagctggaggagacaggcacccaaaaataggcgacggggttctgattggagcaggggccacgatcctaggaaacatcagaatcggcgctggggcgaagattggagcagggtctgttgttttgatcgatgtgccgcctaggactactgcggttgggaatccagctaggttgattggtgggaaggagaagccttctatgcacgaggatgtgcctggtgagtcaatggatcatacttccttcatttccgagtggtcggattatatcatctgatcatggaatgtacgtgctcctatacttttctaattaaaacttgttcatgtttaatgtgtactgcaaaaaaaaaaaaaaaaaaaaa

SEQ ID NO: 83394 - protein, 289 aa, Allium tuberosum
MPCSTVPFPTFPPPESESDESWVWNQIKAEARRDAESEPALASYLYSTIISHPSLARSLSFHLANKLCSSTLLSTSLYDLFLNALSTFPTILSATVADLIAARHRDPACIGFSHCLLNFKGFLAVQTQRIAHVLWSQSRRPLALALHSRVADVLSVDIHPAARIGKGILLDHATGVVIGETAVIGNNVSILHHVTLGGTGKAGGDRHPKIGDGVLIGAGATILGNIRIGAGAKIGAGSVVLIDVPPRTTAVGNPARLIGGKEKPSMHEDVPGESMDHTSFISEWSDYII

SEQ ID NO: 83395 - DNA, 1094 bp, Allium cepa
  CDS (44)..(913)
aattcggcacgagaagaagggaaaaaaaaaaacgccgcaaaaaatgccatgctcaactcttccaattccaacatttccgccacctgaatcggaatccgacgaatcctgggtttggaaccaaatcaaagcggaggcacaccgcgacgcggaatctgaaccagctttggccagctacttgtactctactatcatttctcatccctctctcgcccgttctctatccttccatttggccaataaattgtgttcttcaactttgctttccacttcgctttacgatttgtttttgaacacactctcaacttttcctaccgttctgtcggcgtcggttgccgatttgattgcggccaggcatcgggatccggcttgcgtcggtttcagtcactgcttgttgaattttaaggggtttcttgccgttcagactcaaaggatagcacacgtgctgtggtctcaatcacgccgtcctctcgccctggccctacactctcgtgtagcagatgtcctatcggtggacatccaccctgcagccaggatcggtaagggtatcctcctcgaccatgcaaccggcgtagtgatcggtgaaactgcagtcataggcaacaacgtctccattctccatcacgtgaccttagggggcacgggaaaagctggaggggacaggcaccctaaaataggggatggtgttttgattggggcaggggccacgatcctagggaatatcagaatcggtgctggggcgaaggtcggagcagggtctgttgttctgatcgatgtgccgcctaggactactgcggttgggaatccggctaggctgattggggggaaggagaagccttctgtgcacgaagatgtgcctggcgagtccatggatcatacttcattcatttctgagtggtcggattatatcatctgatggtatgtacgtgctcttatacttttgatttttattacttgttcatgtttaatgtgtactgcattattgagtggtgcgtatcaaacgtttgtacgtgatcgtcttgttgtttttgatttgtgtatctttcttatctaataagtgataaatgactcacgatattaaaaaaaaaaaaaaaaaa

SEQ ID NO: 83396 - protein, 289 aa, Allium cepa
MPCSTLPIPTFPPPESESDESWVWNQIKAEAHRDAESEPALASYLYSTIISHPSLARSLSFHLANKLCSSTLLSTSLYDLFLNTLSTFPTVLSASVADLIAARHRDPACVGFSHCLLNFKGFLAVQTQRIAHVLWSQSRRPLALALHSRVADVLSVDIHPAARIGKGILLDHATGVVIGETAVIGNNVSILHHVTLGGTGKAGGDRHPKIGDGVLIGAGATILGNIRIGAGAKVGAGSVVLIDVPPRTTAVGNPARLIGGKEKPSVHEDVPGESMDHTSFISEWSDYII

SEQ ID NO: 83397 - DNA, 1496 bp, Salmonella typhimurium
  CDS (606)..(1427): transl_table=11
ggatccccagcaactgttgcactgcggaaaaagttttcgcgtctatatcaatgcggattttatcggcgtgcagcttggcggcgcggtgaaaaatgtgattgcgattggcgcggggatgtctgacggcatcggcttcggcgcgaacgcccgcacggcgctaatcacgcgtggactgaccgaaatgtcgcggcttggcgcacggcttggtgccgatcccgccacctttatggggatggcgggtttaggcgatctggtgctgacctgtaccgacaaccagtcgcgcaaccgtcgttttggcatgatgcttggccagggcattggacgttaaaggcgcgccaggataagattggccaggtggtcgaaggctatcgcaatacgaaagaagttcgtgaattggcgcaccgttttggtgttgaaatgccaataaccgaggaaatttatcaagtattgtattgcggaaaaaacgcgcgcgaggcagcattaacgttattaggtcgcgacccgcaaggagagagctgagtcgccatagccgtaagaactgtttgcataaacgacccaacccgcacagaacgggttgtcgttttctgcccgtcgtggagtaagccatgccgtgtgaagaactggaaatcgtctggaagaatattaaagctgaagcccgcgctttagctgactgtgagcctatgttggccagtttttatcacgccacgctactcaagcatgaaaatctgggcagtgcgctgagctatatgctggcaaataaactggcttcgcccatcatgcccgctatcgctatccgtgaagtagttgaagaagcctatgccgccgacccggaaatgatcgcgtcggcagcctgcgatattcaggccgtgcgcactcgcgatccggcggtggataaatactccacgccgctgttatatctgaaaggctttcatgcgctacaggcctaccgcattggtcactggttgtggaataaaggtcgccgcgcgctggctatcttcctgcaaaatcaggtttcggtctcgtttcaggtggatattcacccggcagcgaaaattggccgcgggattatgctcgaccatgccaccggtattgtggtgggggagacggcggttattgaagatgatgtgtcgatcttgcaatccgtcaccctgggcggtaccgggaaaacgagcggcgatcgtcatcctaaaatccgcgaaggcgtgatgattggcgcgggcgcgaaaattctcggcaatatcgaggtggggcgcggcgcgaaaattggcgcaggttccgtcgttttacagcctgtcccgccgcacactaccgccgcaggcgttccggcgcgtattgtcggcaagccgggcagcgataagccgtcgatggatatggaccagcatttcaacgggatacaccatacgtttgagtatggcgacggcatctgaattgcgcggtacaactaaaaaacgctgttccgatggagtgcaatcccggaacagcggagcgaagaattc

SEQ ID NO: 83398 - protein, 273 aa, Salmonella typhimurium
MPCEELEIVWKNIKAEARALADCEPMLASFYHATLLKHENLGSALSYMLANKLASPIMPAIAIREVVEEAYAADPEMIASAACDIQAVRTRDPAVDKYSTPLLYLKGFHALQAYRIGHWLWNKGRRALAIFLQNQVSVSFQVDIHPAAKIGRGIMLDHATGIVVGETAVIEDDVSILQSVTLGGTGKTSGDRHPKIREGVMIGAGAKILGNIEVGRGAKIGAGSVVLQPVPPHTTAAGVPARIVGKPGSDKPSMDMDQHFNGIHHTFEYGDGI

SEQ ID NO: 83399 - DNA, 945 bp, Arabidopsis thaliana
  CDS (1)..(945)
atggcaacatgcatagacacatgccgaaccggtaatacccaagacgatgattcccggttctgttgcatcaagaatttctttcgacccggtttctctgtaaaccggaagattcaccacacccaaatcgaagatgacgatgatgtctggatcaagatgcttgaagaagccaaatccgatgttaaacaagaacccattttatcaaactactactacgcttcgatcacatctcatcgatctttagagtctgctttagctcacatcctctccgtaaagctcagcaatttaaacctaccaagcaacacactcttcgaactgttcataagcgttttagaagaaagccctgagatcatcgaatccacgaagcaagatcttatagcagtcaaagaaagagacccagcttgtataagctacgttcattgcttcttgggcttcaaaggcttcctcgcttgtcaagctcatcgaatagctcataccctctggaaacagaacagaaaaatcgtagctttattgatccaaaacagagtatcagaatctttcgccgtcgatattcatcccggagcgaagatcggaaaagggattcttttagaccatgcgacgggcgtggtgatcggagagacggcggtggttggagacaatgtttcgattctacacggagtgaccttgggaggaacagggaaacagagtggtgatcggcatccgaagattggtgatggtgtgttgattggagctgggagttgtatattggggaatataacaatcggtgagggagctaagattggatcagggtcggtggtggttaaggatgtgccggcgcgtacgacggcggttggaaatccggcgaggttgattggtgggaaagagaatccgagaaaacatgataagattccttgtctgactatggaccagacatcgtatttaaccgagtggtctgattatgtgatttaa

SEQ ID NO: 83400 - protein, 314 aa, Arabidopsis thaliana
MATCIDTCRTGNTQDDDSRFCCIKNFFRPGFSVNRKIHHTQIEDDDDVWIKMLEEAKSDVKQEPILSNYYYASITSHRSLESALAHILSVKLSNLNLPSNTLFELFISVLEESPEIIESTKQDLIAVKERDPACISYVHCFLGFKGFLACQAHRIAHTLWKQNRKIVALLIQNRVSESFAVDIHPGAKIGKGILLDHATGVVIGETAVVGDNVSILHGVTLGGTGKQSGDRHPKIGDGVLIGAGSCILGNITIGEGAKIGSGSVVVKDVPARTTAVGNPARLIGGKENPRKHDKIPCLTMDQTSYLTEWSDYVI

SEQ ID NO: 83401 - DNA, 972 bp, Arabidopsis thaliana
  CDS (1)..(972)
atgaatggcgatgagcttcctttcgagagtggtttcgaggtttacgctaagggaactcataagtcagagtttgactcgaatttgcttgatcctcgttctgatcctatttgggatgctataagagaagaagctaaacttgaggcagagaaagagcctattttgagtagcttcttgtatgctggtatcttagcacatgattgtttagagcaagctttagggtttgttctagccaaccgtctccaaaacccaaccttgttggcaacacaactcttggatatattttatggtgttatgatgcatgacaaaggtattcagagttcgattcgccatgatctccaggcatttaaagatcgtgatcctgcttgtctgtcgtatagttctgctattttacatctgaagggttatcatgcgttacaagcatatagggttgcgcataaactgtggaatgaagggaggaaactattagctcttgcattgcaaagccgaataagcgaggtttttggcattgacatacatccagcggcaagaattggggagggaatattgttggatcatggaactggagtggtcattggtgagaccgctgtgataggcaacggtgtctcgattttacatggtgtgactttaggaggaaccggaaaggaaactggcgatcgccacccaaagataggtgaaggtgcattgcttggagcttgtgtgactatacttggtaacataagcataggtgctggagcaatggtagctgcaggttcacttgtgttaaaagacgttccttcgcatagtgtggtggctggaaatcctgcaaaactgatcagggtcatggaagagcaagacccgtctctagcaatgaaacacgatgctactaaagagttctttcgacatgtagctgatggttacaaaggggcacaatctaacggaccatcactttcagcaggagatacagagaaaggacacactaacagcacatcatga

SEQ ID NO: 83402 - protein, 323 aa, Arabidopsis thaliana
MNGDELPFESGFEVYAKGTHKSEFDSNLLDPRSDPIWDAIREEAKLEAEKEPILSSFLYAGILAHDCLEQALGFVLANRLQNPTLLATQLLDIFYGVMMHDKGIQSSIRHDLQAFKDRDPACLSYSSAILHLKGYHALQAYRVAHKLWNEGRKLLALALQSRISEVFGIDIHPAARIGEGILLDHGTGVVIGETAVIGNGVSILHGVTLGGTGKETGDRHPKIGEGALLGACVTILGNISIGAGAMVAAGSLVLKDVPSHSVVAGNPAKLIRVMEEQDPSLAMKHDATKEFFRHVADGYKGAQSNGPSLSAGDTEKGHTNSTS

SEQ ID NO: 83403 - DNA, 1176 bp, Arabidopsis thaliana; identical to SEQ ID NO: 83247
  CDS (46)..(1176)

SEQ ID NO: 83404 - protein, 376 aa, Arabidopsis thaliana
MLRSSSPHINHHSFLLPSFVSSKFKHHTLSPPPSPPPPPPMAACIDTCRTGKPQISPRDSSKHHDDESGFRYMNYFRYPDRSSFNGTQTKTLHTRPLLEDLDRDAEVDDVWAKIREEAKSDIAKEPIVSAYYHASIVSQRSLEAALANTLSVKLSNLNLPSNTLFDLFSGVLQGNPDIVESVKLDLLAVKERDPACISYVHCFLHFKGFLACQAHRIAHELWTQDRKILALLIQNRVSEAFAVDFHPGAKIGTGILLDHATAIVIGETAVVGNNVSILHNVTLGGTGKQCGDRHPKIGDGVLIGAGTCILGNITIGEGAKIGAGSVVLKDVPPRTTAVGNPARLLGGKDNPKTHDKIPGLTMDQTSHISEWSDYVI

SEQ ID NO: 83405 - DNA, 1099 bp, Arabidopsis thaliana
  CDS (1)..(1068)
atggcttgtataaacggcgagaatcgtgatttttcttcctcgtcatctttgtcttctcttccaatgattgtctcccggaacttttctgccagagacgatggagagaccggtgacgagtttcctttcgagaggattttcccggtttacgctagaggaacccttaatcccgtggccgacccggttttgctggattttaccaattctagttatgacccaatttgggattctataagagaagaagctaagcttgaggcagaagaggagccggttttgagtagcttcttgtatgctagtatcttgtcgcatgactgtttagagcaagcattgagttttgttctagctaaccgtctccaaaaccctaccttgttggcaactcagcttatggatatattttgcaacgttatggtacatgacagaggtattcaaagctcgattcgtcttgatgttcaggcattcaaagacagagatcctgcttgtctatcgtatagttcggctattttacatctgaagggctatcttgcactgcaggcgtatagagtagcacataagttgtggaagcaaggaagaaaactattagcattggcactgcaaagccgagtaagcgaggtttttggaatcgatattcatcccgctgcaagaattgggaaaggaatattgttggatcatggaactggtgtggtcataggtgagactgctgtgataggcgaccgtgtctcaattttgcatggtgtgacattaggaggaactgggaaagaaaccggtgaccgccatccaaatataggcgacggtgctcttcttggagcatgtgtgactatacttggtaacattaagataggcgctggagcaatggtagctgctggttcgcttgtgttaaaggatgttccttcgcatagcatggtggctggaaatccagcaaaactcatcgggtttgttgatgagcaagatccatctatgacaatggagcatgatgctaccagagagttctttcaaaatgtagctgttgcttatagagagacaataccaaatggatcttcagtttcagggagttgcagggaaaggagacattaaaaagagaacatgagatcacctgcagcttctt

SEQ ID NO: 83406 - protein, 355 aa, Arabidopsis thaliana
MACINGENRDFSSSSSLSSLPMIVSRNFSARDDGETGDEFPFERIFPVYARGTLNPVADPVLLDFTNSSYDPIWDSIREEAKLEAEEEPVLSSFLYASILSHDCLEQALSFVLANRLQNPTLLATQLMDIFCNVMVHDRGIQSSIRLDVQAFKDRDPACLSYSSAILHLKGYLALQAYRVAHKLWKQGRKLLALALQSRVSEVFGIDIHPAARIGKGILLDHGTGVVIGETAVIGDRVSILHGVTLGGTGKETGDRHPNIGDGALLGACVTILGNIKIGAGAMVAAGSLVLKDVPSHSMVAGNPAKLIGFVDEQDPSMTMEHDATREFFQNVAVAYRETIPNGSSVSGSCRERRH

SEQ ID NO: 83407 - DNA, 939 bp, Arabidopsis thaliana
  CDS (1)..(939)
atgccaccggccggagaactccgacatcaatctccatcaaaggagaaactatcttccgttacccaatccgatgaagcagaagcagcgtcagcagcgatatctgcggcagctgcagatgcggaagctgccggattatggacacagatcaaggcggaagctcgccgtgatgctgaggcggagccagctttagctagctatctatattcgacgattctttctcattcgtctcttgaacgatctatctcgtttcatctaggaaacaagctttgttcctcaacgcttttatccacacttttatacgatctgttcttaaacactttttcctccgatccttctcttcgtaacgccaccgtcgcagatctacgcgctgctcgtgttcgtgatcctgcttgtatctcgttctctcattgtctcctcaattacaaaggcttcttagctattcaggcgcatcgtgtatcacacaagctatggacacaatcacggaagccattagcattagctctacactcaagaatctccgatgtattcgctgttgatatccatccagcagcgaagatcggaaaagggatacttctagaccacgcaaccggagttgtagtcggagaaacagcggtgattgggaacaatgtttcaatccttcaccatgtgacactaggtggaacaggtaaagcttgtggagatagacatccgaagatcggtgacggttgtttgattggagctggagcgactattcttggaaatgtgaagattggtgcaggtgctaaagtaggagctggttctgttgtgctgattgacgtgccttgtcgaggtactgcggttgggaatccggcgagacttgtcggagggaaagagaagccaacgattcatgatgaggaatgtcctggagaatcgatggatcatacttcattcatctcggaatggtcagattacatcatataa

SEQ ID NO: 83408 - protein, 312 aa, Arabidopsis thaliana
MPPAGELRHQSPSKEKLSSVTQSDEAEAASAAISAAAADAEAAGLWTQIKAEARRDAEAEPALASYLYSTILSHSSLERSISFHLGNKLCSSTLLSTLLYDLFLNTFSSDPSLRNATVADLRAARVRDPACISFSHCLLNYKGFLAIQAHRVSHKLWTQSRKPLALALHSRISDVFAVDIHPAAKIGKGILLDHATGVVVGETAVIGNNVSILHHVTLGGTGKACGDRHPKIGDGCLIGAGATILGNVKIGAGAKVGAGSVVLIDVPCRGTAVGNPARLVGGKEKPTIHDEECPGESMDHTSFISEWSDYII

SEQ ID NO: 83409 - DNA, 1173 bp, Brassica napus
  CDS (1)..(1173)
atgttcccggtcacaagtcgccgccacttcacatcctccctatatatcctccgttcatcttctccacacaaccatctacgtcctctactctccctcctcttcctcccttccgtccgctcctccaaatccaaatccaaatcctcctcttcaaccaacaaacacaaccaacaatctcctcctccaatggccgcgtgcatcgacacgtgccgaaccggtaaaccacagatctcacgcgactcgaaccggtcccacgacgacgaatccggtttccgttactccaattactaccgcccctccggttatcatccaacaacccagacgaaaaccatccacacccgtcctctcgtcgaagacctcccaaacgacgacgtatgggccaagatccgacaagaggccagatccgacatcgagagagagccaatcgtctccggctactaccaggcctcgatcgtctcgcaacgatctctcgaagccgccttagccaacacgctctccgtcaagctcagcaacctgaacctcccgagcaacacgctcttcgatctcttcaacggcgtcctcgaacagcaccctaagatcgtcgagtccgttaagcaagacctcttagccgtcaaagaaagagaccccgcctgcatcagctacgtccactgcttcctccacttcaaaggctttttagcctgccaggcccatcgaatagcccacgagctttggacccaaaaccgaaaggttcttgctctgctgatccagaacagagtctccgaagccttcgccgtcgatttccaccccggggccaagatcgggacggggattttgctcgaccacgcgacggcgattgtgatcggagagacggcggtggtgggggataatgtttcgattcttcataacgtgacgcttggaggcacggggaagcagtgtggggataggcacccgaagattggggacggggtgttgatcggagctgggacgtgtattcttgggaatattacgattggtgaaggggcgaagattggggctggctcggtggtgttgaaggatgtgccgccgaggacgacggctgtggggaatccggcgaggttgcttggtgggaaagataatccgaagaagcatgataaggatcctggtctgactatggaccaaacctcgcatatatccgagtggtcggattatgttatttaa

SEQ ID NO: 83410 - protein, 390 aa, Brassica napus
MFPVTSRRHFTSSLYILRSSSPHNHLRPLLSLLFLPSVRSSKSKSKSSSSTNKHNQQSPPPMAACIDTCRTGKPQISRDSNRSHDDESGFRYSNYYRPSGYHPTTQTKTIHTRPLVEDLPNDDVWAKIRQEARSDIEREPIVSGYYQASIVSQRSLEAALANTLSVKLSNLNLPSNTLFDLFNGVLEQHPKIVESVKQDLLAVKERDPACISYVHCFLHFKGFLACQAHRIAHELWTQNRKVLALLIQNRVSEAFAVDFHPGAKIGTGILLDHATAIVIGETAVVGDNVSILHNVTLGGTGKQCGDRHPKIGDGVLIGAGTCILGNITIGEGAKIGAGSVVLKDVPPRTTAVGNPARLLGGKDNPKKHDKDPGLTMDQTSHISEWSDYVI

SEQ ID NO: 83411 - DNA, 948 bp, Brassica napus
  CDS (1)..(948)
atggcaccctgcatctacacgtccaatacccatctctctcaagacgataattctcggttccgttacatgaatctcttccctgatcggatttcacgagcacccttcacgaaaacctcaaactctctggacggtgatgatgaagatgtctggattaagatgcttgaagaagctcaatccgacgttgagcaagaacccatattgtcaagctactattactcttccgttacatcgcatcggtcgttagactccgctttggcgaacattctctcggtaaagctcagcactttaaccttaccaagcagcaccctcttcgaactcttcaccagcgtcttacaagaaagcccagagatcatggagtcggcgaaacaagacctgttagcagcaaaggaaagagacccagcttgcttaagctacgtccaatgcttcctaagcttcaaaggcttcctcgcttgtcaagctcatcgcatcgctcacaagctctggacccaagacagaaagatcctcgctttactcatccaaaacagagtatccgaagctttcgccgtcgatatccatcccggagctaagatcgggaaaggggtgctgttagaccacgcgacggccgtggtgatcggagagacggcggtggttggagacaacgtttcgattctccacggcgtgacgctcggaggaacagggaagcagtgcggcgataggcatccgaagatcggcgacggagtcttgatcggagcagggacttgtatactggggaatataacaatcggagagggagctaaggttggatcggggtcggtggtgcttaaagacgtgccgccgcatacgacggcggttggaaacccggcgagattgatcggtgggaaagagaatccgaaaatgcttgataagatacccggtttgagcatggaccagacatcgtacttaaccgagtggtctgattatgtcatctaa

SEQ ID NO: 83412 - protein, 315 aa, Brassica napus
MAPCIYTSNTHLSQDDNSRFRYMNLFPDRISRAPFTKTSNSLDGDDEDVWIKMLEEAQSDVEQEPILSSYYYSSVTSHRSLDSALANILSVKLSTLTLPSSTLFELFTSVLQESPEIMESAKQDLLAAKERDPACLSYVQCFLSFKGFLACQAHRIAHKLWTQDRKILALLIQNRVSEAFAVDIHPGAKIGKGVLLDHATAVVIGETAVVGDNVSILHGVTLGGTGKQCGDRHPKIGDGVLIGAGTCILGNITIGEGAKVGSGSVVLKDVPPHTTAVGNPARLIGGKENPKMLDKIPGLSMDQTSYLTEWSDYVI

SEQ ID NO: 83413 - DNA, 948 bp, Brassica napus
  CDS (1)..(948)
atggcaccctgcatctacacgtccaatacccatctctctcaagacgataattctcggttccgttacatgaatctcttccctgatcggatttcacgagcacccttcacgaaaacctcaaactctctggacggtgatgatgaagatgtctggattaagatggttgaagaagctcaatccgacgttgagcaagaacccatattgtcaagctactattactcttccgttacatcgcatcggtcgttagacaccgctttggcgaacattctctccgtaaagctaagcactttgaccttaccaagcagcaccctcttcgaagtcttcaccagcgtcttacaagaaagcccagagatcatcgggtcggcgaaacaagacctgttagcagcaaaggaaagagacccagcttgcttaagctacgtccaatgcttcctaagcttcaaaggcttcctcgcttgccaagctcatcgcatcgctcacaagctctggacccaagacagaaagatcctcgctttgctcatccaaaacagagtatccgaagctttcgccgtcgatatccatcccggagctaagatcgggaaaggggtgttgttagatcacgcgacggccgtggtgatcggagagactgcggtggttggagacaacgtttcgattctccacggcgtgacgctcggaggaacagggaagcagtgcggcgatcggcatccgaagatcggtgacggagtcttgatcggagcagggacttgtgtattggggaatataacaatcggcgagggagctaaggttggatcggggtcggtggtgcttaaagacgtgccgccgcatacgacggcggttggaaacccggcgagattgatcggtgggaaagagaatccgaaaatgcttgataagatacccggtttgagcatggaccagacatcgtacttaaccgagtggtctgattatgtcatctaa

SEQ ID NO: 83414 - protein, 315 aa, Brassica napus
MAPCIYTSNTHLSQDDNSRFRYMNLFPDRISRAPFTKTSNSLDGDDEDVWIKMVEEAQSDVEQEPILSSYYYSSVTSHRSLDTALANILSVKLSTLTLPSSTLFEVFTSVLQESPEIIGSAKQDLLAAKERDPACLSYVQCFLSFKGFLACQAHRIAHKLWTQDRKILALLIQNRVSEAFAVDIHPGAKIGKGVLLDHATAVVIGETAVVGDNVSILHGVTLGGTGKQCGDRHPKIGDGVLIGAGTCVLGNITIGEGAKVGSGSVVLKDVPPHTTAVGNPARLIGGKENPKMLDKIPGLSMDQTSYLTEWSDYVI

SEQ ID NO: 83415 - DNA, 933 bp, Zea mays
  CDS (1)..(933)
atgacggccgggcagcttctgcgcaccgagccatcagcccagccccagcgggtgcgccacagcaccccgccggcggcactccaagcagacatcgtgccgtcgtacccgccgcccgagtcggacggtgacgagtcgtgggtctggtcccagatcaaggcggaggcgcggcgcgacgcggacgcggagccggcgctggcctccttcctctacgcgacggtgctgtcgcacgcgtccctggaccggtccctggccttccacctggccaacaagctgtgctcctccacgctgctgtcgacgctcctctacgacctcttcgtggcgtcgctcgcggaccacccgtccgtccgcgcggcggcggtggccgacctgatcgccgcgcggtcgcgggacccggcctgcgcgggcttcgcgcactgcctcctcaactacaaggggttcctggccgtgcaggcgcaccgcgtggcgcacgtgctgtgggcgcagggccggcgcgcgctggcgctggcgctccagtcccgcgtcgccgaggtcttcgccgtggacatccacccggccgccaccgtcggcaggggcatcctgctcgaccacgccacgggcgtcgtcgtcggggagacggccgtcgtgggcgacaacgtctccatactccaccacgtgacgctgggcggcaccggcaaggcggtgggcgaccggcaccccaagatcggggacggcgtgctcatcggcgccggcgcgaccgtcctcggaaacgtcaggatcggcgccggcgccaaggtcggcgccgggtccgtcgtgctcatcgacgtgccgcccaggagcaccgccgtggggaaccccgccaggctgatcggcgggaagaagggcgaggaggtgatgccgggggagtccatggaccacacctccttcatacagcagtggtcggactacatcatttga

SEQ ID NO: 83416 - protein, 310 aa, Zea mays
MTAGQLLRTEPSAQPQRVRHSTPPAALQADIVPSYPPPESDGDESWVWSQIKAEARRDADAEPALASFLYATVLSHASLDRSLAFHLANKLCSSTLLSTLLYDLFVASLADHPSVRAAAVADLIAARSRDPACAGFAHCLLNYKGFLAVQAHRVAHVLWAQGRRALALALQSRVAEVFAVDIHPAATVGRGILLDHATGVVVGETAVVGDNVSILHHVTLGGTGKAVGDRHPKIGDGVLIGAGATVLGNVRIGAGAKVGAGSVVLIDVPPRSTAVGNPARLIGGKKGEEVMPGESMDHTSFIQQWSDYII

SEQ ID NO: 83417 - DNA, 1023 bp, Zea mays
  CDS (1)..(1023)
atgacgtcctgcgggtgtctgatgctcgagaaggtggagggcgacgcgtcggcgaagacgagggtgaaggccgcgccgggcgccggtgccggcgcctggtgcggctcgtgcgctggggactggcggggccggtcagaggccatcttccccatctacgtgatggggagctcgcgggagagcaccgtggcggcggcgcgcggcatagtcgactcccccgaggaccccatatgggttgccgtcaaggcggaggccaagtctgaggcagaaaaggaacctattttgagtagcttcttgtatgccagtgtgctgtctcatgattgcctagagcgtgcattgagcttcgtccttgcaaataggcttgaagatccaacattgcttgctactcagctaatcgatatttttaacgatgtcatgctgaataacaaagatatatgccgctccattcgccttgatgctcaggctttcaaagatagagatccagcttgtgcccaatatagttgggcactgttatacttaaagggctaccaatcgttgcaatcatacaggatagccaatatattatggaaccagggacgcaaagttttggcattggcactgcaaagccgtattagtgaggtctttgctgtggatatacatccagctgccaaaattggcgagggaatattgttggatcatggaacaggtctagtcattggtgaaactgctgtagttggaaactgggtttcattaatgcagggtgttacacttggaggtacaggcaaggaacatggagataggcaccccaagattggtcagggagctctaattggagccagtgctactatcctcggcaatattaatgtaggcgaaggtgccatgattgctgctggctcccttgttttaaaggacgtacctccccacagtatggctgtaggtaatcctgcaaaggtagttggttatacagagaaagaagatccttctttaactatgaaacatgatgcaaggagagattattttgagcatgctgccatcagattgagatga

SEQ ID NO: 83418 - protein, 340 aa, Zea mays
MTSCGCLMLEKVEGDASAKTRVKAAPGAGAGAWCGSCAGDWRGRSEAIFPIYVMGSSRESTVAAARGIVDSPEDPIWVAVKAEAKSEAEKEPILSSFLYASVLSHDCLERALSFVLANRLEDPTLLATQLIDIFNDVMLNNKDICRSIRLDAQAFKDRDPACAQYSWALLYLKGYQSLQSYRIANILWNQGRKVLALALQSRISEVFAVDIHPAAKIGEGILLDHGTGLVIGETAVVGNWVSLMQGVTLGGTGKEHGDRHPKIGQGALIGASATILGNINVGEGAMIAAGSLVLKDVPPHSMAVGNPAKVVGYTEKEDPSLTMKHDARRDYFEHAAIRLR

SEQ ID NO: 83419 - DNA, 972 bp, Zea mays
  CDS (1)..(972)
atgccggccggccagccgcacgcgcacgaagccgctgccgccgcctgcgtcggcagcggcgcgaaccactccaaccaccgagtgccggcgcactcgccaccgccgctccccgcggaggtggtgccggcgtacccgcccccggagtcggaggacgacgagacctgggtgtggacgcagatcaaggcggaggcccgccgcgacgcggacgcggagccggcgctcgcctccttcctctacgccaccgtgttgtcccacccgtccctgccccgctccctctccttccacctcgccaacaagctctgctcctccacgctcctctccacgctcctctacgacctcttcctcgccacgctcaccgcgcacccctctctccgcgccgccgtcgtcgccgacctcctcgcggcccactcccgcgaccccgcctgcgtcggcttctcccactgcctcctcaactacaagggcttcctcgccatccaggcccaccgcgtcgcgcacgtgctctgggcgcagcagcgacggcccctcgcgctcgcgctccagtcccgcgtcgccgacgtcttcgccgttgacatccaccccgccgccgtcgtcgggaagggaatcctcctcgaccacgccaccggcgtcgtcatcggtgagacggccgtcgtcggcgacaacgtctccatcctccaccacgtcaccttgggcgggaccgggaaggcggtgggtgaccggcaccccaagattggggatggcgtgctgattggagcaggggccaccattcttggtaacgtgaaaattggtgccggggctaagattggagccggatccgtggtgctgatagatgtgccggcgaggagcacggcggttgggaaccctgccaggctgattggtgggaagaaggccgagggtgcgaatgaggaggacatgccaggggagtccatggatcacacgtccttcatacgtcaatggtcggactacaccatttga

SEQ ID NO: 83420 - protein, 323 aa, Zea mays
MPAGQPHAHEAAAAACVGSGANHSNHRVPAHSPPPLPAEVVPAYPPPESEDDETWVWTQIKAEARRDADAEPALASFLYATVLSHPSLPRSLSFHLANKLCSSTLLSTLLYDLFLATLTAHPSLRAAVVADLLAAHSRDPACVGFSHCLLNYKGFLAIQAHRVAHVLWAQQRRPLALALQSRVADVFAVDIHPAAVVGKGILLDHATGVVIGETAVVGDNVSILHHVTLGGTGKAVGDRHPKIGDGVLIGAGATILGNVKIGAGAKIGAGSVVLIDVPARSTAVGNPARLIGGKKAEGANEEDMPGESMDHTSFIRQWSDYTI

SEQ ID NO: 83421 - DNA, 25 bp, Artificial sequence
  primer
atgtcgtgtgaagaactggaaattg

SEQ ID NO: 83422 - DNA, 24 bp, Artificial sequence
  primer
ttagatcccatccccatactcaaa

SEQ ID NO: 83423 - protein, 319 aa, Artificial sequence
  consensus sequence
  Variant (3)..(8): Xaa in position 3 to 8 is any amino acid
  Variant (9)..(32): Xaa in position 9 to 32 is any or no amino acid
  Variant (35)..(35): Xaa in position 35 is any amino acid
  Variant (37)..(43): Xaa in position 37 to 43 is any amino acid
  Variant (44)..(44): Xaa in position 44 is any or no amino acid
  Variant (46)..(49): Xaa in position 46 to 49 is any amino acid
  Variant (50)..(51): Xaa in position 50 to 51 is any or no amino acid
  Variant (53)..(55): Xaa in position 53 to 55 is any amino acid
  Variant (57)..(63): Xaa in position 57 to 63 is any amino acid
  Variant (65)..(92): Xaa in position 65 to 92 is any amino acid
  Variant (93)..(107): Xaa in position 93 to 107 is any or no amino acid
  Variant (109)..(110): Xaa in position 109 to 110 is any amino acid
  Variant (112)..(114): Xaa in position 112 to 114 is any amino acid
  Variant (119)..(126): Xaa in position 119 to 126 is any amino acid
  Variant (127)..(127): Xaa in position 127 is any or no amino acid
  Variant (129)..(130): Xaa in position 129 to 130 is any amino acid
  Variant (134)..(134): Xaa in position 134 is any amino acid
  Variant (136)..(136): Xaa in position 136 is any amino acid
  Variant (138)..(139): Xaa in position 138 to 139 is any amino acid
  Variant (141)..(142): Xaa in position 141 to 142 is any amino acid
  Variant (144)..(144): Xaa in position 144 is any amino acid
  Variant (147)..(149): Xaa in position 147 to 149 is any amino acid
  Variant (151)..(153): Xaa in position 151 to 153 is any amino acid
  Variant (155)..(157): Xaa in position 155 to 157 is any amino acid
  Variant (159)..(164): Xaa in position 159 to 164 is any amino acid
  Variant (166)..(167): Xaa in position 166 to 167 is any amino acid
  Variant (174)..(175): Xaa in position 174 to 175 is any amino acid
  Variant (177)..(177): Xaa in position 177 is any amino acid
  Variant (180)..(181): Xaa in position 180 to 181 is any amino acid
  Variant (187)..(187): Xaa in position 187 is any amino acid
  Variant (189)..(189): Xaa in position 189 is any amino acid
  Variant (195)..(198): Xaa in position 195 to 198 is any amino acid
  Variant (203)..(203): Xaa in position 203 is any amino acid
  Variant (204)..(204): Xaa in position 204 is any or no amino acid
  Variant (213)..(214): Xaa in position 213 to 214 is any amino acid
  Variant (215)..(215): Xaa in position 215 is any or no amino acid
  Variant (223)..(224): Xaa in position 223 to 224 is any amino acid
  Variant (227)..(227): Xaa in position 227 is any amino acid
  Variant (233)..(234): Xaa in position 233 to 234 is any amino acid
  Variant (238)..(240): Xaa in position 238 to 240 is any amino acid
  Variant (242)..(247): Xaa in position 242 to 247 is any amino acid
  Variant (254)..(255): Xaa in position 254 to 255 is any amino acid
  Variant (258)..(260): Xaa in position 258 to 260 is any amino acid
  Variant (262)..(263): Xaa in position 262 to 263 is any amino acid
  Variant (265)..(265): Xaa in position 265 is any amino acid
  Variant (268)..(280): Xaa in position 268 to 280 is any amino acid
  Variant (281)..(318): Xaa in position 281 to 318 is any or no amino acid
EAXXXXXXXXXXXXXXXXXXXXXXXXXXXXXXEPXLXXXXXXXXLXXXXXXLXXXLXXXXXXXLXXXXXXXXXXXXXXXXXXXXXXXXXXXXXXXXXXXXXXXXXXXDXXAXXXRDPAXXXXXXXXXLXXKGFXAXQXXRXXHXLWXXXRXXXAXXXQXXXXXXFXXDIHPAAXXGXGIXXDHATGXVXGETAVXXXXVSILXXVTLGGTGKXXXGDRHPKIXXGVXIGAGAXXLGNXXXGXXXXXXAGSVVLXXVPXXXTXXGXPAXXXXXXXXXXXXXXXXXXXXXXXXXXXXXXXXXXXXXXXXXXXXXXXXXXXM

SEQ ID NO: 83424 - protein, 29 aa, Artificial sequence
  protein pattern
  Variant (3)..(3): Xaa in position 3 is Ala or Gly
  Variant (4)..(4): Xaa in position 4 is any amino acid
  Variant (5)..(5): Xaa in position 5 is Ala, Gly or Ser
  Variant (6)..(6): Xaa in position 6 is Phe, Ile, Leu or Val
  Variant (7)..(7): Xaa in position 7 is Ile or Val
  Variant (8)..(8): Xaa in position 8 is any amino acid
  Variant (10)..(10): Xaa in position 10 is Ala, Glu or Ser
  Variant (12)..(12): Xaa in position 12 is Ala or Ser
  Variant (14)..(14): Xaa in position 14 is Ile or Val
  Variant (15)..(15): Xaa in position 15 is Asp, Glu or Gly
  Variant (16)..(17): Xaa in position 16 to 17 is any amino acid
  Variant (20)..(20): Xaa in position 20 is Ile, Leu or Met
  Variant (22)..(23): Xaa in position 22 to 23 is any amino acid
  Variant (27)..(28): Xaa in position 27 to 28 is Ala or Gly
  Variant (29)..(29): Xaa in position 29 is Pro, Ser or Thr
DHXXXXXXGXTXVXXXXVSXLXXVTLXXX

SEQ ID NO: 83425 - protein, 35 aa, Artificial sequence
  protein pattern
  Variant (6)..(6): Xaa in position 6 is Ile or Val
  Variant (7)..(8): Xaa in position 7 to 8 is any amino acid
  Variant (9)..(9): Xaa in position 9 is Gly or Ser
  Variant (10)..(10): Xaa in position 10 is Ala, Cys or Val
  Variant (11)..(11): Xaa in position 11 is Leu or Met
  Variant (13)..(14): Xaa in position 13 to 14 is any or no amino acid
  Variant (17)..(18): Xaa in position 17 to 18 is any amino acid
  Variant (19)..(20): Xaa in position 19 to 20 is any or no amino acid
  Variant (24)..(24): Xaa in position 24 is Ile or Val
  Variant (25)..(25): Xaa in position 25 is any amino acid
  Variant (26)..(26): Xaa in position 26 is Ile or Val
  Variant (28)..(29): Xaa in position 28 to 29 is any amino acid
  Variant (30)..(30): Xaa in position 30 is Ala, Ser, Thr or Val
  Variant (31)..(31): Xaa in position 31 is any amino acid
  Variant (32)..(32): Xaa in position 32 is Ile or Val
  Variant (33)..(33): Xaa in position 33 is Ala or Gly
  Variant (34)..(34): Xaa in position 34 is Ala or Ser
  Variant (35)..(35): Xaa in position 35 is Cys, Gly or Asn
DRHPKXXXXXXIXXGAXXXXLGNXXXGXXXXXXXX

SEQ ID NO: 83426 - protein, 15 aa, Artificial sequence
  protein pattern
  Variant (2)..(3): Xaa in position 2 to 3 is any amino acid
  Variant (6)..(6): Xaa in position 6 is Phe or Tyr
  Variant (7)..(7): Xaa in position 7 is any amino acid
  Variant (9)..(9): Xaa in position 9 is any amino acid
  Variant (11)..(11): Xaa in position 11 is Ala, Ser or Thr
  Variant (12)..(12): Xaa in position 12 is any amino acid
  Variant (14)..(14): Xaa in position 14 is Ala, Ile, Leu or Val
  Variant (15)..(15): Xaa in position 15 is Ala, Gly, Asn, Ser or Thr
LXXKGXXAXQXXRXX

SEQ ID NO: 83427 - protein, 21 aa, Artificial sequence
  protein pattern
  Variant (2)..(4): Xaa in position 2 to 4 is any amino acid
  Variant (5)..(5): Xaa in position 5 is Ala or Ser
  Variant (6)..(10): Xaa in position 6 to 10 is any amino acid
  Variant (12)..(12): Xaa in position 12 is Phe, Ile, Leu or Val
  Variant (13)..(13): Xaa in position 13 is any amino acid
  Variant (15)..(15): Xaa in position 15 is Ala or Gly
  Variant (17)..(17): Xaa in position 17 is any amino acid
  Variant (18)..(18): Xaa in position 18 is Phe, Ile, Leu, Met or Val
  Variant (20)..(20): Xaa in position 20 is any amino acid
QXXXXXXXXXDXXPXAXXGXG

SEQ ID NO: 83428 - protein, 15 aa, Artificial sequence
  protein pattern
  Variant (3)..(3): Xaa in position 3 is any amino acid
  Variant (4)..(4): Xaa in position 4 is Ala, Asp, Gly, Asn, Pro or Ser
  Variant (6)..(10): Xaa in position 6 to 10 is any amino acid
  Variant (11)..(12): Xaa in position 11 to 12 is Ala or Val
  Variant (14)..(14): Xaa in position 14 is any amino acid
VLXXVXXXXXXXGXP

SEQ ID NO: 83429 - DNA, 672 bp, Escherichia coli
  CDS (1)..(672): transl_table=11
atgacaatgcgcacaaatcgctaccctgccagacagatttttagggagagaaccatgctgttacacattttgtatttggttggcattactgccgaagccatgacgggggcgctggcggccggacgacggcgcatggatacatttggcgtaattattattgcgaccgccaccgcaattggcggagggtcagtgcgcgatattctgctgggccactatccgctcggctgggtcaaacacccggaatatgtgattatcgtcgctaccgccgcagtactcaccactatcgttgctcctgtaatgccttacctgcgcaaagtgtttctggtgctcgatgcgctcggactggtggtcttttctatcatcggggcacaggttgcactggatatggggcacggcccaattattgccgttgtcgcggcggtaaccaccggcgtgtttggcggcgttttgcgcgatatgttctgtaaacgtatcccactggtattccagaaagagttgtatgccggtgtctcatttgcctccgccgtgctgtacatcgcgctgcaacactatgtttctaaccatgatgtggtaattatctccaccctggtattcggcttttttgcccgcttactggcgctacgccttaagctgggattaccggtcttttactacagccacgaaggacactaa

SEQ ID NO: 83430 - protein, 223 aa, Escherichia coli
MTMRTNRYPARQIFRERTMLLHILYLVGITAEAMTGALAAGRRRMDTFGVIIIATATAIGGGSVRDILLGHYPLGWVKHPEYVIIVATAAVLTTIVAPVMPYLRKVFLVLDALGLVVFSIIGAQVALDMGHGPIIAVVAAVTTGVFGGVLRDMFCKRIPLVFQKELYAGVSFASAVLYIALQHYVSNHDVVIISTLVFGFFARLLALRLKLGLPVFYYSHEGH

SEQ ID NO: 83431 - DNA, 639 bp, Mesorhizobium loti MAFF303099
  CDS (1)..(639): transl_table=11
atgcccttgaaccccatcgcccttctcgactatgccggcgtcgccgtttttgcggcgaccggggcgttggctgcctcgcgcaagcaactcgacattatcggtttcctgttcttggccagcgtcactggcattggcggtggcacgtttcgcgacctcatcctcaacgtgccggtcttctgggtgggaaaccgcgactatgtgctgatctgcgccgtggtggcggtcctggtcttcttcaccgcgcatcgcgtcgaatcccgatacaagctgctgctgtggctcgacgccatcgggctcgccgccttttcggtgatgggcgcggccaagggtcttggcatcaccggctcgccggtggtttcgatcatcaccggcatgctgaccgcgacctttggcggcatattgcgcgatctgctggccggcgagccgtcggtgctgctgaggccggagatctacgtcacggccgccctggcgggcgcggccatcttcacattaggtgacgtcgccggattgccgcagtttgtctcggggttggccggcttcgtcgtggcgctcgccgtgcgcggcggcgcgctgcgtttcggctgggcgtttccgtcctacaagagccggcccggccgacggccggaagatattccgtga

SEQ ID NO: 83432 - protein, 212 aa, Mesorhizobium loti MAFF303099
MPLNPIALLDYAGVAVFAATGALAASRKQLDIIGFLFLASVTGIGGGTFRDLILNVPVFWVGNRDYVLICAVVAVLVFFTAHRVESRYKLLLWLDAIGLAAFSVMGAAKGLGITGSPVVSIITGMLTATFGGILRDLLAGEPSVLLRPEIYVTAALAGAAIFTLGDVAGLPQFVSGLAGFVVALAVRGGALRFGWAFPSYKSRPGRRPEDIP

SEQ ID NO: 83433 - DNA, 624 bp, Vibrio cholerae O1 biovar eltor str. N16961
  CDS (1)..(624): transl_table=11
atgctgctgagtgttttgtatatcattgggatcacggcggaagccatgaccggagccttgagtgccggccgtcgcaaaatggactggtttggcgtcatgctggttgccagcgctactgcgattggcggtggtacagtgcgcgatattttgctgggccactacccactcggctgggtaaagaatcctgaatatctggcgattacttgtgtcgcgggcgtactgaccacttgggtctataagtgggtcatcaagctcaaaggcctgtttattcgtcttgatgcgctggggctgattgtgttttcgatcatcggtacgcaagtggcgatgcgcatgggactgcaccccggcatctgtttagtttctgcggtagtcactggcgtgtttggtggtttgctgcgcgatttaatttgccgtcaaccacctttggtattgcatgaagagttgtacgcctcgattgctctgttggcatcgggactgtatctcgccttgcttgaatttggtgtcagtgatgtggtaagcacagtggtcactctggtggtcggttacactttgcggatggctgcggtgcgttttaaatggcgtctgccctctttccatttagaaaccgagaactccattcactag

SEQ ID NO: 83434 - protein, 207 aa, Vibrio cholerae O1 biovar eltor str. N16961
MLLSVLYIIGITAEAMTGALSAGRRKMDWFGVMLVASATAIGGGTVRDILLGHYPLGWVKNPEYLAITCVAGVLTTWVYKWVIKLKGLFIRLDALGLIVFSIIGTQVAMRMGLHPGICLVSAVVTGVFGGLLRDLICRQPPLVLHEELYASIALLASGLYLALLEFGVSDVVSTVVTLVVGYTLRMAAVRFKWRLPSFHLETENSIH

SEQ ID NO: 83435 - DNA, 681 bp, Pasteurella multocida subsp. multocida str. Pm70
  CDS (1)..(681): transl_table=11
atgctgttaagcgtcctctacattattggtatcaccgcagaagccattacaggtgcactggctgctggacgtgaaaaaatggatatttttggcgtcattattattgccgcaatgacggcgattggcggtggctcggtcagagatgtcttactcggtcactaccctatcggctgggtgaaaaatcctcattactttctgattgtggcaggtgcagcggtgttaaccgtctttattgtgcccctaattcgtcgctttatgcactattttcataccgtcttcttagtcttagatgcccttggtttgatcgtgttttccattatcggcgcacaagttgcactggacatgggctatggctttactatcgcggtgattgccgccatcattactggtgcgtttggtggggtactccgtgatttattatgtaaccgtattccactggttttccaaaaagagctatatgccagtattgcattgattgcgactgccatttatattggcttgcagcaactcaatatcgatcacaatcttgttattattatcaccttgatcagtggctttattgctcgtcttttagcaatttatttcgaatgggggctacctgtttttgactatcaagagcaagaaatggcaaagaagagtaatgatgacaaattacccaaaaaagtaacatggaaaaaataa

SEQ ID NO: 83436 - protein, 226 aa, Pasteurella multocida subsp. multocida str. Pm70
MLLSVLYIIGITAEAITGALAAGREKMDIFGVIIIAAMTAIGGGSVRDVLLGHYPIGWVKNPHYFLIVAGAAVLTVFIVPLIRRFMHYFHTVFLVLDALGLIVFSIIGAQVALDMGYGFTIAVIAAIITGAFGGVLRDLLCNRIPLVFQKELYASIALIATAIYIGLQQLNIDHNLVIIITLISGFIARLLAIYFEWGLPVFDYQEQEMAKKSNDDKLPKKVTWKK

SEQ ID NO: 83437 - DNA, 606 bp, Halobacterium sp. NRC-1
  CDS (1)..(606): transl_table=11
atgaacgcggtcggcctggtggcgttcgccaccgtcggctcgctgaaggcgatcgacgccgacttcgacgtgctcggggtcgcggtgctcggcgtgctgacggcgctgggcggcggcgcaacccgtgacgtgctcgtcgggtcggtgccggcgatgttgcagtccaccaccgacgtggggttcgcgctggctggcgtggtggtggcggtcgtggtggcgcgacgcgtcggcaccgaggtgcttgcccacccggtcgtggacgtcccggacgccgtcgggctggcggcgttcgcggcgtcgggcgcgctggtcggcgtcggggcggacgtgtcgccgttcggggtggtcgtgctcggcaccaccacgggagtcggcggggggctggtgtccgacgtgctgttgcagcgcgtgccgttcgtgctcacggaggacctgtacgcgacgtgcgcgatcgccgggagcaccgtgttgtgggtcgccaccgcgtcggggctgggggccacgatcgcggcggcggcgggcgcgggggtcacgctcgcggtgcggctgctcgcgatccgcttcgagtgggcgctgccgacggtccggctcaacgccccggcgtga

SEQ ID NO: 83438 - protein, 201 aa, Halobacterium sp. NRC-1
MNAVGLVAFATVGSLKAIDADFDVLGVAVLGVLTALGGGATRDVLVGSVPAMLQSTTDVGFALAGVVVAVVVARRVGTEVLAHPVVDVPDAVGLAAFAASGALVGVGADVSPFGVVVLGTTTGVGGGLVSDVLLQRVPFVLTEDLYATCAIAGSTVLWVATASGLGATIAAAAGAGVTLAVRLLAIRFEWALPTVRLNAPA

SEQ ID NO: 83439 - DNA, 624 bp, Escherichia coli O157:H7 EDL933
  CDS (1)..(624): transl_table=11
atgctcgtctattggctggatatagtcggcacagcggtatttgccatctccggcgttttgttagccggaaaattgcgtatggacccttttggtgttctggtactgggcgtggttaccgctgtaggcggcgggacaattcgcgacatggcgctggatcacggcccggtattttgggtgaaagatcccaccgatctggtcgttgcaatggtaaccagcatgctgaccatcgtgctggtgcgccagccaagacacttaccaaaatggatgttgccggtgctggacgccgttggtctggcggtgtttgtcggcattggcgtgaataaagcctttaatgcggaagccggtccgttaatcgcggtttgtatgggcgtcattactggcgttggcggcgggatcattcgtgatgttctggcccgcgaaatccccatgattttacgtacagaaatctacgcaactgcctgtattatcggcggtattgtccacgctacggcttattacacattttccgtaccactggaaacagccagtatgatgggcatggtcgtgacgctattgattcggctggcggctattcgttggcatcttaagctaccgacgtttgcgctggatgagaatgggcgttga

SEQ ID NO: 83440 - protein, 207 aa, Escherichia coli O157:H7 EDL933
MLVYWLDIVGTAVFAISGVLLAGKLRMDPFGVLVLGVVTAVGGGTIRDMALDHGPVFWVKDPTDLVVAMVTSMLTIVLVRQPRHLPKWMLPVLDAVGLAVFVGIGVNKAFNAEAGPLIAVCMGVITGVGGGIIRDVLAREIPMILRTEIYATACIIGGIVHATAYYTFSVPLETASMMGMVVTLLIRLAAIRWHLKLPTFALDENGR

SEQ ID NO: 83441 - DNA, 690 bp, Agrobacterium tumefaciens str. C58
  CDS (1)..(690): transl_table=11
ttgcgcgacactgacgtgtttgcgggccgtctttctggggggaaccttttcatgacgctgctgggttttctcgattatgccggtgtcgccgtctttgccgcaaccggcgccttggccgcctcacgcaagcagctcgacctgatcggcttcctgttcttcgcggcggcgaccggcattggcggcggcacggttcgcgatctcgtgctgggcagaacgccggtgttctgggtgataaaccccacctatattctcgtctgtgtctcggtcgcggttctgctgttctttaccgcgcatcttttcgaatcccgttatcgggtattgatctggcttgatgcgctcggcctttccgcctattgcgtcatgggagcagccaaaggtctcgctgcaagcggctcggcaaccgtcgccatcgtcacaggtgttctgacggcgacgttcggtggtgttttgcgcgatattatggccggagagccgtcggttctgctgcgcccggaaatctacatcacctgcgcgcttttgggctcttccatcttcattgtcgtctatttcttcggcgcaccgctctatgccgcatcagcggcgggtttcctgacggccttctgcgtccgatccggcgcgctgatcttcggatggaccttcccgccctataagggcaaaccgggcagacggccggaagacgtcatgaagtga

SEQ ID NO: 83442 - protein, 229 aa, Agrobacterium tumefaciens str. C58
MRDTDVFAGRLSGGNLFMTLLGFLDYAGVAVFAATGALAASRKQLDLIGFLFFAAATGIGGGTVRDLVLGRTPVFWVINPTYILVCVSVAVLLFFTAHLFESRYRVLIWLDALGLSAYCVMGAAKGLAASGSATVAIVTGVLTATFGGVLRDIMAGEPSVLLRPEIYITCALLGSSIFIVVYFFGAPLYAASAAGFLTAFCVRSGALIFGWTFPPYKGKPGRRPEDVMK

SEQ ID NO: 83443 - DNA, 714 bp, Brucella melitensis 16M
  CDS (1)..(714): transl_table=11
ttgaggcagcgcgggtggaaacttgaaccggacgatcaagcggaggctcgtagagacgtgacgatcatacaattcctgaactacgcgggagtgttcgtttttgccgccacaggtgcattggccgcctcgcgccgccagctcgacattatcggcttcatcttccttgccaatatcacggccattggcgggggaacgatgcgcgatctggtgctcgcaagcccggttttctgggtcgtgcagccgctctatctgtttgtgggcacacttgcggccattgcagtctatttcaccgcccataaggtggaatcgcgctatcgcacccttctctggctcgatgccatcggcatggccgcctacacggtcatgggcgccgccaaggggcttgcgctgggcttcggcccgtcagtcgctatcgtcacaggcattttcaccgccacgttcggcggcatattgcgcgacatggtggtgggggaaccgtccgtgctgatgcgccgcgaaatctatgtcacggcagccgttgccggggcctgcctctatgtggtgctggaatatctcggcatcaatcccgtgatttcggcgggtgcagccgcttttgccgcttttttcgtgcgcggcggcgcgctttatttcggctggaccctgccggtttataaaagcaagcccggccgcactgaagaagaactccagcgcgaccagatcatccggccagaataa

SEQ ID NO: 83444 - protein, 237 aa, Brucella melitensis 16M
MRQRGWKLEPDDQAEARRDVTIIQFLNYAGVFVFAATGALAASRRQLDIIGFIFLANITAIGGGTMRDLVLASPVFWVVQPLYLFVGTLAAIAVYFTAHKVESRYRTLLWLDAIGMAAYTVMGAAKGLALGFGPSVAIVTGIFTATFGGILRDMVVGEPSVLMRREIYVTAAVAGACLYVVLEYLGINPVISAGAAAFAAFFVRGGALYFGWTLPVYKSKPGRTEEELQRDQIIRPE

SEQ ID NO: 83445 - DNA, 660 bp, Corynebacterium glutamicum ATCC 13032
  CDS (1)..(660): transl_table=11
atgctgctgacaattctatgggccatcggcatcaccgccgaaggcatgacaggcgcgctggccgcaggccgacaaaaaatggatctcttcggagtatccgtcatcgcatgcgttaccgcgatcggcggcggatccatccgcgacatgctgctgggacattacccgctggtgtgggtggaaaagccactgtatctactgctgatcattggcgcagccattttgacagtgtccatttccttcctgatggagcacttccgtgtgttgttcctcgtgctcgacgccgtgggtctttctgcattcgctgtgatcggcacacaaatcgcactggaaatgggctacggattcatcatcgcagtagtggcatcagtgctcacaggtgtattcggcggcgtcatgcgtgaccttttgtgtgaccgcatcccactggtatttcaaaaagagctctacgcatcaatcgcattcctcgccacctgcgtctactttgcgatgatgtaccttggagcttccgaaaacgtcaccgtcctggtctctgtggtggttgcctttgtagtccgactgctatccatctggcgcggatggagcctccccgtattcgactaccaagaacgcgaatacaaacgagatcccaaaatgcgtctgtggagaatgttccggaagtaa

SEQ ID NO: 83446 - protein, 219 aa, Corynebacterium glutamicum ATCC 13032
MLLTILWAIGITAEGMTGALAAGRQKMDLFGVSVIACVTAIGGGSIRDMLLGHYPLVWVEKPLYLLLIIGAAILTVSISFLMEHFRVLFLVLDAVGLSAFAVIGTQIALEMGYGFIIAVVASVLTGVFGGVMRDLLCDRIPLVFQKELYASIAFLATCVYFAMMYLGASENVTVLVSVVVAFVVRLLSIWRGWSLPVFDYQEREYKRDPKMRLWRMFRK

SEQ ID NO: 83447 - DNA, 615 bp, Xanthomonas axonopodis pv. citri str. 306
  CDS (1)..(615): transl_table=11
gtggcaactgtcctgttcctgctggatctgctcggcaccttcgtgttcgccctgagcggggcgaccgtggcggtacgcaaccgtctggacctgttcggcgtgctggtgctctcctgcgcggccgccgtgtccggcggcatcgtgcgcgatgtgctgatcggcgccaccccgccggccgcgctggtgcagccgcagtatctgctggtggcctgcctggccggcgtggccgggttctattgccatgcagcggtggagcgcctgcgcaatccggtgcagatcttcgatgccgccgggctggcgctgtttgcggtctatggcaccagcaaggcgctggactatcacctcaccccgttgagcgcgacattgctgggcatgctcagcggcatcggcggcggcattgcgcgcgatctgctggtggcgcgcacgccggtggtgttgcaggccgaactgtacgcggtcgccgcgcttgccggtggcgggctggtcgcggtcgggcacgtcctggatgtgccgcaggcctggtcgttggcgaccggcgccggcgtgtgcttcggcctgcgcttcatggcgatccgctacggctggcatctgccggtggcgcgctcgccggagtag

SEQ ID NO: 83448 - protein, 204 aa, Xanthomonas axonopodis pv. citri str. 306
MATVLFLLDLLGTFVFALSGATVAVRNRLDLFGVLVLSCAAAVSGGIVRDVLIGATPPAALVQPQYLLVACLAGVAGFYCHAAVERLRNPVQIFDAAGLALFAVYGTSKALDYHLTPLSATLLGMLSGIGGGIARDLLVARTPVVLQAELYAVAALAGGGLVAVGHVLDVPQAWSLATGAGVCFGLRFMAIRYGWHLPVARSPE

SEQ ID NO: 83449 - DNA, 663 bp, Yersinia pestis KIM
  CDS (1)..(663): transl_table=11
gtgccaacaaatggccagcattccaacccctgtcgcggagtcacattaatgctggtttattggctggatatcttaggtactgcggtatttgctatctctggtgtattactggcaggaaaactacgtatggatccatttggcgtactggttttgggggtggttactgccgtcgggggtggcacgatccgtgacatggcattagccaatggcccggtattttgggtgaaagatcccaccgatctagtcgtggccatggtgacctgtctggctaccatcgtactggtacgtcaacccaggcgcacggcaaaatggatcctgccggtgttagatgcgattggtttagcggtgttcgtcggtatcggggttaataaagcttttgccgccgatgccagcccattagtggctatctgtatgggcgtaataactggtgtcggaggtgggattattcgtgacgtcttagcccgtgagattccgatgatcctgcgtactgagatttatgcgacggcctgtattattggcgggatcgtgcatgccactgcgttctatacatttaacatgccattacagcaagccatgatgttgggcatggtgataaccctcggtattcggctcgccgcaatccgttggcatttaaaactaccaaccttcgaaatagagcattga

SEQ ID NO: 83450 - protein, 220 aa, Yersinia pestis KIM
MPTNGQHSNPCRGVTLMLVYWLDILGTAVFAISGVLLAGKLRMDPFGVLVLGVVTAVGGGTIRDMALANGPVFWVKDPTDLVVAMVTCLATIVLVRQPRRTAKWILPVLDAIGLAVFVGIGVNKAFAADASPLVAICMGVITGVGGGIIRDVLAREIPMILRTEIYATACIIGGIVHATAFYTFNMPLQQAMMLGMVITLGIRLAAIRWHLKLPTFEIEH

SEQ ID NO: 83451 - DNA, 792 bp, Bifidobacterium longum NCC2705
  CDS (1)..(792): transl_table=11
atgcaggtggcgttggagaacaacatcgtttttgtggtcatcgagtatttagcaatcctgtgttggggattatcgggcggacttgccgccattcgcaagggctacgacatcttcaccatcatgctgtgcggatggcttaccgcactcggcggcggtcttgtgcgcgacgtgatgctcggtgccctgccgccggtcggcatcaccgacaaaggctatgtgctcaccacgctgttttccggcattatcgtggtggtggcccatccggagatcaccaaactcaaatggacgatgactgtcatcgatgctctgggcctcggactattcgcagtcagcggcaccgcaaaagctctggcctacggttcctcaggcatgacagccgtattccttggcatgttcacagcactggccggcggcctcattcgtgacatcttcattggcgacgtgccaatgattattcgagacaaacacctctatgctgtgccttcgttcatcggctgcatcctgaccgtgctggtatggcgcggcgtaagctacggctggttcgacatgcgctcggaaatgctgctcgacgtgctgatcgtcatcatcgtggtggcgctgcgactgctctcggtaggcttcaacgtcactctgcccggagccgtcgaacgtcatcgcgtctacctgcccagcgaaagccgatatctcaagcgcccggtcatccatccgcacgccgataccgtcgatcccggcgataccaccaaggacgaagaagacaagcctcaggatggttcaaggccgcctcagggctaa

SEQ ID NO: 83452 - protein, 263 aa, Bifidobacterium longum NCC2705
MQVALENNIVFVVIEYLAILCWGLSGGLAAIRKGYDIFTIMLCGWLTALGGGLVRDVMLGALPPVGITDKGYVLTTLFSGIIVVVAHPEITKLKWTMTVIDALGLGLFAVSGTAKALAYGSSGMTAVFLGMFTALAGGLIRDIFIGDVPMIIRDKHLYAVPSFIGCILTVLVWRGVSYGWFDMRSEMLLDVLIVIIVVALRLLSVGFNVTLPGAVERHRVYLPSESRYLKRPVIHPHADTVDPGDTTKDEEDKPQDGSRPPQG

SEQ ID NO: 83453 - DNA, 657 bp, Brucella suis 1330
  CDS (1)..(657): transl_table=11
gtgacgatcatacaattcctgaactacgcgggagtgttcgtttttgccgccacaggtgcattggccgcctcgcgccgccagctcgacattatcggcttcatcttccttgccaatatcacggccattggcgggggaaccatgcgcgatctggtgctcgcaagcccggttttctgggtcgtgcagccgctctatctgtttgtgggcacacttgcggccattgcagtctatttcaccgcccataaggtggaatcgcgctatcgcacccttctctggctcgatgccatcggcatggccgcctacacggtcatgggcgccgccaaggggcttgcgctgggcttcggcccgtcagtcgctatcgtcacaggcattttcaccgccacgttcggcggcatattgcgcgacatggtggtgggggaaccgtccgtgctgatgcgccgcgaaatctatgtcacggcagccgtcgccggggcctgcctctatgtggtgctggaatatctcggcatcaatcccgtgatttcggcgggtgcagccgcttttgccgcttttttcgtgcgcggcggcgcgctttatttcggctggaccctgccggtttataaaagcaagcccggccgcactgaagaagaactccagcgcgaccagatcatccggccagaataa

SEQ ID NO: 83454 - protein, 218 aa, Brucella suis 1330
MTIIQFLNYAGVFVFAATGALAASRRQLDIIGFIFLANITAIGGGTMRDLVLASPVFWVVQPLYLFVGTLAAIAVYFTAHKVESRYRTLLWLDAIGMAAYTVMGAAKGLALGFGPSVAIVTGIFTATFGGILRDMVVGEPSVLMRREIYVTAAVAGACLYVVLEYLGINPVISAGAAAFAAFFVRGGALYFGWTLPVYKSKPGRTEEELQRDQIIRPE

SEQ ID NO: 83455 - DNA, 624 bp, Shigella flexneri 2a str. 301
  CDS (1)..(624): transl_table=11
atgctcgtctattggctggatatagtcggcacagcggtatttgccatctacggcgttttgttagccggaaaattgcgtatggacccttttggtgttctggtactgggcgtggttaccgcagtaggcgacggaacaattcgcgacatggcgctggatcacggcccggtattttgggtgaaagatcccaccgatctggtcgttgccatggtcaccagcatgctgaccatcgtgctggtgcgccagccaagacgcttaccaaaatggatgttgccggtgctggacgccgttggtctggcggtgtttgtcggcattagcgtgaataaagcctttaatgcggaagccggtccgttaatcgcggtttgtatgggcgtcattactggcgttggcggcgggatcattcgtgatgtactggtccgcgaaatccccatgattttacgtacagaaatctacgcaactgcctgtattatcggcggtattgtccacgctacggcttattacacattttccgtaccactggaaacagccagtatgatgggcatggtcgtgacgctattgattcggctggcggctattcgttggcatcttaagctaccgacgtttgcgctggatgagaatgggcgttga

SEQ ID NO: 83456 - protein, 207 aa, Shigella flexneri 2a str. 301
MLVYWLDIVGTAVFAIYGVLLAGKLRMDPFGVLVLGVVTAVGDGTIRDMALDHGPVFWVKDPTDLVVAMVTSMLTIVLVRQPRRLPKWMLPVLDAVGLAVFVGISVNKAFNAEAGPLIAVCMGVITGVGGGIIRDVLVREIPMILRTEIYATACIIGGIVHATAYYTFSVPLETASMMGMVVTLLIRLAAIRWHLKLPTFALDENGR

SEQ ID NO: 83457 - DNA, 627 bp, Shewanella oneidensis MR-1
  CDS (1)..(627): transl_table=11
atgaatcactggatttacttcttcgatttatgtggcacggcggtatttgccctttctggcgctttagccgctggtcgccaccgtatggacccttttggggtgatagtgcttgcgtcggtgacagcagtgggcggtggcagtatccgcgatgcgctgattggcgcaaccccagtattttggatccgcgacccaaactatattatcgttatccttgcgactgtagtggcctgtttgttgttagtacgtcgcccacgcaagatgcctgagtacgtcctccccgtcgccgatgccttaggtttagccctgttcactgtgattggtgccgaaaaagccctcaatatggggctaagcggcatgattgcagtggtgatgggcttgatcaccggcgtaggaggaggcattattcgagacttgctgtgcagacaaatcccgatggtattgcgcacagaaatctatgccacagcctccattatcggcggtataggctataccgtaagtttggcctgcggtatgggcgaaaaaacggcactttttttagccatggccagtgcgttaatcatccgtctatgcgccatcaaatggcatttatcattacccgcttttgatctcaaaaccaagagggaatag

SEQ ID NO: 83458 - protein, 208 aa, Shewanella oneidensis MR-1
MNHWIYFFDLCGTAVFALSGALAAGRHRMDPFGVIVLASVTAVGGGSIRDALIGATPVFWIRDPNYIIVILATVVACLLLVRRPRKMPEYVLPVADALGLALFTVIGAEKALNMGLSGMIAVVMGLITGVGGGIIRDLLCRQIPMVLRTEIYATASIIGGIGYTVSLACGMGEKTALFLAMASALIIRLCAIKWHLSLPAFDLKTKRE

SEQ ID NO: 83459 - DNA, 642 bp, Shewanella oneidensis MR-1
  CDS (1)..(642): transl_table=11
atgcaagaagcacaatttatcggattattatggctgattgggattttggccgaggcgatgacaggggccttagcggcgggtcgtaagcagatggatttattcggtgtggtgattattggctgcgctacggcgattggtggtggtaccttaagagacatgctactcggaaattaccccttggtttgggtcgagaatgttcattacctgattgcgattgcatttgcgtctttgttaacggtcgcgattgcgccggttatgcgttatctgtctaagttgtttttggcaatcgatgcccttgggctggcggttttctcgattgttggcgcgcaaaagactctgatgctcggttttagccctacgattgcggtagttatggggttagttactggcgtttttggtggggtgatccgcgatattctgtgcaaccaagtgcctttaatttttaagaaagaactctatgcggtgatttcgctctttaccgcaggcttatatatcacgctcaacgcctaccaattggaggagtggataaacctagtgatttgtttaacgcttggatttagcttacgaatgctggcattgcgctatcattggtcgatgcctacctttgattaccagtccagtggtgatcagcatacacactga

SEQ ID NO: 83460 - protein, 213 aa, Shewanella oneidensis MR-1
MQEAQFIGLLWLIGILAEAMTGALAAGRKQMDLFGVVIIGCATAIGGGTLRDMLLGNYPLVWVENVHYLIAIAFASLLTVAIAPVMRYLSKLFLAIDALGLAVFSIVGAQKTLMLGFSPTIAVVMGLVTGVFGGVIRDILCNQVPLIFKKELYAVISLFTAGLYITLNAYQLEEWINLVICLTLGFSLRMLALRYHWSMPTFDYQSSGDQHTH

SEQ ID NO: 83461 - DNA, 666 bp, Corynebacterium efficiens YS-314
  CDS (1)..(666): transl_table=11
atgctgctgacaattctctgggtgatcggcatcaccgcggaagggatgaccggtgccctggctgcggggcgtcagaagatggatctcttcggtgtctcggtcatcgcctgcgtgaccgccatcggtggtggttcgatccgcgacatgctgctgggacactaccccctggtgtgggtggagaaaccgcacttcctgttgctgatcatcggggccgccatcctgacggtgtccatctcctacctgatgcagcacttccgggtgctgttcctggtgctcgatgccgtgggattgtcagcgttcgccgtgatcggcacgcagatcgccctggagatggggtacggcttcatcatcgcggtggtcgcctccgtgctcaccggtgtcttcggcggcgtgctgcgtgacctgttgtgcgaccgtatcccactggtgttccagaaggagctctacgcctccatcgccctgctggccacctgcgtgtacttcctcatgatgtacctcggtgtgggggagaacaccacggtgatcgtatccgtgctggtggccttcaccgcccgactgctcgccctgtggcggggctggtccctgccggtgtttgagtaccaggagcgtgaggtccagcgtgatcccaccaaccggatctggcgtttctggaactggaagaagtag

SEQ ID NO: 83462 - protein, 221 aa, Corynebacterium efficiens YS-314
MLLTILWVIGITAEGMTGALAAGRQKMDLFGVSVIACVTAIGGGSIRDMLLGHYPLVWVEKPHFLLLIIGAAILTVSISYLMQHFRVLFLVLDAVGLSAFAVIGTQIALEMGYGFIIAVVASVLTGVFGGVLRDLLCDRIPLVFQKELYASIALLATCVYFLMMYLGVGENTTVIVSVLVAFTARLLALWRGWSLPVFEYQEREVQRDPTNRIWRFWNWKK

SEQ ID NO: 83463 - DNA, 612 bp, Pseudomonas putida KT2440
  CDS (1)..(612): transl_table=11
atgttgttgatgctctaccttatcgccattaccgccgaagccatgactggcgcgctgtctgccgggcgtcgcggcatggactggtttggcgtggtgctgatcgcctgcgtcactgcgcttgggggtggctcggtgcgtgatgtgctgctcgggcactacccgctgacctgggtgaagcaccctgagtacctggtgctgaccagttttgcggcgctgctgaccattttcattgcgccaatgatgcgccgccttcgctcgctgttcctggtgcttgatgccctggggctggtggcgtttaccctgataggttgcatgacggcgctggagatggggcagggcatgctggtggcgtcgatcagcggggtgatcactggggtgtttggcgggatcctgcgggatatcttctgcaacgacatcccgctggtgttccgccgtgagctgtatgccagcgtgtcatttgcggcagcctggttttatctgggttgcgtgtatttcaaggtgccggcagaacaggcgatgttgctcacactgtttggcggcttcctggtgcgcctgttggcaatccgcttccactgggaaatgcccaagttccactacaacgaccagcagtga

SEQ ID NO: 83464 - protein, 203 aa, Pseudomonas putida KT2440
MLLMLYLIAITAEAMTGALSAGRRGMDWFGVVLIACVTALGGGSVRDVLLGHYPLTWVKHPEYLVLTSFAALLTIFIAPMMRRLRSLFLVLDALGLVAFTLIGCMTALEMGQGMLVASISGVITGVFGGILRDIFCNDIPLVFRRELYASVSFAAAWFYLGCVYFKVPAEQAMLLTLFGGFLVRLLAIRFHWEMPKFHYNDQQ

SEQ ID NO: 83465 - DNA, 621 bp, Vibrio vulnificus CMCP6
  CDS (1)..(621): transl_table=11
atggactccatgctgctgtattttatcgatttatttggcaccgctgtttttgctgtttccggcgttctcttggctggacggttaaagatggatccttttggtgtggttgtattaggcagcgtgaccgcgattggtggtggcactattcgcgatatggccttgggcgcaacccccgtcttttggatcaaggacaccacctatctttgggttatcatcgttacctgtctgttgacaatgctcgttgtgcgccgacctaagcgcttagcgtggtggatattacccgtctgcgatgccattggcttggcggtatttgttgggatcggtgtcgagaaagccctcgcctatcaagattcagcgatggtcgcggtgatcatgggcgtcattaccggctgtggtggcggtattattcgcgatgtgttagcgcgtgagattccaatggtgctgcgaagtgaagtgtatgcgactgcctgtcttgttggtgggatattccacacatctgccctaagccttggctatgatcactctacagccttattggcaggtgtgttttcgaccttgatcatccgcttgggcgccattcgctggcatttatcattgcctacatttgcactaaataaataa

SEQ ID NO: 83466 - protein, 206 aa, Vibrio vulnificus CMCP6
MDSMLLYFIDLFGTAVFAVSGVLLAGRLKMDPFGVVVLGSVTAIGGGTIRDMALGATPVFWIKDTTYLWVIIVTCLLTMLVVRRPKRLAWWILPVCDAIGLAVFVGIGVEKALAYQDSAMVAVIMGVITGCGGGIIRDVLAREIPMVLRSEVYATACLVGGIFHTSALSLGYDHSTALLAGVFSTLIIRLGAIRWHLSLPTFALNK

SEQ ID NO: 83467 - DNA, 642 bp, Bradyrhizobium japonicum USDA 110
  CDS (1)..(642): transl_table=11
atgtggagcctgccgccgagcgatagcgtgctgcaccttctggcgtttgttgccttgacggcgcagggcatgaccgcggcgcttgctgcggggcggcgcagcatggactatgtcggcgtctgcatgctcggcagcattaccgcgctcggcggcggcacgctgcgcgacctgtttctcggccactatccgctcgcctgggtcgcgaacccgatctatctcgtgctccctggcgctgcagcgctgctgaccatcctgttcgcgcgcctcgtgcaccggcttcagctcgccttcatcgtgctcgatgccatcggcctcgtcgtcttcactatgaccggctgcgacatcgcctggcagatggatgtctcgctgccgatcgtcatcgtctcgggcatggtgacgggctgcgccggcggcgtgttgcgcgacgtgctctgcaacgacgtgccgctcttgtttcgctccgagctctacgccagcgtctccgtggtgacggggctgttctacgcgacggccttcggcctcaatctcaacgccgagctctggacgatcctgaccttcatcctcggcatcagcttccgcctgctcgcggtgcgctacaaatgggagatgccgaaattcgtgttcaaggaggatgagcggtag

SEQ ID NO: 83468 - protein, 213 aa, Bradyrhizobium japonicum USDA 110
MWSLPPSDSVLHLLAFVALTAQGMTAALAAGRRSMDYVGVCMLGSITALGGGTLRDLFLGHYPLAWVANPIYLVLPGAAALLTILFARLVHRLQLAFIVLDAIGLVVFTMTGCDIAWQMDVSLPIVIVSGMVTGCAGGVLRDVLCNDVPLLFRSELYASVSVVTGLFYATAFGLNLNAELWTILTFILGISFRLLAVRYKWEMPKFVFKEDER

SEQ ID NO: 83469 - DNA, 612 bp, Pseudomonas syringae pv. tomato str. DC3000
  CDS (1)..(612): transl_table=11
atgttgctgatgctttatctgatcgccatcaccgctgaggccatgaccggcgcgctgtctgccgggcgtcgcgggatggactggttcggcgtggtgctgatcgcctgcgtgactgcgctgggcggtggctcggtgcgtgacgtgctgatcggtcattacccgctgacttgggtcaagcacccggaatacctgatgctgaccagcgtggcggcgttggtgacgatctttatcgcaccgctgatgcgccacctgcgctcgctgtttctggtgctcgacgcactggggctggtggccttcacattgatcggctgcatgacggcactggaagccggacatggtctggtgatcgcgtcggtgtgcggcgttattaccggggtattcggtggcatcctgcgtgacatcttctgcaatgacatcccgctgatcttccgccgcgagctgtacgccagcgtgtcgtttctggccgcgtggtgttttctgctgtgccagtacctgcagttgcccaacgaacaggccgtgctgatcaccctgtttggcggcctgttgctgcgcctgctggccatccgcttccactgggaaatgcccaagttcgtctataaagacgagccctga

SEQ ID NO: 83470 - protein, 203 aa, Pseudomonas syringae pv. tomato str. DC3000
MLLMLYLIAITAEAMTGALSAGRRGMDWFGVVLIACVTALGGGSVRDVLIGHYPLTWVKHPEYLMLTSVAALVTIFIAPLMRHLRSLFLVLDALGLVAFTLIGCMTALEAGHGLVIASVCGVITGVFGGILRDIFCNDIPLIFRRELYASVSFLAAWCFLLCQYLQLPNEQAVLITLFGGLLLRLLAIRFHWEMPKFVYKDEP

SEQ ID NO: 83471 - DNA, 621 bp, Vibrio parahaemolyticus RIMD 2210633
  CDS (1)..(621): transl_table=11
atggattccatgctgctttatatgatcgatttattcggtacagcaatcttcgctgtgtctggtgttttactcgctggccgattaaaaatggatcccttcggtgttatcgtcctaggcagcgtgactgccattggcggtggcactattcgtgatatggcacttggtgcgacccccgtcttttggattaccgataccacttatctttgggttatcttcatcacctgtttgttaactatgatcttggttcgcagaccaaaacggttagcttggtgggttttacccgtgtgtgacgccatcggtctggccgtatttgtgggaattggggtagaaaaagcgctcgcctacaacgcctccggcatggttgccgtgatcatgggtgtaatcaccggttgcggtggcggcataatccgagatgtcttagcccgagaggtacctatggtgctaagaagcgaagtctacgccacagcctgtatcattggtggcatcttccatacaatggctgtgagtatgggttacgatcattccacagccctgctcgcaggtgttatctcaacactagtgattcgcctgggtgcgattcgttggcatctatctttacctactttcgctatcaaccgctaa

SEQ ID NO: 83472 - protein, 206 aa, Vibrio parahaemolyticus RIMD 2210633
MDSMLLYMIDLFGTAIFAVSGVLLAGRLKMDPFGVIVLGSVTAIGGGTIRDMALGATPVFWITDTTYLWVIFITCLLTMILVRRPKRLAWWVLPVCDAIGLAVFVGIGVEKALAYNASGMVAVIMGVITGCGGGIIRDVLAREVPMVLRSEVYATACIIGGIFHTMAVSMGYDHSTALLAGVISTLVIRLGAIRWHLSLPTFAINR

SEQ ID NO: 83473 - DNA, 624 bp, Vibrio parahaemolyticus RIMD 2210633
  CDS (1)..(624): transl_table=11
atgttgctaagtgtgttgtatatcattggtatcacggctgaagccatgacaggtgcgttaagcgctggtagaagaaaaatggactggtttggcgttatgttggtagcgagtgcgacagccattggcggcggcacagtgcgtgacattttattgggccactatcctcttggttgggtcaaaaaccctgagtttctggctatcacctgtgttgctggcgtactaacgactggcctcgcgaaatgggtgatcaaactaaaaggcttgttcattcgtcttgatgcactgggtttgattgtatttagcatcatcggtaccaagattgcgatgggcatgggcttgcacccaggcatctgtatggtgtctgcattggtgactggcgtatttggtggcttacttcgcgatttgatctgtcgccaaactccgttggtactgcatgaggagctatacgcttctatcgcgttgatagcatccggcctttaccttacgttactggaattcagcgtaccagacgtaacagcaaccattgttacccttgttgtgggttacgtacttcgtatggcagcggttcgatttaagtggcgtttgccttctttccagttggaaaccgaaagctcgctccactaa

SEQ ID NO: 83474 - protein, 207 aa, Vibrio parahaemolyticus RIMD 2210633
MLLSVLYIIGITAEAMTGALSAGRRKMDWFGVMLVASATAIGGGTVRDILLGHYPLGWVKNPEFLAITCVAGVLTTGLAKWVIKLKGLFIRLDALGLIVFSIIGTKIAMGMGLHPGICMVSALVTGVFGGLLRDLICRQTPLVLHEELYASIALIASGLYLTLLEFSVPDVTATIVTLVVGYVLRMAAVRFKWRLPSFQLETESSLH

SEQ ID NO: 83475 - DNA, 618 bp, Salmonella enterica subsp. enterica serovar Typhi Ty2
  CDS (1)..(618): transl_table=11
atgctgttgcacgttctttatttaattggcatcactgccgaggccatgacgggcgcactcgctgcgggtcgtcgtcgcatggatacattcggcgtaattattattgctaccgccaccgccattggtggaggctcggttcgcgacattctgctcggtcactatccgctgggttgggtgaagcatcccgaatatgtcattattgtggcgactgccgccgtattgaccaccattgttgctcccgtcatgccctatttacgcaagcttttcctggtacttgacgcgctggggttggtggttttctctattattggcgctcagatagcccttgatatgggcgaagggccaattatcgccgtggtagccgccgccactaccggcgtctttggcggcgtgctccgcgatatgttctgcaaacgcattccactggtgtttcaaaaagagctgtatgccggcatttcgttcgcctcggcggtgctctatattgcgctacaacattacgtcatgaatccggatgtcgtcgttatctctacgctactgtttggctttacagcaaggttattagcgctacgtcttaaacttggcctgccggtattttattaccgtcatgaaggacactaa

SEQ ID NO: 83476 - protein, 205 aa, Salmonella enterica subsp. enterica serovar Typhi Ty2
MLLHVLYLIGITAEAMTGALAAGRRRMDTFGVIIIATATAIGGGSVRDILLGHYPLGWVKHPEYVIIVATAAVLTTIVAPVMPYLRKLFLVLDALGLVVFSIIGAQIALDMGEGPIIAVVAAATTGVFGGVLRDMFCKRIPLVFQKELYAGISFASAVLYIALQHYVMNPDVVVISTLLFGFTARLLALRLKLGLPVFYYRHEGH

SEQ ID NO: 83477 - DNA, 630 bp, Bacteroides thetaiotaomicron VPI-5482
  CDS (1)..(630): transl_table=11
atgccgacattcgttcaaattcttgattttataggcacatttgcctttgctattagtggtatccggctggcttcggcaaagcgtttcgactggttcggagcctatgtcgtaggtcttgctaccgctatcggtggcggtaccatccgtgatgtactgctggatgtgacgcccggatggatgacgaaccctatctatttgatctgtacgggacttgccttgatctgggtgatctgtttcggtcgctggctgatccgtctgaataataccttttttatattcgataccatcggactggctttgtttacggtggtcggtgtggggaaaagtatcgctttgggctatcctttttgggtagccatcatcatgggtagtatcacaggtgccgcaggaggtgtgattcgtgatgtctttatcaatgagatccccttgattttccgaaaagaaatctatgcgatggcgtgtgtagtaggcggcatcgcttactggctgtgcgatgccgcagggatggaatcttatgtctgtcagctcgttggcggatcggcggtatttgttacacgcatccttgccgtgaaataccacatttgccttcctatattaaaaggtagtgaagagactgacggcgattcttga

SEQ ID NO: 83478 - protein, 209 aa, Bacteroides thetaiotaomicron VPI-5482
MPTFVQILDFIGTFAFAISGIRLASAKRFDWFGAYVVGLATAIGGGTIRDVLLDVTPGWMTNPIYLICTGLALIWVICFGRWLIRLNNTFFIFDTIGLALFTVVGVGKSIALGYPFWVAIIMGSITGAAGGVIRDVFINEIPLIFRKEIYAMACVVGGIAYWLCDAAGMESYVCQLVGGSAVFVTRILAVKYHICLPILKGSEETDGDS

SEQ ID NO: 83479 - DNA, 633 bp, Bacillus cereus ATCC 14579
  CDS (1)..(633): transl_table=11
atgttattaatcgatatatttacgtttcttggcattatcgccgctgccatttctggtacattagttggtttaaaaaaagatttagatttatttggtgtcctttgtttagctgtagctactgcgctcggcggcggtattattcgtgatatcatgattggtaacctgccccctgtcgcatttgtaaaacccatttactttttcgtaagtgtattatcagcattatttacttgtatgttttttgagcgcatcaataaacttcaagtcgttattatgctttctgatgctgttggcttaggcgtttttacagctattggtgcaaatgcggcaatgtcacatcatgttgacgcctcatttctagttgtttcaatgggagtcattacaggtattggaggcggtattttacgtgacatttgtgctcaagatatcccttacgtattccgaaaagaaatttacgcaatcgcttctatcttaggagcaattagcttcctaatcacacacgctatgggcgcgcacgtattagctttctatgtttgtttattagtaacattcgttattcgtgtcgtcactgtaatatataatgtgcatttccctgttttctttaaaacacatgctaaaattaataaaggccattaa

SEQ ID NO: 83480 - protein, 210 aa, Bacillus cereus ATCC 14579
MLLIDIFTFLGIIAAAISGTLVGLKKDLDLFGVLCLAVATALGGGIIRDIMIGNLPPVAFVKPIYFFVSVLSALFTCMFFERINKLQVVIMLSDAVGLGVFTAIGANAAMSHHVDASFLVVSMGVITGIGGGILRDICAQDIPYVFRKEIYAIASILGAISFLITHAMGAHVLAFYVCLLVTFVIRVVTVIYNVHFPVFFKTHAKINKGH

SEQ ID NO: 83481 - DNA, 633 bp, Bacillus anthracis str. Ames
  CDS (1)..(633): transl_table=11
atgttattaatcgacatatttacgtttcttggcattatcgccgctgctatttccggtacattagttggtttaaaaaaagatttagatttattcggtgtcctttgtttagctgtagctactgcgctcggcggcggtattattcgtgatattatgatcggtaacctgcctcctgtcgcatttgttaaacctatttactttttcgtaagcgtattatcagcactatttacttgtatgttttttgagcgtatcaataaactgcaagtcgttattatgctctctgatgctgttggcttaggtgtttttacagctatcggtgcaaatgcggcaatgtcacatcatgttgacgcctcatttctagtcgtttcaatgggagtcattacaggtattggaggcggtattttgcgtgacatttgcgctcaagatatcccctacgtcttccgaaaagaaatttacgcaatcgcttctattttaggagcaattagtttcctaatcacatatgcaatgggggcacacatattagctttctatgtttgtttattagtaacattcattattcgtgttgtcactgtaatatataatgtacatttcccagttttctttaaaacacatgctaaaattaataaaggccattaa

SEQ ID NO: 83482 - protein, 210 aa, Bacillus anthracis str. Ames
MLLIDIFTFLGIIAAAISGTLVGLKKDLDLFGVLCLAVATALGGGIIRDIMIGNLPPVAFVKPIYFFVSVLSALFTCMFFERINKLQVVIMLSDAVGLGVFTAIGANAAMSHHVDASFLVVSMGVITGIGGGILRDICAQDIPYVFRKEIYAIASILGAISFLITYAMGAHILAFYVCLLVTFIIRVVTVIYNVHFPVFFKTHAKINKGH

SEQ ID NO: 83483 - DNA, 633 bp, Helicobacter hepaticus ATCC 51449
  CDS (1)..(633): transl_table=11
atgctccttactacgctttatatcattgctatcaccgcggaaggaatgacaggcgcgcttgctgctgggaaacataaaatggatttatttggcgtgatttttatcgcccttgttacagccattggtggtggctctattagagatattttacttaatcattatccacttacttgggtagctcaccctgaatatgttgtgcttatttgtattgctgcattgcttacaatgaaagctccgcgcgtggtagcacgaagtgagggcgtatttttaacccttgatgcagtaggtttagttgtttttagcattcttggcgcacaaattgcgattgataaagaatatgggtttatcattgcagtaagtgcagcagtgattacgggcgtatttggaggcattttgcgtgatattttatgtatgcgaatcccccttgtttttcaaaaagaaatttatgcaggtattgccattattgcaggagcgatgtattatgcgttgcttgaatggacacaattggatattgctcttgttacgattttgactttaatagtgggcgtaagcgcaaggcttttggcgattttttataaactttctttgcctatattttcttatgaagaatcttcacaagaggagaaaaaataa

SEQ ID NO: 83484 - protein, 210 aa, Helicobacter hepaticus ATCC 51449
MLLTTLYIIAITAEGMTGALAAGKHKMDLFGVIFIALVTAIGGGSIRDILLNHYPLTWVAHPEYVVLICIAALLTMKAPRVVARSEGVFLTLDAVGLVVFSILGAQIAIDKEYGFIIAVSAAVITGVFGGILRDILCMRIPLVFQKEIYAGIAIIAGAMYYALLEWTQLDIALVTILTLIVGVSARLLAIFYKLSLPIFSYEESSQEEKK

SEQ ID NO: 83485 - DNA, 639 bp, Bordetella pertussis Tohama I
  CDS (1)..(639): transl_table=11
atgccgccagatccgtccgtcctgctgttgtacacgctctacctggtggccatcgtggccgaggccatgacggcggcgctggccgccgggcggcgcgacatggattgggtcggcgtgtgcgtgatcgcctgtgtcacggcattgggcggcgggtcgctgcgcgacgtgctgctgggccattatccgctgagctgggtggcccatcccgaatacctgtggatgacggccggcgccgcgctgctgacggcgctgggggcgcgcgcactgcggcgcctgcgcagcctgttcctgctgctggacgccatcggcctggtggcgttcaccatcatcggctgccaggtggcccaacaaatggaaatgccgctgaccatcgtgctggtcagcggcatgatcaccgggtgcgccggcggcgtattgcgcgacgtgctgtgcaacgacattccgctgctgtttcgcagcgaactctacgccagcgtttcggcagtgaccggcggcctgtacctggccatgtacggccagggcgtgtccgccagcgtgtcggtgcccgtcgcgctggccgtcgggctggcgtttcgcctgctggcgttgcggttcaactggcagatgccgaagttcgtctaccgcggcgactggcattga

SEQ ID NO: 83486 - protein, 212 aa, Bordetella pertussis Tohama I
MPPDPSVLLLYTLYLVAIVAEAMTAALAAGRRDMDWVGVCVIACVTALGGGSLRDVLLGHYPLSWVAHPEYLWMTAGAALLTALGARALRRLRSLFLLLDAIGLVAFTIIGCQVAQQMEMPLTIVLVSGMITGCAGGVLRDVLCNDIPLLFRSELYASVSAVTGGLYLAMYGQGVSASVSVPVALAVGLAFRLLALRFNWQMPKFVYRGDWH

SEQ ID NO: 83487 - DNA, 639 bp, Bordetella parapertussis 12822
  CDS (1)..(639): transl_table=11
atgccgccagatccgtccgtcctgctgttgtacacgctctacctggtggccatcgtggccgaggccatgacggcggcgctggccgccgggcggcgcgacatggattgggtcggcgtgtgcgtgatcgcctgtgtcacggcattgggcggcgggtcgctgcgcgacgtgctgctgggccattatccgctgagctgggtggcccatcccgaatacctgtggatgacggccggcgccgcgctgctgacggcgctgggggcgcgcgcgctgcggcgcctgtgcagcctgttcctgctgctggacgccatcggcctggtggcgttcaccatcatcggctgccaggtggcccaacaaatggaaatgccgctgaccatcgtgctggtcagcggcatgatcaccgggtgcgccggcggcgtattgcgcgacgtgctgtgcaacgacattccgctgctgtttcgcagcgaactctacgccagcgtttcggcagtgaccggcggcctgtacctggccatgtacggccagggcgtgtccgccagcgtgtcggtgcccgtcgcgctggccgtcgggctggcgtttcgcctgctggcgttgcgcttcaactggcagatgccgaagttcgtctaccgcggcgactggcattga

SEQ ID NO: 83488 - protein, 212 aa, Bordetella parapertussis 12822
MPPDPSVLLLYTLYLVAIVAEAMTAALAAGRRDMDWVGVCVIACVTALGGGSLRDVLLGHYPLSWVAHPEYLWMTAGAALLTALGARALRRLCSLFLLLDAIGLVAFTIIGCQVAQQMEMPLTIVLVSGMITGCAGGVLRDVLCNDIPLLFRSELYASVSAVTGGLYLAMYGQGVSASVSVPVALAVGLAFRLLALRFNWQMPKFVYRGDWH

SEQ ID NO: 83489 - DNA, 573 bp, Bordetella bronchiseptica RB50
  CDS (1)..(573): transl_table=11
atgacggcggcgctggccgccgggcggcgcgacatggattgggtcggcgtgtgcgtgatcgcctgtgtcacggcattgggcggcgggtcgctgcgcgacgtgctgctgggccattatccgctgagctgggtggcccatcccgaatacctgtggatgacggccggcgccgcgctgctgacggcgctgggggcgcgcgcgctgcggcgcctgcgcagcctgttcctgctgctggacgccatcggcctggtggcgttcaccatcatcggctgccaggtggcccaacaaatggaaatgccgctgaccatcgtgctggtcagcggcatgatcaccgggtgtgccggcggcgtattgcgcgacgtgctgtgcaacgacattccgctgctgtttcgcagcgaactctacgccagcgtttcggcagtgaccggcggcctgtacctggccatgtacggccagggcgtgtccgccagcgtgtcggtgcccgtcgcgctggccgtcgggctggcgtttcgcctgctggcgttgcgcttcaactggcagatgccgaagttcgtctaccgcggcgactggcattga

SEQ ID NO: 83490 - protein, 190 aa, Bordetella bronchiseptica RB50
MTAALAAGRRDMDWVGVCVIACVTALGGGSLRDVLLGHYPLSWVAHPEYLWMTAGAALLTALGARALRRLRSLFLLLDAIGLVAFTIIGCQVAQQMEMPLTIVLVSGMITGCAGGVLRDVLCNDIPLLFRSELYASVSAVTGGLYLAMYGQGVSASVSVPVALAVGLAFRLLALRFNWQMPKFVYRGDWH

SEQ ID NO: 83491 - DNA, 615 bp, Chromobacterium violaceum ATCC 12472
  CDS (1)..(615): transl_table=11
atgctgaccctgatctacctgatcgccatcaccgcggaagcgatgaccggcgcgctggcggccggccgccgccacatggacattttcggcgtagccgtcatcgccttcctcaccgcgctgggcggcggcaccgtgcgcgacatcgtgctgggacgctatccgatcggctggacccagcacccggaatacgtgctgctggtggtcgccggcgggctagccgcggtgctggtcgcccgctacatgcgccacctgaaccgcctgttcctgatcctggacgcgctggggctggtggcgttcaccatcataggctgcgacgtggcgctgggcatgggctaccatcctgtgatcgtggtgatggctggcatgatcaccggcatcgccggcggcatcctgcgcgacgtgctatgcaaccgcgtgcccatcgtgttccgccgcgaactgtacgccagcgtgtcgctgctggtggccatcctgtacctgggcctcaaccacctggccgtgccgcacgactggaacgtggtcgccagtttcgccttcggcttggcgctgaggctgaccgcgctatggcgcgaatggcagctgccggttttcgcctaccggcacgaccatcactaa

SEQ ID NO: 83492 - protein, 204 aa, Chromobacterium violaceum ATCC 12472
MLTLIYLIAITAEAMTGALAAGRRHMDIFGVAVIAFLTALGGGTVRDIVLGRYPIGWTQHPEYVLLVVAGGLAAVLVARYMRHLNRLFLILDALGLVAFTIIGCDVALGMGYHPVIVVMAGMITGIAGGILRDVLCNRVPIVFRRELYASVSLLVAILYLGLNHLAVPHDWNVVASFAFGLALRLTALWREWQLPVFAYRHDHH

SEQ ID NO: 83493 - DNA, 618 bp, Photorhabdus luminescens subsp. laumondii TTO1
  CDS (1)..(618): transl_table=11
atgttactaagtgttctttatatcatcggtattactgctgaagcgatgaccggggctttagctgcgggccgccgtaaaatggatatgttcggcgtgattattattgcttccgtaactgcgattggcggtggctccgttcgagatatactactagggcattatcccctcggttgggttaagcatcctgaatatatcgtcaccgttgcctgtgccgccgtaatcaccacttgggttgcgccgatgatgaaacatttgcgccgcctgtttctgatccttgatgccattggcttgattgtcttctccattcttggcgcacagattgcgctggagatgaaccatggccctatcattgcttccattgcggcggttattaccggtgttttcggtggtgtgttacgcgatatgttgtgtaacaccattccgttggttttccagaaagagatctatgcgggtgtctcctttaccgccgcttggttatatattggcttacagcacacgccgttaccgcaaaacggcattgttctgattaccctgatcgccggtctgacagcaagattggttgctattcgctaccgtcttggattaccggtctttaattacgaacactccgatcactga

SEQ ID NO: 83494 - protein, 205 aa, Photorhabdus luminescens subsp. laumondii TTO1
MLLSVLYIIGITAEAMTGALAAGRRKMDMFGVIIIASVTAIGGGSVRDILLGHYPLGWVKHPEYIVTVACAAVITTWVAPMMKHLRRLFLILDAIGLIVFSILGAQIALEMNHGPIIASIAAVITGVFGGVLRDMLCNTIPLVFQKEIYAGVSFTAAWLYIGLQHTPLPQNGIVLITLIAGLTARLVAIRYRLGLPVFNYEHSDH

SEQ ID NO: 83495 - DNA, 645 bp, Vibrio vulnificus YJ016
  CDS (1)..(645): transl_table=11
gtgttactagagcgtttcaacatgttgttaagtgttttgtatgtcattggcatcacggcagaagccatgacaggtgcgctaagcgccggacgcagaaaaatggattggtttggtgtaatgttggtggccagtgcaacagccattggcggtggtacggtacgagacatcctactaggacactacccacttggttgggtaaaaaatccagagtttcttgctatcacttgtgtggcgggcatcttaacaacggggcttgccaagtgggtgatcaaactcaaaggcttgtttatccgccttgatgccctcggcctcatcgtatttagcattattggtactaaaattgcgctgcagatgggcttgcatccgggcatttgtatggtttcagctctagtgactggtgtttttggtggtttactgcgcgacctcatctgtcgtcaaacaccattggtattgcatgaagagctttacgcatccattgcgcttttggcatcgggtctttacctgacattgttggcatttgaaatcccagacgtcacggccactatcgtcacactcgtggtaggttatgtgctgcgcatggcggcagtccgatttaaatggcgcttaccgtcattccacttggactctgaagaagccgtgcattaa

SEQ ID NO: 83496 - protein, 214 aa, Vibrio vulnificus YJ016
MLLERFNMLLSVLYVIGITAEAMTGALSAGRRKMDWFGVMLVASATAIGGGTVRDILLGHYPLGWVKNPEFLAITCVAGILTTGLAKWVIKLKGLFIRLDALGLIVFSIIGTKIALQMGLHPGICMVSALVTGVFGGLLRDLICRQTPLVLHEELYASIALLASGLYLTLLAFEIPDVTATIVTLVVGYVLRMAAVRFKWRLPSFHLDSEEAVH

SEQ ID NO: 83497 - DNA, 654 bp, Rhodopseudomonas palustris CGA009
  CDS (1)..(654): transl_table=11
atggataagcttccgatcgttctcgatctggcgggaactttcgtgttcgcactcagcggcgcggtggccggagcacggcggcggctcgatctgttcggcgtgctggtgctggcgttcgcggccggcaatgccggcggcattacccgcgacgtgctgatcggtgcggtgccgccggtcgcggtggcggactggcgctatctcggggtgtcactgctggccggcctcgtcacgttctacctagtgccggtggtggtgcggatgcgtagcgcgatcctgatgctcgacgccgccgggctggcgctgtttgcggtgaccggcgccagcaaggcgttggcgcatgggctcagcccagtgacggcggtcgcgctcggcgtggtcaccgggatcggcggcggcatggcacgcgacctgctactcgccgagatcccgaccgtgctgcgcgccgagctgtatgcggtcgcggcgctgatcgcggcggcgatcgtggtggtcgggcagatgctgcaactccccgccgcaccggtcacggcggccgccttgctggcctgctttgcgcttcgcgtcactgcgatccgccgcggctggcggctgccggtcgcgaagctcgatgaggcgggcgacccggtcaagccgccgccacaggacggcggttag

SEQ ID NO: 83498 - protein, 217 aa, Rhodopseudomonas palustris CGA009
MDKLPIVLDLAGTFVFALSGAVAGARRRLDLFGVLVLAFAAGNAGGITRDVLIGAVPPVAVADWRYLGVSLLAGLVTFYLVPVVVRMRSAILMLDAAGLALFAVTGASKALAHGLSPVTAVALGVVTGIGGGMARDLLLAEIPTVLRAELYAVAALIAAAIVVVGQMLQLPAAPVTAAALLACFALRVTAIRRGWRLPVAKLDEAGDPVKPPPQDGG

SEQ ID NO: 83499 - DNA, 633 bp, Bacillus thuringiensis serovar konkukian str. 97-27
  CDS (1)..(633): transl_table=11
atgttattaatcgatatatttacgtttcttggcattatcgccgctgctatttccggtacattagttggtttaaaaaaagatttagatttattcggtgtcctttgtttagctgtagctactgcgctcggcggcggtattattcgtgatattatgatcggtaacctgcctcctgtcgcatttgttaagcccatttactttttcgtaagtgtattatcagcattatttacttgtatgttttttgagcgtatcaataaactgcaagtcgttattatgctttctgatgctgttggcttaggtgtttttacagctattggtgcaaatgcagcaatgtcgcatcatgttgatgcctcatttttagttgtttcaatgggagtcattacaggtattggaggcggtattttgcgtgacatttgcgctcaagatatcccctacgtattccgaaaagaaatttacgcaatcgcttctattttaggagcaattagtttcctaatcacatatgcaatgggggcacacgtattagctttctatgtttgtctattagtaacattcattattcgtgttgtcactgtaatatataatgtacatttcccagttttctttaaaacacatgctaaaattaataaaggccattaa

SEQ ID NO: 83500 - protein, 210 aa, Bacillus thuringiensis serovar konkukian str. 97-27
MLLIDIFTFLGIIAAAISGTLVGLKKDLDLFGVLCLAVATALGGGIIRDIMIGNLPPVAFVKPIYFFVSVLSALFTCMFFERINKLQVVIMLSDAVGLGVFTAIGANAAMSHHVDASFLVVSMGVITGIGGGILRDICAQDIPYVFRKEIYAIASILGAISFLITYAMGAHVLAFYVCLLVTFIIRVVTVIYNVHFPVFFKTHAKINKGH

SEQ ID NO: 83501 - DNA, 645 bp, Acinetobacter sp. ADP1
  CDS (1)..(645): transl_table=11
atgttactcactattatttatattatcgcaattaccgcagaagccatgacaggcgcgctttctgctggtcggcgtagtatggattggtttggagtaattctgattgcttgtgtaactgctttaggtggcggttctgtccgtgatgtcctgcttggtcattatcctctgacgtgggtcaaacaccctgagtatcttgtgctaacctgttgcgcagcattatttacgattctgattgccaaatggatgaggcatttacgcaatattttcttgattctggatgcactgggtctgattggattcacgattattggctgtcaaattgctttgcaaatgggtcatggttttgtggtgtctgctgttgctggtgttctaacaggcgtatcgggcggtattttacgcgatattttgtgtaatgacgttccgctggttttccgccgtgagttgtatgccagtatttcatttgttgccgtgatctgttattggctgtgcctcaatattggtatgtcgttagaacttacagtaattttcacattaatttttggctttgtactgcgcttaattgccatttattttggtctggaaatgccaaaatttatttatcaggaagatgatgcagattcagcctcatcaactgataagcattaa

SEQ ID NO: 83502 - protein, 214 aa, Acinetobacter sp. ADP1
MLLTIIYIIAITAEAMTGALSAGRRSMDWFGVILIACVTALGGGSVRDVLLGHYPLTWVKHPEYLVLTCCAALFTILIAKWMRHLRNIFLILDALGLIGFTIIGCQIALQMGHGFVVSAVAGVLTGVSGGILRDILCNDVPLVFRRELYASISFVAVICYWLCLNIGMSLELTVIFTLIFGFVLRLIAIYFGLEMPKFIYQEDDADSASSTDKH

SEQ ID NO: 83503 - DNA, 627 bp, Erwinia carotovora subsp. atroseptica SCRI1043
  CDS (1)..(627): transl_table=11
gtgctgacttacatctatctgatcgcaattacagccgaagggatgtccggggcgcttgccgccgggcgtcgcaatatggatatttttggcgtaggcatgattgccttcatcaccgcgcttggcggtggcaccgttcgcgatattcttctcggtaattaccccatcggctggacgcagcatcccggctatatctacctcaccattggtgcaggtcttttcacgattatcattgcgcgttttatgcaccatttgcatcgtctctttcttgtactggatgcgatggggctaattgcttttaccattattgggtgcaatgtggcgctgaagctgaattattcgatgacagtagtcgtcatggcggggattgtgaccgggattttcggtggcatattgcgtgatattttctgtaaccgtacgccaatggtgttgaagaaagagctgtatgccagcgtctcgctgctcgtcgcacttttatatctgggtctgaaatcgcttaatatcaatcacgatattaacctgctggcgtcattcacgattggtctggctgtgcgattggcagcaattcgctggtcatggcagcttcctgtgttctcttatgttcctggacgctggaaagggaaggcgtaa

SEQ ID NO: 83504 - protein, 208 aa, Erwinia carotovora subsp. atroseptica SCRI1043
MLTYIYLIAITAEGMSGALAAGRRNMDIFGVGMIAFITALGGGTVRDILLGNYPIGWTQHPGYIYLTIGAGLFTIIIARFMHHLHRLFLVLDAMGLIAFTIIGCNVALKLNYSMTVVVMAGIVTGIFGGILRDIFCNRTPMVLKKELYASVSLLVALLYLGLKSLNINHDINLLASFTIGLAVRLAAIRWSWQLPVFSYVPGRWKGKA

SEQ ID NO: 83505 - DNA, 618 bp, Yersinia pseudotuberculosis IP 32953
  CDS (1)..(618): transl_table=11
atgctactcagtgttctttatattattggtatcaccgctgaagccatgaccggggctctggctgcgggtcgccgccaaatggatatgtttggcgttattattattgcctcagcgaccgcaattggcggtggctcggttagagatatgcttttaggccactatccacttggttgggttaagcatcctgaatacattgtgatcgtcgccatcgcagcgatcgtcaccacctggatggctccattgatgaaacagttacgccatctatttttagtgcttgatgccattgggctgattgttttctcaattattggcgcacaaattgctctcgatatgggccacagtactattattgccgctattgccgccgtgattactggtgtctttggtggcgtactacgcgatatgctctgcaactgcattcccttagtgtttcagaaagaaatttatgcaggcatctcatttgcggcagcctggatttacattgctctgcaatacacgccgctgtcccataattgggtcattatcattacgctcatcaccgggcttagcgctagattactcgccttacgattccggcttggcctgcctgtattcaaatatgagcactcagaccattaa

SEQ ID NO: 83506 - protein, 205 aa, Yersinia pseudotuberculosis IP 32953
MLLSVLYIIGITAEAMTGALAAGRRQMDMFGVIIIASATAIGGGSVRDMLLGHYPLGWVKHPEYIVIVAIAAIVTTWMAPLMKQLRHLFLVLDAIGLIVFSIIGAQIALDMGHSTIIAAIAAVITGVFGGVLRDMLCNCIPLVFQKEIYAGISFAAAWIYIALQYTPLSHNWVIIITLITGLSARLLALRFRLGLPVFKYEHSDH

SEQ ID NO: 83507 - DNA, 684 bp, Mannheimia succiniciproducens MBEL55E
  CDS (1)..(684): transl_table=11
atgttattagaggttcttttttatatcgggcttatcgtcgaagcgatgaccggcgcgctttctgccggacgggagaaaatggatattttcggggtgatcgtgattgcatttatgccggcgttagggggcggtttaatgcgggatattattctcggcaattacccggtaaattttatcgccaaccctcattgggtgttaattgtagcggttactgcgcttgcaactatatttattgcacctttaattactcactttaaccgttcgtttcggacggtttttcttgtgttagacgggctggggctgattttattttctatttttggtacgcaaattgcgttagaaatggggtttggtttgacagttgcttccatttcggcgattttaaccggtgcctttggcggtgtattgcgagatattttatgtaaccggatcccgttaattttccaaaaagaactttatgcctttattgccttttttaccgcttgtctctatattggattacagcatttagggttatcaattaatttaaccgtaatgattacgctgacggtcggatttattttccgcttgctcgccatttatttcagttggggattcccggtatttgattatcatgaagaagaaatgtcgccgaaagaaataatgccgagattgccgaaaagacgtaaatataaagaaaaatag

SEQ ID NO: 83508 - protein, 227 aa, Mannheimia succiniciproducens MBEL55E
MLLEVLFYIGLIVEAMTGALSAGREKMDIFGVIVIAFMPALGGGLMRDIILGNYPVNFIANPHWVLIVAVTALATIFIAPLITHFNRSFRTVFLVLDGLGLILFSIFGTQIALEMGFGLTVASISAILTGAFGGVLRDILCNRIPLIFQKELYAFIAFFTACLYIGLQHLGLSINLTVMITLTVGFIFRLLAIYFSWGFPVFDYHEEEMSPKEIMPRLPKRRKYKEK

SEQ ID NO: 83509 - DNA, 630 bp, Legionella pneumophila subsp. pneumophila str. Philadelphia 1
  CDS (1)..(630): transl_table=11
atgttacttcattatctttttattgtggggatttgtgtagaggcgattacaggagccctggcagcaggacgtaaaaaaatggatttttttggggtgctacttattgcgtcaatcactgcactgggaggagggactgtaagggatacattatttaacacctatccactgacctgggtagctcacccggaatatcttttatatacctcagtatgcgcttttctaactatttttattgctcattcactggttagaataatgaaagtattcttaattcttgatgcccttggtctctcaacttttgttattattggtacacaaaaagttctcgcccatggtatgccaccaagtgttgcagtaatcagtggaatgattaccgggatttgcgggggaatgttgcgagatattttatgtaatgacattcctctggttttaagaaaagaattatatgctgttattgccctggctggtgcgcttctgtttataacattagactattttcatatccctcataatttaaatatcattatcactttgttatgcatttttaccgcacgcttattggctattttttttcatattgaaattccaatttttgattactcagagagtataaagaggagaaaaaaataa

SEQ ID NO: 83510 - protein, 209 aa, Legionella pneumophila subsp. pneumophila str. Philadelphia 1
MLLHYLFIVGICVEAITGALAAGRKKMDFFGVLLIASITALGGGTVRDTLFNTYPLTWVAHPEYLLYTSVCAFLTIFIAHSLVRIMKVFLILDALGLSTFVIIGTQKVLAHGMPPSVAVISGMITGICGGMLRDILCNDIPLVLRKELYAVIALAGALLFITLDYFHIPHNLNIIITLLCIFTARLLAIFFHIEIPIFDYSESIKRRKK

SEQ ID NO: 83511 - DNA, 621 bp, Burkholderia mallei ATCC 23344
  CDS (1)..(621): transl_table=11
gtgcacccgaggctcacgctcgcgatcgcggtgctcgaggcgatcgcgacgctcgcgttcgcgatctccggcttcgtcgaggcgcgcaaaaaccggctcgattcggtcggcacgttcgtcgtcgcgctcgcgaccgcgttcggcggcggcacgatgcgcgacgtcctgctcgagcgccggccgttctactgggtcgaacatcaggcgtacgtgatcgcgatcttcggcctgtcgctcgtcgcgccgctcatcctccggatggcgtcgcggctgtcggcggaacggctgctgctcgccgccgacgcgatcggcctcggcatcttcagcatctccggcacgtcgatcgcgctcgacgcgcagatgccgcggttcgtcgccgcgatgatgggcgtgacgacgggcgtgttcggcggagtgatccgcgacgtgctgtgcaacgacattccgctgatcctgcgcgactcgcggccgtacgcgacctgcgcgttcgccgggtgctgggtctatctgctgctcgtgtggctgcagttcgattccgtctacagcgtgctcgcggcgacggccttcatcctcgtcgcgcggctcgtcacctaccagctcgatatccggctgccgcactag

SEQ ID NO: 83512 - protein, 206 aa, Burkholderia mallei ATCC 23344
MHPRLTLAIAVLEAIATLAFAISGFVEARKNRLDSVGTFVVALATAFGGGTMRDVLLERRPFYWVEHQAYVIAIFGLSLVAPLILRMASRLSAERLLLAADAIGLGIFSISGTSIALDAQMPRFVAAMMGVTTGVFGGVIRDVLCNDIPLILRDSRPYATCAFAGCWVYLLLVWLQFDSVYSVLAATAFILVARLVTYQLDIRLPH

SEQ ID NO: 83513 - DNA, 621 bp, Burkholderia pseudomallei K96243
  CDS (1)..(621): transl_table=11
gtgcacccgaggctcacgctcgcgatcgcggtgctcgaggcgatcgcgacgctcgcgttcgcgatctccggcttcgtcgaggcgcgcaaaaaccggctcgattcggtcggcacgttcgtcgtcgcgctcgcgaccgcgttcggcggcggcacgatgcgcgacgtcctgctcgagcgccggccgttctactgggtcgaacatcaggcgtacgtgatcgcgatcttcggcctgtcgctcgtcgcgccgctcgtcctccggatggcgtcgcggctgtcggcggaacggctgctgctcgccgccgacgcgatcggcctcggcatcttcagcatctccggcacgtcgatcgcgctcgacgcgcagatgccgcggttcgtcgccgcgatgatgggcgtgacgacgggcgtgttcggcggagtgatccgcgacgtgctgtgcaacgacattccgctgatcctgcgcgactcgcggccgtacgcgacctgcgcgttcgccgggtgctgggtctatctgctgctcgtgtggctgcagttcgattccgtctacagcgtgctcgcggcgacggccttcatcctcgtcgcgcggctcgtcacctaccagctcgatatccggctgccgcactag

SEQ ID NO: 83514 - protein, 206 aa, Burkholderia pseudomallei K96243
MHPRLTLAIAVLEAIATLAFAISGFVEARKNRLDSVGTFVVALATAFGGGTMRDVLLERRPFYWVEHQAYVIAIFGLSLVAPLVLRMASRLSAERLLLAADAIGLGIFSISGTSIALDAQMPRFVAAMMGVTTGVFGGVIRDVLCNDIPLILRDSRPYATCAFAGCWVYLLLVWLQFDSVYSVLAATAFILVARLVTYQLDIRLPH

SEQ ID NO: 83515 - DNA, 639 bp, Azoarcus sp. EbN1
  CDS (1)..(639): transl_table=11
atgctattctcgcgccccatgattccgatcgatattctcgtctatggcatcggcctcgccggcgtcgcggcgcaggcggccgccggagtgctcgaagccgggcgcaagcgtttcgacctcttcggcatggtcatcgtcgcgctcgcggcggcgctcggcggtggctcgttgcgcgacctgctgctcgaccgcacggtgttctggatcgccgatcagagctatctgatcaccgcactgacggccgggctcgcgactttcgcgctggtgcgcttcgtgcgcctgccaggcaggctcttcctgctgcccgacgccgtcggcctcgcgttgttcaccgtcagcggcacgcaggcggctcttgcgctcggcacaccgtggctcgtcgcgagcctgatgggcgtcgtcaccggcgtattcggcggcatcgtgcgcgacgtgctgtgcaacgaagtgccgctggtgttcagcggcgaactgtatgcgaccgcatcctgggccggcgcgctgctgctgatcgcgatgagagcgtccggcgcgacgcccggcctggcggcactcgccgccggcgtcgtggtgctcgtgatccgcctcggcgcgatgcgcttcggctggcgcctgccggtgttcagcgcgcgcctgtag

SEQ ID NO: 83516 - protein, 212 aa, Azoarcus sp. EbN1
MLFSRPMIPIDILVYGIGLAGVAAQAAAGVLEAGRKRFDLFGMVIVALAAALGGGSLRDLLLDRTVFWIADQSYLITALTAGLATFALVRFVRLPGRLFLLPDAVGLALFTVSGTQAALALGTPWLVASLMGVVTGVFGGIVRDVLCNEVPLVFSGELYATASWAGALLLIAMRASGATPGLAALAAGVVVLVIRLGAMRFGWRLPVFSARL

SEQ ID NO: 83517 - DNA, 663 bp, Haemophilus influenzae 86-028NP
  CDS (1)..(663): transl_table=11
atgttacttagtattttatatatcatcggtatcaccgctgaaggaatgacaggcgcacttgcggcaggtcgtgagaaaatggatatttttggcgtgatcattatcgcatctgtgactgccattggtggcggctctgtgcgtgatgtactgctcggacattaccctctcggctgggttaagcacccagaatattttttaatggtggcaagtgcggcggtaattaccgtatatgttgcaccatttatcaatcattttatgcgctactttcgcactattttcttggtgcttgatgcgatgggcttagtggtgtattccattattggcgcacaaattgcaatggatatgggacatagccttaccattgtttgtattgcaggctgtattactggtgcctttggcggggttctacgcgatatgctatgcaatcgaattcctctcgtgttccaaaaagaactctatgccagcattgcgctatttgccacgctgacttattacgcattaagtacacttcaagtagaacatacacttgccgtgttactcacacttattagcagctttactttacgccttttagctattcatttcgaatgggggttgccggtgtttaattaccaagaactcacatcggaagaacaagataagctgccaaataaaaagaaataa

SEQ ID NO: 83518 - protein, 220 aa, Haemophilus influenzae 86-028NP
MLLSILYIIGITAEGMTGALAAGREKMDIFGVIIIASVTAIGGGSVRDVLLGHYPLGWVKHPEYFLMVASAAVITVYVAPFINHFMRYFRTIFLVLDAMGLVVYSIIGAQIAMDMGHSLTIVCIAGCITGAFGGVLRDMLCNRIPLVFQKELYASIALFATLTYYALSTLQVEHTLAVLLTLISSFTLRLLAIHFEWGLPVFNYQELTSEEQDKLPNKKK

SEQ ID NO: 83519 - DNA, 612 bp, Pseudomonas fluorescens Pf-5
  CDS (1)..(612): transl_table=11
atgctgttgatgctttatctgattgccattaccgccgaagccatgaccggcgccctgtctgccggccggcgcggcatggactggttcggtgtggtgctgattgcctgcgtcaccgcactcggcggcggttcggtgcgtgatgtgctgctgggccactacccgctgacctgggtcaagcacccggagtacctggtgctgacgtcggtggcggcgttggtgacgatcttcatcgcgcccttgatgcgtcacctgcgctcgctgtttctggtgctcgacgccgtgggcctggtggcctttaccctgatcggctgcatgactgccctggaaatgggccacggcatgctggtggcttcagtcagcggggtgatcaccggggtctttggcggcatcctcagggacatcttctgcaacgatatcccgctgatctttcgccgcgagctgtacgccagcgtgtccttcgccgcggcctggtgctacatgctgtgcatctacctgcaactgcccagcgagcagtcgatcctggtcaccctgttcggcggctttctattgcgcctgctggcgatccgttttcactgggaaatgcccaagttcgtctacaacgacgaacactga

SEQ ID NO: 83520 - protein, 203 aa, Pseudomonas fluorescens Pf-5
MLLMLYLIAITAEAMTGALSAGRRGMDWFGVVLIACVTALGGGSVRDVLLGHYPLTWVKHPEYLVLTSVAALVTIFIAPLMRHLRSLFLVLDAVGLVAFTLIGCMTALEMGHGMLVASVSGVITGVFGGILRDIFCNDIPLIFRRELYASVSFAAAWCYMLCIYLQLPSEQSILVTLFGGFLLRLLAIRFHWEMPKFVYNDEH

SEQ ID NO: 83521 - DNA, 663 bp, Psychrobacter arcticus 273-4
  CDS (1)..(663): transl_table=11
atgcctaccattgccttagattctaatctgattactacttttgacccgcgctcactcatttatttgttcgatatgattggcattgtcgcttgtagcatttcaggaacgatattagccaagcataaaaacttcgatgtatttggctgcttactggtatcgattgtgactgctatcggcggcggtaccgtgcgtgatgtgatcttgaatcgtcatccactgttttggatggtggatatgaattatctgacggtcattaccatctcttcactgttgatgcagatattctttcaccccaactctagacgcgttgatacgtttcttaaactctctgacaccattggtctgtcagcctttaccttaatcggtatcaaggtggctgatagtatgggcacaaatgtgctggtggcattgttacttggggttattacaattattgtcggcggtatcattcgcgatatgatttgcaatgaaattccactggtgctacagcaagagatttatatcaccgccgctttaacaggtggtatcctttactttgtgcttcaaaatcttggcgtgagcgcttggattgctgatatctcagcaatggcaacgatttttaccttacgcatgcttgctattcgctatgactggcagtttccgagcattgaatggaaatattaa

SEQ ID NO: 83522 - protein, 220 aa, Psychrobacter arcticus 273-4
MPTIALDSNLITTFDPRSLIYLFDMIGIVACSISGTILAKHKNFDVFGCLLVSIVTAIGGGTVRDVILNRHPLFWMVDMNYLTVITISSLLMQIFFHPNSRRVDTFLKLSDTIGLSAFTLIGIKVADSMGTNVLVALLLGVITIIVGGIIRDMICNEIPLVLQQEIYITAALTGGILYFVLQNLGVSAWIADISAMATIFTLRMLAIRYDWQFPSIEWKY

SEQ ID NO: 83523 - DNA, 660 bp, Colwellia psychrerythraea 34H
  CDS (1)..(660): transl_table=11
atgaacgactttttattttatttagatatttttggcgtcattgtttttgccttatcaggggcgcttatggctgggcgttatcaacttgatccttttggtgttgtggtgttggcttcagttactgctgtgggtggcggtaccattcgagatgttattttacaaacgcccgtcttttgggtggaaaaaccctactacctctatgttattttagcgactgcaatactcaccatagtgcttattagacaaccaaaacggatccctaagcgtttcttgctcattgctgatgcactaggtttagctttgtttgcggttttaggcacgcaaaaagcattatatttgggcgcaccaattccggtggctgtggtattaggtactattacggggattgccggcggaatgattcgagatgttttatgtaatgtaatcccgatgattttacgtgaagagatttatgcgctggcggccatgttaggtggtagtttatttattatattgcatggattaaattggaatgataccaatgcgatgattgtgtcaatctctgcagcattggctctacgcctagccgctatctattggcatgtttcattaccggcctttcatattgttgaaaagccaaaaaaagaaaaaggcacaactaagatcatagagaaaaaataa

SEQ ID NO: 83524 - protein, 219 aa, Colwellia psychrerythraea 34H
MNDFLFYLDIFGVIVFALSGALMAGRYQLDPFGVVVLASVTAVGGGTIRDVILQTPVFWVEKPYYLYVILATAILTIVLIRQPKRIPKRFLLIADALGLALFAVLGTQKALYLGAPIPVAVVLGTITGIAGGMIRDVLCNVIPMILREEIYALAAMLGGSLFIILHGLNWNDTNAMIVSISAALALRLAAIYWHVSLPAFHIVEKPKKEKGTTKIIEKK

SEQ ID NO: 83525 - DNA, 612 bp, Pseudomonas syringae pv. phaseolicola 1448A
  CDS (1)..(612): transl_table=11
atgttgctgatgctttatctgattgccatcactgctgaagccatgactggcgcgctgtctgcgggccgtcgaggaatggactggttcggcgtggtgctgattgcttgcgtcacagcgctgggcggcggctcggtgcgcgatgtgctgatcggccattacccgctgacctgggtcaagcacccggaatacctcatattgaccagtgtggcagcgttggtgacgatctttatcgcgccattgatgcgccacctgcgctcgttgtttctggtgctggatgcgctggggctggtagccttcaccctgatcggctgcatgactgcgctggaagccgggcatggtctggtgatcgcgtcagtgtgcggtgtcatcaccggggtcttcggtggcatcctgcgcgacatcttctgcaacgacattccgctgatcttccctcgcgaactgtatgccagcgtttcatttctggccgcgtggtgttttttgctgtgccagtacctgcaactgccggatgaacaggccgtgctcatcaccttgttcggcggcctgctgctgcgcctgctggcgatccgattccgctgggaaatgcccaaattcgtctataaagacgagccctga

SEQ ID NO: 83526 - protein, 203 aa, Pseudomonas syringae pv. phaseolicola 1448A
MLLMLYLIAITAEAMTGALSAGRRGMDWFGVVLIACVTALGGGSVRDVLIGHYPLTWVKHPEYLILTSVAALVTIFIAPLMRHLRSLFLVLDALGLVAFTLIGCMTALEAGHGLVIASVCGVITGVFGGILRDIFCNDIPLIFPRELYASVSFLAAWCFLLCQYLQLPDEQAVLITLFGGLLLRLLAIRFRWEMPKFVYKDEP

SEQ ID NO: 83527 - DNA, 669 bp, Dechloromonas aromatica RCB
  CDS (1)..(669): transl_table=11
atgttcgatagtctcgcccacgtttttcagcctctcgctatcaagcaattcaacttgttactggtcatttatctggttgccatcaccgccgaagcgatgtccggtgccctggcagcaggacgtcgcaacatggatttcttcggggtggccgtgatcgcctttgtcaccgctctgggaggcggaaccatcagggatgtcgttcttggcaattacccgattggttggacgcagcatcccgaatacgtgtatctggtgaccctggctggtttggccacgaccttgcttgccaagttcatgcaccacctgaaaaacgtctttctgatgctggatgcactcgggttggtcgccttctcgctgattggttgcaatgtggccctgcaacttgaatacccgacggtagtagtcatcatggccggcatgctgacggggatatgcggaggcgttttgcgcgatgtgctgtgcaaccaggtgcccgtcgtattttgccgggagctttatgccagcgtgtcactctttgtttgcgccctatttctcgcgttgaggtcgctggacttggatgccaacctcaatacgatgatgtgcttcattctcggcttcggatttcgcatgctggcgctacgtttgagctggaagcttccgaccttctcctatcagcagcgatgggattag

SEQ ID NO: 83528 - protein, 222 aa, Dechloromonas aromatica RCB
MFDSLAHVFQPLAIKQFNLLLVIYLVAITAEAMSGALAAGRRNMDFFGVAVIAFVTALGGGTIRDVVLGNYPIGWTQHPEYVYLVTLAGLATTLLAKFMHHLKNVFLMLDALGLVAFSLIGCNVALQLEYPTVVVIMAGMLTGICGGVLRDVLCNQVPVVFCRELYASVSLFVCALFLALRSLDLDANLNTMMCFILGFGFRMLALRLSWKLPTFSYQQRWD

SEQ ID NO: 83529 - DNA, 615 bp, Dechloromonas aromatica RCB
  CDS (1)..(615): transl_table=11
atggaaaacctgctctactggatcggcctcgccgccgtcgctgtcagcgccctgaccggcgtgctcgacgccggccgcaagaacatggacctgatcggcgcggtgatggttggctgcgccacggcactggggggcggcacggtgcgcgacgtgctgctcgaccgcaaagtcttctggatcagcgatcagacctatctggtggtcgcactgctcacgacactgctcattttctttgcagtgcgcgccctgcacctgccatcacgtcgcttcctgattcccgacgccatcggcctggcgctattcactgtttccggcacgcagattgcgctggaatggcaggcgccgtggctggttgccagcctgcttggggtgattaccggggtcgttggcggcgtgctgcgcgatgtgctgtgcaacgaagtgccgctggttttcgtgcgcggcgaactctatgcttccgcggcctgggccggagcgctggtactgatcggcctgcagggattcgacatttcgccggtcattgccgcgtgggcaggcatggcggtcgttcttgccgcccgcctgctggccatcgccttccgcattaccctgccgatctactcggaacggcagtga

SEQ ID NO: 83530 - protein, 204 aa, Dechloromonas aromatica RCB
MENLLYWIGLAAVAVSALTGVLDAGRKNMDLIGAVMVGCATALGGGTVRDVLLDRKVFWISDQTYLVVALLTTLLIFFAVRALHLPSRRFLIPDAIGLALFTVSGTQIALEWQAPWLVASLLGVITGVVGGVLRDVLCNEVPLVFVRGELYASAAWAGALVLIGLQGFDISPVIAAWAGMAVVLAARLLAIAFRITLPIYSERQ

SEQ ID NO: 83531 - DNA, 615 bp, Thiobacillus denitrificans ATCC 25259
  CDS (1)..(615): transl_table=11
atggaaaacctgctgtactgggccggcctgtcggccgttgcggtcaatgcgctgaccggcgtgctcgacgcgggccgcaagcggatggacctgatcggtgtggtcatggtgggcgcagccaccgcgctcggcggcggcaccgtgcgcgacgtgctgctcgcgcgccccgtgttctggatcgccgaccaggtctatctgatcgtcgcgctcgcggccacgctggccgtcttcttcgtcgtgcgcaacctgcggctgccgccgcggctgtttctgattcccgatgcgttcggcctcgcgctcttcactatcgtcggcacccagatcgcgctcgagtggcaggcgccgtggctggtcgcgagcctgctgggcatgatcacgggcgtcgtcggcggcgtgttgcgcgacgtgctgtgcaacgaggtgccgctggttttcgtgcgcggcgaactgtatgcctccgcggcgtggctcggcgcgctggtcctggtcgggctgcaggccttgtcggtgtcgccggtcgccgcggcgtgggcggggatggcgaccgttctcgtcgtccggctggcggcgatggccttccgcatcaccctgccgacgtattcggagcgagagtag

SEQ ID NO: 83532 - protein, 204 aa, Thiobacillus denitrificans ATCC 25259
MENLLYWAGLSAVAVNALTGVLDAGRKRMDLIGVVMVGAATALGGGTVRDVLLARPVFWIADQVYLIVALAATLAVFFVVRNLRLPPRLFLIPDAFGLALFTIVGTQIALEWQAPWLVASLLGMITGVVGGVLRDVLCNEVPLVFVRGELYASAAWLGALVLVGLQALSVSPVAAAWAGMATVLVVRLAAMAFRITLPTYSERE

SEQ ID NO: 83533 - DNA, 615 bp, Streptococcus agalactiae A909
  CDS (1)..(615): transl_table=11
atgtcaattgatatttggaacattttaagtttggttggaaccgtagcttttgcaagttcgggagctattgtggcgattgaggaagaatttgatattctagggctttttatcttaggttttgtaacggcatttggtggtggagctattagaaatgtactaattggcttgcctattgaaacactttggagtcaaggaattgctttttatgcagcagcagcagctattttatttattatgattttccctaatttgttgagtggtaagggacgggatgccgaagttgtatcagatgctattgggttagcagcgtttagtgttcaaggagcactatatgcgactcaatctcatcaacctcttagtgctgtcattgtcgcagcagtactaactggtgcaggtggtggtattgtcagagatgttctggctggccgaaaacctggagtactaagaagtgaaatatatgcaggttggtcaatattagtggggatcattttatattttaaaattgctaaaacaacaactgactattatttgttagtgttagttgtaactagcctaaggatgttgggttataagaaacaatggcacttgccagttgtcagaccacgtaagaaatga

SEQ ID NO: 83534 - protein, 204 aa, Streptococcus agalactiae A909
MSIDIWNILSLVGTVAFASSGAIVAIEEEFDILGLFILGFVTAFGGGAIRNVLIGLPIETLWSQGIAFYAAAAAILFIMIFPNLLSGKGRDAEVVSDAIGLAAFSVQGALYATQSHQPLSAVIVAAVLTGAGGGIVRDVLAGRKPGVLRSEIYAGWSILVGIILYFKIAKTTTDYYLLVLVVTSLRMLGYKKQWHLPVVRPRKK

SEQ ID NO: 83535 - DNA, 624 bp, Burkholderia sp. 383
  CDS (1)..(624): transl_table=11
gtgccgcatcctaggctgacgctcgcgatcgcgatactggaggcgatcgccacgctggcctttgcgatctcgggcttcatcgaggcgcgcaagaaccgcctcgactcggtcggcacgttcgtcgtcgcgctcgccaccgcgttcggcggcggcacgctgcgcgacatcctgctcgaacgccggccgttctactgggtcgtgcacgacgactacgtgatcgcgatcttcgtgctcgcgctgttcgcgccgttcgtgctgcgaatgctgtcgcgactgtcggccgagcggttgctgctcgtcgccgatgcgatcgggctggggatcttcagcatctcgggcacggcgatcgcgctcgatgccgagatgccgcgcttcatcgcggtgatgatgggcgtgatcacgggcgtggtcggcgggatcatccgcgacgtgctgtgcaacgatatcccgctgatcctgcgcgattcgcggccttacgcgacctgcgcgttcgtcggctgctggttctacctgctgctcgtgtggctgcagttcgactcggtgtacagcgtgctgctcgcgaccggcttcatcctcgtcgcgcggctcgcgacgttcaagttcgacgtgcggctgccgcactga

SEQ ID NO: 83536 - protein, 207 aa, Burkholderia sp. 383
MPHPRLTLAIAILEAIATLAFAISGFIEARKNRLDSVGTFVVALATAFGGGTLRDILLERRPFYWVVHDDYVIAIFVLALFAPFVLRMLSRLSAERLLLVADAIGLGIFSISGTAIALDAEMPRFIAVMMGVITGVVGGIIRDVLCNDIPLILRDSRPYATCAFVGCWFYLLLVWLQFDSVYSVLLATGFILVARLATFKFDVRLPH

SEQ ID NO: 83537 - DNA, 612 bp, Burkholderia sp. 383
  CDS (1)..(612): transl_table=11
atgcatacgctttatctgattgcaatcgtcgcggaagcgatgtcgggggcgctgatgggcatgcgccgcgggatggaccgcttcgggctcgcgctcgtcggtgcggtgacggcgctcggcggcggcaccgtgcgcgacgtgctgctcggccactatccgctcggctggatcgcgcatccggagtacctggtgatcacgctcgtcgcggcgaccgtcgcgtcgtgggtcgcacggcatgtcgcgcggatgaagacgttgttcgtcaccgtcgacgcgatcggcctcgcggcgttcacgatcatcggttgcgacatcggcgcatcgacgggcgcggtgccgatcatcgtcgtgctggctggcgcgatcaccggtgtctgcggcgggatgctgcgcgacctgctgtgcaacgagatgccgctgatcctgcgcgaggaactgtatgcgagcgtcgcgttcgtcacgggcgggctctatgtcgggatgcagtacgttggcatcgatgcgggcttcgcgacggtcgtcgcgctggcggccgggttctcgatgcggatgcttgccgtgcggctcgggtggaagatgcggacgtttggtgcggcggatctcgagcattga

SEQ ID NO: 83538 - protein, 203 aa, Burkholderia sp. 383
MHTLYLIAIVAEAMSGALMGMRRGMDRFGLALVGAVTALGGGTVRDVLLGHYPLGWIAHPEYLVITLVAATVASWVARHVARMKTLFVTVDAIGLAAFTIIGCDIGASTGAVPIIVVLAGAITGVCGGMLRDLLCNEMPLILREELYASVAFVTGGLYVGMQYVGIDAGFATVVALAAGFSMRMLAVRLGWKMRTFGAADLEH

SEQ ID NO: 83539 - DNA, 618 bp, Geobacter metallireducens GS-15
  CDS (1)..(618): transl_table=11
atgaacctgctctatgccctcgacctgctcggaaccgccgccttcgccgcctcgggcgcctgggccggcatccgccgcgatatggacctcttcggcgtgctcatgctcggcctcgtcaccgctacgggtggcggaaccctgcgcgacctgttcctgggggacaccccccccttcatcttcaaggacgaaacctacctctacctctccatcgccgtttccctggctatctttctcttccacaagcgcctggaattcctccatcacccccttctctacttcgacgccgtggggctcggcaccttcgtggtcatcggcacgggtaaggccctggcattcaaaatggggtttgtcggctcggtgatgatgggggtgatgaccgccaccgccggagggatgatccgtgacgtcctctccacccatattcccctggtgctgcagaaggaggtgtacgcctcggcctgcatcgccggcgcggctcttctcttcctgctggaccggatctcctttccccgcaccctgtcccttctcgccgccgccatgacggtcatcgtggtgcggctcctggccatccgctacaactggtccctcccccgggccgggggcgagcgaaacgcatga

SEQ ID NO: 83540 - protein, 205 aa, Geobacter metallireducens GS-15
MNLLYALDLLGTAAFAASGAWAGIRRDMDLFGVLMLGLVTATGGGTLRDLFLGDTPPFIFKDETYLYLSIAVSLAIFLFHKRLEFLHHPLLYFDAVGLGTFVVIGTGKALAFKMGFVGSVMMGVMTATAGGMIRDVLSTHIPLVLQKEVYASACIAGAALLFLLDRISFPRTLSLLAAAMTVIVVRLLAIRYNWSLPRAGGERNA

SEQ ID NO: 83541 - DNA, 717 bp, Rhodospirillum rubrum ATCC 11170
  CDS (1)..(717): transl_table=11
atggccttgtcgccgactccgacggttttcccctttgtttcccgcggtgagcggggttttctggagcgcggcatggatccggttctgacctggcttgacaccttcggcctgatcgttttcgccgtgtccggggggctggtggcggcgcgcaagggcatggatatcgttggcttcgccctgatggcgacggtcaccggcatcggcggcggcaccttccgcgacatggtgttggggatgacgccggtcttctgggtgcgcgagccccattatctggtggtctgtctggctgtcggtatcctgacgtggttcgtcgcccatcgcctggattcgcgccaaagggcgctgttgtgggccgacgccatcggcatcgccttttttacggtggtcggtacccaggtcggtctgcgcgccgaggccggcatttccgtggccctgctgatgggggtgatgaccgcctgcttcggtggcatcgtccgcgaccttctggccggcgagccgagcctgatccttcagcgcgagatctacatcaccgcctgcgtcgccggcgcctgcgcctatctgctgtttgacgccatgggagcgggcgagggcgtttcgggggtggtgtccttctgcgtgaccttcctggtgcgcggcgcggccctggccttcggtctcagcctgccgggctatcgcgacaaaatcgatcgcagccagggtggaacgggcaagggatga

SEQ ID NO: 83542 - protein, 238 aa, Rhodospirillum rubrum ATCC 11170
MALSPTPTVFPFVSRGERGFLERGMDPVLTWLDTFGLIVFAVSGGLVAARKGMDIVGFALMATVTGIGGGTFRDMVLGMTPVFWVREPHYLVVCLAVGILTWFVAHRLDSRQRALLWADAIGIAFFTVVGTQVGLRAEAGISVALLMGVMTACFGGIVRDLLAGEPSLILQREIYITACVAGACAYLLFDAMGAGEGVSGVVSFCVTFLVRGAALAFGLSLPGYRDKIDRSQGGTGKG

SEQ ID NO: 83543 - DNA, 609 bp, Burkholderia thailandensis E264
  CDS (1)..(609): transl_table=11
atgcatacgctctatttgatcgcgatcgtcgcggaagccatgtcgggcgcgctgatgggcatgcagcgcgggatggaccgcttcggcctcgcgctcgtcggcgcggtgacggcgctgggcggcggcaccgtgcgcgacgtgctgctcggccgctatccgctgacctgggtcgcgcatcccgaatacttgctgctgacgctcgcggcggcgacgttcgcatcgatgacggcgacgcacgtcgcgcggctgaagtcgctgttcacgaccgtcgacgcgcttgggctcgcggcgttctcgatcatcggctgcgacgtcgccgcgaccgtgaacggcagcccggtcgtgatcgtgttggccggcgcgatcaccggcgtctgcggcgggatgctgcgcgatgtgctctgcaacgaaatgccgctcgtgctgcgcaaggagctgtacgcgagcatcgcgctgctgacgggcgggctgtatgtcggcatgaaggcgctcggcgtcgcggaaggtctcgcgaccgtcgtcgcgctgatcgcgggattcgcgctgcggatgctcgcggtgcggcgcggctggcggctgaaggcgtttcacgcggccgaagcgggttga

SEQ ID NO: 83544 - protein, 202 aa, Burkholderia thailandensis E264
MHTLYLIAIVAEAMSGALMGMQRGMDRFGLALVGAVTALGGGTVRDVLLGRYPLTWVAHPEYLLLTLAAATFASMTATHVARLKSLFTTVDALGLAAFSIIGCDVAATVNGSPVVIVLAGAITGVCGGMLRDVLCNEMPLVLRKELYASIALLTGGLYVGMKALGVAEGLATVVALIAGFALRMLAVRRGWRLKAFHAAEAG

SEQ ID NO: 83545 - DNA, 621 bp, Burkholderia thailandensis E264
  CDS (1)..(621): transl_table=11
gtgcatccgagactcacactcgcgatcgcggtcctcgaggcaatcgcgacgctcgcgttcgcgatctcgggtttcgtcgaagcgcgcaagaaccggctcgattcggtcggcatgttcgtcgtcgcgctcgcgaccgcgttcggtggcggcacgatgcgcgacgtgctgctcgagcggcgtccgttctactgggtcgagcaccagggctacgtgattgcgatcttcggcctgtcgctcgtcgcgccgctcgtgctccggatggcgtcgcggctttcggccgaacggctgctgctcgcagccgatgcgatcggcctcgggatcttcagcatctccggcacgtcgatcgcgctcgacgcgcaaatgccgtggttcgtcgccgcgatgatgggcgtgacgacgggcgtgttcggcggaatcatccgcgacgtgctgtgcaacgacatcccgctgatcctgcgcgactcgcgaccgtacgcgacctgcgcgttcgccggctgctgggtctatctgctgctcgtgtggctgcaattcgattccgtctacagcgtgctcgcggcgacgggtttcatcctcgtcacgcggctcgtcacgtacaagctcgacatccggctgccgcactag

SEQ ID NO: 83546 - protein, 206 aa, Burkholderia thailandensis E264
MHPRLTLAIAVLEAIATLAFAISGFVEARKNRLDSVGMFVVALATAFGGGTMRDVLLERRPFYWVEHQGYVIAIFGLSLVAPLVLRMASRLSAERLLLAADAIGLGIFSISGTSIALDAQMPWFVAAMMGVTTGVFGGIIRDVLCNDIPLILRDSRPYATCAFAGCWVYLLLVWLQFDSVYSVLAATGFILVTRLVTYKLDIRLPH

SEQ ID NO: 83547 - DNA, 768 bp, Syntrophus aciditrophicus SB
  CDS (1)..(768): transl_table=11
atgaataacctgagagcgccgtatcttaattgtttgacaaacaacggcacaaataataagggtgaccgggctgtaattcttggatggaaaagaggaaatgccttgacttatctgctggacattctgggcactctggtttttgccgtttccggggccttccgggctgtcaagtacgaactggacctcctcggggtccttgtcctcgcggtggccaccggggtgggcggaggaattctccgcgatctcctgatcggttttgtgcctccgtcggccttccgggatgaaacctatcttcttgtctgctttcttggcggactgcttgtctttctcgccgcgcccaaaatcgcacggcgttgggacctggtgatggcggcggatgctttgggactgggggtgttttccgcaatcggcgccgccaaggccgcggagtttcaccttgggcccgtgggaatcgtcatgatggctgttctgactgctacgggaggaggggttgtccgggatatcctggtaagagaaattcctgcggttatccgggtcgatttttacgcgaccgccgccctctgcggcgggctttcttttctggctgccggactggccggtatgaacgagttttttcagcttctcatctccattatcgttgccacagggctgcggctcatcgccatgatttatcggattaatcttccccgggtgcgcagcctgcctgaatctcccacggagttgacccacaggcataaagctgagaagaaaaaacctcgcgccttctga

SEQ ID NO: 83548 - protein, 255 aa, Syntrophus aciditrophicus SB
MNNLRAPYLNCLTNNGTNNKGDRAVILGWKRGNALTYLLDILGTLVFAVSGAFRAVKYELDLLGVLVLAVATGVGGGILRDLLIGFVPPSAFRDETYLLVCFLGGLLVFLAAPKIARRWDLVMAADALGLGVFSAIGAAKAAEFHLGPVGIVMMAVLTATGGGVVRDILVREIPAVIRVDFYATAALCGGLSFLAAGLAGMNEFFQLLISIIVATGLRLIAMIYRINLPRVRSLPESPTELTHRHKAEKKKPRAF

SEQ ID NO: 83549 - DNA, 639 bp, Novosphingobium aromaticivorans DSM 12444
  CDS (1)..(639): transl_table=11
atgcctgaaatgccgagcgccgacctttcctacctgatcggactgctcgaccttgcgggcattgccgtcttcgcgctgaccggggcgctgctggcggcgcaactgcggcagaccttcgtgaccatggcattcttcgcgctggtgacgggcgtgggcggcggatcggtgcgcgatctgctgatcggggcgccagtgttctgggttcgcgatccgtgggtggcgccggtgtgccttggcgtggcgctggtcgcatggttcacgccgcaccgctggtgggagcggcccgtgctggaatgggcggacgcggcggggcttggcgcctatgcagtgctgggcacggtgaaagccctggcgttcggcgtgccacctgttccggcggtactgatgggagtgatcaccgggtgcgtcggcgggatcatccgcgacgtgcttgcgggccgcccgtcgatcctgatgcggccggaactctacgtgacggcggcagcgctttcgtcggggctctgcgcggcgggcgcggcgctggggctcgcgaaagggctggtttggccggtcgcggcgatggcggggtttgcgctgcgcggcgcggcgatctggtggcgactgggcttgccgacatattcggcggagcgcgagggctga

SEQ ID NO: 83550 - protein, 212 aa, Novosphingobium aromaticivorans DSM 12444
MPEMPSADLSYLIGLLDLAGIAVFALTGALLAAQLRQTFVTMAFFALVTGVGGGSVRDLLIGAPVFWVRDPWVAPVCLGVALVAWFTPHRWWERPVLEWADAAGLGAYAVLGTVKALAFGVPPVPAVLMGVITGCVGGIIRDVLAGRPSILMRPELYVTAAALSSGLCAAGAALGLAKGLVWPVAAMAGFALRGAAIWWRLGLPTYSAEREG

SEQ ID NO: 83551 - DNA, 651 bp, Francisella tularensis subsp. holarctica
  CDS (1)..(651): transl_table=11
atgtatcacgtcggtatcactggaccttttattttttcagttatgtttcttttaggcataattgccgagagtatgactggtgttatatcatcgtctcgtagaaacatggatgcttttggggttgttgcaatagcacttacaacagctttaggaggtggtgttgttagagatgttctattaggtaatttaccagtaactattatactttatccgcactatattgtgatatgcctatttttctcaattattgctattttcacgcaaaaatatattaataagttttataaagtatttttgattctcgattcaattggtctaattgcttttgcctatattggtagcagtatagcacatcaaatttgtacacaagtttttcatatgcagttttttagtgttctgattgttggtattgttatcgcaatacttaacggcgttgctggtggaataatgcgcgatatgatctgtaatgatatccctgttgcctttaaatctgaattatatgcatctgtcgcagcaatagtcggtgcaatgaatatcatatttatatatttagatataaatttatacataagcgcgtcactgataataggcattggtttaacagtgagaattatgtcaataatttataagtggaaattaccaattatataa

SEQ ID NO: 83552 - protein, 216 aa, Francisella tularensis subsp. holarctica
MYHVGITGPFIFSVMFLLGIIAESMTGVISSSRRNMDAFGVVAIALTTALGGGVVRDVLLGNLPVTIILYPHYIVICLFFSIIAIFTQKYINKFYKVFLILDSIGLIAFAYIGSSIAHQICTQVFHMQFFSVLIVGIVIAILNGVAGGIMRDMICNDIPVAFKSELYASVAAIVGAMNIIFIYLDINLYISASLIIGIGLTVRIMSIIYKWKLPII

SEQ ID NO: 83553 - DNA, 648 bp, Rubrobacter xylanophilus DSM 9941
  CDS (1)..(648): transl_table=11
atgcccgagccctcgggatcgacgctgatgctggcgctggacctcgccgggaccttcgccttcgggctgagcggggccctggccggggtgcgcgctcgcctggacctctacggcgtcgtggtgctggccgcggtggtggggctcgccggagggatcacccgcgacatcctgctcggggcgctgcccccggccaccttcagcgactggcgctacctggccaccgtggtctgcgccgccctcctgaccttcttcgcccaccccaccctggagcgcttctcgcgcccggtggccgtcttcgacgccgccggcctctcgctgttctgcgtcaccggggcgaccaaggccctggacttccaggtgggggccgtgcaggcggtgctgctcggcgtcatcaccgcgaccggcggggggatgctgcgcgacgtgctggtgcgcgagatcccgacggtgctgcgcaacgagctgtacgccgtgcccgcgctcgtcggggcgtccatcgtggtcgcggcctccaagctcggccacgacccgggggtcgcctcggtggccgcggcggcgacctgcttcctcatccgcctggcgagcctgcgcttcggcatcgagctgcccaccgcccccaccgaccgcgacaagccccccgaccggtag

SEQ ID NO: 83554 - protein, 215 aa, Rubrobacter xylanophilus DSM 9941
MPEPSGSTLMLALDLAGTFAFGLSGALAGVRARLDLYGVVVLAAVVGLAGGITRDILLGALPPATFSDWRYLATVVCAALLTFFAHPTLERFSRPVAVFDAAGLSLFCVTGATKALDFQVGAVQAVLLGVITATGGGMLRDVLVREIPTVLRNELYAVPALVGASIVVAASKLGHDPGVASVAAAATCFLIRLASLRFGIELPTAPTDRDKPPDR

SEQ ID NO: 83555 - DNA, 609 bp, Rhodococcus sp. RHA1
  CDS (1)..(609): transl_table=11
gtgctgctgtacatcctggaactggtgggcatcgcggtgttcgcggcctcgggtgccctggtgggggtgacgaagcgcctcgacatcttcggtgtgtgcgtggtcggtgtcttcaccgctctcggtggcggcatcgtccgcgacgtcctgctgggcatccacccgccgacgtcgctgggtagctggccgaacctcggcacgtcgttcggcatgtcgttgctggtgttcttcctgcattcgactgtcgggcgactccgccgcgagatcctggtgctcgacgctctgggtatgggcctgttcgcgagcacgggcgcggtgatcgcgctcgaccacggggcgagtccgctcgcgtcgtgcctcatcggcgggacggcggcgatcggcggcgggatcttgcgcgacgtgctggtgaacgaggtcccgttgctgctgcagcgggacttctacgcggtgccggcgctgctcggttcggcgctggtggtcgtggtgagcgagtggggttcgggcaccgacgtggcgctggtggtgggcacggtgttcgcgtcggcgctgcgggtgctggcgctgtggcggaactggggtctgccgggtccgcgggtcctcgactga

SEQ ID NO: 83556 - protein, 202 aa, Rhodococcus sp. RHA1
MLLYILELVGIAVFAASGALVGVTKRLDIFGVCVVGVFTALGGGIVRDVLLGIHPPTSLGSWPNLGTSFGMSLLVFFLHSTVGRLRREILVLDALGMGLFASTGAVIALDHGASPLASCLIGGTAAIGGGILRDVLVNEVPLLLQRDFYAVPALLGSALVVVVSEWGSGTDVALVVGTVFASALRVLALWRNWGLPGPRVLD

SEQ ID NO: 83557 - DNA, 672 bp, Haemophilus somnus 129PT
  CDS (1)..(672): transl_table=11
atgttactgagtattctctatattatcggcattacagcagaagcgataaccggagcattagctgccggacgagaaaaaatggatatttttggggttattattattgcttcaatgacagccatcggtggaggatcgattcgggatatcttgctcgggcattatcccttgggttgggttaaaaacccacattatttcttaattgttaccggagcggctatactcactgtttttatagctcctttcatcaaacactttatacgctacttccgtaccatttttttggtcttagatgcactaggattgatcgtattttccattattggtgctcaaattgctttggacatggggcatggttttactgttacctgtatagccgctatcgttacgggagcctttggtggtgtattacgagattcgctctgtaaccgcattcctttagtgttccaaaaagagctttatgccagtattgcattattagctaccggtatttatgttggcttacaacaattacagattaatcaaaatttggtcattattattacgttaattagtggcttcattattcgtttgctcgccatttatttcgaatggggattgcctatttttgattatcaagagcaagaagcagaaaaagtcaaaacgcatgataaattacctaaaaaaacaaaataa

SEQ ID NO: 83558 - protein, 223 aa, Haemophilus somnus 129PT
MLLSILYIIGITAEAITGALAAGREKMDIFGVIIIASMTAIGGGSIRDILLGHYPLGWVKNPHYFLIVTGAAILTVFIAPFIKHFIRYFRTIFLVLDALGLIVFSIIGAQIALDMGHGFTVTCIAAIVTGAFGGVLRDSLCNRIPLVFQKELYASIALLATGIYVGLQQLQINQNLVIIITLISGFIIRLLAIYFEWGLPIFDYQEQEAEKVKTHDKLPKKTK

SEQ ID NO: 83559 - DNA, 642 bp, Shewanella sp. MR-4
  CDS (1)..(642): transl_table=11
atgcaagaagcgcaatttatcggattattatggctgattggaattttggccgaggccatgactggggcattagcggctggccgtaaacagatggacttattcggcgtggttatcattggctgcgcaacggcgattggtggtggcaccctaagagacatgctgcttggaaattaccctttgatttgggtcgaaaatgtccattatctgatcgcgattgcatttgcctctttgttaacggttgcgattgcgccagtgatgcgttacctgtctaaattatttttggccattgatgccttgggtttagccgtattctcgattgttggcgcacaaaaaacgctaatgttagggtttagtccaacgattgctgtggtgatgggactcgtcactggggtatttggtggggtgatccgcgatattctctgtaaccaagtgcctttgatttttaagaaagaactctatgcggtgatttcactctttaccgcaggcttatatatcacgctcaacgcctatcaattggcggagtggataaacctagtggtctgtttaacgctgggctttagcttgcgaatgttagcactgcgttaccattggtctatgccaaccttcgactatcaagccaacggcgaccagcatactcactaa

SEQ ID NO: 83560 - protein, 213 aa, Shewanella sp. MR-4
MQEAQFIGLLWLIGILAEAMTGALAAGRKQMDLFGVVIIGCATAIGGGTLRDMLLGNYPLIWVENVHYLIAIAFASLLTVAIAPVMRYLSKLFLAIDALGLAVFSIVGAQKTLMLGFSPTIAVVMGLVTGVFGGVIRDILCNQVPLIFKKELYAVISLFTAGLYITLNAYQLAEWINLVVCLTLGFSLRMLALRYHWSMPTFDYQANGDQHTH

SEQ ID NO: 83561 - DNA, 627 bp, Shewanella sp. MR-4
  CDS (1)..(627): transl_table=11
atgagtcactggatttacttcttcgatttatgtggcacagcggtatttgccctttccggcgctttagccgcagggcgtcaccgtatggatccctttggcgttatcgtgctggcctcggtgactgcggtcggcggtggcagtattcgcgatgcgctgattggcgcgacgcccgtgttttggatccgcgacccaaactacatcattgtcatactcgccacagtcctagcttgtttgctgttggtgcgccgcccccgcaagatgccgcaatacacgctaccggtcgccgatgccttaggtttagccctgtttaccgtgattggtgccgaaaaagccctcaatatgggactcagtggcatgattgccgtcgtgatgggcttgatcacgggcgtgggaggaggcattattcgagacttactgtgcagacaaatccctatggtgttacgcacagaaatctatgccacggcttcgattattggcggcataggttataccgtaagcttagccttcggtatgggcgaaaaaacggcgctgtttttatccatggccagtgccctaatcattcgtttaagcgccatcaaatggcatttgtcgttacccgcctttgatctcaaaaccaagagggaatag

SEQ ID NO: 83562 - protein, 208 aa, Shewanella sp. MR-4
MSHWIYFFDLCGTAVFALSGALAAGRHRMDPFGVIVLASVTAVGGGSIRDALIGATPVFWIRDPNYIIVILATVLACLLLVRRPRKMPQYTLPVADALGLALFTVIGAEKALNMGLSGMIAVVMGLITGVGGGIIRDLLCRQIPMVLRTEIYATASIIGGIGYTVSLAFGMGEKTALFLSMASALIIRLSAIKWHLSLPAFDLKTKRE

SEQ ID NO: 83563 - DNA, 615 bp, Alkalilimnicola ehrlichei MLHE-1
  CDS (1)..(615): transl_table=11
atggacgttggctacatctattggctggacctgttcggcacggccgtgtttgccatctccggcgccttggcggcgggtcgcaagaacctggacctgttcggggtcatcgtcctcggactggtcaccgccgtgggcggcggcaccctacgtgacgccaccctgggtgccaccccggtgttctgggtggtcgacccggtctacatcatcgtcgccagcaccgccgcgctgatcaccgtggtcttggcacggctggagcggatcccccatgggctgttggtgaaggccgatgccctgggtctggccacgttcaccgtgatcggcgccgaaaaggccctcagcctcggcttctcaccggtgatcgccctggtcaccggggtgatgaccggctgtttcggcggcatgatccgcgacctgctgtgcggcgagataccgctgatcctgcaaaaggagatctatgccaccgccgcactgtttggcgccggggtctatgtcggggtggggctgacgcccgcgccaaccgccctggccatctggtccggcctgctcgcggccctgctgctgcgcctggcggccatccgctggcacctgcaactgccggtgttcacccaccaataa

SEQ ID NO: 83564 - protein, 204 aa, Alkalilimnicola ehrlichei MLHE-1
MDVGYIYWLDLFGTAVFAISGALAAGRKNLDLFGVIVLGLVTAVGGGTLRDATLGATPVFWVVDPVYIIVASTAALITVVLARLERIPHGLLVKADALGLATFTVIGAEKALSLGFSPVIALVTGVMTGCFGGMIRDLLCGEIPLILQKEIYATAALFGAGVYVGVGLTPAPTALAIWSGLLAALLLRLAAIRWHLQLPVFTHQ

SEQ ID NO: 83565 - DNA, 633 bp, Hyphomonas neptunium ATCC 15444
  CDS (1)..(633): transl_table=11
atgaaccccatcctgatcctcgactatgcgggcatcgccgtcttcgccgccaccggcgcgctggctgcctcgcgcaagcagctcgacatcatcggcttcctgttcttcgccgccttcaccggggtagggggcggcacggtgcgcgatctgatcctcgatgtgcccgtcttctgggtggccaatcatgactatctgctgatctgcctcgtcaccgctatcctggtctacttcaccgcccacctgtttgagtcccgctacaagctcctcctctggctcgatgccctcggccttgctgcctattgcgtctttggcgcgtggaaggcgctggaggttaccggctcgcccgtcatcgccgtcgtcatgggcgtcatcacggcgagcttcggcggcatcctgcgcgaccagctcgcgggagagccctgcatcctcctgcgcccggagatctacatcaccgcggcgctggccggcagcgcggtctataccggcctccacctggcgggccttcccctgatggccgccgccgtgcctgccgccctcgttgccttcgccataaggggcggggcgatgaagttcggctggtcgatccccggctacaagacgcgccccggccgccccgccgaagagatcgaatga

SEQ ID NO: 83566 - protein, 210 aa, Hyphomonas neptunium ATCC 15444
MNPILILDYAGIAVFAATGALAASRKQLDIIGFLFFAAFTGVGGGTVRDLILDVPVFWVANHDYLLICLVTAILVYFTAHLFESRYKLLLWLDALGLAAYCVFGAWKALEVTGSPVIAVVMGVITASFGGILRDQLAGEPCILLRPEIYITAALAGSAVYTGLHLAGLPLMAAAVPAALVAFAIRGGAMKFGWSIPGYKTRPGRPAEEIE

SEQ ID NO: 83567 - DNA, 621 bp, Pseudomonas aeruginosa UCBPP-PA14
  CDS (1)..(621): transl_table=11
atgctgctgaccgtgctctacatcatcgccatcaccgccgaagccatgaccggcgcgctgtcggccggccggcgcagcatggacctgttcggcgtggtgctgatcgcctgcgtcaccgccctgggcggcggctcggtacgcgacatgctgctgggccattacccgctgacctgggtccgtcacccggaatacctggcgctgaccgcagtcgccgcgctggtcacggtgttcatcgcgccgctgatgcgccacctgcgctcgctgttcctggtactcgacgcggtcggcctggtggccttcaccctgatcggctgccaggtcagcctggaaatgggccacagcctgctgatcgcggcgatcagcggggtgatcaccggggtgttcggcggcattctccgcgacatcctgtgcaacgacgtacccttgatcttccgccgcgaactctatgccagcgtgtccttcgccagcgcctggtgctacctgatctgcgtggagctggaactgccctccgagcaggcgatgctgatcaccctgttcagcggcttcctgttccgcctgctggccatccgcttccactgggaaatgcccaagttcgtctaccaggacgatttcgaccactga

SEQ ID NO: 83568 - protein, 206 aa, Pseudomonas aeruginosa UCBPP-PA14
MLLTVLYIIAITAEAMTGALSAGRRSMDLFGVVLIACVTALGGGSVRDMLLGHYPLTWVRHPEYLALTAVAALVTVFIAPLMRHLRSLFLVLDAVGLVAFTLIGCQVSLEMGHSLLIAAISGVITGVFGGILRDILCNDVPLIFRRELYASVSFASAWCYLICVELELPSEQAMLITLFSGFLFRLLAIRFHWEMPKFVYQDDFDH

SEQ ID NO: 83569 - DNA, 642 bp, Shewanella sp. ANA-3
  CDS (1)..(642): transl_table=11
atgcaagaagcgcaatttatcggattattatggctgattgggattttagccgaggccatgacaggggcattagcggcgggtcgtaagcagatggacctattcggcgtggttatcattggctgcgcgacggcaattggtggtggcaccctaagagacatgctgctcggaaattaccctttgatttgggtcgagaatgtccattacctgctcgcgattgcatttgcgtctttactaacggtcgccattgcgcctgtgatgcgttacctgtctaagttattcttggccattgatgccttaggcctagccgtattctcgattgttggcgcccaaaaaaccctaatgttaggctttagtccaacgattgcggtggtgatggggctcgtcacaggggtctttggcggggtgatccgcgatattctctgtaatcaagtgcctttgatttttaagaaagaactctatgcggtgatttcgctctttaccgcaggcttatatatcaccctcaacgcttatcaattggctgagtggataaacctagtggtctgtttaacgcttggctttagcttacgaatgttagcgctgcgttatcattggtctatgccgacctttgactatcaagccaatggcgaccaacatacgcactaa

SEQ ID NO: 83570 - protein, 213 aa, Shewanella sp. ANA-3
MQEAQFIGLLWLIGILAEAMTGALAAGRKQMDLFGVVIIGCATAIGGGTLRDMLLGNYPLIWVENVHYLLAIAFASLLTVAIAPVMRYLSKLFLAIDALGLAVFSIVGAQKTLMLGFSPTIAVVMGLVTGVFGGVIRDILCNQVPLIFKKELYAVISLFTAGLYITLNAYQLAEWINLVVCLTLGFSLRMLALRYHWSMPTFDYQANGDQHTH

SEQ ID NO: 83571 - DNA, 627 bp, Shewanella sp. ANA-3
  CDS (1)..(627): transl_table=11
atgagccactggatttacttcttcgatttatgtggcacggcggtatttgccctttctggcgccttagccgctgggcgtcaccgtatggacccctttggcgttatcgtgctcgcgtcggtaacagctgtgggtggtggcagtattcgcgatgcgctgataggcgccacgccggtgttttggatccgcgaccctaactacatcatagtgatactcgccacagtcctagcttgtttgctgttagtgcgccgcccccgcaagatgccgcaatacacgctacctgtcgccgacgccttaggtttggccctattcacagtgattggtgctgaaaaagccctcaatatgggactcagtggcatgattgccgtcgtgatgggcttgatcacgggcgtaggaggaggcattattcgagacttactgtgcagacaaatccctatggtgttacgcacagaaatctatgccacggcgtcgattgttggcggcataggttataccgtaagccttgcctacgggatgggcgaaaaaacggcactatttttagccatgaccagtgccttaatcattcgcctatgcgccatcaaatggcatttgtcgttacccgcctttgatctcaaaaccaagagggaatag

SEQ ID NO: 83572 - protein, 208 aa, Shewanella sp. ANA-3
MSHWIYFFDLCGTAVFALSGALAAGRHRMDPFGVIVLASVTAVGGGSIRDALIGATPVFWIRDPNYIIVILATVLACLLLVRRPRKMPQYTLPVADALGLALFTVIGAEKALNMGLSGMIAVVMGLITGVGGGIIRDLLCRQIPMVLRTEIYATASIVGGIGYTVSLAYGMGEKTALFLAMTSALIIRLCAIKWHLSLPAFDLKTKRE

SEQ ID NO: 83573 - DNA, 627 bp, Mycobacterium smegmatis str. MC2 155
  CDS (1)..(627): transl_table=11
atgccgatcgactcgccactgctgctgacccttgatctggtgggtacgttcgcgttcgcgttgaacggtgcgctgacggctgtgcgcgccgaacggctcgacatcttcggcgtgatcacgctcggcatgttcaccggcctcggcggcggcacgatccgcgacgtcctgctcgacgcgctaccgcccgccacgttcgtcgactggcggtatctcgcgctcgcggcaggcgggggtctgatcgcgttcatcctcaaccgcacgctcgaccgcctctcgatgaccatcacggtgctcgacgccgtcgggctcagcgtgttcgcggtgctcgcggcctacaaggcactggatctgggattcggtgtgccgcaggcgatgatcgtcggcaccgtcacggccgtgggaggcggcacgatccgcgacgtgatgatcggccgcatccccacggtgctgcgcagtgagctctacgccatcccggcgttgatcgccgcggggatcgccgcggccggatacagcttcggccaccgtggcaccgcggccgcactgagcgcggcggccgtgtgcttcgtgatccggatggtcggcgtgcgtttcgatctgcacgcgccgcggccgccgggccggcgctga

SEQ ID NO: 83574 - protein, 208 aa, Mycobacterium smegmatis str. MC2 155
MPIDSPLLLTLDLVGTFAFALNGALTAVRAERLDIFGVITLGMFTGLGGGTIRDVLLDALPPATFVDWRYLALAAGGGLIAFILNRTLDRLSMTITVLDAVGLSVFAVLAAYKALDLGFGVPQAMIVGTVTAVGGGTIRDVMIGRIPTVLRSELYAIPALIAAGIAAAGYSFGHRGTAAALSAAAVCFVIRMVGVRFDLHAPRPPGRR

SEQ ID NO: 83575 - DNA, 636 bp, Nocardioides sp. JS614
  CDS (1)..(636): transl_table=11
atgccctcgcccgagccctccaccaccctggtcgtcctcgacctggtcggcatcttcgtcttcgcgatcaccggcgccctggtcgccgtgcgcaagggcctcgacgtgttcggggtcctcgtgctggccggcatgaccggcctcggcggtggcttcctgcgcgacgtgctcatcgacgccaccccgccggccgccctgcaggactggcgctacctgctggtgccggtcgtctccggggtgctggcgttcttctaccacccggtgctgggccgggtggagcgcgccgtcaacgtcttcgacgcgttcggcctcggactgttctgcgtcaccggcgccctcaaggccctggactacggcctcggcccggcgccggccgcgctgatggggatggtgaccggcatcggcggcggggtgatccgcgacctgctcgcctcccgcgtgcccgcggtcttccgcggcgagctgtacgccaccccggccctggccggcgccgtcgtggtcgtcgtcggcacccacgtcgacctgccgctcggcgtcgtggtcgtcaccggcgccggcctgtgcatcgtctggcggctgctggccctctggcggcactggcaggcaccggtgccgaccggcccggcgtcggtgtag

SEQ ID NO: 83576 - protein, 211 aa, Nocardioides sp. JS614
MPSPEPSTTLVVLDLVGIFVFAITGALVAVRKGLDVFGVLVLAGMTGLGGGFLRDVLIDATPPAALQDWRYLLVPVVSGVLAFFYHPVLGRVERAVNVFDAFGLGLFCVTGALKALDYGLGPAPAALMGMVTGIGGGVIRDLLASRVPAVFRGELYATPALAGAVVVVVGTHVDLPLGVVVVTGAGLCIVWRLLALWRHWQAPVPTGPASV

SEQ ID NO: 83577 - DNA, 615 bp, Azoarcus sp. BH72
  CDS (1)..(615): transl_table=11
atgctgaccaccatctatctcatcgcgatcaccgccgaagcgatgtccggcgcgctcgccgcgggccgccgcagcatggacatcttcggcgtcgcggtcatcgcctttgtcaccgcgctcggcgggggcaccatccgcgacatgattctcgggcacttcccgattggctggacgcaacatccggagtacgtctatctggtgatctccgccggcctgctcaccacgctggtggcgcgctacatgcaccatctgaagaccgtgttcctggtgctcgacgcaatgggcctgatcgccttctcgctgatcggctgcggcgtcgcgctggagatgggctacgccacgccggtggtgatcatgtccggcatgatcaccggcatcttcggcggcatcctgcgcgacgtgctgtgcaaccaggtgccggtggtgttccgccacgagttgtacgccagcgtgtcgctcgcggtgtgcgcgctctacctcgcgctgcaccacttcgccgtgcccgagcagatcaacatcgccgcgagcttcgccgccggcctcacgctgcggctgctggccatctggcgcggctggcggctgccgacgttttcgtaccgggagcgctgggagtaa

SEQ ID NO: 83578 - protein, 204 aa, Azoarcus sp. BH72
MLTTIYLIAITAEAMSGALAAGRRSMDIFGVAVIAFVTALGGGTIRDMILGHFPIGWTQHPEYVYLVISAGLLTTLVARYMHHLKTVFLVLDAMGLIAFSLIGCGVALEMGYATPVVIMSGMITGIFGGILRDVLCNQVPVVFRHELYASVSLAVCALYLALHHFAVPEQINIAASFAAGLTLRLLAIWRGWRLPTFSYRERWE

SEQ ID NO: 83579 - DNA, 672 bp, Haemophilus somnus 2336
  CDS (1)..(672): transl_table=11
atgttactgagtattctctatattatcggcattacagcagaagcgataaccggagcattggctgccggacgagaaaaaatggatatttttggggttattattattgcttcaatgacagccatcggtggaggatcgattcgggatatcttgctcgggcattatcccttgggttgggttaaaaacccacattatttcttgattgttaccggagcggctatactcactgtttttatagctccttttatcaaacactttatacgctacttccgtaccatttttttggtcttagatgcactaggattgatcgtattttccattattggtgctcaaattgctttggacatggggcatggttttactgttacctgtatagccgctatcgttacgggagcctttggtggtgtattacgagattcgctctgtaaccgcattcctttagtgttccaaaaagagctttatgccagtgttgcattattagctaccggtatttatgttggcttacaacaattacagattaatcaaaatttggtcattattattacgttaattagtggcttcattattcgtttgctcgccatttatttcgaatggggattgcctatttttgattatcaagagcaaggagcagaaaaagtcaaaacgcatgataaattacctaaaaaaacaaaataa

SEQ ID NO: 83580 - protein, 223 aa, Haemophilus somnus 2336
MLLSILYIIGITAEAITGALAAGREKMDIFGVIIIASMTAIGGGSIRDILLGHYPLGWVKNPHYFLIVTGAAILTVFIAPFIKHFIRYFRTIFLVLDALGLIVFSIIGAQIALDMGHGFTVTCIAAIVTGAFGGVLRDSLCNRIPLVFQKELYASVALLATGIYVGLQQLQINQNLVIIITLISGFIIRLLAIYFEWGLPIFDYQEQGAEKVKTHDKLPKKTK

SEQ ID NO: 83581 - DNA, 663 bp, Haemophilus influenzae R2866
  CDS (1)..(663): transl_table=11
atgttacttagtattttatatatcatcggtatcaccgctgaaggaatgacaggcgcactcgccgctggtcgtgaaaaaatggatatttttggcgtgatcattatcgcatccgtcactgccattggtggcggttctgtgcgtgatgtactgcttgggcattatcctctcggctgggttaagcacccagaatattttttaatggtggcaagtgcggcggtaattaccgtatatgttgcaccattcatcaatcattttatgcgctactttcgcactattttcttggtgcttgatgcgatgggcttagtggtgtattccattattggcgcacaaattgcgatggatatgggacatggcctcactattgtttgtattgcaggctgtattacgggtgcctttggcggggttctacgcgatatgctatgcaatcgaattcctctcgtattccaaaaagaactctatgccagcattgcgctatttgccacgctgacttattacgcattaagcacacttcaagtagaacatacacttgccgtattactcacgcttattagtagctttactttacgtcttttagctattcatttcgaatggggtttacccgtgtttaattaccaagaactcacatcggaagaacaagataagctgccaaataaaaagaaataa

SEQ ID NO: 83582 - protein, 220 aa, Haemophilus influenzae R2866
MLLSILYIIGITAEGMTGALAAGREKMDIFGVIIIASVTAIGGGSVRDVLLGHYPLGWVKHPEYFLMVASAAVITVYVAPFINHFMRYFRTIFLVLDAMGLVVYSIIGAQIAMDMGHGLTIVCIAGCITGAFGGVLRDMLCNRIPLVFQKELYASIALFATLTYYALSTLQVEHTLAVLLTLISSFTLRLLAIHFEWGLPVFNYQELTSEEQDKLPNKKK

SEQ ID NO: 83583 - DNA, 645 bp, Actinobacillus pleuropneumoniae serovar 1 str. 4074
  CDS (1)..(645): transl_table=11
atgactaacttattcgacagcttattgccgccttttccttggtcattcttatttattcaagatttgatcggcacgatcgtatttgccgtatccggggcaatcgcggctcgacaacataaaatggatattttcggtatgttcattttagcgtttgtgaccggtgtaggcggcggtacgttgcgtgatgtgatgatcggcagtacgccggttttttggatgaagcaaccgatttatgttttgatgatcactcttgcggtaattatcactgcggtttttaaaaataatttcagtaaaaaagagtggcaaaccggtttactgattttcgatgcgattggtttgggcgtgtttaccgttattggtgtgcaaaaaggcttggatttcggcttacatccgttgattgcgattgcattaggcggaatgaccggatgtttcggtggggttattcgagatattttgcgtaacgaagtgccgattgtgttacaaaaagaagtgtatgtcacggcaagtcttatcggcggtgtgatttttgtgttgttctattccgccggcgttgaaagccgctgggtggatattgccacggtcgctaccgtgattgtgatacgtttattagcgattcgatttaatctaaatttaccgagaatttaa

SEQ ID NO: 83584 - protein, 214 aa, Actinobacillus pleuropneumoniae serovar 1 str. 4074
MTNLFDSLLPPFPWSFLFIQDLIGTIVFAVSGAIAARQHKMDIFGMFILAFVTGVGGGTLRDVMIGSTPVFWMKQPIYVLMITLAVIITAVFKNNFSKKEWQTGLLIFDAIGLGVFTVIGVQKGLDFGLHPLIAIALGGMTGCFGGVIRDILRNEVPIVLQKEVYVTASLIGGVIFVLFYSAGVESRWVDIATVATVIVIRLLAIRFNLNLPRI

SEQ ID NO: 83585 - DNA, 612 bp, Burkholderia vietnamiensis G4
  CDS (1)..(612): transl_table=11
atgcatacgctatatctgattgcgatcgttgcggaagcgatgtcgggcgcgctgatgggcatgcggcgcgggatggaccggttcggcctcgcgctggtcggcgcggtgacggcgctcggcggcggcaccgtgcgcgacgtgctgctcggacactatccgctcggctggatcgcgcatccggcctatctgctgatcacgctcgcggccgcgaccgccgcgtcgtgggctgcgcggcacctgtcacggatgaagacgctgttcgtgaccgtcgacgcgatcggcctcgcggcgttcacgatcatcggctgcgacatcggcgcgtcgaccggcgcggcgccgatcatcgtcgtgctggcaggtgcgatcaccggcgtgtgcggcgggatgctgcgcgacctgctgtgcaacgagatgccgctggtcctgcgcgacgaactgtacgcgagcgtcgcattgttcacgggcgggttgtacgtcggcatgcagtatctgggtatcggcgcggggccggcgacgatcgtcgcgctcgtggcaggcttcgcgacgcggatgctcgccgtgcgactcggatggaaattgcggactttcgcggtcgcggatgtcgagcgctga

SEQ ID NO: 83586 - protein, 203 aa, Burkholderia vietnamiensis G4
MHTLYLIAIVAEAMSGALMGMRRGMDRFGLALVGAVTALGGGTVRDVLLGHYPLGWIAHPAYLLITLAAATAASWAARHLSRMKTLFVTVDAIGLAAFTIIGCDIGASTGAAPIIVVLAGAITGVCGGMLRDLLCNEMPLVLRDELYASVALFTGGLYVGMQYLGIGAGPATIVALVAGFATRMLAVRLGWKLRTFAVADVER

SEQ ID NO: 83587 - DNA, 624 bp, Burkholderia vietnamiensis G4
  CDS (1)..(624): transl_table=11
gtgccgcatcctaggctcacgctcgcgatctcgatcctcgaggcgatcgcgacgctggcgtttgcgatctccggcttcatcgaggcgcgcaagaaccgcctcgactcggtcggcacgttcgtcgtcgcgctcgccaccgcgttcggcggcggcacgctgcgcgacatcctgctcgaacgccggccgttctactgggtcgtgcacgacgactacgtgatcgcgatcttcgtgctcgcgctgttcgcgccgttcgtgctgcggatgctgtcgcggctgtcggccgagcgcctgctgctcgtcgccgacgcgatcgggctcggcatcttcagcatctccggcaccgcgatcgcgctcgacgccgagatgccgcgcttcatcgcggtgatgatgggcgtgatcaccggcgtggtcggcggcatcgtgcgcgacgtgctgtgcaacgacatcccgctgatcctgcgcgattcgcgcccctatgcgacctgcgcgttcgccggctgctggttctatctgctgctcgcatggctgcagtacgactcggtgtacagcgtgctgctcgcgaccggcttcattctcgtcgcgcggctggcgacgttcaaattcgacgtgcggctgccgcactga

SEQ ID NO: 83588 - protein, 207 aa, Burkholderia vietnamiensis G4
MPHPRLTLAISILEAIATLAFAISGFIEARKNRLDSVGTFVVALATAFGGGTLRDILLERRPFYWVVHDDYVIAIFVLALFAPFVLRMLSRLSAERLLLVADAIGLGIFSISGTAIALDAEMPRFIAVMMGVITGVVGGIVRDVLCNDIPLILRDSRPYATCAFAGCWFYLLLAWLQYDSVYSVLLATGFILVARLATFKFDVRLPH

SEQ ID NO: 83589 - DNA, 630 bp, Croceibacter atlanticus HTCC2559
  CDS (1)..(630): transl_table=11
atggatttctttgtatttgttgatcttataggaacaatagcatttgcaatttctggtgttttaacagccaccaagaagcgtatggatgtttttggcattattattattgcttttgtaacatcaattggtggtggtacgttaagagaccttttagtaggatttcccgtagcttggatacgcaatacttattatgtttactttattataggatgcacaattttagctattttatttagacgaaaattaagacatgtaagaacctctttatttctatttgatactattggtattggtttgtacaccgtagttggtatagaaaagggattatctgcagatttgtctccagtaatttgtgttgcattaggaacagttacagctacatttggtggtgtaatacgagacatactctgtaatgaaataccagttgtatttagaaaagagatttatgctactgcctgtattttaggaggtgtttcctactttgtgttattgttcttaactcctataccagaaggtattatttttgttatagcaggatcaatagtaattacatttaggctactagcagttcattacaaatggatactgcctacaatttactcgaaagaagaattggaaaacttaaattag

SEQ ID NO: 83590 - protein, 209 aa, Croceibacter atlanticus HTCC2559
MDFFVFVDLIGTIAFAISGVLTATKKRMDVFGIIIIAFVTSIGGGTLRDLLVGFPVAWIRNTYYVYFIIGCTILAILFRRKLRHVRTSLFLFDTIGIGLYTVVGIEKGLSADLSPVICVALGTVTATFGGVIRDILCNEIPVVFRKEIYATACILGGVSYFVLLFLTPIPEGIIFVIAGSIVITFRLLAVHYKWILPTIYSKEELENLN

SEQ ID NO: 83591 - DNA, 615 bp, Pseudoalteromonas tunicata D2
  CDS (1)..(615): transl_table=11
atggaagcgtggtttcattggtttgatttaataggtgttgcggtttttgcgatatcaggcgcattggtagctcatcgtaaaaagcttgatggttttggtgtgatagtgctcgctgctgtgacaggcattggtggtggtaccattcgagatgtcattctcgatgcgccggtattttggttacataatcctagttatctttactcaattttaggtgcctcgttattaactattttttggcttaataagcgcgggagtatgcgtaaaattataattgaaagtgcagatgcgctgggcctagcattttttgtcgttatgggcgtccaaaaagcgctagattacggtatgcctaatatcacagcagtggtgatgggagtgattacgggttgttttggtggcatgatccgcgatgtgcttgctcgttcaacacctatggtattaaaaagtgaattgtatgcaacaacttgtatttttggcgggattgtttatacccaatgtttaaattttgatatcgccaaagaaatagccatgattgccgggatgctggcgactttatcacttcgtgcagcagctataaaatggcgcttgagcttacatgtttttaaatatccaaattga

SEQ ID NO: 83592 - protein, 204 aa, Pseudoalteromonas tunicata D2
MEAWFHWFDLIGVAVFAISGALVAHRKKLDGFGVIVLAAVTGIGGGTIRDVILDAPVFWLHNPSYLYSILGASLLTIFWLNKRGSMRKIIIESADALGLAFFVVMGVQKALDYGMPNITAVVMGVITGCFGGMIRDVLARSTPMVLKSELYATTCIFGGIVYTQCLNFDIAKEIAMIAGMLATLSLRAAAIKWRLSLHVFKYPN

SEQ ID NO: 83593 - DNA, 612 bp, Photobacterium sp. SKA34
  CDS (1)..(612): transl_table=11
atgctcatctatattctcgatatgtttggtactgcaatctttgcagcctcgggagtactcatggcggggcgattacgcatggatccttttggcgttgtcgtactagccagcgtaacagcgattggtggcggcactattcgtgatatggcactaggtgctacccctgtgttttggatcaatgataccaattacttatgggtgatttttataacatgcattatcacgatgctcgcaacccaacgccctaaacggctgccatggtattttcttcctgtcgctgatgcgattggattagcagtctttgtcgctatcggtgttgaaaaatcattacgttatggcgcatcaccaatagttgctgtgattatgggggttataacaggctgtggcggcggcgtgatccgagatatactcggacgtgagatcccaatggtgttacgtacagaggtttatgcaacggcctgtattcttggtggtatggtacacaccataggcttatctttaggtgtattgccttctattgcagcagtgatcggtatctttaccacactcacaataagactcgctgccattaagtggaatctttctctgcctatttttgcattacgcaattaa

SEQ ID NO: 83594 - protein, 203 aa, Photobacterium sp. SKA34
MLIYILDMFGTAIFAASGVLMAGRLRMDPFGVVVLASVTAIGGGTIRDMALGATPVFWINDTNYLWVIFITCIITMLATQRPKRLPWYFLPVADAIGLAVFVAIGVEKSLRYGASPIVAVIMGVITGCGGGVIRDILGREIPMVLRTEVYATACILGGMVHTIGLSLGVLPSIAAVIGIFTTLTIRLAAIKWNLSLPIFALRN

SEQ ID NO: 83595 - DNA, 621 bp, Photobacterium sp. SKA34
  CDS (1)..(621): transl_table=11
atgctgctttcagttttatacattattggcattacggcagaagcgatgaccggtgcactagctgcaggtaaacgccacatggattggtttggagtaatgctagttgcaagtgctactgcaattggtggagggacagttcgtgacatattactcggtcactaccctttaggctgggttgcacacccacaatacttagtggtcacttgcgttgcagggatcttaactacctactttgcccgttgggttgtacgttttcataaagtgtttatcttgctcgatgctatcggcttaatcgtatttagtattattggatgtcaagtcgcgatgacaatggggctttctccaataatttgtgtcgttgcggctgttgtgacaggcgtatttggtggtttgctacgtgatatgatcactcgtcgtaaacctatggtgctgcataaagagctttatgcatcagtcgcattcattgctggcatcatgtattacgtcatgtcttatataggtgtacacccagatatcaccacactatgtaccttgattacaggttttagcctacgcatggctgcagtgtactttagctggagcttacctgtgtttgagtttaaagaagaatcctttcattaa

SEQ ID NO: 83596 - protein, 206 aa, Photobacterium sp. SKA34
MLLSVLYIIGITAEAMTGALAAGKRHMDWFGVMLVASATAIGGGTVRDILLGHYPLGWVAHPQYLVVTCVAGILTTYFARWVVRFHKVFILLDAIGLIVFSIIGCQVAMTMGLSPIICVVAAVVTGVFGGLLRDMITRRKPMVLHKELYASVAFIAGIMYYVMSYIGVHPDITTLCTLITGFSLRMAAVYFSWSLPVFEFKEESFH

SEQ ID NO: 83597 - DNA, 669 bp, Oceanospirillum sp. MED92
  CDS (1)..(669): transl_table=11
atgactgatctaagttatgcccagtttatctatattgccgacctgataggtgtggcggtatttgctaccgcgggagcgttggcagctcaggggaagcgccttgatattctgggtgtagtcgttttggcaattgttacggcattgggtggtggaactatccgcgatattactctggatatccatccggtagtatggattgctgatacctcctatttgtggacagcgatcatctctgcagtcgttgcttttgttgtttgtcgttatatccagtatccgagacgtacgttattggtactcgatgccatgggattggcactgtttgctgtgctgggtgctgaaaaggcattggcgttggagcttccgccactaatcgttgtcatgatgtctgttatcactggatgtgccggagggatgattcgagacatcatcactgggcagattccattgattctgcaaagggatggtgagctctatgcaacctgtgcattgggtggcgcgattttctatatcgttttcaaagaatatatgccgggcgaagtggttgcgcttagctctatgatgatcatatttgtgttgcgtatggcggctatgtttgctgatctgcgcttgcctgagtttattgttaccgggcataaactggaaaaaataaagaaggataaaaatcagtga

SEQ ID NO: 83598 - protein, 222 aa, Oceanospirillum sp. MED92
MTDLSYAQFIYIADLIGVAVFATAGALAAQGKRLDILGVVVLAIVTALGGGTIRDITLDIHPVVWIADTSYLWTAIISAVVAFVVCRYIQYPRRTLLVLDAMGLALFAVLGAEKALALELPPLIVVMMSVITGCAGGMIRDIITGQIPLILQRDGELYATCALGGAIFYIVFKEYMPGEVVALSSMMIIFVLRMAAMFADLRLPEFIVTGHKLEKIKKDKNQ

SEQ ID NO: 83599 - DNA, 630 bp, Xanthobacter autotrophicus Py2
  CDS (1)..(630): transl_table=11
atggagacggcggatcttctcaaggttctctacatcgtcgccatcgtggcggaggcgatgacggccgcgctggcggcggggcggcgggagatggactgggtgggcgtgtgcctgctcggctcggtcacggcgctcggcggcggctcggtgcgcgacgtgctgctgggccggcatcccctgtcctgggtgcagcatccggaatacctgctcatcacctgcggcgcggcgctggcgaccatcatggtggcgcgttacatgcgccacctgcggcacgtcttcctgttcctcgatgcggtggggctggtggtgttcaccgtcatcggctgcaacgtggccatgagcctcgacatgccggtggtggtggtgatcgccgccgggatgatcaccggctgcgtcggcggcgtcctgcgcgacgtgctgtgcgcggacgtcccgctgctgttccgggccgagctctacggcacggtgtccatcgtcaccggcggcctttacatggcgggcaaggcgctggatttgccgcacgatcccctcaccatcggcgtcatggcgctcgggttggggatgcgcatgcttgccctgcggttcggctggcgcatgcccaagttcgtctacaccgaaacgatccactga

SEQ ID NO: 83600 - protein, 209 aa, Xanthobacter autotrophicus Py2
METADLLKVLYIVAIVAEAMTAALAAGRREMDWVGVCLLGSVTALGGGSVRDVLLGRHPLSWVQHPEYLLITCGAALATIMVARYMRHLRHVFLFLDAVGLVVFTVIGCNVAMSLDMPVVVVIAAGMITGCVGGVLRDVLCADVPLLFRAELYGTVSIVTGGLYMAGKALDLPHDPLTIGVMALGLGMRMLALRFGWRMPKFVYTETIH

SEQ ID NO: 83601 - DNA, 609 bp, Flavobacteria bacterium BBFL7
  CDS (1)..(609): transl_table=11
atggattttatacaagtaattgatttaatgggaacggtagcttttgctatctctggtgctcttgccgcttataataaaaagttagacgcatttggaatcatcattatcgcatttgttactgccgctggtggtggaactataagagacattctactaggtgtaagtccagtttcatggatgactaatatgaatctagtttataccattcttgtatgtgtattggttacttttatattcagtcagaagttactcaaactgcgcaaaacacttttcttttttgatacgataggtatcggtttatatactgttgtagggctagaaatgggaattaccgcaggattacatccctttatatgtgtaaccttaggttgcattacggcctgttttggtggagtaataagagatattctagtaaatgagattccagtaattttccgtaaaaacatctatgccacagcctgtatcgctggtggtgttatttactttatccttagaaagtttgaggcgccagaaaatattacgttcatcgtttctggtatttcagtaatcgttatacgtatgcttgcggtaagatttaaatggcagctaccacgaccttataaagattaa

SEQ ID NO: 83602 - protein, 202 aa, Flavobacteria bacterium BBFL7
MDFIQVIDLMGTVAFAISGALAAYNKKLDAFGIIIIAFVTAAGGGTIRDILLGVSPVSWMTNMNLVYTILVCVLVTFIFSQKLLKLRKTLFFFDTIGIGLYTVVGLEMGITAGLHPFICVTLGCITACFGGVIRDILVNEIPVIFRKNIYATACIAGGVIYFILRKFEAPENITFIVSGISVIVIRMLAVRFKWQLPRPYKD

SEQ ID NO: 83603 - DNA, 618 bp, marine gamma proteobacterium HTCC2207
  CDS (1)..(618): transl_table=11
atgacctcactggatcagctactttacgtcttctcgataatcggcaccgtagtctttgccgtgtcaggggcgttatttgccgctgagaagcgtatggatattctcggctttatcttagttggcaccgtcaccggagtgggcggcggcaccctgcgagatctattgctgggcatctctccagtgagttgggtacacaacccaatggcggtttatatctgtattggtgcctcggctctcacctactttaccgttgccctatatcgcaagcgcgatgctcggatactatggactgatgccataggcctagcagtgtttgcggttatgggagcacaggccgccatagcccatgaagtgccgccaatgattgcggtggtgatgggtgtgatgacggcgacctttggtgggctgatgcgcgatgtgctctgtgctgaagtgctgaccctaatgcggccggagatctatatcagctgtgcattgctgggtgcttcggtgtatgtgattttgaaccagtttggggttggagattcggttgcagccagtgtagcgtttttgatggggtttgggcttagggcggcggcgatttggtttaggttgacgttgccgcggtttggggcttag

SEQ ID NO: 83604 - protein, 205 aa, marine gamma proteobacterium HTCC2207
MTSLDQLLYVFSIIGTVVFAVSGALFAAEKRMDILGFILVGTVTGVGGGTLRDLLLGISPVSWVHNPMAVYICIGASALTYFTVALYRKRDARILWTDAIGLAVFAVMGAQAAIAHEVPPMIAVVMGVMTATFGGLMRDVLCAEVLTLMRPEIYISCALLGASVYVILNQFGVGDSVAASVAFLMGFGLRAAAIWFRLTLPRFGA

SEQ ID NO: 83605 - DNA, 618 bp, Oceanobacter sp. RED65
  CDS (1)..(618): transl_table=11
atgattttagatatcatctattttgcaggactgggcggaactctcgtatttgccatctccggagcactcgctgctgctgagaacgaattagatatccttggttttatactctttgccaccgtgaccggcattggtggtggtactgtgagagacctaattctgggtgtcgaggttgcttgggcacacggtcaacatgcttatgacctgcatatttgtgtggcagctgccgtggttacttattttctcgcgccacaatttataaagcgcatgcgtttattggtgtggatggatgccatgggactcgccatttttagtgcagtcggtacagcaaaggcatatgaattaggactgagtcctttggtctgtgttgccatgggtatgatcaccccaactttcggttctatgattcgagatatcctgtcagatcgccaacctgaactgctacaaccggagatatatgtcaccgcttccatcgtgggaggcgtcagttttcttttaagtatgcaagtactaactaacccacagctaagcatacttctggcggcgctttcagcgtttttagtaagatcggcctcaatcgtgtataatctacggctgcctaagtttacgaataaataa

SEQ ID NO: 83606 - protein, 205 aa, Oceanobacter sp. RED65
MILDIIYFAGLGGTLVFAISGALAAAENELDILGFILFATVTGIGGGTVRDLILGVEVAWAHGQHAYDLHICVAAAVVTYFLAPQFIKRMRLLVWMDAMGLAIFSAVGTAKAYELGLSPLVCVAMGMITPTFGSMIRDILSDRQPELLQPEIYVTASIVGGVSFLLSMQVLTNPQLSILLAALSAFLVRSASIVYNLRLPKFTNK

SEQ ID NO: 83607 - DNA, 624 bp, Vibrio sp. Ex25
  CDS (1)..(624): transl_table=11
atgttgctaagtgtgttgtatatcattggtatcacggctgaagccatgacaggtgcgttgagtgctggtagaagaaaaatggactggtttggtgttatgttggtggccagtgcaacggccattggtggtggcaccgtacgtgacattttactgggacactaccctcttggttgggtaaaaaacccagagttcctagcaatcacgtgtattgcgggtgtacttaccacaggcttagcgaaatgggtgattaagctaaaaggtctattcatccgccttgatgcgttaggtctaatcgtattcagcatcatcggaactaagattgcgatgggcatgggcttacaccctgggatctgtatggtttcagcgctagtaacgggtgtattcggtgggctactccgcgacttaatctgtcgccaaacaccgttggtactgcatgaagaactttacgcttctgtcgctcttatcgcatcaggaatgtacttagcgctattagaatttaatgttcccgatgtaacagccactatcattacactgatcaccggttatatgctgcgtatggccgcggtacgttttaagtggcgtctcccttctttcaatttggaaacggaaggctcactccattaa

SEQ ID NO: 83608 - protein, 207 aa, Vibrio sp. Ex25
MLLSVLYIIGITAEAMTGALSAGRRKMDWFGVMLVASATAIGGGTVRDILLGHYPLGWVKNPEFLAITCIAGVLTTGLAKWVIKLKGLFIRLDALGLIVFSIIGTKIAMGMGLHPGICMVSALVTGVFGGLLRDLICRQTPLVLHEELYASVALIASGMYLALLEFNVPDVTATIITLITGYMLRMAAVRFKWRLPSFNLETEGSLH

SEQ ID NO: 83609 - DNA, 615 bp, Alteromonadales bacterium TW-7
  CDS (1)..(615): transl_table=11
atgacagaactgtatcactggtttgatttaatcggcattgctgtgtttgctatttcaggcacattagtggcctacgagaaaaaaatggatggtttcggggttgtagtattagcaacagtgaccgctattggtgggggaactgttcgcgatgtgattctagacgttcctgtattttggctacatgatcaaagctatttttttgctattttagctgctgtacttattacatctcggcttattaataagcaaaaatccattccgtattacacacttcaaatagcagacgcattcggtttggctttttttgctgtaatgggtactcaaaaagcactacttgcaggtatgccagaaatgacagcaatcataatgggagtcataacggcttgttttggaggcttaatacgtgatgtactcgcccgcgaaatccctatgctgttaaaaggagagctctacgccattacctgtattgcgggtggtattgtttatacacttagtgtgtatttttcatttgtgactgagctggcgatggtattggcaatgttgatgacattattcttacgtttttcagcaataaaatggaaaatcacattacacgtttttaaatatcctgactaa

SEQ ID NO: 83610 - protein, 204 aa, Alteromonadales bacterium TW-7
MTELYHWFDLIGIAVFAISGTLVAYEKKMDGFGVVVLATVTAIGGGTVRDVILDVPVFWLHDQSYFFAILAAVLITSRLINKQKSIPYYTLQIADAFGLAFFAVMGTQKALLAGMPEMTAIIMGVITACFGGLIRDVLAREIPMLLKGELYAITCIAGGIVYTLSVYFSFVTELAMVLAMLMTLFLRFSAIKWKITLHVFKYPD

SEQ ID NO: 83611 - DNA, 810 bp, Pseudomonas putida GB-1
  CDS (1)..(810): transl_table=11
atgtgcgtgacagcttcaagaagggcaatacccacctggcgctggacgatattcgcgagtcgatcgccgaactgcgtcactaccgcgagcacttcatcaagctgtgatccgaaacggcgcagatattgtgtctgcgcccccttttggtgccttgggcaactggttagactgcgcgcctttcctgcacggacccgcaccatgttgttgatgctctatctcgttgccatcaccgccgaagccatgactggcgcgctgtctgccgggcgtcgcggcatggactggttcggcgtggtgctgattgcctgcgtcaccgccctggggggcggctcggtgcgtgatgtgctgctcgggcactacccgctgacctgggtgaagcaccccgagtacctggtgttgaccagctttgcggcgctgctgactattttcattgcgccgatgatgcgccgcctgcgctcgctgtttctggtgctcgatgccctggggctggtggcgtttaccctgattggctgcatgacggcgctggaaatggggcagggcatgctggtggcgtccatcagcggggtgatcaccggggtgtttggcggcatcctgcgggatatcttctgcaacgacatcccgctggtgttccgtcgcgaactgtatgccagcgtgtcgttcgcggcggcgtggttctatctgggctgcgtgtatttcaaggtgccggcggagcaggcgatgctgctgaccttgtttggcggtttcctgctgcgcctgttggcgattcgcttccactgggaaatgcccaagttccactacaacgaccagcagtga

SEQ ID NO: 83612 - protein, 269 aa, Pseudomonas putida GB-1
MCVTASRRAIPTWRWTIFASRSPNCVTTASTSSSCDPKRRRYCVCAPFWCLGQLVRLRAFPARTRTMLLMLYLVAITAEAMTGALSAGRRGMDWFGVVLIACVTALGGGSVRDVLLGHYPLTWVKHPEYLVLTSFAALLTIFIAPMMRRLRSLFLVLDALGLVAFTLIGCMTALEMGQGMLVASISGVITGVFGGILRDIFCNDIPLVFRRELYASVSFAAAWFYLGCVYFKVPAEQAMLLTLFGGFLLRLLAIRFHWEMPKFHYNDQQ

SEQ ID NO: 83613 - DNA, 657 bp, Streptomyces coelicolor
  CDS (1)..(657): transl_table=11
atgagcaccgaacccgctccgctgctcgccctcgacctgaccggcacgttcgcgttcgggctgaacggggcgctgaccgcggtgcgggccgcgcggctggacgtggtcggggtggtggtgctcgggatgatcaccgcgttgggcggcggggtcatccgggacgtgctcatcgactcgctgccgcccgccgcattcctggactggcgttactacacgctcgccgccgccggtggcctgctcgccttcgccgtcagcaggcacctgcgccggctggaaccggcgatcaccgtgctcgacgcggtcggactgagcaccttcgcggtgatcggcgcgagcaaggcgctggacgccgggctggccgtcgtaccggcgatgctgctgggcgtgatcaccgcggtgggcggagggacgatccgcgacaccctggtcggccggatcccgacggtgctgcgcaccgggctgtacgccatccccgccctggcaggcgcggcggtgacggtcgcgaccaccgagaccggggtgtacggcctcccggccgcgctcggagcggcggcggtctgcttcctgatccgcatgctcggcctgcacttcggcatcaacgctccggagccgcccgagacgcgtccgtccggtggcggaacacggcgccagaagtag

SEQ ID NO: 83614 - protein, 218 aa, Streptomyces coelicolor
MSTEPAPLLALDLTGTFAFGLNGALTAVRAARLDVVGVVVLGMITALGGGVIRDVLIDSLPPAAFLDWRYYTLAAAGGLLAFAVSRHLRRLEPAITVLDAVGLSTFAVIGASKALDAGLAVVPAMLLGVITAVGGGTIRDTLVGRIPTVLRTGLYAIPALAGAAVTVATTETGVYGLPAALGAAAVCFLIRMLGLHFGINAPEPPETRPSGGGTRRQK

SEQ ID NO: 83615 - DNA, 633 bp, Campylobacter jejuni
  CDS (1)..(633): transl_table=11
atggagataaatgctcttacgataaccactctttatatcataggtatttccgcagaaggaatgacaggagctttagctgcaggacgccacaaaatggatctttttggagttatttttattgctctcgtaacagcaattggaggcggaagcatacgagatgtgcttttaggacattatcctttaacttgggttaaacatcctgaatatattattttaatctgtttttgcgcccttgtagccacaaaaattccgcgcgtagtaaccaaacttgaaactttatttctaactcttgatgctataggacttgttgtttttagcatacttggagctcaaatagctatagatcaaaaccatggctttatcatagccgttgctgccgctgtaattaccggtgtttttggtggaattttaagagatattttatgtatgagaatccccttggtgtttcaaaaagaaatttatgcaggaattgccataattgcaggagcaatctattattctctaataatttggcttgagcttaatgccctagtttgcacacttttaactctttttataggagtttttgcaaggcttttagctatcaaatatcaatggtctttacctattttttcttacaatgaagaaaaataa

SEQ ID NO: 83616 - protein, 210 aa, Campylobacter jejuni
MEINALTITTLYIIGISAEGMTGALAAGRHKMDLFGVIFIALVTAIGGGSIRDVLLGHYPLTWVKHPEYIILICFCALVATKIPRVVTKLETLFLTLDAIGLVVFSILGAQIAIDQNHGFIIAVAAAVITGVFGGILRDILCMRIPLVFQKEIYAGIAIIAGAIYYSLIIWLELNALVCTLLTLFIGVFARLLAIKYQWSLPIFSYNEEK

SEQ ID NO: 83617 - DNA, 633 bp, Aeromonas punctata
  CDS (1)..(633): transl_table=11
atgcagacactggttgagcagattgtttacatcagcgacatgtttggtactgcggtattcgcgttttcgggcgtactggtggccggccgtctcaggatggacggtttcggtgtcatggtgctggcggcagtcaccgccatcgggggtggcaccatccgcgacatgatcctgggggccacccccgtcttctgggtgcgcgaccccctctatatctgggtggtcattgccacggcgctcatcggcatgtggatggtcaaactgccccgccgcatgccctggtatgtgctgccggtggcggacgccttcgggttggcgctctttaccgtgatcggggcacaaaaagccctcaactttggtacatcggggcttatcgccgtattgatgggcaccatgacgggggttgcgggcggcatgatccgtgacgtgctggcccgggaagtgcccatggtgctgcaaaaggagatctacgccaccgcctgcattctgggcggcatcctctataccttgtcgctggaggtcggggtagacagggtcagcgccatgctcatcagcatgctcggggtgtttggtctgcgagtggcggccatctactggcacctctccctgcccaccttctcgctgcagcgcaactga

SEQ ID NO: 83618 - protein, 210 aa, Aeromonas punctata
MQTLVEQIVYISDMFGTAVFAFSGVLVAGRLRMDGFGVMVLAAVTAIGGGTIRDMILGATPVFWVRDPLYIWVVIATALIGMWMVKLPRRMPWYVLPVADAFGLALFTVIGAQKALNFGTSGLIAVLMGTMTGVAGGMIRDVLAREVPMVLQKEIYATACILGGILYTLSLEVGVDRVSAMLISMLGVFGLRVAAIYWHLSLPTFSLQRN

SEQ ID NO: 83619 - DNA, 624 bp, Escherichia coli O6
  CDS (1)..(624): transl_table=11
atgctcgtctattggctggatatagtcggcacagcggtatttgccatctccggcgttttgttagccggaaaattgcgtatggacccttttggtgttctggtactgggcgtggtaaccgcagtaggcggcgggacaattcgcgacatggcgctggatcacggcccggtattttgggtgaaagatcccaccgatctggtcgttgcaatggtcaccagcatgctgaccatcgtgctggtgcgccagccaagacgcttaccaaaatggatgttgccggtgctggacgccgttggtctggcggtgtttgtcggcattggcgtgaataaagcctttaatgcggaagccggtccgttaatcgcggtttgtatgggcgtcattactggcgttggcggcgggatcattcgtgatgttctggcccgcgaaatccccatgattttacgtacagaaatctacgcaactgcctgtattatcggcggtattgtccacgctacggcttattacacattttccgtaccactggaaacagccagtatgatgggcatggtcgtgacgctattgattcggctggcggctattcgttggcatcttaagctaccgacgtttgcgctggatgagaatgggcgttga

SEQ ID NO: 83620 - protein, 207 aa, Escherichia coli O6
MLVYWLDIVGTAVFAISGVLLAGKLRMDPFGVLVLGVVTAVGGGTIRDMALDHGPVFWVKDPTDLVVAMVTSMLTIVLVRQPRRLPKWMLPVLDAVGLAVFVGIGVNKAFNAEAGPLIAVCMGVITGVGGGIIRDVLAREIPMILRTEIYATACIIGGIVHATAYYTFSVPLETASMMGMVVTLLIRLAAIRWHLKLPTFALDENGR

SEQ ID NO: 83621 - DNA, 618 bp, Escherichia coli O6
  CDS (1)..(618): transl_table=11
atgctgttacacattttgtatttggttggcattactgccgaagccatgacgggggctctggcggccgggcgacgccgcatggatacatttggcgtaattattattgcgaccgccaccgcaattggcggagggtcagtgcgcgatattctgctgggccactatccgctcggctgggtcaaacacccggaatatgtgattatcgtcgctaccgccgcagtactcaccactatcgttgctcctgtaatgccttacctgcgcaaagtgtttctggtgctcgatgcgcttggactggtggtcttttctatcatcggcgcacaggttgcactggatatggggcacggcccaattattgccgttgtcgcggcggtaaccaccggcgtgtttggcggcgttttgcgcgatatgttctgtaaacgtatcccactggtattccagaaagagttgtatgccggtgtctcatttgcctccgccgtgctgtacatcgcgctgcaacactatgtttctaaccatgatgtggtaattatctccaccctggtattcggcttttttgcccgcttactggcgctacgccttaagctgggattaccggtcttttactacagccacgaaggacactaa

SEQ ID NO: 83622 - protein, 205 aa, Escherichia coli O6
MLLHILYLVGITAEAMTGALAAGRRRMDTFGVIIIATATAIGGGSVRDILLGHYPLGWVKHPEYVIIVATAAVLTTIVAPVMPYLRKVFLVLDALGLVVFSIIGAQVALDMGHGPIIAVVAAVTTGVFGGVLRDMFCKRIPLVFQKELYAGVSFASAVLYIALQHYVSNHDVVIISTLVFGFFARLLALRLKLGLPVFYYSHEGH

SEQ ID NO: 83623 - DNA, 24 bp, Artificial sequence
  primer
atgacaatgcgcacaaatcgctac

SEQ ID NO: 83624 - DNA, 23 bp, Artificial sequence
  primer
ttagtgtccttcgtggctgtagt

SEQ ID NO: 83625 - protein, 207 aa, Artificial sequence
  consensus sequence
  Variant (2)..(3): Xaa in position 2 to 3 is any amino acid
  Variant (5)..(5): Xaa in position 5 is any amino acid
  Variant (7)..(7): Xaa in position 7 is any amino acid
  Variant (9)..(13): Xaa in position 9 to 13 is any amino acid
  Variant (14)..(14): Xaa in position 14 is any or no amino acid
  Variant (16)..(17): Xaa in position 16 to 17 is any amino acid
  Variant (19)..(25): Xaa in position 19 to 25 is any amino acid
  Variant (28)..(28): Xaa in position 28 is any amino acid
  Variant (32)..(33): Xaa in position 32 to 33 is any amino acid
  Variant (36)..(37): Xaa in position 36 to 37 is any amino acid
  Variant (39)..(40): Xaa in position 39 to 40 is any amino acid
  Variant (41)..(41): Xaa in position 41 is any or no amino acid
  Variant (43)..(44): Xaa in position 43 to 44 is any amino acid
  Variant (46)..(50): Xaa in position 46 to 50 is any amino acid
  Variant (51)..(52): Xaa in position 51 to 52 is any or no amino acid
  Variant (54)..(80): Xaa in position 54 to 80 is any amino acid
  Variant (81)..(85): Xaa in position 81 to 85 is any or no amino acid
  Variant (88)..(88): Xaa in position 88 is any amino acid
  Variant (91)..(92): Xaa in position 91 to 92 is any amino acid
  Variant (94)..(96): Xaa in position 94 to 96 is any amino acid
  Variant (98)..(100): Xaa in position 98 to 100 is any amino acid
  Variant (102)..(117): Xaa in position 102 to 117 is any amino acid
  Variant (118)..(126): Xaa in position 118 to 126 is any or no amino acid
  Variant (129)..(130): Xaa in position 129 to 130 is any amino acid
  Variant (133)..(134): Xaa in position 133 to 134 is any amino acid
  Variant (137)..(142): Xaa in position 137 to 142 is any amino acid
  Variant (144)..(148): Xaa in position 144 to 148 is any amino acid
  Variant (149)..(150): Xaa in position 149 to 150 is any or no amino acid
  Variant (152)..(152): Xaa in position 152 is any amino acid
  Variant (155)..(185): Xaa in position 155 to 185 is any amino acid
  Variant (186)..(195): Xaa in position 186 to 195 is any or no amino acid
  Variant (197)..(198): Xaa in position 197 to 198 is any amino acid
  Variant (200)..(206): Xaa in position 200 to 206 is any amino acid
AXXGXLXAXXXXXXDXXGXXXXXXXTAXGGGXXRDXXLXXXPXXWXXXXXXXYXXXXXXXXXXXXXXXXXXXXXXXXXXXXXXXXDAXGLXXFXXXGXXXAXXXXXXXXXXXXXXXXXXXXXXXXXTGXXGGXXRDXXXXXXPXXXXXXXEXYAXXXXXXXXXXXXXXXXXXXXXXXXXXXXXXXXXXXXXXXXXRXXAXXXXXXXP

SEQ ID NO: 83626 - protein, 22 aa, Artificial sequence
  protein pattern
  Variant (2)..(2): Xaa in position 2 is any or no amino acid
  Variant (4)..(5): Xaa in position 4 to 5 is any amino acid
  Variant (8)..(13): Xaa in position 8 to 13 is any amino acid
  Variant (15)..(15): Xaa in position 15 is any amino acid
  Variant (16)..(16): Xaa in position 16 is Ala, Ile, Leu or Val
  Variant (17)..(17): Xaa in position 17 is Phe, Ile or Leu
  Variant (18)..(19): Xaa in position 18 to 19 is any amino acid
  Variant (20)..(20): Xaa in position 20 is Asp, Glu, Gly or Asn
  Variant (21)..(21): Xaa in position 21 is Phe, Ile, Leu or Val
GXGXXRDXXXXXXPXXXXXXXY

SEQ ID NO: 83627 - protein, 29 aa, Artificial sequence
  protein pattern
  Variant (2)..(2): Xaa in position 2 is any amino acid
  Variant (3)..(3): Xaa in position 3 is Phe, Ile or Val
  Variant (5)..(7): Xaa in position 5 to 7 is any amino acid
  Variant (8)..(8): Xaa in position 8 is Phe, Ile, Leu or Val
  Variant (9)..(9): Xaa in position 9 is Ala, Gly or Ser
  Variant (10)..(11): Xaa in position 10 to 11 is any amino acid
  Variant (12)..(12): Xaa in position 12 is Pro or Thr
  Variant (13)..(13): Xaa in position 13 is Ala, Gly or Ser
  Variant (14)..(14): Xaa in position 14 is any amino acid
  Variant (18)..(18): Xaa in position 18 is any amino acid
  Variant (19)..(19): Xaa in position 19 is Phe, Ile, Leu, Met or Val
  Variant (22)..(22): Xaa in position 22 is any amino acid
  Variant (23)..(23): Xaa in position 23 is any or no amino acid
  Variant (25)..(26): Xaa in position 25 to 26 is any amino acid
  Variant (27)..(28): Xaa in position 27 to 28 is any or no amino acid
DXXGXXXXXXXXXXGGGXXRDXXLXXXXP

SEQ ID NO: 83628 - protein, 16 aa, Artificial sequence
  protein pattern
  Variant (2)..(2): Xaa in position 2 is any amino acid
  Variant (3)..(3): Xaa in position 3 is any or no amino acid
  Variant (6)..(6): Xaa in position 6 is Ala, Gly, Ile or Val
  Variant (7)..(7): Xaa in position 7 is Ala, Ile, Leu or Val
  Variant (8)..(8): Xaa in position 8 is Phe or Tyr
  Variant (9)..(9): Xaa in position 9 is Ala, Cys, Ser, Thr or Val
  Variant (10)..(11): Xaa in position 10 to 11 is any amino acid
  Variant (12)..(12): Xaa in position 12 is Gly or Ser
  Variant (13)..(13): Xaa in position 13 is Ala, Cys, Gly, Ser, Thr or Val
  Variant (14)..(15): Xaa in position 14 to 15 is any amino acid
  Variant (16)..(16): Xaa in position 16 is Ala, Gly, Ser or Thr
DXXGLXXXXXXXXXXX

SEQ ID NO: 83629 - DNA, 291 bp, Escherichia coli
  CDS (1)..(291): transl_table=11
atgcaaaacacaactcatgacaacgtaattctggagctcaccgttcgcaaccatccgggcgtaatgacccacgtttgtggcctttttgcccgccgcgcttttaacgttgaaggcattctttgtctgccgattcaggacagcgacaaaagccatatctggctactggtcaatgacgaccagcgtctggagcagatgataagccaaatcgataagctggaagatgtcgtgaaagtgcagcgtaatcagtccgatccgacgatgtttaacaagatcgcggtgttttttcagtaa

SEQ ID NO: 83630 - protein, 96 aa, Escherichia coli
MQNTTHDNVILELTVRNHPGVMTHVCGLFARRAFNVEGILCLPIQDSDKSHIWLLVNDDQRLEQMISQIDKLEDVVKVQRNQSDPTMFNKIAVFFQ

SEQ ID NO: 83631 - DNA, 303 bp, Yersinia pestis CO92
  CDS (1)..(303): transl_table=11
atgataaatcaaccaatacccactcgggtcactctgctcctgacggtgcgtaaccatccaggtgtgatgtcacatatctgtggcttatttgcccgccgcgcttttaacgttgaaggtattctgtgtatgccgctgccaagtggtgaagagagccgtatttggctgcaggttttggatgatcaacgcctgctacagatgataagccagctagagaaactggtggatgtgcttcaagtgcgccgtttcgggccagaaatgccgatttttgatcaagtagaagacttggttgccaatcaaaggtga

SEQ ID NO: 83632 - protein, 100 aa, Yersinia pestis CO92
MINQPIPTRVTLLLTVRNHPGVMSHICGLFARRAFNVEGILCMPLPSGEESRIWLQVLDDQRLLQMISQLEKLVDVLQVRRFGPEMPIFDQVEDLVANQR

SEQ ID NO: 83633 - DNA, 318 bp, Yersinia pestis KIM
  CDS (1)..(318): transl_table=11
ttggaggggaatagtatgataaatcaaccaatacccactcgggtcactctgctcctgacggtgcgtaaccatccaggtgtgatgtcacatatctgtggcttatttgcccgccgcgcttttaacgttgaaggtattctgtgtatgccgctgccaagtggtgaagagagccgtatttggctgcaggttttggatgatcaacgcctgctacagatgataagccagctagagaaactggtggatgtgcttcaagtgcgccgtttcgggccagaaatgccgatttttgatcaagtagaagacttggttgccaatcaaaggtga

SEQ ID NO: 83634 - protein, 105 aa, Yersinia pestis KIM
MEGNSMINQPIPTRVTLLLTVRNHPGVMSHICGLFARRAFNVEGILCMPLPSGEESRIWLQVLDDQRLLQMISQLEKLVDVLQVRRFGPEMPIFDQVEDLVANQR

SEQ ID NO: 83635 - DNA, 291 bp, Shigella flexneri 2a str. 301
  CDS (1)..(291): transl_table=11
atgcaaaacacaactcataacaacgtaattctggagctcaccgttcgcaaccatccgggcgtaatgacccacgtttgtggcctttttgcccgccgcgcttttaacgttgaaggcattctttgtctgccgattcaggacagcgacaaaagccatatctggctactggtcaatgacgaccagcgtctggagcagatgataagccaaatcgctaagctggaagatgtcgtgaaagtgcagcgtaatcagtccgatccgacgatgtttaacaagatcgcggtgttttttcagtaa

SEQ ID NO: 83636 - protein, 96 aa, Shigella flexneri 2a str. 301
MQNTTHNNVILELTVRNHPGVMTHVCGLFARRAFNVEGILCLPIQDSDKSHIWLLVNDDQRLEQMISQIAKLEDVVKVQRNQSDPTMFNKIAVFFQ

SEQ ID NO: 83637 - DNA, 363 bp, Yersinia pestis biovar Microtus str. 91001
  CDS (1)..(363): transl_table=11
ttggaggggaatagtatgataaatcaacaaaaacccactcagcaagcatctgctcaacatgaatccgctcaaccaatacccactcgggtcactctgctcctgacggtgcgtaaccatccaggtgtgatgtcacatatctgtggcttatttgcccgccgcgcttttaacgttgaaggtattctgtgtatgccgctgccaagtggtgaagagagccgtatttggctgcaggttttggatgatcaacgcctgctacagatgataagccagctagagaaactggtggatgtgcttcaagtgcgccgtttcgggccagaaatgccgatttttgatcaagtagaagacttggttgccaatcaaaggtga

SEQ ID NO: 83638 - protein, 120 aa, Yersinia pestis biovar Microtus str. 91001
MEGNSMINQQKPTQQASAQHESAQPIPTRVTLLLTVRNHPGVMSHICGLFARRAFNVEGILCMPLPSGEESRIWLQVLDDQRLLQMISQLEKLVDVLQVRRFGPEMPIFDQVEDLVANQR

SEQ ID NO: 83639 - DNA, 324 bp, Desulfovibrio vulgaris subsp. vulgaris str. Hildenborough
  CDS (1)..(324): transl_table=11
atgaacggagccgcacccgccgcagggggcctcatcgccctgcggctcacggtgaacaatcaccccggcgtcatgacgcacatatgcggtctcttcgcgcgccgtgccttcaacgtcgagggcatcctgtgcatgcccgtcggcgaggggacgagccgcatctggctgctggtgaacgaggacgagcgcctcgaacagatgatccgtcaggtgcgcaagcttcaggacgtgctggaagtgctgcccttcccggcggacatgagcgcgttcacccgccttgaggacagcatgaaggtatgggagagcggcggctgccgcctgtga

SEQ ID NO: 83640 - protein, 107 aa, Desulfovibrio vulgaris subsp. vulgaris str. Hildenborough
MNGAAPAAGGLIALRLTVNNHPGVMTHICGLFARRAFNVEGILCMPVGEGTSRIWLLVNEDERLEQMIRQVRKLQDVLEVLPFPADMSAFTRLEDSMKVWESGGCRL

SEQ ID NO: 83641 - DNA, 294 bp, Erwinia carotovora subsp. atroseptica SCRI1043
  CDS (1)..(294): transl_table=11
atgcaaactcaaccaacgtcaaatcaggtcacgctagaactctctgtacgcaaccaccccggcgtgatgtcacacgtttgcggcctgtttgcccgccgggcatttaacgtagaaggcattctctgtatgccgctggcaaatggtgaagaaagccgaatctggctactcgtcaaagatgaccagcgactacagcagatgatcagtcaggtggagaaactggaagacgtccttcaggtacgtcgtcacggggaagaaatgcgtattttcgagcaggtcgcagagttttactgctag

SEQ ID NO: 83642 - protein, 97 aa, Erwinia carotovora subsp. atroseptica SCRI1043
MQTQPTSNQVTLELSVRNHPGVMSHVCGLFARRAFNVEGILCMPLANGEESRIWLLVKDDQRLQQMISQVEKLEDVLQVRRHGEEMRIFEQVAEFYC

SEQ ID NO: 83643 - DNA, 348 bp, Yersinia pseudotuberculosis IP 32953
  CDS (1)..(348): transl_table=11
atgataaatcaacaaaaacccactcagcaagcatctgctcaacatgaatcagctcaaccaatacccactcgggtcactctgctcctgacggtgcgtaaccatccaggtgtgatgtcacatatctgtggcttatttgcccgccgcgcttttaacgttgaaggtattctgtgtatgccgctgccaagtggtgaagagagccgtatttggctgcaggttttggatgatcaacgcctgctacagatgataagccagctagagaaactggtggatgtgcttcaagtgcgccgtttcgggccagaaatgccgatttttgatcaagtagaagacttggttgccaatcaaaggtga

SEQ ID NO: 83644 - protein, 115 aa, Yersinia pseudotuberculosis IP 32953
MINQQKPTQQASAQHESAQPIPTRVTLLLTVRNHPGVMSHICGLFARRAFNVEGILCMPLPSGEESRIWLQVLDDQRLLQMISQLEKLVDVLQVRRFGPEMPIFDQVEDLVANQR

SEQ ID NO: 83645 - DNA, 315 bp, Azoarcus sp. EbN1
  CDS (1)..(315): transl_table=11
atgatcgaacaagttgccgaacccttgcagcaatccggcttcgccaaagtcgtgctggaactcgaagtcaacaatcaccccggcgtgatgagtcacatctgcaatctgttcgcccgtcgtgcgttcaacgtcgaaggcatcttgtgcatgccgctgtccgatccgcgccgcagccgcatctggctgctggtgttcgaggaccagcggctggagcagatggtgctgcaggtggagaagctcgtcgacgtattgtcggtgcgccggcacggggcggagcatgaagtattcgaacggctggagaaatttttctactga

SEQ ID NO: 83646 - protein, 104 aa, Azoarcus sp. EbN1
MIEQVAEPLQQSGFAKVVLELEVNNHPGVMSHICNLFARRAFNVEGILCMPLSDPRRSRIWLLVFEDQRLEQMVLQVEKLVDVLSVRRHGAEHEVFERLEKFFY

SEQ ID NO: 83647 - DNA, 312 bp, Dechloromonas aromatica RCB
  CDS (1)..(312): transl_table=11
atgaacgccataacgaaaaatgaaaacgatgcccttgcccgggcagtgctggaaatcaacgtcaataaccacccgggcgtgatgtcacacgtcgtcggcctcttttcccggcgcgcctacaacgtcgagggcatcctctgcctgccggtcggtgacggtagccagagccgcatctggctaatgctgatcgaagaccatcgcctgccgcagatgatcaagcaggtggaaaagctcgaagatgtgatcgccatatgccggcacaacgcagaccatgcagtgttccaggatctggagagcttcttccggccctga

SEQ ID NO: 83648 - protein, 103 aa, Dechloromonas aromatica RCB
MNAITKNENDALARAVLEINVNNHPGVMSHVVGLFSRRAYNVEGILCLPVGDGSQSRIWLMLIEDHRLPQMIKQVEKLEDVIAICRHNADHAVFQDLESFFRP

SEQ ID NO: 83649 - DNA, 366 bp, Desulfovibrio desulfuricans G20
  CDS (1)..(366): transl_table=11
atgaccgtacagaagcagcagcctgacagcgccgcggggcttattgccctgcgccttaccgtgcgtaaccaccccggtgtcatgtcgcatgtgtgcggtctttttgcccgccgcgcgttcaacgtggaaggcattctgtgcacgccggtggacgatggttccataagccgcatatggctgctggtacacgatgatgcccgtctggagcagatgatcaggcaggcggccaaactgcaggacgtgagcgaagtgcgtccttttccggctgacggagctgcttttgcccgtctggaatcctgtgttgccgcgtgggaaaccggtgatgcggtgtatgagcggcctgcggtttctgcaccggtttcgtga

SEQ ID NO: 83650 - protein, 121 aa, Desulfovibrio desulfuricans G20
MTVQKQQPDSAAGLIALRLTVRNHPGVMSHVCGLFARRAFNVEGILCTPVDDGSISRIWLLVHDDARLEQMIRQAAKLQDVSEVRPFPADGAAFARLESCVAAWETGDAVYERPAVSAPVS

SEQ ID NO: 83651 - DNA, 315 bp, Azoarcus sp. BH72
  CDS (1)..(315): transl_table=11
atgatcgaacaggttgccgacccgctgccgcaagcgggctttgccaaggttgtgctcgaactggaggtgcgcaaccaccccggcgtgatgagccatatctgcaatctcttcgcgcgacgggcattcaacgtcgagggcatcctgtgcatgcctgtgtcggacggcaagaagagccggatctggctgctggtgttcgaggatcagcgcctcgagcagatgctgcgccagctcgagaagctcgaggacgtccttgccgtgcgccggcacggcgcagagcacgaagtcttcgagcggctggaggacttcttccactaa

SEQ ID NO: 83652 - protein, 104 aa, Azoarcus sp. BH72
MIEQVADPLPQAGFAKVVLELEVRNHPGVMSHICNLFARRAFNVEGILCMPVSDGKKSRIWLLVFEDQRLEQMLRQLEKLEDVLAVRRHGAEHEVFERLEDFFH

SEQ ID NO: 83653 - DNA, 22 bp, Artificial sequence
  primer
atgcaaaacacaactcatgaca

SEQ ID NO: 83654 - DNA, 23 bp, Artificial sequence
  primer
ttactgaaaaaacaccgcgatct

SEQ ID NO: 83655 - protein, 104 aa, Artificial sequence
  consensus sequence
  Variant (2)..(10): Xaa in position 2 to 10 is any amino acid
  Variant (11)..(26): Xaa in position 11 to 26 is any or no amino acid
  Variant (28)..(28): Xaa in position 28 is any amino acid
  Variant (30)..(30): Xaa in position 30 is any amino acid
  Variant (32)..(32): Xaa in position 32 is any amino acid
  Variant (39)..(39): Xaa in position 39 is any amino acid
  Variant (41)..(41): Xaa in position 41 is any amino acid
  Variant (58)..(58): Xaa in position 58 is any amino acid
  Variant (60)..(64): Xaa in position 60 to 64 is any amino acid
  Variant (65)..(65): Xaa in position 65 is any or no amino acid
  Variant (71)..(71): Xaa in position 71 is any amino acid
  Variant (73)..(74): Xaa in position 73 to 74 is any amino acid
  Variant (76)..(76): Xaa in position 76 is any amino acid
  Variant (79)..(79): Xaa in position 79 is any amino acid
  Variant (83)..(83): Xaa in position 83 is any amino acid
  Variant (85)..(86): Xaa in position 85 to 86 is any amino acid
  Variant (89)..(89): Xaa in position 89 is any amino acid
  Variant (92)..(93): Xaa in position 92 to 93 is any amino acid
  Variant (95)..(95): Xaa in position 95 is any amino acid
  Variant (97)..(103): Xaa in position 97 to 103 is any amino acid
MXXXXXXXXXXXXXXXXXXXXXXXXXLXLXVXNHPGVMXHXCGLFARRAFNVEGILCXPXXXXXXSRIWLXVXXDXRLXQMIXQXXKLXDVXXVXRXXXXXXXF

SEQ ID NO: 83656 - protein, 35 aa, Artificial sequence
  protein pattern
  Variant (2)..(2): Xaa in position 2 is Glu or Thr
  Variant (4)..(4): Xaa in position 4 is Asn or Arg
  Variant (11)..(11): Xaa in position 11 is Ser or Thr
  Variant (13)..(13): Xaa in position 13 is Ile or Val
  Variant (15)..(15): Xaa in position 15 is Gly or Asn
  Variant (30)..(30): Xaa in position 30 is any amino acid
  Variant (32)..(32): Xaa in position 32 is Ile, Leu or Val
  Variant (33)..(33): Xaa in position 33 is any amino acid
  Variant (34)..(34): Xaa in position 34 is Asp, Glu or Ser
  Variant (35)..(35): Xaa in position 35 is Gly, Pro or Ser
LXVXNHPGVMXHXCXLFARRAFNVEGILCXPXXXX

SEQ ID NO: 83657 - DNA, 993 bp, Escherichia coli
  CDS (1)..(993): transl_table=11
atgaaaaccgcttacattgccaaacaacgtcaaattagcttcgtgaaatctcacttttctcgtcaactggaagaacgtctggggctgatcgaagtccaggcgccgattcttagccgtgtgggggatggcacgcaggataacttgtcgggctgtgaaaaagcggtgcaggtaaaagtgaaagctctgcctgatgcccagttcgaagtggttcattcactggcgaagtggaaacgtcagaccttagggcaacacgacttcagcgcgggcgaagggctgtacacgcacatgaaagcccttcgccccgatgaagaccgtctttctccgttgcactcggtctatgttgaccagtgggactgggaacgcgtaatgggcgacggtgagcgtcaattctcgactctgaaaagcacggtagaggcgatctgggcgggaattaaagcaaccgaagctgcggttagcgaagagtttggcctggcaccgttcctgccggatcagatccacttcgtacacagccaggagttactgtctcgttatccggatcttgatgccaaagggcgtgagcgggcgatagcgaaagatcttggcgcggtattccttgtcgggattggcggcaagctgagcgatggtcatcgccacgacgtgcgcgcaccggattatgatgactggagcaccccgtcagagctgggccatgcgggtctgaacggcgatattctggtgtggaacccggtactggaagatgcgtttgagctttcctccatggggatccgtgtagatgccgacacgctgaagcatcaactggcgctgaccggtgacgaagatcgcctggagctggagtggcatcaggcgctgctgcgcggtgaaatgccgcagaccatcggcggcggtatcggccagtctcgtttgactatgctgctgctgcaactgccgcatatcggccaggttcagtgtggagtatggccagctgctgttcgcgagagcgtcccttctctgctgtaa

SEQ ID NO: 83658 - protein, 330 aa, Escherichia coli
MKTAYIAKQRQISFVKSHFSRQLEERLGLIEVQAPILSRVGDGTQDNLSGCEKAVQVKVKALPDAQFEVVHSLAKWKRQTLGQHDFSAGEGLYTHMKALRPDEDRLSPLHSVYVDQWDWERVMGDGERQFSTLKSTVEAIWAGIKATEAAVSEEFGLAPFLPDQIHFVHSQELLSRYPDLDAKGRERAIAKDLGAVFLVGIGGKLSDGHRHDVRAPDYDDWSTPSELGHAGLNGDILVWNPVLEDAFELSSMGIRVDADTLKHQLALTGDEDRLELEWHQALLRGEMPQTIGGGIGQSRLTMLLLQLPHIGQVQCGVWPAAVRESVPSLL

SEQ ID NO: 83659 - DNA, 999 bp, Streptococcus pneumoniae R6
  CDS (1)..(999): transl_table=11
ttgtctatgaagaaaagttttatccatcaacaagaagaaatttcctttgtcaaaaacacttttacccagtatttgaaagataagctagaagttgtcgaagttcaaggtcctatcttgagtaaggtcggtgacggaatgcaggacaacctgtctggtgtggaaaatccagtatcggtcaaggttctccaaatccctgatgctacttatgaagtggtgcactcacttgctaaatggaaacgccacaccttggctcgttttggctttggtgaaggagagggtctctttgtccacatgaaagcccttcgtccagatgaggattccttggatgcaacccactctgtttatgttgaccagtgggactgggagaaggttatcccaaatggtaagcgtaacatcgtttatctaaaagaaacagttgagaagatttataaggctattcgcctgactgagctagctgttgaagctcgctatgacatcgagtctatcttgccaaaacaaatcacctttatccatacagaagaattggtagaacgctatccagacttgacatcgaaagaacgtgaaaatgcgatttgtaaagaatttggagccgtctttttgattggtatcggtggcgagttgccagatggtaaaccgcacgatggacgtgcaccagactatgatgactggacaagcgagtctgagaatggctacaagggtctaaatggtgatattcttgtctggaatgagtctttaggtggagcctttgagttgtcttctatgggaattcgtgtagatgaagaaactcttagacgtcaggtggaaattacaggtgatgaagaccgcttggaattggaatggcacaagtctttgttgaatggcctattcccattgacaatcggtggaggaattggacaatctcgtatggccatgttcctacttcgcaagagacacatcggagaagtgcaaacaagtgtttggcctcaagaagtacgcgatacttacgaaaatattttgtag

SEQ ID NO: 83660 - protein, 332 aa, Streptococcus pneumoniae R6
MSMKKSFIHQQEEISFVKNTFTQYLKDKLEVVEVQGPILSKVGDGMQDNLSGVENPVSVKVLQIPDATYEVVHSLAKWKRHTLARFGFGEGEGLFVHMKALRPDEDSLDATHSVYVDQWDWEKVIPNGKRNIVYLKETVEKIYKAIRLTELAVEARYDIESILPKQITFIHTEELVERYPDLTSKERENAICKEFGAVFLIGIGGELPDGKPHDGRAPDYDDWTSESENGYKGLNGDILVWNESLGGAFELSSMGIRVDEETLRRQVEITGDEDRLELEWHKSLLNGLFPLTIGGGIGQSRMAMFLLRKRHIGEVQTSVWPQEVRDTYENIL

SEQ ID NO: 83661 - DNA, 981 bp, Mycoplasma mycoides subsp. mycoides SC str. PG1
  CDS (1)..(981): transl_table=4
atgtataaatctaaactaagtattaaacaaactcaacaagctattcaagatattaaatttggtttaactaagcaattaaaacaaaatttaaacttaacaagagtttcagctccactttttgtaacttcagaatctaaaattaatgatggattaaatggtgatattccagttgtatttactcctaatcaatgaaaagaagacttagaaatagttcactcacttgctaaatgaaaacgttatgcactagataaatataattttaattttggtgaaggtatttgagcagatatgaatgctattagaaaagatgatgttgttgattataaacactcattatatgttgatcaatgagattgagaattgattataagtaaagaacaaagaaatcttgagtttttaaaacaaattgctactaaaatttatgactcaattagatatgttgaacacaaaatcaattttaaatatcctgatttagtagataagttaccaaaacaattaacatttattgattctttagatttatataataaatatcctaatttaacagctgaacaaagagaagatgaagttgcaagagaatataaagccgtattcatttataaaattggttatgatttaccagataaaaaacctcattcaaaaagagcatttgattatgatgattgaaatctaaatggtgatttaattttttatgatttagttaatgataaagctttagaaattagttctatgggtattagagttgatgctaaaagtttaagtgaacaaactaaaatattaaataaaacagattctgatttaggtttatatcacgatcaagtacttaatgataaattgcctttaactattggtggaggaattggacaaagtcgattaagtatgtttttattagaaaaagctcatattggtgaagtacaagttagtgtgtgagaaaaacaatataaagaagatttaaaaaaacaaggaatagttttattgtaa

SEQ ID NO: 83662 - protein, 326 aa, Mycoplasma mycoides subsp. mycoides SC str. PG1
MYKSKLSIKQTQQAIQDIKFGLTKQLKQNLNLTRVSAPLFVTSESKINDGLNGDIPVVFTPNQWKEDLEIVHSLAKWKRYALDKYNFNFGEGIWADMNAIRKDDVVDYKHSLYVDQWDWELIISKEQRNLEFLKQIATKIYDSIRYVEHKINFKYPDLVDKLPKQLTFIDSLDLYNKYPNLTAEQREDEVAREYKAVFIYKIGYDLPDKKPHSKRAFDYDDWNLNGDLIFYDLVNDKALEISSMGIRVDAKSLSEQTKILNKTDSDLGLYHDQVLNDKLPLTIGGGIGQSRLSMFLLEKAHIGEVQVSVWEKQYKEDLKKQGIVLL

SEQ ID NO: 83663 - DNA, 1023 bp, Clostridium thermocellum ATCC 27405
  CDS (1)..(1023): transl_table=11
gtggttgagaagatagacaggcttataattccgccggattaccatccgactttgtcggttagagagacggaagcggcaattaaaaaaataaaggacttttttgagacggcactggcagcggagttgaacttaagcagggtttctgcgcctctttttgtaagacctgagacaggcatgaatgataacctcaacggagtggaaagaccggtatcttttgatgtaaaggctatcggcggaaatacagtggagattgtgcattcccttgcaaaatggaagcgtatggctttggcaaaatacggatttaaagtgggagaagggctttataccgacatgaatgccataagaagggacgaggatttggacaaccttcattccatatatgtggaccaatgggactgggaattggtgattaataaagaagacagaaatgaagagactttgaaaaatatagtgaaaaaaatatataatgttcttaaaaagaccgaagactttattgctgaacaatatcctcaaataccaaaatttttgccggaagatatattctttattacgacccaggagctggaggacatgtatcccgagctttctccgaaggagagagaggatgcaattgcaaaggagaaaaaagcgatatttctcatgaaaataggaggtgttctcaaatcagggaagaaacatgacggaagggcaccggattacgatgactggacgttgaacggggacataattttgtggtatcctttgctggaaaggtcttttgagatatcttccatgggaataagagtggatgaaaattcattgctaagtcagctgaaagaagccggttgcgaggaaagaaaagaaatgaaattccacaaagatttgcttcaaggaaagctcccttacaccattggagggggtatcggacagtcgaggatttgcatgtattttctgaagaaggctcatataggagaggttcaatcttcggtatggccggattcaatgattgaaatttgcgaaaatgcaaatattaatttattatag

SEQ ID NO: 83664 - protein, 340 aa, Clostridium thermocellum ATCC 27405
MVEKIDRLIIPPDYHPTLSVRETEAAIKKIKDFFETALAAELNLSRVSAPLFVRPETGMNDNLNGVERPVSFDVKAIGGNTVEIVHSLAKWKRMALAKYGFKVGEGLYTDMNAIRRDEDLDNLHSIYVDQWDWELVINKEDRNEETLKNIVKKIYNVLKKTEDFIAEQYPQIPKFLPEDIFFITTQELEDMYPELSPKEREDAIAKEKKAIFLMKIGGVLKSGKKHDGRAPDYDDWTLNGDIILWYPLLERSFEISSMGIRVDENSLLSQLKEAGCEERKEMKFHKDLLQGKLPYTIGGGIGQSRICMYFLKKAHIGEVQSSVWPDSMIEICENANINLL

SEQ ID NO: 83665 - DNA, 993 bp, Streptococcus pyogenes str. Manfredo
  CDS (1)..(993): transl_table=11
atgaagaaaagttttattcatcaacaagaggagatttcctttgttaaaaatacgttcactcagtatttaattgctaagttagatgttgttgaagtgcaaggacccattttaagtcgggtcggggatggtatgcaagataatttgtccggtactgaaaatccagtatctgtcaatgtcttgaaaattcctaatgcaacctttgaagttgtgcattcattagcaaaatggaaacgtcacaccttagcccgttttgggtttaatgaaggtgaaggtcttgttgttaatatgaaggctctccgaccggatgaagattcacttgaccaaacccattctgtctatgttgaccaatgggactgggaaaaagtcatccctgatggcaaacgtaatctcgcttaccttaaagaaaccgttgaaaccatttacaaggtcattcggctaactgaattagctgtagaagctcgttatgatattgaggctgttttacctaagaaaataaccttcattcataccgaagaattggtagctgaataccctgatttgacgcccaaagaacgtgaaaatgccattactaaagaatttggagcagtctttttaattggtattggcggggttttacctgacggtaaaccacacgatggccgcgctcctgactatgatgactggacaacagaaactgaaaatggctatcatgggcttaatggtgatattttggtttggaatgaccaacttggttcagcctttgaattatcctcaatggggatccgtgtggatgaagaggccctaaaacgtcaggtggaaatgactggtgaccaagaccgcttagcctttgattggcacaaatctttgttgaatggacttttccctctaacgattggtggaggaatcggtcaatcacgtatggtcatgtttttgttgcgtaaaaaacatattggagaagttcagacctccgtttggccccaagaagttcgtgatagctacgataatattttataa

SEQ ID NO: 83666 - protein, 330 aa, Streptococcus pyogenes str. Manfredo
MKKSFIHQQEEISFVKNTFTQYLIAKLDVVEVQGPILSRVGDGMQDNLSGTENPVSVNVLKIPNATFEVVHSLAKWKRHTLARFGFNEGEGLVVNMKALRPDEDSLDQTHSVYVDQWDWEKVIPDGKRNLAYLKETVETIYKVIRLTELAVEARYDIEAVLPKKITFIHTEELVAEYPDLTPKERENAITKEFGAVFLIGIGGVLPDGKPHDGRAPDYDDWTTETENGYHGLNGDILVWNDQLGSAFELSSMGIRVDEEALKRQVEMTGDQDRLAFDWHKSLLNGLFPLTIGGGIGQSRMVMFLLRKKHIGEVQTSVWPQEVRDSYDNIL

SEQ ID NO: 83667 - DNA, 993 bp, Erwinia carotovora subsp. atroseptica SCRI1043
  CDS (1)..(993): transl_table=11
atgaaaaagcagtacatcgaaaagcaacagcaaatcagcttcgttaaatctttcttctccagtcaactggagcagcttctgggattgattgaagtccaggcaccgattctcagccgtatcggcgatggcacacaggataacttgtctggtacagaaaaagcggtgcaggttaaggtaaaagccttaccggatgccacatttgaagtggtgcactcactggcaaaatggaaacgcaaaacgctgggcgcgtatgattttagcttcggtgaaggcatttatactcacatgaaggcgctgcgtccggacgaagatcgcctgagcccgatccactcggtttatgtcgatcagtgggattgggagcgcgtgatggaggatggcgagcgcaatgctgaatatctgaaatcgacggtcacgcgtatttatcaaggcattaaagcgactgaggctgcggtacatcaggcgtttggcattcagcctttcctgccagagcagattcattttgtgcataccgaaaccttgctgaagcgttatcccgatctggacgccaaagggcgtgagcgagctatagctaaagagctgggtgcggtcttcctgattgggattggcggtaagctgtccagcggacactctcacgatgtgcgtgcaccggattatgatgactggacgacaccaggcgagcaggaattggcgggtttgaacggcgatatcgtcgtctggaacccagtcctgaacgatgcgtttgagatttcatccatgggtatccgcgtggacgcagaggcgctaacacgccaactggcactgacgcaggatgaggaacgtctgaagcttgaatggcatcaggcgctgctgcgcggtgagatgccacaaacgatcggtgggggaatcggtcagtctcgcttggtcatgctactgctgcaattgccgcacattggtcaggttcagtgcggtgtatggccacagccgctgcgtgagtcggtttctggcctgctttaa

SEQ ID NO: 83668 - protein, 330 aa, Erwinia carotovora subsp. atroseptica SCRI1043
MKKQYIEKQQQISFVKSFFSSQLEQLLGLIEVQAPILSRIGDGTQDNLSGTEKAVQVKVKALPDATFEVVHSLAKWKRKTLGAYDFSFGEGIYTHMKALRPDEDRLSPIHSVYVDQWDWERVMEDGERNAEYLKSTVTRIYQGIKATEAAVHQAFGIQPFLPEQIHFVHTETLLKRYPDLDAKGRERAIAKELGAVFLIGIGGKLSSGHSHDVRAPDYDDWTTPGEQELAGLNGDIVVWNPVLNDAFEISSMGIRVDAEALTRQLALTQDEERLKLEWHQALLRGEMPQTIGGGIGQSRLVMLLLQLPHIGQVQCGVWPQPLRESVSGLL

SEQ ID NO: 83669 - DNA, 993 bp, Mannheimia succiniciproducens MBEL55E
  CDS (1)..(993): transl_table=11
atgaaaaaatcattcattttacagcagcaagaaattagctttacaaagaatacgtttacggaaaaattagccgaacatttaggtttggttgaagttcaaggtcctatcctaagtcaagttggtaatggtattcaagataatctttcgggaacggagaaagctgttcaagtaaatgtgaagatgatcacagatgcggcttttgaagtcgtgcactctttagcaaaatggaaacgtcacaccttggctcgttttggtttcgcggaaggcgaagggttattcgtacatatgaaagcgctacgtccggatgaagatagtctggatcaaacgcattccgtttatgtggatcaatgggactgggaaaaagtgatccctgaaggtcgccgcaatttggattatttaaaagaaaccgtgcgtgaaatttatgcggcgattttagaaacggaagcggcggtagataaaaaatacggtttgaaatcatttttaccaaaagaaattacttttattcattccgaagatttagttaaagattatccgggtatgacggataaagaacgtgaaaacgaactttgtaaaaaatacggtgcggtttttttaatcggtatcggcggagtattgcctgacggcaaacctcatgacggtcgcgcgccggattatgatgactggacaaccacatcggaaggcgaatataaaggattgaacggcgatattttagtttggaacccgattctaaaccgcgcttttgaggtttcttccatgggtattcgcgtggatgaaacagcgttacgcaaacagctttcaattaccggtgatgaagatcgcttaaaattcgattggcatcaggatttaattaacggccgtatgccgctttcaatcggtggcggcatcggtcagtctcgtttagcaatgttattattacaaaaacgccatatcggcgaagtacagtcaagcgtatggccgaaagcggttatggaacaatacgaaaatattctttaa

SEQ ID NO: 83670 - protein, 330 aa, Mannheimia succiniciproducens MBEL55E
MKKSFILQQQEISFTKNTFTEKLAEHLGLVEVQGPILSQVGNGIQDNLSGTEKAVQVNVKMITDAAFEVVHSLAKWKRHTLARFGFAEGEGLFVHMKALRPDEDSLDQTHSVYVDQWDWEKVIPEGRRNLDYLKETVREIYAAILETEAAVDKKYGLKSFLPKEITFIHSEDLVKDYPGMTDKERENELCKKYGAVFLIGIGGVLPDGKPHDGRAPDYDDWTTTSEGEYKGLNGDILVWNPILNRAFEVSSMGIRVDETALRKQLSITGDEDRLKFDWHQDLINGRMPLSIGGGIGQSRLAMLLLQKRHIGEVQSSVWPKAVMEQYENIL

SEQ ID NO: 83671 - DNA, 993 bp, Haemophilus influenzae 86-028NP
  CDS (1)..(993): transl_table=11
atgaaaaagacatttattttacaacaacaagaaatcagctttgtgaagaacacttttacccaaaatcttattgagcaacttggcattattgaagtgcaaggcccaattttgagccaagtgggtaacggaatgcaagataacttatcaggcattgaaaaagccgtacaggttaatgtgaaatgtattccaaatgccatatttgaagttgtgcattctcttgcgaaatggaaacgccatacattagctcgtttcaactttaaagaagacgaaggcttgtttgttcatatgaaagcattgcgtcccgatgaagattctcttgatccaacgcactctgtttatgtagatcaatgggactgggaaaaagtgattcctgaaggtcgtcgtaattttgcatacttaaaagaaacggtaaattctatttatcgtgctattcgtttaacagaattagccgtagaagcacgttttgatattccttccattcttccaaaacagattacctttgtgcatagcgaagatttagtaaaacgctatccagatttaagcagtaaagagcgtgaaaacgcaatttgtaaagaatacggtgcagtattcttaatcgggattggcggcaaactttcagatggcaaacctcatgatggtcgtgcacctgactatgatgactggacaacagaatctgaaaatggctacaaaggcttaaatggcgacattttggtatggaacgaccaattaggcaaagcctttgaactatcctcaatgggtatccgcgtagatgaaagtgcattacgtttacaagttggcttaacaggcgatgaagaccgtttaaaaatggattggcaccaagatttattaaacgggaaattgccattaactatcggcggtggtatcggtcaatctcgcttagcgatgcttttacttcgtaaaaaacatatcggtgaagtgcaatcaagcgtatggccaaaagaaatgttagaagaattttcaaacattctttaa

SEQ ID NO: 83672 - protein, 330 aa, Haemophilus influenzae 86-028NP
MKKTFILQQQEISFVKNTFTQNLIEQLGIIEVQGPILSQVGNGMQDNLSGIEKAVQVNVKCIPNAIFEVVHSLAKWKRHTLARFNFKEDEGLFVHMKALRPDEDSLDPTHSVYVDQWDWEKVIPEGRRNFAYLKETVNSIYRAIRLTELAVEARFDIPSILPKQITFVHSEDLVKRYPDLSSKERENAICKEYGAVFLIGIGGKLSDGKPHDGRAPDYDDWTTESENGYKGLNGDILVWNDQLGKAFELSSMGIRVDESALRLQVGLTGDEDRLKMDWHQDLLNGKLPLTIGGGIGQSRLAMLLLRKKHIGEVQSSVWPKEMLEEFSNIL

SEQ ID NO: 83673 - DNA, 1140 bp, Acidobacteria bacterium Ellin345
  CDS (1)..(1140): transl_table=11
atggcaacaacgctatcgaaggtggcagatctcgcagggcccggcatcggcaactataccgaactcgaaaagatcctgcccaaggactatcactcactgctcgatcgcaaacaaacccagaaggcgatctatgcggtgaagacgtacattgaagagcacctctgccaggaattgaacctgattatgacgtccgtgccgctgattgtggatatggagagtggcgtgaacgactatctcgatcgcgacggatcgaggacgccaatcaccttccacatcccgaacgatcatgacgtgcacccaatcgacgcacaggtggtgcaggccgcgaccaagtggaagagaatggcgctcaaacagttcgatatgaagcccggcgaagggctttgcaccgacatgcatgcggtgcgcaaggactatttcctcgatcacgaccacagcgtgtacgtggaccagtgggactgggagcggacaattacggcccagcagcgcagcctcgaattcctgaagacgattgtcagcaagatttggacggtgattgtcggagcggagcggttcgcgctgaacaaattcccggaactgaatgatccacgctgtcccaagctaccggagaagctgaccttcctgcatgcggaagacattctcgagatgtatccggacctgccgcggaaacagcgcgagacgatgatcctgcaaaaatatccggcggtgttcattatcgggattggatggacgctgaaggatggctatccgcatgaaatgcgcgcggcggattatgacgactgggtcaccgagacagagtcggccgagggcaagatgatgcacggcctgaacggtgacatcctggtctggaacccggtaacgaagcgtcggcacgagctgtcgtccatgggcatccgggtgaatgcggagacgctgaaacagcaactgaaggcgacgaaccaggagcactttctgaacttcccatatcacaaggcgattctggacggcacgattccgctcagcattggcggcggtattgggcagtcacggacgttgatgcagattttgcggaaggcacatcttggcgaagtgacggtatcggtgtggccgaagatcctgaaggagatttgcgcgaagaagaatattttcgttttggagtaa

SEQ ID NO: 83674 - protein, 379 aa, Acidobacteria bacterium Ellin345
MATTLSKVADLAGPGIGNYTELEKILPKDYHSLLDRKQTQKAIYAVKTYIEEHLCQELNLIMTSVPLIVDMESGVNDYLDRDGSRTPITFHIPNDHDVHPIDAQVVQAATKWKRMALKQFDMKPGEGLCTDMHAVRKDYFLDHDHSVYVDQWDWERTITAQQRSLEFLKTIVSKIWTVIVGAERFALNKFPELNDPRCPKLPEKLTFLHAEDILEMYPDLPRKQRETMILQKYPAVFIIGIGWTLKDGYPHEMRAADYDDWVTETESAEGKMMHGLNGDILVWNPVTKRRHELSSMGIRVNAETLKQQLKATNQEHFLNFPYHKAILDGTIPLSIGGGIGQSRTLMQILRKAHLGEVTVSVWPKILKEICAKKNIFVLE

SEQ ID NO: 83675 - DNA, 1002 bp, Haemophilus somnus 129PT
  CDS (1)..(1002): transl_table=11
atgtatgtcatgaaaaaatcatttattttacaacaacaagaaattagttttgctaaaaacacttttacagaaaaattaatcgaacatttaggcatcattgaagtgcaaggacctatcttaagtcaagtgggaaatggtattcaagataatctttcaggtacagagaaagcggttcaagtaaatgtgaaacagatcactgatgccaaatttgaagtggtgcattcattggcaaaatggaaacgtcatacattagctcgttttaactttgcagagaatgaaggcttatttgtacatatgaaagcattacgtcccgatgaagatagtctggatcaaacccactctgtttatgttgatcaatgggattgggaaaaagttattccaacgggacgtcgtaaccttgcttatttaaaagaaactgtacgttcaatttatcaagctattttggaaacggaagatgcagtacaccaaaaatttgggttgagtaaatttttacctagagagattacttttatacacagtgaggaacttgttcaacgttatcctgaattgaacgataaacaacgtgaaaatgcgatttgcaaagaatatggtgcagtattcttaataggaattgggggagtattatcagatggcaaaccacatgataagcgtgcacctgattatgatgactggacaacaccgtctgaaggtgagtatttaggtttgaatggcgatattcttgtttggaatcctgtattggagcgtgcatttgaagtatcttctatgggcattcgtgtagatgaaaccgcattacgtaaacaactggcattaaccggtgatgaagatcggttgcaatttgactggcatcaagatcttgtcaacggacgtttaccgctttctattggtggtgggattggtcaatctcgcttggcgatgttgcttttacagaaaaaacatattggcgaagtgcaatcaagtgtttggccaaaagttgttacagaacagtttgaaaacattctgtag

SEQ ID NO: 83676 - protein, 333 aa, Haemophilus somnus 129PT
MYVMKKSFILQQQEISFAKNTFTEKLIEHLGIIEVQGPILSQVGNGIQDNLSGTEKAVQVNVKQITDAKFEVVHSLAKWKRHTLARFNFAENEGLFVHMKALRPDEDSLDQTHSVYVDQWDWEKVIPTGRRNLAYLKETVRSIYQAILETEDAVHQKFGLSKFLPREITFIHSEELVQRYPELNDKQRENAICKEYGAVFLIGIGGVLSDGKPHDKRAPDYDDWTTPSEGEYLGLNGDILVWNPVLERAFEVSSMGIRVDETALRKQLALTGDEDRLQFDWHQDLVNGRLPLSIGGGIGQSRLAMLLLQKKHIGEVQSSVWPKVVTEQFENIL

SEQ ID NO: 83677 - DNA, 1008 bp, Pediococcus pentosaceus ATCC 25745
  CDS (1)..(1008): transl_table=11
atggatttaattattcctgcatcatacgatccaaaattatcagtacgtcaaacccaagaggccattcgctacatccgcgaaacttttcaagatgaatttggaaaagaactcaacctctcacgtctctctgcaccaatgttcgttcctagtgccactgggttaaacgataatttaaatggagttgaaaccccagtttccttctctatgcaagatatgcctgaaaccagcatcgaaatcgtccactctctagctaaatggaaaagagttgctttgaaacgctttgatttcgagatgcacagtggactttatactaatatgaatgccattcgtaaagacgaagatcttgataatattcattccatctatgttgatcaatgggactgggaaaaagttatcgatcaaagtgagcgtaatctaactacccttaaagaaacagttcaaacaatttttaaagtaatcaaacacatggagcacgaagtttggtataaatatcctgaagccgtctatcatcttcctgatcaaattcattttgtcactacccaagaattagaggatcgttttccgaaattaactcctaaagaacgcgaggacgccatctgtaaagaactgggttgcgttttcttaatgcaaattggtgggacgctaaaaagtggtgaacgtcatgatggacgcgcaccagattacgatgattggcaattaaacggcgatattttattttggtatgaacctcttcaaaaagcccttgaaatttctagcatgggaatcagagttagtgaagagtcgatgctaaaacaactaaaaatagctaacgcagaggatcgaatccatctcccttatcatcaaatgttgttgaatcatcaactgccctacaccattggcggtggaattggtcaatcacgtctttgcatgttgctattaggtaaagcccatgttggtgaagttcaagctagtgtctggcctcaatcgatgattgatcaatgtgaagaaaatcaaattcatattttataa

SEQ ID NO: 83678 - protein, 335 aa, Pediococcus pentosaceus ATCC 25745
MDLIIPASYDPKLSVRQTQEAIRYIRETFQDEFGKELNLSRLSAPMFVPSATGLNDNLNGVETPVSFSMQDMPETSIEIVHSLAKWKRVALKRFDFEMHSGLYTNMNAIRKDEDLDNIHSIYVDQWDWEKVIDQSERNLTTLKETVQTIFKVIKHMEHEVWYKYPEAVYHLPDQIHFVTTQELEDRFPKLTPKEREDAICKELGCVFLMQIGGTLKSGERHDGRAPDYDDWQLNGDILFWYEPLQKALEISSMGIRVSEESMLKQLKIANAEDRIHLPYHQMLLNHQLPYTIGGGIGQSRLCMLLLGKAHVGEVQASVWPQSMIDQCEENQIHIL

SEQ ID NO: 83679 - DNA, 1131 bp, Solibacter usitatus Ellin6076
  CDS (1)..(1131): transl_table=11
atgctcgacaagaaagcggacctggccggtcccggcattggcgactatgaggaactggagaaaatcctgccccaggattactcctccctgctctccatcagggacacccagcgcgccatcttcgcaggaaagaactttatcgaggagcacctttgtcaggcgctcaacctcatgatggtcaccgtaccgctcgtcgtggataccgagagcgggttgaacgacctattggatcgcgacggctcccgtactccgatccagttccacatcgccaacgatcacgacaagcatcccatcgacgcgcagatcgtgcaggccgccaccaagtggaaacgcctcgccctgcagcgcttcggcatgaaggcgggcgaaggcctctgcaccgatatgcgcgccatccgcaaggactattttctcgaccacgaccacagcgcttatgttgaccagtgggattgggagaaggtcattcatttctacgaacacgacctcgactttttgaagcaggcggtcaacgcaatttggaaggtgctggtcgatgctgaaagctacctgcagaaggagttccccgcgctcaaggattcgcggtatccgaacctgccgcgcaaactcacgttccttcatgccgaagacgtgctcgacatgtaccccgacctgccgcgcaagcaacgcgagacaagattgctacaggagtgtcccgccgtcttcctgatcggcatcggctggacgctgaaggatggctatccgcacgaaatgcgcgccgccgattacgacgattggtgcaccgagacgcgctccatcgacggccgcccctgccacggtctcaatggcgacattttggtgtggaatcacgtgacccggcgccgccatgagctgagctcgatgggcattcgcgtgaacgcggagacgctgcagaagcagttgcgcattaccaatcaactggacttcctgcggtatccgtatcaccaggccgtggttcgccatgaactgccggtttccatcggcggcggcatcggccaatcgcgcaccttgatgctcctgctgcggaaagcgcacttgggcgaagtcaccgtgagtgtatggccgaagatcctcaaggagatctgcgcggcgaagaatattcacgtactcgagtaa

SEQ ID NO: 83680 - protein, 376 aa, Solibacter usitatus Ellin6076
MLDKKADLAGPGIGDYEELEKILPQDYSSLLSIRDTQRAIFAGKNFIEEHLCQALNLMMVTVPLVVDTESGLNDLLDRDGSRTPIQFHIANDHDKHPIDAQIVQAATKWKRLALQRFGMKAGEGLCTDMRAIRKDYFLDHDHSAYVDQWDWEKVIHFYEHDLDFLKQAVNAIWKVLVDAESYLQKEFPALKDSRYPNLPRKLTFLHAEDVLDMYPDLPRKQRETRLLQECPAVFLIGIGWTLKDGYPHEMRAADYDDWCTETRSIDGRPCHGLNGDILVWNHVTRRRHELSSMGIRVNAETLQKQLRITNQLDFLRYPYHQAVVRHELPVSIGGGIGQSRTLMLLLRKAHLGEVTVSVWPKILKEICAAKNIHVLE

SEQ ID NO: 83681 - DNA, 984 bp, Fusobacterium nucleatum subsp. vincentii ATCC 49256
  CDS (1)..(984): transl_table=11
atggcttacatttcaagtttagatattttagaaacagaaattgctattaaaaaagttaaagatttttttgaaagtcgtcttgcaaaagaattagatttattaagagtttcagcaccactatttgttattccagaatctggattaaatgacaatttgaatggaacagaaagaccagtatcttttgatactaaaagtggagaaagagttgagatagttcattcacttgcaaaatggaaaagaatggcattgtatagatataatattgaaaatcataaaggtatctacacagatatgaatgctattagaagagatgaagatacagattttattcattcttactatgttgaccaatgggattgggaaaaaataatttctaaggaagatagaaatgaagaatatttaaaagaaacagttagaaaaatttattgtgtatttaaagaaacagaagaatatattactactgaatatccaaaacttactaaaaagttgccagaagaaataacttttataacttcacaagaacttgaaaataaatatcctaacttaactcctaaaaatagagaacatgctgctgcaaaagagtatggagctatatttttgatgaagataggtgggaaattatcttctggtgaaaaacatgatggtagagcacctgactatgatgattgggacttgaatggagatataatatttaactatccacttttaggaataggacttgaattatcttctatgggaataagagttgatgaaaagtcattagatgagcaattaaaaattgctaattgcgaagatagacgatctttaccatatcatcaaatgatattaaataaagttctaccttataccataggtggaggaataggacaatctcgtatatgtatgttcttcttagataaattacatataggagaagtacaagcatctatatggtcacaagaagttcatgaaatttgtagacaaatgaatattaaattattataa

SEQ ID NO: 83682 - protein, 327 aa, Fusobacterium nucleatum subsp. vincentii ATCC 49256
MAYISSLDILETEIAIKKVKDFFESRLAKELDLLRVSAPLFVIPESGLNDNLNGTERPVSFDTKSGERVEIVHSLAKWKRMALYRYNIENHKGIYTDMNAIRRDEDTDFIHSYYVDQWDWEKIISKEDRNEEYLKETVRKIYCVFKETEEYITTEYPKLTKKLPEEITFITSQELENKYPNLTPKNREHAAAKEYGAIFLMKIGGKLSSGEKHDGRAPDYDDWDLNGDIIFNYPLLGIGLELSSMGIRVDEKSLDEQLKIANCEDRRSLPYHQMILNKVLPYTIGGGIGQSRICMFFLDKLHIGEVQASIWSQEVHEICRQMNIKLL

SEQ ID NO: 83683 - DNA, 975 bp, Exiguobacterium sibiricum 255-15
  CDS (1)..(975): transl_table=11
atgacaacactcgtatcgatgaaacagacacaggaagctatcacacttgtaaaaaaacgctttgaggagcaattctcagcccaactcggattgacacgcgtcgaagcaccgttattcgtcgaaagcacactcggagtcaacgatcacctgaacggaactgaacgcgtcatccgctttgatgcgattgatcatcaggcagaactcgaaatcgttcaatcgcttgcgaagtggaaacgccaggcactccacacatacggattcgcaaaaggcgaaggcttgtacacattgatgcatgccatccgccgcgacgaagtattggatgaaacgcattcgatccatgtcgatcagtgggactgggaacgtgtgatttcaaaagaagagcggacaatcgactacttgcagaaaacggtgcaagcgatttacgcatcgattcgtcaagtggaacgtgaagtcgaagaacagctcgcgattgaagcgatcttaccggaaacgatccatttcatgacgacacaggaactggaagatgcgtacccgacgctttcgacgaaagagcgtgagacggaagtgactaaagaatacggggctgtcttcttgatgcaaatcggtggagccttagcgtccggagaaaaacatgacggccgagcggctgactacgatgactggacactcaacggcgatattctagtccatcatccggaaatcggtgcatttgaactttcatcgatgggcattcgtgtcgaccgtgaaacgttactcgcacaaatcgagacgacaggcgagcatgcgaaactcgatttcccgttccatcaaggggtactggcagaaacacttccactgacaatcggcggcggaatcggacaatcccggatggcgatgttcctcttgaagaaacgtcacatcggtgaagttcaggcgtcggtctggtcggaagaaacacgcgcgtcgtaccgtgagcaaggtgtgcacctgctgtaa

SEQ ID NO: 83684 - protein, 324 aa, Exiguobacterium sibiricum 255-15
MTTLVSMKQTQEAITLVKKRFEEQFSAQLGLTRVEAPLFVESTLGVNDHLNGTERVIRFDAIDHQAELEIVQSLAKWKRQALHTYGFAKGEGLYTLMHAIRRDEVLDETHSIHVDQWDWERVISKEERTIDYLQKTVQAIYASIRQVEREVEEQLAIEAILPETIHFMTTQELEDAYPTLSTKERETEVTKEYGAVFLMQIGGALASGEKHDGRAADYDDWTLNGDILVHHPEIGAFELSSMGIRVDRETLLAQIETTGEHAKLDFPFHQGVLAETLPLTIGGGIGQSRMAMFLLKKRHIGEVQASVWSEETRASYREQGVHLL

SEQ ID NO: 83685 - DNA, 996 bp, Pseudoalteromonas tunicata D2
  CDS (1)..(996): transl_table=11
atggcatcacagtatattcagacgcagcagcagatcagtaaagcaaaagcattgtttgcaacgcaactcgaaagcaaattagggcttattgaagttcaagcgccgcttttggctcaagtagggaatggtattcaagataacttaagtggtcatgagcaagcggtagcagtaaaaataaaaaccatgccagatgcgcaatatgaagtggtgcattcactggcaaaatggaaacgtaaaacgttggccgatcatggtttttcagttggtgaagggctttacaccaatatgaaagcactgcgcccagatgaagataaactaactccaattcattcggtgtatgttgatcagtgggattgggaaaaagtaatttgcattgaaactgaacgtagtttgagcttcttaaaaaccacagttgaaacgatttatcagtcaatcaaggcaaccgaattacagctcgcaactttatatggcttaacgccttttttaccacaacacattcaatttgtgcatgctgaacagttagcgcgtgattacccagcacttagtggcaaagaaagagagcaaaaagtagcgaaagaatttggtgcggtgtttttaattggcattggtgggcagcttagtgatggtgctattcatgatgtacgtgcccctgattatgatgattggtctacggcaacatgtgagcaattttccggtttaaacggtgatattttggtttggaacccaattttgaatgatgtatttgaaatttcatcaatgggtattcgagttgatgcaaaagcgcttcagcatcagctggcaattaccggagatgaagaccgcttagcgtttgcttggcaccagcaattattagcagataaattaccgcaaacgatcggggggggcattggtcaatcgcggttagtgatgctgttgctacaaaagcagcatattggtgaagtgcaagtcggtatttggcctgatgaagtattagcgcactacagcgctatattataa

SEQ ID NO: 83686 - protein, 331 aa, Pseudoalteromonas tunicata D2
MASQYIQTQQQISKAKALFATQLESKLGLIEVQAPLLAQVGNGIQDNLSGHEQAVAVKIKTMPDAQYEVVHSLAKWKRKTLADHGFSVGEGLYTNMKALRPDEDKLTPIHSVYVDQWDWEKVICIETERSLSFLKTTVETIYQSIKATELQLATLYGLTPFLPQHIQFVHAEQLARDYPALSGKEREQKVAKEFGAVFLIGIGGQLSDGAIHDVRAPDYDDWSTATCEQFSGLNGDILVWNPILNDVFEISSMGIRVDAKALQHQLAITGDEDRLAFAWHQQLLADKLPQTIGGGIGQSRLVMLLLQKQHIGEVQVGIWPDEVLAHYSAIL

SEQ ID NO: 83687 - DNA, 996 bp, Alteromonadales bacterium TW-7
  CDS (1)..(996): transl_table=11
atgagttcacactatgtgcagcagcagttgcaaataagcagcgtaaagcaatttttttcacggcaattggaaaaacagttagggctagtagaagtgcaggcacctattcttgcaaaagtaggtgatggcacacaagataatttaagcggtcatgaaaacgctgtagcagtaaatgtaaaagcgattgccgatagccaatacgaagttgtgcattcgctagcaaagtggaaacgtaaaacgttaggtgagtatggatttagtaaaggtgaaggcctttacactcaaatgaaggcactgcgccctgatgaagagtcgctaagtcctatccactcggtttacgttgatcagtgggattgggaaaaggtaatttgtgaatcaacagaacgttctttaactaccctcaaacgtacagttgaatcaatttataaaggcataaaagaaacagagcaatttgttagcgaacacttttcgcttgatccttttttaccaagtgatattcaatttgtgcacagtgaagagcttcgtaaaatataccctgaccttacggctaaaaatcgcgaaaaagcaatagcaaaaaaatatggtgctgtatttttaattgggattggcggtcaattaggcgatggtcaaattcacgatgtaagagcgcctgattatgacgattggtctacaccaacgagcgaacaatatatagggcttaatggtgatattttagtatggaatccaatacttgaagattcctttgagatatcttcaatggggattcgtgtaagccccgaggtactaaaaactcagttgaggattacaggagatgatgaccgcctgcaattggattggcataaggcattattaaaaagtcagtttccacaaactattggtggaggtattgggcaatcacgtttggctatgttattgctgcaaaagggacatattggacaagttcaagttggagtatggtcaacacaaacacatgcaagtgttgacggtatactctaa

SEQ ID NO: 83688 - protein, 331 aa, Alteromonadales bacterium TW-7
MSSHYVQQQLQISSVKQFFSRQLEKQLGLVEVQAPILAKVGDGTQDNLSGHENAVAVNVKAIADSQYEVVHSLAKWKRKTLGEYGFSKGEGLYTQMKALRPDEESLSPIHSVYVDQWDWEKVICESTERSLTTLKRTVESIYKGIKETEQFVSEHFSLDPFLPSDIQFVHSEELRKIYPDLTAKNREKAIAKKYGAVFLIGIGGQLGDGQIHDVRAPDYDDWSTPTSEQYIGLNGDILVWNPILEDSFEISSMGIRVSPEVLKTQLRITGDDDRLQLDWHKALLKSQFPQTIGGGIGQSRLAMLLLQKGHIGQVQVGVWSTQTHASVDGIL

SEQ ID NO: 83689 - DNA, 984 bp, Bacillus anthracis
  CDS (1)..(984): transl_table=11
atgtatcaatcattaatgacagtaagagagactcaaatcgcaattaaggaagttaaaacatttttcgaggatcaattagcaaaacgacttgaactattccgcgtatctgcaccattattcgtaacgaaaaaatcaggattaaacgatcacctaaacggtgtagaacgtccaattgaatttgatatgttacactcaggagaagaattagaaattgtgcactcactagcgaagtggaaacgatttgcactccatgaatatggatatgaagctggtgaaggtttgtatacaaacatgaacgcgatccgtcgtgatgaagaacttgatgcaacacattctatttacgttgaccaatgggattgggaaaaaatcgttcaaaaagaatggcgtactgtagattacttacaaaaaacagtactaacaatttatggaatattcaaagatttagaagaccacttatttgaaaagtatccgttccttgggaagtatttaccagaagaaattgtattcgttacttctcaagaactagaagataaatatccagaattaacaccgaaagatcgtgaacatgcaattgcaaaagaacacggtgcagtcttcattatcggaattggtgatgcacttcgttcaggtgaaaagcatgatggacgcgcagctgattatgatgattggaaattaaacggtgatattttattctggcacccagtactacaatcttcattcgaattatcatcaatgggaattcgtgttgatagtaaatcacttgatgagcagttaacgaaaacaggtgaagacttcaaacgtgagtacgatttccataaagggattttagaagacgtactaccattaacaattggtggtggtatcggacaatcaagaatgtgcatgtacttcttacgtaaagcacatattggtgaagttcaatcttctgtatggcctgatgatttacgtgaagcttgcaagaaagaaaacattcatctattttaa

SEQ ID NO: 83690 - protein, 327 aa, Bacillus anthracis
MYQSLMTVRETQIAIKEVKTFFEDQLAKRLELFRVSAPLFVTKKSGLNDHLNGVERPIEFDMLHSGEELEIVHSLAKWKRFALHEYGYEAGEGLYTNMNAIRRDEELDATHSIYVDQWDWEKIVQKEWRTVDYLQKTVLTIYGIFKDLEDHLFEKYPFLGKYLPEEIVFVTSQELEDKYPELTPKDREHAIAKEHGAVFIIGIGDALRSGEKHDGRAADYDDWKLNGDILFWHPVLQSSFELSSMGIRVDSKSLDEQLTKTGEDFKREYDFHKGILEDVLPLTIGGGIGQSRMCMYFLRKAHIGEVQSSVWPDDLREACKKENIHLF

SEQ ID NO: 83691 - DNA, 984 bp, Bacillus cereus
  CDS (1)..(984): transl_table=11
atgtatcaatcattaatgacagtaagagagactcaaattgcaattaaggaagttaaaacatttttcgaggaccaattagcaaaacgccttgaactattccgcgtatctgcaccattattcgtaacgaaaaaatcaggattaaacgatcacctaaacggtgtagaacgtccaattgaatttgatatgttacattcaggagaagaattagaaattgttcattcactagcgaaatggaaacgatttgcattacatgaatacggatatgaagctggtgaaggtttatatacaaacatgaacgcgattcgtcgtgatgaagaacttgatgcaacgcattccatttatgttgaccaatgggattgggaaaaaatcgttcaaaaagaatggcgtactgttgaatacttacaaaaaacagtacaaacaatttatggaatattcaaagatttagaagatcacttatttgaaaaatatccgttccttggaaagtatttaccggaagaaattgttttcgttacttctcaagaattagaagataaatatccagaattaacaccgaaagatcgtgaacatgcaattgcaaaagaacacggtgcagtcttcattatcggaattggtgatgcacttcgttcaggtgaaaagcatgacggacgcgcagctgattatgacgattggaaattaaacggtgacattttattctggcacccagtactacaatcttcatttgagttatcatcaatgggaattcgtgttgatagtaaatcacttgatgagcagttaacgaaaactggtgaagacttcaaacgtgagtatgatttccataaaggtatactagaagacgtactaccattaacaattggcggtggcattggacaatcaagaatgtgcatgtacttcttacgtaaagcacatatcggtgaagttcaatcttctgtatggcctgacgatttacgtgaagcttgcaagaaagaaaacattcatctgttttaa

SEQ ID NO: 83692 - protein, 327 aa, Bacillus cereus
MYQSLMTVRETQIAIKEVKTFFEDQLAKRLELFRVSAPLFVTKKSGLNDHLNGVERPIEFDMLHSGEELEIVHSLAKWKRFALHEYGYEAGEGLYTNMNAIRRDEELDATHSIYVDQWDWEKIVQKEWRTVEYLQKTVQTIYGIFKDLEDHLFEKYPFLGKYLPEEIVFVTSQELEDKYPELTPKDREHAIAKEHGAVFIIGIGDALRSGEKHDGRAADYDDWKLNGDILFWHPVLQSSFELSSMGIRVDSKSLDEQLTKTGEDFKREYDFHKGILEDVLPLTIGGGIGQSRMCMYFLRKAHIGEVQSSVWPDDLREACKKENIHLF

SEQ ID NO: 83693 - DNA, 1038 bp, Bacteroides thetaiotaomicron
  CDS (1)..(1038): transl_table=11
atgagttacttgataaaaccaaagaactataaaccgttactcgacttaaaacaaacagagttgggaatcaaacaaataaaagagttcttccagttaaacttgtcatccgaattacgcctcagacgcgtgacagcccctcttttcgtattgaaagggatgggtatcaatgacgatttgaatggtatagaacgtcccgtttcattccctatcaaggatttaggtgacgcacaagcagaagtcgttcattcattagccaaatggaaaagattaactctcgccgattacaatatcgaaccgggatacggtatctataccgacatgaacgccatccgttctgatgaagaactcggaaacctccattcgctctatgtagaccaatgggactgggaacgtgtcatcaccaacgaggacagaaacgtagaattcctgaaagagatcgtaaatcgtatctacgctgccatgatccgtacagaatacatggtatatgaaatgtatccgcagatcaaaccttgtctgccccagaaattacattttatccattcggaagaactacgccaactctatccgaacctggaacccaaatgccgcgagcatgccatctgccaaaaatacggtgccgtatttatcatcggtatcggttgcaagctaagcgacggcaaaaaacatgacggacgtgcaccggactatgatgactacacatccaccggcctgaacaacctgcccggactgaacggtgaccttttactttgggatgatgtactgcaacgctccatcgaactatcctctatgggtgttcgtgtagacagagaagcgctacaacgccagctcaaagaagaaaacgaagaagagagactgaaactttatttccacaaacgattaatggacgacacacttccactatctatcggtggcggtatcggtcaatcccgtttgtgtatgttctaccttcgcaaagctcatatcggagaaatacaagccagcatctggccggaagatatgcgcaaagaatgtgaggaacttgatatacaccttatataa

SEQ ID NO: 83694 - protein, 345 aa, Bacteroides thetaiotaomicron
MSYLIKPKNYKPLLDLKQTELGIKQIKEFFQLNLSSELRLRRVTAPLFVLKGMGINDDLNGIERPVSFPIKDLGDAQAEVVHSLAKWKRLTLADYNIEPGYGIYTDMNAIRSDEELGNLHSLYVDQWDWERVITNEDRNVEFLKEIVNRIYAAMIRTEYMVYEMYPQIKPCLPQKLHFIHSEELRQLYPNLEPKCREHAICQKYGAVFIIGIGCKLSDGKKHDGRAPDYDDYTSTGLNNLPGLNGDLLLWDDVLQRSIELSSMGVRVDREALQRQLKEENEEERLKLYFHKRLMDDTLPLSIGGGIGQSRLCMFYLRKAHIGEIQASIWPEDMRKECEELDIHLI

SEQ ID NO: 83695 - DNA, 1011 bp, Clostridium perfringens
  CDS (1)..(1011): transl_table=11
atggaaaaattatttataccaaagggctataaacctttattatcacttagagaaactgaagttgctattaaagaacttaaagactttttcgaagattctttagctaaaaacttaaacttaacaagagtttctgctccacttttcgtaaataaaggttcaggattaaatgatgatctaaatggaattgaaagacctgtaagttttgatatgaaagctatgccagagtttaacattcaaatagttcattctctagctaaatggaaaagactagctcttcatagatatgaatttgaacatggtgaaggtctttacactgatatgaacgctataagaagagatgaagatttagataacattcactctatttatgttgaccaatgggattgggagaaaataatagataaagaagaaagaaatttagaaactttaaaagaaactgtaaaatcaatatatggtacttttaaagcaacagaagattttatagtagcaaaataccctcacatagaaaaaattcttcctgaagatataacatttataacatcacaggaattagaagatcgttatccagatcttacttctaaagagagagaaactgctatatgtaaagaatttggcgctgtattcataataggaattggtggaaaattagcttctggtgaaaaacatgatgatagaagtccagactatgatgattggacattaaatggagatttattattctactaccctctatttgatgaggctgtagaactttcatcaatgggaataagagttgatgaggaaagccttttaaaacaattaaaaatagcagaatgtgaagaaagaaaagaactaccattccatcaaatgcttcttgaaggaaaattaccgtatactataggtggtggaattggtcaatctagaatatgtatgttcttccttagaaaagctcacattggagaagttcaagcatctatgtgggatgaagatatgataagaacttgtgaagaaaacaacatacatttattataa

SEQ ID NO: 83696 - protein, 336 aa, Clostridium perfringens
MEKLFIPKGYKPLLSLRETEVAIKELKDFFEDSLAKNLNLTRVSAPLFVNKGSGLNDDLNGIERPVSFDMKAMPEFNIQIVHSLAKWKRLALHRYEFEHGEGLYTDMNAIRRDEDLDNIHSIYVDQWDWEKIIDKEERNLETLKETVKSIYGTFKATEDFIVAKYPHIEKILPEDITFITSQELEDRYPDLTSKERETAICKEFGAVFIIGIGGKLASGEKHDDRSPDYDDWTLNGDLLFYYPLFDEAVELSSMGIRVDEESLLKQLKIAECEERKELPFHQMLLEGKLPYTIGGGIGQSRICMFFLRKAHIGEVQASMWDEDMIRTCEENNIHLL

SEQ ID NO: 83697 - DNA, 1026 bp, Clostridium tetani
  CDS (1)..(1026): transl_table=11
atggaaatcaaatgtagcgaaagacttataataccaaaagagtataaaactgaattagatttaaaagaaactgctattgcaattaaggaagtgaaggattgttttgaaagagctttagcaaaacagctaaatcttataagagtatcagcacctctttttgtaagatgtgacaagggattaaatgataacttaaatggagtagagagaccagtaaagttcactgtgaaggatgataatgaagcagcagtagaaattgttcattctctagcaaagtggaagagaatggctctttacagatataattttaatgctgacgaaggtctatatacagatatgaatgctataagaagggatgaggaattagataatacacattccatatatgttgaccaatgggattgggagagaataataaaaaaagaagatagaaatgaggaatatttaaaagatatagttagaaaaatatttaaagcttttaaagaaacagaggagcatataaacaaattgtatccatttttaggagaagttttaccagaagaagtattttttatgactactcaagaacttgaggatatgtttccagatcttacagctaaagaaagagaagatgctataactaaagaaaagaaagcagtatttttaatgaaaataggaaaaacattagaatcaggagaaaaacatgatggaagagctccagactatgatgactgggaattaaatggagatatacttttttggaatccagttctaaataaagcttttgaattatcttctatgggaataagggtagatgaagaatcccttttaaaacaattaaaattagctaattgcgaagaaagaaaggaattacaatttcataaaatgcttttagagaaaaaactaccatatacaataggtggtggaataggtcaatctagaatgtgtatgcttttcctaaaaaaagctcatataggagaggttcaatcctcaatatggccagaagaaatgataaagttttgtgaagaaaaaggaatgacaatattataa

SEQ ID NO: 83698 - protein, 341 aa, Clostridium tetani
MEIKCSERLIIPKEYKTELDLKETAIAIKEVKDCFERALAKQLNLIRVSAPLFVRCDKGLNDNLNGVERPVKFTVKDDNEAAVEIVHSLAKWKRMALYRYNFNADEGLYTDMNAIRRDEELDNTHSIYVDQWDWERIIKKEDRNEEYLKDIVRKIFKAFKETEEHINKLYPFLGEVLPEEVFFMTTQELEDMFPDLTAKEREDAITKEKKAVFLMKIGKTLESGEKHDGRAPDYDDWELNGDILFWNPVLNKAFELSSMGIRVDEESLLKQLKLANCEERKELQFHKMLLEKKLPYTIGGGIGQSRMCMLFLKKAHIGEVQSSIWPEEMIKFCEEKGMTIL

SEQ ID NO: 83699 - DNA, 993 bp, Escherichia coli O157
  CDS (1)..(993): transl_table=11
atgaaaaccgcttacattgccaaacaacgccaaattagcttcgtgaaatctcacttttctcgtcaactggaagaacgtctggggctgatcgaagtccaggcgccgattcttagccgtgtgggggatggcacgcaggataacttgtcgggctgtgaaaaagcggtacaggtaaaagtgaaagctctgcctgatgcccagttcgaagtggttcattcactggcgaagtggaaacgtcagaccttagggcaacacgacttcagcgcgggcgaagggctgtacacgcacatgaaagcccttcgccccgatgaagaccgtctttctccgttgcactcggtctatgttgaccagtgggactgggaacgcgtaatgggcgacggtgagcgtcaattctcgactctgaaaagcacggtagaggcgatttgggcgggaattaaagcaaccgaagctgcggttagcgaagagtttggcctggcaccgttcctgccggatcagatccacttcgtacacagccaggagttactgtctcgttatccggatcttgatgccaaagggcgtgagcgggcgatagcgaaagatcttggtgcggtattccttgtcgggattggcggcaagctgagcgatggtcatcgccacgacgtgcgcgcaccggattatgatgactggagcaccccgtcagagctgggccatgcgggtctgaacggcgatattctggtgtggaaccctgtactggaagatgcgtttgagctttcttccatggggatccgcgtggatgccgacacgttgaagcatcagttggcgctgaccggtgatgaagatcgtctgcagctggaatggcatcaggcgttgctgcgcggtgaaatgccgcagaccatcggcggcggtatcggccagtctcgtttgaccatgctgctgctgcaactgccgcatatcggccaggtccagtgtggagtatggccagctgctgttcgcgagagcgtcccttctctgctgtaa

SEQ ID NO: 83700 - protein, 330 aa, Escherichia coli O157
MKTAYIAKQRQISFVKSHFSRQLEERLGLIEVQAPILSRVGDGTQDNLSGCEKAVQVKVKALPDAQFEVVHSLAKWKRQTLGQHDFSAGEGLYTHMKALRPDEDRLSPLHSVYVDQWDWERVMGDGERQFSTLKSTVEAIWAGIKATEAAVSEEFGLAPFLPDQIHFVHSQELLSRYPDLDAKGRERAIAKDLGAVFLVGIGGKLSDGHRHDVRAPDYDDWSTPSELGHAGLNGDILVWNPVLEDAFELSSMGIRVDADTLKHQLALTGDEDRLQLEWHQALLRGEMPQTIGGGIGQSRLTMLLLQLPHIGQVQCGVWPAAVRESVPSLL

SEQ ID NO: 83701 - DNA, 993 bp, Haemophilus ducreyi
  CDS (1)..(993): transl_table=11
atgaaaaagagctttattttacaacaacaagaaattagttttgttaaaaacacttttacgcaatacctgatcgatcaattagatattattgaagtacaagggccgattttgagccaagtgggcaatggtatgcaagataacttatccggcatcgaaaaagcggtacaggtaaatgtaaaatgcattcctggcgcagtgtttgaagttgtacattcattagccaaatggaaacgccacactttagctcgttttggttttaaacaaggcgaaggtttatttgtacatatgaaagcattgcgtcccgatgaagattctttagacccaacacattctatttatgttgatcaatgggattgggaaaaagtaattcctgaaggccaacgtaactttgcttatttaaaacagactgttaatcaaatttataaagccattcgtttaactgaattagcggttgaagcgcgctttgatatcccatcaagtttgccaaaacaaattacgttcatacatagcgaagaattagcacagcgttatccaaatatgtccagtaaagaacgtgaaaatgcgatttgtaaagaacacggtgcgatctttttaatcggcattggaggtaaattatctgacggtaaagcgcatgatggtcgtgcacctgattatgacgattggacaactgaatctgaaaatggctataaaggtttaaacggcgatattttagtttggaatgaagaattaggctctgcctttgaattatcctcaatgggcattcgtgttgatcaacaagcattacgtttacaagtcagcttaactggtgatgaagatcgattaacgatggattggcatcaagatttattagcgggtcgtttaccgctttctatcggcggtggtattggtcagtcacgtttagtgatgtttctactacataaaaaacacattggtgaagtacaatcaagtgtatggccaactgaaatgcttacccaatttgaaaacattctttaa

SEQ ID NO: 83702 - protein, 330 aa, Haemophilus ducreyi
MKKSFILQQQEISFVKNTFTQYLIDQLDIIEVQGPILSQVGNGMQDNLSGIEKAVQVNVKCIPGAVFEVVHSLAKWKRHTLARFGFKQGEGLFVHMKALRPDEDSLDPTHSIYVDQWDWEKVIPEGQRNFAYLKQTVNQIYKAIRLTELAVEARFDIPSSLPKQITFIHSEELAQRYPNMSSKERENAICKEHGAIFLIGIGGKLSDGKAHDGRAPDYDDWTTESENGYKGLNGDILVWNEELGSAFELSSMGIRVDQQALRLQVSLTGDEDRLTMDWHQDLLAGRLPLSIGGGIGQSRLVMFLLHKKHIGEVQSSVWPTEMLTQFENIL

SEQ ID NO: 83703 - DNA, 1011 bp, Lactobacillus johnsonii
  CDS (1)..(1011): transl_table=11
atgacattaatattacctaaggactaccatccaagtttaaccattcgtgatactgaagccgcaattgttttcattagagaaaattttcaagataaaattgctgacaaattaaaccttcaaagaatgtcagcaccaatgtttgttgaaaaatctactggattaaatgataacttaaatgggattgaacgtccggttgcttttgatatgaaggctatgccagatgatacaatcgaagttgtacactcattagcaaaatggaaacgtctagcacttaagcgttatggttttggaatgcatgaaggtctttatactaacatgaacgcaattcggcgtgatgaagatttagataattttcactcaatctacgtagatcaatgggactgggaaaagattattgctaaagaagaaagaaatattgagactcttaaaactactgtcaaacaaatttttaaagcaattaaagaaactgaaaaagagctcagcgcacgctatccgggttctacttaccgcttacctagcgatattacttttattactacacaagaactggaagaccgctggccagatttagcaccagaagaacgtgaagataaaatagctaaagagaaaaaagcagtattcttaatgaaaattggtgataaattaaagcgtagtggtaagccacatgatggccgtgcaccagattacgatgactgggaattaaacggtgacttactattttggtatgaacctttaaaacgtaaaatagaaatttcttcaatgggaattcgagttagcgaagaatcgctgaaagagcaactcaaaaaagctcatactgaagaaagatctgatttacctttccacaaaatgcttttagaaggtaaacttccttatacaattggtgggggtattggccaatctcgtttatgtatgcttttgcttggaaaagctcatattggcgaagtccaagcaagtatttggcctcccgaaatgattgaatcatgtaaagctgccgacataaaaattctatag

SEQ ID NO: 83704 - protein, 336 aa, Lactobacillus johnsonii
MTLILPKDYHPSLTIRDTEAAIVFIRENFQDKIADKLNLQRMSAPMFVEKSTGLNDNLNGIERPVAFDMKAMPDDTIEVVHSLAKWKRLALKRYGFGMHEGLYTNMNAIRRDEDLDNFHSIYVDQWDWEKIIAKEERNIETLKTTVKQIFKAIKETEKELSARYPGSTYRLPSDITFITTQELEDRWPDLAPEEREDKIAKEKKAVFLMKIGDKLKRSGKPHDGRAPDYDDWELNGDLLFWYEPLKRKIEISSMGIRVSEESLKEQLKKAHTEERSDLPFHKMLLEGKLPYTIGGGIGQSRLCMLLLGKAHIGEVQASIWPPEMIESCKAADIKIL

SEQ ID NO: 83705 - DNA, 969 bp, Lactobacillus plantarum
  CDS (1)..(969): transl_table=11
atgcatttaattattccaaaggattacgatcctaaattatccgttaaagaaacccaacaggccattcgttacattcgtgaaacgttccaagatgaatttgggaagcaactaaacttatctcggctttcagcaccgatgttcgttgaaaagaaaactggtctgaacgataacttaaacggtgtcgaaaaacctgtctccttcactatgcaagacatgggtgatgaacaaatcgaaatcgttcactcacttgctaagtggaaacgggtcgctttaaagcgctacggttttgatatgcatgaaggtctctacacgaacatgaacgctattcgtaaggatgaagatttagacaactaccactccgcctacgtcgatcaatgggattgggaaaaagtgatcagtaaggaagaacgaaccgttgaaactttgaaagccgcggtacgtcaaatctttaaagtgatcaagcacatggaacacgaagtttggtacaagttcccacaagccgttcaccacttaccagacgaaattcacttcttaaccacacaagagctcgaagacatgtaccctgacatgacgccgcgcgaacgcgaaaacgccatttgcaagaaactcggctgtgtcttcttaatgcaaattggctggaagcttgattccggcgaacgtcacgatggccgcgcccccgactatgatgactggaagttgaacggcgatatcctcttctggtatgaaccattagaccaagctatcgaaatctcaagtatgggaatccgggtcgatgctgaatcaatgaagaaacaacttaaagacgtggacgccgaagaccggcttagcttgccataccaccaaatgatcttgaacgcggacgtcccttacacgatcggtggcgggattggtcaatcacggctctgcatgttattacttggcaaagcccatgtcggtgaagtacaagctgccttgtggcacaagccatga

SEQ ID NO: 83706 - protein, 322 aa, Lactobacillus plantarum
MHLIIPKDYDPKLSVKETQQAIRYIRETFQDEFGKQLNLSRLSAPMFVEKKTGLNDNLNGVEKPVSFTMQDMGDEQIEIVHSLAKWKRVALKRYGFDMHEGLYTNMNAIRKDEDLDNYHSAYVDQWDWEKVISKEERTVETLKAAVRQIFKVIKHMEHEVWYKFPQAVHHLPDEIHFLTTQELEDMYPDMTPRERENAICKKLGCVFLMQIGWKLDSGERHDGRAPDYDDWKLNGDILFWYEPLDQAIEISSMGIRVDAESMKKQLKDVDAEDRLSLPYHQMILNADVPYTIGGGIGQSRLCMLLLGKAHVGEVQAALWHKP

SEQ ID NO: 83707 - DNA, 993 bp, Pasteurella multocida
  CDS (1)..(993): transl_table=11
atgaagaaatcatttattttacaacaacaagaaattagttttgcgaagaacacgttcacagaaaaattagcagaacatttgggtattgttgaagttcaaggtcctatcctaagccaagttggtaatggtattcaagataatctttcaggtgcagagaaagcggtgcaagtaaatgtgaaacagatcacagatgccacctttgaggttgttcactctttagccaaatggaaacgtcatacacttgcgcgctttaattttgcacaaggtgaagggctatttgtgcatatgacggcacttcgtccagatgaagattctttagatcaaacccattctgtgtatgtagatcaatgggactgggaaaaagtgatttcagcagagcaacgtaaccttgcctatttgaaagaaactgttcgtgctatttatgccgcgattttagaaacggaagaagcggtaagtaaaaaattcggtttagccacctttttgccaaaggatattcagtttgtacacagtgaagaattagtacaacgttttccgaacatgaatgataaagagcgtgagaatgcgatttgtaaagaatatggcgcggtgttcttaatcgggattggtggcaaattgtctgatgggaaaccacatgatgtacgtgcacctgattatgatgactggacaacgccatcagaaggtgaatacaaaggattaaacggggatattttggtttggaacccaattttagaacgtgcttttgaattatcttccatggggatccgtgtggatgaaaccgcattacgtaaacagcttgctttaaccaacaatgaagaccgtttaaaatttgattggcaccaagatttagtcaatggtcgtttaccgttatctatcggtggtgggattgggcgctcacgcttagtgatgttgctattacagaaaaaacacattggtgaagtccaatccagtgtgtggccaaaatgggtgatggagcagtttgataatattctttaa

SEQ ID NO: 83708 - protein, 330 aa, Pasteurella multocida
MKKSFILQQQEISFAKNTFTEKLAEHLGIVEVQGPILSQVGNGIQDNLSGAEKAVQVNVKQITDATFEVVHSLAKWKRHTLARFNFAQGEGLFVHMTALRPDEDSLDQTHSVYVDQWDWEKVISAEQRNLAYLKETVRAIYAAILETEEAVSKKFGLATFLPKDIQFVHSEELVQRFPNMNDKERENAICKEYGAVFLIGIGGKLSDGKPHDVRAPDYDDWTTPSEGEYKGLNGDILVWNPILERAFELSSMGIRVDETALRKQLALTNNEDRLKFDWHQDLVNGRLPLSIGGGIGRSRLVMLLLQKKHIGEVQSSVWPKWVMEQFDNIL

SEQ ID NO: 83709 - DNA, 993 bp, Salmonella typhimurium
  CDS (1)..(993): transl_table=11
atgaaaaccgcttacattgccaaacaacgtcaaattagcttcgtgaaatcacatttctctcgccagctggaggagcgtctgggtctgattgaggtccaggcgccgatcctgagtcgcgtaggggatggtacgcaggataatttgtccggctgtgaaaaagcggtgcaggtaaaagtgaaagcattgcctgacgcccagttcgaagtggtgcattcactggcgaagtggaaacgtcaaaccctggggcaacatgacttcagcgcgggcgaagggctgtacacgcacatgaaagcccttcgccccgatgaagaccgactctctccgctccactcggtctatgtggatcagtgggactgggagcgtgtcatgggcgatggcgagcgccaattttccaccctgaaaagcacagtagaggctatatgggcaggaattaaggcgacggaagcagaagtgcataaacagtttggtctggcgccgttcctgccagagcaaattcagtttgttcacagtcaggaactgctggcgcgtttcccggatctggatgcgaaagggcgcgaacgcgcgatcgccaaagaacttggcgccgttttcctggtggggatcggcggtaaactgagcgatggccaccgccatgatgtacgcgcgccggattatgatgactggagctccgcatctgagctgggctacgccggtctgaacggcgatatcctggtgtggaacccggtgctggaagatgcgtttgagctttcctctatgggtatccgcgtagatgccgatacgctgatgcgccagctggcgttgaccggtgatgaagatcgtctgcaactggagtggcatcaggcgctgctgcgcggcgaaatgccgcagaccatcggcggcgggattgggcagtcgcgtctgacgatgttgctgctgcaattgccgcatattggtcaggtacagtgcggcgtatggcccgcgcaggttcgcgaaagcattcctgctattttataa

SEQ ID NO: 83710 - protein, 330 aa, Salmonella typhimurium
MKTAYIAKQRQISFVKSHFSRQLEERLGLIEVQAPILSRVGDGTQDNLSGCEKAVQVKVKALPDAQFEVVHSLAKWKRQTLGQHDFSAGEGLYTHMKALRPDEDRLSPLHSVYVDQWDWERVMGDGERQFSTLKSTVEAIWAGIKATEAEVHKQFGLAPFLPEQIQFVHSQELLARFPDLDAKGRERAIAKELGAVFLVGIGGKLSDGHRHDVRAPDYDDWSSASELGYAGLNGDILVWNPVLEDAFELSSMGIRVDADTLMRQLALTGDEDRLQLEWHQALLRGEMPQTIGGGIGQSRLTMLLLQLPHIGQVQCGVWPAQVRESIPAIL

SEQ ID NO: 83711 - DNA, 993 bp, Shigella flexneri
  CDS (1)..(993): transl_table=11
atgaaaaccgcttacattgccaaacaacgccaaattagcttcgtgaaatctcacttttctcgccaactggaagaacgtctggggctgatcgaagtccaggcgccgattcttagccgtgtgggggatggcacgcaggataacttgtcgggctgtgaaaaagcggtgcaggtaaaagtgaaagctctgcctgatgcccagttcgaagtggttcattcactggcgaagtggaaacgtcagaccttagggcaacacgacttcagcgcgggcgaagggctgtacacgcacatgaaagcccttcgccccgatgaagaccgtctttctccgttgcactcggtctatgttgaccagtgggactgggaacgcgtaatgggcgacggtgagcgtcaactctcgactctgaaaagcacggtagaggcgatctgggcgggaattaaagcaaccgaagctgcggttaacgaagagtttggcctggcaccgttcctgccggatcagattcacttcgtacacagccaggagttactgtctcgttatccggatctcgatgccaaagggcgtgagcgggcgattgcgaaagatcttggcgcggtattcctcgtcgggattggcggcaagttgagtgatggtcatcgtcacgacgtgcgcgcaccggattatgatgactggagcaccccgtcagagctgggccatgcgggcctgaacggcgatattctggtgtggaacccggtactggaagatgcgtttgagctttcttccatggggatccgcgtggatgccgacacgctgaagcatcagctggcgctgaccggtgatgaagatcgtctgcagctggaatggcatcaggcgctgctgcgcggtgaaatgccgcagaccatcggcggcggtatcggccagtctcgtttgactatgctgctgctgcaactgccgcatatcggccaggttcagtgtggagtatggccagctgctgttcgcgagagcgtcccttctctgctgtaa

SEQ ID NO: 83712 - protein, 330 aa, Shigella flexneri
MKTAYIAKQRQISFVKSHFSRQLEERLGLIEVQAPILSRVGDGTQDNLSGCEKAVQVKVKALPDAQFEVVHSLAKWKRQTLGQHDFSAGEGLYTHMKALRPDEDRLSPLHSVYVDQWDWERVMGDGERQLSTLKSTVEAIWAGIKATEAAVNEEFGLAPFLPDQIHFVHSQELLSRYPDLDAKGRERAIAKDLGAVFLVGIGGKLSDGHRHDVRAPDYDDWSTPSELGHAGLNGDILVWNPVLEDAFELSSMGIRVDADTLKHQLALTGDEDRLQLEWHQALLRGEMPQTIGGGIGQSRLTMLLLQLPHIGQVQCGVWPAAVRESVPSLL

SEQ ID NO: 83713 - DNA, 993 bp, Treponema pallidum
  CDS (1)..(993): transl_table=11
atggaaaaatcatttattttgcaacagcaggggatcagctttgccaagcacacatttacccaaaagctgatggagcacctgggactcatagaagttcagggacctcttctgagccaggtgggtgacgggatccaagatggtctttcaggtcgggagaaggcggtttccgtctccgtgaagcagatcccgggtactgcctttgaggttgtgcactcgttagcaaagtggaagcgccacacgcttgcccgctacggctttcaggataatgagggtttgtttgtacacatgatcgcgctccgcccggatgaagatttcttggatcaggtgcgctctgtgtgtgtggatcagtgggattgggagaaggtagtaccggtagggtcgagaaatcttgcgtatctgaaggacacggtgcgtaaggtctacggtgctcttcgggagtcggaggtgttggtaagtgagaggttcggcctacgggcgtttttgcctgcggatattgtatttgtacagagcgaggagctggtgcggcgttatccgcatttagacagcaaggggcgtgaggatgctatttgcaaagagcatggtgcggtgttcctgattgggatcggtggtgtgctttctgacggcaagccgcacgatgtgcgcgctccagattacgatgactggacgacgccttccgaaggggaatacaagggcctgaacggcgatattttggtgtggaatccagtgttggggcgtgcgtttgaagtgtcttcgatggggatacgggtggacgagggtgcgcttcgcacgcagctggctcttactggcgatgaggatagtctggcatgcagctggcaccaggatctgatcaatggtcgtcttcctcaatccatcggaggtggtatcggtcaatcccgtttggcgatgctactcctacaaaggaagcatattggtgaagttcaggccagtgtatggccgcggtcggtgagggaggagttcgagaacattctttga

SEQ ID NO: 83714 - protein, 330 aa, Treponema pallidum
MEKSFILQQQGISFAKHTFTQKLMEHLGLIEVQGPLLSQVGDGIQDGLSGREKAVSVSVKQIPGTAFEVVHSLAKWKRHTLARYGFQDNEGLFVHMIALRPDEDFLDQVRSVCVDQWDWEKVVPVGSRNLAYLKDTVRKVYGALRESEVLVSERFGLRAFLPADIVFVQSEELVRRYPHLDSKGREDAICKEHGAVFLIGIGGVLSDGKPHDVRAPDYDDWTTPSEGEYKGLNGDILVWNPVLGRAFEVSSMGIRVDEGALRTQLALTGDEDSLACSWHQDLINGRLPQSIGGGIGQSRLAMLLLQRKHIGEVQASVWPRSVREEFENIL

SEQ ID NO: 83715 - DNA, 993 bp, Yersinia pestis
  CDS (1)..(993): transl_table=11
atgaaaaaacaatttatccaaaaacaacaacaaatcagcttcgtaaaatcattcttttcccgccaattagagcaacaacttggcttgatcgaagtccaggctcctattttgagccgtgtgggtgatggaacccaagataacctttctggttctgagaaagcggtacaggtaaaagttaagtcattgccggattcaacttttgaagttgtacattcattagcgaagtggaaacgtaaaaccttagggcgttttgattttggtgctgaccaaggggtgtatacccatatgaaagcattgcgcccagatgaagatcgcctgagtgctattcattctgtatatgtagatcagtgggattgggaacgggttatgggggacggtgaacgtaacctggcttacctgaaatcgactgttaacaagatttatgcagcgattaaagaaactgaagcggcgatcagtgctgagtttggtgtgaagcctttcctgccggatcatattcagtttatccacagtgaaagcctgcgggccagattccctgatttagatgctaaaggccgtgaacgtgcaattgccaaagagttaggtgctgtcttccttatagggattggtggcaaattggcagatggtcaatcccatgatgttcgtgcgccagattatgatgattggacctctccgagtgcggaaggtttctctggattaaacggcgacattattgtctggaacccaatattggaagatgcctttgagatatcttctatgggaattcgtgttgatgccgaagctcttaagcgtcagttagccctgactggcgatgaagaccgcttggaactggaatggcatcaatcactgttgcgcggtgaaatgccacaaactatcgggggaggtattggtcagtcccgcttagtgatgttattgctgcagaaacaacatattggtcaggtgcaatgtggtgtttggggccctgaaatcagcgagaaagttgatggcctgctgtaa

SEQ ID NO: 83716 - protein, 330 aa, Yersinia pestis
MKKQFIQKQQQISFVKSFFSRQLEQQLGLIEVQAPILSRVGDGTQDNLSGSEKAVQVKVKSLPDSTFEVVHSLAKWKRKTLGRFDFGADQGVYTHMKALRPDEDRLSAIHSVYVDQWDWERVMGDGERNLAYLKSTVNKIYAAIKETEAAISAEFGVKPFLPDHIQFIHSESLRARFPDLDAKGRERAIAKELGAVFLIGIGGKLADGQSHDVRAPDYDDWTSPSAEGFSGLNGDIIVWNPILEDAFEISSMGIRVDAEALKRQLALTGDEDRLELEWHQSLLRGEMPQTIGGGIGQSRLVMLLLQKQHIGQVQCGVWGPEISEKVDGLL

SEQ ID NO: 83717 - DNA, 25 bp, Artificial sequence
  primer
atgaaaaccgcttacattgccaaac

SEQ ID NO: 83718 - DNA, 22 bp, Artificial sequence
  primer
ttacagcagagaagggacgctc

SEQ ID NO: 83719 - protein, 342 aa, Artificial sequence
  consensus sequence
  Variant (2)..(3): Xaa in position 2 to 3 is any amino acid
  Variant (5)..(7): Xaa in position 5 to 7 is any amino acid
  Variant (9)..(10): Xaa in position 9 to 10 is any amino acid
  Variant (12)..(14): Xaa in position 12 to 14 is any amino acid
  Variant (16)..(18): Xaa in position 16 to 18 is any amino acid
  Variant (20)..(20): Xaa in position 20 is any amino acid
  Variant (22)..(23): Xaa in position 22 to 23 is any amino acid
  Variant (25)..(26): Xaa in position 25 to 26 is any amino acid
  Variant (28)..(34): Xaa in position 28 to 34 is any amino acid
  Variant (36)..(37): Xaa in position 36 to 37 is any amino acid
  Variant (39)..(39): Xaa in position 39 is any amino acid
  Variant (41)..(41): Xaa in position 41 is any amino acid
  Variant (43)..(43): Xaa in position 43 is any amino acid
  Variant (44)..(45): Xaa in position 44 to 45 is any or no amino acid
  Variant (47)..(48): Xaa in position 47 to 48 is any amino acid
  Variant (50)..(59): Xaa in position 50 to 59 is any amino acid
  Variant (60)..(64): Xaa in position 60 to 64 is any or no amino acid
  Variant (66)..(66): Xaa in position 66 is any amino acid
  Variant (76)..(77): Xaa in position 76 to 77 is any amino acid
  Variant (79)..(82): Xaa in position 79 to 82 is any amino acid
  Variant (84)..(86): Xaa in position 84 to 86 is any amino acid
  Variant (90)..(92): Xaa in position 90 to 92 is any amino acid
  Variant (94)..(94): Xaa in position 94 is any amino acid
  Variant (96)..(96): Xaa in position 96 is any amino acid
  Variant (98)..(98): Xaa in position 98 is any amino acid
  Variant (101)..(101): Xaa in position 101 is any amino acid
  Variant (102)..(102): Xaa in position 102 is any or no amino acid
  Variant (104)..(106): Xaa in position 104 to 106 is any amino acid
  Variant (109)..(109): Xaa in position 109 is any amino acid
  Variant (118)..(124): Xaa in position 118 to 124 is any amino acid
  Variant (125)..(125): Xaa in position 125 is any or no amino acid
  Variant (127)..(130): Xaa in position 127 to 130 is any amino acid
  Variant (133)..(134): Xaa in position 133 to 134 is any amino acid
  Variant (136)..(137): Xaa in position 136 to 137 is any amino acid
  Variant (139)..(145): Xaa in position 139 to 145 is any amino acid
  Variant (147)..(158): Xaa in position 147 to 158 is any amino acid
  Variant (159)..(163): Xaa in position 159 to 163 is any or no amino acid
  Variant (166)..(167): Xaa in position 166 to 167 is any amino acid
  Variant (169)..(169): Xaa in position 169 is any amino acid
  Variant (171)..(175): Xaa in position 171 to 175 is any amino acid
  Variant (177)..(179): Xaa in position 177 to 179 is any amino acid
  Variant (182)..(182): Xaa in position 182 is any amino acid
  Variant (184)..(185): Xaa in position 184 to 185 is any amino acid
  Variant (187)..(187): Xaa in position 187 is any amino acid
  Variant (190)..(191): Xaa in position 190 to 191 is any amino acid
  Variant (193)..(193): Xaa in position 193 is any amino acid
  Variant (195)..(196): Xaa in position 195 to 196 is any amino acid
  Variant (202)..(203): Xaa in position 202 to 203 is any amino acid
  Variant (206)..(207): Xaa in position 206 to 207 is any amino acid
  Variant (209)..(210): Xaa in position 209 to 210 is any amino acid
  Variant (211)..(211): Xaa in position 211 is any or no amino acid
  Variant (213)..(214): Xaa in position 213 to 214 is any amino acid
  Variant (217)..(217): Xaa in position 217 is any amino acid
  Variant (226)..(226): Xaa in position 226 is any amino acid
  Variant (227)..(239): Xaa in position 227 to 239 is any or no amino acid
  Variant (246)..(246): Xaa in position 246 is any amino acid
  Variant (248)..(250): Xaa in position 248 to 250 is any amino acid
  Variant (252)..(254): Xaa in position 252 to 254 is any amino acid
  Variant (255)..(255): Xaa in position 255 is any or no amino acid
  Variant (257)..(257): Xaa in position 257 is any amino acid
  Variant (266)..(268): Xaa in position 266 to 268 is any amino acid
  Variant (270)..(271): Xaa in position 270 to 271 is any amino acid
  Variant (274)..(286): Xaa in position 274 to 286 is any amino acid
  Variant (288)..(290): Xaa in position 288 to 290 is any amino acid
  Variant (292)..(295): Xaa in position 292 to 295 is any amino acid
  Variant (297)..(298): Xaa in position 297 to 298 is any amino acid
  Variant (308)..(309): Xaa in position 308 to 309 is any amino acid
  Variant (311)..(312): Xaa in position 311 to 312 is any amino acid
  Variant (314)..(314): Xaa in position 314 is any amino acid
  Variant (316)..(316): Xaa in position 316 is any amino acid
  Variant (320)..(320): Xaa in position 320 is any amino acid
  Variant (323)..(325): Xaa in position 323 to 325 is any amino acid
  Variant (327)..(337): Xaa in position 327 to 337 is any amino acid
  Variant (338)..(341): Xaa in position 338 to 341 is any or no amino acid
QXXIXXXKXXFXXXLXXXLXLXXVXXPXXXXXXXGXXDXLXGXXXEXXVXXXXXXXXXXXXXXXEXVHSLAKWKRXXLXXXXFXXXEGLXXXMXAXRXDEXXLXXXHSXYVDQWDWEXXXXXXXXRXXXXLKXXVXXIXXXXXXXEXXXXXXXXXXXXXXXXXLPXXIXFXXXXXLXXXYPXLXXKXREXXIXKXXGAVFLXXIGXXLXXXGXXHDXRAPDYDDWXXXXXXXXXXXXXXLNGDILXWXXXLXXXXEXSSMGIRVDXXXLXXQLXXXXXXXXXXXXXHXXXLXXXXPXXIGGGIGQSRXXMXXLXKXHIGXVQXXXWXXXXXXXXXXXXXXXL

SEQ ID NO: 83720 - protein, 37 aa, Artificial sequence
  protein pattern
  Variant (2)..(5): Xaa in position 2 to 5 is any amino acid
  Variant (6)..(6): Xaa in position 6 is any or no amino acid
  Variant (8)..(8): Xaa in position 8 is any amino acid
  Variant (9)..(9): Xaa in position 9 is Ser or Thr
  Variant (19)..(19): Xaa in position 19 is Leu or Met
  Variant (20)..(20): Xaa in position 20 is Ala, Cys, Ser, Thr or Val
  Variant (22)..(23): Xaa in position 22 to 23 is any or no amino acid
  Variant (25)..(27): Xaa in position 25 to 27 is any amino acid
  Variant (29)..(29): Xaa in position 29 is Ile or Val
  Variant (31)..(31): Xaa in position 31 is Glu or Gln
  Variant (32)..(32): Xaa in position 32 is Ile or Val
  Variant (34)..(34): Xaa in position 34 is Ala, Cys, Ser, Thr or Val
  Variant (35)..(35): Xaa in position 35 is Ala, Gly or Ser
  Variant (36)..(36): Xaa in position 36 is Ile, Leu or Val
LXXXXXPXXIGGGIGQSRXXMXXLXXXHXGXXQXXXW

SEQ ID NO: 83721 - protein, 45 aa, Artificial sequence
  protein pattern
  Variant (2)..(3): Xaa in position 2 to 3 is any amino acid
  Variant (5)..(5): Xaa in position 5 is any amino acid
  Variant (7)..(9): Xaa in position 7 to 9 is any amino acid
  Variant (10)..(10): Xaa in position 10 is any or no amino acid
  Variant (12)..(12): Xaa in position 12 is any or no amino acid
  Variant (14)..(16): Xaa in position 14 to 16 is any amino acid
  Variant (17)..(17): Xaa in position 17 is Phe or Tyr
  Variant (19)..(19): Xaa in position 19 is any amino acid
  Variant (20)..(20): Xaa in position 20 is Leu or Met
  Variant (21)..(21): Xaa in position 21 is Asp, Asn, Ser or Thr
  Variant (22)..(22): Xaa in position 22 is Ala, Asp, Gly, Pro, Ser or Thr
  Variant (23)..(23): Xaa in position 23 is Lys or Arg
  Variant (24)..(24): Xaa in position 24 is Asp, Glu, Gly, Asn or Gln
  Variant (27)..(28): Xaa in position 27 to 28 is any amino acid
  Variant (29)..(29): Xaa in position 29 is Ala, Ile, Leu or Val
  Variant (30)..(30): Xaa in position 30 is Ala, Cys or Thr
  Variant (32)..(32): Xaa in position 32 is Asp, Glu or Lys
  Variant (33)..(34): Xaa in position 33 to 34 is any amino acid
  Variant (35)..(35): Xaa in position 35 is Ala or Cys
  Variant (36)..(36): Xaa in position 36 is Ile or Val
  Variant (38)..(38): Xaa in position 38 is Ile or Leu
  Variant (39)..(39): Xaa in position 39 is Ile, Met or Val
  Variant (40)..(40): Xaa in position 40 is any amino acid
  Variant (43)..(44): Xaa in position 43 to 44 is any amino acid
PXXIXFXXXXEXLXXXXPXXXXXXREXXXXKXXXXXFXXXIGXXL

SEQ ID NO: 83722 - protein, 40 aa, Artificial sequence
  protein pattern
  Variant (2)..(2): Xaa in position 2 is any amino acid
  Variant (12)..(12): Xaa in position 12 is any amino acid
  Variant (13)..(13): Xaa in position 13 is Ala or Thr
  Variant (15)..(16): Xaa in position 15 to 16 is any amino acid
  Variant (17)..(17): Xaa in position 17 is Phe, His or Tyr
  Variant (18)..(18): Xaa in position 18 is Asp, Gly or Asn
  Variant (19)..(23): Xaa in position 19 to 23 is any amino acid
  Variant (25)..(25): Xaa in position 25 is Ile, Leu or Val
  Variant (26)..(26): Xaa in position 26 is any amino acid
  Variant (27)..(27): Xaa in position 27 is Thr or Val
  Variant (28)..(28): Xaa in position 28 is any amino acid
  Variant (30)..(30): Xaa in position 30 is any amino acid
  Variant (32)..(32): Xaa in position 32 is Ile or Leu
  Variant (34)..(34): Xaa in position 34 is any amino acid
  Variant (37)..(37): Xaa in position 37 is any amino acid
  Variant (38)..(38): Xaa in position 38 is any or no amino acid
  Variant (40)..(40): Xaa in position 40 is Asp, Gly, Ser or Thr
EXVHSLAKWKRXXLXXXXXXXXXGXXXXMXAXRXDEXXLX

SEQ ID NO: 83723 - protein, 20 aa, Artificial sequence
  protein pattern
  Variant (3)..(3): Xaa in position 3 is Ala, Ile, Leu or Val
  Variant (12)..(13): Xaa in position 12 to 13 is any amino acid
  Variant (14)..(14): Xaa in position 14 is Ile, Met or Val
  Variant (15)..(16): Xaa in position 15 to 16 is any amino acid
  Variant (17)..(17): Xaa in position 17 is Glu, Gly, Gln or Ser
  Variant (18)..(18): Xaa in position 18 is any amino acid
  Variant (20)..(20): Xaa in position 20 is Asn, Gln, Ser or Thr
HSXYVDQWDWEXXXXXXXRX

SEQ ID NO: 83724 - protein, 18 aa, Artificial sequence
  protein pattern
  Variant (2)..(3): Xaa in position 2 to 3 is any amino acid
  Variant (6)..(6): Xaa in position 6 is Gly or Val
  Variant (9)..(9): Xaa in position 9 is Ala or Pro
  Variant (15)..(17): Xaa in position 15 to 17 is any amino acid
  Variant (18)..(18): Xaa in position 18 is Gly, Ser or Thr
GXXHDXRAXDYDDWXXXX

SEQ ID NO: 83725 - protein, 27 aa, Artificial sequence
  protein pattern
  Variant (2)..(2): Xaa in position 2 is any amino acid
  Variant (3)..(3): Xaa in position 3 is Asp, Glu or Pro
  Variant (4)..(4): Xaa in position 4 is any amino acid
  Variant (6)..(9): Xaa in position 6 to 9 is any or no amino acid
  Variant (11)..(11): Xaa in position 11 is Ile, Leu or Val
  Variant (16)..(16): Xaa in position 16 is Ile or Val
  Variant (19)..(19): Xaa in position 19 is Asp or Ser
  Variant (20)..(21): Xaa in position 20 to 21 is any amino acid
  Variant (22)..(22): Xaa in position 22 is Ala, Ser, Thr or Val
  Variant (23)..(23): Xaa in position 23 is Leu or Met
  Variant (24)..(25): Xaa in position 24 to 25 is any amino acid
  Variant (27)..(27): Xaa in position 27 is Leu or Val
WXXXLXXXXEXSSMGXRVXXXXXXXQX

SEQ ID NO: 83726 - DNA, 1131 bp, Escherichia coli
  CDS (1)..(1131): transl_table=11
atgattccatttaacgcaccgccggtggtgggaaccgaactcgactatatgcagtcggcaatgggtagcggcaaactgtgtggcgatggcggttttacccgtcgctgccagcagtggctggagcaacgttttggcagcgccaaagtgttactgacgccgtcctgcaccgcttcgctggagatggcggcgctgctgctcgatatccagcctggcgatgaagtgatcatgccgagctacacctttgtctccaccgccaatgcctttgtgctgcgtggcgcaaaaatcgtttttgtggatgttcgcccggacaccatgaacatcgacgaaacgctgattgaagcggcgatcaccgacaaaacgcgcgttatcgtgccggtccattacgcgggtgtggcctgcgaaatggacaccattatggcgttggcgaaaaagcataatttgtttgtggtagaagatgccgctcagggcgtgatgtccacttacaaagggcgtgcactgggaaccattggtcatattggctgctttagcttccatgaaaccaaaaactacacggcgggcggtgaaggcggcgcgacgctgattaacgataaagcgttaatcgaacgagccgagatcatccgtgaaaagggcactaaccgcagccagttcttccgtggtcaggtcgataaatatacctggcgcgatattggctccagctatttgatgtccgatctgcaagctgcatacctgtgggcgcaactggaagcagcggatcgtatcaaccagcaacgtctggcgctgtggcaaaactactacgatgcgttagcgcctctggcgaaagccgggcgtatcgagctgccgtcgattcccgatggctgcgtgcagaacgcgcatatgttctacattaaactgcgggatattgatgaccggagcgcgttgattaactttctgaaagaagcggaaatcatggcggtgtttcattacattccgctgcacggttgccctgcgggggaacactttggtgagttccacggtgaagatcgctacaccaccaaagagagcgagcgcctgctgcgcctgccgctgttctacaacctgtcgcccgtcaatcagcgtacggtaattgcgactttgttgaactacttttcctaa

SEQ ID NO: 83727 - protein, 376 aa, Escherichia coli
MIPFNAPPVVGTELDYMQSAMGSGKLCGDGGFTRRCQQWLEQRFGSAKVLLTPSCTASLEMAALLLDIQPGDEVIMPSYTFVSTANAFVLRGAKIVFVDVRPDTMNIDETLIEAAITDKTRVIVPVHYAGVACEMDTIMALAKKHNLFVVEDAAQGVMSTYKGRALGTIGHIGCFSFHETKNYTAGGEGGATLINDKALIERAEIIREKGTNRSQFFRGQVDKYTWRDIGSSYLMSDLQAAYLWAQLEAADRINQQRLALWQNYYDALAPLAKAGRIELPSIPDGCVQNAHMFYIKLRDIDDRSALINFLKEAEIMAVFHYIPLHGCPAGEHFGEFHGEDRYTTKESERLLRLPLFYNLSPVNQRTVIATLLNYFS

SEQ ID NO: 83728 - DNA, 1152 bp, Vibrio vulnificus YJ016
  CDS (1)..(1152): transl_table=11
atgtttgagacaaattatatgattccattcaataaacctccagttactggtgaagaacttcaatttattcaggaagctatttcttgtgggaagctttcgggagatggagaattctcaagaaagtgcgaaaattggtttgtatcacatactggtacgactaaagctcttcttactccttcatgtactcatgcgctagaaatggctgcgatgctcatcgatatccagcctggtgatgaagtaataatgccaagttatacattcgttagtacagccaacgcttttgtattaagaggggccaaagtagtatttgtggacattcgagctgatacgatgaatatcgacgaatccaagatagaggtagctatcaccgagcgcactaaggcgatcgtgcccgtacattatgcaggggtggcttgtgatatggacactataatgggtttatctgacaaatatggtttgtatgttattgaagatgcagcccaagggatgatgtcaacttataaaggtcgagcgttaggtagtattggtcatatagggacctatagttttcatgaaaccaaaaattatacgagtggtggtgaaggtggtttactgttggttaatgatcagagtttttctcaacgagcagaaataattagagaaaaaggcactaatcgcaatcagttttttagaggtatggttgataaatatacatgggtagatgttggtagtagtatgttacctagtgaaattcaatctgcttatttatgggcccagttgattaatgctaaaagaattaatgagaagagaattaatgattggaattactattttgatagtttgttacccttgaaggaaaaaggattaattgagttgcccaacattccaattgaatgtacacacaatgctcatatgttctacattaaactaccggacttaacccaaagaacaaggtttattgaagccatgtttaaacaaggtgttctttctgtttttcattatataccattacattcttcgcctgcaggaaaaagttttggtcgattcaatggtaaggatatctatacaaccatggaaagtgaaaaattagttcgcttacctatgttttatggattggctctctcagagagaaataagatcatatctactatttttgatattttggagtcttaa

SEQ ID NO: 83729 - protein, 383 aa, Vibrio vulnificus YJ016
MFETNYMIPFNKPPVTGEELQFIQEAISCGKLSGDGEFSRKCENWFVSHTGTTKALLTPSCTHALEMAAMLIDIQPGDEVIMPSYTFVSTANAFVLRGAKVVFVDIRADTMNIDESKIEVAITERTKAIVPVHYAGVACDMDTIMGLSDKYGLYVIEDAAQGMMSTYKGRALGSIGHIGTYSFHETKNYTSGGEGGLLLVNDQSFSQRAEIIREKGTNRNQFFRGMVDKYTWVDVGSSMLPSEIQSAYLWAQLINAKRINEKRINDWNYYFDSLLPLKEKGLIELPNIPIECTHNAHMFYIKLPDLTQRTRFIEAMFKQGVLSVFHYIPLHSSPAGKSFGRFNGKDIYTTMESEKLVRLPMFYGLALSERNKIISTIFDILES

SEQ ID NO: 83730 - DNA, 1143 bp, Idiomarina loihiensis L2TR
  CDS (1)..(1143): transl_table=11
atgattccatttaataagccgcctttgacaggcaacgaagttcaatacattacagaagcattgaagggtaataagatttccggagacggcccttttggaaaacgctgtcagcaatggtttgaagaaaatttaccaactcaaaaggctcttttaacgccttcctgtactgcagcactcgagcttgccgctatccttattgatgtccagtctggcgatgaaataattatgccaagctacaccttcgttagcacagccaacgcatttgtattgcggggagctaaaatcgttttcgtcgatattcgccctgatacgatgaatattgatgaaacgaaaattgaggctgcaattacagatagaactaaagcgattgttcccgtccattatgcgggagttagttgtgaaatggacgccattatggatattgctgggcgttatagtctttacgttatcgaagatgcagctcagggagtaatgagtagctataaagaaagacctttaggcactattggccatttgggcgcttttagcttccatgaaaccaaaaactatacgagtggtggcgaaggcggcctgttaataattaatgatgctcgatttacagaacgagctgaagttattcgtgaaaaaggtactaatagaagtcaattttttagagggcaagtagacaagtatacttgggttgatattggtagtagctacctgcctagtgaaatgcaggcggcatacctttgggctcagcttgagaaagcaaatgaaataaatgatgctcgactccgtacttggaaatcttactatgattcttttagaaaattaattcaggaaggttttatagagttgccgataattcctgattattgtatccacaatgctcatatgttctatataaaagttaaaaacttacaagtgcgaactgagttactcgaatttttaaaaaataaaaatattttgggggcttttcactatatacctttacattcgactcctgtaggtaaggactgggggcgattttctgaggatgaagtgtatacaacatctgaaagcgaacgtttgttaagactaccaattttttttggtataaaagatgaagaagtttcgctagtagtaaaagaagtatcaaatttctttaaggaacctcatgcttaa

SEQ ID NO: 83731 - protein, 380 aa, Idiomarina loihiensis L2TR
MIPFNKPPLTGNEVQYITEALKGNKISGDGPFGKRCQQWFEENLPTQKALLTPSCTAALELAAILIDVQSGDEIIMPSYTFVSTANAFVLRGAKIVFVDIRPDTMNIDETKIEAAITDRTKAIVPVHYAGVSCEMDAIMDIAGRYSLYVIEDAAQGVMSSYKERPLGTIGHLGAFSFHETKNYTSGGEGGLLIINDARFTERAEVIREKGTNRSQFFRGQVDKYTWVDIGSSYLPSEMQAAYLWAQLEKANEINDARLRTWKSYYDSFRKLIQEGFIELPIIPDYCIHNAHMFYIKVKNLQVRTELLEFLKNKNILGAFHYIPLHSTPVGKDWGRFSEDEVYTTSESERLLRLPIFFGIKDEEVSLVVKEVSNFFKEPHA

SEQ ID NO: 83732 - DNA, 1146 bp, Actinobacillus pleuropneumoniae serovar 1 str. 4074
  CDS (1)..(1146): transl_table=11
atgcaaattccttttaataaaccgccgattgtcggtacggaactcggttatatgcaacaagcgatggcaagcgggaaattatccggcgacggcttttatagccggcgttgcgagcggtggctggaaaatcaattcggtacggcaaaagcattgcttacgccgtcttgtaccgctgcattggaaatggcggcgatattaatcgatattcaagccggcgatgaagtgattatgccgagttatacctttgtttcgaccgctaacgcatttgtgttgcgtggagcaaagattgtgtttgtcgatattcgtcccgatacgatgaatattgatgaaacgaaaattgaagcggcgattacaccgaaaaccaaagcgattgtgccggtacattacgccggtatcgcctgtgaaatggatacgattatggcaatagccgaaaaatatcggttgtatgtgatcgaagatgcggcgcaagcggtaatgtcctcttacaaaggtaaagcattaggcactattgggcatttcggctgttatagttttcacgaaactaagaattatagtgccggcggcgaaggcggtgctttattgattaatgatgatcgatttattgctcgtgcggaagtgatccgagaaaaaggcacaaatcgtagtcaattctttcgtggtgaaacggataaatacacttggcgagatctcggatccagttttttaatgtcggaattacaagcggcctatttatatgcacaattggaagtcgcacaacaaatcaagcagacccgtttagccgtttggcaacactattttgaagtcttacgtccgtttgccgaacaaggtcgtcttgagttaccgacttgcccgcccgaatgtgaacaaaacggccatctgttttatctgaaatggcgcaattcggatgaacgcaatgactttatcgaacggctaaaacaacacggaattttagcggtatttcattatgtgccgttacatagcagccctgccggtcagcggttcggctcgtttatcggcgaagaccgttttactacttcggaaagcgaacgcttggtgcgtttaccgctattttataatttacaaccgcaagaatcggataaaattattcgggttatattggaatttctacatcaatgcaatcattga

SEQ ID NO: 83733 - protein, 381 aa, Actinobacillus pleuropneumoniae serovar 1 str. 4074
MQIPFNKPPIVGTELGYMQQAMASGKLSGDGFYSRRCERWLENQFGTAKALLTPSCTAALEMAAILIDIQAGDEVIMPSYTFVSTANAFVLRGAKIVFVDIRPDTMNIDETKIEAAITPKTKAIVPVHYAGIACEMDTIMAIAEKYRLYVIEDAAQAVMSSYKGKALGTIGHFGCYSFHETKNYSAGGEGGALLINDDRFIARAEVIREKGTNRSQFFRGETDKYTWRDLGSSFLMSELQAAYLYAQLEVAQQIKQTRLAVWQHYFEVLRPFAEQGRLELPTCPPECEQNGHLFYLKWRNSDERNDFIERLKQHGILAVFHYVPLHSSPAGQRFGSFIGEDRFTTSESERLVRLPLFYNLQPQESDKIIRVILEFLHQCNH

SEQ ID NO: 83734 - DNA, 1095 bp, Escherichia coli O157:H7 EDL933
  CDS (1)..(1095): transl_table=11
atgaaatatataccagtttaccaaccgtcattgacaggaaaagaaaaagaatatgtaaatgaatgtctggactcaacgtggatttcatcaaaaggaaactatattcagaagtttgaaaataaatttgcggaacaaaaccatgtgcaatatgcaactactgtaagtaatggaacggttgctcttcatttagctttgttagcgttaggtatatcggaaggagatgaagttattgttccaacactgacatatatagcatcagttaatgctataaaatacacaggagccacccccattttcgttgattcagataatgaaacttggcaaatgtctgttagtgacatagaacaaaaaatcactaataaaactaaagctattatgtgtgtccatttatacggacatccatgtgatatggaacaaattgtagaactggccaaaagtagaaatttgtttgtaattgaagattgcgctgaagcctttggttctaaatataaaggtaaatatgtgggaacatttggagatatttctacttttagcttttttggaaataaaactattactacaggtgaaggtggaatggttgtcacgaatgacaaaacactttatgaccgttgtttacattttaaaggccaaggattagctgtacataggcaatattggcatgacgttataggctacaattataggatgacaaatatctgcgctgctataggattagcccagttagaacaagctgatgattttatatcacgaaaacgtgaaattgctgatatttataaaaaaaatatcaacagtcttgtacaagtccacaaggaaagtaaagatgtttttcacacttattggatggtctcaattctaactaggaccgcagaggaaagagaggaattaaggaatcaccttgcagataaactcatcgaaacaaggccagttttttaccctgtccacacgatgccaatgtactcggaaaaatatcaaaagcaccctatagctgaggatcttggttggcgtggaattaatttacctagtttccccagcctatcgaatgagcaagttatttatatttgtgaatctattaacgaattttatagtgataaatag

SEQ ID NO: 83735 - protein, 364 aa, Escherichia coli O157:H7 EDL933
MKYIPVYQPSLTGKEKEYVNECLDSTWISSKGNYIQKFENKFAEQNHVQYATTVSNGTVALHLALLALGISEGDEVIVPTLTYIASVNAIKYTGATPIFVDSDNETWQMSVSDIEQKITNKTKAIMCVHLYGHPCDMEQIVELAKSRNLFVIEDCAEAFGSKYKGKYVGTFGDISTFSFFGNKTITTGEGGMVVTNDKTLYDRCLHFKGQGLAVHRQYWHDVIGYNYRMTNICAAIGLAQLEQADDFISRKREIADIYKKNINSLVQVHKESKDVFHTYWMVSILTRTAEEREELRNHLADKLIETRPVFYPVHTMPMYSEKYQKHPIAEDLGWRGINLPSFPSLSNEQVIYICESINEFYSDK

SEQ ID NO: 83736 - DNA, 1173 bp, Escherichia coli O157:H7 EDL933
  CDS (1)..(1173): transl_table=11
  misc_feature (554)..(554): y is t or c
gtggacaggtattcaatggcggaaggaaaagcaatgtcagaatttttgcctttttcgagaccagcaatgggcgtggaggaactcgctgcagttaaagaggttctcgaatccggttggatcacaaccggtccgaagaatcacgcgcttgaacaagccttttgccagttgacgggaaatcagcatgccatcgcggtcagttcagccaccgccggaatgcatatcacgctaatggcgttggaaattggcaagggcgatgaagtgattacgccttccctgacctgggtttcaaccctcaatatgatttccttgcagggtgcaacgccggtaatggtggatgtcgatcgcgatacgctgatggtcacgcctgaagcgatcgaatcagccattacgccacgcactaaagccatcattccggtgcattatgccggtgcgccagcagatattaacgccattcgcgccattggcgaacgttacggcatcgcagttatcgaagatgctgcccatgccgtaggtacgtattacaaagggcgacatattggcgcaaaaggtaccgytattttttcatttcatgccattaaaaatattacctgtgcggaaggaggcctgattgttactgataatgaaaatattgcccgccagctacggatgctgaaatttcacggcctgggtgtcgatgcctatgacagacaaacctggggccgtgcaccgcaggctgaagtcttaacgccgggctataagtacaatctgaccgatattaacgccgcgattgccctgacacagttagccaaattagagcacctcaacacccgtcggcgcgaaattgcccagcaatatcagcaagcactggcagctctcccctttcagccattaagccttcccgcctggccgcacgttcacgcctggcatctgtttattattcgtgtcgatgaacaacgttgtggtatcagtcgcgatgcgttgatggaagcgttaaaagaaagaggtattggtaccgggttacatttccgcgccgctcacacacaaaaatattatcgcgagcgttttccctcgctgtcgttaccgaataccgaatggaatagcgaacgcatctgttctttgccgctgttcccggatatgactaccgccgatgccgaccgtgtcatcacagcccttcagcaactcgcaggacaataa

SEQ ID NO: 83737 - protein, 390 aa, Escherichia coli O157:H7 EDL933
  misc_feature (185)..(185): The Xaa at location 185 stands for Ala, or Val.
MDRYSMAEGKAMSEFLPFSRPAMGVEELAAVKEVLESGWITTGPKNHALEQAFCQLTGNQHAIAVSSATAGMHITLMALEIGKGDEVITPSLTWVSTLNMISLQGATPVMVDVDRDTLMVTPEAIESAITPRTKAIIPVHYAGAPADINAIRAIGERYGIAVIEDAAHAVGTYYKGRHIGAKGTXIFSFHAIKNITCAEGGLIVTDNENIARQLRMLKFHGLGVDAYDRQTWGRAPQAEVLTPGYKYNLTDINAAIALTQLAKLEHLNTRRREIAQQYQQALAALPFQPLSLPAWPHVHAWHLFIIRVDEQRCGISRDALMEALKERGIGTGLHFRAAHTQKYYRERFPSLSLPNTEWNSERICSLPLFPDMTTADADRVITALQQLAGQ

SEQ ID NO: 83738 - DNA, 1131 bp, Escherichia coli O157:H7 EDL933
  CDS (1)..(1131): transl_table=11
  misc_feature (565)..(565): k is g or t
atgattccatttaacgcaccgccggtggtgggaaccgaactcgactatatgcagtcggcaatgggtagcggcaaactgtgtggcgatggcggttttacccgtcgctgccagcagtggctggagcaacgttttggcagcgccaaagtgttactgacgccgtcctgcaccgcttcgctggagatggcggcgctgctgctcgatatccagcctggcgatgaagtgatcatgccgagctacacctttgtctccaccgccaatgcctttgtgctgcgtggcgcaaaaatcgtttttgtggatgttcgcccggacaccatgaacatcgacgaaacgttgattgaagcggcgatcaccgacaaaacgcgcgttatcgtgccggtgcattacgcgggcgtggcctgcgaaatggacaccattatggcgttggcgaaaaagcataatctgtttgtggtggaagatgctgctcagggcgtgatgtccacttacaaagggcgtgcactgggaaccattggtcatattggctgctttagcttccatgaaaccaaaaactacacggcgggcggtgaakgcggcgcgacgctgattaacgataaagcgttgatcgaacgagccgagatcatccgtgaaaaaggcacaaaccgcagccagttcttccgtggtcaggtcgataaatatacctggcgcgatatcggctccagctatttgatgtccgatctgcaagctgcgtacctgtgggcgcaactggaagcagcggatcgtatcaaccagcaacgtctggcgctgtggcaaaactactacgatgcgttagcacctctggcgaaagccgggcgtatcgagctgccgtcgattcccgatggctgcttgcagaacgcgcatatgttttacattaaactgcgggatattggtgaccggagcgcgttgattaactttctgaaagaagcggaaatcatggcggtgttccattacattccgctgcacggttgccctgcgggggaacgctttggtgagttccacggtgaagatcgctacaccaccaaagagagcgagcgcctgctgcgcctgccgctgttctacaacctgtcgcccgtcaatcagcgtacggtaattgcgactttgttgaactacttctcctga

SEQ ID NO: 83739 - protein, 376 aa, Escherichia coli O157:H7 EDL933
  misc_feature (189)..(189): The Xaa at location 189 stands for Cys, or Gly.
MIPFNAPPVVGTELDYMQSAMGSGKLCGDGGFTRRCQQWLEQRFGSAKVLLTPSCTASLEMAALLLDIQPGDEVIMPSYTFVSTANAFVLRGAKIVFVDVRPDTMNIDETLIEAAITDKTRVIVPVHYAGVACEMDTIMALAKKHNLFVVEDAAQGVMSTYKGRALGTIGHIGCFSFHETKNYTAGGEXGATLINDKALIERAEIIREKGTNRSQFFRGQVDKYTWRDIGSSYLMSDLQAAYLWAQLEAADRINQQRLALWQNYYDALAPLAKAGRIELPSIPDGCLQNAHMFYIKLRDIGDRSALINFLKEAEIMAVFHYIPLHGCPAGERFGEFHGEDRYTTKESERLLRLPLFYNLSPVNQRTVIATLLNYFS

SEQ ID NO: 83740 - DNA, 1131 bp, Yersinia pestis CO92
  CDS (1)..(1131): transl_table=11
atgattccatttaacactccaccgatagtgggcactgaactgggttatatgcaggctgcgatgagcagtggcaagttatgcggtgatggtggttttacccgtcgctgccagcagtggatggagaaacgttttaactgcccaaaagtgttactgacgccatcttgtaccgcctcgttggaaatggccgcgttattgctggatatcaagcccggtgatgaagtgatcatgccaagttttacctttgtttctaccgccaatgcctttgtgctgcgcggggccaaaatggtgtttgtcgatatccgtccagacaccatgaatatcgatgaaaccaagattgaagcggcgatcaccgataaaacccgggttattgtgccagtccactacgcaggggttgcctgtgagatggataccatcatggcactggcgaaaaagcataatttgtttgtggtagaagatgcggctcaaggcgtgatgtcaacctacaaaggtaaagctctgggtaccattggccatattggctgcttcagcttccatgaaaccaaaaattacactgcgggcggtgaaggtggggcgacgttgatcaatgatccttcattgattgatcgtgcagaaattatccgtgaaaagggcaccaaccgtagccaattcttccgtggtcaggtggataaatacacctggcgtgacatcggctccagctacttgatgtctgatttacaggccgcttacctgtggggccagttagaggcagcagagcagatcaacgaacgccgtctggcgctatggcatggttattataatgctttcaaaccgttggccgatgctgggcgcattgatttaccggtgatcccaggcaacgtggtgcaaaatgcccacatgttttatattaaactgcgtgatattgaggagcgctctgcatttatcagctatttaaaagaagcggatattatggcggtattccactacatcccattacatgcgtgtccagcaggtgaggcgtttggccgtatggctggcgaagaccgctttacctccaaggagagtgagcgtctggtgcgcttacctattttctacaacctgactgatgttaatcagagcacggttattaatactgtgctgagtttcttcgtctga

SEQ ID NO: 83741 - protein, 376 aa, Yersinia pestis CO92
MIPFNTPPIVGTELGYMQAAMSSGKLCGDGGFTRRCQQWMEKRFNCPKVLLTPSCTASLEMAALLLDIKPGDEVIMPSFTFVSTANAFVLRGAKMVFVDIRPDTMNIDETKIEAAITDKTRVIVPVHYAGVACEMDTIMALAKKHNLFVVEDAAQGVMSTYKGKALGTIGHIGCFSFHETKNYTAGGEGGATLINDPSLIDRAEIIREKGTNRSQFFRGQVDKYTWRDIGSSYLMSDLQAAYLWGQLEAAEQINERRLALWHGYYNAFKPLADAGRIDLPVIPGNVVQNAHMFYIKLRDIEERSAFISYLKEADIMAVFHYIPLHACPAGEAFGRMAGEDRFTSKESERLVRLPIFYNLTDVNQSTVINTVLSFFV

SEQ ID NO: 83742 - DNA, 1158 bp, Salmonella typhimurium LT2
  CDS (1)..(1158): transl_table=11
atggctgaaggaaaaatgatgtcggactttttgcctttctcccgtccggcgatgggcgcggaagagcttgctgccgttaagaccgtactggactcaggttggataacaaccggcccgaaaaatcaggaactggaagcggcgttttgtcggctaactggcaatcaatatgccgttgccgtcagttcagccactgccggtatgcacatcgcgttgatggcgctgggcattggtgaaggcgacgaggtcattacaccgtcaatgacgtgggtttctacgctaaatatgatcgttttactcggcgcgaaccccgtcatggtcgatgtcgatcgcgatacgctgatggtcacgcctgaacatatcgaagccgcgattacgccacaaaccaaagcaattatccccgtccactacgctggcgcgcccgccgatctggacgctatttacgctcttggcgagcgttatggcattccagtgattgaagacgcggcgcacgcgacaggaaccagctacaaaggtcgccacattggcgcccggggcaccgcgattttctccttccacgccattaagaacattacctgcgctgaaggcggtatcgtcgtcacggataacccgcaattcgccgataaactgcgcagtctcaagtttcacgggcttggcgttgatgcctgggatcgacagagcgggggacgcgcgccacaagcggaagtcctggcgccgggctacaaatataatttgcccgacctcaacgccgctatcgcgcttgcccagttacagaaactggatgcgcttaacgctcgacgcgccgccatcgcagcgcagtaccaccaggcaatggcagacctgccttttcagcctctgagccttccgtcgtgggagcatattcacgcctggcatttattcattatccgggtcgatgaagcccgctgcggtattacccgggatgctctgatggcatcgctgaaaacgaaaggcatcggcacagggctgcatttccgcgccgcgcatacgcaaaaatattatcgcgaacgtttcccaacgctcacgctgcctgacaccgagtggaacagcgagcggatctgctcactgccgctcttcccggacatgaccgagagtgactttgatcgagtcattaccgcccttcatcagatagcaggacaataa

SEQ ID NO: 83743 - protein, 385 aa, Salmonella typhimurium LT2
MAEGKMMSDFLPFSRPAMGAEELAAVKTVLDSGWITTGPKNQELEAAFCRLTGNQYAVAVSSATAGMHIALMALGIGEGDEVITPSMTWVSTLNMIVLLGANPVMVDVDRDTLMVTPEHIEAAITPQTKAIIPVHYAGAPADLDAIYALGERYGIPVIEDAAHATGTSYKGRHIGARGTAIFSFHAIKNITCAEGGIVVTDNPQFADKLRSLKFHGLGVDAWDRQSGGRAPQAEVLAPGYKYNLPDLNAAIALAQLQKLDALNARRAAIAAQYHQAMADLPFQPLSLPSWEHIHAWHLFIIRVDEARCGITRDALMASLKTKGIGTGLHFRAAHTQKYYRERFPTLTLPDTEWNSERICSLPLFPDMTESDFDRVITALHQIAGQ

SEQ ID NO: 83744 - DNA, 1131 bp, Salmonella typhimurium LT2
  CDS (1)..(1131): transl_table=11
atgattccttttaatgcgccgccggtggtgggaaccgaactcgaatacatgcagtctgcaatgagcagcggcaaactgtgcggcgacggcggctttacgcgtcgttgccagcagtggctggagcaacatttcggcagcgcgaaggtgttgctaacgccttcctgtaccgcatcgctggagatggcggctctgttgttggatattcagcccggcgatgaagtgatcatgccgagctttacgtttgtctccaccgctaacgcttttgtcctgcgcggcgcgaaaattgtgtttgtcgatattcgtccggatacgatgaatattgacgaaacgctgattgaggcggcgattactgataaaacccgcgctatcgtgccggtacactacgctggcgtcgcttgtgaaatggacgtcatcatggcgctggcggataagtataatctgttcgttgtcgaggatgccgcccagggtgtgatgtccacgtacaaagggcgcgcattagggacgatcggtcacatcggctgttttagcttccatgaaaccaaaaattacaccgctggcggcgaaggcggcgcgacgctgatcaacgatcgtacgctaattgaacgcgcggagatcatccgcgaaaaaggcaccaaccgtagccagttcttccgtggtcaggtggataaatacacctggcgggatatcggctccagttatttgatgtccgatctgcaggctgcctatctgtgggcgcaactggaggccgccgatcgtatcaatcaacagcgtctgtcgctgtggcagacttactacgatgcgttaacgccgctggcgcgcgccgggcgtttcgagctgccttctattccggaaaactgcgggcataatgcccatatgttttacatcaaactgcgggatatcgccgatcgcagcgcgctgattaatttcctgaaagaggcggaaatcatggcggtattccattacattccgctgcatgattgtccggcgggcgataaattcggcgagtttatcggggacgatgtctacaccacaaaagagagcgaacgtttgttgcgtctgccgctgttttataaccttgcgcccgtcgatcaacgaacggtgattactaccttgctaaattatttctcctga

SEQ ID NO: 83745 - protein, 376 aa, Salmonella typhimurium LT2
MIPFNAPPVVGTELEYMQSAMSSGKLCGDGGFTRRCQQWLEQHFGSAKVLLTPSCTASLEMAALLLDIQPGDEVIMPSFTFVSTANAFVLRGAKIVFVDIRPDTMNIDETLIEAAITDKTRAIVPVHYAGVACEMDVIMALADKYNLFVVEDAAQGVMSTYKGRALGTIGHIGCFSFHETKNYTAGGEGGATLINDRTLIERAEIIREKGTNRSQFFRGQVDKYTWRDIGSSYLMSDLQAAYLWAQLEAADRINQQRLSLWQTYYDALTPLARAGRFELPSIPENCGHNAHMFYIKLRDIADRSALINFLKEAEIMAVFHYIPLHDCPAGDKFGEFIGDDVYTTKESERLLRLPLFYNLAPVDQRTVITTLLNYFS

SEQ ID NO: 83746 - DNA, 1206 bp, Yersinia pestis KIM
  CDS (1)..(1206): transl_table=11
ttgctgctttacgtctctatattcgtagtggtgcctccattgagagtaccgcgtattggttatgcaggggatgagatgattccatttaacactccaccgatagtgggcactgaactgggttatatgcaggctgcgatgagcagtggcaagttatgcggtgatggtggttttacccgtcgctgccagcagtggatggagaaacgttttaactgcccaaaagtgttactgacgccatcttgtaccgcctcgttggaaatggccgcgttattgctggatatcaagcccggtgatgaagtgatcatgccaagttttacctttgtttctaccgccaatgcctttgtgctgcgcggggccaaaatggtgtttgtcgatatccgtccagacaccatgaatatcgatgaaaccaagattgaagcggcgatcaccgataaaacccgggttattgtgccagtccactacgcaggggttgcctgtgagatggataccatcatggcactggcgaaaaagcataatttgtttgtggtagaagatgcggctcaaggcgtgatgtcaacctacaaaggtaaagctctgggtaccattggccatattggctgcttcagcttccatgaaaccaaaaattacactgcgggcggtgaaggtggggcgacgttgatcaatgatccttcattgattgatcgtgcagaaattatccgtgaaaagggcaccaaccgtagccaattcttccgtggtcaggtggataaatacacctggcgtgacatcggctccagctacttgatgtctgatttacaggccgcttacctgtggggccagttagaggcagcagagcagatcaacgaacgccgtctggcgctatggcatggttattataatgctttcaaaccgttggccgatgctgggcgcattgatttaccggtgatcccaggcaacgtggtgcaaaatgcccacatgttttatattaaactgcgtgatattgaggagcgctctgcatttatcagctatttaaaagaagcggatattatggcggtattccactacatcccattacatgcgtgtccagcaggtgaggcgtttggccgtatggctggcgaagaccgctttacctccaaggagagtgagcgtctggtgcgcttacctattttctacaacctgactgatgttaatcagagcacggttattaatactgtgctgagtttcttcgtctga

SEQ ID NO: 83747 - protein, 401 aa, Yersinia pestis KIM
MLLYVSIFVVVPPLRVPRIGYAGDEMIPFNTPPIVGTELGYMQAAMSSGKLCGDGGFTRRCQQWMEKRFNCPKVLLTPSCTASLEMAALLLDIKPGDEVIMPSFTFVSTANAFVLRGAKMVFVDIRPDTMNIDETKIEAAITDKTRVIVPVHYAGVACEMDTIMALAKKHNLFVVEDAAQGVMSTYKGKALGTIGHIGCFSFHETKNYTAGGEGGATLINDPSLIDRAEIIREKGTNRSQFFRGQVDKYTWRDIGSSYLMSDLQAAYLWGQLEAAEQINERRLALWHGYYNAFKPLADAGRIDLPVIPGNVVQNAHMFYIKLRDIEERSAFISYLKEADIMAVFHYIPLHACPAGEAFGRMAGEDRFTSKESERLVRLPIFYNLTDVNQSTVINTVLSFFV

SEQ ID NO: 83748 - DNA, 1131 bp, Oceanobacillus iheyensis HTE831
  CDS (1)..(1131): transl_table=11
ttgataccatttaatataccttgtcatttaggtcaagaagaagaagcaatcgctgaagcaattaaagagcaaaagttatctgggaatggccgttttagtcgatattgtacgacatggttggagaatcagttagacgcaaaaaaagcaatattaactccgtcctgtacggccgctttggaaatgtctgccattttgacagatgtgtcagaaggagacgaagttattatgccatcctatacatttgtgtctaccgctaatgcatttgcattgcgaggagcacatattcggtttgtagatgtggaaccaacgacaatgaatattgatccgaaggctattgaagcagcaattaatcatcgaactaaagcaatcgtagtggttcactatgggggtgtggcttgtgatatgattcctatcatgaacttggcaaacgaacatcaattatgggtaattgaagatgcggcacaaggattaaagagtcagtataatggacgtccattaggaactattggtcatcttgggacatttagttttcatgaaacaaaaaattatacatgtggagaaggcggagctcttataataaatgacgatgcttttatcgaacgtgcagagatcatacaggaaaaaggcacagaccgttctaaatttgttcgcggggaagtagacaaatatacatggcgagatatcggatcttcttatttaacgagtgaattaaatgcagcctatttatctgttcaattggatcaagcagaagtcattaaccaagatcgtcttgctacttggtatttgtatcaaaaaggattaaagccattagaagaaaaaggaattttagatttaccaaccataccaaatggatataagcataatgcacatatgttttacattaaaacaaaaacagaagaagacagaaatgaacttattaaatacttaaaggaacaagaaattatggctgtaacccattatgttccattacaccaatctgaagctggtagatattatggatccttctcaggagaagacatgtatacaacatctcatagtaacaggattctacgcttaccactttattacggaataacaaaaagggatgtcgcatatgtcatacaaacaattcagcaatattattcaacataa

SEQ ID NO: 83749 - protein, 376 aa, Oceanobacillus iheyensis HTE831
MIPFNIPCHLGQEEEAIAEAIKEQKLSGNGRFSRYCTTWLENQLDAKKAILTPSCTAALEMSAILTDVSEGDEVIMPSYTFVSTANAFALRGAHIRFVDVEPTTMNIDPKAIEAAINHRTKAIVVVHYGGVACDMIPIMNLANEHQLWVIEDAAQGLKSQYNGRPLGTIGHLGTFSFHETKNYTCGEGGALIINDDAFIERAEIIQEKGTDRSKFVRGEVDKYTWRDIGSSYLTSELNAAYLSVQLDQAEVINQDRLATWYLYQKGLKPLEEKGILDLPTIPNGYKHNAHMFYIKTKTEEDRNELIKYLKEQEIMAVTHYVPLHQSEAGRYYGSFSGEDMYTTSHSNRILRLPLYYGITKRDVAYVIQTIQQYYST

SEQ ID NO: 83750 - DNA, 1131 bp, Shigella flexneri 2a str. 301
  CDS (1)..(1131): transl_table=11
atgattccatttaacgcaccgccggtggtgggaaccgaactcgactatatgcagtcggcaatgggtagcggcaaactgtgtggcgatggcggttttacccgtcgctgccagcagtggctggagcaacgttttggcagcgccaaagtgttactgacgccgtcctgcaccgcttcgctggagatggcggcgctgctgctcgatatccagcctggcgatgaagtgatcatgccgagctacacctttgtctccaccgccaatgcctttgtgctgcgtggcgcgaaaatcgtctttgtggatgttcgcccggacaccatgaacatcgacgaaacgttgattgaagcagcgatcaccgacaaaacgcgcgttatcgtgccggtccattacgcgggtgtggcctgcgaaatggacaccattatggcgttggcgaaaaagcataatttgtttgtggtggaagatgccgctcagggcgtgatgtccacttacaaagggcgtgcactgggaaccattggtcatattggctgctttagcttccatgaaaccaaaaactacacggcgggtggtgaaggcggcgcgacgctgattaacgataaagcgttaatcgaacgagccgagatcatccgtgaaaagggcactaaccgcagccagttcttccgtggtcaggtcgataaatatacctggcgcgatattggctccagctatttgatgtccgatctgcaagctgcgtacctgtgggcgcaactggaagcagcggatcgtatcaaccagcaacgtctggcgctgtggcaaaactactacgatacgttagcgcctctggcgaaagccgggcgtatcgagctgccgtcgattcccgatggctgcgtgcagaacgcgcatatgttctacattaaactgcgggatattgatgaccggagcgcgttgattaactttctgaaagaagcggaaatcatggcggtgtttcattacattccgctgcacggttgccctgcgggggaacactttggtgagttccacggtgaagatcgctacaccaccaaagagagcgagcgcctgctgcgcctgccgctgttctacaacctgtcgcccgtcaatcagcgtacggtaattgcgactttgttgaactacttctcctga

SEQ ID NO: 83751 - protein, 376 aa, Shigella flexneri 2a str. 301
MIPFNAPPVVGTELDYMQSAMGSGKLCGDGGFTRRCQQWLEQRFGSAKVLLTPSCTASLEMAALLLDIQPGDEVIMPSYTFVSTANAFVLRGAKIVFVDVRPDTMNIDETLIEAAITDKTRVIVPVHYAGVACEMDTIMALAKKHNLFVVEDAAQGVMSTYKGRALGTIGHIGCFSFHETKNYTAGGEGGATLINDKALIERAEIIREKGTNRSQFFRGQVDKYTWRDIGSSYLMSDLQAAYLWAQLEAADRINQQRLALWQNYYDTLAPLAKAGRIELPSIPDGCVQNAHMFYIKLRDIDDRSALINFLKEAEIMAVFHYIPLHGCPAGEHFGEFHGEDRYTTKESERLLRLPLFYNLSPVNQRTVIATLLNYFS

SEQ ID NO: 83752 - DNA, 1131 bp, Salmonella enterica subsp. enterica serovar Typhi Ty2
  CDS (1)..(1131): transl_table=11
atgattccttttaatgcgccgccggtggtgggaaccgaactcgaatacatgcagtctgcaatgagcagcggcaaactgtgcggcgacggcggctttacgcgtcgttgccagcagtggctggagcaacatttcggcagcgcgaaggtgttgctgacgccttcctgtaccgcgtctttggagatggcggccctgttgttggatattcagcccggcgatgaagtgatcatgccgagctttacgtttgtctccactgctaacgcttttgtcctgcgcggcgcgaaaattgtgtttgtcgatattcgtccggatacgatgaatattgacgaaacgctgattgaggcggcgattactgataaaacccgcgctatcgtgccggtacactacgctggcgtcgcttgtgaaatggacgtcatcatggcgctggcggataagtataatctgttcgttgtcgaggacgccgcccagggcgtaatgtccacgtacaaagggcgcgcgttagggacgatcggtcacatcggctgttttagcttccatgaaaccaaaaattacaccgctggcggcgaaggcggcgcgacgctgatcaacgatcgtacgctgattgaacgcgcggagatcatccgcgaaaaaggcaccaaccgtagccagttcttccgtggtcaggtggacaaatacacctggcgggatatcggctccagttacttgatgtccgatctgcaggctgcctacctgtgggcgcaactggaggccgccgatcgtatcaatcaacagcgtctgtcgctgtggcagacttactacgatgcgttaacgccgctggcgcgcgccgggcgtattgagctgccttctattccggaaaactgcgggcataatgcccacatgttttacatcaaactgcgggatatcgccgatcgcagcgcgctgattaatttcctgaaagaggcggaaatcatggcggtattccattacattccgctacatgattgcccggcgggcgataaattcggcgagtttatcggggacgatgtctacaccacaaaagagagcgaacgtttgttgcgtctgccgctgttttataaccttgcgcccgtcgatcaacgaacggtgattactaccttgctaaattatttctcctga

SEQ ID NO: 83753 - protein, 376 aa, Salmonella enterica subsp. enterica serovar Typhi Ty2
MIPFNAPPVVGTELEYMQSAMSSGKLCGDGGFTRRCQQWLEQHFGSAKVLLTPSCTASLEMAALLLDIQPGDEVIMPSFTFVSTANAFVLRGAKIVFVDIRPDTMNIDETLIEAAITDKTRAIVPVHYAGVACEMDVIMALADKYNLFVVEDAAQGVMSTYKGRALGTIGHIGCFSFHETKNYTAGGEGGATLINDRTLIERAEIIREKGTNRSQFFRGQVDKYTWRDIGSSYLMSDLQAAYLWAQLEAADRINQQRLSLWQTYYDALTPLARAGRIELPSIPENCGHNAHMFYIKLRDIADRSALINFLKEAEIMAVFHYIPLHDCPAGDKFGEFIGDDVYTTKESERLLRLPLFYNLAPVDQRTVITTLLNYFS

SEQ ID NO: 83754 - DNA, 1146 bp, Nitrosomonas europaea ATCC 19718
  CDS (1)..(1146): transl_table=11
gtgaaaaatacaaatcaccgcatcccgttcaactggcctcacatgacaggcaaggagttgtactacatcgctgaagcgcacttcaatggtagcttggcaggcgatgggcctttcaccaagcgctgtcatgcatggctggaggagcggactggatgtaataagggtctgcttactcactcttgcacggcggcactcgagatggctgctttattgctggatattcagcccggtgacgaggtcatcatgccgtcgtacacctttgtatctaccgccaatgcctttgtgctacgtggtggggttcctgtgtttgtcgatatcagagaagacactctgaatttggacgaacggctgattgagtccgccattacgccgcgtacccgtgccattgctcccgtgcattacgcgggagtggcgtgcgagatggatacgattatggccatcgcccagaagcatgaattgaaggtcgttgaggatgcagcgcagggggtgatgtcaacctacaaagggcgggccctcggcagcattggtgatcttggagcctacagtttccacgaaacaaaaaatgtgatctcgggagaaggcggtgcgctactcgttaatacacctgatctgagccttcgtgcagagatcatccgcgaaaaagggaccgatcgcagtcagttcttcaggggcgaagtggacaagtacacctggcaggaggtgggctcgtcattcttaccgggtgagctgatcgctgccttcctgtgggcgcagcttgaagaagcagaccgtataactaacgagcggctggcaagctggcaacgatatcatgagttgcttgggccacttgaagctaaagagattctgcgtcgtccaatcgttccggaagagtgtcagcataatgcccacatgtattatgtattattggcatcaaaaattgataggcaagaagtacttgacgaatttaagagaaacgatatttggtctgtgttccattatgtgccccttcattcctccccggctggtttacggtacggacgtatacatggcaacctgaaaattactactcaacaatctgagagattggttcggttacccctctgggttggtttatcagtagagcagcaagaccgggtcgttgaggttttgtgtaaagctgttagctga

SEQ ID NO: 83755 - protein, 381 aa, Nitrosomonas europaea ATCC 19718
MKNTNHRIPFNWPHMTGKELYYIAEAHFNGSLAGDGPFTKRCHAWLEERTGCNKGLLTHSCTAALEMAALLLDIQPGDEVIMPSYTFVSTANAFVLRGGVPVFVDIREDTLNLDERLIESAITPRTRAIAPVHYAGVACEMDTIMAIAQKHELKVVEDAAQGVMSTYKGRALGSIGDLGAYSFHETKNVISGEGGALLVNTPDLSLRAEIIREKGTDRSQFFRGEVDKYTWQEVGSSFLPGELIAAFLWAQLEEADRITNERLASWQRYHELLGPLEAKEILRRPIVPEECQHNAHMYYVLLASKIDRQEVLDEFKRNDIWSVFHYVPLHSSPAGLRYGRIHGNLKITTQQSERLVRLPLWVGLSVEQQDRVVEVLCKAVS

SEQ ID NO: 83756 - DNA, 1149 bp, Mycobacterium bovis AF2122/97
  CDS (1)..(1149): transl_table=11
gtgtcagatcacaaagttccattcaatcggccgtacatgaccggccgggagctcgcgtacatcgccgaagcgcattcttgcggccacctggccggcgatggtcccttcacccggcgtagccatgcatggctcgaacagcagaccggttgtcgcaaggcactactcaccccctcatgcaccgccgcgctggaaatgatggcgctgcttctggacatagaggagggggacgaagtcatactgccgtcatacacctttgtctctaccgccaacgccttcgtgttgcgcggtggtgtgccagtctttgtcgatattcggcccgacacgctcaacattgatgaaactcgcatcgtagacgccatcaccccgcgaaccaaggccatcgtccccgttcactatgccggcgtggcctgcgagatggacgcgatcatgaagatcgccacgcaccacaacctggcggtggtcgaagacgcggcccaaggcgcgatggcgtcgtatcgtgggcgggcgctcggcagcatcggcgacctgggagcgctctcatttcacgagaccaagaatgtgatttccggcgaaggcggcgccctgcttgtcaactcagaagacttcctgctccgggcagagattctcagggaaaagggcaccaatcgcagccgcttccttcgcaacgaggtcgacaaatatacgtggcaggacaaagggtcttcctatttgcccagcgaattagtcgctgcctttctatgggctcagttcgaggaagccgagcggatcacgcgtatccgattggacctatggaaccggtatcatgaaagcttcgaatcattggaacagcgggggctcctgcgccgtccgatcatcccacagggctgctctcacaacgcccacatgtactacgtgttactagcgcccagcgccgatcgggaggaggtgctggcgcgtctgacgagcaaaggtataggcgcggtctttcattacgtgccgcttcacgattcgccggccgggcgtcgctacggccgcaccaatggcaacctgaccgtcaccaacgacgtggcttcccgcctaatccgtctgccgatgtgggttggacttcaggaggtagatcagagccgcgttgtcgaggcgctcacgcgcatcctgacgttgcgcgcatga

SEQ ID NO: 83757 - protein, 382 aa, Mycobacterium bovis AF2122/97
MSDHKVPFNRPYMTGRELAYIAEAHSCGHLAGDGPFTRRSHAWLEQQTGCRKALLTPSCTAALEMMALLLDIEEGDEVILPSYTFVSTANAFVLRGGVPVFVDIRPDTLNIDETRIVDAITPRTKAIVPVHYAGVACEMDAIMKIATHHNLAVVEDAAQGAMASYRGRALGSIGDLGALSFHETKNVISGEGGALLVNSEDFLLRAEILREKGTNRSRFLRNEVDKYTWQDKGSSYLPSELVAAFLWAQFEEAERITRIRLDLWNRYHESFESLEQRGLLRRPIIPQGCSHNAHMYYVLLAPSADREEVLARLTSKGIGAVFHYVPLHDSPAGRRYGRTNGNLTVTNDVASRLIRLPMWVGLQEVDQSRVVEALTRILTLRA

SEQ ID NO: 83758 - DNA, 1149 bp, Wigglesworthia glossinidia endosymbiont of Glossina brevipalpis
  CDS (1)..(1149): transl_table=11
atgaaaaaaaaaaataaaattattccttttaatttacctgtttattcaggaaaagaattaaaatatatagattttgcaataagaaataaaaccttttcaggagaagggtatttttcaaatttatgcacgttatggatagaaaataaattaaatattaaaaaagtttttttgacaccttcttgtacttcctctttagaaatggctgctttattattaaaaataaataaagacgacgaaattatcatgccaagttatacttttgtgtcaactgctaatccttttgtattacgtggagcaaaaatagtattcgttgacattagatcggataatttaaatattaatgaaaatttaattgaatctgcaatcacaaaaaagacaaaagcaatagtagttatgcactatgctggaatttcttgtgaaatggattttataaaaaatatttctaataagtataaattatggctaatagaagatagtgctcaaagtatgatgtctaaatataaaaatttatatttaggaagcttaggtcatataggatgttttagttttcatgaaacaaaaaattatacctctggaggagagggaggagcaattcttataaatgatgagtctttaatcaaaagagcaagcataattaaagaaaaaggaacaaatcgttccctttttattaaaggaaaaacaaataaatatgtttggaaagacataggatctagttatactatatcagatattcaagcagcatatttatggtctcagttaaaaatatcagaaaagattcaaaaaaaaagagaaatgttgtggaaaaattattttttgtctttagaaaatataaaattgttcaggataccgtttttcaacaaaaattgcaagcataatgcaaatacattttatttaatttttaatgataaaaaaacttgtaatttgtttattgaatacatgaaaaataataaaattacaactttaagacactatgttcctttgcacattagtccagcaggaaaaaaatttggaaaatttcatggaaatgatataaatactattaaaacaagtaataatcttgttcgtcttccattattttttaatttaaaaaataaagaccaaaaatatattataagtaatatttataatttcatagataaatattcttaa

SEQ ID NO: 83759 - protein, 382 aa, Wigglesworthia glossinidia endosymbiont of Glossina brevipalpis
MKKKNKIIPFNLPVYSGKELKYIDFAIRNKTFSGEGYFSNLCTLWIENKLNIKKVFLTPSCTSSLEMAALLLKINKDDEIIMPSYTFVSTANPFVLRGAKIVFVDIRSDNLNINENLIESAITKKTKAIVVMHYAGISCEMDFIKNISNKYKLWLIEDSAQSMMSKYKNLYLGSLGHIGCFSFHETKNYTSGGEGGAILINDESLIKRASIIKEKGTNRSLFIKGKTNKYVWKDIGSSYTISDIQAAYLWSQLKISEKIQKKREMLWKNYFLSLENIKLFRIPFFNKNCKHNANTFYLIFNDKKTCNLFIEYMKNNKITTLRHYVPLHISPAGKKFGKFHGNDINTIKTSNNLVRLPLFFNLKNKDQKYIISNIYNFIDKYS

SEQ ID NO: 83760 - DNA, 1131 bp, Haemophilus ducreyi 35000HP
  CDS (1)..(1131): transl_table=11
atgattccttttaataaaccaccattggtgggcaatgaattagcctatattcaacaggcgttacagcaagataaattatcaggtgatggttattataaccagcaagcggaacaatggttagaaaagcaattttcgacagtgaaagcgttattaacaccatcttgtactgccgcattagaaatggcggcgattctgttagatattcaagctggcgatgaagtgattatgcctagctatacttttgtgtcgactgcaaatgcatttgtgttgcgtggcgctaaaattgtgtttgttgatattcgcccggatactatgaatattgatgaacagaaaattgaagcgacaattacggatagaactaaagtgattgttccagtgcattacgcgggcgtagcttgtgagatggatacaattatggcattagcggctaaatatcagctatatgtggttgaagatgctgcacaggcaatgatagcaagctataaaaatcgcccattaggcacgattggacatttggggtgttatagttttcacgaaactaaaaattatagttcggcaggtgaaggtggagcgctgttaattaatgatgcgacattagttagtcgcgcagaaattattcgcgagaaaggcactgatcgaagtcagttttttcgaggacaagttgataaatatacgtggcgagatattggatcaagttatctcatgtcggagttacaagcggcttatttatatgcacaatttacggtggcagaacagattaatcaaacacgtttagcaatgtggcaacgttattatcaagcgttattgccttttgctaatagcgggcggatagcattagcccaattaccgcccgaatgccaacataatgcgcatttattttatttaaaattaacagattcagccgatcggaacgcgttattaacttggcttaaacaacacgatattttagcggtgtttcattatattccattgcattccagcccagcaggtaaacaatttgggcgctttgtcggtgaagatcaatttacaacacaagaaagtgagcgcttgctaaggttacccttgttttataatttgcatctaacagagcaacaacgtgtgattgaggttgtgacggattattttcagtaa

SEQ ID NO: 83761 - protein, 376 aa, Haemophilus ducreyi 35000HP
MIPFNKPPLVGNELAYIQQALQQDKLSGDGYYNQQAEQWLEKQFSTVKALLTPSCTAALEMAAILLDIQAGDEVIMPSYTFVSTANAFVLRGAKIVFVDIRPDTMNIDEQKIEATITDRTKVIVPVHYAGVACEMDTIMALAAKYQLYVVEDAAQAMIASYKNRPLGTIGHLGCYSFHETKNYSSAGEGGALLINDATLVSRAEIIREKGTDRSQFFRGQVDKYTWRDIGSSYLMSELQAAYLYAQFTVAEQINQTRLAMWQRYYQALLPFANSGRIALAQLPPECQHNAHLFYLKLTDSADRNALLTWLKQHDILAVFHYIPLHSSPAGKQFGRFVGEDQFTTQESERLLRLPLFYNLHLTEQQRVIEVVTDYFQ

SEQ ID NO: 83762 - DNA, 1131 bp, Photorhabdus luminescens subsp. laumondii TTO1
  CDS (1)..(1131): transl_table=11
atgattccatttaacaaaccaccagtagttggcactgaattagattacatgaagcaagccatggaaagcggtaagctttgcggggatggtggtttcaccaagcgttgtgaagagtggatggaacaacatttcaattgcccgaaagttctattgacaccatcctgtaccgctgcactggaaatggcggctattttgctgaatatccaacccggtgatgaagttattatgccgagtttcactttcgtttccagttctaacgcgtttgtactgcgtggagcaactgttgtatttgtggatatccgtccagataccatgaatattgatgaaaccaaaatcgaagcagcaattacagctaaaacacgcgtgattgttccagtgcattatgccggtgtagcctgtgaaatggataccattatggccttggcagagaaatataatctgtttgtcgtggaagatgctgcacagggagtaatgtctacttataaagggcgtgcattgggaactatcggacacattggttgctacagtttccacgaaaccaaaaactactcctctggtggtgaaggtggtgcagcacttatcaatgatcaatcattgatttctcgtgcggaaattgtccgtgaaaaagggactaatcgtagtcagtttttccgtggtcaagttgataaatatacttggcgcgatatcggttcgagttatcttatgtcggaacttcaggctgcttatttgtgggcacaattggaagaggctgagaaaatcaatgagcgtcgtcttgccttgtggaatacctattatcaagcattaaaaccgctggttgatgctggtctcctgacattgccggtcataccggaagagctggagcataatgctcacatgttctatatcaagctgaaagatgttgaagaacgctcagcattcaatagctatatgaaggacgcaggtgtactaacagtattccattatgtttctctgcacaccagccccggtggtgaaaaatttggccgttttcatggggaagattgttttactacttgtgaaagtgatcgtctagtgcgcttgccgatgttttacaacataacagacgctgaacagcagattgtcatcaaacatattcgggaatacttcgcctga

SEQ ID NO: 83763 - protein, 376 aa, Photorhabdus luminescens subsp. laumondii TTO1
MIPFNKPPVVGTELDYMKQAMESGKLCGDGGFTKRCEEWMEQHFNCPKVLLTPSCTAALEMAAILLNIQPGDEVIMPSFTFVSSSNAFVLRGATVVFVDIRPDTMNIDETKIEAAITAKTRVIVPVHYAGVACEMDTIMALAEKYNLFVVEDAAQGVMSTYKGRALGTIGHIGCYSFHETKNYSSGGEGGAALINDQSLISRAEIVREKGTNRSQFFRGQVDKYTWRDIGSSYLMSELQAAYLWAQLEEAEKINERRLALWNTYYQALKPLVDAGLLTLPVIPEELEHNAHMFYIKLKDVEERSAFNSYMKDAGVLTVFHYVSLHTSPGGEKFGRFHGEDCFTTCESDRLVRLPMFYNITDAEQQIVIKHIREYFA

SEQ ID NO: 83764 - DNA, 1158 bp, Photorhabdus luminescens subsp. laumondii TTO1
  CDS (1)..(1158): transl_table=11
atgaactcttcttttctccctttcgcactcccagaaatcagccaagaagaaattgatgaagtcattgactcacttaaaacaggctggataaccaccggacctaaaaccagaagatttgaacaagattttgcgcaatatttaggttccgatgttgaagccatagcggtaaattcagccacggcagggttgcatttagcattagaagccattggtattcagccgggtgatgaagtcatcgttccgacctatacctttacggcaaccgcagaagttgtccgttatttgggagctcaccctatttttgttgattctttacctgacagcctgaatattgacccaatagcaatagaaaaagccataaccgccaaaactaaagcaattatgccggtacactttgcaggtttatcctgtgatatggatgccattattgcaatagctaaaaaattcaatctacgaatcattgaagatgccgcccattcatttccgactttatataagggaaagaaaattggcacgctagataccgatgtcaccgtattcagcttttacgcgaataaaaccatgacgacagcggaaggtggcatgctagtctccagacatccagatatcataaaaagagcaaaaataatgcgcctccacggcattagcaaagacgcctttgatcgatatcaatctaaaatacctgcctggtattatgaagtgattgaaccaggctataaatataacatgcccgatatttgtgcatctatcggcatccatcaattacagaaaatagacactttccacaagaaaagagaggcaatggctaaactctatgatgatgaattaaaagatctaccgattatcttacccactaaacctcaagaatctaatagccaacacgcctggcatctatataccattagattaaatgatcaagtcaaaatatccagagatgactttattataaaaatggcagaaaaaaatatcggctgctctgtccattttattccactacacaaacaacccatctggaaaaatacctattctcttaacgaaaacaacttcccagtcgcagaagaaaactttaaaagaattgtatccatccctttatatacaaaaatgaccaaagaagaccaaatatacgttatcaaaacaattaaagagatcttggcataa

SEQ ID NO: 83765 - protein, 385 aa, Photorhabdus luminescens subsp. laumondii TTO1
MNSSFLPFALPEISQEEIDEVIDSLKTGWITTGPKTRRFEQDFAQYLGSDVEAIAVNSATAGLHLALEAIGIQPGDEVIVPTYTFTATAEVVRYLGAHPIFVDSLPDSLNIDPIAIEKAITAKTKAIMPVHFAGLSCDMDAIIAIAKKFNLRIIEDAAHSFPTLYKGKKIGTLDTDVTVFSFYANKTMTTAEGGMLVSRHPDIIKRAKIMRLHGISKDAFDRYQSKIPAWYYEVIEPGYKYNMPDICASIGIHQLQKIDTFHKKREAMAKLYDDELKDLPIILPTKPQESNSQHAWHLYTIRLNDQVKISRDDFIIKMAEKNIGCSVHFIPLHKQPIWKNTYSLNENNFPVAEENFKRIVSIPLYTKMTKEDQIYVIKTIKEILA

SEQ ID NO: 83766 - DNA, 1137 bp, Bdellovibrio bacteriovorus HD100
  CDS (1)..(1137): transl_table=11
atgaaaattccattcaatctaccgcctaaaagctcgaacgaagagaagtacatttctcaagccatctccaacaaaaaactcagtggagaaggtcagttcaataaaaaatgcacggaatggttcaacaagaaccttccaaccttgatgaccgtcatcaccccgtcttgcacctcggctctggaaatggccatggttttggccgatatcggtccgggcgatgaagtcatcctgccatctttcactttcacttccactgccaacgttgtcgccctgtatggcgccatcccggtttttgtcgacgtggaccccaagaccatgaacatcgatgtcgatgccattgccaaagccatcaccgcccgcacacgcgtgatcatgccggttcactatgccggcgtgggctgcgagatggacaaaatcatggaccttgcgaacaagaacaacatctgggtggttgaagacgcggctcagggcatctttgcttcctacaagggcaaagccttgggagcttggggccatatggccgctttcagcttccatgaaaccaaaaatatcgtctgcggcgaaggcggtgccttgaccatcaacgatccccgtctggtggcgcgcgctgaaatcgtgcgcgacaaggggaccaatcgccagcaattcctgaacggccaagtcgacaaatacacctggcaggacaaagggtcttcctatctgctgtccgagctttcagctgcttttcttttgtcccaactggaagagggcgaaaaaatcacggcccgccgtatggcgatctggaagcagtactatgccggcatggcggatctggaagctgctggcaaagtccagcgcatgaccgtgcctgcggaggccaaagccaacgcgcatatcttctatttcctgctacctactatgcagacgcgcattgagctatggacccacctgaaagaagccggaatccagtccacattccattatgtgcctttgcattctgctccggcgggtttgaaatacggcaaagtcagcggcagcatggctgtcactgatgatcactcagcccgtttgctgcgactgcctttgtgggcggacatgacagcggcggatgctcagttcgtcctggacgaagttaataaattttttaaggggaaataa

SEQ ID NO: 83767 - protein, 378 aa, Bdellovibrio bacteriovorus HD100
MKIPFNLPPKSSNEEKYISQAISNKKLSGEGQFNKKCTEWFNKNLPTLMTVITPSCTSALEMAMVLADIGPGDEVILPSFTFTSTANVVALYGAIPVFVDVDPKTMNIDVDAIAKAITARTRVIMPVHYAGVGCEMDKIMDLANKNNIWVVEDAAQGIFASYKGKALGAWGHMAAFSFHETKNIVCGEGGALTINDPRLVARAEIVRDKGTNRQQFLNGQVDKYTWQDKGSSYLLSELSAAFLLSQLEEGEKITARRMAIWKQYYAGMADLEAAGKVQRMTVPAEAKANAHIFYFLLPTMQTRIELWTHLKEAGIQSTFHYVPLHSAPAGLKYGKVSGSMAVTDDHSARLLRLPLWADMTAADAQFVLDEVNKFFKGK

SEQ ID NO: 83768 - DNA, 1131 bp, Erwinia carotovora subsp. atroseptica SCRI1043
  CDS (1)..(1131): transl_table=11
atgattccatttaatgcgccaccggttgtcggtacggaactggattatatgcaggctgccatgagcagcggcaaattgtgcggcgatggcggatttactcgccgctgtcagcagtggctggaacattactccggtagcaagaaagtcctgcttacgccttcctgcacagcgtcgctggagatggccgctatcctactggatattaagcccggcgatgaagtgatcatgccgagctataccttcgtctctaccgccaacgcctttgtgctgcgcggtgcgaagatcgtgtttgtcgatatccgcccagatacgatgaatattgacgagacgaaaatcgaagcggcaattacggaaaaaacacgcattatcgtgccggttcactacgcgggcgtcgcctgcgagatggacgcgattatggcactggcgaaaaaatacgatttatatgtcgtggaagatgcggcacagggcgtgatgtccagctacaaaggccgcgttctggggtctattggtcacatcggctgcttcagttttcacgaaaccaaaaactacacctcgggcggtgagggcggggccacgttgattaatgacgcgaggctggtggaacgagcggaaatcatccgtgaaaaaggcaccaaccgtagccagttcttccgtggacaggtggacaaatacacctggcgtgacatcggctcaagctatctgatggcggatattcaagctgcttatctctgggcacagctggaagccgcgcgacccatcaacgagcgtcgcctgaaactgtggcagaactactatgcggcattcaaatcgctggccgatgcggggcgtataacactgccgaccgtgcctgccaatgggatccacaacgcgcacatgttttatatcaaactgcgcgatcaggacgaccgcagtgcgtttatcaattacatgaaagaagccgaaatcatgacagtctttcattatatcccgctacatagctgcccggcgggtctgaacttcggtcgtttctccggtgacgatcgctacaccacgcaggaaagcgaacggctggtacgtttaccgctgttctacaacctgtcggacgtcaatcagcgcaccgtcattaataccattctgagcttcttctcctga

SEQ ID NO: 83769 - protein, 376 aa, Erwinia carotovora subsp. atroseptica SCRI1043
MIPFNAPPVVGTELDYMQAAMSSGKLCGDGGFTRRCQQWLEHYSGSKKVLLTPSCTASLEMAAILLDIKPGDEVIMPSYTFVSTANAFVLRGAKIVFVDIRPDTMNIDETKIEAAITEKTRIIVPVHYAGVACEMDAIMALAKKYDLYVVEDAAQGVMSSYKGRVLGSIGHIGCFSFHETKNYTSGGEGGATLINDARLVERAEIIREKGTNRSQFFRGQVDKYTWRDIGSSYLMADIQAAYLWAQLEAARPINERRLKLWQNYYAAFKSLADAGRITLPTVPANGIHNAHMFYIKLRDQDDRSAFINYMKEAEIMTVFHYIPLHSCPAGLNFGRFSGDDRYTTQESERLVRLPLFYNLSDVNQRTVINTILSFFS

SEQ ID NO: 83770 - DNA, 1161 bp, Pseudomonas fluorescens Pf-5
  CDS (1)..(1161): transl_table=11
ttgtgtaaacccgaggtaaccatgaaccaggctttccttcctttctcgcgcccgagtattggcgaagaagagattgctgcagtggagcaggttctgcgctccggctggatcaccaccggcccgaaaaaccaggaactggaacagcagttcgccgaacgcgtcggcgcccgccacgccgtggcactgtcctccgccaccggcgccatgcacatcaccctgctggccctgggcatcggccccggggatgaagtgatcaccccgtcgcagacctgggtctccaccgccaacatgatctgcctgctgggcgccaccccggtgttcgtcgatgtcgaccccgacaccctgatgagcgacgccgccaccatcgaagccgccatcactccgcggaccaaggcgatcatcccggtgcactacgccggcgcagccttcgacctcgacccgctctatgccctggccgacaagcacggcatcgcggtgatcgaagacgccgcccacgccgccggtaccacctaccgcggccgcgccatcggcgcccggggcacggcgatcttttccttccacgcgatcaagaacatgacgtgcgccgaaggcgcgatgttcgtcagcgatgacgaagccctggccaaccgcgtgcgcatgctcaagttccacggcctgggagtggacgcctacgaccgcctgacccatggccgcaagccacaggcccaggtcatcgagcccggcttcaagtacaacctggcggacatgaacgcggccattgccctggtgcaactgcaacgcctggacgagatcaacgccaagcgtgaagtgctggccaaggcctacctgcagcgcctggaaggcttgccggtacagcccctgctcctgccccagtacccgcagcagcatgcctggcacctgttcatcctgcgcatcgacgccgaacgctgcggcctggaccgcgaagccttcatgaaaggcctgcaggaacagaatatcggcaccggtatccacttcattgcgacgcacctgcatacctattaccgacagcgcttccctgaagtgcagctgccccataccgaatggaattcggcgcggctatgctcgattccactgtttccggacatgaccctcgacgatgtcgagcgggtgaccggtgccattgcaaaccttttggactga

SEQ ID NO: 83771 - protein, 386 aa, Pseudomonas fluorescens Pf-5
MCKPEVTMNQAFLPFSRPSIGEEEIAAVEQVLRSGWITTGPKNQELEQQFAERVGARHAVALSSATGAMHITLLALGIGPGDEVITPSQTWVSTANMICLLGATPVFVDVDPDTLMSDAATIEAAITPRTKAIIPVHYAGAAFDLDPLYALADKHGIAVIEDAAHAAGTTYRGRAIGARGTAIFSFHAIKNMTCAEGAMFVSDDEALANRVRMLKFHGLGVDAYDRLTHGRKPQAQVIEPGFKYNLADMNAAIALVQLQRLDEINAKREVLAKAYLQRLEGLPVQPLLLPQYPQQHAWHLFILRIDAERCGLDREAFMKGLQEQNIGTGIHFIATHLHTYYRQRFPEVQLPHTEWNSARLCSIPLFPDMTLDDVERVTGAIANLLD

SEQ ID NO: 83772 - DNA, 1158 bp, Burkholderia sp. 383
  CDS (1)..(1158): transl_table=11
atgttcggcccacccaatctcgactgcattccattcggccgcccgttcgtggtcggcaaggagctctactacatcgcgaaagcggtcgagcagggcggcctcgccggcgaccaggcgttcacgaagctctgccaccgctggctggaagcgcgcatcggctgccagcgcgcgctgctcacgcactcgtgcacggccgcgctcgagatggccgcgatcctcgccgacgtgcagcccggcgacgaagtgatcatgccgtcctacacgttcgtgtcgaccgccaacgcgttcgtgctgcgcggcgcgacgccggtgttcgtcgacatccgccgcgacacgctgaaccttgacgagacgcagatcgccgccgcgatcacccagcgcacgcgcgcgatcgtgccggtgcactacgcgggcgtcgcatgcgacatggacgtgatcgggcagctcgcggcggaccacgacctgtgggtgatcgaggacgccgcccaggcgctgcagtcgacgtggaacggcaagccgctcggcagcctcggccacctcgcgtgcctcagcttccacgagaccaagaacgtgatctcgggcgaaggcggcgcgctgctggtcaacgacccgcgcctcgtcgagcgcgcggagatcatccgcgagaagggcaccaaccgcagtcagttcttccgcgggcaggtggacaagtacacatgggtcgacgtcggctcgtcgttcctgccgggcgagctgatcgcggcattcctgtacgcgcagttcgagcacgcggacgtgatcaccgcgcagcggcgcgcgaccgtgcagcgctaccaggacgcgctgcagccgctgcacgcggacgggctgatcgagctgcccgcgatttcgctcgccgagcgcggcaacggccacatgttctatttcctcgcacgcgacctcgccgaacgcaccgatctgctgcagcagatccgcgcggtgggcgtgaacgcggtgttccattacgtgccgctgcacagttcgccggccggccagcgctacgggcgctgcgggtccggcatggcggtgacggacctcgtcgccgaccggctcgtccggctgccgctgtaccacgacatgaccgaagccgaacaggatcgcatcctcgaagtggtcttcgatttctaccgcacccgataa

SEQ ID NO: 83773 - protein, 385 aa, Burkholderia sp. 383
MFGPPNLDCIPFGRPFVVGKELYYIAKAVEQGGLAGDQAFTKLCHRWLEARIGCQRALLTHSCTAALEMAAILADVQPGDEVIMPSYTFVSTANAFVLRGATPVFVDIRRDTLNLDETQIAAAITQRTRAIVPVHYAGVACDMDVIGQLAADHDLWVIEDAAQALQSTWNGKPLGSLGHLACLSFHETKNVISGEGGALLVNDPRLVERAEIIREKGTNRSQFFRGQVDKYTWVDVGSSFLPGELIAAFLYAQFEHADVITAQRRATVQRYQDALQPLHADGLIELPAISLAERGNGHMFYFLARDLAERTDLLQQIRAVGVNAVFHYVPLHSSPAGQRYGRCGSGMAVTDLVADRLVRLPLYHDMTEAEQDRILEVVFDFYRTR

SEQ ID NO: 83774 - DNA, 1161 bp, Desulfovibrio desulfuricans G20
  CDS (1)..(1161): transl_table=11
atgcgtgagtcctttctggttttcggacagccccttatcgaacaggacgaaatagacgaagtcgtggactccatgcacaaggcatggatcggcaccggtcccaaggtgcatcagtttgaacgcgatttcgccgcatacaagggcgtggcgcatgccgccgccgtcaactcgtgcacggcagccctgcaccttgcctgtcttacactcgaccttgcacccggcgacgaggtgataaccaccgccatgaccttctgcgcgtcggtcaatgccatcatccatgccggcggtactcccgtgctggctgatgcagaccccgtcacgcttaatatttcggccgaaaccatagccccgcacatcggcccgcgcacccgcgccatcatggtggtgcactacgcaggacgctgctgcgatatggaccccataatggagctggcccgcaaacacggtctgattgtcatcgaagactgcgcccacgccattgaaagcgaatacaaagggcgcaaagccggcaccatagggcacataggctgcttcagcttttacgccaccaaaaacatcgtcaccggcgaaggcggcatgatcatttctgacgacaaagccgccatagaccgctgcaaaataatggcactgcacggcatgagcgccgacgcatgggccagattcagcgatgcgggctacaagcactatcaggttgttgatcacggctttaagtacaacatgatggatattcaggcggccatgggcatccatcagctgcggcgcgtggaagaatactggaaacgccgcgcctgcatatggcagaagtacaatgaaggactggccggacttggcatgggcctgcccgccgacgccgaggaacatacccgccatgcgtaccacctgtacaccatacgggtgtcggccgcgtgctgcggcgtggaacgcgacgccatgcttgaagcgctgagggcgcacaacataggcgtgggcgtacactatctggcagttcccgaacacccctactaccggcgccgtttcggctgggacccggcagacactccggtggccacagcttacgggcgcgagactgtcagcctgcccctttcccccaaactgtcagacggtgatgtggacgatgtcatagaagccatccgcgccatctgcacggaatctgccagatga

SEQ ID NO: 83775 - protein, 386 aa, Desulfovibrio desulfuricans G20
MRESFLVFGQPLIEQDEIDEVVDSMHKAWIGTGPKVHQFERDFAAYKGVAHAAAVNSCTAALHLACLTLDLAPGDEVITTAMTFCASVNAIIHAGGTPVLADADPVTLNISAETIAPHIGPRTRAIMVVHYAGRCCDMDPIMELARKHGLIVIEDCAHAIESEYKGRKAGTIGHIGCFSFYATKNIVTGEGGMIISDDKAAIDRCKIMALHGMSADAWARFSDAGYKHYQVVDHGFKYNMMDIQAAMGIHQLRRVEEYWKRRACIWQKYNEGLAGLGMGLPADAEEHTRHAYHLYTIRVSAACCGVERDAMLEALRAHNIGVGVHYLAVPEHPYYRRRFGWDPADTPVATAYGRETVSLPLSPKLSDGDVDDVIEAIRAICTESAR

SEQ ID NO: 83776 - DNA, 1137 bp, Saccharophagus degradans 2-40
  CDS (1)..(1137): transl_table=11
atgatgaaaacgataaaatttaatgagccttttttagcgggcaacgagttgaaatacttaaaagatgtttttcgacaagatcatttttatgggaatggtaagtatacaagattgtgcgccgaatttattcgaaaaaagctaagtgtagaaaatgttttgattaccgatagttgtacatctgcacttgagattgcggcgctgttaatgagagaaacaggtcaggagcaagaaattattttaccatcttatactttttcttccactgcttctgcatttgcgagggctgggtttaagttggtttttgcagaaatagatccgaaaacaatgatgatggatgttcgagatgtaagagaaaagtttactcaaaatacagcagcagtagttgtagtgcattatggtggttattgtgcagaagttaatgagtttagagcgctttgtgatgcaaatgaagtctacctcgtcgaagatgctgcgcaggcatttaattgctttttaaacaataaggcgctcggcacaataggtgattttggttgcttttcgttccatgagacaaaaaatgttcacgcaggcttatctggtgcattaattataaaagacaatagttttgttaatagagctacatatatatgggagcgtggaacaaataggcaggatgttttgaaggggcttgcaaacaaatattcttgggttgaaataggtggtagcttttatcctacggaattacaaactgcttttttgtacgctcaactggaagcgctcgaaagaaatatagaagaaaggaaagtgatttatgatgaatataaaataggtttggctcctttaaagttagccggtgtggtgtattacccagaatttcatgttgattataaatctaattatcatgcattttttgtggtttttaatagtgaaagtaaagcagatcaggttcgagagttcttaagggcaagaaatgttcatgcctatattgggtatattccactgcattcttcaccagtggggttgaaaatggggtatgaaattaactccttgccaataacagagaaatattcaaagcgagtgctccgcttaccattgcataataagttgacgcttactcaagttgcaggaatagttgacttaataaaaggatgtatttag

SEQ ID NO: 83777 - protein, 378 aa, Saccharophagus degradans 2-40
MMKTIKFNEPFLAGNELKYLKDVFRQDHFYGNGKYTRLCAEFIRKKLSVENVLITDSCTSALEIAALLMRETGQEQEIILPSYTFSSTASAFARAGFKLVFAEIDPKTMMMDVRDVREKFTQNTAAVVVVHYGGYCAEVNEFRALCDANEVYLVEDAAQAFNCFLNNKALGTIGDFGCFSFHETKNVHAGLSGALIIKDNSFVNRATYIWERGTNRQDVLKGLANKYSWVEIGGSFYPTELQTAFLYAQLEALERNIEERKVIYDEYKIGLAPLKLAGVVYYPEFHVDYKSNYHAFFVVFNSESKADQVREFLRARNVHAYIGYIPLHSSPVGLKMGYEINSLPITEKYSKRVLRLPLHNKLTLTQVAGIVDLIKGCI

SEQ ID NO: 83778 - DNA, 1134 bp, Cytophaga hutchinsonii ATCC 33406
  CDS (1)..(1134): transl_table=11
atgatcccttttaataaaccgcatttaacaggtaaagaagttcattacatctatgaggctgttcattcagggaaaatttcaggaaatggcatttttactaaaaaatgtcatgatttctttacttccacatacggtttcacaaagacattgatgacatcaagctgtacagatgcgctggaaatgtcgtcattgttaatggatattcaaccgggggatgaaattatattaccaacgtttacgtttgtttcaacggcaaacgcttttgtattaagaggcgcaaagcttgtatttgtagatagtttagcaactgaaccaaatatgaacgttgagttgattgaaggtctgatcacatctaaaacaaaggcgattgttgtggtgcattatgccggcgtagcgtgtgatatggatgttgtaatgaacattgcaaaaaaatatcagttattcgtagtggaagatgccgcgcaggcaataagctcctattataaagataaaccattgggcggcattggcgattttggtgcattcagttttcatgaaacaaaaaatatcatttccggagaaggcggactgttggcaataaacaattcagattattgtaacaggtctgaaattatctgggaaaaaggtacaaaccgtagcgctttttttagaggcgaaacagataagtatggttgggtagatgttggttcctcgtttttaccatctgaaattataagcgcctttttatatgcgcagttagaaaacgtagctgaaattcaggctaagcgactggaaatctggaatacctattacaatacactaagccccttagcggaacataaaaaactcaggttgccttatataccggcgtatgcaaccaacaacgcacatatgttttatgtgatctgcaattctctggaagagcggaccgcattgattgattatttaaaagcacataatattctggctgtgtttcattatttatcgcttcataaatcaccttacttttcagataaacacgatggaagatcgatggattatgcagatcagtatgcagaaacgttggttcggttgcccttgttttatgatctttccaccgaagatcaggaatttatttgtactaaaatcttatctttttattcagaaaaaatatga

SEQ ID NO: 83779 - protein, 377 aa, Cytophaga hutchinsonii ATCC 33406
MIPFNKPHLTGKEVHYIYEAVHSGKISGNGIFTKKCHDFFTSTYGFTKTLMTSSCTDALEMSSLLMDIQPGDEIILPTFTFVSTANAFVLRGAKLVFVDSLATEPNMNVELIEGLITSKTKAIVVVHYAGVACDMDVVMNIAKKYQLFVVEDAAQAISSYYKDKPLGGIGDFGAFSFHETKNIISGEGGLLAINNSDYCNRSEIIWEKGTNRSAFFRGETDKYGWVDVGSSFLPSEIISAFLYAQLENVAEIQAKRLEIWNTYYNTLSPLAEHKKLRLPYIPAYATNNAHMFYVICNSLEERTALIDYLKAHNILAVFHYLSLHKSPYFSDKHDGRSMDYADQYAETLVRLPLFYDLSTEDQEFICTKILSFYSEKI

SEQ ID NO: 83780 - DNA, 1116 bp, Rhizobium leguminosarum bv. viciae 3841
  CDS (1)..(1116): transl_table=11
atgacagggaaggaactctattacattgctgaagcaaagtttggaaacatgcttgccggagacggcccatttaccaaaagatgtcatgagtggcttgagcaaacaagcggctgcaacaagtcgctactaactcactcatgcactgcggcgctcgaaatggcggctctgcttctcgacattcagccgggtgacgagatcataatgccatcatacactttcgtctcgactgcaaacgccttcgtcctgcgcggcggagtcccggtattcgtcgacatccgtgaagacactctgaatctagatgaaagcttgattgaagcggcgatcaccccgcgcactcgcgctatagtcccagttcactacgcgggcgttgcatgcgaaatggacaccattatgcgcatcgccaaacaacacggtctcaaggtcgtagaggacgcggcacagggcgtgatggccgcatataaggggcgcccgatcggcagcatcggcgatctcgcggcatacagttttcacgagaccaagaatgtcatttctggcgaaggcggagcgctattggtcaatgatcctgcgctggctctgcgggccgaagtcatccgtgaaaaaggcactgatcgcagtcgtttcttccggggtgaagttgacaagtacacttggcaggaagtgggctcgtccttcctgccgggggagttgatcgcggccttcttgtgggcgcaactcgaagagtcagagcgcattacaaaagaccgtctggcgatctggcattattatcacgcgatccttgagccgctcgaaacggaggggctgctccgtcgccctatcgtgcctgatgattgccagcataatgcccacatgtactatgtactgctgccggaagagagagaccgtcaaaaggtactaggtgagctgaaaagcaacggcatttcgtcagtcttccattacgtccctcttcattcctcgcccgcaggaagacgatatgcgcggatgtcaggcgagttgccggtaacgacttcgcagtcagagcgtctgatacgcttgcccttgtgggtaggcctgacgttcgagcagcagaaccgcgttgcggcagttctggctgacgcgctggaaggatgggcggcgtag

SEQ ID NO: 83781 - protein, 371 aa, Rhizobium leguminosarum bv. viciae 3841
MTGKELYYIAEAKFGNMLAGDGPFTKRCHEWLEQTSGCNKSLLTHSCTAALEMAALLLDIQPGDEIIMPSYTFVSTANAFVLRGGVPVFVDIREDTLNLDESLIEAAITPRTRAIVPVHYAGVACEMDTIMRIAKQHGLKVVEDAAQGVMAAYKGRPIGSIGDLAAYSFHETKNVISGEGGALLVNDPALALRAEVIREKGTDRSRFFRGEVDKYTWQEVGSSFLPGELIAAFLWAQLEESERITKDRLAIWHYYHAILEPLETEGLLRRPIVPDDCQHNAHMYYVLLPEERDRQKVLGELKSNGISSVFHYVPLHSSPAGRRYARMSGELPVTTSQSERLIRLPLWVGLTFEQQNRVAAVLADALEGWAA

SEQ ID NO: 83782 - DNA, 1143 bp, Azoarcus sp. BH72
  CDS (1)..(1143): transl_table=11
atgctggaagagaagaagatcccgttcaactggccttacatgacaggcaaggagttgtactacatcgctgaagcacactttaatggcaggttggcaggggatgggcctttcacaaagcgctgccatcgctggctggaggagaggactggatgcaataagggcttgcttacgcactcgtgcacggcagcactcgagatggctgctttattgctggatattcagcctggtgatgagatcatcatgccgtcatacacctttgtatctaccgccaatgcctttgtgcttcgtggtggagtcccagtgtttgtcgatatcagagaagattcgctgaatttggacgaacgtctgatcgagtctgccataacgccgcgtacccgtgccattgctccggttcattacgcgggagtcgcgtgcgagatggatacgatcatgatcatggcccgagagcatggattgaaagtcgttgaggatgcggcgcagggggtgatgtcgacctacaaggggcggcctctgggtagcattggtgatctcggagtttacagttttcacgaaacaaagaacctgatctctggagaaggcggcgcgctgctcgtcaatagtcccgacatgagccttcgcgcagagatcattcgcgagaaagggactgaccgaagccgattcttcaggggagaagtcgataagtacacttggcaagaggtgggctcgtctttcctgccaggggagttgattgccgctttcctgtgggcgcaacttgaagaagcggatcgaattactaaagagcggttggctagctggcaacgttatcacgagtttctggagccgcttgaagccaaaggaatactgaggcgcccgattgttccaggtgactgtcagcacaatgctcacatgtactacgttctcctggcgcctgaaattaatcgtcaagaggtccttgattcgttcaaacgaaatgaaatctggtcggttttccattacgtaccgcttcactcatcccctgccggtaagcgttatggtcggtcgcatggcgacctggatgtcacaactcggctgtctgaaaggttggtccgcttgccgatgtgggttgggttgacgaatgagcagcaagaaagagtcgttgaggtgctgagtgaagcggttagctga

SEQ ID NO: 83783 - protein, 380 aa, Azoarcus sp. BH72
MLEEKKIPFNWPYMTGKELYYIAEAHFNGRLAGDGPFTKRCHRWLEERTGCNKGLLTHSCTAALEMAALLLDIQPGDEIIMPSYTFVSTANAFVLRGGVPVFVDIREDSLNLDERLIESAITPRTRAIAPVHYAGVACEMDTIMIMAREHGLKVVEDAAQGVMSTYKGRPLGSIGDLGVYSFHETKNLISGEGGALLVNSPDMSLRAEIIREKGTDRSRFFRGEVDKYTWQEVGSSFLPGELIAAFLWAQLEEADRITKERLASWQRYHEFLEPLEAKGILRRPIVPGDCQHNAHMYYVLLAPEINRQEVLDSFKRNEIWSVFHYVPLHSSPAGKRYGRSHGDLDVTTRLSERLVRLPMWVGLTNEQQERVVEVLSEAVS

SEQ ID NO: 83784 - DNA, 1152 bp, Nostoc punctiforme PCC 73102
  CDS (1)..(1152): transl_table=11
atgccagaattcatccctttcgctttacctgatattggagaagaagaaattagtgaggttgttgattctttacgatctggttggttgactacaggacctaagaccaaacgttttgagcaatattttgcagatttcattggttctggagtagaagcgatcgcagttaattctgccacatcagggttacatctcgctctggaagcattgggaattggtcccggagatgaagtaattaccacagtccacaccttcacggctacagcagaagtgattcgttacttaggagccaatccagtctttgttgatattaatttagctactctcaacattgatgctagcaaaattgaggctgctattactccccgcactaaagccatcatgcctgtccattttggtggacttgcttgtgatatgcaatcaattttaacaattgcccaaaagcatcaattgaaagtagttgaagatgctgcccatgctatcccgacaacctatcagggtaagttgattggtagcttagatagtgatgtcaccgtctatagcttttatgcaaccaaaaccattgctacaggtgaagggggtatgctagtaacccgtaacccggaaatagctcaaagatgccgaactatgcgcttacatggcatcaatcgagatgctttcgatcgctatacctcaactaaaccctcatggtattacgaggtagttgcaccaggcttcaaatataatatgacagatgtcgcggcttctcttggtatccatcaattgaagaaagccaagacactacagcaacaacgagctgcgatcgctaatcgatacaatatagaactaagcgacttacctttacatctgccagcattacctgctgatggagatattcactcttggcatctatatgtaattcgtttagccgattctgtacaagttagtcgcaataactttattgagcaattggctgctaaagggattggttgtagcgttcactatattcctttacacttgcatccctactggcgcgacacttacaatctctgcttagaagattttcctcaagcatcctatgcttctgaacggatagtaagcctaccaatctacacaaaaatgactgaggcagatcaaactcatatcattgaaatcatcaacaaaactttgacttga

SEQ ID NO: 83785 - protein, 383 aa, Nostoc punctiforme PCC 73102
MPEFIPFALPDIGEEEISEVVDSLRSGWLTTGPKTKRFEQYFADFIGSGVEAIAVNSATSGLHLALEALGIGPGDEVITTVHTFTATAEVIRYLGANPVFVDINLATLNIDASKIEAAITPRTKAIMPVHFGGLACDMQSILTIAQKHQLKVVEDAAHAIPTTYQGKLIGSLDSDVTVYSFYATKTIATGEGGMLVTRNPEIAQRCRTMRLHGINRDAFDRYTSTKPSWYYEVVAPGFKYNMTDVAASLGIHQLKKAKTLQQQRAAIANRYNIELSDLPLHLPALPADGDIHSWHLYVIRLADSVQVSRNNFIEQLAAKGIGCSVHYIPLHLHPYWRDTYNLCLEDFPQASYASERIVSLPIYTKMTEADQTHIIEIINKTLT

SEQ ID NO: 83786 - DNA, 1143 bp, Vibrio sp. Ex25
  CDS (1)..(1143): transl_table=11
atgattccatttaataagcccccagttgtaggtaaagagcttagctttattgagcaagctatccaaggaagtaaactctcgggagatgggccactttctgaacgatgcgagagttggtttgaaaacagagcgagctgtattaagactttgttaacgccttcatgtacccatgcgcttgaactcgccgctttactgatcgatattcagcctggtgatgaagtgattatgccaagctacacttttgttagcactgcgaatgcatttgtactgcgtggtgcaaaagtggtgtttgttgatattcgtccagatacgatgaacattgatgaaaccaaaattgaggctgcaatcactgaaaaaacggttgctattgtacctgtacattatgctggtgttgcttgtgagatggacacgatcatgagtattgcagagaagtataaactcattgttattgaagatgcggctcaaggtgtgatgtctacttacaaagggaaagcgttgggggcaattggccatctaggtgcatatagttttcatgagacgaaaaattatacgtccggtggtgaaggtggactacttcttattaatgaccaatcttttgttgagcgtgcagaaattgtcagagagaaggggacgaaccgaagtttgttcttccgtggcatggtagacaaatatacttgggttgatcttggtagtagtttgcttccaagtgagatacaagcagcatacctttgggggcagcttgaagaagctgaagggattaaccaaagacggctacaaatttggcgaaaatatctagatgagcttacgcctcttgccgcaaaacacaatatagaagtgccaactgttccttttgaatgtcagcacaatgcgcatatgttctacttgaaactggaaaatctggaattgagaagccagtttattgaaatgcttcgtgaagagggcatagtctctgcgtttcactatattccattgcatagctcaccagctggccaacagtttggtcggtttgtcggcagtgatatatatacgacacaagaaagtgagcgcttggtaaggctaccactgtacttcaatatgagtgatagtgagcagtcgtatgttattaatgctataaaaaatgttttagggcgtatggaattgtaa

SEQ ID NO: 83787 - protein, 380 aa, Vibrio sp. Ex25
MIPFNKPPVVGKELSFIEQAIQGSKLSGDGPLSERCESWFENRASCIKTLLTPSCTHALELAALLIDIQPGDEVIMPSYTFVSTANAFVLRGAKVVFVDIRPDTMNIDETKIEAAITEKTVAIVPVHYAGVACEMDTIMSIAEKYKLIVIEDAAQGVMSTYKGKALGAIGHLGAYSFHETKNYTSGGEGGLLLINDQSFVERAEIVREKGTNRSLFFRGMVDKYTWVDLGSSLLPSEIQAAYLWGQLEEAEGINQRRLQIWRKYLDELTPLAAKHNIEVPTVPFECQHNAHMFYLKLENLELRSQFIEMLREEGIVSAFHYIPLHSSPAGQQFGRFVGSDIYTTQESERLVRLPLYFNMSDSEQSYVINAIKNVLGRMEL

SEQ ID NO: 83788 - DNA, 1131 bp, Alteromonadales bacterium TW-7
  CDS (1)..(1131): transl_table=11
atggttccttttaatatacctcctaaagtaggtacagaattagcgtatatcgagcaagcgattgcatcagacaaattatgcggcgatggttacttctctaaaaaatgcgaaagatggtttgaagacagcttcaacacaacaaaagcattattaactccctcatgcaccgcatcgttagagctagctgctattctgattgatattcagcctgctgatgaagttattatgccctcatacacatttgtatctacagcgaatgcgtttgtattacgtggtgcaaaaattatatttgttgacgtacgtccagatactatgaatatggatgaaacactcattgaagctgcaattacgactaacacaaaagcaatagtgccagtacattacgcaggtgtagcttgtgaaatggatacaatacttgctatcgcagaaaaacatgacttgtgggtagtagaagatgcagcacaaggcgtaatgtctacctataaaggtaaagcactaggaactcttggtcatataggttgttatagctttcatgaaactaaaaactactcatcgggtggtgaaggtggggctattttaattaatgaccctaagctagttgaacgagctgagattatacgtgagaaaggaacaaaccgtagccaattcctacatggtattgtcgataaatacacatggcaagacataggttcgagctttttacctagcgaattacaagcggcatatttgtatgcacaactagaagcagcagacacgataaacaatttccgtttatcaatatgggaccattattacagtaaactgagcctaaaattaaaagctgagcagctacctcatattccggattcattaacgcataacgcacatatgttttatataaaattaaattcgaatgaagaacgaaatgaatttattagttatatgaaaacgcaggatattacgacaccttttcattatatcccactgcactcaagccctgcaggaaaacagtttggcgagtttttaggcaatgatacttatacaacgcaagagagttcaaggctagtacgtttgccgctgtattatggaatgactacagaaaatcaagacaaggtaataaaagcgtctttggatttcttccttgaaagctaa

SEQ ID NO: 83789 - protein, 376 aa, Alteromonadales bacterium TW-7
MVPFNIPPKVGTELAYIEQAIASDKLCGDGYFSKKCERWFEDSFNTTKALLTPSCTASLELAAILIDIQPADEVIMPSYTFVSTANAFVLRGAKIIFVDVRPDTMNMDETLIEAAITTNTKAIVPVHYAGVACEMDTILAIAEKHDLWVVEDAAQGVMSTYKGKALGTLGHIGCYSFHETKNYSSGGEGGAILINDPKLVERAEIIREKGTNRSQFLHGIVDKYTWQDIGSSFLPSELQAAYLYAQLEAADTINNFRLSIWDHYYSKLSLKLKAEQLPHIPDSLTHNAHMFYIKLNSNEERNEFISYMKTQDITTPFHYIPLHSSPAGKQFGEFLGNDTYTTQESSRLVRLPLYYGMTTENQDKVIKASLDFFLES

SEQ ID NO: 83790 - DNA, 1158 bp, Escherichia coli B
  CDS (1)..(1158): transl_table=11
atggcggaaggaaaagcaatgtcagaatttttgcctttttcgcgaccagcaatgggcgtggaggaactcgctgcagttaaagaggttctcgaatccggttggatcacaaccggcccgaagaatcaggcgcttgagcaagccttttgccagttgacgggaaatcagcatgccatcgcggtcagttcagccaccgccggaatgcatatcacgctaatggcgttggaaattggcaagggtgatgaagtgattacgccttccctgacctgggtttcaactctcaatatgatctccttgttgggtgcaacgccggtaatggtggatgtcgaccgcgatacgctgatggtcacgcctgaagctatcgagtcagccattacgccacgcactaaagccatcattccggtgcattatgccggtgcgccagcagatattgacgccattcgcgccattggcgaacgttacggcatcgcagttatcgaagatgcagcccatgccgtcggtacgtattacaaagggcgacatattggagcaaaaggtaccgctattttttcgtttcacgccatcaaaaatattacctgtgcggaaggtggcctgattgttactgataatgaaaatcttgcccgccagctacggatgctgaaatttcacggtctgggtgtcgatgcctatgacagacaaacctggggccgtgcaccgcaggctgaagtcttaacgccgggctataagtacaatctgaccgatattaacgccgcgattgccatgacacagttagccaaattagagtacctcaacacccgtcggcgcgaaattgccctgcaatatcagcaagcactggcagctctcccctttcagccattaagtcttcccgcctggccgcacgttcacgcctggcatctgtttattattcgtgtcgatgaacaacgttgtggtatcagtcgaaatgcgttgatggaagcgttaaaagaaagaggcattggtaccgggttacatttccgcgccgctcacacacaaaaatattatcgcgagcgttttcccacgctgtcgttaccgaataccgaatggaatagcgaacgcatctgttctttgccgctgttcccggatatgaccaccgccgatgccgaccgtgtcatcacagcccttcagcaactcgcaggacaataa

SEQ ID NO: 83791 - protein, 385 aa, Escherichia coli B
MAEGKAMSEFLPFSRPAMGVEELAAVKEVLESGWITTGPKNQALEQAFCQLTGNQHAIAVSSATAGMHITLMALEIGKGDEVITPSLTWVSTLNMISLLGATPVMVDVDRDTLMVTPEAIESAITPRTKAIIPVHYAGAPADIDAIRAIGERYGIAVIEDAAHAVGTYYKGRHIGAKGTAIFSFHAIKNITCAEGGLIVTDNENLARQLRMLKFHGLGVDAYDRQTWGRAPQAEVLTPGYKYNLTDINAAIAMTQLAKLEYLNTRRREIALQYQQALAALPFQPLSLPAWPHVHAWHLFIIRVDEQRCGISRNALMEALKERGIGTGLHFRAAHTQKYYRERFPTLSLPNTEWNSERICSLPLFPDMTTADADRVITALQQLAGQ

SEQ ID NO: 83792 - DNA, 1176 bp, Aspergillus oryzae
  CDS (1)..(1176)
atggatatgcgcaccaatactatccatacgacctgcaccaccattattggcaccgagttggccaatattgaagatgtactcactctgaacaacctttccggcaaggggaaatatacccggctgtgtgaacaatggctggagcagttcatgagaggaaataacggacgagcactggttgtctcttcctgcacctccgccctggagatggccgccatacttgccgatatccaagcaggcgacgaggtgattgtccccagctatacgtacgtgacaaccgtgaatgcattcgcactgcggggcgccgtgcctgtgtttgtagatttggacgacgccacgatgaacatcgacgcgaaccttatcgaaagggctattacacccaagacgcgagcaatcatccccattcactatggcggggttgcatgcgacatggacaaaatcatgaaggtcgctaaaagacatcaactattcgtctgcgaagatgcagccatggcatgcacatccacctataagggccagattctcggcactataggcaacatcggctgcatcagctttcaggaaaagaagaactttacagccggaggtcaaggaggtgcccttctagtcaatgatccagtattagctgagcgagccgagatcctctatgaccacgggaccaaccgttcgcgcttcatgcgcggtgaagttgatagctaccagtggctggatctggggttgaatgccactctttctgagctgcaggctgcgtttctatatgcacaattacaagctgcggatggcatcaatgcgcgcagaaggcatatctgggatcattattttgttagtttgttacctttggtccgtaagaggtacattactttgccccgtgttcctgatgataccacccaacatgcgaacgtgttctatatcagagttatagatccggcgcagcgcgaggatctgattcggcatatggctagggccaaagttcaggtacatccgcagttcatgccattacacttgtctccatttggtaggagtcatggtcactttcatggagaggaccgtgttacgtcactcgccagctcgcaaatcttgctgctgccggtgcatttggcgctgtctgatgaggcgcaggaggttgtgatccgggagatgtttgctttttggggtgagacagcagagggtagtgtttag

SEQ ID NO: 83793 - protein, 391 aa, Aspergillus oryzae
MDMRTNTIHTTCTTIIGTELANIEDVLTLNNLSGKGKYTRLCEQWLEQFMRGNNGRALVVSSCTSALEMAAILADIQAGDEVIVPSYTYVTTVNAFALRGAVPVFVDLDDATMNIDANLIERAITPKTRAIIPIHYGGVACDMDKIMKVAKRHQLFVCEDAAMACTSTYKGQILGTIGNIGCISFQEKKNFTAGGQGGALLVNDPVLAERAEILYDHGTNRSRFMRGEVDSYQWLDLGLNATLSELQAAFLYAQLQAADGINARRRHIWDHYFVSLLPLVRKRYITLPRVPDDTTQHANVFYIRVIDPAQREDLIRHMARAKVQVHPQFMPLHLSPFGRSHGHFHGEDRVTSLASSQILLLPVHLALSDEAQEVVIREMFAFWGETAEGSV

SEQ ID NO: 83794 - DNA, 1149 bp, Aspergillus oryzae
  CDS (1)..(1149)
atgataccgttcagcgttcctacagtagcgggctcagagctgcaatatgttgagcaagcggtgcggaaaggcaccctaagtggcgatggagaatacaccgtcttatgtcaaaattggctggaaaggaaattgcccgccgccaaagtattccttactccatctgggactgctgccctcgatttggcagcattggtcctgaacattcagcatggagatgaagtcattgtccccagctacacctatgtttctaccgccaatgcattcctacttcgcggggcctcgttggtgtttgtggatattgcgcccgagaccatgaacatggacatggaaaagctccaagatgccatcactgacaagacccgtgtgatcgtcccggttcactatgctggtgtcgcttgcgatatggatgctcttttgcatatagccaccgagcgagggatctatattgtggaagacgccgcgcagggtttgttctcaacctataaaggtcgtgcgttgggcacaattggccacatcgggtgcttcagcttccacgagagcaagaacgtgacagcaggcgggcaaggtggcgcgattctgatcaacgaccctggccttgtcgagcaagcggaaattatcaaagataaaggcaccaaccgccaaaagttcctgcgtggggacgtcgcccactatacctggcaacaggctggggcgagctataccctcagcgagatacaggccgcctacctttggggccagcttgaagcgtccgattgcatacaaagccaacgtttggagatctggaatttctactacagggaattatctaagctaggcgatgatgtaccaattgttctaccctctgtaccatcttactgccagcacaatgcacatatcttctttataagagtgaaggatggagcgcagcgcagagaattcattaccgccatgaaagatgcagggataacggttctcgcccattatagtcctctacactcgacggtccccggcgcccaaggtcggcacgttcttgatcgacaggacctcgcaactcgcgagagcgagaggctggttcgtcttccgatcttctatacgatgactatggagcaagcacgcaaggtggttgaaacaataaagtggtatttcatgagacgtttgactcgtatatag

SEQ ID NO: 83795 - protein, 382 aa, Aspergillus oryzae
MIPFSVPTVAGSELQYVEQAVRKGTLSGDGEYTVLCQNWLERKLPAAKVFLTPSGTAALDLAALVLNIQHGDEVIVPSYTYVSTANAFLLRGASLVFVDIAPETMNMDMEKLQDAITDKTRVIVPVHYAGVACDMDALLHIATERGIYIVEDAAQGLFSTYKGRALGTIGHIGCFSFHESKNVTAGGQGGAILINDPGLVEQAEIIKDKGTNRQKFLRGDVAHYTWQQAGASYTLSEIQAAYLWGQLEASDCIQSQRLEIWNFYYRELSKLGDDVPIVLPSVPSYCQHNAHIFFIRVKDGAQRREFITAMKDAGITVLAHYSPLHSTVPGAQGRHVLDRQDLATRESERLVRLPIFYTMTMEQARKVVETIKWYFMRRLTRI

SEQ ID NO: 83796 - DNA, 1137 bp, Streptomyces griseus subsp
  CDS (1)..(1137): transl_table=11
ttgagctctttccaggaattgccgcggtggccccagctgacggacgacgacatcgaggcggcggtggcggcgctgcgctccaaccgcctggtggggcaggggaacagcacggtcgaggagttcgaggcggcgctggcggccggccagggagtcgagcacgcggtcgcggtgtccaccggcacggcggccgtgcacctggcgctgcacgccctcgacgtcggcccgggcgacgaggtcatcgtgcccacccacaccttcatcggctccgccagcccggtgacgtacctcggcgcccgcccggttttcgccgacgtcacgccggacacccactgcctggacccggactcggtgaagtccctgatcggggagcgcaccaaagccatcgtcgtggtccacatcaacggcatagccgccgacatggccgctctgaccgctgtggccgccgaggcgggcgtgccggtcatcgaggacgccgcgcaggcgctcggcaccgagatcggcggccggcccatcggcggcttcggggatctcgcctgcgtcagcctcttcgaacagaaggtgatcacctcgggcggcgagggaggcgccgtgctcaccgacaacccggtctacgcggagcgagtgcgccggctgcggagccacggtgaggggcccgtctccggcagcccggggatgatctgggcgcacgaggtcggctacaactaccgcctcacgtccgtccaggcggccgtcggcctcgcccagcacaagcgcctcggcgacctggtcgaagcccgccgtcgcaacgcggcgtacctctccgagcggctggccggcgtcgagggcttggagctgccggtggagccgcccggcaccactcacgcgtactggaagtacgcggtgcgcgtggttccgggggacggacgccgcagcgctgcggacatcgcggcccacctgcgctcgcggggcgtcccggtgctgctgcgctacccgtacccgctgcacaagcagcccgcgttcgccgagtaccacggggtgtccctgccggtcgccgagcggctgtcgcaggaactgctggccctgccctcgcacccgggactggtggagggccacctggaccacgtcgccgaagaggtccgcaaggccgtcgcgagctga

SEQ ID NO: 83797 - protein, 378 aa, Streptomyces griseus subsp
MSSFQELPRWPQLTDDDIEAAVAALRSNRLVGQGNSTVEEFEAALAAGQGVEHAVAVSTGTAAVHLALHALDVGPGDEVIVPTHTFIGSASPVTYLGARPVFADVTPDTHCLDPDSVKSLIGERTKAIVVVHINGIAADMAALTAVAAEAGVPVIEDAAQALGTEIGGRPIGGFGDLACVSLFEQKVITSGGEGGAVLTDNPVYAERVRRLRSHGEGPVSGSPGMIWAHEVGYNYRLTSVQAAVGLAQHKRLGDLVEARRRNAAYLSERLAGVEGLELPVEPPGTTHAYWKYAVRVVPGDGRRSAADIAAHLRSRGVPVLLRYPYPLHKQPAFAEYHGVSLPVAERLSQELLALPSHPGLVEGHLDHVAEEVRKAVAS

SEQ ID NO: 83798 - DNA, 1218 bp, Streptomyces bikiniensis
  CDS (1)..(1218): transl_table=11
atgaccatgaaacgcaatctcggtgatctcgccgtgttcggcggcccgtcggcgttcctgcaaccacttcacgtggggcggcccaacgtgggcgaccgagcgcggttcctggaccgtgtgaactgggcgctggaccaccagtggctgaccaacggcgggccgctggcccgggagttcgagcagcgcgtggcggaactcgccggcgtgcgctactgcgtgtcgacctgcaacgcgaccgtcgccctccagttgctggcccgcgccgccgatctgtcgggcgaggtcatcatgccgtcgctgaccttcccggcgaccgcccaggcgttccgctggctgggtctgaccccggtcttcgtcgacatcgacccggccaccaactgcctggacccggatctgatcgaggcggcgatcaccccccgtacgagtgcggtcgtgccggtccatctgtggggtcggccctgcgcggtcgaccggctggcgaaggtcgcggccgatcacggtctcaggctcttctacgatgccgcgcacggactcggctgcacgtcggaagggcagccgatcggcggcttcggacaagccgaggtgttcagcttccacgccaccaaggtggtcaacgccttcgagggcggcgcggtggtgaccgatgacgagaggctggcccagcgggtccgcgcgatgcacaacttcggattcacccaggggcgggtgtccacggagaccggcaccaacgggaagatgaccgaagccgccgccgcgatgggactcacctcgctcgacgccttcgaggagacggttcgccggaacgaggccaaccacgacgactaccggtcggaactcgccgggctcgccgggctgaaggtcatggagttcgaccgtgccgagcgcaacaactaccactatctggtcgtggaggtcgacgccgcggtgaccggggtccaccgggacctgctggacgaggtgctgagggcggagaacatcatgtgccagcggtacttctcccccggatgccacgagatggagccctaccgctcggagcggccggtctccctgccccacaccgaacggctcgcgcggaaggtcctcgccctgcccaccggccccaccgtctctcgcgaggacatccgtcgggtctgcgacatcgtgcggctcactctggagcggggacacgaggtgacccgacgggccgacgagcgggtgccctccacgacggctccctga

SEQ ID NO: 83799 - protein, 405 aa, Streptomyces bikiniensis
MTMKRNLGDLAVFGGPSAFLQPLHVGRPNVGDRARFLDRVNWALDHQWLTNGGPLAREFEQRVAELAGVRYCVSTCNATVALQLLARAADLSGEVIMPSLTFPATAQAFRWLGLTPVFVDIDPATNCLDPDLIEAAITPRTSAVVPVHLWGRPCAVDRLAKVAADHGLRLFYDAAHGLGCTSEGQPIGGFGQAEVFSFHATKVVNAFEGGAVVTDDERLAQRVRAMHNFGFTQGRVSTETGTNGKMTEAAAAMGLTSLDAFEETVRRNEANHDDYRSELAGLAGLKVMEFDRAERNNYHYLVVEVDAAVTGVHRDLLDEVLRAENIMCQRYFSPGCHEMEPYRSERPVSLPHTERLARKVLALPTGPTVSREDIRRVCDIVRLTLERGHEVTRRADERVPSTTAP

SEQ ID NO: 83800 - DNA, 1158 bp, Vibrio cholerae
  CDS (1)..(1158): transl_table=11
atgcattttatcccatttaacaaaccaccagtgactggcaatgaactaaaatatatttctcaagctgtttctggtgataagttatctggggatggaccattcgcaaaacaatgtgaggtatggcttgaaaagcatactcaaacaaaaaaagctttactcacaccttcttgcactcatgcactcgagcttgctgctttactgattgatattcaagctggtgatgaagtgattatgccaagctttactttcgttagtactgcaaatgcatttgtcctacgtggagccaaaattgtctttgtcgatattcgcccagacactatgaacattgatgaaaccaaaattgaatcagccattaccgctagaacaaaagcgatagtaccagtccactacgcaggagtcagctgtgatatgggtacaataatggcaatcgcgaataagtataaactatttgttatagaagatgccgcacaagggatgatgtctacatataaagatcaacctttgggctctattggtcatatggccgcatttagttttcatgagacaaaaaactacacgtctggaggagaaggaggcgcactcctgattaacgaccaacgttttattcaacgtgcagaaattttgcgagagaaaggaactaacagaagtttatttttcaaaggtatggtggataaatacacatgggttgatataggtagcagcatgctgccaagcgaaatacaagcggcatatctgtatgctcaaatggagcaggctgtagaaatcaatcatactcgcctcaatatttggaacagctatctaaatgccttttctaaatatcaagagtctggcgtaatcgaactcccatcaatcccggcgaactgtcaacacaatgctcatatgttttacataaaactacataatgttgatataagagataaatttattattcatatgaagaataatagtgttctgacggtatttcattatttacctctacatagcacagtagcgggaagaaaatttagctattttcatggtgaagatatccatacaacaaaagaaagtgagaaattagttagactcccgctatactttaatcttaaagaagaagatatgtatcgaataattgatatagcatgtgattttttagacagttattctggtaataaaaaatga

SEQ ID NO: 83801 - protein, 385 aa, Vibrio cholerae
MHFIPFNKPPVTGNELKYISQAVSGDKLSGDGPFAKQCEVWLEKHTQTKKALLTPSCTHALELAALLIDIQAGDEVIMPSFTFVSTANAFVLRGAKIVFVDIRPDTMNIDETKIESAITARTKAIVPVHYAGVSCDMGTIMAIANKYKLFVIEDAAQGMMSTYKDQPLGSIGHMAAFSFHETKNYTSGGEGGALLINDQRFIQRAEILREKGTNRSLFFKGMVDKYTWVDIGSSMLPSEIQAAYLYAQMEQAVEINHTRLNIWNSYLNAFSKYQESGVIELPSIPANCQHNAHMFYIKLHNVDIRDKFIIHMKNNSVLTVFHYLPLHSTVAGRKFSYFHGEDIHTTKESEKLVRLPLYFNLKEEDMYRIIDIACDFLDSYSGNKK

SEQ ID NO: 83802 - DNA, 1161 bp, Rhizobium meliloti
  CDS (1)..(1161): transl_table=11
atgataccttacggtcgtcaggatatcacgcaggcggacatcgacgcggttgcagaggtgctccgttccgattttcttacgcaagggccagcggtgcctcgttttgagaacgcccttgttgattacacgggtgcaaagtttgcattagcggcaaacagtgcaacatcagcacttcatgtagcttgcctagcgttgggcctcggtccaggagactggttgtggacttcgccattgacgttcgtggcgtctgccaattgtgcactttactgcggagccaaggtggacttcgttgacgtggatccgcgaacctataatctttgcccagcgaaactagagcgcaagttaatcgttgccgaacgcgatggaactcttcccaagatcgttgtgctcgtgcatttcgctggccagccgtgcgctattgccgaattccatgagctcggtaagcggtacgggttcaggatcattgaggacgcttcacacgctgttggtggtaggtatcggggcgaacccatcggcaattgccgctacagtgatgtcaccgtcttcagcttccacccggtaaagatcgtcaccactgcggaaggaggcgcggctctgaccaacagcaaggagcttgcagaaagaatagcgttatttcgtagtcacggaattacacgcgatccggcagtaatgacccatgaaccggacgggccttggtattatcagcaggtggaacttggatacaactaccgtttgactgatatgcaagcggctttggggctgagtcagatggttcgcctcgacgaatatgtcgcaaggcgtcacaccctggctcggcgatatgataagtcgcttgtcgaactccccgtggtgacgccatggcagcaccctgacagctattccggcctgcacctttatgtggtccgcctggaacgtacgaagatttctaaatctcaccgagcgttcttcgaggggctccgtgcacggggcattggtgtgaacctgcactatattccggttcatacgcagccctattattcgaaaatgggcttccgaaagggcgactatcctgaagcggaacggtattacgaggaggcaatcacactgccgttatacccgacaatgactgaagcgcaacaggaccaggtcgtggcggcgctcactgcggaactggcaacgtga

SEQ ID NO: 83803 - protein, 386 aa, Rhizobium meliloti
MIPYGRQDITQADIDAVAEVLRSDFLTQGPAVPRFENALVDYTGAKFALAANSATSALHVACLALGLGPGDWLWTSPLTFVASANCALYCGAKVDFVDVDPRTYNLCPAKLERKLIVAERDGTLPKIVVLVHFAGQPCAIAEFHELGKRYGFRIIEDASHAVGGRYRGEPIGNCRYSDVTVFSFHPVKIVTTAEGGAALTNSKELAERIALFRSHGITRDPAVMTHEPDGPWYYQQVELGYNYRLTDMQAALGLSQMVRLDEYVARRHTLARRYDKSLVELPVVTPWQHPDSYSGLHLYVVRLERTKISKSHRAFFEGLRARGIGVNLHYIPVHTQPYYSKMGFRKGDYPEAERYYEEAITLPLYPTMTEAQQDQVVAALTAELAT

SEQ ID NO: 83804 - DNA, 1155 bp, Plesiomonas shigelloides
  CDS (1)..(1155): transl_table=11
atgaaaaattttattccttttgcgttacctgaaattggcgaagaagaaattgcagaggtaattgactctttacgttcaggttggattacgacaggtcctaaggctaagcaatttgaacaagaattttctaattacctaggagcgaacgttcaatcattagctgttaactctgctacgtcgggcttacatttggctcttgaagctgttggcgtaaaacctggagaccaagttattgtcccatcatatacattcactgctactgccgaaattgtcaggtaccttggtgctgatcctgtaattgttgatgtagatcgtaaaacatttaatatatcagttgatgccattgagaaggctattactaataaaacaaaggcgattattccagtacacttcgctggattagcttgtgacatggattcaatcttatcaattgctaaaaaatatgacctaaaggttgtcgaggatgccgctcatgcatttcctacaacatataaaggaagtaagataggaacgcttgattcagatgctacggtttttagcttctacgccaataaaactatgacaaccggtgaaggcggaatggttgtttcaaaaaataaagatataattgagcgttgtaaggtaatgcgtttacatggaatcagtcgtgacgcttttgaccggtaccagtctaaaactccttcttggttttatgaggttgtagctccagggtttaaatacaatatgcctgatatctgtgcggcaatcggtattcatcaacttagaaagatcgatgattttcagaaaaaacgtcaacgaatggcaaaaatttacgatgatgcgttaaaagaattgccacttgaattgcctgaatggcctactaatgctagtgatattcatgcttggcatctatatcctatccgcttaaaaactgattcggctattaatcgcgatgattttattaagaagttatcagatcttggaattggttgttctgtccattttataccgttgcataagcaaccggtttggcgtgatacatataatttgaacgccagtgactttccagtttctgaggcgtgttatttaaatgaaatatctattcctctttatactaaaatgacggatcaagatcagttgttcgttatcgaatcgattagacaattatttatgtaa

SEQ ID NO: 83805 - protein, 384 aa, Plesiomonas shigelloides
MKNFIPFALPEIGEEEIAEVIDSLRSGWITTGPKAKQFEQEFSNYLGANVQSLAVNSATSGLHLALEAVGVKPGDQVIVPSYTFTATAEIVRYLGADPVIVDVDRKTFNISVDAIEKAITNKTKAIIPVHFAGLACDMDSILSIAKKYDLKVVEDAAHAFPTTYKGSKIGTLDSDATVFSFYANKTMTTGEGGMVVSKNKDIIERCKVMRLHGISRDAFDRYQSKTPSWFYEVVAPGFKYNMPDICAAIGIHQLRKIDDFQKKRQRMAKIYDDALKELPLELPEWPTNASDIHAWHLYPIRLKTDSAINRDDFIKKLSDLGIGCSVHFIPLHKQPVWRDTYNLNASDFPVSEACYLNEISIPLYTKMTDQDQLFVIESIRQLFM

SEQ ID NO: 83806 - DNA, 1140 bp, Escherichia coli
  CDS (1)..(1140): transl_table=11
atgtcagaatttttgcctttttcgcgaccagcaatgggcgtggaggaactcgctgcagttaaagaggttctcgaatccggttggatcacaaccggtccgaagaatcaggcgcttgagcaagctttttgccagttgacgggaaatcagcatgccatcgcggtcagttcagccaccgccggaatgcatatcacgctaatggcgttgaaaattggcaagggcgatgaagtgattacgccttccctgacctgggtttcaaccctcaatatgatttccttgttgggtgcaacgccggtaatggtggatgtcgaccgcgatacgctgatggtcacgcctgaagctatcgagtcagccattacgccacgcactaaagccatcattccggtgcattatgccggtgcgccagcagatattgacgccattcgcgccattggcgaacgttacggcatcgcagttatcgaagatgctgcccatgccgtcggtacgtattacaaagggcgacatattggcgcaaaaggtaccgctattttttcatttcatgccattaaaaatattacctgtgctgaaggtggcctgattgtaactgataatgaaaaccttgcccgccagctacggatgctgaaatttcacggtctgggtgtcgatgcctatgacagacaaacctggggccgtgcaccgcaggctgaagtcttaacaccgggctataagtacaatctgaccgatattaacgccgcgattgccctgacacagttagtcaaattagagcacctcaacacccgtcggcgcgaaattgcccagcaatatcagcaagcactggcagctctcccctttcagccattaagccttcccgcctggccgcacgttcacgcctggcatctgtttattattcgtgtcgatgaacaacgttgtggtatcagtcgcgatgcgttgatggaagcgttaaaagaaagaggcattggtaccgggttacatttccgcgccgctcacacacaaaaatattatcgcgagcgttttcccacgctgtcgttaccgaataccgaatggaatagcgaacgcatctgttctttgccgctgttcccggatatgactaccgccgatgccgaccatgtcatcacagcccttcagcaactcgcaggacaataa

SEQ ID NO: 83807 - protein, 379 aa, Escherichia coli
MSEFLPFSRPAMGVEELAAVKEVLESGWITTGPKNQALEQAFCQLTGNQHAIAVSSATAGMHITLMALKIGKGDEVITPSLTWVSTLNMISLLGATPVMVDVDRDTLMVTPEAIESAITPRTKAIIPVHYAGAPADIDAIRAIGERYGIAVIEDAAHAVGTYYKGRHIGAKGTAIFSFHAIKNITCAEGGLIVTDNENLARQLRMLKFHGLGVDAYDRQTWGRAPQAEVLTPGYKYNLTDINAAIALTQLVKLEHLNTRRREIAQQYQQALAALPFQPLSLPAWPHVHAWHLFIIRVDEQRCGISRDALMEALKERGIGTGLHFRAAHTQKYYRERFPTLSLPNTEWNSERICSLPLFPDMTTADADHVITALQQLAGQ

SEQ ID NO: 83808 - DNA, 1149 bp, Erwinia carotovora subsp
  CDS (1)..(1149): transl_table=11
atgacggattttttgcctttttcccgcccgaccatgggcgacgaggaaattgctgccgtggcagaagtattacgttctggctggataaccacggggccgaaatgtcagcagttagagcaggctttttgccagcagtttgggtgccaacaggcgattgcggttagctccgcgacgggcggaatgcacgttacgctgatggcgctcggcattggacctggtgacgaggttattacgccgtctcagacttgggtttcaaccgtcaatatcatcacgctattgggtgcggaaccggtgatggtggatgtggatcggcatacgttgatggtgcgatcgcaggatattgaagccgcaattacgccgaagaccaaagcgattattcccgtgcattacgccggtgcgcccgccgatctggatgcgctgcgcgcactcagtgaacgctatggcattccgctcattgaggatgcggcgcatgccgtcggtacgcaataccgtggtgagtggattggtgcgcgtggaaccgccattttctcgtttcacgcgattaaaaatatcacctgtgcggaaggtggcatggtggtgacggatgacgaagcactcgccgagcgtatacgcagtctgaaatttcacgggctgggtgtggatgcgtttgacaggcagttacaggggcgcaagccgcaggccgaagtggtgacgccggggtttaaatacaatctggcggatatcaatgcggctattgcgctggtccaactggataaactcccagcgatcaacgcccgccgtcagcagcttgccgcgcgttatctcacgcagttgcactcgctgccgctccaaccgctggcggttcctgactatccccatttgcacgcctggcacctgtttatggtgcgcgtggacgaaacgcagtgcggtatttcacgcgatgatctgatggcggcgctgcaaacacatggcattggcaccgggctgcatttcagagcggtgcatacgcagaaatattaccgtgagcgctacccgcatttgcacctgccggaaacggagtggaattcggcgtcgctcatgacgctaccgctgttccccgatatgcaggacagcgatgtcgatcgcgtcgtcgcggcgttaacctcgattctggagtctgttcgtgattga

SEQ ID NO: 83809 - protein, 382 aa, Erwinia carotovora subsp
MTDFLPFSRPTMGDEEIAAVAEVLRSGWITTGPKCQQLEQAFCQQFGCQQAIAVSSATGGMHVTLMALGIGPGDEVITPSQTWVSTVNIITLLGAEPVMVDVDRHTLMVRSQDIEAAITPKTKAIIPVHYAGAPADLDALRALSERYGIPLIEDAAHAVGTQYRGEWIGARGTAIFSFHAIKNITCAEGGMVVTDDEALAERIRSLKFHGLGVDAFDRQLQGRKPQAEVVTPGFKYNLADINAAIALVQLDKLPAINARRQQLAARYLTQLHSLPLQPLAVPDYPHLHAWHLFMVRVDETQCGISRDDLMAALQTHGIGTGLHFRAVHTQKYYRERYPHLHLPETEWNSASLMTLPLFPDMQDSDVDRVVAALTSILESVRD

SEQ ID NO: 83810 - DNA, 1158 bp, Salmonella typhimurium; identical to SEQ ID NO: 83742
  CDS (19)..(1158): transl_table=11

SEQ ID NO: 83811 - protein, 379 aa, Salmonella typhimurium
MSDFLPFSRPAMGAEELAAVKTVLDSGWITTGPKNQELEAAFCRLTGNQYAVAVSSATAGMHIALMALGIGEGDEVITPSMTWVSTLNMIVLLGANPVMVDVDRDTLMVTPEHIEAAITPQTKAIIPVHYAGAPADLDAIYALGERYGIPVIEDAAHATGTSYKGRHIGARGTAIFSFHAIKNITCAEGGIVVTDNPQFADKLRSLKFHGLGVDAWDRQSGGRAPQAEVLAPGYKYNLPDLNAAIALAQLQKLDALNARRAAIAAQYHQAMADLPFQPLSLPSWEHIHAWHLFIIRVDEARCGITRDALMASLKTKGIGTGLHFRAAHTQKYYRERFPTLTLPDTEWNSERICSLPLFPDMTESDFDRVITALHQIAGQ

SEQ ID NO: 83812 - DNA, 1326 bp, Bacillus subtilis
  CDS (1)..(1326): transl_table=11
atgcaaaaacaggttaagatttcaggtaaaagcaaagaaaacatgtcactattaaaacacttaaaaggtgacgtacaaggaaaagaacttgttattgaagacagtattgtaaacgagcggtggaaacaagtattaaaagaaaagatagatattgaacatgaccttttcaactatcaaaaaaatcgtgaaatcagtaaagtcccttttttgcctgtagacagattaataaccaatgatgaagtggaagatatcttaaatacattaactgaagttttgccaactggaaaatttacgagtggtccctatttagagcaattcgaaaaagttttatctacatatttacataaaaggtatgtaattgcaaccagcagtggaaccgatgctattatgataggtttattggctttagggttaaacccaggggatgaagttatcatgccggctaatagcttttcagctactgaaaatgctgtgttagcttcgggaggcgttcctatctatgtagatattaacccacaaacattctgcatcgatcctgacaaaattgaagaagcaataactccttatacaaagtttattctacctgtgcatttatacggaaaacattcagacatgcagcatatccgtcaaatcgcaaatcgttataaattaaaagtaattgaagatgcctgccaaggaattggactgacagacttaggaaagtatgcagacatcactacattaagttttaatccctataagaattttggtgtatgtggcaaggctggggcaatagcaactgataatgaagaactcgctaaaaaatgcattcaatttagttatcacggttttgaagtaaatgtaaaaaataagaaagtcatcaattttggatttaattcaaaaatggacaatttacaggcagcaattggtttagagagaatgaagtacctttcattaaacaacttcaaaagattgttcttggcggatagatacattacccaattagcagagttgcagaataaaggctatattgaattaccagaattaagtgaagatcatgtatggcatctgtttcctattaaggtaagaacagaagatagggcagatatcatgactaaattaaatgaagattttggtgttcaaacagatgtatattatccaatactttctcatatgcaaaaaactcctttagtacaggacaagtatgcaggactccaattggttcatacggaaaaggctcatagtcaggtactgcatttgcctttatatccgtcatttactttagaagaacaagacagagtaatggagggactgtttcatgttattaagcaagaaatcggagtataa

SEQ ID NO: 83813 - protein, 441 aa, Bacillus subtilis
MQKQVKISGKSKENMSLLKHLKGDVQGKELVIEDSIVNERWKQVLKEKIDIEHDLFNYQKNREISKVPFLPVDRLITNDEVEDILNTLTEVLPTGKFTSGPYLEQFEKVLSTYLHKRYVIATSSGTDAIMIGLLALGLNPGDEVIMPANSFSATENAVLASGGVPIYVDINPQTFCIDPDKIEEAITPYTKFILPVHLYGKHSDMQHIRQIANRYKLKVIEDACQGIGLTDLGKYADITTLSFNPYKNFGVCGKAGAIATDNEELAKKCIQFSYHGFEVNVKNKKVINFGFNSKMDNLQAAIGLERMKYLSLNNFKRLFLADRYITQLAELQNKGYIELPELSEDHVWHLFPIKVRTEDRADIMTKLNEDFGVQTDVYYPILSHMQKTPLVQDKYAGLQLVHTEKAHSQVLHLPLYPSFTLEEQDRVMEGLFHVIKQEIGV

SEQ ID NO: 83814 - DNA, 1170 bp, Bacillus subtilis
  CDS (1)..(1170): transl_table=11
atggtgcaaaagagaaatcattttctcccttactcattgccgttaatcggtaaggaagaaattcaggaggttacagaaacgcttgaatcgggatggctctctaaaggcccgaaggttcagcagtttgaaaaagagtttgccgcgtttgtcggggcgaagcacgccgtggcggtgaattcatgtaccgcagctttatttttggctttgaaagcaaaagggattgggcccggggacgaggtcattacctctccgcttacgttcagctcgaccgccaatacgattattcatacgggagcgacgcctgtgtttgcggatattgacgaaaacacgctcaatattgacccggtaaagcttgaggcggccgtcacaccgcgaacgaaagcagttgtgcccgtccactttggcgggcagtcctgcgatatggatgcaatattggctgttgcccaaaatcatggtttattcgtgctggaggatgcggcacatgcggtatatacgacttataagcaaagaatgatcggttctatcggggatgcaacggcattcagcttttacgccaccaaaaacctcgcgacaggggaaggcggcatgctgacgactgatgatgaggagcttgccgataagatacgggtgctaagccttcacggcatgagtaaagccgcatggaaccgttattcttcaaatggcagctggtactatgaagtcgaatcgcccggctataagatgaatatgtttgatttgcaggcggccctcggacttcatcagctgaaacggctggatgatatgcagaaacggagagaagagattgccggccgctatcaaaccgcttttcagcagattcctgggctgatcacgccgtttgtccatgatgacggcaggcacgcctggcatctatatgttctgcaagttgatgaaaaaaaggccggggttacgcgcagcgaaatgattacggctttaaaggatgaatacaatatcggcactagcgttcattttattccagtacacattcatccgtattatcaaaagcaatttggatataaggaagcggactttccgaatgccatgaattactataaacgaaccctttctctcccgctctatccatcaatgtctgacgatgatgtagatgatgtcattgaagctgtgcgggatatcgtaaaaggggctgattaa

SEQ ID NO: 83815 - protein, 389 aa, Bacillus subtilis
MVQKRNHFLPYSLPLIGKEEIQEVTETLESGWLSKGPKVQQFEKEFAAFVGAKHAVAVNSCTAALFLALKAKGIGPGDEVITSPLTFSSTANTIIHTGATPVFADIDENTLNIDPVKLEAAVTPRTKAVVPVHFGGQSCDMDAILAVAQNHGLFVLEDAAHAVYTTYKQRMIGSIGDATAFSFYATKNLATGEGGMLTTDDEELADKIRVLSLHGMSKAAWNRYSSNGSWYYEVESPGYKMNMFDLQAALGLHQLKRLDDMQKRREEIAGRYQTAFQQIPGLITPFVHDDGRHAWHLYVLQVDEKKAGVTRSEMITALKDEYNIGTSVHFIPVHIHPYYQKQFGYKEADFPNAMNYYKRTLSLPLYPSMSDDDVDDVIEAVRDIVKGAD

SEQ ID NO: 83816 - DNA, 22 bp, Artificial sequence
  primer
atgattccatttaacgcaccgc

SEQ ID NO: 83817 - DNA, 27 bp, Artificial sequence
  primer
ttaggaaaagtagttcaacaaagtcgc

SEQ ID NO: 83818 - protein, 383 aa, Artificial sequence
  consensus sequence
  Variant (3)..(4): Xaa in position 3 to 4 is any amino acid
  Variant (6)..(9): Xaa in position 6 to 9 is any amino acid
  Variant (10)..(10): Xaa in position 10 is any or no amino acid
  Variant (12)..(50): Xaa in position 12 to 50 is any amino acid
  Variant (51)..(53): Xaa in position 51 to 53 is any or no amino acid
  Variant (55)..(55): Xaa in position 55 is any amino acid
  Variant (57)..(70): Xaa in position 57 to 70 is any amino acid
  Variant (73)..(73): Xaa in position 73 is any amino acid
  Variant (77)..(77): Xaa in position 77 is any amino acid
  Variant (80)..(80): Xaa in position 80 is any amino acid
  Variant (82)..(84): Xaa in position 82 to 84 is any amino acid
  Variant (86)..(86): Xaa in position 86 is any amino acid
  Variant (88)..(92): Xaa in position 88 to 92 is any amino acid
  Variant (95)..(96): Xaa in position 95 to 96 is any amino acid
  Variant (101)..(104): Xaa in position 101 to 104 is any amino acid
  Variant (106)..(112): Xaa in position 106 to 112 is any amino acid
  Variant (115)..(115): Xaa in position 115 is any amino acid
  Variant (116)..(117): Xaa in position 116 to 117 is any or no amino acid
  Variant (121)..(122): Xaa in position 121 to 122 is any amino acid
  Variant (123)..(126): Xaa in position 123 to 126 is any or no amino acid
  Variant (128)..(129): Xaa in position 128 to 129 is any amino acid
  Variant (131)..(131): Xaa in position 131 is any amino acid
  Variant (138)..(142): Xaa in position 138 to 142 is any amino acid
  Variant (144)..(144): Xaa in position 144 is any amino acid
  Variant (146)..(155): Xaa in position 146 to 155 is any amino acid
  Variant (157)..(157): Xaa in position 157 is any amino acid
  Variant (162)..(167): Xaa in position 162 to 167 is any amino acid
  Variant (169)..(169): Xaa in position 169 is any amino acid
  Variant (171)..(173): Xaa in position 171 to 173 is any amino acid
  Variant (175)..(178): Xaa in position 175 to 178 is any amino acid
  Variant (179)..(184): Xaa in position 179 to 184 is any or no amino acid
  Variant (188)..(189): Xaa in position 188 to 189 is any amino acid
  Variant (192)..(195): Xaa in position 192 to 195 is any amino acid
  Variant (196)..(196): Xaa in position 196 is any or no amino acid
  Variant (200)..(210): Xaa in position 200 to 210 is any amino acid
  Variant (212)..(218): Xaa in position 212 to 218 is any amino acid
  Variant (220)..(229): Xaa in position 220 to 229 is any amino acid
  Variant (230)..(242): Xaa in position 230 to 242 is any or no amino acid
  Variant (244)..(252): Xaa in position 244 to 252 is any amino acid
  Variant (255)..(258): Xaa in position 255 to 258 is any amino acid
  Variant (261)..(269): Xaa in position 261 to 269 is any amino acid
  Variant (271)..(276): Xaa in position 271 to 276 is any amino acid
  Variant (278)..(280): Xaa in position 278 to 280 is any amino acid
  Variant (281)..(283): Xaa in position 281 to 283 is any or no amino acid
  Variant (285)..(310): Xaa in position 285 to 310 is any amino acid
  Variant (311)..(316): Xaa in position 311 to 316 is any or no amino acid
  Variant (318)..(326): Xaa in position 318 to 326 is any amino acid
  Variant (327)..(329): Xaa in position 327 to 329 is any or no amino acid
  Variant (331)..(334): Xaa in position 331 to 334 is any amino acid
  Variant (336)..(338): Xaa in position 336 to 338 is any amino acid
  Variant (339)..(339): Xaa in position 339 is any or no amino acid
  Variant (341)..(364): Xaa in position 341 to 364 is any amino acid
  Variant (365)..(368): Xaa in position 365 to 368 is any or no amino acid
  Variant (371)..(382): Xaa in position 371 to 382 is any amino acid
PFXXPXXXXXEXXXXXXXXXXXXXXXXXXXXXXXXXXXXXXXXXXXXXXXXXXSXTXXXXXXXXXXXXXXGDXEVIXPSXTXXXTXNXXXXXGAXXVFVDXXXXTXXXXXXXIEXXXAITXXXXXXTXXIXPVHYAGXXXXXDXIXXXXXXXXXXVXEDAAXXXXXXYXGXXXGXXXXXXXXXXSFHXXKNXXXXXEGGXXXXXXXXXXXRXXXXXXXGXXXXXXXXXXXXXXXXXXXXXXXGXXXXXXXXXAAXXXXQLXXXXXXXXXRXXXXXXYXXXXXXLXXXXXXXXXXXXXXXXXXXXXXXXXXXXXXXXRXXXXXXXXXXXXIXXXXHXXXXHXXXXXXXXXXXXXXXXXXXXXXXXXXXXLPXXXXXXXXXXXXV

SEQ ID NO: 83819 - protein, 36 aa, Artificial sequence
  protein pattern
  Variant (2)..(4): Xaa in position 2 to 4 is any or no amino acid
  Variant (8)..(8): Xaa in position 8 is any amino acid
  Variant (9)..(9): Xaa in position 9 is Pro, Ser or Thr
  Variant (10)..(11): Xaa in position 10 to 11 is any amino acid
  Variant (13)..(13): Xaa in position 13 is Phe, Trp or Tyr
  Variant (14)..(14): Xaa in position 14 is any amino acid
  Variant (15)..(15): Xaa in position 15 is Ala, Gly, Ser or Thr
  Variant (16)..(16): Xaa in position 16 is Ser or Thr
  Variant (17)..(17): Xaa in position 17 is any amino acid
  Variant (18)..(18): Xaa in position 18 is Glu, Asn, Gln or Ser
  Variant (19)..(19): Xaa in position 19 is any amino acid
  Variant (20)..(20): Xaa in position 20 is Phe, Ile or Val
  Variant (21)..(23): Xaa in position 21 to 23 is any amino acid
  Variant (25)..(25): Xaa in position 25 is Ala, Gly or Leu
  Variant (26)..(28): Xaa in position 26 to 28 is any amino acid
  Variant (29)..(29): Xaa in position 29 is Phe, Leu or Met
  Variant (30)..(30): Xaa in position 30 is Ala or Val
  Variant (32)..(35): Xaa in position 32 to 35 is any amino acid
  Variant (36)..(36): Xaa in position 36 is Ser or Thr
DXXXEVIXXXXTXXXXXXXXXXXGXXXXXXDXXXXX

SEQ ID NO: 83820 - protein, 61 aa, Artificial sequence
  protein pattern
  Variant (2)..(4): Xaa in position 2 to 4 is any amino acid
  Variant (6)..(6): Xaa in position 6 is Gly, Asn or Thr
  Variant (7)..(8): Xaa in position 7 to 8 is any amino acid
  Variant (10)..(10): Xaa in position 10 is any amino acid
  Variant (11)..(11): Xaa in position 11 is Ala, Ile or Val
  Variant (13)..(14): Xaa in position 13 to 14 is any or no amino acid
  Variant (16)..(17): Xaa in position 16 to 17 is any or no amino acid
  Variant (19)..(20): Xaa in position 19 to 20 is any amino acid
  Variant (22)..(24): Xaa in position 22 to 24 is any amino acid
  Variant (25)..(25): Xaa in position 25 is Asp or Glu
  Variant (26)..(26): Xaa in position 26 is Ile, Leu or Met
  Variant (27)..(28): Xaa in position 27 to 28 is any amino acid
  Variant (29)..(29): Xaa in position 29 is Ile, Leu or Val
  Variant (30)..(31): Xaa in position 30 to 31 is any amino acid
  Variant (32)..(32): Xaa in position 32 is Ile, Leu or Met
  Variant (33)..(33): Xaa in position 33 is Ala, Gly or Ser
  Variant (34)..(37): Xaa in position 34 to 37 is any amino acid
  Variant (38)..(38): Xaa in position 38 is Ile or Leu
  Variant (39)..(39): Xaa in position 39 is any amino acid
  Variant (40)..(40): Xaa in position 40 is Ile, Leu or Val
  Variant (41)..(41): Xaa in position 41 is Ile or Val
  Variant (44)..(44): Xaa in position 44 is Ala, Cys or Ser
  Variant (46)..(46): Xaa in position 46 is any amino acid
  Variant (47)..(47): Xaa in position 47 is Ala, Gly or Ser
  Variant (48)..(49): Xaa in position 48 to 49 is any amino acid
  Variant (50)..(50): Xaa in position 50 is Ala, Ser or Thr
  Variant (51)..(51): Xaa in position 51 is any amino acid
  Variant (53)..(53): Xaa in position 53 is any amino acid
  Variant (54)..(54): Xaa in position 54 is Asp, Glu, Gly or Asn
  Variant (55)..(56): Xaa in position 55 to 56 is any amino acid
  Variant (57)..(57): Xaa in position 57 is Ala, Ile, Leu or Val
  Variant (59)..(59): Xaa in position 59 is Ala, Gly, Ser or Thr
  Variant (60)..(60): Xaa in position 60 is any amino acid
  Variant (61)..(61): Xaa in position 61 is Asp or Gly
IXXXIXXXTXXIXXVXXHXXGXXXXXXXXXXXXXXXXXXXXEDXAXXXXXXYXXXXXGXXX

SEQ ID NO: 83821 - DNA, 711 bp, Escherichia coli
  CDS (1)..(711): transl_table=11
atggcggagaatcaatccaccgtagaaaatgcaaaagagaaactggatcggtggttgaaagatggcatcaccacgccgggtggaaaactcccttcagaaagagagctgggagaactgctgggcattaaacgtatgacgctgcgccaggcgttgttgaacctcgaggcagaatccaaaatcttccgtaaggatcgtaaggggtggttcgtgacccagccgcgatttaattacagtccggagctgtcggcgagctttcagcgggccgcaattgagcaagggcgagagccttcctgggggtttaccgagaaaaaccgtaccagcgatattcccgagacgctcgcgccactgattgcagtgacgccatcaactgaactctatcgcatcaccggctggggggcgctggaaggacataaagttttctatcacgaaacatatattaatcctgaagttgctccgggctttattgaacaacttgaaaaccactcattttctgcagtctgggaaaagtgctaccaaaaagagacggtagtaaaaaaattgattttcaaacccgtcagaatgccgggcgatatcagcaagtatcttggcggttctgcgggtatgccagcgatcttaattgaaaagcatcgcgccgaccagcaaggcaatattgtccaaatagatattgaatattggcgatttgaggccgtagacctcatcattaatctgtaa

SEQ ID NO: 83822 - protein, 236 aa, Escherichia coli
MAENQSTVENAKEKLDRWLKDGITTPGGKLPSERELGELLGIKRMTLRQALLNLEAESKIFRKDRKGWFVTQPRFNYSPELSASFQRAAIEQGREPSWGFTEKNRTSDIPETLAPLIAVTPSTELYRITGWGALEGHKVFYHETYINPEVAPGFIEQLENHSFSAVWEKCYQKETVVKKLIFKPVRMPGDISKYLGGSAGMPAILIEKHRADQQGNIVQIDIEYWRFEAVDLIINL

SEQ ID NO: 83823 - DNA, 720 bp, Salmonella typhimurium LT2
  CDS (1)..(720): transl_table=11
atgaaatctatcccgggcgatatcccgcagtacctgttgatcaaggcgcagcttcaggcgcgtattcagagcggtgcgttgaaaagcggtgataaactgccgtctgaacgcgaactgtgcgcgatcttcaacaccacgcgcattactattcgcgaaagtctggcacagctggagtccagtgggcttatctggcgcgccgatcgtcgcggttggttcgttacgccggaacgcctgtggctggatccgacccagaacaccaacttccataagctttgccgcgagcaggggcgggagccaaaaaccgcgctactgagcggcgtgttaaccaccgtgcctgtcgaggtcatggagcccctccagctccagccgtttgatcaaatctatctgctgacccgtctgcgttacgccgatggccgcgccgtgtgctactgcgaaaaccattgtttgcccgcccgcgtgcctgagctgctgcagtacgatctcaacggcagcctgaccgaggtatacgagtcgcactacaacctcgtctataccagcatgcatctgtcgttctaccccaccgccatgcctgcgcaggccgcacaggcgctgggcgttatggaagggcgcccggcgctgttgctgcgccgtctgaactacgatcaacacgggcgagtgctggatctggatatcgaatactggcgtcacgacagcctgcgtattgaggtagatacccactag

SEQ ID NO: 83824 - protein, 239 aa, Salmonella typhimurium LT2
MKSIPGDIPQYLLIKAQLQARIQSGALKSGDKLPSERELCAIFNTTRITIRESLAQLESSGLIWRADRRGWFVTPERLWLDPTQNTNFHKLCREQGREPKTALLSGVLTTVPVEVMEPLQLQPFDQIYLLTRLRYADGRAVCYCENHCLPARVPELLQYDLNGSLTEVYESHYNLVYTSMHLSFYPTAMPAQAAQALGVMEGRPALLLRRLNYDQHGRVLDLDIEYWRHDSLRIEVDTH

SEQ ID NO: 83825 - DNA, 714 bp, Pseudomonas putida KT2440
  CDS (1)..(714): transl_table=11
atgcagtcgacgcccccgcgtgcggtaacagccatctgccatgccctgcaggagcagatcgagcatggcctgctggcgccgggcggcaagctgccggccgagcggcggctcagcgaggtgttcgacaccacgcgcattaccctgcgtgaggccttggtgcagctggaggcccaaggcttgatttaccgcgaagagcgccgaggctggttcgttgcgccgcagcgcttgacctacgacctcatcgagcgcagccacttccatgccatggtgcgcgatcaggggcgggtggccagtaccgaactgctgtcggcgaggctgcagccggcttcggcggccatctgtgcacgcttgcagctgccggcgttgtccagtgtggtgcgcgtctgccggttacggcggattgacgggcgggcggtgctgtatgccgagcattacctcaacccccggtactttccaggcattctcgaacacgacctggcgcagtcactgaccgagatttatgggcgggtgtatggcatcgagtacgggcaggtgtgcttcgagatcctgccgacagcgttgccggtggaggcggcaagcgccttgaaagtgtcggcgggcagcccggggttgcacattacccgggtcaacagcgaccagcatgggcacttgatcgactgtgacctcgagtattggcggcacgatgcgatccgcattcgtgcccaggctggatga

SEQ ID NO: 83826 - protein, 237 aa, Pseudomonas putida KT2440
MQSTPPRAVTAICHALQEQIEHGLLAPGGKLPAERRLSEVFDTTRITLREALVQLEAQGLIYREERRGWFVAPQRLTYDLIERSHFHAMVRDQGRVASTELLSARLQPASAAICARLQLPALSSVVRVCRLRRIDGRAVLYAEHYLNPRYFPGILEHDLAQSLTEIYGRVYGIEYGQVCFEILPTALPVEAASALKVSAGSPGLHITRVNSDQHGHLIDCDLEYWRHDAIRIRAQAG

SEQ ID NO: 83827 - DNA, 717 bp, Pseudomonas aeruginosa UCBPP-PA14
  CDS (1)..(717): transl_table=11
atgcgcgacgagccgtcccgacccctgacggtgatctaccagtccctgcgcgagcagatcgagcgcggcctgctcgcgcgcggcagcaagctgcccagcgaacggcagttgagcgagctgttctcgaccacccgcatcaccctgcgcgaggcgctcggccagttggaggaccagggcctgatctaccgcgaggaacgccgcggctggttcgtctcgccgcagcggctgctgtacaacccgctggtgcgcagccacttccacgcgatggtcgccgaccagggccgggtgccggagaccgaggtgctcggcgcggcgatgatcccggccagcgtcgacatctgccagcgcctggagctgccggcgctgtcgcgggtgttccagatccgccgggcgcggcgggtcgacgggcggctggtgctgtacgtcgagcactacctgaatcccgcctactttcccggcatcgagcgcttcgacctgactcgctcgctgaccgatctctacgccaaccactacggcatccgctacggccgggtgcgcttcgagatggtcccgaccatcctcccggcggaggccgccgggccgctgcgggtctcggtgggcagcccggcgctacagatcgtgcgggtcaaccgcgaccaggcgggccgcctgatcgactgcgacctggagtactggcgccacgacgcgctacaggtcaacgtcgaggtgcccgagtag

SEQ ID NO: 83828 - protein, 238 aa, Pseudomonas aeruginosa UCBPP-PA14
MRDEPSRPLTVIYQSLREQIERGLLARGSKLPSERQLSELFSTTRITLREALGQLEDQGLIYREERRGWFVSPQRLLYNPLVRSHFHAMVADQGRVPETEVLGAAMIPASVDICQRLELPALSRVFQIRRARRVDGRLVLYVEHYLNPAYFPGIERFDLTRSLTDLYANHYGIRYGRVRFEMVPTILPAEAAGPLRVSVGSPALQIVRVNRDQAGRLIDCDLEYWRHDALQVNVEVPE

SEQ ID NO: 83829 - DNA, 22 bp, Artificial sequence
  primer
atggcggagaatcaatccaccg

SEQ ID NO: 83830 - DNA, 26 bp, Artificial sequence
  primer
ttacagattaatgatgaggtctacgg

SEQ ID NO: 83831 - protein, 229 aa, Artificial sequence
  consensus sequence
  Variant (2)..(14): Xaa in position 2 to 14 is any amino acid
  Variant (15)..(17): Xaa in position 15 to 17 is any or no amino acid
  Variant (19)..(24): Xaa in position 19 to 24 is any amino acid
  Variant (26)..(29): Xaa in position 26 to 29 is any amino acid
  Variant (31)..(31): Xaa in position 31 is any amino acid
  Variant (35)..(35): Xaa in position 35 is any amino acid
  Variant (38)..(38): Xaa in position 38 is any amino acid
  Variant (40)..(46): Xaa in position 40 to 46 is any amino acid
  Variant (48)..(48): Xaa in position 48 is any amino acid
  Variant (50)..(50): Xaa in position 50 is any amino acid
  Variant (52)..(53): Xaa in position 52 to 53 is any amino acid
  Variant (55)..(56): Xaa in position 55 to 56 is any amino acid
  Variant (59)..(62): Xaa in position 59 to 62 is any amino acid
  Variant (64)..(64): Xaa in position 64 is any amino acid
  Variant (66)..(67): Xaa in position 66 to 67 is any amino acid
  Variant (69)..(69): Xaa in position 69 is any amino acid
  Variant (74)..(76): Xaa in position 74 to 76 is any amino acid
  Variant (78)..(87): Xaa in position 78 to 87 is any amino acid
  Variant (89)..(94): Xaa in position 89 to 94 is any amino acid
  Variant (98)..(137): Xaa in position 98 to 137 is any amino acid
  Variant (138)..(138): Xaa in position 138 is any or no amino acid
  Variant (140)..(141): Xaa in position 140 to 141 is any amino acid
  Variant (143)..(143): Xaa in position 143 is any amino acid
  Variant (145)..(145): Xaa in position 145 is any amino acid
  Variant (147)..(150): Xaa in position 147 to 150 is any amino acid
  Variant (152)..(154): Xaa in position 152 to 154 is any amino acid
  Variant (156)..(164): Xaa in position 156 to 164 is any amino acid
  Variant (166)..(173): Xaa in position 166 to 173 is any amino acid
  Variant (175)..(186): Xaa in position 175 to 186 is any amino acid
  Variant (188)..(190): Xaa in position 188 to 190 is any amino acid
  Variant (192)..(197): Xaa in position 192 to 197 is any amino acid
  Variant (199)..(202): Xaa in position 199 to 202 is any amino acid
  Variant (204)..(204): Xaa in position 204 is any amino acid
  Variant (206)..(214): Xaa in position 206 to 214 is any amino acid
  Variant (217)..(217): Xaa in position 217 is any amino acid
  Variant (219)..(223): Xaa in position 219 to 223 is any amino acid
  Variant (225)..(225): Xaa in position 225 is any amino acid
MXXXXXXXXXXXXXXXXLXXXXXXGXXXXGXKLPXERXLXXXXXXXRXTXRXXLXXLEXXXXIXRXXRXGWFVXXXRXXXXXXXXXXFXXXXXXQGRXXXXXXXXXXXXXXXXXXXXXXXXXXXXXXXXXXXXXXXXXGXXVXYXEXXXXPXXXPXXXXXXXXXSXXXXXXXXYXXXXXXXXXXXXPXXXPXXXXXXLXXXXGXPXXXXXXXXXDQXGXXXXXDXEYWR

SEQ ID NO: 83832 - protein, 56 aa, Artificial sequence
  protein pattern
  Variant (3)..(3): Xaa in position 3 is Ala or Ser
  Variant (6)..(6): Xaa in position 6 is Glu, Gln or Arg
  Variant (8)..(8): Xaa in position 8 is Cys, Gly or Ser
  Variant (9)..(9): Xaa in position 9 is Ala or Glu
  Variant (10)..(10): Xaa in position 10 is Ile, Leu or Val
  Variant (11)..(11): Xaa in position 11 is Phe or Leu
  Variant (12)..(12): Xaa in position 12 is Asp, Gly, Asn or Ser
  Variant (13)..(14): Xaa in position 13 to 14 is any amino acid
  Variant (16)..(16): Xaa in position 16 is Ile or Met
  Variant (18)..(18): Xaa in position 18 is Ile or Leu
  Variant (20)..(20): Xaa in position 20 is Glu or Gln
  Variant (21)..(21): Xaa in position 21 is Ala or Ser
  Variant (23)..(23): Xaa in position 23 is Ala, Gly, Leu or Val
  Variant (24)..(24): Xaa in position 24 is Asn or Gln
  Variant (27)..(27): Xaa in position 27 is Ala, Asp or Ser
  Variant (28)..(28): Xaa in position 28 is Glu, Gln or Ser
  Variant (29)..(29): Xaa in position 29 is Gly or Ser
  Variant (30)..(30): Xaa in position 30 is any amino acid
  Variant (32)..(32): Xaa in position 32 is Phe, Trp or Tyr
  Variant (34)..(34): Xaa in position 34 is any amino acid
  Variant (35)..(35): Xaa in position 35 is Asp or Glu
  Variant (37)..(37): Xaa in position 37 is Lys or Arg
  Variant (42)..(42): Xaa in position 42 is Ala, Ser or Thr
  Variant (43)..(43): Xaa in position 43 is Pro or Gln
  Variant (44)..(44): Xaa in position 44 is Glu, Pro or Gln
  Variant (46)..(46): Xaa in position 46 is Phe or Leu
  Variant (47)..(48): Xaa in position 47 to 48 is any amino acid
  Variant (49)..(49): Xaa in position 49 is Asp, Asn or Ser
  Variant (50)..(50): Xaa in position 50 is Leu or Pro
  Variant (51)..(52): Xaa in position 51 to 52 is any amino acid
  Variant (53)..(53): Xaa in position 53 is Asn, Arg or Ser
  Variant (54)..(54): Xaa in position 54 is Ala, Ser or Thr
  Variant (55)..(55): Xaa in position 55 is any amino acid
LPXERXLXXXXXXXRXTXRXXLXXLEXXXXIXRXXRXGWFVXXXRXXXXXXXXXXF

SEQ ID NO: 83833 - protein, 57 aa, Artificial sequence
  protein pattern
  Variant (2)..(10): Xaa in position 2 to 10 is any amino acid
  Variant (11)..(11): Xaa in position 11 is any or no amino acid
  Variant (13)..(18): Xaa in position 13 to 18 is any amino acid
  Variant (19)..(22): Xaa in position 19 to 22 is any or no amino acid
  Variant (24)..(24): Xaa in position 24 is any amino acid
  Variant (25)..(25): Xaa in position 25 is Gly or Val
  Variant (26)..(27): Xaa in position 26 to 27 is any amino acid
  Variant (29)..(29): Xaa in position 29 is any amino acid
  Variant (31)..(31): Xaa in position 31 is Ala or Gly
  Variant (32)..(32): Xaa in position 32 is Ile or Leu
  Variant (33)..(33): Xaa in position 33 is any amino acid
  Variant (34)..(34): Xaa in position 34 is Ile or Leu
  Variant (35)..(35): Xaa in position 35 is any amino acid
  Variant (36)..(36): Xaa in position 36 is Lys or Arg
  Variant (37)..(37): Xaa in position 37 is any amino acid
  Variant (38)..(38): Xaa in position 38 is Asn or Arg
  Variant (39)..(39): Xaa in position 39 is any amino acid
  Variant (42)..(42): Xaa in position 42 is any amino acid
  Variant (44)..(44): Xaa in position 44 is any amino acid
  Variant (45)..(46): Xaa in position 45 to 46 is Ile, Leu or Val
  Variant (47)..(47): Xaa in position 47 is Asp or Gln
  Variant (48)..(48): Xaa in position 48 is any amino acid
  Variant (50)..(50): Xaa in position 50 is Ile or Leu
  Variant (55)..(55): Xaa in position 55 is Phe or His
  Variant (56)..(56): Xaa in position 56 is Asp or Glu
  Variant (57)..(57): Xaa in position 57 is Ala or Ser
VXXXXXXXXXXPXXXXXXXXXXLXXXXGXPXXXXXXXXXDQXGXXXXXDXEYWRXXX

SEQ ID NO: 83834 - protein, 18 aa, Artificial sequence
  protein pattern
  Variant (2)..(2): Xaa in position 2 is His or Arg
  Variant (3)..(3): Xaa in position 3 is any amino acid
  Variant (5)..(5): Xaa in position 5 is any amino acid
  Variant (7)..(7): Xaa in position 7 is any amino acid
  Variant (9)..(11): Xaa in position 9 to 11 is any or no amino acid
  Variant (13)..(15): Xaa in position 13 to 15 is any amino acid
  Variant (16)..(16): Xaa in position 16 is any or no amino acid
  Variant (18)..(18): Xaa in position 18 is Ala or Gly
GXXVXYXEXXXNXXXXPX

SEQ ID NO: 83835 - DNA, 1350 bp, Escherichia coli
  CDS (1)..(1350): transl_table=11
atgtctgaaattgttgtctccaaatttggcggtaccagcgtagctgattttgacgccatgaaccgcagcgctgatattgtgctttctgatgccaacgtgcgtttagttgtcctctcggcttctgctggtatcactaatctgctggtcgctttagctgaaggactggaacctggcgagcgattcgaaaaactcgacgctatccgcaacatccagtttgccattctggaacgtctgcgttacccgaacgttatccgtgaagagattgaacgtctgctggagaacattactgttctggcagaagcggcggcgctggcaacgtctccggcgctgacagatgagctggtcagccacggcgagctgatgtcgaccctgctgtttgttgagatcctgcgcgaacgcgatgttcaggcacagtggtttgatgtacgtaaagtgatgcgtaccaacgaccgatttggtcgtgcagagccagatatagccgcgctggcggaactggccgcgctgcagctgctcccacgtctcaatgaaggcttagtgatcacccagggatttatcggtagcgaaaataaaggtcgtacaacgacgcttggccgtggaggcagcgattatacggcagccttgctggcggaggctttacacgcatctcgtgttgatatctggaccgacgtcccgggcatctacaccaccgatccacgcgtagtttccgcagcaaaacgcattgatgaaatcgcgtttgccgaagcggcagagatggcaacttttggtgcaaaagtactgcatccggcaacgttgctacccgcagtacgcagcgatatcccggtctttgtcggctccagcaaagacccacgcgcaggtggtacgctggtgtgcaataaaactgaaaatccgccgctgttccgcgctctggcgcttcgtcgcaatcagactctgctcactttgcacagcctgaatatgctgcattctcgcggtttcctcgcggaagttttcggcatcctcgcgcggcataatatttcggtagacttaatcaccacgtcagaagtgagcgtggcattaacccttgataccaccggttcaacctccactggcgatacgttgctgacgcaatctctgctgatggagctttccgcactgtgtcgggtggaggtggaagaaggtctggcgctggtcgcgttgattggcaatgacctgtcaaaagcctgcggcgttggcaaagaggtattcggcgtactggaaccgttcaacattcgcatgatttgttatggcgcatccagccataacctgtgcttcctggtgcccggcgaagatgccgagcaggtggtgcaaaaactgcatagtaatttgtttgagtaa

SEQ ID NO: 83836 - protein, 449 aa, Escherichia coli
MSEIVVSKFGGTSVADFDAMNRSADIVLSDANVRLVVLSASAGITNLLVALAEGLEPGERFEKLDAIRNIQFAILERLRYPNVIREEIERLLENITVLAEAAALATSPALTDELVSHGELMSTLLFVEILRERDVQAQWFDVRKVMRTNDRFGRAEPDIAALAELAALQLLPRLNEGLVITQGFIGSENKGRTTTLGRGGSDYTAALLAEALHASRVDIWTDVPGIYTTDPRVVSAAKRIDEIAFAEAAEMATFGAKVLHPATLLPAVRSDIPVFVGSSKDPRAGGTLVCNKTENPPLFRALALRRNQTLLTLHSLNMLHSRGFLAEVFGILARHNISVDLITTSEVSVALTLDTTGSTSTGDTLLTQSLLMELSALCRVEVEEGLALVALIGNDLSKACGVGKEVFGVLEPFNIRMICYGASSHNLCFLVPGEDAEQVVQKLHSNLFE

SEQ ID NO: 83837 - DNA, 1713 bp, Oryza sativa (japonica cultivar-group)
  CDS (1)..(1713)
atggcgatcgctctccgattagcggccgcgccgctccgcctccgcctcgtctcgccggcccctccggcgatcggcggcgcgggagatggaggacgacgaggaggaggaggagcagctcgtatcggtgtcctgggcagggctcgctgccgccgccgccgcggcggaggcgggagactggaggtggcggcggcggccgccgatgactccgctcgctgtcgggccaagggagtgggcgccgccgccgccgcggcggaaaccctaggtgggatcggggtgggaggtggggaccagctgagcgtggtgatgaagttcggggggtcgtcggtgtcgtcggcggcgaggatgcgggaggtggcgggcctcatcctcgccttccccgaggagcgccccgtcgtcgtcctctccgccatggggaagaccaccaatctcctcctcctcgctggtgagaaggcagtgggatgcggcgtgatccgtgtttcggaaattgaagagtggaatttgatcaaagatctacacattaaaactgtggaggaacttgcactgccaagatctgtaatacacactatgctggatgaactggagcagctcttgaaaggtattgcaatgatgaaagagctgacacttcggaccactgactaccttgtttcatttggggagtgcatgtctacacggatttttgctgcttatttgaacaaaatcggagtaaaagcacggcagtacgacgcatttgatattggtttcataacaacagacgatttcggaaacgcggacatcttggaggcaacttatcctgctgttgcgaagagattacatggagactggattcgtgatccagcgatacctattgttactgggttccttgggaagggctggaaatcaggcgctgtaaccactttaggccgaggtggcagtgacttgactgctacaaccattggtaaagccctggggttgagagaaattcaggtatggaaagatgttgatggtgtactgacctgtgatccaaatatctacccgaatgcaaccactgtgccatacttaacatttgaagaggcagcagaacttgcttattttggtgcccaggtattacatccacaatctatgagacctgctagagaaggtgatataccagtcagggttaagaattcgtacaaccctaaagctccaggcaccctgatcactaaacaaagagagatggataaggttgtgctaactagcatagtgctcaagtcaaatgtcactatgttggatatagtaagcactcggatgcttggtcaatttggttttctggcaaaggtcttctctatattcgaagatctagggatatctgtagattgtgtggctactagtgaagttagtatttctgtgtcgcttgatccatcaaagatctggagcagggaacttattcaacaggaacttgaccatgtagttgaagagcttgagaaaattgcagttgtccatctacttcagcagagggcaataatatcactcattggaaacgtacggcgatcatctcttatactggaaaaggcctttcaagtgttgaggaaaagcggggtgaatgtccagatgatctcgcaaggtgcatccaaggttaacatgtctctgattgttcatgatagcgaggcaaagcagtgcataaaggccctccaccaggcgttcttcgaggacgatgtcctgacagaagtcgaggaagaagcccttcacatgagctga

SEQ ID NO: 83838 - protein, 570 aa, Oryza sativa (japonica cultivar-group)
MAIALRLAAAPLRLRLVSPAPPAIGGAGDGGRRGGGGAARIGVLGRARCRRRRGGGGRLEVAAAAADDSARCRAKGVGAAAAAAETLGGIGVGGGDQLSVVMKFGGSSVSSAARMREVAGLILAFPEERPVVVLSAMGKTTNLLLLAGEKAVGCGVIRVSEIEEWNLIKDLHIKTVEELALPRSVIHTMLDELEQLLKGIAMMKELTLRTTDYLVSFGECMSTRIFAAYLNKIGVKARQYDAFDIGFITTDDFGNADILEATYPAVAKRLHGDWIRDPAIPIVTGFLGKGWKSGAVTTLGRGGSDLTATTIGKALGLREIQVWKDVDGVLTCDPNIYPNATTVPYLTFEEAAELAYFGAQVLHPQSMRPAREGDIPVRVKNSYNPKAPGTLITKQREMDKVVLTSIVLKSNVTMLDIVSTRMLGQFGFLAKVFSIFEDLGISVDCVATSEVSISVSLDPSKIWSRELIQQELDHVVEELEKIAVVHLLQQRAIISLIGNVRRSSLILEKAFQVLRKSGVNVQMISQGASKVNMSLIVHDSEAKQCIKALHQAFFEDDVLTEVEEEALHMS

SEQ ID NO: 83839 - DNA, 1728 bp, Oryza sativa (japonica cultivar-group)
  CDS (1)..(1728)
atggcggcggcggcggctctccggtgcaacccgcggccctctgcggcggttgctctccgcggtgccgccgcagccccgcaggtcgggaatgaggctgccttcgagctgctggtcggtgccaccgagccttgcctgcggggccggaggaggggtgcggggattcggtgccagcgaagtgcggctgccagcgcggtcgtcgtcgagaagaagagtcgcgcggtggagccggcgcgggagggggccaatgccggtcacacggagtcggagctcaccgtggtgatgaagttcggcgggtcgtcagtggcgtcggccgagcggatgcgggaggtggccgatctcatcctcagcttccccgaggagcggccggtgatcgtactctccgccatggggaagaccaccaacaagcttctgatggctggggagaaagcggtgggctgtggtgcaacaaatgtgtcggagcttgatgagctcacctttattaaggaattgcattttgggaccattgatcaacttggattggataggtcaattgtttccggcttgtcggatgagcttgagcaacttcttaagggaattgctatgatgaaagagcttactcttaggacaagagactatcttgtttccttcggtgaatgcatgtcaacaaggatatttgcggcacttttgaataaacttggggtgaaagcacgtcagtatgatgcatttgaaataggctttataaccactgatgatttcacaaacgctgatattctggaagcaacttatcctgccattgcaaagaggctacatggggactgggttactggtcctgctattccaatagtcactggttttctcggaaagggatggaaaactggtgcaatcaccactttaggcaggggtggtagtgacctgacagctactaccattggcaaagccttgggattaagagaaatccaggtttggaaagatgttgatggtgttttaacttgtgatcctaatattcatccaaatgcgaaacctgtgccatacttgacatttgatgaggcagctgaacttgcctattttggtgcacaggttttgcatccacaatcgatgcgaccagctagagaaggtgatatacctgtcagggttaaaaactcttataaccgccgagcccctggtacactcattactaaagctagagatatgagtaagactgttttgactagtattgtacttaaatcaaatattacaatgcttgatatagtgagcacacggatgcttggacaatatggttttctagctaaggtcttttcaatttttgaagatttgggcatctctgttgattgtgtagctacaagtgaagtcagcatatctttgaccctggatccatcaaaactctggagtcgtgaattgatcaagcaggcaaatgaacttgatcatgtcatcgaagaacttgaaaagatagcagttgttcacctactgcagcatagatcgataatttcgttaattggaaatgtgcagaggtcatctttgattcttgaaaaggctttcaacgttttacgtacaaatggagttaatgttcagatgatctcacaaggggcatccaaggtgaacatttccttggtggtccatgacagtgaggcaaagcagtgcgttcaagccctccactcagcattctttgagagtggtttcttgccagaagtcaatgatattctgcaggacgactctgtggcacattccaatggcacagtttacaggcattag

SEQ ID NO: 83840 - protein, 575 aa, Oryza sativa (japonica cultivar-group)
MAAAAALRCNPRPSAAVALRGAAAAPQVGNEAAFELLVGATEPCLRGRRRGAGIRCQRSAAASAVVVEKKSRAVEPAREGANAGHTESELTVVMKFGGSSVASAERMREVADLILSFPEERPVIVLSAMGKTTNKLLMAGEKAVGCGATNVSELDELTFIKELHFGTIDQLGLDRSIVSGLSDELEQLLKGIAMMKELTLRTRDYLVSFGECMSTRIFAALLNKLGVKARQYDAFEIGFITTDDFTNADILEATYPAIAKRLHGDWVTGPAIPIVTGFLGKGWKTGAITTLGRGGSDLTATTIGKALGLREIQVWKDVDGVLTCDPNIHPNAKPVPYLTFDEAAELAYFGAQVLHPQSMRPAREGDIPVRVKNSYNRRAPGTLITKARDMSKTVLTSIVLKSNITMLDIVSTRMLGQYGFLAKVFSIFEDLGISVDCVATSEVSISLTLDPSKLWSRELIKQANELDHVIEELEKIAVVHLLQHRSIISLIGNVQRSSLILEKAFNVLRTNGVNVQMISQGASKVNISLVVHDSEAKQCVQALHSAFFESGFLPEVNDILQDDSVAHSNGTVYRH

SEQ ID NO: 83841 - DNA, 1389 bp, Archaeoglobus fulgidus DSM 4304
  CDS (1)..(1389): transl_table=11
atgagaatcgtaatgaagttcggaggagtgagcgttaaagatggggaaaacatttaccattgcgctaatctcgttaaaaagttctcggagggaaatgaagttgtagtcgttgtctcagcgatgcagggtgtgactgatgcacttttaaaggccgcgcaccgctgctgctctgaaccatctgccggattcatcaagatgttcatcgcggatatgatgaagagacactacgaggcgatcgagtatgcggtcaggaacgacgaaatcaaggcaaaggtgattgcagctgtagagcgacttcttgatgagcttgaaaaggttctcctcggaatcagctaccttggcgagcttacgaggagaagtgaggactatatagtctccttcggcgagaggctctcagctccaatattttcagcagcccttctttccctcggcgttgattctgtagctctcactggaggggatgcaggaataatcacggacaggaactttgggagggcaaagccgcttcccggggtttacacaacaatcagaaacaggcttgagcctttgctgacgataaagaaaactattcccgtcgttacgggcttcataggcgcaacggatgacggcagcataacaaccctcggcagaggagggagcgactacaccgcaacaatactcgccgcagcccttgacgcggacgaggtgtggctgtggaaggaagttgacggaataatgacctgcgaccccaagtacgtgcccaatgcgagggtgattccggagatatcctatcaggaggcaatggagctgtcccacttcggagcaaagatacttcacccgagagccttggagccggtgatgaggaagaacattccagtaagaatcaagaacaccttcaaccccgatgctccgggaaccgtgattggcccgacaacgaaggattcaagcgagatagtgaaggctttaagcctcattccgcaggcggggatagtcaacgtcagcggtgcgggcttcgattttgcggagataatgtcggaggtttttggcagacttgctgaggagagggtaaacgtcattatggtagctcagagctcctcagagctgaatctgtcgatagtggtcgatatccgggacttggagaaggcctacaacgccctgaaaagcttggaaaacggcgtgataaaggtcgaaaagattccctacatagcggtcgtgagcgcagttggttcgggaatggctggaacgccgggcgttgcaggaaagattttctcagcgcttggcaagaacggaataaacgtaataatgatcagccagagctgctctgagtacaacgtttcgttcgtcgttgacggtagcgatggcgttaatgctgtgaaggtagtgcacgatgagttcgggctcggcaattaa

SEQ ID NO: 83842 - protein, 462 aa, Archaeoglobus fulgidus DSM 4304
MRIVMKFGGVSVKDGENIYHCANLVKKFSEGNEVVVVVSAMQGVTDALLKAAHRCCSEPSAGFIKMFIADMMKRHYEAIEYAVRNDEIKAKVIAAVERLLDELEKVLLGISYLGELTRRSEDYIVSFGERLSAPIFSAALLSLGVDSVALTGGDAGIITDRNFGRAKPLPGVYTTIRNRLEPLLTIKKTIPVVTGFIGATDDGSITTLGRGGSDYTATILAAALDADEVWLWKEVDGIMTCDPKYVPNARVIPEISYQEAMELSHFGAKILHPRALEPVMRKNIPVRIKNTFNPDAPGTVIGPTTKDSSEIVKALSLIPQAGIVNVSGAGFDFAEIMSEVFGRLAEERVNVIMVAQSSSELNLSIVVDIRDLEKAYNALKSLENGVIKVEKIPYIAVVSAVGSGMAGTPGVAGKIFSALGKNGINVIMISQSCSEYNVSFVVDGSDGVNAVKVVHDEFGLGN

SEQ ID NO: 83843 - DNA, 1365 bp, Aeropyrum pernix K1
  CDS (1)..(1365): transl_table=11
gtgggttgtgcgccaaacgatctagtcgtcgtcaagttcgggggtagcgtgctcaacggctccccggggtttctggcggcgggccgcctcgtcctgggcctcctggagtccggcctcgagcctgtggttgtcgtctccgctgtcaagggtgttaccgacgccctcctctcctccttcgagaggcgggatcccggcgtcgggggtgcggtggggaagacctacctctcgatagccagggagctgggcctgccccccgagtccgtgagggacgtcagccttgcttcggctgaggtctcgaagctcctctgggcggccgaggtcctgggccagtggacgccgagggtcagggatctcgtggtctcctatggtgagaggcttagcgcggccctcatggcggggctgctgaggcgcctgggcgtcgaggctaggtggctcggcggcggcgaggcgggtatagtgacggatggcgagttcggggatgcgacgcccctctacggctatacggagggcgttatcagggagaggcttgagcccatgctggaggagggcgttgtccccgtggtcgccggcttcaccggcgccactagggagggggataccaccctgctgggcaggggcggtagcgacctcaccgcgaccctcctcgcctcagccctcggggccgggagggttgtgctctacaccgacgtccccgggatactcagcggcgaccctcgtgtcgtgggggagccccgcagggttggctatatgagctatgaggaggcctgggaggtggccaggctgggcctcaggaagttccaccccaggactttcgagcccctcatagccggggggctgggggtggaggtggtggtctccgacctcaggggcaggagcaccaggataggcccgggtaggggcgggcccccgctgaaggtggtctccctctcccgtggagtggccaggctcgttgtcagggggcctagcatggccggcaagagggggttcctctcgaggctcgcaggcctcctagcgggtaggggcgtgaacatactggccataaggcagcctccctccgagactgctatagagcttgtggtggatgagcgggacctccccgcggctgtggaggagcttggggcccgctcgggcgcggctggtgtcaggctggaggtggagagggggttcgatgtagtgagcatcgtgggctggggcgccgtcgaggcccttcccgaggccctctcggcggcggagaagacggggggcaggctgctcagcacgggggagctcagccctagcatctccatactggcgcgggggaggacctcgccggagctggccaggcttctccacaggagggtggttgagagttgggtgacagggtga

SEQ ID NO: 83844 - protein, 454 aa, Aeropyrum pernix K1
MGCAPNDLVVVKFGGSVLNGSPGFLAAGRLVLGLLESGLEPVVVVSAVKGVTDALLSSFERRDPGVGGAVGKTYLSIARELGLPPESVRDVSLASAEVSKLLWAAEVLGQWTPRVRDLVVSYGERLSAALMAGLLRRLGVEARWLGGGEAGIVTDGEFGDATPLYGYTEGVIRERLEPMLEEGVVPVVAGFTGATREGDTTLLGRGGSDLTATLLASALGAGRVVLYTDVPGILSGDPRVVGEPRRVGYMSYEEAWEVARLGLRKFHPRTFEPLIAGGLGVEVVVSDLRGRSTRIGPGRGGPPLKVVSLSRGVARLVVRGPSMAGKRGFLSRLAGLLAGRGVNILAIRQPPSETAIELVVDERDLPAAVEELGARSGAAGVRLEVERGFDVVSIVGWGAVEALPEALSAAEKTGGRLLSTGELSPSISILARGRTSPELARLLHRRVVESWVTG

SEQ ID NO: 83845 - DNA, 2580 bp, Arabidopsis thaliana
  CDS (1)..(2580)
atggcgactctgaagccgtcatttactgtttctccgccgaatagtaatccgattagatttggaagttttccgccgcaatgctttctccgtgttccgaaaccgcggcgacttatattgcctaggtttcggaagacgactggtggtggcggcggcttgattcgatgtgagcttccagattttcatctatcagcaacagcaactactgtatcaggtgtatcgacggtgaatttagtggatcaagttcagattcctaaaggtgaaatgtggagtgttcacaagtttggtgggacttgtgtgggaaactctcagaggatcagaaatgtagcagaggttataatcaatgataattccgaaagaaaacttgtggttgtctcggcgatgtcgaaggttacggacatgatgtatgacttaatccgcaaggcacaatcacgagatgattcttatttatccgcgttggaagctgtcttggaaaagcatcgtttaacagctcgtgaccttctcgatggagatgatctcgctagtttcttgtcacatttgcataatgatattagtaatcttaaagcaatgcttcgtgctatatacatagctggccatgcatcagagtcgttttcagattttgttgcaggacatggggagctttggtctgctcagatgctatcatatgttgtcagaaagactgggcttgagtgcaagtggatggatactagagacgtgctcattgttaatcccaccagctctaatcaggttgatcctgattttggtgaatctgagaagagactcgataaatggttctccttaaatccgtcgaaaattattattgcgactgggtttattgctagcactccgcaaaatattccaacaactttgaaaagagatgggagtgatttctcagcagctattatgggtgctttattgagagctcgtcaagtaaccatttggacagatgttgatggtgtatacagtgcggatcctcgtaaagttaatgaggcagtgatactccagacactttcttatcaagaggcctgggaaatgtcttattttggagcaaatgtgttacatcctcgcaccatcattcctgtgatgcgatataatattccgattgtgattagaaatattttcaatctctctgcaccgggaacaataatctgtcaacctcctgaagatgattatgaccttaaactgacaactcctgtcaaagggtttgcaactattgacaatttggccctcataaatgttgaaggtactggaatggctggtgtacccggtactgcaagtgacatttttggctgtgtaaaagatgttggagctaatgtgattatgatatcacaggctagcagtgagcattctgtgtgctttgctgtgcctgagaaggaagtaaacgcagtctctgaggcattgcggtcgagatttagtgaagctttacaagcgggacgtctttctcagattgaggtgataccaaactgtagcatcttagctgcagtcggccagaaaatggctagtacacctggagttagttgtacacttttcagtgctttggcgaaggctaatattaatgtccgagctatatctcaaggttgttctgagtacaatgttactgtcgttattaaacgtgaagatagcgttaaggcgttaagagctgtacactcgaggtttttcttgtcaagaacaacattagcaatgggaatcgtaggaccgggcttgattggtgcaacattacttgaccagctgcgggatcaggctgctgttctcaaacaagaatttaacattgatctgcgtgttttgggaatcactggttcaaagaagatgttattgagtgacattggtattgatttgtcgagatggagagaacttctaaacgagaagggaacagaggcggatttggataaattcactcaacaagtgcatggaaatcattttatccccaactctgtagtggttgattgtacagcagactctgctattgcaagccgttactatgattggttacgaaagggaattcatgtcattaccccaaataaaaaggctaactcaggtcccctcgatcagtacttgaaactgagagatcttcaaaggaaatcctacactcattacttctacgaagccactgttggagctggtcttccaattatcagcactttacgtggtctccttgagacaggagataagatactacgcatagagggcatttgcagtggaactttgagttatctattcaacaattttgttggagatcgaagtttcagcgaggttgtcactgaagcaaagaacgcaggtttcactgagcctgatccaagagatgatttatctggaactgatgttgcaaggaaggtgattatcctcgctcgagaatctggactgaaattggacctcgctgatctccccattagaagtctcgtaccagaacctctaaaaggatgcacttctgttgaagaattcatggagaaactcccacagtacgatggagacctagcaaaagaaaggctagatgctgaaaactctggggaagtaagattattcacaacaaacgttttccctttcgatcaatgtgatcatattttaaccatatatatatgtatgtaa

SEQ ID NO: 83846 - protein, 859 aa, Arabidopsis thaliana
MATLKPSFTVSPPNSNPIRFGSFPPQCFLRVPKPRRLILPRFRKTTGGGGGLIRCELPDFHLSATATTVSGVSTVNLVDQVQIPKGEMWSVHKFGGTCVGNSQRIRNVAEVIINDNSERKLVVVSAMSKVTDMMYDLIRKAQSRDDSYLSALEAVLEKHRLTARDLLDGDDLASFLSHLHNDISNLKAMLRAIYIAGHASESFSDFVAGHGELWSAQMLSYVVRKTGLECKWMDTRDVLIVNPTSSNQVDPDFGESEKRLDKWFSLNPSKIIIATGFIASTPQNIPTTLKRDGSDFSAAIMGALLRARQVTIWTDVDGVYSADPRKVNEAVILQTLSYQEAWEMSYFGANVLHPRTIIPVMRYNIPIVIRNIFNLSAPGTIICQPPEDDYDLKLTTPVKGFATIDNLALINVEGTGMAGVPGTASDIFGCVKDVGANVIMISQASSEHSVCFAVPEKEVNAVSEALRSRFSEALQAGRLSQIEVIPNCSILAAVGQKMASTPGVSCTLFSALAKANINVRAISQGCSEYNVTVVIKREDSVKALRAVHSRFFLSRTTLAMGIVGPGLIGATLLDQLRDQAAVLKQEFNIDLRVLGITGSKKMLLSDIGIDLSRWRELLNEKGTEADLDKFTQQVHGNHFIPNSVVVDCTADSAIASRYYDWLRKGIHVITPNKKANSGPLDQYLKLRDLQRKSYTHYFYEATVGAGLPIISTLRGLLETGDKILRIEGICSGTLSYLFNNFVGDRSFSEVVTEAKNAGFTEPDPRDDLSGTDVARKVIILARESGLKLDLADLPIRSLVPEPLKGCTSVEEFMEKLPQYDGDLAKERLDAENSGEVRLFTTNVFPFDQCDHILTIYICM

SEQ ID NO: 83847 - DNA, 1353 bp, Pasteurella multocida subsp. multocida str. Pm70
  CDS (1)..(1353): transl_table=11
atgtctcatctttcaattgccaaatttggaggcaccagtgtcgctaattatgctgccatgtctgcctcggcaaaaattgtcgtgaatgatcccaatacacgggttgtcgtactttccgcttcggcaggtgtcactaacttacttgttgcgttggcaaatggctgtgacaacgaagaacgcactaaattaatcaatgaagttcgccaaattcaagaaaatatcctttcggaattaaaagatgatagcttagtacgcaataaagtggaaaagttactggcgaatatagaatcgcttgctgaagcagcaagcctagcaacctccccagctctcacagatgagctgattagtcacggggaaatgatgtcttctctgatctttgttgaaatcttacgcgaattcaacacgccatccacttggattgatgtgcgtaatattatcgcgactgatagccattttggtaaagcagtaccaaacgatcacaaaacgcaagaaaacagtacacatattttaaaacccttaattgatcgcggtgaattgatcattacacaaggttttattggtcgtgatgaacaaggcaaaaccaccacattaggtcgaggtgggagtgattattctgcggcattattagccgaagtactcaatgcggaagatgtcttgatctggactgatgtcgcgggcatttataccactgatcctcgtatcgtgccgaatgcgaaacgtattgataccatgagtttttctgaagcggctgaaatggcaacctttggtgctaaagtcttacatcccgccacattattgcctgcagtgcgcagtaatattcctgtttatgttggctccagtaaagcgccagaagcagggggcacttgggtaacacgcgatcctcaacaccgaccgatattccgagccattgctctccgtcgggatcaaacgctactcaccctctctagcttaaatatgttacatgcgcaaggctttctcgctaacgtctttacgatcttagccaaacataaaatttctgtggacgtggtcacaacctcagaagtcagtattgcactcacattagataaaaccggttcggcatcttctggtctcagtttactttcaagcgcactgattgacgaattaagccaactttgtagtgtcaaagtggacagcgatctcgctttagtcgctttaatcggtaatgatttgcatattacctcaggtattgccaaacgtatttttgatacattagccccttataatatccgctcaatcagttatggtgcgagtacgaataatgtttgtcttctagtcaccaatgcacatgctgatgctgttgtttccgcattacataaaaatctctttgagtaa

SEQ ID NO: 83848 - protein, 450 aa, Pasteurella multocida subsp. multocida str. Pm70
MSHLSIAKFGGTSVANYAAMSASAKIVVNDPNTRVVVLSASAGVTNLLVALANGCDNEERTKLINEVRQIQENILSELKDDSLVRNKVEKLLANIESLAEAASLATSPALTDELISHGEMMSSLIFVEILREFNTPSTWIDVRNIIATDSHFGKAVPNDHKTQENSTHILKPLIDRGELIITQGFIGRDEQGKTTTLGRGGSDYSAALLAEVLNAEDVLIWTDVAGIYTTDPRIVPNAKRIDTMSFSEAAEMATFGAKVLHPATLLPAVRSNIPVYVGSSKAPEAGGTWVTRDPQHRPIFRAIALRRDQTLLTLSSLNMLHAQGFLANVFTILAKHKISVDVVTTSEVSIALTLDKTGSASSGLSLLSSALIDELSQLCSVKVDSDLALVALIGNDLHITSGIAKRIFDTLAPYNIRSISYGASTNNVCLLVTNAHADAVVSALHKNLFE

SEQ ID NO: 83849 - DNA, 2463 bp, Escherichia coli O157:H7 EDL933; identical to SEQ ID NO: 14915
  CDS (1)..(2463): transl_table=11

SEQ ID NO: 83850 - protein, 820 aa, Escherichia coli O157:H7 EDL933; identical to SEQ ID NO: 14916

SEQ ID NO: 83851 - DNA, 1422 bp, Deinococcus radiodurans R1
  CDS (1)..(1422): transl_table=11
atgagccaaccccagcctccctcccgcctcctcgtcatgaaattcggcggcaccaacatgcaaagcgcccacgccatccgccacagcgcctcgctcgccgggcgcagcgtccgggaaggcgtgaaggtggtggtggtggtcagcgccatggccggcgtgaccaacggcctgctgcacctcgccgacgccgcgcagtcgggcgacatcgcgcgcgccaacgacgagatcgccgcgctgcgcacccggcacttcacggcggcgcaggaactcggggcggcgcccgactcggaaaccgtgcgcgaactgcgcgaactgcacgagacgctgcggcaggccgtctacggcgtgtacctgctgcgcgaactcaccccgcgcagccgcgacctgatcgtggccttcggcgagcggctttcggcccccttgatgagcctcgcgctcgagcagtcgggcctgcgcgcccggcacctgaccggcggcgaggcgggcatcctgaccgacaccaacttcggcaacgcccggccgctgcccggcacctacgagcgcgtgggcgaccgcctcagcggctttctgagcgccggcgtcacgccggtgatcgccggtttcatgggcgaaaccgagcagggcgcgatcaccaccctcgggcgcggcggcaccgatttctcggcgaccatcgtgggcaaggcgctcggggcggacgaggtgtgggcctggaaggacgtggacggcgtgatgtcggccgacccgcgtgtggtgggggacgcgagcaacatcggggtgctgagctacggcgaggtgatggagctcgcctatttcggcgccaaggtgctgcacccgctcgcggtcacgcccctgcaagacagcgggattcccctgcgcgtcaagagcgccgccgaccccgacttcgccggcacactggtgcgctcgcaggccgaggaaattccgggccgcccggtcaaggccgtgaccgccatcaagaacgtcagcctgctcaccgtcaccggcgccggggtcctgggggtgcccgaagtcatcgcgagcgtcttcaccgccatcgcccgcgagaacatcaccctgctgatggtgtcccagagcagttcgatgagcaacgtctcgctcgcggtgccgagcgccgacgccgcccgagccttgcaggcgctgcgcgcggggctgtcgagcgagctcaacgtcgaggaaacgaacggcgtggcggtcctcgccatcgtcggcagcggcatgcgcggtcagcagggcgtctcggcgcggctgttcacggcgctcgcgagcgaggacatcaacatcctgatgatctcgcagggctcgagcgagctcaacatatcggtggcgctcagcggcgaagaagtcgaccgcgccaccgccgccgtccacgccgcgttcaccctcagccagcccgtcggcgcctga

SEQ ID NO: 83852 - protein, 473 aa, Deinococcus radiodurans R1
MSQPQPPSRLLVMKFGGTNMQSAHAIRHSASLAGRSVREGVKVVVVVSAMAGVTNGLLHLADAAQSGDIARANDEIAALRTRHFTAAQELGAAPDSETVRELRELHETLRQAVYGVYLLRELTPRSRDLIVAFGERLSAPLMSLALEQSGLRARHLTGGEAGILTDTNFGNARPLPGTYERVGDRLSGFLSAGVTPVIAGFMGETEQGAITTLGRGGTDFSATIVGKALGADEVWAWKDVDGVMSADPRVVGDASNIGVLSYGEVMELAYFGAKVLHPLAVTPLQDSGIPLRVKSAADPDFAGTLVRSQAEEIPGRPVKAVTAIKNVSLLTVTGAGVLGVPEVIASVFTAIARENITLLMVSQSSSMSNVSLAVPSADAARALQALRAGLSSELNVEETNGVAVLAIVGSGMRGQQGVSARLFTALASEDINILMISQGSSELNISVALSGEEVDRATAAVHAAFTLSQPVGA

SEQ ID NO: 83853 - DNA, 2607 bp, Xylella fastidiosa 9a5c
  CDS (1)..(2607): transl_table=11
atgtccgcttcccctacagccgagcgctggatcgttctaaaatttggtggtacgtccgtatcgcgtcgtcatcgctgggacaccattgcgatggtggtgagaaaacgccttgaagagcatggaacacgtgtgctgatcgtggtttcggcgctgtctggtgtgacgaatgaactgacggcgattgctcaaggtgtcgttgacagtgcccagcgcgtcgctgccttggagcagcgtcatcgcgattttttggctgagcttgggttagatgcgcaagcagtgctcggcacgcgtttcaccgtgttgtgggatcttctgcaagatgcgcgtgcggtgacgcggtcactggactggcaggctgagttgttagggcaaggtgaactgttgtcttccacactcggtgcggcctacttgggtgcttcgggtgttgacatcggttggatggatgcgcgtgactggctgaccgctttaccaccacagcccaaccagagtgaatggtcgcaacgtctttctgtctcctgtcaatggaagtctgatgtggagtggcgtacacgtttcgatgcccaacgtgctcaggtattgatcactcaagggtttatctcacgtcatcaagatggtggtaccgccatcctgggacgtggtggttcggacacgtcagcagcgtattttggtgcgctacttggtgcggcgtgtgttgagatctggactgatgtaccagggatgttcagtgcgaacccgaaggaggtccctgatgcgcgtttgctgacgcgcctggattactacgaggcacaggagatcgccacaactggcgcgaaggtgttgcatccgcgttcgatcaaaccatgccgtgatactggcgtgccgatgctgattctggatactgagcggcccgatgtattggggacccgtattgatgctgaagttgagccggtgcttggggtcaaggcgattagccgtcgtgatggcatcgtattagtgtcgatggaagggatcggcatgtggcagcaggtgggttttcttgctgacgtatttacattgttcaagaaacacggattgtcggtggacctcatcggatcggcagaaaccaatgtcaccgtgtccttggacccctccgagaacctggttaacaccgacgtactgactgcattgtcaaccgatttatcacaggtctgcaaagtcaaaattattgtgccttgcgctgcgatcactttggtcgggcgtggcatgcgttccctgctgcataaactctctgaggtatgggctacgttcggtaaagaacgtgtccacatgatctcgcagtcttccaatgatcttaatctcacctttgtgattgatgagacggatgcggacggattattggcggtgctgcatttcaaattgatcgaaagcggcgcaatgcctgtccaagagcgtgccgtgtttggttcgccttggcgcgagatcatcggacacgtacgtacgcgggtcatgccttggtggcacagtgcccgcatgcgtttactggccatgagagatgaagagggcattggtccttgctacgtctaccatttgccgacagtgcgcgaacgtgcgcggcaattgaatgcagtggctgccgtggatcagcgctactacgccatcaaggccaacccgcatccggccattctccgtaccctgattgaagaaggctttggactggagtgcgtgtcgttgggtgaattgcgtcacgtgtttgcagtagtgccacacctggttccgtcgcgtgtgttattcactccaagtttcgcctcacgtgtggagtacgagcaggcattcttactaggtgtcaatgtgaccttagacaatgtcgaggccttgcgcttatggccggaggtattccgtgaccggacgttatggttacgtatcgatctgggttacggcgatggacatcacgagaaggtcaccaccggtggtaagacatctaaatttggcctttcggtcacgcggattgatgaatttatcgatgttgccaagacactgaacataatcgtgaccggcctgcatgcccatcttgggagtggcgtggagagaggcgaccattggtcccgcatgtacgatgaactggctggttttgcctcccgcatcgggagtgtgtctaccctggatatcggcggcggtttaccgatcccgtaccggcctgatgatgaaccatttgacgtggaggcatggggagtcagtttggctgaagtcaaagccttgcatcccaaattgcaattggtgatcgagccgggccgcttcctggtggccgaggcgggggtactcctgacccgggtcacccaggtgattgagaaagatggtatccgtcgggttggcctggaggctggaatgcataccctgattcgcccagccctttacgatgcctggcacgacgtggagaacctcagccgcttagatgagataccacatgtactgtgcgatgtcgtgggtcctatttgcgagtcatccgatgtgtttggccgttgccgtcaccttccagccgccaccgcctccggtgatttgatgctgattgcagatgctggcgcctatggtttctcgatggccagcacctacaatctgcgcggcctgccggccgaggtcgtgcttgatgcttga

SEQ ID NO: 83854 - protein, 868 aa, Xylella fastidiosa 9a5c
MSASPTAERWIVLKFGGTSVSRRHRWDTIAMVVRKRLEEHGTRVLIVVSALSGVTNELTAIAQGVVDSAQRVAALEQRHRDFLAELGLDAQAVLGTRFTVLWDLLQDARAVTRSLDWQAELLGQGELLSSTLGAAYLGASGVDIGWMDARDWLTALPPQPNQSEWSQRLSVSCQWKSDVEWRTRFDAQRAQVLITQGFISRHQDGGTAILGRGGSDTSAAYFGALLGAACVEIWTDVPGMFSANPKEVPDARLLTRLDYYEAQEIATTGAKVLHPRSIKPCRDTGVPMLILDTERPDVLGTRIDAEVEPVLGVKAISRRDGIVLVSMEGIGMWQQVGFLADVFTLFKKHGLSVDLIGSAETNVTVSLDPSENLVNTDVLTALSTDLSQVCKVKIIVPCAAITLVGRGMRSLLHKLSEVWATFGKERVHMISQSSNDLNLTFVIDETDADGLLAVLHFKLIESGAMPVQERAVFGSPWREIIGHVRTRVMPWWHSARMRLLAMRDEEGIGPCYVYHLPTVRERARQLNAVAAVDQRYYAIKANPHPAILRTLIEEGFGLECVSLGELRHVFAVVPHLVPSRVLFTPSFASRVEYEQAFLLGVNVTLDNVEALRLWPEVFRDRTLWLRIDLGYGDGHHEKVTTGGKTSKFGLSVTRIDEFIDVAKTLNIIVTGLHAHLGSGVERGDHWSRMYDELAGFASRIGSVSTLDIGGGLPIPYRPDDEPFDVEAWGVSLAEVKALHPKLQLVIEPGRFLVAEAGVLLTRVTQVIEKDGIRRVGLEAGMHTLIRPALYDAWHDVENLSRLDEIPHVLCDVVGPICESSDVFGRCRHLPAATASGDLMLIADAGAYGFSMASTYNLRGLPAEVVLDA

SEQ ID NO: 83855 - DNA, 1296 bp, Agrobacterium tumefaciens str. C58
  CDS (1)..(1296): transl_table=11
atggtactggtcaaggctatggctcgcattgtcatgaaattcggcggcacgtccgtcgcgaacctcgaacgtattcacaatgtcgcacggcatgtgaaacgcgaagtggatgccggccatgaagtggccgtggtcgtttccgccatgtccggcaaaaccaatgagctggtggactgggtgcagaatgctgcgaaggtggccggcaccaatgccgcctccttttatgatgcgcgcgaatatgacgcggttgtcgcctccggcgagcaggtgacctctggccttctggcaatcaccctgcaatccatgggcatcaacgcacgctcctggcagggctggcagatcccgatccgcaccgacaatgcgcatggcgccgcccgcatcctcgagatcgacggttcggatatcgttcatcgcatgggtgaggggcaggttgccgtggttgccggtttccagggcatcggcccggataatcgcatcgcgacgctcggccgcggcggctcggatacgtcggctgtcgccatcgccgctgccgtcaaggcggatcgttgcgatatctataccgatgtcgacggcgtctacaccaccgatccgcgcatcgagcccaaggctcgccgcatgaagaagatcgccttcgaggaaatgctcgaaatggcgtctctcggcgcgaaggttctgcaggttcgctcggtcgagcttgccatggtacacaaggtgcgcaccttcgttcgctccagtttcgaggatcccgatgcgccgggcatgggcgacctcatcaacccgcccggtactttgatttgtgacgaggatgaaatcgtggaacaggaagtcgtaaccggcatcgcctatgccaaggatgaagcacagatttcgctgcgtcgcgtcgccgaccgtccgggcgtctccgccgcgattttcggaccgctcgccgaagcgcatatcaacgtcgacatgatcgtgcagaacatctccgaagatggctcgcgcaccgacatgaccttcacagttccttcgggcgacgttgccaaggctctgcgcgttctggacgagaacaagggccagatcggcttcgacgtcgcgcagaacgaaacgggcctcgccaaggtttcggtcatcggtatcggcatgcgcagccacgccggcgttgccgccagcgcgttcaaggcgctggccgagaagaacatcaacatcaaggcgatcaccacttccgaaatcaaaatttcgatcctgatcgacggcgcctatgccgaacttgcggttcgcactttgcattccgcttacggtctcgataaggcttga

SEQ ID NO: 83856 - protein, 431 aa, Agrobacterium tumefaciens str. C58
MVLVKAMARIVMKFGGTSVANLERIHNVARHVKREVDAGHEVAVVVSAMSGKTNELVDWVQNAAKVAGTNAASFYDAREYDAVVASGEQVTSGLLAITLQSMGINARSWQGWQIPIRTDNAHGAARILEIDGSDIVHRMGEGQVAVVAGFQGIGPDNRIATLGRGGSDTSAVAIAAAVKADRCDIYTDVDGVYTTDPRIEPKARRMKKIAFEEMLEMASLGAKVLQVRSVELAMVHKVRTFVRSSFEDPDAPGMGDLINPPGTLICDEDEIVEQEVVTGIAYAKDEAQISLRRVADRPGVSAAIFGPLAEAHINVDMIVQNISEDGSRTDMTFTVPSGDVAKALRVLDENKGQIGFDVAQNETGLAKVSVIGIGMRSHAGVAASAFKALAEKNINIKAITTSEIKISILIDGAYAELAVRTLHSAYGLDKA

SEQ ID NO: 83857 - DNA, 1275 bp, Sinorhizobium meliloti 1021
  CDS (1)..(1275): transl_table=11
atggcacgcatcgtgatgaaattcggcgggacctccgtcgcagatttgaaccgcatccacaatgtcgcccgccatgtgaaacgcgaagtcgatgccggccatgaggttgctgtcgtcgtttccgccatgtccggcaagaccaacgagctggtcggctgggtcgaaaacatgccgaaggtcgcgggctcgaacgcccccttttacgatgcgcgcgaatatgacgcggtcgtcgcctcaggcgaacaggtgacctccggcctgcttgcgatcgcgctgcagtcgatgggcatcaacgcccgctcgtggcagggctggcagttgccgatcaagaccgacaacgcccatggtgcggcccgcattctcgaaatcgacggcgccgatgtcatccgacgcatgggcgagggtcaggtggcggtcgtcgccggcttccagggtctcggtccggacaaccgcctggcgacgctcggccgcggcggctcggacacctccgccgtcgcaatcgcagccgccgtcaaggccgatcgctgcgacatctacaccgacgtcgacggcgtctacacgaccgacccgcgcatcgaaccgaaggcccggcgattgaagaagatcgccttcgaggaaatgctggaaatggcgtctctcggcgccaaggtgctgcaggtacgctcggtcgagctcgccatggtgcacaaggtacgcacattcgtgcgttcttctttcgaggatcccgatgcgccgggcatgggtgatctcatgaacccgcccggaacgctgatttgtgatgaggatgagatcgtggaacaggaagtcgtaaccggcatcgcctatgccaaggatgaagcacagatctcgctgcgccgcctggccgaccggccgggcgtttccgccgcgatcttcgggccgcttgcggaagcccacatcaatgtcgacatgatcgtccagaacatttcggaagacggctcgaagaccgatatgaccttcaccgtgccgtccggcgacgtcgacaaggccctcagggttctgggcgataacaaggaaaagatcggctatgacgtcattcagtcggagtcgggcctcgtcaaggtctcggtgatcggcatcggaatgcgcagccatgcgggcgtcgccgcttccgcgttccgggcacttgccgacaaggggatcaacatcaaggccatcaccacctccgaaatcaagatctccatcctgatcgacggaccttacgccgaattggccgttcgcactttgcattccgtctacggtctggataagagttaa

SEQ ID NO: 83858 - protein, 424 aa, Sinorhizobium meliloti 1021
MARIVMKFGGTSVADLNRIHNVARHVKREVDAGHEVAVVVSAMSGKTNELVGWVENMPKVAGSNAPFYDAREYDAVVASGEQVTSGLLAIALQSMGINARSWQGWQLPIKTDNAHGAARILEIDGADVIRRMGEGQVAVVAGFQGLGPDNRLATLGRGGSDTSAVAIAAAVKADRCDIYTDVDGVYTTDPRIEPKARRLKKIAFEEMLEMASLGAKVLQVRSVELAMVHKVRTFVRSSFEDPDAPGMGDLMNPPGTLICDEDEIVEQEVVTGIAYAKDEAQISLRRLADRPGVSAAIFGPLAEAHINVDMIVQNISEDGSKTDMTFTVPSGDVDKALRVLGDNKEKIGYDVIQSESGLVKVSVIGIGMRSHAGVAASAFRALADKGINIKAITTSEIKISILIDGPYAELAVRTLHSVYGLDKS

SEQ ID NO: 83859 - DNA, 1248 bp, Caulobacter crescentus CB15
  CDS (1)..(1248): transl_table=11
gtgtcacgtctggtgatgaagttcggcggcacgtcggtggccgacctggagcgcatccgccgtgtggcgcgcctggtcgccgccgaggtcgccacgggtaagcaggtcgcggtggtcgtctcggccatgtcgggcaagaccaatgagctggtcgcctggaccgacggcgccggccgcgccgctgcgggcctgccggagtcggacgacgagtatgacgccgtcgtcgcctcgggcgagcaggtgaccgccggcctcttggccatgaccctgcgcaacatgggccacaaggcccgctcgttcctgggctggcaggtgccgatcctgaccgacgaggcccacggccgcgcgcggatcgaggagatcccgcccgagaacctcgaggaatgcttcgccaacggtgagatcgccgtgatcgccggcttccagggcgtgaccccgaaccgccgcatcaccaccctgggccggggcggctcggacaccagcgccgtggccatcgccgccgccgtcaagggcgactgtgacatctacaccgacgtggacggggtctacaccaccgacccccggatcgagagcaaggccaggcgcctggccaagatctcctacgaagaaatgctcgaaatggcctcgctgggggccaaggttctgcagacccgctcggtcgagatggccatggcccatcgcgtcccggtgcgggtgctgtccagtttcgtcgaaccgggcgaagccccgggccaaggtacgatcgtctgcgacgaggaagaaatcatggaaaagcgcatcgtctcgggcgtcgcctacagccgcgacgaagccaagatcaccctgctgggcctgcccgatcacccgggcgtgtcttcgcagatcttcggccgcctcgccgaggccaatgtgaacgtcgacatgatcgtgcagtcgcgcgcccgcagcgccgacaccgccaacatggagttcaccgtcggcaagcgtgacgccacgcgcgccgtcgagatcgtccaggccgcccagaaggagatcggcttcgaggccgtcgccgtcaacgaggacgtcgccaaggtgtcggtcatcggcgtcggcatgcgctcgcacgccggcgtggcgcaatcgatgttccaggccctggccgagaagaacatcaacatccaggtcatctcgacctcggagatcaagatctcggtcctgatcgacgcggcctataccgaactggcggtgcgggccctgcacgcggtttacgggctggatcagctttaa

SEQ ID NO: 83860 - protein, 415 aa, Caulobacter crescentus CB15
MSRLVMKFGGTSVADLERIRRVARLVAAEVATGKQVAVVVSAMSGKTNELVAWTDGAGRAAAGLPESDDEYDAVVASGEQVTAGLLAMTLRNMGHKARSFLGWQVPILTDEAHGRARIEEIPPENLEECFANGEIAVIAGFQGVTPNRRITTLGRGGSDTSAVAIAAAVKGDCDIYTDVDGVYTTDPRIESKARRLAKISYEEMLEMASLGAKVLQTRSVEMAMAHRVPVRVLSSFVEPGEAPGQGTIVCDEEEIMEKRIVSGVAYSRDEAKITLLGLPDHPGVSSQIFGRLAEANVNVDMIVQSRARSADTANMEFTVGKRDATRAVEIVQAAQKEIGFEAVAVNEDVAKVSVIGVGMRSHAGVAQSMFQALAEKNINIQVISTSEIKISVLIDAAYTELAVRALHAVYGLDQL

SEQ ID NO: 83861 - DNA, 1803 bp, Synechocystis sp. PCC 6803
  CDS (1)..(1803): transl_table=11
atggcattaatcgttcaaaaatttggcggcacttccgttggcactgtggagcgtattcaagcggtggcccaacgcattaaacgaactgtgcagggaggcaactccctggtggtggtggtgtcggccatgggaaaaagcaccgatgtgttagtggatttagcccaacagatttcccccaatccctgtcgccgggagatggatatgttactttccaccggggaacaggtatccattgctttgctgagtttagccttgcaggaaatagaccagcccgccatttccctcaccggagcccaggtgggcatcgtcaccgaggccgaacatagccgggcccgcattctagaaattcgtcccgatcgcctggagcaccatttaagggaagggaaagtggtggtagtggctggtttccagggcatcagtagcgtagaacatctagaaattactaccctgggacggggcggctcagacacctctgccgtggccctggcggcggcattgaaagcggatttttgcgaaatttacaccgacgtaccgggtattctcaccactgatccccgtttagtgccggaagcccaactgatggcggaaatcacctgtgacgagatgttggaattagccagtctgggggcgaaagtactccatccccgggcggtggaaattgcccgcaattatggcattcccttggtggtgcgttccagttggagtgatgaaccgggcacaaaagtagtggctcccccggtgcaaaaccgttccctggtagggcttgaaattgccaaggcagtggatggggtggaatacgacgccgatcaagccaaagtcgctctgttgcgagtgcccgatcgccctggggtggcatcaaaattatttcgggatattgcccaacaacaggtggacattgatttaattattcaatccatccatgacggcaacagtaatgacattgctttcactgttgtcaaagatttactcaatacagcggaagccgttaccagcgccattgccccggccctacgcagttaccccgaagcggatcaggaagcggaaattattgtcgaaaaaggcatcgctaaaattgccattgccggagccggtatgatcggtcgtcctggcatcgccgccaaaatgttcaaaactttggccgatgtgggggtcaacattgaaatgatttccacttcggaagtgaaagttagttgtgttattgatcaacgggacgcagaccgggcgatcgccgctttatccaatgcttttggggtaactttatctccgccgaaaaaccaaacggacacttcccatttaccagcggtgcggggggtagccctggaccaagaccaggcccaaattgccattcgccacgtacccgatcgccctggcatggcagcccaactgttcaccgccctagcagaagccaacatcagtgtggacatgattatccaatcccaacgctgtcgcattaatcaaggcaccccctgccgggacattgcttttatggtggcggaaggggatagcagtcaggctgaggcgattttgcaacccctgatcaaagattggctcgatgcggccatagttgtgaacaaagccattgccaaagtcagcattgtcggttccggcatgattggccatccgggggtggcggcccacttctttgctgccctggcccaggaaaatatcaacattgaaatgattgccacgtcggaaatcaaaatcagttgtgtggtgccccaggatcggggagtggatgctttgaaagctgcccacagcgcctttaacttagctggcacgaaaaccgtcactgttccagcttag

SEQ ID NO: 83862 - protein, 600 aa, Synechocystis sp. PCC 6803
MALIVQKFGGTSVGTVERIQAVAQRIKRTVQGGNSLVVVVSAMGKSTDVLVDLAQQISPNPCRREMDMLLSTGEQVSIALLSLALQEIDQPAISLTGAQVGIVTEAEHSRARILEIRPDRLEHHLREGKVVVVAGFQGISSVEHLEITTLGRGGSDTSAVALAAALKADFCEIYTDVPGILTTDPRLVPEAQLMAEITCDEMLELASLGAKVLHPRAVEIARNYGIPLVVRSSWSDEPGTKVVAPPVQNRSLVGLEIAKAVDGVEYDADQAKVALLRVPDRPGVASKLFRDIAQQQVDIDLIIQSIHDGNSNDIAFTVVKDLLNTAEAVTSAIAPALRSYPEADQEAEIIVEKGIAKIAIAGAGMIGRPGIAAKMFKTLADVGVNIEMISTSEVKVSCVIDQRDADRAIAALSNAFGVTLSPPKNQTDTSHLPAVRGVALDQDQAQIAIRHVPDRPGMAAQLFTALAEANISVDMIIQSQRCRINQGTPCRDIAFMVAEGDSSQAEAILQPLIKDWLDAAIVVNKAIAKVSIVGSGMIGHPGVAAHFFAALAQENINIEMIATSEIKISCVVPQDRGVDALKAAHSAFNLAGTKTVTVPA

SEQ ID NO: 83863 - DNA, 1185 bp, Halobacterium sp. NRC-1
  CDS (1)..(1185): transl_table=11
gtgcgcgtagtcacgaagttcggcggcaccagcctcgggagcggcgaccgcgtggagcgcgctgcggactccatcgcggacgccgttgcggccggccacgagatcgcggtggtggcgtcggcgatgggcaacaccaccgacgaactgctcgacgacatcacgttcgacgccgacgaacccgaccgcgcggagatcgtttcgatgggcgaacgcacgtccgtgcgcatgctgaaggccgcgctggccgctcgcggcgtcgacgcgacgttcctcgaacccgggaccaccgactggccgatcgtcaccaacgagcgcggtgaagtcgacgccgacgcgacggccgccggcgttgaccgcctcgcgggccggctcggggacaccgtccccgtgatcacggggttcctcgcagaggacccacagggcaacgtcaccacgctcgggcgcggcggctcggacacgaccgcggtgatgctcggacggtacctcgacgccgacgaggtcgtcatcgtcaccgacgtggagggcatcatgaccggcgacccccaggtcgtcgagggcgcacgcaacgtcggccgcatcaccgtcgacgaactccgcaacctctcgttccgcggcgcggaagtcatcgcgccgtccgcgctctcgttcaaagacgacgccctcgacgtccgcgtgatccactaccagcacggcgacctgctgtccgggggcacgcgcatcgagggcaccttcgagagcatgatcgacatgcgggactcgccgctggcctgtctgaccgtcgccgggcgtgccatccgcaaccgccccggcatcacgtccgcgctctcgacggcgctctctgacagcgacatcaacgtcgacgccgtggcctccggcatggactcgatgacgttctacgtcgacgagtcggtggccgagcgcgccgagaacatcctccaccaggaggtcatcgccgtctccgagctgtcctcggtcaccgtcaccgacgacatcgcggcgatccgcgtgctcggcggcgaactccccaaccgcccgggcgtcctctgtcgcatcatcgacccgctcgccgaccgcaacatcaacgtcatcgacatcatctcctcggccacctccgtcgcggttttcgtctcctgggcggaccgcgagccggccctcgatgtcgtccagaacggcttcggctcgtag

SEQ ID NO: 83864 - protein, 394 aa, Halobacterium sp. NRC-1
MRVVTKFGGTSLGSGDRVERAADSIADAVAAGHEIAVVASAMGNTTDELLDDITFDADEPDRAEIVSMGERTSVRMLKAALAARGVDATFLEPGTTDWPIVTNERGEVDADATAAGVDRLAGRLGDTVPVITGFLAEDPQGNVTTLGRGGSDTTAVMLGRYLDADEVVIVTDVEGIMTGDPQVVEGARNVGRITVDELRNLSFRGAEVIAPSALSFKDDALDVRVIHYQHGDLLSGGTRIEGTFESMIDMRDSPLACLTVAGRAIRNRPGITSALSTALSDSDINVDAVASGMDSMTFYVDESVAERAENILHQEVIAVSELSSVTVTDDIAAIRVLGGELPNRPGVLCRIIDPLADRNINVIDIISSATSVAVFVSWADREPALDVVQNGFGS

SEQ ID NO: 83865 - DNA, 2463 bp, Salmonella typhimurium LT2; identical to SEQ ID NO: 651
  CDS (1)..(2463): transl_table=11

SEQ ID NO: 83866 - protein, 820 aa, Salmonella typhimurium LT2; identical to SEQ ID NO: 652

SEQ ID NO: 83867 - DNA, 1350 bp, Salmonella typhimurium LT2
  CDS (1)..(1350): transl_table=11
atgacagagatcgttgtttccaaatttggcggtaccagcgtcgctgattttgacgccatgaaccgtagcgcggatatcgtactttccgacaccaatgttcgtttagtcgtgctttccgcgtctgccggcatcactaacctgctggtggcgctggccgaagggatggagcccggcgaacgtttcgctacgctcgacgccatccgtaaaatccagttcgatatccttgatcgtctgcgtcatccgaatgtcattcgcgaagagattgaacgcctgctggaaaacatcactattctggcggaggcggcatcgctggcgacatcggcagccctgaccgatgaactggtcagccacggcgagctgatgtctaccctgctatttgttgagatcctgcgtgaacgcgacgtacaggcccactggttcgacgtgcgcaaagtgatgcgtaccagcgatcgctttggtcgtgcggaaccggacgtcgcagcgcttgcggaactggccgcgcagcagttgctcccgcgcctgagcgaaacgttggtcattactcagggctttatcggcagtgaaagcaaaggccgcaccacgacgttaggccgcggcggcagcgactatacggcagcgttgctggctgaagcgctccacgccgcgcgggttgatatctggacagatgtgcccggtatttacaccaccgacccgcgcgtagtgcctgtcgcgcagcgaattgatgaaatcgactttgaagaagcggcggagatggcaaccttcggcgcaaaagtactgcatccagccaccttactcccggccgtgcgtagcgatatcccggtcttcgttggctccagtaaagatccgcaagcgggcggtacgctggtgtgcaataaaacccaaaacccgccgctgttccgcgcgctggcgctgcgccgcaatcaaacgctattgacgctgcacagcctgaatatgctgcactcacgaggtttcctggcagaggtgttcggcattctggcgcggcataatatttcggtagatctgattaccacttcggaggtgagcgtcgcgctgacgctggatactaccggctccacctccacgggcgatacgttactgacccaatccttattgatggagctttccgcgctgtgtcgggtcgaagttgaagaaggactggcgctggtcgcgctgattggcaacaacctgtcaaaagcctgcggtgttggtaaagaagtgtttggcgtcctggaaccgttcaacattcgcatgatttgttacggcgcctccagccacaatctgtgcttcctcgtgccgggagacgatgccgagaaagtggtgcaaaagctacatcagaacttatttgaataa

SEQ ID NO: 83868 - protein, 449 aa, Salmonella typhimurium LT2
MTEIVVSKFGGTSVADFDAMNRSADIVLSDTNVRLVVLSASAGITNLLVALAEGMEPGERFATLDAIRKIQFDILDRLRHPNVIREEIERLLENITILAEAASLATSAALTDELVSHGELMSTLLFVEILRERDVQAHWFDVRKVMRTSDRFGRAEPDVAALAELAAQQLLPRLSETLVITQGFIGSESKGRTTTLGRGGSDYTAALLAEALHAARVDIWTDVPGIYTTDPRVVPVAQRIDEIDFEEAAEMATFGAKVLHPATLLPAVRSDIPVFVGSSKDPQAGGTLVCNKTQNPPLFRALALRRNQTLLTLHSLNMLHSRGFLAEVFGILARHNISVDLITTSEVSVALTLDTTGSTSTGDTLLTQSLLMELSALCRVEVEEGLALVALIGNNLSKACGVGKEVFGVLEPFNIRMICYGASSHNLCFLVPGDDAEKVVQKLHQNLFE

SEQ ID NO: 83869 - DNA, 1215 bp, Listeria innocua Clip11262
  CDS (1)..(1215): transl_table=11
ttgggactagtagtattaaaatttggcggaacctctgttagcaccgtagataaaatcggaaaaacagcagatcaagccatttacgagaaaaaacaagggaataaagtcattgtcgtcgtttccgcgatgggtaaatcaaccgacaaattagtagcgatggcagaagaaatcagtgaagctccagacaagcgagaaatggatatgttactttcaaccggcgaacaaatcacgattgctttacttgcgatgactttaaaagaaaaaggacatgatgctatttcttatacaggatggcaagcaggaattgaaacagaagcagtacatagtaacgcaagaattgctgatattgatagcgcgcgcattgagtcagcacttgaagctgggcaaattgttattgttgcagggttccaaggtataactacagacggcgaaattactacactcggcaggggtggctctgatacgaccgcagtagcaatcgcatccgctttaaaagcagaaaaatgtgctatttgtacagatgttgtcggcgtattcacaacagatccccgttacgtaaaaaaagcccaaaaactagaacaactaacctatgatgaaatgctagaattagccaatctcggtgctggagttttacatccacgctccgttgaatatgcgaaaaatttccgaattccgcttgaagtaagagcgagtcatgaactagaaccaggtacaatgattgaggaggatttaacaatggaaaataccaaagtagtccgcggaattgcttttgaagatcaaattactcgtgtaaccattcactggaaacaaaaagaagcgatgcgcgtttcaaaagtttttactaaactagcagaaaataacattgatgtagatattatcattcaaggtatcacaggtcttggtcacggcaacttatccttcaccattaaaacaagcgaactattagctactctagctgttttagaagaaagtaaagaactacttcaaatcgaaaaactagaatccgagcaggaactagcgaaagtatccattgttggttctggcatggtaagtaaccctggagtcgctgcaaaaatgtttgaagctttaactgaaaataatatcccaataaaaatgataagcacttcagaaatcaaagtttcgacggttgttcctgcccgtaaaatggtagaagcagcacaagttttacatgaccaatttgaattagataaataa

SEQ ID NO: 83870 - protein, 404 aa, Listeria innocua Clip11262
MGLVVLKFGGTSVSTVDKIGKTADQAIYEKKQGNKVIVVVSAMGKSTDKLVAMAEEISEAPDKREMDMLLSTGEQITIALLAMTLKEKGHDAISYTGWQAGIETEAVHSNARIADIDSARIESALEAGQIVIVAGFQGITTDGEITTLGRGGSDTTAVAIASALKAEKCAICTDVVGVFTTDPRYVKKAQKLEQLTYDEMLELANLGAGVLHPRSVEYAKNFRIPLEVRASHELEPGTMIEEDLTMENTKVVRGIAFEDQITRVTIHWKQKEAMRVSKVFTKLAENNIDVDIIIQGITGLGHGNLSFTIKTSELLATLAVLEESKELLQIEKLESEQELAKVSIVGSGMVSNPGVAAKMFEALTENNIPIKMISTSEIKVSTVVPARKMVEAAQVLHDQFELDK

SEQ ID NO: 83871 - DNA, 1404 bp, Methanopyrus kandleri AV19
  CDS (1)..(1404): transl_table=11
ttgagggtcgttatgaagttcggcggtacctcggtaggtaccggagagtccattaggaaagttgcgaaaatcgtcacagacgcggcggaggagcacgaggtgatcgtggtagtttcagcgatgtctggggtcacggacgagctggtacgggcggccgaaagcgccccggactggacggaggaggatgttaaaaacttcgtagggaagctccgaaggaggcacggaaaagccgcttcggaagcgatttcgtccgacctcatccggcgggaggtgatgggttacgtcgactccttactcgaggaactcgagaaagtgctgttgggcctcagttacgtcggtgaggtgacccctcgttcgatggacctcatactctcgttcggggagcgaatgtccgcacccatcgtagcgggcgcactacgggaccgaggactcgaggcggagcatctcgagggaggagaggctggagtgatcacggacgatgggttcggtgaggccgagccgatactgcccgcttgccggcggaaggcgcagaagacgctgattcccatgatcgaatccggaaagatccccgtgatcacgggcttcatcgggcggactatcgacggcgaggtgacgacgctggggcgcggaggatccgactactccgccgccatcatcgggtgcatctcggaggcggacgaggtgcagatatggaccgacgtcgacggtgtgatgacggcgaacccgaacctcgtacctgatgcccgaacggtcccgaggctctcgtacgaggaggccatggaactggccagcttcggcgcggaggtactccatcctaagaccgtcattccggcaaggtcggaaaacatcccgattcgggttaagaacaccttcaaccccgagagcgagggtacgctgatcacttccgaatcggagccttccgagcaggtggtgaaggcggtcgcgtcgtcctcggacgtcggtatgatcgacatccgaggcaccacgatgattgggcgtcccggagtggcaggacgaatattctcgagactcggggacgagggaatcaacgtcataatgatatcccagtcggcctcggagtcgaacatctcgatagtcgtgagccgcccggaggttcgccgcgccgctcgtatcatcgagcgtgagttcgtcggcgagcgagtggtcgagagggtcacgacgtacgaggacgtagccgtggtggcggtggtaggggagggcatgcgagggactcccggagtcgcttccagggtgttcagagcggtcgcggacgccggggtaaacatcaaaaccatctcgcaaggggcgtctgaggtgaacatatcgttcgtagtagcggaggaggacgaggcggcggcggttaacgcggttcacagcgaattcgaactcggtgaggaggcatga

SEQ ID NO: 83872 - protein, 467 aa, Methanopyrus kandleri AV19
MRVVMKFGGTSVGTGESIRKVAKIVTDAAEEHEVIVVVSAMSGVTDELVRAAESAPDWTEEDVKNFVGKLRRRHGKAASEAISSDLIRREVMGYVDSLLEELEKVLLGLSYVGEVTPRSMDLILSFGERMSAPIVAGALRDRGLEAEHLEGGEAGVITDDGFGEAEPILPACRRKAQKTLIPMIESGKIPVITGFIGRTIDGEVTTLGRGGSDYSAAIIGCISEADEVQIWTDVDGVMTANPNLVPDARTVPRLSYEEAMELASFGAEVLHPKTVIPARSENIPIRVKNTFNPESEGTLITSESEPSEQVVKAVASSSDVGMIDIRGTTMIGRPGVAGRIFSRLGDEGINVIMISQSASESNISIVVSRPEVRRAARIIEREFVGERVVERVTTYEDVAVVAVVGEGMRGTPGVASRVFRAVADAGVNIKTISQGASEVNISFVVAEEDEAAAVNAVHSEFELGEEA

SEQ ID NO: 83873 - DNA, 1197 bp, Thermoanaerobacter tengcongensis MB4
  CDS (1)..(1197): transl_table=11
gtgaaaatattggtgcaaaagtttggaggaacatctgtgtcttcagaagaaaaaagagagaaagctgtttcaaaagtaatagaagcagtaaaaaatggctataacgtggtagtagtagtgtctgctatggggagaaacggcgacccttatgccacagatactttaataaacatggcaaaatcaatttacagtgatattccaaaaagagaacttgacttaataatgaactgcggtgaaataatatctagtgtgcttttcgctgcaactctgtccaataaaggatataaagcaaaagctttgacaggaggacaagctggaatcataacggacgataattttggaaatgcagaggtcataaatgtagatccttctagaattttagaagttttaagagaaggaataatccctgtagtagcaggctttcaaggaatcacgcaaaaaggagagctcactacattggggcgcggtggaagtgacactacagcagcgcttttaggagtggctttaaaagcagaagctgtagagatatacactgatgtagatgggataatgacagcagacccaagaattgtatcaactgctcatatcatagataaaataagctacaatgaagtttttcaattcgctgaacaaggggcaaaagtagtccacccgcgagctgtggaaatagccatgaggggaaatatccctttaattataaaaaatactatgtcagacagcggcgggactatcataactaattacagtgatgcctacgacagcatatatgaagtagacaaattggtaacgggcattgccaatatgaacaacagggtccagattacaattgaaagtacagaaaatgtccaggatatatttgagaagataggagaagaaaaaattagcatcgacttgataagcatattccctgacaaacaggtgtttactatatctgaagctgattttgaaaaacttagaaggctttttgaaaaatacggggtgaaatactcctacaggacaaattgcgcaaaagtttctatcataggcaacagaataagaggagtgccaggtgtcatggctagagtcatcaaagcattatctaagcgcaatattgaaatatatcagacagcagactcacacaataccatctcttgtctggtaagtcaggataaggtagaagaggccataagagttctccacgacgaatttagcctgtaa

SEQ ID NO: 83874 - protein, 398 aa, Thermoanaerobacter tengcongensis MB4
MKILVQKFGGTSVSSEEKREKAVSKVIEAVKNGYNVVVVVSAMGRNGDPYATDTLINMAKSIYSDIPKRELDLIMNCGEIISSVLFAATLSNKGYKAKALTGGQAGIITDDNFGNAEVINVDPSRILEVLREGIIPVVAGFQGITQKGELTTLGRGGSDTTAALLGVALKAEAVEIYTDVDGIMTADPRIVSTAHIIDKISYNEVFQFAEQGAKVVHPRAVEIAMRGNIPLIIKNTMSDSGGTIITNYSDAYDSIYEVDKLVTGIANMNNRVQITIESTENVQDIFEKIGEEKISIDLISIFPDKQVFTISEADFEKLRRLFEKYGVKYSYRTNCAKVSIIGNRIRGVPGVMARVIKALSKRNIEIYQTADSHNTISCLVSQDKVEEAIRVLHDEFSL

SEQ ID NO: 83875 - DNA, 1413 bp, Chlorobium tepidum TLS
  CDS (1)..(1413): transl_table=11
atggtagtcatgaaatttggcggcacctctgttggctcggctgcggccatgcggcaggtgatcgccaatgtcgcggaaaagaagaaatcgagcgcgccgctcgtcgttttaagcgcgtgcagcggaataaccaacaaactgatccagatcgccgatgcggccggctccggctgtctcgaagaggcccagcagcttgttggcgaggttcgccagtttcacctcgatctgatcggggagttgatcgaaagcgaggagctccaacaggaggtgatcgcaaagatcgaggtctatctcacccggctcgaacgcctcaccgagggcatcgagatcgtcggtgagctgaccgagcgctcgaaagaccgcttctgctcattcggcgaactgctttcgacctccgtgttcgccgccgcactgaacgaagcgggcgtgagctgcaagtggatcgacgtgcggacggtgatgatcaccgacgaccgattcggctttgcccgcccactcgccgagatttgccagaaaaacaccagcgagatcatcaagccactgctcgatgcaggcacagtcgtcgtgacgcagggctacatcggcgcgaccgagtcgggccgtaccaccacactgggacgcggaggctccgacctgtcggcagcacttttcggcgcatggctgcattcggagtctatcgaaatctggacggacgttgatggcgtcatgacgactgatccccgaatagttccggaggcgaagagcatcagggtcatgaccttttccgaagctgccgagctggcctatctcggcgcgaaagtgctccatcccgacaccatcgccccagcggtccaaaagaacattccggtttatgtgctcaacacctggcacccggattccaaaggcacgctgatcaccaacgatccggagctgctggcaggaaagagccacggcggtctggtcaaatccattgccgtcaagaaagcgcaggcgattctcaatatccgctcgaaccggatgtttggccgccacggatttatgagcgagctgttcgacgtgttcgagcgctttggcatttcggtcgaaatgatctcgaccagcgaagtctcggtctccctgacggttgacgatgccgtggtgagcgagccgctcatcaaggcgctcggcgcgctcggtgaggtcgagattgagcacaaggtagccacggtcagcgtggttggcgacaatctccgtatgtcgaagggcgttgccggcaggattttcaactcgcttcgcaacgtcaacctgcgcatgatttcgcagggcgcatcggagattaacgtgggcgtggtggttgatgaaagtgacgtgcaggcggcggttgcaagtctgcactgcgagttctttgcggaatcgcagtgcgacgcgattttcgagaaaccggcgggcagctaa

SEQ ID NO: 83876 - protein, 470 aa, Chlorobium tepidum TLS
MVVMKFGGTSVGSAAAMRQVIANVAEKKKSSAPLVVLSACSGITNKLIQIADAAGSGCLEEAQQLVGEVRQFHLDLIGELIESEELQQEVIAKIEVYLTRLERLTEGIEIVGELTERSKDRFCSFGELLSTSVFAAALNEAGVSCKWIDVRTVMITDDRFGFARPLAEICQKNTSEIIKPLLDAGTVVVTQGYIGATESGRTTTLGRGGSDLSAALFGAWLHSESIEIWTDVDGVMTTDPRIVPEAKSIRVMTFSEAAELAYLGAKVLHPDTIAPAVQKNIPVYVLNTWHPDSKGTLITNDPELLAGKSHGGLVKSIAVKKAQAILNIRSNRMFGRHGFMSELFDVFERFGISVEMISTSEVSVSLTVDDAVVSEPLIKALGALGEVEIEHKVATVSVVGDNLRMSKGVAGRIFNSLRNVNLRMISQGASEINVGVVVDESDVQAAVASLHCEFFAESQCDAIFEKPAGS

SEQ ID NO: 83877 - DNA, 1386 bp, Yersinia pestis KIM
  CDS (1)..(1386): transl_table=11
atgattcaagtcgccccccaacagacccgcgatgcaccttctgcgactgtcgtcgccaaatttggcggcaccagcgtggccagttttgatgccatgagtcgtagcgccgatgtggttttatcgaacccggacgttcgtttggtgatcctttctgcgtctgccggtatcaccaatctgttggttgcccttgctgatggcagtgagccagaaaaacgtgcagaccatctggaggatattcgccatattcaatacgatattattgccagactcactgattcgacggtgatccgcgaagaaattgaccgcatgttggaaaacattgccatgctgtctgaggcggccagtctggcgacctccccggccctgaccgatgagctggtcagccacggtgaattaatgtccaccctgctatttgtcgagctgttacgccaacgtcaggttgccgtggaatggtttgatgtgcgaaaagtcatgcgaaccaatgaccgttttggccgcgcagagccagatacctcggccttggctgaactggcccaaacactgctggcaccgcgtattgaagatgccattgtggtcacacaaggttttatcggcagcgaaggcaaaggccgaaccaccactctgggccgtggtggcagtgattacaccgccgcattgttaggtgaagcactgaatgtcagccgtatcgatatctggaccgatgtgccggggatatatacgactgacccgcgtgtcgtcccggcagcaaaacgtatcgataaaatcgcctttgaagaagcggccgaaatggcaacctttggggcgaaaatcctgcatccggccactctgctaccggcagtacgcagtgatatcccgatgtttgtcggctccagtaaagatcctgcggctggcggcaccttggtctgtaacgaaacctacaacccgccgctgttccgtgctctggcactacgccgcaagcagacgctgttaactttgcacagcttaaatatgttgcatgcgcgcggttttctggcggaagtgtttaatattctggcgcgccacagtatctccgtggatttaatcaccacgtctgaagtgagtgtcgcgttaacattggataccaccggttcaacgtctaccggtgatagcctgctgaccacctcgttattgacggaactctcttccctgtgccgggttgaagtggaagaagatctggcgttggtggccattatcggcaacaacctgtctcaggcttgcggcgtcggtaaagaggtatttggtgtcttggatccgttcaatattcgtatgatttgttacggtgccagcagccataatctgtgtttcctggtaccgggtaatgacgctgacaaagtcgtacaaacgctacattacaatttatttgaataa

SEQ ID NO: 83878 - protein, 461 aa, Yersinia pestis KIM
MIQVAPQQTRDAPSATVVAKFGGTSVASFDAMSRSADVVLSNPDVRLVILSASAGITNLLVALADGSEPEKRADHLEDIRHIQYDIIARLTDSTVIREEIDRMLENIAMLSEAASLATSPALTDELVSHGELMSTLLFVELLRQRQVAVEWFDVRKVMRTNDRFGRAEPDTSALAELAQTLLAPRIEDAIVVTQGFIGSEGKGRTTTLGRGGSDYTAALLGEALNVSRIDIWTDVPGIYTTDPRVVPAAKRIDKIAFEEAAEMATFGAKILHPATLLPAVRSDIPMFVGSSKDPAAGGTLVCNETYNPPLFRALALRRKQTLLTLHSLNMLHARGFLAEVFNILARHSISVDLITTSEVSVALTLDTTGSTSTGDSLLTTSLLTELSSLCRVEVEEDLALVAIIGNNLSQACGVGKEVFGVLDPFNIRMICYGASSHNLCFLVPGNDADKVVQTLHYNLFE

SEQ ID NO: 83879 - DNA, 1350 bp, Shigella flexneri 2a str. 301
  CDS (1)..(1350): transl_table=11
atgtctgaaattgttgtctccaaatttggcggtaccagcgtagctgattttgacgccatgaaccgcagcgctgatattgtgctttctgatgccaacgtgcgtttagtagtcctctcggcttctgctggtatcactaatctgctggtcgctttagcggaagggctggaacctggcgagcgattcgaaaaactcgacgctattcgcaacatccagtttgccattctggaacgtctgcgttacccgaacgttatccgtgaagagattgaacgtctgctggagaacattactgttctggcagaagcggcggcgctggcaacgtctccggcgctgacagatgagctggtcagccacggcgagctgatgtcgaccctgctgtttgtcgaaatcctgcgcgaacgcgatgttcaggcacagtggtttgatgtacgtaaagtgatgcgtaccaacgaccgatttggtcgtgcagagccagatgtagccgcgctggcggaactggccgcgctgcagctgctcccacgcctcaatgaaggcttagtgatcacccagggatttatcggtagcgaaaataaaggtcgtacaacgacgcttggccgtggaggcagcgattatacggcagccttgctggcggaggctttacacgcatctcgtgttgatatctggaccgacgtcccgggcatctacaccaccgatccacgcgtagtttccgcagcaaaacgcattgatgaaatcgcgtttgccgaagcggcagagatggcaacttttggtgcaaaagtactgcatccggcaacgttgctacccgcagtacgcagcgatatcccggtctttgtcggctccagcaaagacccacgcgcaggtggtacgctggtgtgcaataaaactgaaaatccgccgctgttccgcgcgctggcgcttcgtcgcaatcagactctgctcactttgcacagcctgaatatgctgcattctcgcggcttcctcgcggaagttttcggcatcctcgcgcggcataatatttcggtagacttaatcaccacgtcagaagtgagcgtggcattaacccttgataccaccggttcaacctccactggcgatacgttgctgacgcaatctctgctgatggagctttccgcactgtgccgggtggaggtggaagaaggtctggcgctggtcgcgttgattggcaatgacctgtcaaaagcctgcggcgttggcaaagaggtattcggcgtactggaaccgttcaacattcgcatgatttgttacggcgcatccagccataacctgtgcttcctggtgcccggcgaagatgccgagcaggtggtgcaaaaactgcatagtaatttgtttgagtaa

SEQ ID NO: 83880 - protein, 449 aa, Shigella flexneri 2a str. 301
MSEIVVSKFGGTSVADFDAMNRSADIVLSDANVRLVVLSASAGITNLLVALAEGLEPGERFEKLDAIRNIQFAILERLRYPNVIREEIERLLENITVLAEAAALATSPALTDELVSHGELMSTLLFVEILRERDVQAQWFDVRKVMRTNDRFGRAEPDVAALAELAALQLLPRLNEGLVITQGFIGSENKGRTTTLGRGGSDYTAALLAEALHASRVDIWTDVPGIYTTDPRVVSAAKRIDEIAFAEAAEMATFGAKVLHPATLLPAVRSDIPVFVGSSKDPRAGGTLVCNKTENPPLFRALALRRNQTLLTLHSLNMLHSRGFLAEVFGILARHNISVDLITTSEVSVALTLDTTGSTSTGDTLLTQSLLMELSALCRVEVEEGLALVALIGNDLSKACGVGKEVFGVLEPFNIRMICYGASSHNLCFLVPGEDAEQVVQKLHSNLFE

SEQ ID NO: 83881 - DNA, 1356 bp, Shewanella oneidensis MR-1
  CDS (1)..(1356): transl_table=11
atgtctcttgttgtcgctaaatttggtggaacctcagttgccgactacggcgcaatgaatcgctgtgccgagattgtgctgggtaatcccgattgccgtttagtggtggttagcgcctcaagtggcgtgaccaatcttttggttgaactcactcaagagtcgattaacgacgatggtcgtttgcaacgattaaaacaaattgcgcaaattcaatacgctatcttagataaactcggtcgccccaatgatgttgcggccgcgttagataagctgctcagccgcatggcggtcctgagcgaagccttagtctcagcacgcagcaaggcgactatggatgagttattgtcccttggtgaacaatgttcatcagcattatttgcggcagtgttacgggaaaaaggcgcgaactcgagcgcattcgatgtgcgccgagtactgcgtaccgacagccattttggccgtgccgagccacaagttgaacagattgccttgttatcccgtgaacacttattgccgctgttgtctgaacaagtgattgtaactcaaggttttattggtgcagatgaggcggggcaaaccactacgcttggccgcggtggtagcgactattccgcggcattgttagctgaagccttaacagcctctgcggttgagatttggaccgatgtggcggggatttatacgactgatccacggcttgcaccaaatgcccatcctattgccgaaatcagctttaacgaagctgctgaaatggcaacctttggtgccaaagtgctgcatcctgcgacgattcttccagctgtgcgtcaacaaattcaagtgtttgtgggttcaagcaaggagccagaaaaaggcgggacttggatccgccaccaggttgaagatgcgcctgtgtttcgtgctgtggcgctgcgccgtgatcaaaccctgctgaatttacacagcctacaaatgctacatgcgcagggctttttggccgagacctttgcgaccttagcaagacataagatcagtgtggatttaattaccacctctgaagttaacgtatcactcacgcttgataaaactggctccgactccagtggccaaggtctgttaagtgaagcgttgctgcaagagttatcacaacactgccgtgtgcgcgtggaggatggtttagccctagttgcgattatcggtaatcgcatagccaccacagccggtatttgccgccgcgtgtttgaagtgctggaaccccataatgtgcgcatgatctgccagggtgcgagcccgcataacttgtgtgtgttagtggccgaatctgaagcggcgcaggtggttaaagcgttgcacgaaaatctgtttgaaggcgcttaa

SEQ ID NO: 83882 - protein, 451 aa, Shewanella oneidensis MR-1
MSLVVAKFGGTSVADYGAMNRCAEIVLGNPDCRLVVVSASSGVTNLLVELTQESINDDGRLQRLKQIAQIQYAILDKLGRPNDVAAALDKLLSRMAVLSEALVSARSKATMDELLSLGEQCSSALFAAVLREKGANSSAFDVRRVLRTDSHFGRAEPQVEQIALLSREHLLPLLSEQVIVTQGFIGADEAGQTTTLGRGGSDYSAALLAEALTASAVEIWTDVAGIYTTDPRLAPNAHPIAEISFNEAAEMATFGAKVLHPATILPAVRQQIQVFVGSSKEPEKGGTWIRHQVEDAPVFRAVALRRDQTLLNLHSLQMLHAQGFLAETFATLARHKISVDLITTSEVNVSLTLDKTGSDSSGQGLLSEALLQELSQHCRVRVEDGLALVAIIGNRIATTAGICRRVFEVLEPHNVRMICQGASPHNLCVLVAESEAAQVVKALHENLFEGA

SEQ ID NO: 83883 - DNA, 1287 bp, Corynebacterium efficiens YS-314
  CDS (1)..(1287): transl_table=11
gtgaacgaaaggtgcgcaagggtggccctagtcgtacagaaatatggcggttcctcactggagagtgcggaacgcatccggaatgttgctgaacggattgttgccaccaagaaggccggaaatgatgtcgtcgtggtctgttccgcgatgggcgacaccaccgatgaactccttgatcttgccgcggccgtcaacccggttccacccgcccgtgagatggatatgctcctgaccgccggcgagcggatctcgaacgcactggtggccatggccattgaatccctcggcgccgaggcccagtcgttcaccggttcccaggccggtgtgctcaccaccgaacgtcacggcaacgcccggatcgtggatgtcaccccggggcgtgtgcgtgaggcgctcgatgagggcaagatctgcatcgtcgccggtttccagggtgtgaacaaggaaacccgtgatgtgaccacgctaggtcgcggcggttccgataccacggcagttgcgctggcggcagcgctcggggccgatgtctgcgagatctactccgatgtggatggtgtctacaccgctgatccccgcatcgtccccaatgcacagaagctggagcgcctctccttcgaggagatgctggaactggcggccgtcggttccaagatcctggtgctgcgcagcgttgagtatgcccgtgcattcaatgttccgatgcgcgtccgttcgtcctatagcaatgaccccggcaccctgatcgccggttcgatggaggatattcctatggaagaagcagttctcaccggtgtagccaccgacaagtccgaggccaaggtcaccgttctgggtatccccgacaagccgggtgaggccgccaaggtcttccgtgcgcttgccgacgccgagatcaacatcgacatggtcctgcagaacgtctcctccgtcgaggacggcaccaccgacatcactttcacctgcccccggtccgacggaccacgcgccatggagctgctcaagaagatgcagcagcagggtgactggaccaacgtgctctacgacgatcaggtgggtaaggtctcactcgtcggcgccggcatgaagtcccacccgggtgtcaccgccgagttcatggaggctctccgtgacgtcaacgtcaacgtcgaactgatctccacctccgagatccgcatctccgtgctcatccgtgaggatgacctggataagtccgcgaaggcactgcacgagaagttccagctcggtggcgatgaggaagccaccgtctacgccggcaccgggcgttaa

SEQ ID NO: 83884 - protein, 428 aa, Corynebacterium efficiens YS-314
MNERCARVALVVQKYGGSSLESAERIRNVAERIVATKKAGNDVVVVCSAMGDTTDELLDLAAAVNPVPPAREMDMLLTAGERISNALVAMAIESLGAEAQSFTGSQAGVLTTERHGNARIVDVTPGRVREALDEGKICIVAGFQGVNKETRDVTTLGRGGSDTTAVALAAALGADVCEIYSDVDGVYTADPRIVPNAQKLERLSFEEMLELAAVGSKILVLRSVEYARAFNVPMRVRSSYSNDPGTLIAGSMEDIPMEEAVLTGVATDKSEAKVTVLGIPDKPGEAAKVFRALADAEINIDMVLQNVSSVEDGTTDITFTCPRSDGPRAMELLKKMQQQGDWTNVLYDDQVGKVSLVGAGMKSHPGVTAEFMEALRDVNVNVELISTSEIRISVLIREDDLDKSAKALHEKFQLGGDEEATVYAGTGR

SEQ ID NO: 83885 - DNA, 1320 bp, Clostridium tetani E88
  CDS (1)..(1320): transl_table=11
atgaataatattatagtgacaaaatttggaggaagttctttagcagatgtgaatcaatttaaaaaagttaagaatatagttttaggagaccaaagaaggaaatatgtagttccttctgctcccggaaaaaggcataaagaagatcaaaaaattactgatttactttacttatgtcatgcaaatgtagaacaaaatgttgaaatagattatatatttaccattatagaaaaaagatttaaagatcttgctaaggaattaggggtaaatatagatatagatacagagttagaaaatataaagaaaaatataaaaaatggagctacagcagattatacagctagtaggggagaatacttaaatggattaattctttctaattatttaggatatgaatttgtagatccagcagagattatattctttaggagaaatggagtttttgatagtgataaaactcaagaagcagtaagtaaaagattatgtaatatacaaaaagctgttattcccggtttttatggatccttacctaatggagatataaaaactttctccagaggtggatctgatgtaacaggtgctattattgctagaggagtggctgcggatttatatgaaaattggacagatgtatctggatttttaatggtggatcctaatattgtagaaaatcctaaaaatatagaaaaaataacttatagagaacttagagaattagcgtatatgggagcaactgtattacatgaagaagcggtctttcctgtaagaagtgcagggattccaataaatattaaaaatactaatagaccagaagataagggaactcttataattgatgacttaaagccagctagttatgcaggaagtataacaggtatagcagggaaaaaagattttgttgttattgccatagaaaaaaatatgatgaatatagaacaggggtattgcagaaaagtactttcagttttagaagaaaattatgtatcttttgaacatatgccttcaggtgtagatgctgtgtcactggtaatatctaaaaatcaactaaacggaaagctagatggtatattagaggaaatagaaatgaaatgcaagccagattctatagaagtttatcctaatatggctttagttgctatagttggaaggggtatgcttagaactgtaggtatgtcagcaaaaatatttgacgcattggctagagaaaaagttaatattagaatgataattcaaggctcaagtgagataaatataattgtaggtgtagaaaatgaagattttgaaaaggctttaaaatctatatatgatgaatttgcaaaataa

SEQ ID NO: 83886 - protein, 439 aa, Clostridium tetani E88
MNNIIVTKFGGSSLADVNQFKKVKNIVLGDQRRKYVVPSAPGKRHKEDQKITDLLYLCHANVEQNVEIDYIFTIIEKRFKDLAKELGVNIDIDTELENIKKNIKNGATADYTASRGEYLNGLILSNYLGYEFVDPAEIIFFRRNGVFDSDKTQEAVSKRLCNIQKAVIPGFYGSLPNGDIKTFSRGGSDVTGAIIARGVAADLYENWTDVSGFLMVDPNIVENPKNIEKITYRELRELAYMGATVLHEEAVFPVRSAGIPINIKNTNRPEDKGTLIIDDLKPASYAGSITGIAGKKDFVVIAIEKNMMNIEQGYCRKVLSVLEENYVSFEHMPSGVDAVSLVISKNQLNGKLDGILEEIEMKCKPDSIEVYPNMALVAIVGRGMLRTVGMSAKIFDALAREKVNIRMIIQGSSEINIIVGVENEDFEKALKSIYDEFAK

SEQ ID NO: 83887 - DNA, 1203 bp, Lactobacillus plantarum WCFS1
  CDS (1)..(1203): transl_table=11
atggaaattattgttcaaaagttcggcggcacgtcagtcaaggacgaagccgcccgtattcaagctttaaagcacgttcaatacgccgtcgatcagggcgataaagtcattgtcgttgtctcagcaattggccggaaaggtgccccttacgccaccgactcattactcggattagttggggccgagcactcccgcttaaccaatcgagaactcgacatgttggtctcagttggggaaaccatctcgaccgctgtctttaccgagttagcgcgtaagcaaggcctaaacgtcacggccatgactggtcatgatgctggcatcgtgactaacgacgattttcaaaatgcgaagattctccgcgttgatccgaaaccaatcacggacgcctttattgacgccgacgtggtagtcgtaactggttttcaaggtgctactgagagcggccacgttactacgattggccgtggtggttccgatacatcagcagccatcctcggcgccgctttaaaagcaaaacgtgttgatatttttactgatgtcaacggcatgatgactgccgatccacgactcgtcacccacgcccgcttcattaaggccatcagctacgaagaacttgctaacatggcccatgaaggtgctaaggtcattcatccgcgtgctgttgaaattgcagaacaagctcacgtgccgatgcggattcggtcaacttatcaggaacccgacgaattagggactttagtcactgaccggaccacgacccaaatcgaacattatcgtaccgtgacagggattgcacaccaaactgatttgacgcaatttactgttcctaccgatacgttaagttcaagtgccattttccaattgatggcacagcacggtttgagtgttgactttattaacattacaccacaccaagttgtcttcaacctggttgatggtgacgcggacgttgccaagcagctactgactgacgcgcacgtccattgtcagtcaattgcgaactgtgctaaagtttccgttgtcggtgctggtatcactgggacacccggcgtcactgctcggatcgtctcggcattagctgcacaacatatcgatattttacaatcgaccgatagttatacgaccatctgggtgctcgttaaggaagccgatttaaaagcggccatgaacgccttacatgatgagttcttaggaatcgaataa

SEQ ID NO: 83888 - protein, 400 aa, Lactobacillus plantarum WCFS1
MEIIVQKFGGTSVKDEAARIQALKHVQYAVDQGDKVIVVVSAIGRKGAPYATDSLLGLVGAEHSRLTNRELDMLVSVGETISTAVFTELARKQGLNVTAMTGHDAGIVTNDDFQNAKILRVDPKPITDAFIDADVVVVTGFQGATESGHVTTIGRGGSDTSAAILGAALKAKRVDIFTDVNGMMTADPRLVTHARFIKAISYEELANMAHEGAKVIHPRAVEIAEQAHVPMRIRSTYQEPDELGTLVTDRTTTQIEHYRTVTGIAHQTDLTQFTVPTDTLSSSAIFQLMAQHGLSVDFINITPHQVVFNLVDGDADVAKQLLTDAHVHCQSIANCAKVSVVGAGITGTPGVTARIVSALAAQHIDILQSTDSYTTIWVLVKEADLKAAMNALHDEFLGIE

SEQ ID NO: 83889 - DNA, 1353 bp, Vibrio parahaemolyticus RIMD 2210633
  CDS (1)..(1353): transl_table=11
gtgagcgcatttaacgtagctaaattcggtgggaccagtgttgccaattttgaggcaatgagtcgttgtgccaccatcatcgaaaacaatccaaatactcgccttgttgttagcagcgcttgctctggggtaaccaacatcttggtagaactggccaatggcgttcaagatcaggaacaccgtgctgagttactaaaaaacctagctgagatccatgattccattttggctcaattggaagatgcgacagaagcttcttcagaagtgtacggaattttagataccgtgaccagccttgcagaagccgcctcaattcaagcaaataccaaactgaccgaccaccttgtggcatgtggtgagttaatgtcgacgcacattttggcgcagctcatgcgagagcgtggtatcaatgcagtacgatttgatattcgtgaagtactaagaaccgacgacaactttggtcgcgcagaaccgaatgtcgaagccattgctcaactagcccaagagaagcttatccctttatgccttgattctgtcgtcatcacacagggcttcattggctctgacgaagaaggcaatacaacaacgttaggccgtggtggtagcgactacagtgcagccttgattgctgaaggtgtgaaagcatctggacttgaaatttggacagatgttcctggtatttacacgaccgatcctcgcatcgcaccaaaagcgtcaccaatcccagagatcagttttagtgaagcctctgaaatggctaactttggcgcgaaaatattacacccatcaacactggtccctgctctgcgccatgatatcccggtttttgttggctcatctaaagaaccagaaaaaggtggcacgtggattcgtcatcaagtcgaaagctcaccgctgttccgtgctctcgctctgcgttgtaatcaaacgatggtcactctacgtagtgcgaacatgttccatgcgtacggcttcttagcaaaagtatttgagattttagccaagcacaaaatttcggtagaccttatcaccacatcagaaatcagtgtgtcactcacactggatcaaactgatacctcaggaggcgcaccacaacttcctcaagcagcacgtgaagagttggaagagttgtgtaaggtcgaagtagaacatgacctttgtttggtagccttgattggtaacaagatgagtgaacgtaaaggctatgcgaagcaagtgtttggtacgctagaagatttgaacttacgcatgatctgttatggagcaagccctcataacctgtgcttccttgtgaatgagtcggtggcgaagcaagccattcagaagctgcatacagagctcttcgaacaataa

SEQ ID NO: 83890 - protein, 450 aa, Vibrio parahaemolyticus RIMD 2210633
MSAFNVAKFGGTSVANFEAMSRCATIIENNPNTRLVVSSACSGVTNILVELANGVQDQEHRAELLKNLAEIHDSILAQLEDATEASSEVYGILDTVTSLAEAASIQANTKLTDHLVACGELMSTHILAQLMRERGINAVRFDIREVLRTDDNFGRAEPNVEAIAQLAQEKLIPLCLDSVVITQGFIGSDEEGNTTTLGRGGSDYSAALIAEGVKASGLEIWTDVPGIYTTDPRIAPKASPIPEISFSEASEMANFGAKILHPSTLVPALRHDIPVFVGSSKEPEKGGTWIRHQVESSPLFRALALRCNQTMVTLRSANMFHAYGFLAKVFEILAKHKISVDLITTSEISVSLTLDQTDTSGGAPQLPQAAREELEELCKVEVEHDLCLVALIGNKMSERKGYAKQVFGTLEDLNLRMICYGASPHNLCFLVNESVAKQAIQKLHTELFEQ

SEQ ID NO: 83891 - DNA, 1350 bp, Salmonella enterica subsp. enterica serovar Typhi Ty2
  CDS (1)..(1350): transl_table=11
atgacagagatcgttgtttccaaatttggcggtaccagcgtcgctgattttgacgccatgaaccgtagcgcggatatcgtactttccgacgccaatgttcgtttagtcgtgctttccgcgtctgccggcatcactaatctgctggtggcgctggccgaagggatggagcccggcgaacgtttcgctacgctcgacgccatccgtaaaatccagttcgatatccttgatcgtctgcgtcatccgaatgtcattcgcgaagagattgaacgcctgctggaaaacatcactattctggcggaggcggcatcgctggcgacatcggcagccctgaccgatgaactggtcagccacggcgagctaatgtctaccctgctatttgttgagatcctgcgtgaacgcgacgtacaggcccactggttcgacgtgcgcaaagtgatgcgtaccagcgatcgctttggtcgtgcggaaccggacgtcgcagcgcttgcggaactggccgcgcagcagttgctcccgcgcctgagcgaaacgttggtcattactcagggctttatcggcagtgaaagcaaaggccgcaccacgacattaggccgcggcggcagcgactatacggcagcgttgctggctgaagcgctccacgccgcgcgggttgatatctggacagatgtgcccggtatttacaccaccgacccgcgcgtagtgcccgtcgcgcagcgaattgatgaaatcgactttgaagaagcggcggagatggcaaccttcggcgcaaaagtactgcatccagccaccttactcccggccgtgcgcagcgatatcccggtcttcgttggctccagtaaagatccgcaagcgggcggtacgctggtgtgcaataaaacccaaaacccgccgctgttccgcgcgctggcgctgcgccgcaatcaaacgctattgacgctgcacagcctgaatatgctgcactcacgaggtttcctggcagaggtgttcggcattctggcgcggcataatatttcggtagatctgattaccacttcggaggtgagcgtcgcgctgacgctggatactaccggctccacctccacgggcgatacgttactgacccaatccttattgatggagctttccgcgctgtgtcgggtcgaagttgaagaaggactggcgctggtcgcgctgattggcaacaacctgtcaaaagcctgcggtgttggtaaagaagtgtttggcgtcctggaaccgttcaacattcgcatgatttgttacggcgcctccagccacaatctgtgcttcctcgtgccgggagacgatgccgagaaagtggtgcaaaagctacatcagaacttatttgaataa

SEQ ID NO: 83892 - protein, 449 aa, Salmonella enterica subsp. enterica serovar Typhi Ty2
MTEIVVSKFGGTSVADFDAMNRSADIVLSDANVRLVVLSASAGITNLLVALAEGMEPGERFATLDAIRKIQFDILDRLRHPNVIREEIERLLENITILAEAASLATSAALTDELVSHGELMSTLLFVEILRERDVQAHWFDVRKVMRTSDRFGRAEPDVAALAELAAQQLLPRLSETLVITQGFIGSESKGRTTTLGRGGSDYTAALLAEALHAARVDIWTDVPGIYTTDPRVVPVAQRIDEIDFEEAAEMATFGAKVLHPATLLPAVRSDIPVFVGSSKDPQAGGTLVCNKTQNPPLFRALALRRNQTLLTLHSLNMLHSRGFLAEVFGILARHNISVDLITTSEVSVALTLDTTGSTSTGDTLLTQSLLMELSALCRVEVEEGLALVALIGNNLSKACGVGKEVFGVLEPFNIRMICYGASSHNLCFLVPGDDAEKVVQKLHQNLFE

SEQ ID NO: 83893 - DNA, 1320 bp, Bacteroides thetaiotaomicron VPI-5482
  CDS (1)..(1320): transl_table=11
atgaaagttttaaagtttggaggaacttccgtgggttctgctcagcggatgaaggaagtagccaaattgattaccgatggtgaacagaagattgttgtcctttctgcaatgtcaggaacaacaaatacattggtggaaatttcggactatctgtataagaagaatccggagggtgccaacgagattatcaataagctggaatcaaaatataaacagcacgttgatgagctttttgcaactcaggaatataaacagaaaggtctggaagtcatcaagtctcacttcgactacatccgctcctatactaaagaccttttcactttgttcgaagagaaagtggttttggcacagggagagcttatttctacggctatggtcaacttctacctgcaggaatgcggtgtgaagtccgtattgcttccggctttggaattcatgcgtactgacaagaacgcggaaccggaccctgtatatattaaggagaaactgcagacacaactggaactgtatccggatatggagatttacatcacacaaggtttcatctgccgcaatgcttacggtgagatagacaacctgcagcgtggtggcagcgattacaccgcatccttgatcggtgctgccgtaaaggcttccgaaatccagatatggacggacatcgacggtatgcacaataacgacccgcgcattgtggacaagacagctccggttcgtcagctgcatttcgaagaagcagccgagctggcttacttcggtgcaaaaatcctgcacccgacttgcatccagcctgctaaatatgccaatatacctgtacgtctgctgaatacaatggacccggatgctcccggaacactaatttctaatgacacggagaaaggtaagattaaagccgtagctgccaaaaacaatattacagctatcaagatcaaatcaagccgtatgttgcttgctcatggtttcctgcgtaaagtattcgagatctttgaaagctatcagacttctattgacatgatctgtacctcagaggtcggtgtatctgttacaatagacaacaccaagcatctgaacgagattctggacgacctgaaaaaatacggtactgtcactgttgacaaggatatgtgtattatctgtgtagtaggtgacctggaatgggagaatgtcggtttcgaagctaaagcgcttgatgcgatgcgggacatacctgtgcgaatgatttccttcggaggaagtaactacaatatttccttccttatccgggattgcgataagaagacggcgttgcagtcgctgagcgatatgcttttcaacaacaaataa

SEQ ID NO: 83894 - protein, 439 aa, Bacteroides thetaiotaomicron VPI-5482
MKVLKFGGTSVGSAQRMKEVAKLITDGEQKIVVLSAMSGTTNTLVEISDYLYKKNPEGANEIINKLESKYKQHVDELFATQEYKQKGLEVIKSHFDYIRSYTKDLFTLFEEKVVLAQGELISTAMVNFYLQECGVKSVLLPALEFMRTDKNAEPDPVYIKEKLQTQLELYPDMEIYITQGFICRNAYGEIDNLQRGGSDYTASLIGAAVKASEIQIWTDIDGMHNNDPRIVDKTAPVRQLHFEEAAELAYFGAKILHPTCIQPAKYANIPVRLLNTMDPDAPGTLISNDTEKGKIKAVAAKNNITAIKIKSSRMLLAHGFLRKVFEIFESYQTSIDMICTSEVGVSVTIDNTKHLNEILDDLKKYGTVTVDKDMCIICVVGDLEWENVGFEAKALDAMRDIPVRMISFGGSNYNISFLIRDCDKKTALQSLSDMLFNNK

SEQ ID NO: 83895 - DNA, 1356 bp, Haemophilus ducreyi 35000HP
  CDS (1)..(1356): transl_table=11
atgtctcatttttcggttgcaaaatttggtggcacaagtgtcgctgattttaatgcaatgaatgcttgtgcaaacattgttgttaaagataaccatacacgcgttgtggtcctatccgcttcagcgggaatcactaattacttggttgaattagcgaatggctgtgccccattacgccgtgtagaaattctgcagaacgttcgaagtgtccaatacaatattatacaacaactacaacaacctgaagctatttctgcagaaatagaccgattactgcaacatatcagtgtcttagctgaatcagccagtgtaacaacatctgctaccctaactgatgagttgattgctcacggtgaattgatgtcgtctaaaatatttacgcaattattaattgaaagagaaatacccgctatatgggttgatgttcgtgatgtaatcgcgaccaatagccaccatggtaaagcaacacctgatgataaaaaaacacaacagcaggcagatgctatagtcaaaccactgcttgaagcaaataaaatcattattacacaaggttttattgctcgcgatcaacaaggaaacaccacaacgttagggcgtggtggatcagactactctgcggccttattagcggaagtattatccgccaaagacgttttaatttggactgatgtaccaggaatttatacgacagatccacgtatagtacccaatgcacaacgcatcgccaccatcgcgttcaatgaagcggctgaaatggctacatttggtgcaaaagtcttacatcctgccacattattacctgccgtacggagtaacattcctgtttatgttggatcgagtaaagcgccagaacaaggtggaacgtgggtaacacgtgatccaacatgccgcccgatttttcgagctattgcgttacgtcgtaaccaaactttagtgacactatcaagccttgcaatgctacacgcccaagaatttttagcgagtgtcttttctatactagccaaataccaagtttcagttgatattatcactacatcagaagtcagcattactttaacattagataagactgattctaccgcatcaactgcacaaatattatcggacgctttagttcacgaattaagtcaattttgccatataaaaattgaaaatgaccttagcctacttgcaattattggcaatgatctacatttacaacaaggcattgctaaagaattatttcagacaattgaaccctttaatattcgtttaattaactatggcgccagtaccaataatatttatatgttagtaaaaaatagcgatgcagatcatatcttgcttgctttacactacgacctatttgaatcataa

SEQ ID NO: 83896 - protein, 451 aa, Haemophilus ducreyi 35000HP
MSHFSVAKFGGTSVADFNAMNACANIVVKDNHTRVVVLSASAGITNYLVELANGCAPLRRVEILQNVRSVQYNIIQQLQQPEAISAEIDRLLQHISVLAESASVTTSATLTDELIAHGELMSSKIFTQLLIEREIPAIWVDVRDVIATNSHHGKATPDDKKTQQQADAIVKPLLEANKIIITQGFIARDQQGNTTTLGRGGSDYSAALLAEVLSAKDVLIWTDVPGIYTTDPRIVPNAQRIATIAFNEAAEMATFGAKVLHPATLLPAVRSNIPVYVGSSKAPEQGGTWVTRDPTCRPIFRAIALRRNQTLVTLSSLAMLHAQEFLASVFSILAKYQVSVDIITTSEVSITLTLDKTDSTASTAQILSDALVHELSQFCHIKIENDLSLLAIIGNDLHLQQGIAKELFQTIEPFNIRLINYGASTNNIYMLVKNSDADHILLALHYDLFES

SEQ ID NO: 83897 - DNA, 1341 bp, Porphyromonas gingivalis W83
  CDS (1)..(1341): transl_table=11
ttgaaagttctcaaatttggcggtacgtctgtaggagatgctgagcgtatccgcagtgttgcccgactgattacttcggtaaaaggaagaaaaattatagtcctttcggctatggccggaacgaccaattcgcttgtcgaaatagcctcacaccttgtcaaacgcaatgtggcacaggccaaagaggtggtgcaggtgttgcgagagaaatatcatcgcgaaataaatgctctatacaaacgtccggataccttgagcgcagccaagaaggccgtcgactccctcctcgactctctgggtcatatgtgcgacgtggagggcttcacactcttcgaggaaaagcgtgtgttgatcctcggcgagctgatgagcacgaccatgatgcagatctatttgcaggagatgggtgcagtggtagccatgctgccggctttggagtatatgcgtaccgacaagaatgcagagccggacaaagactatatccggaagcatctcttgccgatgatagaggctcatccggatgaggatatgctattcctgacggagggttacatttgtcggaatgccttcggagagatcgacaatctccaacgtggcggcagcgactacacggcctctctgatcggagcagcactgaatgctgatgaaattcagatatggacggatatcgacggcatgcacaacaatgatcctcgtgtcgtagacgttacggcacccgttcgccgtctccattttgaagaagctgcggaactggcacacttcggagccaaaatcctccatccgacctgtatcaagccggccaaggagaagaatattccggtacgtttactcaatacgatggatcccgatgcacccgggacgctgatttcactggataccgaaaaggattgtatcaaggccgttgctgccaaggatggcattacggttatcaaggtaaagagcagcaacaaactcctttcatggcactttatgcgcaagctcttcgagatattcgagttctaccaggagcctgtggatatggtcgctacgagcgaagtgggtgtttccctgaccattgacaatgacaagaatctgcccgatattgttcgtgccttgtccgatattggagatgtgacggtcgataaggatatggtcatcatctgtatcgtaggcgatatggagtgggacaatgtgggcttcgaggctcgtatcatcaatgcgctcaaaggagtgccggttcggatgatttcatacggcgggagcaactacaacgtctcggtactcgtcaaggcggaagacaagaaaaaagcactgatagcattgagcaacaagctcttcaattcacgtgcgacaaaagcctaa

SEQ ID NO: 83898 - protein, 446 aa, Porphyromonas gingivalis W83
MKVLKFGGTSVGDAERIRSVARLITSVKGRKIIVLSAMAGTTNSLVEIASHLVKRNVAQAKEVVQVLREKYHREINALYKRPDTLSAAKKAVDSLLDSLGHMCDVEGFTLFEEKRVLILGELMSTTMMQIYLQEMGAVVAMLPALEYMRTDKNAEPDKDYIRKHLLPMIEAHPDEDMLFLTEGYICRNAFGEIDNLQRGGSDYTASLIGAALNADEIQIWTDIDGMHNNDPRVVDVTAPVRRLHFEEAAELAHFGAKILHPTCIKPAKEKNIPVRLLNTMDPDAPGTLISLDTEKDCIKAVAAKDGITVIKVKSSNKLLSWHFMRKLFEIFEFYQEPVDMVATSEVGVSLTIDNDKNLPDIVRALSDIGDVTVDKDMVIICIVGDMEWDNVGFEARIINALKGVPVRMISYGGSNYNVSVLVKAEDKKKALIALSNKLFNSRATKA

SEQ ID NO: 83899 - DNA, 1380 bp, Photorhabdus luminescens subsp. laumondii TTO1
  CDS (1)..(1380): transl_table=11
atgagtgctgtttcatcccaatgcccagaaattggcgggcatgtagtcgcaaaatttggtggtaccagcgtggcaaatttcgatgccatgaataacagtgcagatatcgtactggcaaataaagcagtacgtgtggttgtattgtctgcttctgccggtataaccaacttattagttgcattagcggcaggctgtgatgcagataagcgggctgactacttgaaacagatccactccattcaatacgcaattattgatcgtttgcatgaatccgatacgattcgtcaagagattgatcgtctactggaaaatattaaaaccctggctaaagccgcatctctggcaacctctgcggctctgacagatgaattagtcagccacggtgaattgatgtccacacgattgtttaccgaattgcttcgccaacgcggtaaagatgccgaatggtttgatatacgcaaagtgatgtataccgacgagagttttggccgtgcagaaccaaactatgaacaacttcaatcgttggcaacggaacatctcttaccacagctaaaaaatagcctgattgtcacccaaggttttatcggtcgtgaagagaacggccgtaccactacactgggacgcggtggcagcgattatactgcggcactcttgggagaagcccttggcctgaaacgcgttgatatctggacagatgttccgggcatttacaccactgacccacgagtcgttcccgccgcccaacgaattgataagattgcttttgatgaagccgcggagatggcaacatttggtgccaaaatcctacatccggcaacactgtttcctgctattcgctgtggcattccggtctttgtcggttccagtaaaaacccacaggcaggcggtacgctggtctgtgataccacagaagctccaccacagttccgcgctatcgccctgcgccagaaacagacgttactgacactacacagcctgaaaatgctgcacgcacagggatttttggctgaaatatttaccattctgtcacgtcataatatctcagtggatttgatcaccacctctgaagtcaatgtggcattaactctcgacaccactggctccactagcacaaatggcagcctgctgaccaatgcactgatgacagagctttcgacgctgtgtcgggttgaagtggaagaagatctggcgctggtggcaattattggtaatcagctttctcaaaccaacggattaggaaaaaaggtttttagtgtgctggaaaaattcaatcttcgtatgatcagtcatggtgccagtaaccataacctatgcttgcttgttcaaggcaaagatgcagaacaaattgttcaaacgcttcatcaacgtttgtttgaataa

SEQ ID NO: 83900 - protein, 459 aa, Photorhabdus luminescens subsp. laumondii TTO1
MSAVSSQCPEIGGHVVAKFGGTSVANFDAMNNSADIVLANKAVRVVVLSASAGITNLLVALAAGCDADKRADYLKQIHSIQYAIIDRLHESDTIRQEIDRLLENIKTLAKAASLATSAALTDELVSHGELMSTRLFTELLRQRGKDAEWFDIRKVMYTDESFGRAEPNYEQLQSLATEHLLPQLKNSLIVTQGFIGREENGRTTTLGRGGSDYTAALLGEALGLKRVDIWTDVPGIYTTDPRVVPAAQRIDKIAFDEAAEMATFGAKILHPATLFPAIRCGIPVFVGSSKNPQAGGTLVCDTTEAPPQFRAIALRQKQTLLTLHSLKMLHAQGFLAEIFTILSRHNISVDLITTSEVNVALTLDTTGSTSTNGSLLTNALMTELSTLCRVEVEEDLALVAIIGNQLSQTNGLGKKVFSVLEKFNLRMISHGASNHNLCLLVQGKDAEQIVQTLHQRLFE

SEQ ID NO: 83901 - DNA, 1473 bp, Vibrio vulnificus YJ016
  CDS (1)..(1473): transl_table=11
atggattttctgattattcaaactgacctctctaaactgctctgcccctttcctcaccaaaacaaacatcggatgttggattaccaacggttaatatttttcggaagtcgtgggagaaatgccgtgagcgcattgaatgtagcgaaatttggtggaacaagtgttgcaaactttgaggcaatgagtcgttgctcggccattattgaaaacaatccagagacacgcttagtggtaagcagtgcatgctctggcgtcactaacctattggtagagttggccaatggtgttcaatcacaagaaagacgcgctgaacttctagcccaattggctgaaattcatgacgcgattctcaatcaattggaagatgcaacagaagcggcggcggaagtgtatgccattctcgataccatcactagccttgctgaagccgcatcgattcaagccagcaataaactcaccgaccacttggtcgcatgtggtgagttgatgtcgactcatattctggcccagttgatgcgtgagcgtggagtcaacgcggtgcgatttgatattcgagaagtcctacgcacagatgacaactttggccgcgcagaacctgacgtggcgaaaattgcagagctggcgcaagagaagcttttaccactttgccgcgattacgtggtagtaactcaaggcttcatcggctcggatgaggaaggtaataccaccaccttaggccgtggtggcagtgattacagtgcggctttgattgccgaaggcgttaaagcaagtggcctcgagatttggaccgatgttccagggatctacaccactgatcctcgcattgcggcgaaagcagcgccaattccagaaatcagctttgcagaagcgtctgaaatggctaactttggtgccaaaattctgcacccatcaacgctcgttccagcccttcgtcacgacattccagtttttgtcggatcgtcaaaagagccagaaaaaggcggtacttggattcgccacgaagcacaaagctcgccgcttttccgtgcactggcactgcgttgcaatcagactatggtcaccttacgcagtgcgaaaatgttccatgcgtacggcttcttagccaaagtatttgaaattctcgcaaaacacaaaatctccgtggatttgatcacaacctcagagatcagcgtttccctcactctagacaaaacggacacttctggtggtgcacctgaagtgccacaggccgcgcgagaggagcttgaagagctatgcactgttgaagtcgagcacaacctttgtctggtggccttgatcggcaatcatatggagacgaagggttacgctaaagaagtcttcagcaccttaggggatttcaatttgcgtatgatctgttacggggcaagtgatcacaacctttgcttcttagtcgatgcacacgattctaagagcgtgatccaaaaacttcatcaagatctttttgaacgctaa

SEQ ID NO: 83902 - protein, 490 aa, Vibrio vulnificus YJ016
MDFLIIQTDLSKLLCPFPHQNKHRMLDYQRLIFFGSRGRNAVSALNVAKFGGTSVANFEAMSRCSAIIENNPETRLVVSSACSGVTNLLVELANGVQSQERRAELLAQLAEIHDAILNQLEDATEAAAEVYAILDTITSLAEAASIQASNKLTDHLVACGELMSTHILAQLMRERGVNAVRFDIREVLRTDDNFGRAEPDVAKIAELAQEKLLPLCRDYVVVTQGFIGSDEEGNTTTLGRGGSDYSAALIAEGVKASGLEIWTDVPGIYTTDPRIAAKAAPIPEISFAEASEMANFGAKILHPSTLVPALRHDIPVFVGSSKEPEKGGTWIRHEAQSSPLFRALALRCNQTMVTLRSAKMFHAYGFLAKVFEILAKHKISVDLITTSEISVSLTLDKTDTSGGAPEVPQAAREELEELCTVEVEHNLCLVALIGNHMETKGYAKEVFSTLGDFNLRMICYGASDHNLCFLVDAHDSKSVIQKLHQDLFER

SEQ ID NO: 83903 - DNA, 1383 bp, Bdellovibrio bacteriovorus HD100
  CDS (1)..(1383): transl_table=11
gtggcaaaactggtagtttctaaatttggcggcacctccatgggagatgcagactgtatgcttcgcagtgcggaagtcagcttccgccagggttcgggtctggtggttgtttctgccacctccggcaccaccaacgatctgattgctcttggcaaaaccgccgaatcccaagcttggtcggaatctgaaaaaatcctttccaagattcaggacaaacacaataagatcgcccaggatctgaaactgccagccgatgccaaagccaaactggaaactttgtttgaagaaatgagttcattggcaaaaggtatgcaccttctgaaagactgctcggtcaaagccatggacaccctgatgagtctgggggaaagaatgtcctccgttcttttcaccgaagcgatgtctcaggttctaaaaaagcacggctctgcaaaatccgctgaacttttggacgtgcgcacagttttgcgcacggatgatcagttcggtaaagccaaaccactcaccaatgatgtggctaacctgtgccagaagaacctgtctttcctgcgtgagggaaagaaagtcatgtgcacgcaaggttacattggcatgactgaagaaggcatcacaaccactttagggcgcgggggcagtgactattccgccgcgattttggccgaaggtgtgtctgcggatgtgctggagatctggacagatgtggcggggattgcaacgacggatccgcgtctgtgcccgaaggcacaacctatcagcgaaatttccttcaaagaagcttccgaacttgccacttttggtgcgaaagttctgcatccggcgacattgcttccagccattcgcaagaacattcctgtctttgtgggttccagttttgatgttgaagcccgcggcacctgggtgcgcatggatgtggaagatcatccgctgattcgtgcgatggcgcttcgaaaaaaacaggtgcttgtgaccctttccactccggaaatgctttacgcgcatggctttttgttccagatcttcaaaatcttcaacgatcacaaagtcagtatcgacgcgatcaccacctctgaaatttcagtcagtgtgaccctggatgactcaactttattgaataaaaatctgatcaaggatctttctcagatcgcggatgtgcaggtggaagaaaacctggcactgatttctttgatcggaaacaacatcaaccacacgccgggcttgggaaaaagaatcttcgagaccattccggacatcaatgtgcgcatgatctgtctgggtgccagcaaacacaacttctgtttcctggtggccgatgaacagggccccgaggtcatcaaacgcctgcacgcctgcttcatcgaagccggcatcgaagaaatggcctaa

SEQ ID NO: 83904 - protein, 460 aa, Bdellovibrio bacteriovorus HD100
MAKLVVSKFGGTSMGDADCMLRSAEVSFRQGSGLVVVSATSGTTNDLIALGKTAESQAWSESEKILSKIQDKHNKIAQDLKLPADAKAKLETLFEEMSSLAKGMHLLKDCSVKAMDTLMSLGERMSSVLFTEAMSQVLKKHGSAKSAELLDVRTVLRTDDQFGKAKPLTNDVANLCQKNLSFLREGKKVMCTQGYIGMTEEGITTTLGRGGSDYSAAILAEGVSADVLEIWTDVAGIATTDPRLCPKAQPISEISFKEASELATFGAKVLHPATLLPAIRKNIPVFVGSSFDVEARGTWVRMDVEDHPLIRAMALRKKQVLVTLSTPEMLYAHGFLFQIFKIFNDHKVSIDAITTSEISVSVTLDDSTLLNKNLIKDLSQIADVQVEENLALISLIGNNINHTPGLGKRIFETIPDINVRMICLGASKHNFCFLVADEQGPEVIKRLHACFIEAGIEEMA

SEQ ID NO: 83905 - DNA, 1593 bp, Candida glabrata CBS 138
  CDS (1)..(1593)
atggcttacagtacaagtgctacatctaattgggttgtgcagaagttcggtggtacttctgtcggtaaattccctgtgcagatcgtggacgagatagtcaagtactactcttcttccaaacaggacggtgggtttgataacgatgtcgccgttgtgtgttccgcgaggtcctcctataccaagcaggaaggtaccacttctaggctgctgaagtgttgtgatctggcatctcaggaccaggagtacagcgacattatcgagaccataaggcaggatcacgtcagcaacgccgagaggtttctggaggactctcctttagtcgccaagttgatcgacgacactaacaaagagctggccctagtggataagtacctgtccgcctcgaaggtgttgggtgaggtcagcaatagaaccatcgacctggtgatgtcctgtggtgagaagttgagttgtctgttcatcaccgcgctttgcaacgaccgtgggtgcaaagccaagtatgtcgacctttccaacgtggtcccatcagattatcaaactactacactagataccagtttctacactttcctggtccaggccctgaaggaaaaactggaaccattcgtaaactccaaggagagaatcgtgccagtattcaccggtttcttcggtttcatcccaatgggtctgctgaatggtgtcggtcgtggttacactgacttgtgtgcggctttgatcgccgtcgccttgaacgcagacgaattgcaagtatggaaagaagtcgatggtatcttcaccgccgatccacgtaaagtccctcaggctcgtctactggacagtgtcacgcctgaagaggcctcagaattgacctactacggttccgaagtcattcacccattcaccatggagcaagtcataagagctaagattcctatcagaatcaagaacgtccagaatccaaagggcaacggtacaatcatttatccagacaatgtggccaagaaaggtgagtccactccaccacatccacctgaggccttgagctccactttcttcgaaaagaagagaagaggtgctaccgctatcactactaagaacgatatcgtcgtgctgaatgttcactccaacaagaagactctgtctcacggtttcctagctcagatatttaccgttctggataagtacaagctagttgtcgatttgatttccacctcagaagttcacgtctctatggctcttccaatccctgatagtgactcgatgaaggctctgagatccgcagttgagaaattgaagcccttgggttcagtcgatatcatcaagaagatgtccatcgtttccttggtcggtaagcaaatgaaacaattcattggtatcgccggtaccatgtttaccactctggcagagcaaggtatcaacatcgaaatgatttctcaaggtgccaacgagattaacatctcctgtgttattgatgaaatggactccataaaagcccttcaatccattcacaagaaactactagacgaactcccagaaaatggatctggctctgaacaatttgagaaggcggtcgatgaaagacttgaacaaatcaagaggttgaacttgtag

SEQ ID NO: 83906 - protein, 530 aa, Candida glabrata CBS 138
MAYSTSATSNWVVQKFGGTSVGKFPVQIVDEIVKYYSSSKQDGGFDNDVAVVCSARSSYTKQEGTTSRLLKCCDLASQDQEYSDIIETIRQDHVSNAERFLEDSPLVAKLIDDTNKELALVDKYLSASKVLGEVSNRTIDLVMSCGEKLSCLFITALCNDRGCKAKYVDLSNVVPSDYQTTTLDTSFYTFLVQALKEKLEPFVNSKERIVPVFTGFFGFIPMGLLNGVGRGYTDLCAALIAVALNADELQVWKEVDGIFTADPRKVPQARLLDSVTPEEASELTYYGSEVIHPFTMEQVIRAKIPIRIKNVQNPKGNGTIIYPDNVAKKGESTPPHPPEALSSTFFEKKRRGATAITTKNDIVVLNVHSNKKTLSHGFLAQIFTVLDKYKLVVDLISTSEVHVSMALPIPDSDSMKALRSAVEKLKPLGSVDIIKKMSIVSLVGKQMKQFIGIAGTMFTTLAEQGINIEMISQGANEINISCVIDEMDSIKALQSIHKKLLDELPENGSGSEQFEKAVDERLEQIKRLNL

SEQ ID NO: 83907 - DNA, 1569 bp, Kluyveromyces lactis NRRL Y-1140
  CDS (1)..(1569)
atgattgaaactagtaactgggttgtacagaaatttggtggtaccagtattggtaaattttccaagcagattgtaaatgaaatcatcaaagtgtactctcaggaatacgacaataacgtggctgtcgtgtgttctgctaggtcttcgtacactaaagctgaaggtactacttccagattattattggcatgtgatctagcgtcaaacaacaactatgaatataagaacgttcttgatttagtcgagagagatcatgtcgcaaatgcagaagagtctgtcaaggatattaccatccaagagactttaattgaggataccaagagagaaataaatattgtcaggagatatctggatgcctctcaagtcttgggtgaggtgtctacaagaactttggatttagttatgtcattgggtgagaaactatcctgtttgtatgtgactgctctttgtcaggataatggtgtcaatgcgagatatgtggatctctcttttattgttccaagtgattacgaatgtaaggaaggtactctggataatagtttctacaccttcctcgtcaccgcttttagagagaagctatcgccgatcttaaaagaaaccgagaatggcaccaagatcattcctgtcattactgggttctttggagtcgttccaatgggtctacttaatggtgttggtagaggatatactgatctatgcgccgccttgatcgccgtcgcactaaatgctgacgaattacaagtatggaaagaagttgatggtatcttcaccgccgatccaagaaaagtaccccaagcaagactgttagacacagttacacccgacgaagctgctgagttaacttactacggttcagaagtcattcatccattcaccatggaacaggttatcagaactcacataccgattagaattaaaaacgtccaaaaccctaagggtaacggtactattatttacccaagcgatcaagccaagaagggtgaatccacacctccacatccacctgtagcgttaacatcctctatcttcgaatccaaaaagaaaggcgctacggccatcactactaaatctgatattgttgtggttaatatacattctaataagaagacgttatctcatgggttcttggcagaaatgttctctacgttggataaatataaactagttgtggacttgatttctacttctgaggtccacgtctctatggcccttcctgtacctgattcagattccctaaaggctttacggtgtgctgttgaagagttaaagagactaggtacagtcgatgttattaagaaaatggcaattgtctctctggtcggtaagcagatgaagcaatttgttggtattgctggtactatgtttacaaccttagctgaacaacatattaatattgaaatgatttctcaaggtgctaatgaaattaatatctcttgtgtcattgatgagagcaatgcagtgagagctcttcagtctattcatgcaaaattattagattctccgcagaatgaaaattttgaatcagcagtgaatgaaaggttggaacaaatcaagcaaatgtctttatag

SEQ ID NO: 83908 - protein, 522 aa, Kluyveromyces lactis NRRL Y-1140
MIETSNWVVQKFGGTSIGKFSKQIVNEIIKVYSQEYDNNVAVVCSARSSYTKAEGTTSRLLLACDLASNNNYEYKNVLDLVERDHVANAEESVKDITIQETLIEDTKREINIVRRYLDASQVLGEVSTRTLDLVMSLGEKLSCLYVTALCQDNGVNARYVDLSFIVPSDYECKEGTLDNSFYTFLVTAFREKLSPILKETENGTKIIPVITGFFGVVPMGLLNGVGRGYTDLCAALIAVALNADELQVWKEVDGIFTADPRKVPQARLLDTVTPDEAAELTYYGSEVIHPFTMEQVIRTHIPIRIKNVQNPKGNGTIIYPSDQAKKGESTPPHPPVALTSSIFESKKKGATAITTKSDIVVVNIHSNKKTLSHGFLAEMFSTLDKYKLVVDLISTSEVHVSMALPVPDSDSLKALRCAVEELKRLGTVDVIKKMAIVSLVGKQMKQFVGIAGTMFTTLAEQHINIEMISQGANEINISCVIDESNAVRALQSIHAKLLDSPQNENFESAVNERLEQIKQMSL

SEQ ID NO: 83909 - DNA, 1608 bp, Debaryomyces hansenii CBS767
  CDS (1)..(1608)
atggttaactcacctacattatcagctctgtcgtataattccgtccttgacttcaagaaagtgaataaagcatcaaattggattatccaaaaattcggtggtacttcggtaggtaaatttcctgaaaacatcgtggatgatatagccaaagtattcagtcagcaaaacagagttgcagttgtctgttctgcaagatcttcgaacacaaaaagcgaaggtaccacgtccagattgatcaaatcagcggatttagcattggaggacggcgacttccatgcattattaaaggttattgaagaagatcacgtcgaaaatgctaagagtcgtatctcagacacaaaaattcaagaagaattaattgagaatacaatgaaagaattagaaagagcgaatgaattgttaaaggcatgccaggtgattggtgaaataagtgccagaaccttagattcgatcatgtctgttggtgaaaagctttcatgtctctttatggctgccttgatgaatgaccgtggcttaaaggctacctatgttgatttgtcagacattattcctttggattatgactttacaagtggatttgatgagaaattttataaattcttatcttctgaattaggtaagaaagtattatctcttgattctgatgttgttcctgttctcactggctatttcggagttgtccctggtggattattgaacggtgtaggtaggggttacaccgacttatgtgcggcattgattgctgttggcactcaagccgaagaattacagatttggaaagaagtcgatggtatatttactgcagatcctagaaaggtaccaaacgccagattattggatagtgtcaccccagaagaggccgctgagcttacctattatggttctgaagtcatccatccgtttaccatggaacaagtcatcaaagcgaaaattcctatcagaattaagaatgtgaaaaacccatggggttcaggtactattattttcccagataatttgggcagaagaggagaagaaactcctccacatccaccagcagcttatgagactttgtcaagttcatatattgctacacacaaaaagaaatctgcaactgctattacagccaagcaagatatcgtagttattaacgttcattcaaacaaaaaaaccttatcgcatggttttttggctcacattttcaccaccttagacaacttcaagctagttgttgatttaatatcgacttcagaagtccatgtatcaatggctctccaaattcaacctgatcaagaattacatttgaaaaatgctttgaaagaattacgcaaaatgggtactgttgatgttacaagagaaatgactatagtttcgttggtcggaaaacaaatggttaactttattggcattgcaggtaatatgtttaaagtgctagctgacgaaagaattaatatcgaaatgatatcccaaggtgcaaatgaaataaatatttctgcagttatcgatgcaaaggacactttaagagcgttgcaatctattcatgctaaattactagaaggcagttatgacttattaggtaagacagaaagtgctgtcgatacacgcttagaaggcttaaaattgcaatga

SEQ ID NO: 83910 - protein, 535 aa, Debaryomyces hansenii CBS767
MVNSPTLSALSYNSVLDFKKVNKASNWIIQKFGGTSVGKFPENIVDDIAKVFSQQNRVAVVCSARSSNTKSEGTTSRLIKSADLALEDGDFHALLKVIEEDHVENAKSRISDTKIQEELIENTMKELERANELLKACQVIGEISARTLDSIMSVGEKLSCLFMAALMNDRGLKATYVDLSDIIPLDYDFTSGFDEKFYKFLSSELGKKVLSLDSDVVPVLTGYFGVVPGGLLNGVGRGYTDLCAALIAVGTQAEELQIWKEVDGIFTADPRKVPNARLLDSVTPEEAAELTYYGSEVIHPFTMEQVIKAKIPIRIKNVKNPWGSGTIIFPDNLGRRGEETPPHPPAAYETLSSSYIATHKKKSATAITAKQDIVVINVHSNKKTLSHGFLAHIFTTLDNFKLVVDLISTSEVHVSMALQIQPDQELHLKNALKELRKMGTVDVTREMTIVSLVGKQMVNFIGIAGNMFKVLADERINIEMISQGANEINISAVIDAKDTLRALQSIHAKLLEGSYDLLGKTESAVDTRLEGLKLQ

SEQ ID NO: 83911 - DNA, 1530 bp, Yarrowia lipolytica CLIB122
  CDS (1)..(1530)
atgacctggatcgtccaaaagttcggaggaacatcggtcggcaagttccccaaaaacatctgcaacgacattgtgcagcagtactcgcagtcttacgacgtggctgtggtctgctcagcccgatctaccggaaccaaggccgagggaaccaccacccgtcttattgctgctgctgactctgctcttctcggatcagacgcctacaaccccatcattgagtctatccgagaagaccatcttgcagctgctaagcgtgacgtcaagaaccccgaactgctcgaaaacctcaatgccgacatcaacggcgagtgcgaccagctgttgcgaatcctggctgctgctgaaatcatttctgagatctccccccgaacactcgactccatcatggccattggggagaagctcagttgcatgtacatgactgcagttatgcgggacgctggtgttaacgcacggtactttgacctgtctcacgcagttaccaccaccaatgccgaagatcccaagttctattcggacctcggacgtgttctgggcgagatcatcactcttcccggctctcctaacacggactctgctcctgtcaagggaaacatggtgcccgtgttgaccggtttctttggccccgtcaagggaggcctcctaagccagatcggacgaggatacaccgatctgtgtgctgctctggtggctgtgggtctggacgccaaggagcttcagatctggaaagaagtcgatggtgtcttcactgccgatcccagaaaggtgtccactgcccgtctgctgcccatcattacccccgaggaggccgctgagttgacctactacggatctgaagtcatccaccccttcaccatggagcaggtcattaaggcccatattcctatccgaatcaaaaacgtggaaaaccccctgggaggaggaactatcatctacccatctgctgacggctcgggcaacctgaaaacgaaaaacaatgtccaggatctggcttcttccaccgactcgctaacttctctgtcctctggctcattcactccccaggtgtctgctcctgtagatgacgagaagaagcctacagctgtcactaccaaatcgaatatcaccgttctcaacgttcattcgaataagcgaaccaagagtcatggcttcttgaacaagatctttgctactctcgaccagcagaaacttgtcgtcgatctcatctccacttctgaggtccatgtgtcgatggccttccatgctcccgactccaacctcaagcaggctgtggaggagctgcgaaagtacggcacagtagatgtgaagcgaggcatgaccattgtgtcgctgatcggaacgagaatgaaggccatggtcggatgtgcaggcatgttcttctctactctggcccaggcaggtattaacattgagatgatttctcagggagccaacgaaattaacatctcgtgtgttattgaggaaaaagacgcgctgaaggcgttgaacgtcatccaccagggcttgttgtgtcctagacggaaaatctag

SEQ ID NO: 83912 - protein, 509 aa, Yarrowia lipolytica CLIB122
MTWIVQKFGGTSVGKFPKNICNDIVQQYSQSYDVAVVCSARSTGTKAEGTTTRLIAAADSALLGSDAYNPIIESIREDHLAAAKRDVKNPELLENLNADINGECDQLLRILAAAEIISEISPRTLDSIMAIGEKLSCMYMTAVMRDAGVNARYFDLSHAVTTTNAEDPKFYSDLGRVLGEIITLPGSPNTDSAPVKGNMVPVLTGFFGPVKGGLLSQIGRGYTDLCAALVAVGLDAKELQIWKEVDGVFTADPRKVSTARLLPIITPEEAAELTYYGSEVIHPFTMEQVIKAHIPIRIKNVENPLGGGTIIYPSADGSGNLKTKNNVQDLASSTDSLTSLSSGSFTPQVSAPVDDEKKPTAVTTKSNITVLNVHSNKRTKSHGFLNKIFATLDQQKLVVDLISTSEVHVSMAFHAPDSNLKQAVEELRKYGTVDVKRGMTIVSLIGTRMKAMVGCAGMFFSTLAQAGINIEMISQGANEINISCVIEEKDALKALNVIHQGLLCPRRKI

SEQ ID NO: 83913 - DNA, 1578 bp, Aspergillus nidulans FGSC A4
  CDS (1)..(1578)
atgaacgggcaactgcagtccaacccagatatattgtctaccctaaaagacataccgtcagcctcccataacggcaattgggtcgtacagaaatttgggggcacgagcgttggcaagttcgctcacaatatcattgatcaggttgtccttccaagtctatcacacaacaaggttgctgtggtttgctctgcgaggagcagttctacgaaagctgaaggcaccacgaatcgcttactccgagccgcacgcgatgcagagaattctcagtccaaacaatatctttcatttgtcgaggccgtccggttggaacatgtcgacgtcgtcgagagccagatcaattctgctgaactcaggacgcagcttacctcagcgatcaacgccgaatgcgaacgggtcctcaaggtcctggaagctgctcagactcttggcgaaatcagtgcgcgttgtgtggataaagtgataagcaccggagagaagttgagttgccgcctgatggccgcattcttacaggatcgaggagtcgactcggagtacgtcgacctgtctgaaatcgttgattttcacatttcaggtcaaggccttgaccaagagttttatgacaatcttgcggctgctcttggtcgcaaggtacatgcctgcgaaaataaagttccagtcatcacgggatattttggaacgataccgggaggccttctcgatcagatcgggcgtggatacactgatctttgtgctgctctggtcgccgttggcgtacaggctggggaacttcaagtatggaaagaggttgatgggattttcactgcggacccccggaaagtgccaaccgcccgtcttctaccagcgataacacccgctgaagccgcggagttgactttttatggctcggaggtgatccatcccttcacaatggaacaagttatccgtgccaaaatacccatccggataaaaaatgttatgaatccgaaaggcgacggaaccgtgatattcccagattccacctatgagttggaaaggacgacgcccggccacgatccgagactattccgtacaaggagccctagccttcttcaacgccctaagcgcccaaccgctgttaccatcaagcacaacatcctcgtcattaatgttcattccaacaagcggtctctctctcatggattcttcgcaggaatattctcggttctcgaccgttggaagctgtcgattgatctgatatcgaccagcgaagtccacgtgtcaatggctcttcactcagaaaggccgcttctgaatggtgttgggagggatgaatatcaaatcatcgacgaagatttgaagggagctttgagtgatttacagagatatggtaccgtcgatataattcctgggatggctattcttagccttgtcggaaagcaaatgaagaacatggttggagtggctgggcgcatgttctctactctgggagagaacaatgtcaatattgagatgatttctcaaggtgcaagcgaaatcaatatttcatgtgtcattgaagaacgagatgcggaccgtgcactcaacataatacacacaagtttatttacgttcctagattag

SEQ ID NO: 83914 - protein, 525 aa, Aspergillus nidulans FGSC A4
MNGQLQSNPDILSTLKDIPSASHNGNWVVQKFGGTSVGKFAHNIIDQVVLPSLSHNKVAVVCSARSSSTKAEGTTNRLLRAARDAENSQSKQYLSFVEAVRLEHVDVVESQINSAELRTQLTSAINAECERVLKVLEAAQTLGEISARCVDKVISTGEKLSCRLMAAFLQDRGVDSEYVDLSEIVDFHISGQGLDQEFYDNLAAALGRKVHACENKVPVITGYFGTIPGGLLDQIGRGYTDLCAALVAVGVQAGELQVWKEVDGIFTADPRKVPTARLLPAITPAEAAELTFYGSEVIHPFTMEQVIRAKIPIRIKNVMNPKGDGTVIFPDSTYELERTTPGHDPRLFRTRSPSLLQRPKRPTAVTIKHNILVINVHSNKRSLSHGFFAGIFSVLDRWKLSIDLISTSEVHVSMALHSERPLLNGVGRDEYQIIDEDLKGALSDLQRYGTVDIIPGMAILSLVGKQMKNMVGVAGRMFSTLGENNVNIEMISQGASEINISCVIEERDADRALNIIHTSLFTFLD

SEQ ID NO: 83915 - DNA, 1641 bp, Candida albicans SC5314
  CDS (1)..(1641): transl_table=12
atgtcacaatccccaactaacgttccaagatcctataattcagttttagaccttaaactcgcctcaccgacaaattctgcttctggtgccactggtggttggattgtccaaaaatttggtggtacttcagtaggtaaattccccgagaatatcgttgataacattgtcaaagtatattctcaaaccaatcgtgttgctgttgtatgttctgctagatcttcacaaacgaaaagtgaaggtaccactagtagattattacgcagtgctgatttggcagaaaacgataaggattatcaaccacttttaaatgccattgaagaagatcatgttaccaatgcagaacgtattcaactggaagaaattaaacaagagttgattaaagatactaaacaagaaattgaacacgttagagaattattacatgcatgtcaaatcattggtgaaattagtcctcgttcattggattcaattatggccgttggagaaaaattgtcttgtttgttcatgactgccttgatgaaagaccatggattgaatgctgtatatataaatttacaagatgtcattcctttaagttatgatttccaaaaagggtttgatgattcattttatcaattcttatcccaagaaattggtaaaagggttttacaatgtgataaagaaggagaaagagaaggagaagaagatgttattccagttttaactggttattttggtgttgtacctggtggactattaaatggtgttggtagaggttataccgatttatgtgctgctttagctgctgttgccttacaagccgatgaattacaaatttggaaagaagttgatggtattttcactgctgatcctcgtaaagtccctaatgcaagattattagatagtgttaccccagaagaagctgctgaattgacatattatggttctgaagtcattcacccatttactatggaacaagtcattagagccaaaattcctatcagaataaaaaatgtggaaaacccaactggtaagggaacaattatataccctgataatattggtagaagaggtgaagccactccacctcatcctccagctgcatttgaacaattggccatgagtagtttattacaaagaaaacgttcagccactgccatcactgctaaacaagacattgtggttataaatatccattccaacaaaaaaacattatcacatggatttttagctcatgttttcactacattggataaatataaacttgtggttgatttaatctcaacttcagaagttcatgtatcaatggcattactgatacaactggatcaagaatcacaattgaaacatgcattagttgatttacgtaaaatgggtactgttgatgttactaagaaaatgaccattgtttctttagtaggtaaacaaatggtgaatttcattggtattgctggtaatatgtttaaagtgctagctgatgaaaaaatcaatattgaaatgatatctcaaggagctaatgaaatcaatatttctgctgttattaatgaaaaagataccattagagcattaaaatccattcatgctaaattattagaaggtggttcagcaattggcgattccctggctgtggatacacgtttggaagcattaaaactactgtag

SEQ ID NO: 83916 - protein, 546 aa, Candida albicans SC5314
MSQSPTNVPRSYNSVLDLKLASPTNSASGATGGWIVQKFGGTSVGKFPENIVDNIVKVYSQTNRVAVVCSARSSQTKSEGTTSRLLRSADLAENDKDYQPLLNAIEEDHVTNAERIQSEEIKQELIKDTKQEIEHVRELLHACQIIGEISPRSLDSIMAVGEKLSCLFMTALMKDHGLNAVYINLQDVIPLSYDFQKGFDDSFYQFLSQEIGKRVLQCDKEGEREGEEDVIPVLTGYFGVVPGGLLNGVGRGYTDLCAALAAVALQADELQIWKEVDGIFTADPRKVPNARLLDSVTPEEAAELTYYGSEVIHPFTMEQVIRAKIPIRIKNVENPTGKGTIIYPDNIGRRGEATPPHPPAAFEQLAMSSLLQRKRSATAITAKQDIVVINIHSNKKTLSHGFLAHVFTTLDKYKLVVDLISTSEVHVSMALSIQSDQESQLKHALVDLRKMGTVDVTKKMTIVSLVGKQMVNFIGIAGNMFKVLADEKINIEMISQGANEINISAVINEKDTIRALKSIHAKLLEGGSAIGDSSAVDTRLEALKLS

SEQ ID NO: 83917 - DNA, 1635 bp, Candida albicans SC5314
  CDS (1)..(1635): transl_table=12
atgtcacaatccccaactaacgttccaagatcctataattcagttttagaccttaaactcgcctcaccgacaaattctgcttctggtgccactggtggttggattgtccaaaaatttggtggtacttcagtaggtaaattccccgagaatatcgttgataacattgtcaaagtatattctcaaaccaatcgtgttgctgttgtatgttctgctagatcttcacaaacgaaaagtgaaggtaccactagtagattattacgcagtgctgatttggcagaaaacgataaggattatcaaccacttttaaatgccattgaagaagatcatgttaccaatgcagaacgtattcaactgaaagaaattaaacaagagttgattaaagacactaaacaagaaattgaacacgttagagaattattacatgcatgtcaaatcatcggtgaaattagtcctcgttcattggattcaattatggccgttggagaaaaattgtcttgtttgttcatgactgccttgatgaaagaccatggattgaatgctgtatatataaatttacaagatgtcattcctttgagttatgatttccaaaaagggtttgatgattcattttatcaatttttatcccaagaaattggtaaaagggttttacaatgtgataaagaaagagaagaagaagaagatgttattccagttttaactggttattttggtgttgtacccggtggactattaaatggtgttggtagaggttatactgacttatgtgctgctttagctgctgttgccttacaagctgatgaattacaaatttggaaagaagttgatggtattttcactgctgatcctcgtaaagtccctaatgcaagattattagatagtgttaccccagaggaagctgctgaattgacatattatggttctgaagtgattcacccatttactatggaacaagtcattagagccaaaattcctatcagaataaaaaatgtggaaaatccaactggtaagggaacaattatataccctgataatattggtagaagaggtgaagccactccacctcatcctccagctgcatttgaacaattggccatgagtagtttattacaaagaaaacgttcagccactgccatcactgctaaacaagacattgtggttataaatatccattccaacaaaaaaacattatcacatggatttttagctcatgttttcactacattggataaatataaacttgtggttgatttaatctcaacttcagaagttcatgtatcaatggcattactgatacaactggatcaagaatcacaattgaaacatgcattagttgatttacgtaaaatgggtactgttgatgttactaagaaaatgaccattgtttccttagtaggtaaacaaatggtgaatttcattggtattgctggtaatatgtttaaagtgctagctgatgaaaaaatcaatattgaaatgatatctcaaggagctaatgaaatcaatatttctgctgtcattaatgaaaaagataccattagagcattaaaatccattcatgctaaattattagaaggtggttcagcaattggcgattccctggctgtggatacacgtttggaagcattaaaactactgtag

SEQ ID NO: 83918 - protein, 544 aa, Candida albicans SC5314
MSQSPTNVPRSYNSVLDLKLASPTNSASGATGGWIVQKFGGTSVGKFPENIVDNIVKVYSQTNRVAVVCSARSSQTKSEGTTSRLLRSADLAENDKDYQPLLNAIEEDHVTNAERIQSKEIKQELIKDTKQEIEHVRELLHACQIIGEISPRSLDSIMAVGEKLSCLFMTALMKDHGLNAVYINLQDVIPLSYDFQKGFDDSFYQFLSQEIGKRVLQCDKEREEEEDVIPVLTGYFGVVPGGLLNGVGRGYTDLCAALAAVALQADELQIWKEVDGIFTADPRKVPNARLLDSVTPEEAAELTYYGSEVIHPFTMEQVIRAKIPIRIKNVENPTGKGTIIYPDNIGRRGEATPPHPPAAFEQLAMSSLLQRKRSATAITAKQDIVVINIHSNKKTLSHGFLAHVFTTLDKYKLVVDLISTSEVHVSMALSIQSDQESQLKHALVDLRKMGTVDVTKKMTIVSLVGKQMVNFIGIAGNMFKVLADEKINIEMISQGANEINISAVINEKDTIRALKSIHAKLLEGGSAIGDSSAVDTRLEALKLS

SEQ ID NO: 83919 - DNA, 1257 bp, Bartonella henselae str. Houston-1
  CDS (1)..(1257): transl_table=11
atggcgcggattgtcatgaaatttggcggaacatctgtagcaaacattgaacgtatttataatgttgcacagcatgttaaaagagaggtagatgcgggcaatgaggttgcggtggtggtatccgcaatggccggtaaaactaatgagcttgttcagtggacatgtgacgcttcaccaatacataaagatgcttatgaatatgatgtggttgttgcttctggtgaacaggtaacggcaggtttgttggcccttacacttcaagaaatgggagtgaatgctcgttcatggcttggttggcaaattcctattcacacagatagtgcacatgggagtgcacgtattacagatattgatggatcttttttaatacaacgttttcaggaaggtcaggtagcagttattgctggttttcaaggattggcgccagataatcggatttctactttggggcgtggtggatcagatacaagtgctgttgcaatggcagcagctatacaggctgatcgttgtgatatttatacagatgtggacggtgtttatacaacggatccgcgcgtagaacctaaggcacgtcgtttaccaaaagtggcttttgaagaaatgctggaaatggcttctcttggggcaaaagttttacaggttcggtctgttgaattggctatggttcataacgtccgtaccttcgtgcgttcaagttttgaggatcccaatgcattaggcatgggtgatccaatgaattcttctggaacacttatttgcgatgaggatgaaatcgtggaacaacagaatgttactggtattgcttttgctaaggatgaagcgcaaatttcgctccgtcggcttgcagatcgcccagggatctccgcagcaatttttggccccttggccgaagcgcgaattaatgttgatatgattgtacaaaatatttctgaagatggttcaaaaactgatatgacttttactgtaccatcagcagatgtagataaggctgttgcgcttcttgagaaaaatcgtaaagagattgggtttgatgttatccaatctgaaagcggtcttgccaagatatctgttattggtgttggaatgcgcagtcatgcaggtgttgcggctacagcttttagggctttggctgaaaagggtattaatattcaagcaatcacgacttcagagattaagatttctattttgattgacagcgtttatactgagcttgcagtgagaacattacatgctgtttatggacttgataagggttaa

SEQ ID NO: 83920 - protein, 418 aa, Bartonella henselae str. Houston-1
MARIVMKFGGTSVANIERIYNVAQHVKREVDAGNEVAVVVSAMAGKTNELVQWTCDASPIHKDAYEYDVVVASGEQVTAGLLALTLQEMGVNARSWLGWQIPIHTDSAHGSARITDIDGSFLIQRFQEGQVAVIAGFQGLAPDNRISTLGRGGSDTSAVAMAAAIQADRCDIYTDVDGVYTTDPRVEPKARRLPKVAFEEMLEMASLGAKVLQVRSVELAMVHNVRTFVRSSFEDPNALGMGDPMNSSGTLICDEDEIVEQQNVTGIAFAKDEAQISLRRLADRPGISAAIFGPLAEARINVDMIVQNISEDGSKTDMTFTVPSADVDKAVALLEKNRKEIGFDVIQSESGLAKISVIGVGMRSHAGVAATAFRALAEKGINIQAITTSEIKISILIDSVYTELAVRTLHAVYGLDKG

SEQ ID NO: 83921 - DNA, 1377 bp, Erwinia carotovora subsp. atroseptica SCRI1043
  CDS (1)..(1377): transl_table=11
atgtctgcaactgaagtatccgcaaacgcgaacgctaccgttattgccaaatttggcggcaccagcgtcgcggactttgacgccatgaaccgcagcgctgatgtggtgttatctaatccaaatgtacgcgttgtggtgctgtcggcatcggctggcattaccaatttattggtcgcgctcgcggaaggtcaaactcaggaaacgcgcgctgaacatctggcgaagatccgccagattcaatacgccatcatcgacaggctgaccaatcaaagcgttattcgcgatgagattgatcgcatgctagacagcgtcaccacgctgtctgaagcagcagcgctggctacttccaatgcgctaaccgatgaactggtcagccatggcgagctaatgtccaccttgctgtttgtcgaaattttacgccagcgtgatgtcattgcagagtggtttgatgtgcgcaaaatcatgcgtacagacgatcactttggccgtgcgcagccggattgcgacgtgctgggtgagctgactcgtagcctgttgcagccgcgccttgaacaaggtctggtgattactcagggctttatcggcagcgaagcaaaaggccgtacgaccacactgggccgtggtggtagcgattatactgcggcgctgctgggcgaagcgctcaacgtcaatcggattgatatctggaccgacgttcccggtatttataccaccgacccacgcgtggtgccgacggcgaaacgcatcgatcaaatcatgtttgaagaagccgctgaaatggcaacatttggcgcaaaagtcctgcatccagccacgctgttacctgcggttcgcagcgacattccggtgttcgtcggctccagcaaagatccggctgctggcggtacactggtgtgcaataaaactgaaaatccaccgcttttccgcgcgctggcgctacgtcgtaagcaaacgctgctcacgctgcacagtctcaacatgctgcacacacgcggttttctggccgaagtgttcagtattttggcacgccacaacatctccgttgacctgatcacgacgtcagaagtcaacgtcgcgctcacgctcgatacgactggatccacctcaacgggcggcagtctgctgtccagcgccttgctgaccgagctgtcatcgctatgtcgagtcgaggttgaagagaatctgtcgctggtcgcgctgatcggcaacaaactgtctcaggcctgtggtgtagggaaagaagtgtttggcgtgcttgaacctttccgcattcgcctgatctgctacggtgccagcagcaacaacctgtgcttcttggtacccggtgacgacgccgagcgggtggtgcagacgctgcaccgcagcctgttcgagtaa

SEQ ID NO: 83922 - protein, 458 aa, Erwinia carotovora subsp. atroseptica SCRI1043
MSATEVSANANATVIAKFGGTSVADFDAMNRSADVVLSNPNVRVVVLSASAGITNLLVALAEGQTQETRAEHLAKIRQIQYAIIDRLTNQSVIRDEIDRMLDSVTTLSEAAALATSNALTDELVSHGELMSTLLFVEILRQRDVIAEWFDVRKIMRTDDHFGRAQPDCDVLGELTRSLLQPRLEQGLVITQGFIGSEAKGRTTTLGRGGSDYTAALLGEALNVNRIDIWTDVPGIYTTDPRVVPTAKRIDQIMFEEAAEMATFGAKVLHPATLLPAVRSDIPVFVGSSKDPAAGGTLVCNKTENPPLFRALALRRKQTLLTLHSLNMLHTRGFLAEVFSILARHNISVDLITTSEVNVALTLDTTGSTSTGGSLLSSALLTELSSLCRVEVEENLSLVALIGNKLSQACGVGKEVFGVLEPFRIRLICYGASSNNLCFLVPGDDAERVVQTLHRSLFE

SEQ ID NO: 83923 - DNA, 1275 bp, Propionibacterium acnes KPA171202
  CDS (1)..(1275): transl_table=11
atgacgcgagtcgtccagaagttcggcgggtcctcagtggccgatgccgcatcgattaagcgcgtggcgcgccgtattgccgccacaaagcaggcgggcaatgacattgtcgtcgtcatctcggctatgggtgacaccactgacgacctgatggacctcgccttggaggtttccccacagcccgctccccgggaactcgacatgctcctgacgacgggtgagcggcagtccgctgccctgctcgcgatggctctgtctgacgtgggtatcccggcacgctcgtacaccggttctcaggctggagttattacgaccgcggcccacggcaatgcccgcattattgacattacccccgggcgaattgagaagtctttggaggccggagacctcgtcattgtcgcgggattccagggggtttcccaaacaactaaggacgtcaccaccctagggcggggggcgtctgacaccactgcggtcgccctggccagctccctgggcgctgatttttgtgagatctactctgacgtcgacggtgtctttactgctgatccacggatcgtcaagggtgcccgacgcattcctgagatctcctacgaggagatgctcgaaatggccgcttgcggtgccaaaatcctccatctgcgttgcgtcgaatacgcccgccgtgaggacgtgccagtgcacgtacgttcctcgttctctgacaaacccggcacctgggtcaaggaccctaccgacatcacgaagggatctgacatggaagaggccatcatctccggggtggcccatgaccgctcggaggccaagatcaccatcgccggtcttcctgacgcggtgggtcgagctgcccagatcttcgagatcatcgctcacgctgacatcaatatcgacatgattgtgcagaatgcctcgcgggttatgaatgggcgtacggacctctcctttaccttgccgatgaatgacggacccacggcagtccgcgccctgaccgccgtcaaggacgagttgggctacgagcagatcctgtacaacgaccagattggcaaggtatcggtggtcggcgtgggcatgaggactcaccccggggtcacctcgacgttcttccgtgctttggccgactgcggcattaacttgcagatgatctcgacttccgagattcgcatctcggtggttgtggatgccgatcaggttgacgaggccgttcgcgttgctcataccgccttcgggctcgatgctgaaggcgaggccgtcgtctacgccgggaccggccgttaa

SEQ ID NO: 83924 - protein, 424 aa, Propionibacterium acnes KPA171202
MTRVVQKFGGSSVADAASIKRVARRIAATKQAGNDIVVVISAMGDTTDDLMDLALEVSPQPAPRELDMLLTTGERQSAALLAMALSDVGIPARSYTGSQAGVITTAAHGNARIIDITPGRIEKSLEAGDLVIVAGFQGVSQTTKDVTTLGRGASDTTAVALASSLGADFCEIYSDVDGVFTADPRIVKGARRIPEISYEEMLEMAACGAKILHLRCVEYARREDVPVHVRSSFSDKPGTWVKDPTDITKGSDMEEAIISGVAHDRSEAKITIAGLPDAVGRAAQIFEIIAHADINIDMIVQNASRVMNGRTDLSFTLPMNDGPTAVRALTAVKDELGYEQILYNDQIGKVSVVGVGMRTHPGVTSTFFRALADCGINLQMISTSEIRISVVVDADQVDEAVRVAHTAFGLDAEGEAVVYAGTGR

SEQ ID NO: 83925 - DNA, 1386 bp, Yersinia pseudotuberculosis IP 32953
  CDS (1)..(1386): transl_table=11
atgattcaagtcgccccccaacagacccgcgatgcaccttctgcgactgtcgtcgccaaatttggcggcaccagcgtggccagttttgatgccatgagtcgtagcgccgatgtggttttatcgaacccggacgttcgtttggtgatcctttctgcgtctgccggtatcaccaatctgttggttgcccttgctgatggcagtgagccagaaaaacgtgcagaccatctggaggaaattcgccatattcaatacgatattattgccagactcactgattcgacggtgatccgcgaagaaattgaccgcatgttggaaaacattgccatgctgtctgaggcggccagtctggcgacctccccggccctgaccgatgagctggtcagccacggtgaattaatgtccaccctgctatttgtcgagctgttacgccaacgtcaggttgccgtggaatggtttgatgtgcgaaaagtcatgcgaaccaatgaccgttttggccgcgcagagccagatacctcggccttggctgaactggcccaaacactgctggcaccgcgtattgaagatgccattgtggtcacacaaggttttatcggcagcgaaggcaaaggccgaaccaccactctgggccgtggtggcagtgattacaccgccgcattgttaggtgaagcactgaatgtcagccgtatcgatatctggaccgatgtgccggggatatatacgactgacccgcgtgtcgtcccggcagcaaaacgtatcgataaaatcgcctttgaagaagcggccgaaatggcaacctttggggcgaaaatcctgcacccggccactctgctaccggcagtacgcagtgatatcccggtgtttgtcggctccagtaaagatcctgcggctggcggcaccttggtctgtaacgaaacctacaacccgccgctgttccgtgctctggcactacgccgtaagcagacgctgttaactttgcacagcttaaatatgttgcatgcgcgcggttttctggcggaagtgtttaatattctggcgcgccacagtatctccgtggatttaatcaccacgtctgaagtgagtgtcgcgttaacattggataccaccggttcaacgtctaccggtgatagcctgctgaccacctcgttattgacggaactctcttccctgtgccgggttgaagtggaagaagatctggcgttggtggccattatcggcaacaacctgtctcaggcttgcggcgtcggtaaagaggtatttggtgtcttggatccgttcaatattcgtatgatttgttacggtgccagcagccataatctgtgtttcctggtaccgggtaatgacgctgacaaagtcgtgcaaacgctacattacaatttatttgaataa

SEQ ID NO: 83926 - protein, 461 aa, Yersinia pseudotuberculosis IP 32953
MIQVAPQQTRDAPSATVVAKFGGTSVASFDAMSRSADVVLSNPDVRLVILSASAGITNLLVALADGSEPEKRADHLEEIRHIQYDIIARLTDSTVIREEIDRMLENIAMLSEAASLATSPALTDELVSHGELMSTLLFVELLRQRQVAVEWFDVRKVMRTNDRFGRAEPDTSALAELAQTLLAPRIEDAIVVTQGFIGSEGKGRTTTLGRGGSDYTAALLGEALNVSRIDIWTDVPGIYTTDPRVVPAAKRIDKIAFEEAAEMATFGAKILHPATLLPAVRSDIPVFVGSSKDPAAGGTLVCNETYNPPLFRALALRRKQTLLTLHSLNMLHARGFLAEVFNILARHSISVDLITTSEVSVALTLDTTGSTSTGDSLLTTSLLTELSSLCRVEVEEDLALVAIIGNNLSQACGVGKEVFGVLDPFNIRMICYGASSHNLCFLVPGNDADKVVQTLHYNLFE

SEQ ID NO: 83927 - DNA, 1221 bp, Symbiobacterium thermophilum IAM 14863
  CDS (1)..(1221): transl_table=11
atgcggatcatcgtccagaagttcggcggcacctccgtggccacgccggagggccgcgaggcagtagtccgccgcgtgcggcaggccctggacgacggctacgcgacggtggtcgtcgtctcggccatggggcgccagggcgacccttacgccaccgacacgctgatccagctggcgcagtcggctgggccggacctggctccccgggagatggacctgctgctctcctgcggcgagatcatctccagcgtactcatggcggcgacgctcaccgccgccggcatccccgccgtggcccttacgggcggccaggcgggcatccagacggatgagaactacggtaacgcgcagatcgtgaaggtcgatccggccccggtgctcagccggctgaaggaggggctggtggtggtggtggccggcttccagggggtgaacgccgccggggaggtcaccacgctgggccgcggcggctccgacacgacggccgccgcgctgggcggggccctgcgggccgaggtggtggagatctacaccgacgtcgacggcgtcaagaccgcggacccgcgcctcgtcgccgaggcccggacgctgtcggtcaccacctatgatgaaatcgcccagatggcccactacggcgccaaggtggtccacccgcgggcggtggagatcgcgatgcagcaccgggtgccgatccgggtgcggtcgaccttcagcgacaaccccggaacgctcatcacctacagcgccgaggccggcgtcatctggagcgagccgttctccgaccgggtcgtcaccgccgtgacccacgtggtcgggctcgcccaggtggtggtaaagaccgggcgcgactgggccaccccgcggctgttccggcggctggccaacgccggcatctcggtggacctgatctcagtttccatggagtccagcgcgttctcaattcccgagtcgcgggcggcccaggcggagatgatcctgaccgagctgggcctcgtggacctgcaggtgcggcacggctgcgccaaggtcaccgtggtgggctccggcatgcgcggccgccccggcgtcatggccacggtggccgaggcgctgtacgcggcggaggtgccgatctggcagacggccgactcccacgtgaccatctcctgcctgatccccgccgccgacgtgcagcgggcggtacaggccctccacgacgccttcgagctgggccggatctga

SEQ ID NO: 83928 - protein, 406 aa, Symbiobacterium thermophilum IAM 14863
MRIIVQKFGGTSVATPEGREAVVRRVRQALDDGYATVVVVSAMGRQGDPYATDTLIQLAQSAGPDLAPREMDLLLSCGEIISSVLMAATLTAAGIPAVALTGGQAGIQTDENYGNAQIVKVDPAPVLSRLKEGLVVVVAGFQGVNAAGEVTTLGRGGSDTTAAALGGALRAEVVEIYTDVDGVKTADPRLVAEARTLSVTTYDEIAQMAHYGAKVVHPRAVEIAMQHRVPIRVRSTFSDNPGTLITYSAEAGVIWSEPFSDRVVTAVTHVVGLAQVVVKTGRDWATPRLFRRLANAGISVDLISVSMESSAFSIPESRAAQAEMILTELGLVDLQVRHGCAKVTVVGSGMRGRPGVMATVAEALYAAEVPIWQTADSHVTISCLIPAADVQRAVQALHDAFELGRI

SEQ ID NO: 83929 - DNA, 1353 bp, Mannheimia succiniciproducens MBEL55E
  CDS (1)..(1353): transl_table=11
atggctaatctttcagtcgctaaatttggtggcacaagtgtggcaaattatgccgccatgacagcttgtgcaaaaattgtgatcgccgatccgaatacaagagtggtcgttctttcggcttctgcgggagtaacaaatttattagtcgctttagcaaatggttgcgaagcaacgcaacgagctaaattattagccgaagtgcgtcaaatccaggaaaatattttaaacgaactgaaggatgccggcaccgttcgtcttgaaattgaagaattactgactaatatcgaatatttggcggaagcggcaagtttagctacatcatcagccttaaccgacgaattaatcagccacggcgaaatgatgtcgactaaaatttttgttcaagtgttacgtgaattaaacgcacaggcaacttgggttgacgtgcgtaccgtcgttgcaacaaacagcaatttcggtaaagcggcgcctgatgacgaacaaactcaaaaaaatagcgacaatgtgttaaaaccgttgattgaccgcggtgaattggtaattacccagggttttatcgggcgcgatcctaacggtaaaacaaccactttaggacgcggcggttcggattattccgccgcattaattgccgaagtattaaatgccaaagacgtattaatctggaccgatgtggcaggtatttattcaacggatccccgtattgttccgaatgcgcaacgcattgacaccatgagctttgcggaagcggcggaaatggcgacttttggcgcgaaagtgctacacccggcgacattattgccggcggtgcgtagtaacattccggtttatgtgggctcaagtaaggcgccggaacaaggcggtacatgggtaacccgcgatcctcaacctcgcccgacgttccgcgctatagctttgcgccgcgatcagacgttattaaccttatcaagtttaaatatgttgcatgcgcaaggttttttagccaacgtattcaacattttggcaaaacacaaaatttcagtggatacgatcactacttcggaagtcagtgttgcgttaaccttggataaaaccggttcggcttcttccggtgcggaattgttatcaagcgatttattaaatgaactcagcgaagtttgtacggtaaaagtggacaccggtttggcgctggtggcattaataggtaatgatctgcatttatcggcgggcattgcgaaacgtattttcggtacaatcgaagaatacaatattcgcatgattagctacggagcaagcacaaataatatctgtactttagtgcatagcgcccatgcagacgacgtcgtccgtgcattgcataaagaattattcgaataa

SEQ ID NO: 83930 - protein, 450 aa, Mannheimia succiniciproducens MBEL55E
MANLSVAKFGGTSVANYAAMTACAKIVIADPNTRVVVLSASAGVTNLLVALANGCEATQRAKLLAEVRQIQENILNELKDAGTVRLEIEELLTNIEYLAEAASLATSSALTDELISHGEMMSTKIFVQVLRELNAQATWVDVRTVVATNSNFGKAAPDDEQTQKNSDNVLKPLIDRGELVITQGFIGRDPNGKTTTLGRGGSDYSAALIAEVLNAKDVLIWTDVAGIYSTDPRIVPNAQRIDTMSFAEAAEMATFGAKVLHPATLLPAVRSNIPVYVGSSKAPEQGGTWVTRDPQPRPTFRAIALRRDQTLLTLSSLNMLHAQGFLANVFNILAKHKISVDTITTSEVSVALTLDKTGSASSGAELLSSDLLNELSEVCTVKVDTGLALVALIGNDLHLSAGIAKRIFGTIEEYNIRMISYGASTNNICTLVHSAHADDVVRALHKELFE

SEQ ID NO: 83931 - DNA, 1230 bp, Methylococcus capsulatus str. Bath
  CDS (1)..(1230): transl_table=11
atggctttattcgtacacaaatacggcggcacctcggtcggctcgccggagcggatcaagaacgtcgcgaagaacgtcatccgggcgcgcagccggggcgacgacatcatcgtcgtggtgtcggccatgagcggcgaaaccaaccgcctggtggcgctggcgcatgaaatgcacgaaaggcccagcacccgtgaaatggatgtgctgctggccaccggcgagcaggtcacgatcgcgctgttgagcatggcgctggaggcggcagggtgcccggcctgttcctataccggcgggcaggtgcggatcctcaccgacgatgcacacaccaaggcgcgcatcctcgacatcgacaccgaccgtatccgcagcgatctcgcggccggacgcgtggtcgtggtggcgggtttccaggggatcaccgaggcgggtgacatcaccaccttggggcggggcggctccgacaccacggcggtcgccctggccgctgcactcaaggcggacgaatgcctgatttataccgacgtggatggcgtctataccacggatccaaggatcgaaccgaaggcgcgccggctggaccgcatcaccttcgaggaaatgctcgaaatggcgagcctggggtccaaggtgctgcagattcgctcggtcgaattcgccggcaagtacaacgtccccctgagagtcttgtccagtttcgcagccggtcccggcacattgattacatatgaggaagcaagtgtggaaaaacctttgatctccggtatcgccttcaatcgcgacgaagcgaaactgaccgtcaagggcgtgccggacaagccgggcgtggcatatcagatcctggggcccgtcgcccatgccaacatcgaagtggacatgatcgtccagaacgtcgcggaggatgcgaccacggatttcacgtttaccgtccaccgcaacgactaccgcaaggcgctcgacatcctgcaggcgacttgcacggccctgggggcgcgcgaagtgacgggagacgacaagatcgtgaaagtttcgctggtgggcgtggggatgcgctcgcatgccgggatcgccgcccggatgttcgaagccctggcgcgggaaggcatcaacatccgcatgatatccacttccgaaatcaagatttccatcgtcgtggacgaaaaatacctcgagctggcggtacgtaccctgcacgaggcgttcaatctcgatcgcgagccggacgcggtttga

SEQ ID NO: 83932 - protein, 409 aa, Methylococcus capsulatus str. Bath
MALFVHKYGGTSVGSPERIKNVAKNVIRARSRGDDIIVVVSAMSGETNRLVALAHEMHERPSTREMDVLLATGEQVTIALLSMALEAAGCPACSYTGGQVRILTDDAHTKARILDIDTDRIRSDLAAGRVVVVAGFQGITEAGDITTLGRGGSDTTAVALAAALKADECLIYTDVDGVYTTDPRIEPKARRLDRITFEEMLEMASLGSKVLQIRSVEFAGKYNVPLRVLSSFAAGPGTLITYEEASVEKPLISGIAFNRDEAKLTVKGVPDKPGVAYQILGPVAHANIEVDMIVQNVAEDATTDFTFTVHRNDYRKALDILQATCTALGAREVTGDDKIVKVSLVGVGMRSHAGIAARMFEALAREGINIRMISTSEIKISIVVDEKYLELAVRTLHEAFNLDREPDAV

SEQ ID NO: 83933 - DNA, 1794 bp, Synechococcus elongatus PCC 6301
  CDS (1)..(1794): transl_table=11
atggctttgattgttcaaaaatacggcggaacctcggttggcagcgtcgaacggatcacggcggttgcccaacgcattgcccagacggttgctgctggcaatcaagtcgtggtcgtagtttcggccatgggtcacagcacggatgagctgctgaagctggccaatgggatcagtgctaatcctagtcgccgcgaattggacatgctgctggcgacgggcgaacaagtctcgatcgcgctgttgagtatggccctacatgaacagggctgcgacgcgatttcgatgaccggcgcgcaggttgggatcatcacagaagcacatcacagccgtgcccgaattctggaaattgatccgcagcggctgcaaagccaactcgatgccggtcgggtggttgtcgtcgcggggttccaaggcattgcgtctagcgatcgcacagcgctgacggaaattacgacactgggacggggcggttccgatacgtcagccgtcgctttggccgcagctctcaacgccgatcgctgcgaaatctataccgatgtccccggcatcctgaccacggatccgcgcttggtacccgaagcgcatttgctcgaagagatcacttgcgacgaaatgctagagctggccagcttaggtgcgagtgtacttcaccctcgtgccgtaaaaattgcccgcaactatggcgtccgtttggtcgtgcgcagcagttggacgcaggaaccggggacgggtgtcgttgcgccaccacgccgcagcgatcgctcgttgcaagggctcgaaattggtcgccccgtcgatggcctggcgttagatacggatcaggccaaagtggcattgctgcatgtgcccgatcgccccgggattgctgccagcctgtttggcgaaatggcgcagcgcggcgtcaatgttgatttgatcatccagtcgattcacgaaggcaatagcaacgacatctctttcacggtcagccaagcggatctggagaaggcagaagcgggcaccacccaactgctcgcggatctgggtggcgaacaacagtcggaagccgctgtcgccaaagtcagtatcagcggcgttgggatcgtcggtcgccccggcattgcggctcagatgttcagcgctttggcgcagggcggcatcaacattcagatgatctcgacctctgaagtcaaagtgagctgtgtgattgcggcagcggatcagcaacgggcgatcgcagccttgcaagagagctttgaactggaagaggcgatcgcagccactgctaccgatgcctgtacgaccgatttacctgcagtgcgcggcgtggccctcgatcgcgaccaagcccgtttggcgattctcaatgtgccagatctaccggggatggcggctacgatcttccaaattctggccgatcgccaaatcagcgttgacatgattatccaatcacagcgcggccgcatccacaacggtcagccctgtcgtgacattgcctgcacgctgccaccggctgatgccgagctagcggcggcagcgctacaagcctttgcggatcaacacggctgcagcctggaaattcagactgagattgctaaggtcagcattgtcggttcggggatggtgcaacaacctggggtagcagcacagatgtttgcagccttagccaaccacggcatcaatatccacatgattgccacatcggaaattaaggtcagttgcatcgtggatgccagccaagcggttgaggctttgcaaaccgttcatgcagcttttggtctcgcaagcgatcgccggattgaagtgcctgcctag

SEQ ID NO: 83934 - protein, 597 aa, Synechococcus elongatus PCC 6301
MALIVQKYGGTSVGSVERITAVAQRIAQTVAAGNQVVVVVSAMGHSTDELLKLANGISANPSRRELDMLLATGEQVSIALLSMALHEQGCDAISMTGAQVGIITEAHHSRARILEIDPQRLQSQLDAGRVVVVAGFQGIASSDRTALTEITTLGRGGSDTSAVALAAALNADRCEIYTDVPGILTTDPRLVPEAHLLEEITCDEMLELASLGASVLHPRAVKIARNYGVRLVVRSSWTQEPGTGVVAPPRRSDRSLQGLEIGRPVDGLALDTDQAKVALLHVPDRPGIAASLFGEMAQRGVNVDLIIQSIHEGNSNDISFTVSQADLEKAEAGTTQLLADLGGEQQSEAAVAKVSISGVGIVGRPGIAAQMFSALAQGGINIQMISTSEVKVSCVIAAADQQRAIAALQESFELEEAIAATATDACTTDLPAVRGVALDRDQARLAILNVPDLPGMAATIFQILADRQISVDMIIQSQRGRIHNGQPCRDIACTLPPADAELAAAALQAFADQHGCSLEIQTEIAKVSIVGSGMVQQPGVAAQMFAALANHGINIHMIATSEIKVSCIVDASQAVEALQTVHAAFGLASDRRIEVPA

SEQ ID NO: 83935 - DNA, 1323 bp, Chlamydophila abortus S26/3
  CDS (1)..(1323): transl_table=11
atgcccccagtagtctataaatttggtgggacgagtttaggaaccgccgaaagtatcagaaaggtttatgatattgttcataaagatacgccgtggttcattgttgtcagtgctgtagccggtattacggatcttttggatatgttttgttccgtttctagtgaatatcgggaacatatcattttggatatagcaaacaaacataatgaaatcattcatgatctacaactcaccttctctatagctccttggatggagaagttacaacgttgtatgcataaggaaaaaatatccctgcgtgatcgcgcagaaattcttgctataggagaggacatatcagcctccctattccatgctttttgttgtagtcatgatttttctttagagtttttggaagctagaaccgtgatattaacagacggtgagtatagttgcgcaactcctgacattccgcgtatgcgtgagaattggcatgctctcaatttccgaagtgatgtttgttacattacccagggattcataggagcaaatgctgctggggaaaccacactattgggtcgcgggggtagcgattattccggagctttaattgcagaaatgagtcacgccaaggaagtgcgtatttataccgatgtgaacggtatttataccatggatcctagaattattgaagatgctcaactgattcccgagttgagttttgaagaaatgcagaatcttgccacatttggtgccaagattctttacccaccgatgctttctccttgtgtgcgctctggcatcccgatttttgtcacctcaacttttgatttatctaaaggggggacgtggatctatgctatggataaaattatgagtcatgagccccgtgtaaaggcattgtctttacgtcagcatcagcgtttatggtcgatagactgcagcggttcaagtacggtgggcttcgataagattttatctatactagacacccatcatgttcttcctggattaatcacttctcaagatagcacagtatcctttaccaccgatgatgatgacgtttctgacgatgtgattcgagagctttatgatcagttatcaagcattggcaccgtgcatatgctctatgatctagcgttaatcacaatgatcggttccggattagcttcaacaaaagttgtaacgactgtcacggaaaaattacggcattatccttccccaatcttttgctgttgccaaagctgtatggcattaagcttagtcgttcctgaaaatcttgcaggaaatgttgtagaacaactccataatgattatgttaagcagaagttttctgtagtataa

SEQ ID NO: 83936 - protein, 440 aa, Chlamydophila abortus S26/3
MPPVVYKFGGTSLGTAESIRKVYDIVHKDTPWFIVVSAVAGITDLLDMFCSVSSEYREHIILDIANKHNEIIHDLQLTFSIAPWMEKLQRCMHKEKISLRDRAEILAIGEDISASLFHAFCCSHDFSLEFLEARTVILTDGEYSCATPDIPRMRENWHALNFRSDVCYITQGFIGANAAGETTLLGRGGSDYSGALIAEMSHAKEVRIYTDVNGIYTMDPRIIEDAQLIPELSFEEMQNLATFGAKILYPPMLSPCVRSGIPIFVTSTFDLSKGGTWIYAMDKIMSHEPRVKALSLRQHQRLWSIDCSGSSTVGFDKILSILDTHHVLPGLITSQDSTVSFTTDDDDVSDDVIRELYDQLSSIGTVHMLYDLALITMIGSGLASTKVVTTVTEKLRHYPSPIFCCCQSCMALSLVVPENLAGNVVEQLHNDYVKQKFSVV

SEQ ID NO: 83937 - DNA, 1371 bp, Colwellia psychrerythraea 34H
  CDS (1)..(1371): transl_table=11
gtgaattcagttcaatctacatcatctttaactgttgccaagttcggcggtactagtgttgccgattaccaagctatgcttcgttgcgccaatattattaaaaatgataacagcaatcgtctagtggttgtttcagcgagttcaggcgtgacaaacctgctagttcgcttaagtcagaaaaatgtatctgtcattgagcaaaaggatattgttgaaaatatccgcgctattcaagtcaatattactcagcatttatcaagcgatgttgaagcacagcttaatcaagaaataaacagcttacttgatgaactaactcaacatgcactaacgcagttattacaatactcgactaagacagcagatgccattcttgcctttggtgagcaatttagctcgcgaatttttgctcaagttttacaatctgttgatattccaggtgagtatttcaatgtgcaacaagtgatgaaaaccaatagtttatatggcaaagcggtagtagatcttaatcaattgagtgaacaaagcacacaactgcttgccccaaaactgattgacaaagtgattgttactcagggatttattggtcaagatagccaaggtcatacgactacgctagggcgaggtggatccgattattccgcagcattacttgctgaagctttaaatggcactaatttatctatttggacggatgttgtaggtatctttactaccgacccgcgtattactgaccaagcgcgcgcgattaaagaaattagctttggcgaagcggccgaaatggccacctttggcgcgaaaatattacaccccgcgacactgatccctgcaatgcgccgcaatattccagtttttgttggttcaagtaaagagccagaaaaaggtggtacgcaaattaagcaaaaagttgattcgaatcccacttatcgctccattgcattaagacgtgaacaaacgttagtgacggtaaaaagcccggctatgttacatgctagcggattcttagcaaaagtgtttggcgtattagcgaaacatgagttaagcattgatttgatcactaccagtgaaattagtgtcgctttaacttttgataacccaagtggttcaacgcaatcgttaattactaatgccgtggtggcagaattagagcagttatgtgaagttagcgttgagcatggtttatcgctagttgctgtgattgggaatggtttaacgtgtgctaaaggtattggtcaaagcatttttgaaacgattaatgatgtgaatatccgtttaatttgtcatggcgctagtgccaataacttatgctttttagtgaatgaagatgaggcaaattatgtggttgagaaattacataataccttattcgcttaa

SEQ ID NO: 83938 - protein, 456 aa, Colwellia psychrerythraea 34H
MNSVQSTSSLTVAKFGGTSVADYQAMLRCANIIKNDNSNRLVVVSASSGVTNLLVRLSQKNVSVIEQKDIVENIRAIQVNITQHLSSDVEAQLNQEINSLLDELTQHALTQLLQYSTKTADAILAFGEQFSSRIFAQVLQSVDIPGEYFNVQQVMKTNSLYGKAVVDLNQLSEQSTQLLAPKLIDKVIVTQGFIGQDSQGHTTTLGRGGSDYSAALLAEALNGTNLSIWTDVVGIFTTDPRITDQARAIKEISFGEAAEMATFGAKILHPATLIPAMRRNIPVFVGSSKEPEKGGTQIKQKVDSNPTYRSIALRREQTLVTVKSPAMLHASGFLAKVFGVLAKHELSIDLITTSEISVALTFDNPSGSTQSLITNAVVAELEQLCEVSVEHGLSLVAVIGNGLTCAKGIGQSIFETINDVNIRLICHGASANNLCFLVNEDEANYVVEKLHNTLFA

SEQ ID NO: 83939 - DNA, 1272 bp, Thermobifida fusca YX
  CDS (1)..(1272): transl_table=11
gtggctttgatcgtgcaaaagtacggcgggtcgtccgtcgctgatgcggatgccattaagcgggtagccgaacggatcgtcgctcagaagaaagccggatacgacgtggtcgtcgtggtctccgccatgggcgacaccactgacgagcttctcgaccttgcgaagcaggtgagtccgctcccgccgggccgggagttggacatgctgctgactgccggggagcggatctcgatggccctggttgcgatggctatcgggaacttgggctatgaggcccggtcgttcaccggttcgcaggccggggtgatcaccacgtcgctgcacggcaacgcgaagatcatcgatgtcaccccggggcggatcagggatgcgctcgccgaaggggcgatctgcatcgtcgctggcttccaaggggtgtcgcaggacagcaaggacatcaccacgttgggccgcggtggttcggacactacggctgtggcgcttgctgcggcgctcaacgccgacttgtgcgagatctacaccgacgtcgacggggtgttcactgctgatccgcgtatcgtgccctccgctcgacgcatcccccagatctcctacgaggagatgctggagatggcggcctccggcgccaagatcctgcatctgcgctgcgtggagtatgcgcggcggtacaacattccgctgcacgtgcgctcgtctttcagtcagaagcccggtacctgggtcgtctcggaagttgaggaaaccgaaggcatggaacaaccgatcatctccggcgtggcgcatgaccggagcgaagccaagatcacggttgtgggggtgcccgaccgtgtcggcgaggcagcagcgatcttcaaggcgctggccgacgctgagatcaacgtggacatgatcgtgcagaacgtgtccgcggcttccacgtcgcgtacggacatttctttcactctgcctgccgactcggggcagaacgcgctggccgcgttgaagaagatccaggacaaggtcggtttcgagtcgctgctgtacaacgaccggatcggcaaggtgtcgctgatcggcgcggggatgcgctcctatccgggggtgactgctcggttctttgacgctgtggcccgcgagggcatcaacatcgagatgatttccacttccgagatccgcatctcgatcgtggtggcgcaggacgacgtggacgccgcagtggccgccgcgcaccgtgagttccagttggacgccgaccaggtcgaggccgttgtgtatggaggtaccggccgatga

SEQ ID NO: 83940 - protein, 423 aa, Thermobifida fusca YX
MALIVQKYGGSSVADADAIKRVAERIVAQKKAGYDVVVVVSAMGDTTDELLDLAKQVSPLPPGRELDMLLTAGERISMALVAMAIGNLGYEARSFTGSQAGVITTSLHGNAKIIDVTPGRIRDALAEGAICIVAGFQGVSQDSKDITTLGRGGSDTTAVALAAALNADLCEIYTDVDGVFTADPRIVPSARRIPQISYEEMLEMAASGAKILHLRCVEYARRYNIPLHVRSSFSQKPGTWVVSEVEETEGMEQPIISGVAHDRSEAKITVVGVPDRVGEAAAIFKALADAEINVDMIVQNVSAASTSRTDISFTLPADSGQNALAALKKIQDKVGFESLLYNDRIGKVSLIGAGMRSYPGVTARFFDAVAREGINIEMISTSEIRISIVVAQDDVDAAVAAAHREFQLDADQVEAVVYGGTGR

SEQ ID NO: 83941 - DNA, 1419 bp, Methanosarcina barkeri str. Fusaro
  CDS (1)..(1419): transl_table=11
atgaaaattgtaatgaaatttggaggaacttccgttggggacggaaaaaaaatccgtcatgttgcccagcttctgaagaggtaccgtgaagaaggcaaccagatcgtggtagtaacctcagcactcggtggagtaaccgacgagcttctggagaatgcactctttgcctcaacaaaaggcaaagtctcccttgtgaaagagtttaaaacagaaattacaaacaaacaccacaaggctgtgaaagacgccattgatgaccccacagtcgcaaaagaagttatccaaacacttgacctccgcattgatgagctcgaaaaagccctggttggaatctgctatcttggcgagcttacttcaaggtcaattgattacatttgctcttatggagagcgcctggctgctccgattgtgtcaggagctattcgttcccttggaattgaatcaactgaattcacaggtggagaagcaggaattataacatcatcggattacggaaatgcaaggcctctcgagaaaacttacgaacttgtgaataagaggcttggatgcagacttgagacacagattcttgtagttacgggatttatcggagaaaacgaggaaggaattattaccactctgggaaggagtgggtctgactttacagcttccatactgggcgcagctttaaaagccgatgaaatctggctctggaaagaagtaaacggtatcatgactaccgatccgagaatcgtgcccgaggcaaaaactatcccgcaaatttcttatgccgaagccatggaactttcttacttcggggcaaacatactgcacccacgcacgattgagcctgctatgcgcgaacacattcctgtgcgcgtcaagaatacttttgagccgaagttacctggcacactcgtagttgcggaaaagttccagtgcaagaatgtagtaaaagccgtaagcttaatcaaaaacgtggctctcatcaacatttcaggcgcagagatggtaggggcaatcgggaccgtagcaaggctcttcgcagtacttgcaaagtcaggcgttaatgttattatgatcagccagggctcgtccgaatcaaatatttccttcgtgatcagtgaggcacatgtgaaaactgcattaaaagccctgcatgaagagttcaaccgcggaatcgtaaaagagataacttcagacaaaaatgtctgcgtagttgcagtcgtgggtgcaggtatggcaggaactccaggcgtggcaaaacgggtctttggagcgcttgggaattcacttattaatattatcatgatcagccagggttcttcccagtacaatatctctttcgtagtgcgggaaaacgatgcatttgctgcagtcaagaccctgcatgatgaattcgaattatataacggaaatggaattgaaaaacaactataa

SEQ ID NO: 83942 - protein, 472 aa, Methanosarcina barkeri str. Fusaro
MKIVMKFGGTSVGDGKKIRHVAQLLKRYREEGNQIVVVTSALGGVTDELLENALFASTKGKVSLVKEFKTEITNKHHKAVKDAIDDPTVAKEVIQTLDLRIDELEKALVGICYLGELTSRSIDYICSYGERLAAPIVSGAIRSLGIESTEFTGGEAGIITSSDYGNARPLEKTYELVNKRLGCRLETQILVVTGFIGENEEGIITTLGRSGSDFTASILGAALKADEIWLWKEVNGIMTTDPRIVPEAKTIPQISYAEAMELSYFGANILHPRTIEPAMREHIPVRVKNTFEPKLPGTLVVAEKFQCKNVVKAVSLIKNVALINISGAEMVGAIGTVARLFAVLAKSGVNVIMISQGSSESNISFVISEAHVKTALKALHEEFNRGIVKEITSDKNVCVVAVVGAGMAGTPGVAKRVFGALGNSLINIIMISQGSSQYNISFVVRENDAFAAVKTLHDEFELYNGNGIEKQL

SEQ ID NO: 83943 - DNA, 1353 bp, Streptococcus agalactiae A909
  CDS (1)..(1353): transl_table=11
atgaaagtagtcaaatttggaggaagttctttagcatcttcccaacaattatacaaagtactaaatattatcaaatcagactacactagacggtttgttgtcgtttcagctccagggaaacgctacgaagaagacttaaaaatgacagatgctttgatacaatattatcaaaattatattaacggtaaagatattgttaaagaccaaacttggattatcaatcgttatcaagaaattattagtgatttgtctttaggaagcactattgcagaagaaattactcgctctatagagcagctagcttcacttcccatagaaaataatcagtttttatatgattgttttttagcagccggtgaagataacaacgcaaagttagttgcaacgttttttaatcaaaatgacattcctgcaagatatgttcatccaaacgaagcaggaattattgtaactaaagaaccatgtaatgcacgaattattccaggaagttatgataagattgagaacttatgtctatacaatgaggttcttgttatccctggattttttggagtcacagaagataaccaaatttgtaccttttcaagagggggatctgacattactggatccctaattgcagcaggcataaaagcagacctttatgagaacttcacagatgttgatggtatatttgcagcacatccaggtgtagttaagaaccctcacgctatccctgagcttacttataaagaaatgcgtgaattagcctatgcgggtttttcggttttacatgatgaagctttacttcctgcctatcgtggcagaatccctcttgttattaaaaatacaaataatccccaacagcctggtacaaaaatagttttaaagcatactcgtagtaacatagcagtaactgggatcgcttctgatagccgttttgctagcataaacgtatctaaatacttaatgaatagagaagtaggtttcggccgaaaagtactacaaattttagaggatttaaatattagttttgaacatatgccaactggcatagatgatctatccattgtcttacgtgaaaaagaattgacaccaatcaaagaacaagaaatcttaaattacctaactcgtaaactagaagtagattacgttgacatccaacacaatctatctacaatcgtaattgtaggtgaaaatatgaaaagtcagattggagtcactgcaacagcgacacaagccttatcaagagaaaaaatcaatatcaccatgatatcacaaggttcaagcgaagtctccattatgttcgttataaacagtaaggatgaaaaaagagctattaaagcactatatgaaacattcttccaaaaatag

SEQ ID NO: 83944 - protein, 450 aa, Streptococcus agalactiae A909
MKVVKFGGSSLASSQQLYKVLNIIKSDYTRRFVVVSAPGKRYEEDLKMTDALIQYYQNYINGKDIVKDQTWIINRYQEIISDLSLGSTIAEEITRSIEQLASLPIENNQFLYDCFLAAGEDNNAKLVATFFNQNDIPARYVHPNEAGIIVTKEPCNARIIPGSYDKIENLCLYNEVLVIPGFFGVTEDNQICTFSRGGSDITGSLIAAGIKADLYENFTDVDGIFAAHPGVVKNPHAIPELTYKEMRELAYAGFSVLHDEALLPAYRGRIPLVIKNTNNPQQPGTKIVLKHTRSNIAVTGIASDSRFASINVSKYLMNREVGFGRKVLQILEDLNISFEHMPTGIDDLSIVLREKELTPIKEQEILNYLTRKLEVDYVDIQHNLSTIVIVGENMKSQIGVTATATQALSREKINITMISQGSSEVSIMFVINSKDEKRAIKALYETFFQK

SEQ ID NO: 83945 - DNA, 1242 bp, Pseudomonas fluorescens PfO-1
  CDS (1)..(1242): transl_table=11
atggctttgatcgtacagaaatttggaggcacctcggtcggcactgtcgagagaatcgagcaggtcgccgacaaggttaagaaattccgcgatgccggcgatgacctggtggttgtgctgtctgcaatgagcggcgaaaccaaccgtctgatcgatctggccaagcaaatcagtggcgaagatcaaccggttccgcgcgaactggatgtgatcgtttccacaggtgagcaggtgacgatcgccctgttggccatggcgctgatcaagcgcggtgtgccggcggtgtcgtacaccggcaaccaggtgcggattctgacggacagtgcgcacaataaagcgcgtatcttgcagattgatgaccagaagattcgcggtgacctgaaagccggtcgcgtggtggtggtcgctggtttccagggcgtcgacgagcacggcaacatcacgaccctgggtcgtggcggttccgacaccaccggtgtggcgctggccgctgcgctgaaggctgacgagtgccagatctacaccgacgtcgatggtgtctacaccactgacccgcgtgtggtatcggttgctcagcgtctggacaagatcaccttcgaagagatgctggaaatggccagcctcggttccaaggtgctgcagatccgtgcggtggaattcgccggcaagtacaacgttccgctgcgcgtactgcacagcttcaaggagggtccgggcaccctcattactattgatgaagaggaaaccatggaacagccgatcatttccggcatcgctttcaaccgcgatgaagccaagctgaccatccgtggcgtgccagacaccccgggcgtggcgttcaagattctcggcccgatcagtgccgcgaacatcgaagtcgacatgatcgtgcagaacgtcgcgcacgataacaccaccgacttcaccttcaccgtgcaccgcaacgactaccagtccgcgcaaaccgtgctggaaaacaccgctcgcgagatcggtgcccgtgaagtggtgggcgataccaagattgccaaggtctcgatcgtcggcgtcggcatgcgttcccacgcaggcgtggccagccgcatgtttgaatccctggcaaaagaaagcatcaacatccagatgatctcgacctcggaaatcaaggtttccgtggtgatcgaagagaagtacctggaactggccgtgcgcgccctgcacacggctttcgaactcgacgctccggcccgtcagggcgagtga

SEQ ID NO: 83946 - protein, 413 aa, Pseudomonas fluorescens PfO-1
MALIVQKFGGTSVGTVERIEQVADKVKKFRDAGDDLVVVLSAMSGETNRLIDLAKQISGEDQPVPRELDVIVSTGEQVTIALLAMALIKRGVPAVSYTGNQVRILTDSAHNKARILQIDDQKIRGDLKAGRVVVVAGFQGVDEHGNITTLGRGGSDTTGVALAAALKADECQIYTDVDGVYTTDPRVVSVAQRLDKITFEEMLEMASLGSKVLQIRAVEFAGKYNVPLRVLHSFKEGPGTLITIDEEETMEQPIISGIAFNRDEAKLTIRGVPDTPGVAFKILGPISAANIEVDMIVQNVAHDNTTDFTFTVHRNDYQSAQTVLENTAREIGAREVVGDTKIAKVSIVGVGMRSHAGVASRMFESLAKESINIQMISTSEIKVSVVIEEKYLELAVRALHTAFELDAPARQGE

SEQ ID NO: 83947 - DNA, 1221 bp, Rhodospirillum rubrum ATCC 11170
  CDS (1)..(1221): transl_table=11
atggcgcgcatcgtgatgaaattcggcggaacctccgtcggcgacgtggatcgtatccgcaacgtcgcccggcgggtcaaggccgaggttgacgccggcaatgaggtggcggtggtggtctcggccatgtcgggagagaccaatcgtctggtcggcttctgcgattccatgaccaacatgtacgacgcgcgggaatatgatgccgtggtcgccaccggggaacaggtgaccatcgggcttctggccatcgccttgcaagatatcggcgtcgaggcgcggtcgtggatgggctggcagatcccgatccatacggacgaggcccacggcaaggcccgcatcctgtcgatcgacaccaccgtgctcgaacagcgtctggccagcggtcaggtggcggtggtcgccggtttccaggggctgggaccgaataatcgcgtgaccaccctgggccgtggcggctccgatacctcggccgtcgccctggccgcggcgctgaaggccgatcgttgcgatatctacaccgatgtcgacggcgtctatacgaccgatccgcggattgtgcccaaggcgcggaagcttgacagaattacctatgaggagatgctggagcaggcatccttgggggccaaggtccttcagacccggtcggtggaaatggccatgaagcaccgggttcgggtccgtgtgctgtcaagcttcagcgatgcgcccggaaccctggtatgcgacgaggatgagatcgtggaaaaggaattggtaagcggcattgcttatagtcgcgatgaggccaagatcactctggtcaaggtttccgaccggccgggcgtggcggcgcggatcttcgggcccttggccgacgccaatatcaatgtcgatatgatcgtgcagaacgtgtccgaggacggtcattcgaccgatctcacctttaccttgccgcgcagcgatctcgcccgcgccctcaaggttctggaaggggcgcgcgacgatatcaactatcgcgaactgacgaccagcagcgccgtggtcaaggtttcggtcatcggcgtcggcatgcgcagccatgccggggtcgcccagacgatgttccgggccctttccgaaaaaggcatcaatatccatgtgatctccacctcggagatcaaggtgtcggtgctgatcgccgaggaatacatggaactcgcggtacgcgcgctgcactccgcctatgggctggatgcggcctga

SEQ ID NO: 83948 - protein, 406 aa, Rhodospirillum rubrum ATCC 11170
MARIVMKFGGTSVGDVDRIRNVARRVKAEVDAGNEVAVVVSAMSGETNRLVGFCDSMTNMYDAREYDAVVATGEQVTIGLLAIALQDIGVEARSWMGWQIPIHTDEAHGKARILSIDTTVLEQRLASGQVAVVAGFQGLGPNNRVTTLGRGGSDTSAVALAAALKADRCDIYTDVDGVYTTDPRIVPKARKLDRITYEEMLEQASLGAKVLQTRSVEMAMKHRVRVRVLSSFSDAPGTLVCDEDEIVEKELVSGIAYSRDEAKITLVKVSDRPGVAARIFGPLADANINVDMIVQNVSEDGHSTDLTFTLPRSDLARALKVLEGARDDINYRELTTSSAVVKVSVIGVGMRSHAGVAQTMFRALSEKGINIHVISTSEIKVSVLIAEEYMELAVRALHSAYGLDAA

SEQ ID NO: 83949 - DNA, 1218 bp, Moorella thermoacetica ATCC 39073
  CDS (1)..(1218): transl_table=11
atggccctcatcgtccaaaagtacggcggcacttccgttaacggcccggaacgggtcaaaaacgtagcccgccgggtagtaaatacccgacgcgccgggaacgacgtggtcgttattgtgtcagctccgggcgatatgaccgacgatctcatcgccatggcccacgagatcagccccaacccgccggccagagaaatggacatgcttctggctaccggggagcagacatcgatagccctcctggccatggccatccacgagcttggcgaaccggttatctccctgaccggcccccaggtgggcatcctgaccgacaacgtccattccaaggcgcgcattatggaagtgagctgcgagcgcctgcgccgggaattagaacagggcaagatcgttattgtagccggcttccagggcaagacctgtgaaggcgagataacgaccctgggccggggaggctccgatacaacggccgtggccgtggccgccgccctgaaggccgacgtttgccagatctataccgatgtggacggcgtttatacggccgatccccgggtggtgccggaggccagaaaattaccggttatttcctacgatgaaatgctagaattggcgagtctaggtgcccaggtgctgcaaccccggtcggtagagtttggcaaactcaaccatgtcgtcctcgaggtacgatcaagctttaatgatcatgaaggaaccctggtcaaagaggtgacggaaatggagaggaaaatggtcgtcagcggcgtagccggtgaccgcaacgtagccaggatagccctgcacgacgtccccgaccggccgggcatcgccaggaccctctttgtagccctggcccgagagagcatcaatgttgatatgatcgtccagagcgccatgcgggacgggattaatgatatcgccttcaccgtagggcgtgacgatctccagaaggcggttgaggtaacggaaagggtacgtcaggaaattggtgccagcaaggtgacttctaacgaccgggtggccaaggtatccatcgtcggcgccggtatgatcaccaatcccggcgtggctgccgacatgttcgcctgcctggctgaggaaggcattaatattcacatgatcagtacttcagagatcaaggtatcctgcatcattgacgaagaacacctgacccgggccatgcaagccctgcaccgtcactttaaactggaccgggagtaa

SEQ ID NO: 83950 - protein, 405 aa, Moorella thermoacetica ATCC 39073
MALIVQKYGGTSVNGPERVKNVARRVVNTRRAGNDVVVIVSAPGDMTDDLIAMAHEISPNPPAREMDMLLATGEQTSIALLAMAIHELGEPVISLTGPQVGILTDNVHSKARIMEVSCERLRRELEQGKIVIVAGFQGKTCEGEITTLGRGGSDTTAVAVAAALKADVCQIYTDVDGVYTADPRVVPEARKLPVISYDEMLELASLGAQVLQPRSVEFGKLNHVVLEVRSSFNDHEGTLVKEVTEMERKMVVSGVAGDRNVARIALHDVPDRPGIARTLFVALARESINVDMIVQSAMRDGINDIAFTVGRDDLQKAVEVTERVRQEIGASKVTSNDRVAKVSIVGAGMITNPGVAADMFACLAEEGINIHMISTSEIKVSCIIDEEHLTRAMQALHRHFKLDRE

SEQ ID NO: 83951 - DNA, 1221 bp, Syntrophus aciditrophicus SB
  CDS (1)..(1221): transl_table=11
atggctttagttgttcaaaaatatggtggaacctctgttgccaatctggagaaaatcgaaaatgttgcccggaaagtcatcaaaacaaagaaagagggaaacgacgtcgtggttgtgctttcagccatggcgggtgaaactaatcgactgatcgaactggcccgtcaagctgccgaagattatgatgttcgtgagtatgacaccctgatttcaactggggagcaggttacaatttccctgcttgccatggttctgaaccggatgggctatcccgctcgatcctttctggggcatcaagtcagaatcatgactgatcaggcttacacccaggcaagaattctggatgtggaagatcggcttttgcgcggtgaacttgaaaagggaaagattgcggtggtggcgggattccagggtgtggatcaggataataatatcacgacactgggacggggcggttccgatacgagtgccgtcgcactggccgctgctcttcatgccgatgtttgcgaaatttacacggacgtggacggagtctacacaacggatccgaatatctgcagcaacgcacgactgctcgagaaaatttcctatgacgaaatgcttgaaatggcacgggctggcgcaaaggtattgcagccgcgttccgtcgaactggcgaaaaaatatgaagttcctgtttatgttaaatcttcttttaaagatgaagttggaacgctcgtgacaaaggaggataaggatatggagagagaagtcgtatcgggagttacatatgaccgggatcaggcaaagatcacggtggttcatgttcccgacaaatccggcgttgctgcccggttatttacgcctctggctgaacataacatcgtagtcgatatgatcattcagaacgccagccttgaaggctataccgatctgagttttacagtgtccaggaaagatatcaaggaaacaaagcgtttgattgaggaggcggcgaaggaagtaggcgcttccaaagttgaagtggatgagcaggtggccaaggtatccatcattggtgtgggaatgatcagccattccggtgtagccgccaggatgttcgcagccctggcccaggaggggatcaatattatgatgatcagcacctctgaaatcaaagtctcctgtgttattcaatccaaatacacggaactggcggtcatggttctgcatgaagtcttcgggctggataagaaatcctga

SEQ ID NO: 83952 - protein, 406 aa, Syntrophus aciditrophicus SB
MALVVQKYGGTSVANLEKIENVARKVIKTKKEGNDVVVVLSAMAGETNRLIELARQAAEDYDVREYDTLISTGEQVTISLLAMVLNRMGYPARSFLGHQVRIMTDQAYTQARILDVEDRLLRGELEKGKIAVVAGFQGVDQDNNITTLGRGGSDTSAVALAAALHADVCEIYTDVDGVYTTDPNICSNARLLEKISYDEMLEMARAGAKVLQPRSVELAKKYEVPVYVKSSFKDEVGTLVTKEDKDMEREVVSGVTYDRDQAKITVVHVPDKSGVAARLFTPLAEHNIVVDMIIQNASLEGYTDLSFTVSRKDIKETKRLIEEAAKEVGASKVEVDEQVAKVSIIGVGMISHSGVAARMFAALAQEGINIMMISTSEIKVSCVIQSKYTELAVMVLHEVFGLDKKS

SEQ ID NO: 83953 - DNA, 1269 bp, Frankia sp. CcI3
  CDS (1)..(1269): transl_table=11
atggcgctcttggtcgcgaagttcggtgggtcctccgttgccgacgcggaccgcatcaaacgagtcgctgagcgaatcgtggagaaccggcgggccggcaacgacgtcgtcgtggtggtcagcgcgatgggtgacaccaccgacgaacttctcgatctggccgaacaggtctcgccgcttccgcccgcccgggagctcgacatgctgctcaccgccggtgagcgaatctcgatggcgctgctggccatggcgatcaccaccctcggcgccgaagcccgctcgttcaccggctcccaggccggagtcatcaccgactcggtgcacggcaaggcgcgcatcatcgacgttacccccgggcggatccgcgccgccctggactccggcgccatcgcgatcgtcgcgggcttccagggtgtgagccaggacacgaaggacatcaccacgctcggtcgaggcggctcggacacgaccgcggtggcgctcgctgccgcgctgggagcggacgcctgcgagatctacaccgatgtagacggcgtgttcaccgccgacccgcgcatcgtccccgacgcccgccgcatcgacacgatctcttatgaggagatgctggagatggcggcgtgcggcgcgaaggtcctcatgctgaggtgcgtcgagtacgcccgccgttacagcgtccccgtgcatgtccgatcgtccttctctgcgaagccgggcacgtgggtcaccgagattccggaggaacagctcgtggaacaggccatcatccgtggggtcgcgcacgacctcagcgaggcgaaggtgacggtcgtcggatgcccggacaagcccggggtggcggcggcggtgttccgggccgtggcggacaccgacgtcaacctggacatgatcgttcaggtcggctcggtcgccgggtcggggcggacggatatctcgttcaccctgcccaaggcggatggacgtaccgcgctcaccgcgctcacgaaggtccaaagcgagatcggcttcgagcgcaccctctacgacgaccacatcggcaagctgtcgctgatcggcgcggggatgaagtcgcacccgggggtgtccgcccggttcttcggctccctcgccgacgcgggggtcaacgtcgagatcatctccacctctgagattcgcatctcagtagtggtgcgcgacaccgacctcccgctcgccgtgcgggccgtgcacggcgccttcgacctgggtgacccgaacggcggggcgatcgtgtacgcgggaaccggacgatga

SEQ ID NO: 83954 - protein, 422 aa, Frankia sp. CcI3
MALLVAKFGGSSVADADRIKRVAERIVENRRAGNDVVVVVSAMGDTTDELLDLAEQVSPLPPARELDMLLTAGERISMALLAMAITTLGAEARSFTGSQAGVITDSVHGKARIIDVTPGRIRAALDSGAIAIVAGFQGVSQDTKDITTLGRGGSDTTAVALAAALGADACEIYTDVDGVFTADPRIVPDARRIDTISYEEMLEMAACGAKVLMLRCVEYARRYSVPVHVRSSFSAKPGTWVTEIPEEQLVEQAIIRGVAHDLSEAKVTVVGCPDKPGVAAAVFRAVADTDVNLDMIVQVGSVAGSGRTDISFTLPKADGRTALTALTKVQSEIGFERTLYDDHIGKLSLIGAGMKSHPGVSARFFGSLADAGVNVEIISTSEIRISVVVRDTDLPLAVRAVHGAFDLGDPNGGAIVYAGTGR

SEQ ID NO: 83955 - DNA, 1410 bp, Acidobacteria bacterium Ellin345
  CDS (1)..(1410): transl_table=11
atgattgtcatgaagttcggtggtacctcggtggaagacgcggcggcgatctcgcgggtggcagggatcgtccgtgaccgcgccaaacaaaagccggcggtcgtggtcagtgcgctgggcgggtttacggactcgctggtggcgatgggcaaagccgcggcgaagggtgacctcgcggcggcgctgaagctatggaaggctggacggcaaaggcacctggcggtgctggcgggcgtcaagggcgcaggggcggccgaagagcaggtgcaggaactatttggcaacctgcaggacgtgctcaagggcattgcggcgctcggtgagctttcgccccgcacccaggacaacgtcttgtcgttcggcgagatgttgtcgagcgtgatggtggtagcgctgttcaaagccgctggggtggatgcgatacatattgatgcccgtcaatgtatcgtgaccgacaactgtcataccaaggccgttccgcttctcgatcagaccaattcccgcctccgcagcgctctcaaagaacatctcgcaaagaaccgggtaccagtattgggcggcttcgtcggcgcgaccgaggacggcacgcagacgacgttggggcgcggaggttcagacttttcggcagcgatcgtgggcgcggcgttgggcgcgaagaagattgagatctggaccgatgtcgaaggcatgctgacgaccgatccgcggatttgcaaagatgcgaggcggattgaagtgattggcttcgaagaagcttcggagttggcttacttcggggcgaaggtgctgcatccggcgacgctgattccggcggtcgagtcgaatattccggtgtacgtactgaattcgcgcaatccgaagagcacgggcacctgcatccagcaacacgcaccgcatagtgcgacgaccttccgcgccatcgcgctgaagaagggcacgaagattttgaatatccgcgcgccacggctgctgatcaatcatggcttcctgcggtcgctgttcgaagtgtttgagaagcattcgctctcgccggacctggtaaatacctccgaagtgagcgtttcggtggcgctggatggaacgcgcgatgtgaaggcattggtgagcgatctgaagcggctggggcaagtggatgtggagaacggaaaggccatcgtttgcctggtgggcgataacatccgcgggcgggtgggtatttgcgccgatgtcttcgccgtggtggccaagcatggcgtcaacattcacatggtttcgcagggtgcgtcggagatcaacatcagcttcgtggcggaagaaaacgaggcggtgcgagcggtgaaggcgctgcacgcccacttcttcgaggaagagaaattaacgttcgcagccaagggcgacgaagtttacgccggctgttcgggggtagcataa

SEQ ID NO: 83956 - protein, 469 aa, Acidobacteria bacterium Ellin345
MIVMKFGGTSVEDAAAISRVAGIVRDRAKQKPAVVVSALGGFTDSLVAMGKAAAKGDLAAALKLWKAGRQRHLAVLAGVKGAGAAEEQVQELFGNLQDVLKGIAALGELSPRTQDNVLSFGEMLSSVMVVALFKAAGVDAIHIDARQCIVTDNCHTKAVPLLDQTNSRLRSALKEHLAKNRVPVLGGFVGATEDGTQTTLGRGGSDFSAAIVGAALGAKKIEIWTDVEGMLTTDPRICKDARRIEVIGFEEASELAYFGAKVLHPATLIPAVESNIPVYVLNSRNPKSTGTCIQQHAPHSATTFRAIALKKGTKILNIRAPRLLINHGFLRSLFEVFEKHSLSPDLVNTSEVSVSVALDGTRDVKALVSDLKRLGQVDVENGKAIVCLVGDNIRGRVGICADVFAVVAKHGVNIHMVSQGASEINISFVAEENEAVRAVKALHAHFFEEEKLTFAAKGDEVYAGCSGVA

SEQ ID NO: 83957 - DNA, 1239 bp, Silicibacter sp. TM1040
  CDS (1)..(1239): transl_table=11
atgcccctacttgtgatgaaattcggcggcacatccgtcgccaatctggaccgcattcgccgcgctgccaaacgcgttggtgtcgaagtggccaaaggctatgacgtgatcgtcattgtctccgccatgtccggcaagaccaacgagctggtcggttgggtgggggagacctcgccgctctatgatgcgcgtgaatatgatgcggttgtatcctctggtgagaatgtgaccgcgggcctcatggcgttgacgctgcaagagatggacgtgcccgcgcgcagctggcagggctggcaagtgccgctcaagaccaactcggcccacagccaggcccggatcgaagagatcggcacagagaacatcaaccagaagttcggcgaaggcatgaaagtggccgttgttgcgggctttcaggggatttctcccgaaggtcgcatcaccaccctcgggcgcggcggctctgacaccacagcggtggcttttgcggcggccttcggggcggagcgctgcgatatctacaccgatgtggacggcgtctataccaccgacccgcgcatctgcgaaaaggcacgcaagctcgacaagatcgcctttgaggaaatgctggagctggcatccttgggcgccaaggtgctgcaaacccgctccgtcgagctggcgatgcgctacaaggtgaaactgcgcgtgctctcgagctttgaagaacagtccgacgaggccggaaccctggtctgcgacgaggaggaaatcatggaatccaatgttgttaacggcgttgcctactcgcgggatgaggccaaactgacctgtctttcggtcgcggaccgtccgggcatcgcggcgaccatttttggctgcctctcggatgccggcgtcaacgtcgatatgatcgtgcagaacatctctgaagatgggcgcacggatatgacgttctcttgccccacggatcaggtacagcgcgcggaaatggccctgaacgcctacaaagagaagggcgagctgaactttgctgaactcgtggcggacaccggtgttgcgaagatttcggtggtgggcatcggcatgcgatcgcagtccggtgtggccgccaagatgttcaaggtcctctcggatgagggcatcaacatcaaggtgatcaccacctccgagatcaagatttcggtgctggtggaccgcaaatacatggagctcgccgtgcaggccctgcacgacgcctttgagctcgacaaagccagctga

SEQ ID NO: 83958 - protein, 412 aa, Silicibacter sp. TM1040
MPLLVMKFGGTSVANLDRIRRAAKRVGVEVAKGYDVIVIVSAMSGKTNELVGWVGETSPLYDAREYDAVVSSGENVTAGLMALTLQEMDVPARSWQGWQVPLKTNSAHSQARIEEIGTENINQKFGEGMKVAVVAGFQGISPEGRITTLGRGGSDTTAVAFAAAFGAERCDIYTDVDGVYTTDPRICEKARKLDKIAFEEMLELASLGAKVLQTRSVELAMRYKVKLRVLSSFEEQSDEAGTLVCDEEEIMESNVVNGVAYSRDEAKLTCLSVADRPGIAATIFGCLSDAGVNVDMIVQNISEDGRTDMTFSCPTDQVQRAEMALNAYKEKGELNFAELVADTGVAKISVVGIGMRSQSGVAAKMFKVLSDEGINIKVITTSEIKISVLVDRKYMELAVQALHDAFELDKAS

SEQ ID NO: 83959 - DNA, 2460 bp, Myxococcus xanthus DK 1622; identical to SEQ ID NO: 715
  CDS (1)..(2460): transl_table=11

SEQ ID NO: 83960 - protein, 819 aa, Myxococcus xanthus DK 1622; identical to SEQ ID NO: 716

SEQ ID NO: 83961 - DNA, 1278 bp, Rubrobacter xylanophilus DSM 9941
  CDS (1)..(1278): transl_table=11
gtgtcgagcgcagaacccctggtgatcaagttcggaggcacctcggtcggcgacggcgagggcttcgcccgcgccgcgcggatcacggccggcgcggccgcggagggccgcccggtcgccgcggtggtctcggcgatgagcggcgtgaccgacgccctgctcgccgccgcggccgggaccgcgacggccggcacccgaaccgcccggggtcttgcgcgcgacctccgccgggcgctcggggagcggcacctggcggcggcccggtgcgccgtgagcggggacctcctcccggaggtcgaggcgcgggtgctctctctgctcgaccggctggaggaggaactcgcccgccgcgcgctcccggaggcggagcggagggccgagatagccgtctgcggcgagcggctctcggccgagatcctggccggcgccctgcgcgccgccggcgcgcccgcggccgtggccgccgaccccatagccaccggtcccgggggggaggaggtgctttcggaggagacgcgggcgcgatgtacgcgccacgtgcgcccgctgctcgaggagggcctcgtcgcggtcgtccccggctacgccgggcgctcgccggacggggccgttaccacgctcgggaggggcggctccgacctctccgccaccgcgctcgggcgggggatcggcgcgggggaggtctggatcatgaccgacgtggacggggtgctggacgccgacccgcggctcgtgcccggcgccgccacgctcccccggctctcttaccgggaggcgggcgccttcgccgcgctcggcgccgaggtgctccacccccggaccatggagcccgccgccgcggcgggcatcgaggtgctcgtcagaaacaccttcgacccccactccccggggacccgcatctccgcccgcgagtgcgggcccgggctgagggccctggcgctgcgccgggggctctcggtggagccgctcgaggccctcgacggccgctccggggacgtcttctgcctgctcggggccgacgtctacgggatacgggcgctggtggagcgcccctccggcagcgccgccgccgtcatcggcgtcggctccccgggcgacgaggagctcgcggcggggctgcgccggctgcaccgggccggcatccggccgctgtgggccggcaacaccgccgccggcctcgccttcgtggtggccgggtcccgggccgaggaggcgctgcgggagttgcacgccgcgctcctccgccgggaggccctcgccggggaggccgtggcgtga

SEQ ID NO: 83962 - protein, 425 aa, Rubrobacter xylanophilus DSM 9941
MSSAEPLVIKFGGTSVGDGEGFARAARITAGAAAEGRPVAAVVSAMSGVTDALLAAAAGTATAGTRTARGLARDLRRALGERHLAAARCAVSGDLLPEVEARVLSLLDRLEEELARRALPEAERRAEIAVCGERLSAEILAGALRAAGAPAAVAADPIATGPGGEEVLSEETRARCTRHVRPLLEEGLVAVVPGYAGRSPDGAVTTLGRGGSDLSATALGRGIGAGEVWIMTDVDGVLDADPRLVPGAATLPRLSYREAGAFAALGAEVLHPRTMEPAAAAGIEVLVRNTFDPHSPGTRISARECGPGLRALALRRGLSVEPLEALDGRSGDVFCLLGADVYGIRALVERPSGSAAAVIGVGSPGDEELAAGLRRLHRAGIRPLWAGNTAAGLAFVVAGSRAEEALRELHAALLRREALAGEAVA

SEQ ID NO: 83963 - DNA, 1275 bp, Mesorhizobium sp. BNC1
  CDS (1)..(1275): transl_table=11
atggcgcgcatcgtgatgaaattcggcggaacctccgtcgccgatctcgaccgcatccacaatgtggcgcgccatgtcaaacgcgaggtcgaagctgggcaccaggtggctgtggtggtctcggccatgtcgggcaagacgaatgagcttgtcggctgggtgcagggcatgccgaaggcggccggcgccaaatcgcccttttacgacgcgagagaatatgacaccgtggttgcctcgggcgagcaggtgacgagcggcctgctcgcgattgcgctgcagtcgatcgggatcgacgcgcgctcctggcaggggtggcagatccccatacgcaccgacaacgcccatggtgcggcgcgcatcacggatattgacggcagcgatatcatagagcgcatggagcgcgggcaggtggctgtggtcgccgggttccaggggctcgcccccgataatcgcgtggcgacgctcgggcgcggcgggtctgatacgagcgccgttgcggtcgcagccgcgcttcgcgccgaccgctgcgacatctatacggacgtggacggggtctatacgaccgacccgcgcattgagccgagggcacggcggctggcgaagatctccttcgaggagatgctggagatggcctcgctcggggccaaggtgctgcaggtgcgctcggtggagcttgccatggtgcacaaggtcaggactttcgtaagatcgtcattcgaggacccggacgcgccgggaatgggcgatttcgacaatccgcccggcacgctcatttgcgacgaggaagaaatcgtggaacagcaagtcgtcaccggcattgcctatgccaaggatgaggcacagatctcgctgcgtcgggtggccgaccggccgggtgtctcagccggcattttcggtccgctcgccgaggccaacatcaatgtcgacatgatcgtccagaacgtctcggaggacggctcgaagacagacatcacctttaccgtgcccacgggggatgtggaaaaggcgctcagcgtgctcgagaaggtgcgggggacagtcggattcgacgccatccagtcggaagctgggctggtgaaggtttcggtgatcggcatcggcatgcgcagccacgcgggcgtggcagccaccgcctttagtgccttggccgagaaaggcatcaatattcgcgcgatcaccacgtcggagataaaaatttccatactgatcgacggaccctatgcggaattggccgtccggactttgcattccgtctacggtctggataagcattag

SEQ ID NO: 83964 - protein, 424 aa, Mesorhizobium sp. BNC1
MARIVMKFGGTSVADLDRIHNVARHVKREVEAGHQVAVVVSAMSGKTNELVGWVQGMPKAAGAKSPFYDAREYDTVVASGEQVTSGLLAIALQSIGIDARSWQGWQIPIRTDNAHGAARITDIDGSDIIERMERGQVAVVAGFQGLAPDNRVATLGRGGSDTSAVAVAAALRADRCDIYTDVDGVYTTDPRIEPRARRLAKISFEEMLEMASLGAKVLQVRSVELAMVHKVRTFVRSSFEDPDAPGMGDFDNPPGTLICDEEEIVEQQVVTGIAYAKDEAQISLRRVADRPGVSAGIFGPLAEANINVDMIVQNVSEDGSKTDITFTVPTGDVEKALSVLEKVRGTVGFDAIQSEAGLVKVSVIGIGMRSHAGVAATAFSALAEKGINIRAITTSEIKISILIDGPYAELAVRTLHSVYGLDKH

SEQ ID NO: 83965 - DNA, 2454 bp, Cytophaga hutchinsonii ATCC 33406; identical to SEQ ID NO: 717
  CDS (1)..(2454): transl_table=11

SEQ ID NO: 83966 - protein, 817 aa, Cytophaga hutchinsonii ATCC 33406; identical to SEQ ID NO: 718

SEQ ID NO: 83967 - DNA, 1815 bp, Trichodesmium erythraeum IMS101
  CDS (1)..(1815): transl_table=11
atgctaatagtccaaaaatacggtggcacatcagtagggtctgtggaaaggattaaagccgtggcccaacgtattgctaaaacagctagcgatcgctcagtagtagtagtcgtatcagcgatgggaaaaaccacagataccctagtcaaactagcaaacgacatctcccccaacccctgtcgccgagaaatggatatgttactatctacaggagaacaagttactatcgctctagtgagtatggccttacaagagttgggagtaccagctatttccctcactggagcccaggtaggaatagtcacagaagctcaacattcccgggctcgtattttacatattcaaaccgaacggatagaagaacatctgcaactgggagaggttgtagttgttgcaggtttccaaggtattagtcagactcgccatcaggaaatcacaacattaggtagaggtggttcagatacttccgcagttgctttagctgcagcactccaagcacaaaggtgtgaaatatatacagacgtacccggaattttaacaactgatccccgcatagtacctgaagcacagttaatgtcagaaattacctgtgatgaaatgttggagttggcaagcttaggagcaaaagtgctacatcctagggctgttgaaattgctcgaaattatggaatgccattagtagtcttatcaagttggagcgatgcaccaggtacccgtgtagtttcagcaatacccaaacgtcctgccttgcaagatttagaattaactaaacctgtagacgccgtagaatatgatactaaccaagctggaatttctatgctgcgccttccggatcgccctggtgtggcagcccaattattttctggtattgctctacaaaatatagatgtagatttgattattcaatctattcacgaaagcaatactaatgatattgcgtttaccgtcagtaaagatgtattgaaacaagcagcagcagttgcagatgctatgctgccggctttaggaaaaaatgctcaccccagtttgggggaaccagaagttaaaacagaagagcgacctattgccaaagttagtcttgtgggtgcgggaatgatcgggcgaccagaagtagcagccaaaatgtttgaagctctggcagcagcaggagtcaatataataatgatttccacttcggaggttaaggtcagttgtgtagtagatgcagaagactgtaaaaaaacagttaattctttgtgtcaagcatttgatgtggatgttgcagatatttccagtagctctactgctggtgagtcggaagaagtgcccccaccagtgcgaggggtggctttggatataaagcaagcaagactggcagtgcgtcaagttccggatcatccaggaatggcagccaagatatttggtttgttggcgcagcagaatattagtgtagatatgattattcaatctcaacgctgccacagtgtggatggagttttgactcgtgatattgcttttactgtatctcaaccagagggagaaactgcatatcaaattttggcaaatacagcggctgactttggttggggagaagtggtattggagagtagtatcgcgaaagtgagtgtagttggctccggaatgatttctcatccaggggtagcagcacagatgtttgaggcgttggcagcaagtcaaatcaatattttgatgattaccacttcggaaattaaaattagttgtgtggtagaagaggaggatggtgtgaaggcattgcaagctattcataaagctttttgtttgtctgctaatgaggtagttaaagttccagcttaa

SEQ ID NO: 83968 - protein, 604 aa, Trichodesmium erythraeum IMS101
MLIVQKYGGTSVGSVERIKAVAQRIAKTASDRSVVVVVSAMGKTTDTLVKLANDISPNPCRREMDMLLSTGEQVTIALVSMALQELGVPAISLTGAQVGIVTEAQHSRARILHIQTERIEEHLQLGEVVVVAGFQGISQTRHQEITTLGRGGSDTSAVALAAALQAQRCEIYTDVPGILTTDPRIVPEAQLMSEITCDEMLELASLGAKVLHPRAVEIARNYGMPLVVLSSWSDAPGTRVVSAIPKRPALQDLELTKPVDAVEYDTNQAGISMLRLPDRPGVAAQLFSGIALQNIDVDLIIQSIHESNTNDIAFTVSKDVLKQAAAVADAMLPALGKNAHPSLGEPEVKTEERPIAKVSLVGAGMIGRPEVAAKMFEALAAAGVNIIMISTSEVKVSCVVDAEDCKKTVNSLCQAFDVDVADISSSSTAGESEEVPPPVRGVALDIKQARLAVRQVPDHPGMAAKIFGLLAQQNISVDMIIQSQRCHSVDGVLTRDIAFTVSQPEGETAYQILANTAADFGWGEVVLESSIAKVSVVGSGMISHPGVAAQMFEALAASQINILMITTSEIKISCVVEEEDGVKALQAIHKAFCLSANEVVKVPA

SEQ ID NO: 83969 - DNA, 1257 bp, Shewanella sp. MR-4
  CDS (1)..(1257): transl_table=11
gtgctcgaaaaacgaaagcttagtggtagcaagctttttgtgaagaagtttggtggcacttcggtgggttcgattgaacgcatcgaagtggttgccgagcaaattgcaaagtccgctcacaatggtgagcagcaggttttggtgctttctgcgatggcaggggagaccaacagactatttgcgcttgcggcgcaaatcgatccccgcgcgagtgcgcgggaactcgatatgctggtctcgacgggagagcaaatcagtattgcgttaatggcgatggcgttacaacgtcgcggcattaatgcaagatccctgactggtgatcaagttcaaattcataccaacagtcagtttggtcgagcgagtattgaaagtgtcgatacggcatacttaacgtctttgctgagcgacggcatagtgccgattgtggcgggttttcaaggtatcgatcccaatggggatgtgacaaccttgggtcgcggcggttcggatactaccgcagtggcactcgctgcggcgctaaaagccgatgaatgccaaatctttaccgatgtacccggtgtatttactaccgatccgaatatcgatagtagtgccagacgcctcgatgtgattggttttgatgtgatgctagaaatggcaaaactcggcgccaaggtgttgcatcccgattcggttgaatacgcacaacgttttaaggtgccactgcgggtattatcgagttttgaggcgggccatggaacattgatccaatttggttatgaatcagagctggcgatggccgcttcggtgcaaggcattgcgattaataaggccttagcgaccttaactatcgaaggcttgtttaccagcagcgagcattaccaagcgctgttagcttgcttggcacggcttgagattgatgttgagtttattaccccgctcaagcttaatgaaacctcagcagccgaatgtgtcagttttatgctggccgaagccaaggtggatattttattgcacgagctcgagcttttaagtgaaagtcttgacctaggccaattgattgttgagcgtcaacgtgcaaaagtgtctttagttggcaaaggtttacaggcaaaagttggattattgactaagatgttagatgtattgggtaatgaaacaatccatgctaagttactttcgacatcggagagtaaattgtcaactgtgatcgatgaaagggacttacacaaggcggttcgggcgctgcatcacgccttcgagctaaataaggtgtaa

SEQ ID NO: 83970 - protein, 418 aa, Shewanella sp. MR-4
MLEKRKLSGSKLFVKKFGGTSVGSIERIEVVAEQIAKSAHNGEQQVLVLSAMAGETNRLFALAAQIDPRASARELDMLVSTGEQISIALMAMALQRRGINARSLTGDQVQIHTNSQFGRASIESVDTAYLTSLLSDGIVPIVAGFQGIDPNGDVTTLGRGGSDTTAVALAAALKADECQIFTDVPGVFTTDPNIDSSARRLDVIGFDVMLEMAKLGAKVLHPDSVEYAQRFKVPLRVLSSFEAGHGTLIQFGYESELAMAASVQGIAINKALATLTIEGLFTSSEHYQALLACLARLEIDVEFITPLKLNETSAAECVSFMLAEAKVDILLHELELLSESLDLGQLIVERQRAKVSLVGKGLQAKVGLLTKMLDVLGNETIHAKLLSTSESKLSTVIDERDLHKAVRALHHAFELNKV

SEQ ID NO: 83971 - DNA, 1356 bp, Shewanella sp. MR-7
  CDS (1)..(1356): transl_table=11
atgtctcttgttgtcgcaaaatttggtggtacctcagtcgccgattacggtgcaatgaatcgctgcgccgatatcgtactgggcaatcccgattgccgtttagtggtggttagcgcctccagtggcgtgactaacctcttggttgaactcactcaagagtcgatgaacgacgatggtcgtttacagcgcttaaagcaaatcgcgcaaattcaatacgctatcttagataaactgggtcgccccaacgatgtagctgcggcattggataagttgttaagtcgtatggcggtattgagcgaagcgctagcatcccaacgcagcaaggccaccatggatgagttattgtcccttggtgagcagtgttcgtcggcattatttgcggcggtattgcgcgaaaaaggcgccaactcgagtgccttcgatgtgcgccgagtgctgcgcaccgacagccattttggccgcgccgagccacaggttgagcaaattgcgctcctctcgtctgagcatttactgccgttgttatctgagcaagtgattgtgactcaaggctttattggttcagatgaggccggacaaaccaccacgcttggtcgtggcggtagcgactattctgcggcattgttagccgaagccttaaaagcctctgcggttgagatttggaccgatgtggcggggatttacacgaccgatccgcgccttgcgccaaacgctcatcctattgccgaaatcagttttaacgaagccgccgaaatggcgacttttggtgccaaagtgctgcacccagcgacgatcctgcctgcggtgcgccaacaaattcaagtgtttgtcggttcgagcaaggagcctgaaaagggcggcacttggatccgtcatcaggttgaagatgcgcctgtgtttcgcgctgttgcactgcgccgcgaccaaacgctactcaatttacacagcctgcaaatgttgcatgctcagggcttcttggctgaaacttttgccacactggcaaggcataagatcagtgtggatttgatcaccacttcagaagttaacgtatccctgaccctagataaaaccggctctgattcaagcggccaagggctgttgagcgaagcactgctgcaggaattatcacagcattgccgtgtgcgtgttgaagatagtttggcactggtggcgattatcggtaatcgcattgccaccacagccggtatctgccgccgggtgtttgaagtgctcgagccccacaatgtgcgcatgatctgccaaggtgccagcccgcataacttgtgcgtattggtagccgaatcagaagcggcgcaagtggttaaagcgctgcacgaaaacctgttcgaaggcgcgtaa

SEQ ID NO: 83972 - protein, 451 aa, Shewanella sp. MR-7
MSLVVAKFGGTSVADYGAMNRCADIVLGNPDCRLVVVSASSGVTNLLVELTQESMNDDGRLQRLKQIAQIQYAILDKLGRPNDVAAALDKLLSRMAVLSEALASQRSKATMDELLSLGEQCSSALFAAVLREKGANSSAFDVRRVLRTDSHFGRAEPQVEQIALLSSEHLLPLLSEQVIVTQGFIGSDEAGQTTTLGRGGSDYSAALLAEALKASAVEIWTDVAGIYTTDPRLAPNAHPIAEISFNEAAEMATFGAKVLHPATILPAVRQQIQVFVGSSKEPEKGGTWIRHQVEDAPVFRAVALRRDQTLLNLHSLQMLHAQGFLAETFATLARHKISVDLITTSEVNVSLTLDKTGSDSSGQGLLSEALLQELSQHCRVRVEDSLALVAIIGNRIATTAGICRRVFEVLEPHNVRMICQGASPHNLCVLVAESEAAQVVKALHENLFEGA

SEQ ID NO: 83973 - DNA, 1248 bp, Hyphomonas neptunium ATCC 15444
  CDS (1)..(1248): transl_table=11
atggcgcggacagtactcaaattcggcggcacatcggtcggcgatctcgaccgtattgcgaatgtagcagagatcgtcgctgcgcgcgccgcaaagggcgagaagatggccgtgattgtctcggccatgtcgggcgagaccaacaagctggttgccctggcagacggggcggcaggcaaggatctgccgcgcagcctctatgatgacgagtacgacgtggtcgtcgcctcgggcgagcaggtgaccgcagggcttctcgcgctggcgctgcgccgccgggggctgaaagcccgctcctggctcggctggcagctgcgcctgaagaccgataacagccatggccgcgctcgcatcatgggctttgacgacagctcgctgcccgattccatcgacagcggcgagattgccgtcgtcgccggtttccagggcgtgaccgatgacttccgggtcaccacgctcggccggggcgggtctgacaccagcgccgtggccgtggccgccgcccttggcgcgcaggtgtgtgatatctataccgatgtggacggcgtctacacgaccgacccccgcatcgttcccaaagcccgccgcatcgacaagatttcctatgaggaaatgctcgaaatggcctccctgggcgccaaagtgcttcagacgcgctcggtcgagctggcgatgaaccatggtgtgccggtgcgcgtgctgtccagttttgtaaaacccggcgaggagagccccggcaccctcgtctgttcagaggaagagatcgtggaaaaacaggtcgtcagcggcgttgcctattcgcgggatgaggcgaaggtcaccctctatggcgtgcccgacaagcccggctcctcggccaagatcttctctgcgctcgcccgcgccggcgtcaatgtggacatgatcgtccaggcctcctcgcgcgaagcctccaaggcgaacctcgttttcacctgcaccgaccgcgacagcccgtttgcccgcgagacgctggaaggccttcaggccgaggtcggctatgaccggatcgaggtgatccgcgacgtgtcgaagatctcgatcatcggcgtcggcatgaaaagccataccggcgttgccgaaaagatgttcaccgccctctcggaaaagagcatcaacattgatgtcatcgccacatccgagatcaagatttccgttctgatcgccgcgccctatacagaactggcggtccgggcacttcatacagcattcgggctggacgcagactga

SEQ ID NO: 83974 - protein, 415 aa, Hyphomonas neptunium ATCC 15444
MARTVLKFGGTSVGDLDRIANVAEIVAARAAKGEKMAVIVSAMSGETNKLVALADGAAGKDLPRSLYDDEYDVVVASGEQVTAGLLALALRRRGLKARSWLGWQLRLKTDNSHGRARIMGFDDSSLPDSIDSGEIAVVAGFQGVTDDFRVTTLGRGGSDTSAVAVAAALGAQVCDIYTDVDGVYTTDPRIVPKARRIDKISYEEMLEMASLGAKVLQTRSVELAMNHGVPVRVLSSFVKPGEESPGTLVCSEEEIVEKQVVSGVAYSRDEAKVTLYGVPDKPGSSAKIFSALARAGVNVDMIVQASSREASKANLVFTCTDRDSPFARETLEGLQAEVGYDRIEVIRDVSKISIIGVGMKSHTGVAEKMFTALSEKSINIDVIATSEIKISVLIAAPYTELAVRALHTAFGLDAD

SEQ ID NO: 83975 - DNA, 1275 bp, Rhizobium leguminosarum bv. viciae 3841
  CDS (1)..(1275): transl_table=11
atggcacgcatcgtaatgaaattcggcggcacatccgtcgctgacctggaccgcatcaagaacgtcgcccgccacgtaaaacgcgaagtcgatgccgggcacgaggtggcggtggtcgtctcggccatgtccggcaagaccaatgaactggtcggctgggtccagggcacgccgaaggtgatcggcgccaattctccattttacgatgcgcgggaatatgatgcggtggtcgcatccggcgagcaagtgacatccgggctgctggcgatcgcattgcaggcgatggatatcaatgcgcgttcctggcagggatggcagatcccgatccgcaccgacaatgcgcatggcgcggcacggatcatggagatcgacggctccgacatcgtcaagcggatgggcgaggggcaagtcgccgtcatctccggcttccagggactgggacccgacaatcggatcgcgacgctcggacgcggcggatcggacacttcggccgtcgcaatcgcggcagctgtcaaggcggatcgctgcgatatctataccgatgtcgacggcgtctacacgaccgacccgcgcatcgtgccgaaggcgcgcaggctgaaaaagatcgccttcgaggaaatgctggaaatggcctcgctcggcgccaaggtgctgcaggtgcgctcggtcgagctcgccatggtacacaaggtgcgcaccttcgtgcgctcatcattcgaagatcccgatgctccgggcatgggcgatctactgaacccgcccggaacgctgatttgtgacgaggatgaaatcgtggaacaggaagtagtcaccggcatcgcctatgccaaggatgaggctcagatctcgcttcgccgtcttgccgaccggccgggcgtctccgcggcgatcttcgggccgctcgccgaatcccatatcaatgtcgacatgatcgtccagaatatttccgaggacgggtcgaagaccgacatgaccttcaccgtaccgtcaggcgacgtcgagaaggcgatcaaggtgctcggcgaccataaggagaagatcggctacgatgtcgtgcagaacgaatcggggctggtgaaagtatcggtcatcggcatcggcatgcgcagccatgcgggcgttgccgctaccgcatttcgtgcacttgccgaaaaaggcatcaacatcaaggcgatcaccacctccgagatcaagatttccatcctgatcgacggtccctatgcagaactcgctgtcaggactttgcattcctgctacggtctggataagaattga

SEQ ID NO: 83976 - protein, 424 aa, Rhizobium leguminosarum bv. viciae 3841
MARIVMKFGGTSVADLDRIKNVARHVKREVDAGHEVAVVVSAMSGKTNELVGWVQGTPKVIGANSPFYDAREYDAVVASGEQVTSGLLAIALQAMDINARSWQGWQIPIRTDNAHGAARIMEIDGSDIVKRMGEGQVAVISGFQGLGPDNRIATLGRGGSDTSAVAIAAAVKADRCDIYTDVDGVYTTDPRIVPKARRLKKIAFEEMLEMASLGAKVLQVRSVELAMVHKVRTFVRSSFEDPDAPGMGDLLNPPGTLICDEDEIVEQEVVTGIAYAKDEAQISLRRLADRPGVSAAIFGPLAESHINVDMIVQNISEDGSKTDMTFTVPSGDVEKAIKVLGDHKEKIGYDVVQNESGLVKVSVIGIGMRSHAGVAATAFRALAEKGINIKAITTSEIKISILIDGPYAELAVRTLHSCYGLDKN

SEQ ID NO: 83977 - DNA, 1440 bp, Oenococcus oeni PSU-1
  CDS (1)..(1440): transl_table=11
atgaaaattgtcaaattcggcggaagctcgttatccagtggcgtgcaaatcagaaaagtttttcaaattgtaaaaagcgacccggaaagaagaatcgtcgttgtttcagcaccgggaaaacgttttaagggcgatgttaaaattaccgatcttctcctaaaattggccgaagcaattttaaacgaggaaaaaacagctcaaatttatgaacaaatttttctgcgctatcaggcgattggcgatttctttaaaatcccaaggtcgggaatcgagcagctaaaagaacacctctattcagttgcccaggcagattacccgtccaatgatttttttagagccgctttatcagcccaaggcgaaaatatgtcagcccatctgataacacttatcttcaaacagcttgggctaaaagcccgtcttcttacaccaaaagaagtcggcttaacagtcagcggcgaagcaagaaaagcacagattctgccgggttcctacgcaaaaatcgccaaaacaaaattcaccgataacgaagtacttattttcccgggcttttttggtatcacgaaaaacggtttgattaataccttctcacgtgggggttccgatattaccggagcaattttggctcgcgggtttggagcggatttatacgaaaactttaccgatgttgattcgatttatgccgttaatcctggtttggtagccgatccggcaccaattaaagagatgacctataacgaaatgcgggaactaagttatgcgggttttgccgtctttcacgacgaagcgattctgccggcaattcaaggaaaaattccaatctgcgtaaaaaatacgaaccgtccggaaatgcccggaacaaagattgttccgcgcgacaaggtttcccacaaaaataaaattactgggatcgccagctcgcatcattttcaagccatttatcttcaccgttatttaatcaaccgggaagttggttttaccgctaaaatattaaaaatcatggccgatttgaatatttcctatgagcatatgccttcgggaatcgatgatttgacgattattttggataaaaaccagttaacaaatggtcgcaaagaaaaactgacgcaaagaattaaagacgaaattcaaccggacgatcttcaatggagaaacgactacgcaatcattatggttgtcggcgaaggtttggttaatcgagttggcgcaatggccgacatcgttgatccgatcagagatgccggaatttctttaacgatggttaatcagggatcttcggaaatttccattatgcttggcgttcgtccggaagacgaacaaaaagccgttaaagcaatctataacgatcactttgaaaacggccatcctaaaaaagagcttcaaattccgagagcttcattcaaatcggttagcaaatctttgattgccaatttttttgtatga

SEQ ID NO: 83978 - protein, 479 aa, Oenococcus oeni PSU-1
MKIVKFGGSSLSSGVQIRKVFQIVKSDPERRIVVVSAPGKRFKGDVKITDLLLKLAEAILNEEKTAQIYEQIFLRYQAIGDFFKIPRSGIEQLKEHLYSVAQADYPSNDFFRAALSAQGENMSAHLITLIFKQLGLKARLLTPKEVGLTVSGEARKAQILPGSYAKIAKTKFTDNEVLIFPGFFGITKNGLINTFSRGGSDITGAILARGFGADLYENFTDVDSIYAVNPGLVADPAPIKEMTYNEMRELSYAGFAVFHDEAILPAIQGKIPICVKNTNRPEMPGTKIVPRDKVSHKNKITGIASSHHFQAIYLHRYLINREVGFTAKILKIMADLNISYEHMPSGIDDLTIILDKNQLTNGRKEKLTQRIKDEIQPDDLQWRNDYAIIMVVGEGLVNRVGAMADIVDPIRDAGISLTMVNQGSSEISIMLGVRPEDEQKAVKAIYNDHFENGHPKKELQIPRASFKSVSKSLIANFFV

SEQ ID NO: 83979 - DNA, 1392 bp, Solibacter usitatus Ellin6076
  CDS (1)..(1392): transl_table=11
atgatcgtcatgaagttcggcggcacctccgtggagagcgccgcggctatcgaacgggtggcggggattgtgcgggcgcgggaggcgcggcgaccggtggtggtggtctccgcgatggggaagaccacgaacaagctgctcgcgatcgcgtcggccgcgattgcgggcaagcgtaatgaatacattccccagttgcacgacctgcgcgattatcattcgcgggaggcgcggctggtggtgccgctctcggagcgcgcggaactggatcgcttcctggatgaacatttccaggaattgaccgagctggtgaagggcttggcggtgctgggcgaattgaccccgcgctcgatcgacgcaatctcgagctacggggagcggctctcgagctacatcgtgacgctcgcgttccggcacttcggcatggcggcggagcacatcgattcgcgcgacgtgatcatcacggaccggcggcacacgcaggctgcgccgaattttccggagacgtacgcgcggctgcagaagacgattccgccgctggccgcgcagagcgtggtggtgatgggcgggttcatcggtagcacggaagacggcgtgaccagcacgctggggcgcggcggcagcgatttcacggcggcgatcgtgggcgcgggcattcaggcggaagagatccagatctggacggatgtggatggaatgcttacggcggacccgacgatcctggcgggcggacaccgggtgaagacgatctcgttcgcggaagcggcggagctagcgtacttcggcgcgaaggtgctgcacccggccacggtggtgccggcgatcgagaaaaatatcccggtgatgattctgaattcgcgacggccggaggtccccggaacgcacattacggcgcacacggtgcactgcgagaacgcggtgaaatcgatcgcgtgcaagcgcaaaatcacgacggtgagtattcactcgacgcgcatgctgatggcgcacggcttcctgcatcgcattttcgagattttcgaccgctaccagacgccggtggatatggtggcgacgagtgaagtgagcgtatcgctgaccatcgacaacaccacccatatcgacctggtgctcggcgagttgcggcagttcgcggaggccacggtagagcacgatagcgtgatcgtgtgcctggtaggcgagaatatccgccacacgccgggcgtggcgcggcgcgtattcaactcgctggatggcatcaatatccggatgatcagccagggggcgtcgctgctgaatatcagctttgtgatcgccgagaccgatctggtgaacgcggtgaggctgctgcacgaggaatttttcgcgacgctcgatcccaatgtgttcgagcgcaaagaggctgtgcatgcgtaa

SEQ ID NO: 83980 - protein, 463 aa, Solibacter usitatus Ellin6076
MIVMKFGGTSVESAAAIERVAGIVRAREARRPVVVVSAMGKTTNKLLAIASAAIAGKRNEYIPQLHDLRDYHSREARLVVPLSERAELDRFLDEHFQELTELVKGLAVLGELTPRSIDAISSYGERLSSYIVTLAFRHFGMAAEHIDSRDVIITDRRHTQAAPNFPETYARLQKTIPPLAAQSVVVMGGFIGSTEDGVTSTLGRGGSDFTAAIVGAGIQAEEIQIWTDVDGMLTADPTILAGGHRVKTISFAEAAELAYFGAKVLHPATVVPAIEKNIPVMILNSRRPEVPGTHITAHTVHCENAVKSIACKRKITTVSIHSTRMLMAHGFLHRIFEIFDRYQTPVDMVATSEVSVSLTIDNTTHIDLVLGELRQFAEATVEHDSVIVCLVGENIRHTPGVARRVFNSLDGINIRMISQGASLLNISFVIAETDLVNAVRLLHEEFFATLDPNVFERKEAVHA

SEQ ID NO: 83981 - DNA, 1356 bp, Shewanella sp. ANA-3
  CDS (1)..(1356): transl_table=11
atgtctcttgttgtcgcaaaatttggtggtacctcagtcgccgattacggtgcaatgaatcgctgcgccgatatcgtactgggcaatcccgattgtcgtttagtggtggttagcgcctccagtggcgtgactaacctcttggttgaactcactcaagagtcaatgaacgacgatggtcgtttacagcgcttaaagcaaattgcgcaaattcaatacgctatcttagataaactgggtcgccccaacgacgtagctgcggcattggataagctgttaagccgtatggcggtattgagcgaagcgctagcatcccagcgcagcaaggccaccatggatgagttattgtcccttggcgagcagtgctcgtcggcattatttgcggcggtattgcgggaaaaaggcgctaactcgagtgccttcgatgtgcgcagagtgctgcgcaccgacagccattttggccgcgccgagccacaggttgagcaaattgccattctctcacgtgagcatttactgccgctgttatctgaacaagtgattgtgactcaaggctttattggctcagatgaggcagggcaaaccaccacgcttggccgtggcggtagcgactattctgcggcactgttagccgaagccttaaaagcctctgcggttgagatttggaccgatgtggccgggatttacacgaccgatccgcgccttgcgccaaacgcgcaccctattgccgaaatcagttttaacgaagccgccgaaatggcgactttcggtgctaaagtgctgcatcctgcgacgattctgcctgctgtgcgccagcaaattcaagtgtttgtcggctcgagtaaggagcctgaaaagggcggtacttggatccgtcatcaggttgaagatgcgcccgtgtttcgcgcggttgcgctgcgccgcgaccaaacgctactcaatttacacagcctgcaaatgttgcatgcacagggcttcttggctgaaacctttgccaccttggcaaggcataagatcagtgtggacttgatcaccacctccgaagttaacgtatcgctcactctagataaaactggctctgattcgagcggccaggggctattgagcgaagcgctgttgcaggaattatcacagcattgccgcgtgcgtgttgaagatggtttagcactggtggcgattatcggtaaccgcattgccaccacagcgggcatttgtcgccgagtgtttgaagtgctcgagccccacaatgtgcgcatgatctgccaaggtgccagcccacataacttgtgcgtattggtagccgaatctgaagcggcgcaagtggttaaagcgctgcacgaaaacctgttcgaaggtgcgtaa

SEQ ID NO: 83982 - protein, 451 aa, Shewanella sp. ANA-3
MSLVVAKFGGTSVADYGAMNRCADIVLGNPDCRLVVVSASSGVTNLLVELTQESMNDDGRLQRLKQIAQIQYAILDKLGRPNDVAAALDKLLSRMAVLSEALASQRSKATMDELLSLGEQCSSALFAAVLREKGANSSAFDVRRVLRTDSHFGRAEPQVEQIAILSREHLLPLLSEQVIVTQGFIGSDEAGQTTTLGRGGSDYSAALLAEALKASAVEIWTDVAGIYTTDPRLAPNAHPIAEISFNEAAEMATFGAKVLHPATILPAVRQQIQVFVGSSKEPEKGGTWIRHQVEDAPVFRAVALRRDQTLLNLHSLQMLHAQGFLAETFATLARHKISVDLITTSEVNVSLTLDKTGSDSSGQGLLSEALLQELSQHCRVRVEDGLALVAIIGNRIATTAGICRRVFEVLEPHNVRMICQGASPHNLCVLVAESEAAQVVKALHENLFEGA

SEQ ID NO: 83983 - DNA, 1215 bp, Listeria monocytogenes str. 1/2a F6854
  CDS (1)..(1215): transl_table=11
ttgggactagtcgtattaaaatttggtggaacatctgtgagcacggtggataaaatcgggaaaacagcagatcaagccatttatgaaaaaaaacaaggaaataaagtcatcgtcgtcgtttccgcaatggggaaatcaaccgacaaattagtcgcaatggcggaagaaattagcgaggcgccagataaacgcgaaatggatatgctactttctaccggtgaacaaatcacaattgctttacttgcgatgacattaaaagaaaaagggcacgatgctatatcctatacaggatggcaagcgggaattgaaacagaagccgtacatagtaatgctagaattgccgatattgatagcgcttgtattgaatctgcgcttgatgcgggacaaattgttgttgtagcaggttttcaaggtttcacgacagatggtgaaattactacattaggacgaggtggatcagacacaaccgccgtcgccatcgcctcagctctaaacgccgaaaaatgcgcgatttgtacggatgtagtcggtgtatttacaacagatccacgctacgtgaaaaaagcccaaaaactggagcaaatcacctatgatgaaatgctagaattagctaatctcggtgccggcgttttacatccacgctccgttgaatatgccaaaaatttccgaattccgcttgaagtcagagcgagtcacgaacaagtaccaggaacaatgatcgaggaggatttaacaatggaaaataccaaagtagtccgtggaattgcttttgaagaccaaatcacccgtgtaactatccactggaaacaaaaagaagcaatgcgagtttctaaagtctttacaaaattagcagaaaataatattgatgtagatattattatccaaggaattactggactaggtcacggtaatctatccttcactatcaaaacaagtgcactgttagccacactagcagttttagaagaaagcaaagaattacttcaaatcgaaaagctagagtccgagcaagaattagcgaaagtatctatagttggctctggaatggtaagtaatccaggtgtagctgcacaaatgtttgaagctttaacagaaaataatattccaataaaaatgattagcacatccgaaatcaaagtttctactgtcgtaccagctcgtaaaatggtcgaagcagcccaagttttacacgaccaatttgaactcgataaataa

SEQ ID NO: 83984 - protein, 404 aa, Listeria monocytogenes str. 1/2a F6854
MGLVVLKFGGTSVSTVDKIGKTADQAIYEKKQGNKVIVVVSAMGKSTDKLVAMAEEISEAPDKREMDMLLSTGEQITIALLAMTLKEKGHDAISYTGWQAGIETEAVHSNARIADIDSACIESALDAGQIVVVAGFQGFTTDGEITTLGRGGSDTTAVAIASALNAEKCAICTDVVGVFTTDPRYVKKAQKLEQITYDEMLELANLGAGVLHPRSVEYAKNFRIPLEVRASHEQVPGTMIEEDLTMENTKVVRGIAFEDQITRVTIHWKQKEAMRVSKVFTKLAENNIDVDIIIQGITGLGHGNLSFTIKTSALLATLAVLEESKELLQIEKLESEQELAKVSIVGSGMVSNPGVAAQMFEALTENNIPIKMISTSEIKVSTVVPARKMVEAAQVLHDQFELDK

SEQ ID NO: 83985 - DNA, 1407 bp, Prosthecochloris aestuarii DSM 271
  CDS (1)..(1407): transl_table=11
atgaaattcggggggacgtctgtcgggacagcttcggctatgcggcgggcaatggcgatcgttgctgatgtaaagaagaagaagagcgctccgcttgttgtactgagcgcctgcagcggaatgaccaatcttctcatcgagattgccggagcggcgggagagggtcgtcttggcgacgctcttgctatggctgaagaggtcaggctgcatcatctctccattgccggggaacttgttaaagatccggttcgaagcgcggcacttcaggaaaaaatcgaagggtatgtcaatgagcttgaaatgcttgtcaagggagtcgatattgtcggtgaactgacggcccgatcgtttgataccttctgctcattcggagagctgttgtcgacgaccgttttttcagaggcgatgctcgatgccggtcatgcttgttcctgggtggatgcccggagcgtgatgatcaccgacgacaatttcggtaccgcacgccctctggagggccgctgtgaagagaacgtgcactcagtgatcaagccgctgctcgatgcaggaactatcgttgttacccagggttttatcggagcttcggctgacggaaaaacgacgactatgggcagaggtggatcggactttacagctgcgcttctcggggcatggcttccctctgaccagattcagatatggaccgatgtggatggtgtgatgacctgtgatccgagaattgttcctcaggcacgaagtatacgggtgctgaccttttcagaggcggccgaacttgcttatcttggtgctaaggttctccatccggatacgatcgctcctgcggtgaagcagaatattccggtctatgtgcttaattccctgcatccggatgcgaaaggtacggttattaccaatgaccctgatattctggacggtatgagctatggcggacttgtcaagtcgattgcggtcaagaagggacagtgcattgtcaacttccgttctaacaggatgcttggccgtcacggtttcctgatagagttttttaatgtttttgcccgtgccggagtttctgttgaaatgatttcaaccagcgaagtgtcggtttctctgaccgtgagcgatactgcggctgttgacggactggtccgtgaactggcgggtatgggggaggttgaactggagcacaatgtcgccacagtgagcgttgttggtgataatctcagaatgtcgagaggtgttgccggacgtattttcagcgcgctcaaggatgtcaacatccggatgatctcccagggggcatcggaaatcaatgtcggctttgttgtcgaagagcgggaggttccgaaagctgttgaaaatctgcatcatgagtttttctctcatgacgatacaagaggtatttttgagacgccggcaggaaagtga

SEQ ID NO: 83986 - protein, 468 aa, Prosthecochloris aestuarii DSM 271
MKFGGTSVGTASAMRRAMAIVADVKKKKSAPLVVLSACSGMTNLLIEIAGAAGEGRLGDALAMAEEVRLHHLSIAGELVKDPVRSAALQEKIEGYVNELEMLVKGVDIVGELTARSFDTFCSFGELLSTTVFSEAMLDAGHACSWVDARSVMITDDNFGTARPLEGRCEENVHSVIKPLLDAGTIVVTQGFIGASADGKTTTMGRGGSDFTAALLGAWLPSDQIQIWTDVDGVMTCDPRIVPQARSIRVLTFSEAAELAYLGAKVLHPDTIAPAVKQNIPVYVLNSLHPDAKGTVITNDPDILDGMSYGGLVKSIAVKKGQCIVNFRSNRMLGRHGFLIEFFNVFARAGVSVEMISTSEVSVSLTVSDTAAVDGLVRELAGMGEVELEHNVATVSVVGDNLRMSRGVAGRIFSALKDVNIRMISQGASEINVGFVVEEREVPKAVENLHHEFFSHDDTRGIFETPAGK

SEQ ID NO: 83987 - DNA, 1341 bp, Kineococcus radiotolerans SRS30216
  CDS (1)..(1341): transl_table=11
gtgagcacggccgggagcacggccccccgttccgtagaatcgctcgtcgtggctctcgtggtgcagaagttcggcggttcctcggtcgctgatgccgacggcatcaagcgcgtcgcgaagcgcatcgccgcgacgaagcgcgccggtcacgaggtcgtcgtcgtggtctcggcgatgggcgacaccaccgacgagctcatcgacctcgccgagcaggtcagcccgatgccgcccgcgcgcgagctggacatgctgctgacctccggcgagcggatctcgatggccgtcctcgccatggcgatctcgaacctcgggctggaggcgcgctccttcaccggctcccaggccggggtcatcaccgactcctcgcacgggcgcgcccgcatcatcgacgtcacccccggccgcatccgctcggcgctggacgagggcgcgatcgcgatcgtcgccgggttccagggcgtcagccaggacaccaaggacatcaccaccctgggccgcggcggctcggacaccaccgccgtcgcgctggccgcggccttgaaggccgacgtctgcgagatctacaccgacgtcgacggcgtgttcaccgccgacccgcggatcgtgccgacggcgcgcaagatcaaccggatcgcgaccgaggagatgctggagatggccgccaacggcgccaagatcctcatgctccgctgcgtcgagtacgcccggaactacgacctcccgatccacgtgcgcagctcgttcagcccgcacgaggggacgtgggtcaccgacttccccatccccgccgctctcagctcgcacagcccggaggaacccgtggaacagccgatcatctccggtgtcgcgcacgaccgcagcgaagccaagatcaccgtcgtgggggtcccggacaaccccggtactgcggccgccatcttcaaggccgtcgccgaggccgagatcaacatcgacatgatcgtgcagaacgtcgcggccggggcctcgggccgcacggacatctccttcacgctgcccaaggccgagggcgcgacggcgatcgcggcgctggacaaggcgcaggccgcgatcggcttcgagcgcgtcgagtacgacgaccagatcggcaaggtctcgctcatcggcgtcgggatgcgctcgcacccgggcgtctcggcgacgttcttcgacgcgctgggcagcaaggccatcaacatggagatgatctcgacctccgagatccgcatctcggtggtcacccgtctcgaccagctcgacgacgctgtgcgcgcgatccacaccgcgttcggcctggacaccgaagcagaagccgtggtctacggagggaccggacgatga

SEQ ID NO: 83988 - protein, 446 aa, Kineococcus radiotolerans SRS30216
MSTAGSTAPRSVESLVVALVVQKFGGSSVADADGIKRVAKRIAATKRAGHEVVVVVSAMGDTTDELIDLAEQVSPMPPARELDMLLTSGERISMAVLAMAISNLGLEARSFTGSQAGVITDSSHGRARIIDVTPGRIRSALDEGAIAIVAGFQGVSQDTKDITTLGRGGSDTTAVALAAALKADVCEIYTDVDGVFTADPRIVPTARKINRIATEEMLEMAANGAKILMLRCVEYARNYDLPIHVRSSFSPHEGTWVTDFPIPAALSSHSPEEPVEQPIISGVAHDRSEAKITVVGVPDNPGTAAAIFKAVAEAEINIDMIVQNVAAGASGRTDISFTLPKAEGATAIAALDKAQAAIGFERVEYDDQIGKVSLIGVGMRSHPGVSATFFDALGSKAINMEMISTSEIRISVVTRLDQLDDAVRAIHTAFGLDTEAEAVVYGGTGR

SEQ ID NO: 83989 - DNA, 2445 bp, Croceibacter atlanticus HTCC2559; identical to SEQ ID NO: 737
  CDS (1)..(2445): transl_table=11

SEQ ID NO: 83990 - protein, 814 aa, Croceibacter atlanticus HTCC2559; identical to SEQ ID NO: 738

SEQ ID NO: 83991 - DNA, 1236 bp, Oceanicola batsensis HTCC2597
  CDS (1)..(1236): transl_table=11
atgcccgttctcgtgatgaaattcggcggcacctcggtcgccacgctggaccgcatccgccgcgccgccaaacgggtcggcgtcgaggtggccaaaggctatgacgtgatcgtcatcgtctcggccatggcgggcaagaccaacgaactcgtcggctgggtcggcgagacgtctaaattctacgacgcgcgcgaatacgacgccgtcgtctcgtcgggcgagaacgtgaccgccgggctgatggcgctgacgctgcaggaaatggacgtgccggcgcggtcctggcagggctggcaggtgccgctcaggaccaactccgcccattcctcggcccggatcgaggagatccctaccgagaacatcgcgggcaagttcgccgaggggatgaaggtggccgtggtcgcggggttccagggcgtctcgcccgagggacggatcaccacgctcggccgtggcggttctgacaccaccgccgtcgccttcgccgccgccttcggtgccgagcgctgcgacatctacaccgacgtggacggcgtctacacgaccgacccccgggtcagcggcaaggcgcgcaagctcgaccggatcgccttcgaggagatgctcgagcttgcctcgctcggcgccaaggtgctgcagacccggtccgtggaactcgccatgcggttcggcgtgcgtctgcgggtgctgtcgtccttcgaggaacaatctgatgaagccggcaccatcgtctgtgccgaggaggatatcatggaaaatcgcccggtctccggcatcgcctattcccgcgaggaagccaagatgacgctgatctcggtcgcggaccgccccggcatcgccgccgcgatcttcggaccgctcgccgaggcggggatcaacgtggacatgatcgtccagaacatctcggaagaggggcggaccgacatgaccttctcctgccccgtcgatcaggtcgcgcgggcggacaaggcgctgaacgcggcaaaggaccggggcgacatcaatttccacgatctggtggcggataccgatgtcgccaaggtctccgccgtcggcatcggcatgcggtcgcagtcgggcgtcgcggcgcagatgttcaagacgctctcggacgagggcatcaacattaaggtgatcgcgacctccgagatcaagatctcggtgctgatcgaccgcaagtacatggaactggcggtccaggccctgcacgacgcgttcgagctggaaaaggcctga

SEQ ID NO: 83992 - protein, 411 aa, Oceanicola batsensis HTCC2597
MPVLVMKFGGTSVATLDRIRRAAKRVGVEVAKGYDVIVIVSAMAGKTNELVGWVGETSKFYDAREYDAVVSSGENVTAGLMALTLQEMDVPARSWQGWQVPLRTNSAHSSARIEEIPTENIAGKFAEGMKVAVVAGFQGVSPEGRITTLGRGGSDTTAVAFAAAFGAERCDIYTDVDGVYTTDPRVSGKARKLDRIAFEEMLELASLGAKVLQTRSVELAMRFGVRLRVLSSFEEQSDEAGTIVCAEEDIMENRPVSGIAYSREEAKMTLISVADRPGIAAAIFGPLAEAGINVDMIVQNISEEGRTDMTFSCPVDQVARADKALNAAKDRGDINFHDLVADTDVAKVSAVGIGMRSQSGVAAQMFKTLSDEGINIKVIATSEIKISVLIDRKYMELAVQALHDAFELEKA

SEQ ID NO: 83993 - DNA, 1347 bp, Pseudoalteromonas tunicata D2
  CDS (1)..(1347): transl_table=11
atgagttcatcttttattgttgccaagtttggtggcacaagtttagccgattttgacgccatgtttcgttgtgcgcaaatcattcatgacgataacaatgtccgtgttgttgcagtaagcgcaagcgcgggtgtgaccaaccatttagttgccttaagtcataaagacatcagtgacgcagtgcgccaaagtcatattgatggtgtgttagctattcaaaataatattctggcaaaattaacccttgatgccgatttagccactttatttagccaaaccttggctgactttgaacaatgtgcagccttaacgagcactagcgagcagcataacgatgaattactgagctttggcgagcgtttatcatcatgtttgttcacccaagtattgcgtgatttaggaataaaagctgaacgatttgatgtacgtagcgtacttaaaaccgatgcacattttggtaaagcaacaccaaatgtagcgcagacacgcgctgcagctcttgaacatttagtgccgttattaaacgaaaccgtagtggtaactcaaggctttatcggttctgatcagcatggtcgtacaacgacgttaggccgtggaggttctgattatagtgcagcattattagccgaagcgattgatgcctgtagtgtacatatttggactgatgtagttggtatttttagtaccgacccacgtttatgccaaaaggcgaaaccgataccaaaactgagctttgatgaagctgctgaaatggcgacttttggcgccaaagtgttgcatcctgcgactattttgcctgcaagccgtgccgggatcagcgtttttgttggttcaagccgcgccccagagcaaggtggtacttggattgagaaagaaaagtcgcagcatcctggaattcgtgccgttactcagcgtaaaaatcaaattctactgaccttaaaaagccctgaaatgttgcttgccagcggctttttagcccgtgtatttaccattttatctgaatacaatatttcggttgatttagtcacgacatctgaaattagtgttgctctgaccctcgataacgcgccaaatgctagccgcccagagctagatcaggcatgtcttcagcgcttaagtgaattttgccatgtgacggttgaaaacaacttaacactcgtggcactagtaggttctgagattcaattacgtcaacatgaaatgaacttaatgcaagttttggctgattttaatatccgcatgatttgccacggtgccagcaaacataacctttgctttttagtcgagcaaagtgaatcagatgcggttgtacagtccattcaccgtcgcttgcttgaagtgtgttaa

SEQ ID NO: 83994 - protein, 448 aa, Pseudoalteromonas tunicata D2
MSSSFIVAKFGGTSLADFDAMFRCAQIIHDDNNVRVVAVSASAGVTNHLVALSHKDISDAVRQSHIDGVLAIQNNILAKLTLDADLATLFSQTLADFEQCAALTSTSEQHNDELLSFGERLSSCLFTQVLRDLGIKAERFDVRSVLKTDAHFGKATPNVAQTRAAALEHLVPLLNETVVVTQGFIGSDQHGRTTTLGRGGSDYSAALLAEAIDACSVHIWTDVVGIFSTDPRLCQKAKPIPKLSFDEAAEMATFGAKVLHPATILPASRAGISVFVGSSRAPEQGGTWIEKEKSQHPGIRAVTQRKNQILLTLKSPEMLLASGFLARVFTILSEYNISVDLVTTSEISVALTLDNAPNASRPELDQACLQRLSEFCHVTVENNLTLVALVGSEIQLRQHEMNLMQVLADFNIRMICHGASKHNLCFLVEQSESDAVVQSIHRRLLEVC

SEQ ID NO: 83995 - DNA, 1371 bp, Photobacterium sp. SKA34
  CDS (1)..(1371): transl_table=11
atggacaaggctacaacacatttagactcactaactgtcgcaaaatttggcggtactagtgttgctgattacagtgcaatgagccgtagtgctgcaattgttactgctaatccagaaactaaaattgtgttaatcagcgcctgctctggcgttactaatattctggtagaacttgccaatggcgtgagcgattcaacaacccgtcaacagcgcattcagacactgacccaaacccaccaagatgttcttgagcaacttcagcatccagaaaatattcaagatgctatttacggcctacttgataacatcgcaacccttgctgaacatgcggcatcagcaacctcagcacaattgactgatcaaatcgttagccatggcgagctgctttcaacccacctttttagtcaaatattagtcgagctaaacgcccctgctgtacgtgtagatattcgtcccatcatgcgtactgatgatcaatttggtaaagcgatcccacagccagacacaattaagcaattagcgactgagcaattattaccactattagacaataatatcgtggtatcacagggctttattggatcaaatagccaaggtgttacgacaacacttggtcgtgggggcagtgactatagtgcagccttaatcgcagaagccgtaaatgctagtacattagaaatttggactgatgtaccgggtctatatacaaccgacccacgtattacatcagccgcgaaaccgatcaaagagatcagctttagtgaagcctctgaaatggcaaactttggcgcaaaaattttacacccatcaaccctagtaccagctgttcgtcaacagatcccagtatttgttggttcatcaaaagcaccagctcaaggtggtacttggatccgacaatctgttgaagatgcgccactatttagagcgcttgcattacgtgccaaccaaaccatggtgacacttactagcttaaatatgttccatgcttatggctttttagccgaagtctttcgtatcttggctgaacataaaatctcagttgatctcatcacaacttcagaggtcagcgtttcacttaccttagatcaaaccgatactggtggcggtgcgccaactcttccgcttcaagtcgttgaagaattaagtcaattatgtgtggttgacgtcgagcaagggctatcactggttgcacttatcggtaaccaaatgagtgacactaaagggtctgcaaaagatatctttggcgcactagaagatcataacctacgtatgatttgctacggtgccagcccacataatttatgtttcttaattaatgaagatgaagctaaagatgtggttcgcacactacacgcatctttattggagtaa

SEQ ID NO: 83996 - protein, 456 aa, Photobacterium sp. SKA34
MDKATTHLDSLTVAKFGGTSVADYSAMSRSAAIVTANPETKIVLISACSGVTNILVELANGVSDSTTRQQRIQTLTQTHQDVLEQLQHPENIQDAIYGLLDNIATLAEHAASATSAQLTDQIVSHGELLSTHLFSQILVELNAPAVRVDIRPIMRTDDQFGKAIPQPDTIKQLATEQLLPLLDNNIVVSQGFIGSNSQGVTTTLGRGGSDYSAALIAEAVNASTLEIWTDVPGLYTTDPRITSAAKPIKEISFSEASEMANFGAKILHPSTLVPAVRQQIPVFVGSSKAPAQGGTWIRQSVEDAPLFRALALRANQTMVTLTSLNMFHAYGFLAEVFRILAEHKISVDLITTSEVSVSLTLDQTDTGGGAPTLPLQVVEELSQLCVVDVEQGLSLVALIGNQMSDTKGSAKDIFGALEDHNLRMICYGASPHNLCFLINEDEAKDVVRTLHASLLE

SEQ ID NO: 83997 - DNA, 1260 bp, Xanthobacter autotrophicus Py2
  CDS (1)..(1260): transl_table=11
atggctcggctggtgatgaagttcggcggcacctcggtcgccaatatcgagcgcatccgcaatgtggcgcgccatgtgaagcgcgaagtcgaggccggctaccaggtcgcggtggtggtctccgccatgtcgggcaagaccaacgaactggtcggctggtgcaaggatgcctccgccctctacgacccgcgcgaatatgacgcggtggtggcttcgggcgagcaggtgacgagcgggctcctcgccatcgtgctccaggaaatgggcctctccgcccggtcctggcagggctggcagctgcccatttccaccgacgatgcccacggctccgcccgcatcctcgacatcgacagcgagaagctcggcgccgccatcgacggcggccaggtggcggtgatcgccggtttccagggcattcacctgcccaccggccgcctgaccaccctcggccggggcggctcggacacctcggcggtggcggtggcggcggcgctgaaggccgagcgctgcgacatctacaccgatgtggacggggtctacaccaccgacccgcgcgtggtgcccaaggctcgccgcctcgaccgcatcgccttcgaggagatgctggaaatggcgtctctcggggccaaggtgctgcaggtgcgctcggtggagcttgccatggtgcataatgtgcgcaccttcgtgcgctcgagccttgtggatcccgacgcccccgagacggcgaacgtggaaaaggccggtacgctcatctgcgacgaggaggagatcgtggcaaaccagatggaatcgcaggtggtcaccggcatcgccttctccaaggacgaagcccaggtctccatccgccgggtcgccgacaagccgggcatcgccgccgccgtgttcgggcctttggccgatgcccacatcaatgtggacatgatcgttcagaacgtgtcggcggatggcttcaccgacatcaccttcaccgttcccaccgccgatttcgagcgcgccaaggcggtgatcgagaaggcgcgggacaccatcgcccaccaggtggtggaaggcgccaccgacgtgacgaaggtgtcggtcatcggcatcggcatgcgctcccacgccggcgttgcggcgcaggcgttccaggcgctggcaggcaagggaatcaacatccgggccatcaccacgtcggagatcaagatctcgttcctgatcgatgcggcatataccgaacttgcggttcggactctccattcgctatacgggctggacagctga

SEQ ID NO: 83998 - protein, 419 aa, Xanthobacter autotrophicus Py2
MARLVMKFGGTSVANIERIRNVARHVKREVEAGYQVAVVVSAMSGKTNELVGWCKDASALYDPREYDAVVASGEQVTSGLLAIVLQEMGLSARSWQGWQLPISTDDAHGSARILDIDSEKLGAAIDGGQVAVIAGFQGIHLPTGRLTTLGRGGSDTSAVAVAAALKAERCDIYTDVDGVYTTDPRVVPKARRLDRIAFEEMLEMASLGAKVLQVRSVELAMVHNVRTFVRSSLVDPDAPETANVEKAGTLICDEEEIVANQMESQVVTGIAFSKDEAQVSIRRVADKPGIAAAVFGPLADAHINVDMIVQNVSADGFTDITFTVPTADFERAKAVIEKARDTIAHQVVEGATDVTKVSVIGIGMRSHAGVAAQAFQALAGKGINIRAITTSEIKISFLIDAAYTELAVRTLHSLYGLDS

SEQ ID NO: 83999 - DNA, 1338 bp, Flavobacteria bacterium BBFL7
  CDS (1)..(1338): transl_table=11
atgctagttttaaaatttggtggtacttcagtaggttctgtagaaaacatgactcatgttaaaaacatcattaatgatggtacaaagaaagttgtggtactatctgccatgtctggtactacaaatgctttggtagaaatatctgaacatatacgtttaaaagaaagggattctgcacatgttcttatacagcaactggctagtagttatcaaaatactatagagcaattattaaacgatagtgctcttattaacgaatctcaagaatacgtcaataaagtttttgcaggcttaatagagcttgttaactcagaacataccacattgatttataatcaaatagttgcgcaaggagagttattgtctacctttctattcagtagatttttaatgcaagaaggtataaacgctgcattattacctgccttagattttatgcgcatcgataataatgacgagccagattctttttatatcaagcaaagtctaaatagaattttaaatgagaatagtgaagcagatatttatattactcaaggttttatatgtctagatgttcaaggaaatatatctaacctgcaacgtggcggtagtgattatacagcttctatagtgggagcagccatagaggcaaatgaagtgcaaatatggacagacattgatggttttcataataatgatcctcgttttgtagaaaacacgactgctatttcaaatatatcttttgatgaagcggcagagcttgcttatttcggcgctaaaattttacatcctcaaacggttatacctgtaaaagatctcaatattcctgtacgtttaaaaaataccatgtctccagattcttatggtactttaataacacatcatgttcatggagaaggaatcaaggctatcgcggccaaagatggaatctatgctattaagataaaatctgcaagaatgttacaggcgcatggttttcttaaaaaagtatttgaaatttttgagaagtacgagacttctatagatatgatcaccacgtcagaaatagctgtttctcttaccatagataacccattacatctagatgttatagtagaagaactagagaaagtagctagtgtagatgtagatcaaggtatgagtattgtatgtctggtaggtaataatattatttatcatcaagacactccacatttatttcaagtattacaagatgtacctgtacgcatgatctcttatggaggtagtaataataatatatcattattgatcaatacagatcaaaaattaaatactttacaaaaattacagggctatgtgtttgaatcccaacttgaaaaagctgttgcctattaa

SEQ ID NO: 84000 - protein, 445 aa, Flavobacteria bacterium BBFL7
MLVLKFGGTSVGSVENMTHVKNIINDGTKKVVVLSAMSGTTNALVEISEHIRLKERDSAHVLIQQLASSYQNTIEQLLNDSALINESQEYVNKVFAGLIELVNSEHTTLIYNQIVAQGELLSTFLFSRFLMQEGINAALLPALDFMRIDNNDEPDSFYIKQSLNRILNENSEADIYITQGFICLDVQGNISNLQRGGSDYTASIVGAAIEANEVQIWTDIDGFHNNDPRFVENTTAISNISFDEAAELAYFGAKILHPQTVIPVKDLNIPVRLKNTMSPDSYGTLITHHVHGEGIKAIAAKDGIYAIKIKSARMLQAHGFLKKVFEIFEKYETSIDMITTSEIAVSLTIDNPLHLDVIVEELEKVASVDVDQGMSIVCLVGNNIIYHQDTPHLFQVLQDVPVRMISYGGSNNNISLLINTDQKLNTLQKLQGYVFESQLEKAVAY

SEQ ID NO: 84001 - DNA, 1236 bp, marine gamma proteobacterium HTCC2143
  CDS (1)..(1236): transl_table=11
atgagtttaattgtacaaaaatttggtggtacttcggttggtaccatagagcgcattgaggcagtggctgacaaggtcacggaatttcgtcgtcagggccatgatatcgttgtcgctgtgtctgcaatgagtggcgaaaccaatcgtctcattgggctggcccatgaacttcagagtcagcccacgccacgggaactagacgtactgatatcaactggcgagcaggtgactatcgctttgttgagtatggcgctgaataagcgtggctgtccggcgcgttcttttacgggatcgcaggtgaaaatactgaccgacagcgcgcataataaagcccgtattaaagaaattgatggcagtaatatccgtgctgaattgaagcggggtagggttgtcgtcgttgctgggtttcaaggttctgatgaagatggcaatatcactacactcggaagaggtggttccgatacaactgcggtggcgctagcggcggctttaaaagctgacgaatgtcagatttacacggatgttgacggtgtatacactaccgacccgagagttgttgagcgggcgcgccggctggagcatattaccttcgaagaaatgcttgagatggcgagtttgggctctaaggtgttgcaaatccgagcggttgaattcgctggaaaatataatgtgcccttgcgtgtcttacatagttttcaagatggtcccggtacactgataagtttagaggaaagtttagagatggagagccctgcaatttcaggcattgcctttacacgcgacgaagccaaactcagcatattgggcgttccggatacacccgggatcgcctaccgtattctgggtccaatcagcgatgctaatatagaagttgatgtgatcgtacagaacgcggctgctgataaaactaacgatattacctttacagttagtcgtggcgacatggtcaaagcagaggctattctgcatgaaacggccaaagaactgggtgcgcgtgaagtggtgaccgacgccaaaattgccaaagtttcaattgtcggtgtcggtatgcggtcccatgcgggcgttgccagcaaaatgtttaaaacattggctgacatcagcactaacatacaattgattacaacatccgagattaaaatttcagttgtgattgatgagaattttttggagcttgctgtgcgagccctgcatacagcgtttgatctcgatgatacgtcatctgagtcagcgtaa

SEQ ID NO: 84002 - protein, 411 aa, marine gamma proteobacterium HTCC2143
MSLIVQKFGGTSVGTIERIEAVADKVTEFRRQGHDIVVAVSAMSGETNRLIGLAHELQSQPTPRELDVLISTGEQVTIALLSMALNKRGCPARSFTGSQVKILTDSAHNKARIKEIDGSNIRAELKRGRVVVVAGFQGSDEDGNITTLGRGGSDTTAVALAAALKADECQIYTDVDGVYTTDPRVVERARRLEHITFEEMLEMASLGSKVLQIRAVEFAGKYNVPLRVLHSFQDGPGTLISLEESLEMESPAISGIAFTRDEAKLSILGVPDTPGIAYRILGPISDANIEVDVIVQNAAADKTNDITFTVSRGDMVKAEAILHETAKELGAREVVTDAKIAKVSIVGVGMRSHAGVASKMFKTLADISTNIQLITTSEIKISVVIDENFLELAVRALHTAFDLDDTSSESA

SEQ ID NO: 84003 - DNA, 2463 bp, Escherichia coli B; identical to SEQ ID NO: 757
  CDS (1)..(2463): transl_table=11

SEQ ID NO: 84004 - protein, 820 aa, Escherichia coli B; identical to SEQ ID NO: 758

SEQ ID NO: 84005 - DNA, 1350 bp, Escherichia coli B
  CDS (1)..(1350): transl_table=11
atgtctgaaattgttgtctccaaatttggcggtaccagcgtagctgattttgacgccatgaaccgcagcgctgatattgtgctttctgatgccaacgtgcgtttagtagtcctctcggcttctgctggtatcactaatctgctggtcgctttagcggaagggctggaacctggcgagcgattcgaaaaactcgacgctattcgcaacatccagtttgccattctggaacgtctgcgttacccgaacgttatccgtgaagagattgaacgtctgctggagaacattactgttctggcagaagcggcggcgctggcaacgtctccggcgctgacagatgagctggtcagccacggcgagctgatgtcgaccctgctgtttgttgagatcctgcgcgaacgcgatgttcaggcacagtggtttgatgtacgtaaagtgatgcgtaccaacgaccgatttggtcgtgcagagccagatgtagccgcgctggcggaactggccgcgctgcagctgctcccacgcctcaatgacggcttagtgatcacccagggatttatcggtagcgaaaataaaggtcgtacaacgacgcttggccgtggaggcagcgattatacggcagccttgctggcggaggctttacacgcatctcgtgttgatatctggaccgacgtcccgggcatctacaccaccgatccacgcgtggtttccgcagcaaaacgcattgatgaaatcgcgtttgccgaagcggcagagatggcaacttttggtgcaaaagtactgcatccagcaacgttgctccccgcagtacgcagcgatatcccggtctttgtcggctccagcaaagactcacgcgcaggtggtacgctggtgtgcaataaaactgaaaatccgccgctgttccgcgcgctggcgcttcgtcgcaatcagactctactcactttgcacagcctgaatatgctgcattctcgcggtttcctcgcggaagttttcggcatcctcgcgcggcataatatttcggtagacttaatcaccacgtcagaagtgagcgtggcattaacccttgataccaccggttcaacctccactggcgatacgttgctgacgcaatctctgctgatggagctttccgcactgtgtcgggtggaggtggaagaaggtctggcgctggtcgcgttgattggcaatgacctgtcaaaagcctgcggcgttggcaaagaggtattcggcgtactggaaccgttcaacattcgcatgatttgttatggcgcatccagccataacctgtgcttcctggtgcccggcgaagatgccgagcaggtggtgcaaaaactgcatagtaatttgtttgagtaa

SEQ ID NO: 84006 - protein, 449 aa, Escherichia coli B
MSEIVVSKFGGTSVADFDAMNRSADIVLSDANVRLVVLSASAGITNLLVALAEGLEPGERFEKLDAIRNIQFAILERLRYPNVIREEIERLLENITVLAEAAALATSPALTDELVSHGELMSTLLFVEILRERDVQAQWFDVRKVMRTNDRFGRAEPDVAALAELAALQLLPRLNDGLVITQGFIGSENKGRTTTLGRGGSDYTAALLAEALHASRVDIWTDVPGIYTTDPRVVSAAKRIDEIAFAEAAEMATFGAKVLHPATLLPAVRSDIPVFVGSSKDSRAGGTLVCNKTENPPLFRALALRRNQTLLTLHSLNMLHSRGFLAEVFGILARHNISVDLITTSEVSVALTLDTTGSTSTGDTLLTQSLLMELSALCRVEVEEGLALVALIGNDLSKACGVGKEVFGVLEPFNIRMICYGASSHNLCFLVPGEDAEQVVQKLHSNLFE

SEQ ID NO: 84007 - DNA, 1236 bp, Pseudomonas putida GB-1
  CDS (1)..(1236): transl_table=11
atggcgttgatcgtacagaaatttggcggcacctctgtcggttccatcgagcggatcgagcaggtagccgaaaaggtcaagaaacaccgtgaggcaggcgacgacctggtgattgtgctgtcggccatgagcggtgaaaccaatcgcctgatcgacctggccaagcagattaccgatcagccggttcctcgtgagctggatgtgatcgtgtcgaccggtgagcaggtcaccattgccctgctgaccatggccttgatcaagcgtggtgtgccagcggtgtcctacaccggcaaccaggtgcgcattctcaccgatagctcgcacaacaaggcgcgcatcctgcagatcgacgaccagaaaattcgtgccgacctcaaggaaggccgcgtggtcgtggttgcaggtttccagggcgtcgacgagcacggcagcatcaccaccctgggccgtggcggctccgacaccaccggcgtggccctggcggcggcgctgaaggctgatgagtgccagatctacaccgatgtcgatggcgtctacaccaccgacccgcgcgtcgtgccgcaggctcagcgcctggagaagatcaccttcgaagagatgctggaaatggccagcctcggttccaaggtgctgcagatccgctcggtggagttcgccggcaaatacaacgttccgctgcgcgtgctgcacagcttcaaggagggtccgggtaccctcattaccattgatgaagaggaatccatggaacagccgatcatttccggtatcgccttcaaccgtgatgaagccaagctgaccattcgcggcgtgccggacaccccgggcgtggccttcaagatcctcggcccgatcagtgcttcgaacatcgaagtcgacatgatcgtgcagaacgttgcccacgataacaccaccgacttcaccttcaccgtacaccgcaacgagtacgagaaggcgcaaagcgtgctggaaaacactgcccgcgaaatcggtgcccgtgaagtgatcggcgacaccaagatcgccaaggtctcgatcgttggcgtcggcatgcgttcgcacgccggtgtcgccagccgcatgttcgaagcgctggccaaggaaagtatcaacatccagatgatctccacctccgaaatcaaggtttcggtagtgatcgaagagaagtacctggagctggccgtacgcgcgctgcacaccgcgttcgagctggacgcccctgcccgacagggcgagtaa

SEQ ID NO: 84008 - protein, 411 aa, Pseudomonas putida GB-1
MALIVQKFGGTSVGSIERIEQVAEKVKKHREAGDDLVIVLSAMSGETNRLIDLAKQITDQPVPRELDVIVSTGEQVTIALLTMALIKRGVPAVSYTGNQVRILTDSSHNKARILQIDDQKIRADLKEGRVVVVAGFQGVDEHGSITTLGRGGSDTTGVALAAALKADECQIYTDVDGVYTTDPRVVPQAQRLEKITFEEMLEMASLGSKVLQIRSVEFAGKYNVPLRVLHSFKEGPGTLITIDEEESMEQPIISGIAFNRDEAKLTIRGVPDTPGVAFKILGPISASNIEVDMIVQNVAHDNTTDFTFTVHRNEYEKAQSVLENTAREIGAREVIGDTKIAKVSIVGVGMRSHAGVASRMFEALAKESINIQMISTSEIKVSVVIEEKYLELAVRALHTAFELDAPARQGE

SEQ ID NO: 84009 - DNA, 1233 bp, Marinobacter sp. ELB17
  CDS (1)..(1233): transl_table=11
atggccctgtatgtacagaaatttggtggcacctcggtaggcactaccgagcgtatcgaagcggttgcagagaaggtttttagctttcgtaaggccgggcacgacatcgttgtcgtggtgtcagccatgagcggtgaaactaaccgcttgattggcctggccagtaacattactgatgagcccggtcagcgtgaaatggacgtgcttctgtctaccggcgaacaggtgaccattgcactcttgtcgatggcattacagaagctgggttgcgaggctcgttcttacacaggctcacaggtgcgcatcctaaccgaccgtgcccatacaaaagctcgtattcagcacattgatgaacaacatgtgcgtgaagatctgaatgccggccgtgtggtcgtggtggcaggttttcagggagtggacgatctgggtgacattaccacccttggtcgcggtggttcagacactaccgcggtggccttggcagccgcgttgaaagccgatgaatgccagatttataccgatgtggacggggtttataccaccgacccgcgagtggtggattccgctcgcaggttgactcacattacctttgaggaaatgctggaaatggccagtctggggtccaaagtgctgcagattcgcgctgtggaattcgcaggtaaatacaacgttccgttacgggtgctgtccagctttcaggaaggcgagggcaccctgattaccattgaggatgatagcactatggaacaaccaatcgtttcgggcattgcattcaatcgtgacgaagccaagctgaccatatccggtgtgccggatacgcctggcagtgcactgcgtattctgaagccgatcagtgatgccaatattgaagtggacatgattgtccagaacgtgggtgaagacgacagaaccgcctttacgtttactgttctgcgtcacgacttcaaacgcgccggcgatgtgcttcgctcggtagcagccgagctaggcgcacgcgaggtcatcggaaacgaaaagatcgtcaaagtcagtattgtcggtgttggtatgcgttctcacgcgggtgttgccaccaagatgttcgaggcactgtctaacgaaggtattaacattcagatgatttctacttcggaaattaaaatttccgtggtgattgatgaaaagtaccttgagcttgcggtacgtgcgcttcattcggcttttgaactggacaagcccctggtagaagcttga

SEQ ID NO: 84010 - protein, 410 aa, Marinobacter sp. ELB17
MALYVQKFGGTSVGTTERIEAVAEKVFSFRKAGHDIVVVVSAMSGETNRLIGLASNITDEPGQREMDVLLSTGEQVTIALLSMALQKLGCEARSYTGSQVRILTDRAHTKARIQHIDEQHVREDLNAGRVVVVAGFQGVDDLGDITTLGRGGSDTTAVALAAALKADECQIYTDVDGVYTTDPRVVDSARRLTHITFEEMLEMASLGSKVLQIRAVEFAGKYNVPLRVLSSFQEGEGTLITIEDDSTMEQPIVSGIAFNRDEAKLTISGVPDTPGSALRILKPISDANIEVDMIVQNVGEDDRTAFTFTVLRHDFKRAGDVLRSVAAELGAREVIGNEKIVKVSIVGVGMRSHAGVATKMFEALSNEGINIQMISTSEIKISVVIDEKYLELAVRALHSAFELDKPLVEA

SEQ ID NO: 84011 - DNA, 1746 bp, Oryza sativa subsp
  CDS (1)..(1746)
atggcggtggcgctccggttcgcggcggccgtcgcgcgggactcgccggcggccgccgctccccccagggtggggaggggggagcagcagtatctcgcgtgcgcggcggcggcgaggccgggagggaggtgttcgaggaggaggggattggtggcgcggtgccagagcggggcggcggcggttgtcctcaacaaggacgacgcggcgtctgtggccgccgtcgcatcctccgcgacggggttcaccgtcgccatgaagttcggcgggtcgtcggtggcgtcggcggagcggatgcgggaggtggccgatctcatactcagcttccccgaggagactcccgttgttgttctctccgccatggggaagaccaccaataacctcctcctggccggagagaaggctgtcagctgcggcgccccgaaggcgtctgaaattcccgagctcgcagttatcaaggagctccatgttaggacgatcgatgagcttggattagatagatcgattgtttcagcccaccatgttttaaatatgaaagattgtagacagctgaaacatggtttattggaagagttggaacaacttcttaagggtgttgctatgatgaaagaactaactcctaggacacgggattaccttgtttccttcggtgaatgcatgtctacaagaatatttgctgcatatttgaataaacttgggaaaaaggctcggcagtatgatgcgtttgatattggctttataactactgatgatttcacaaatgcggacattcttgaagcaacatatcctgctgttgcaaagaggttacagggtgattggattgatgaccctgctattcctatagttactggtttccttggaaaaggatggaaatcatgtgctgtcaccactttaggcagaggtggcagcgacttgactgctaccactattggcaaagcgttgggattaagagagatccaggtatggaaggatgtagatggtgtgttgacatgtgatcctaatatttgtgcaaacgctatacctgtaccctacttgacttttgaggaggcagctgaacttgcctactttggtgcacaggttttgcatccccaatcaatgagaccagccaaagaaggtggtataccagttagagttaagaattcatataaccgtcgagcacctggtactgtcattactaaaacaagagatctgagcaagagtatattaaccagcattgtattgaagtcaaacattactatgctggatatagtgagcacaaggatgcttggccagtatggttttctggcgaaggttttctcaatatttgaagatttaggtatctctgttgattgtgtggctaccagtgaagtcagtatatcattgacactagatccatcaaaactatggtgtcgtgaattgatccagcaggaacttgatcatgtagttgaagaacttgaaaaaattgcagttgttcatctactgcagcacaggtctatcatctcactgatagggaatgtacagagatcgtcattgattcttgagaaggctttcaatgttctacgaagaaatggcgttaacgtccagatgatctcacaaggggcatccaaggtgaatatttcattggtggtccatgatagcgaggcgaaacagtgtatacaggcccttcattcagcattctttgagaacggtttcttgtcagaagttgaggaagaggatcttcaacacaatggctctcctgtgagctcaaatggtgtcatttacggaaactag

SEQ ID NO: 84012 - protein, 581 aa, Oryza sativa subsp
MAVALRFAAAVARDSPAAAAPPRVGRGEQQYLACAAAARPGGRCSRRRGLVARCQSGAAAVVLNKDDAASVAAVASSATGFTVAMKFGGSSVASAERMREVADLILSFPEETPVVVLSAMGKTTNNLLLAGEKAVSCGAPKASEIPELAVIKELHVRTIDELGLDRSIVSAHHVLNMKDCRQLKHGLLEELEQLLKGVAMMKELTPRTRDYLVSFGECMSTRIFAAYLNKLGKKARQYDAFDIGFITTDDFTNADILEATYPAVAKRLQGDWIDDPAIPIVTGFLGKGWKSCAVTTLGRGGSDLTATTIGKALGLREIQVWKDVDGVLTCDPNICANAIPVPYLTFEEAAELAYFGAQVLHPQSMRPAKEGGIPVRVKNSYNRRAPGTVITKTRDLSKSILTSIVLKSNITMLDIVSTRMLGQYGFLAKVFSIFEDLGISVDCVATSEVSISLTLDPSKLWCRELIQQELDHVVEELEKIAVVHLLQHRSIISLIGNVQRSSLILEKAFNVLRRNGVNVQMISQGASKVNISLVVHDSEAKQCIQALHSAFFENGFLSEVEEEDLQHNGSPVSSNGVIYGN

SEQ ID NO: 84013 - DNA, 1365 bp, Bacillus amyloliquefaciens
  CDS (1)..(1365): transl_table=11
atgaaagttgtaaaattcggaggcagctctcttgcgtcaggagcacagcttgagaaagtgtttcaaatcgtgacggctgatcccgcgcggaaagccgtcgtcgtatcggcaccgggaaaacgcttctcggacgatacaaaggtgacggatctgttaatccgctgtgcggagcattatttgcaaaaaggtgtagcgcccgagcttgccgaaacggtcattgaacggtacgccgccatcgcgcgtgagctgaacctggatttctctattatagaaagaatccgcagtgacctattcgctcttttaaacagctgtaaaaccaatcccgaacaatatatggatgcggtgaaggcgagcggcgaggacaacaacgcgaagctgatcgcagcctacttccgacggcagggcgtgaaagcggaatacgtaagtccgaaagaagcggggctgtttgtgacggatgaacccggaagcgcgcaggtgctccctgagtcttatggtcatttgtaccgtctgagaaaccgtgaaggattgatcatttttccgggatttttcggttacacgaaggagcatgagattgtgacgttttcccggagcggttctgatattaccggctccattctcgccagcggcttaaaagccgacctgtacgaaaactttactgatgtggatgccgtctattccgtcaacccgtcaatcgtgcggcatccgaaagaaattaacgaactgacgtatcgggaaatgcgtgagctctcctatgccggattttccgtttttcatgatgaagcgctgattcccgcatttcgggccggcatccccgttcaaattaagaatacgaataatccggatgcgaaaggaacacgcgtcgtcagcagccgtgacaatacgaacgggccagtcatcggcatcgcaagcgacacgggcttttgcagcatttacataagcaaatatttaatgaaccgggaaatcggtttcggccgcaaagcccttcacattttggaggaagaaggattgacgtatgaacacgttccatccggcattgacgacatcacgatcatccttcggcacaatcagatggactcagaactggaacacaggctcgtcacccgtctgaagcaggaacttcaagcagatgaagtcacagtcaggcacaatctggcgctgattatggtcgtcggggaagcgatgcgccataatgtcggcacaaccgccagggcatccaaagcactgtcggaagccggcgtcaacatcgagatgatcaatcaagggtcatcggaagtcagcatgatgttcggagtgaaagaagaacaggaaaaacacgcggtgcgggcactgtatgacgaatttttcgccggagtcttactctcatag

SEQ ID NO: 84014 - protein, 454 aa, Bacillus amyloliquefaciens
MKVVKFGGSSLASGAQLEKVFQIVTADPARKAVVVSAPGKRFSDDTKVTDLLIRCAEHYLQKGVAPELAETVIERYAAIARELNLDFSIIERIRSDLFALLNSCKTNPEQYMDAVKASGEDNNAKLIAAYFRRQGVKAEYVSPKEAGLFVTDEPGSAQVLPESYGHLYRLRNREGLIIFPGFFGYTKEHEIVTFSRSGSDITGSILASGLKADLYENFTDVDAVYSVNPSIVRHPKEINELTYREMRELSYAGFSVFHDEALIPAFRAGIPVQIKNTNNPDAKGTRVVSSRDNTNGPVIGIASDTGFCSIYISKYLMNREIGFGRKALHILEEEGLTYEHVPSGIDDITIILRHNQMDSELEHRLVTRLKQELQADEVTVRHNLALIMVVGEAMRHNVGTTARASKALSEAGVNIEMINQGSSEVSMMFGVKEEQEKHAVRALYDEFFAGVLLS

SEQ ID NO: 84015 - DNA, 2225 bp, Zea mays
  CDS (157)..(1902)
tcctcccggccgcagccgagcacagccgacgcgcccacaaatcacgcgactcccgcttccatgtcctcgcgtcctccattgcagccgcatacatagcgtcgccccttccatcgatggcagccagccgcgcccgcaaatcacgcgactcccccttccatggcgtcgcccccttccatccatggcaggtccgcgcccctacgccccaaatcacgcggatggaaggggtcgcgagggagtctctctctggacgcgcccgtcgccgcctccaagctcaggagggagcggcgcccggcccccgcgagcgtgaacccggggccacaatgcttgaggcggaggaggggcctggcggttcgctgccagacggggtccaccgcaccgcccgtccttaggacggaggaggcccccgcggctgcggcgggggcaaggaatgcccaggcggggttcaccgtcgtcatgaagttcggcggctcgtcgctcgcgtcagccgagcggatgcgggaggtggccggcctcatccttagcttccccgacgagacgcccgtcgtcgtcctctccgccatggggaagaccaccaataacctcctcctggccggcgagaaggcggtgagctgcggcgcccccaaggcgtccgaaatccctgagctcgctgtcatcaaggacctgcatcttaggacggttgatgagctcggtttagataggtcgattgtttcaggtttattggatgaattggagcaacttcttaaaggagttgctatgatgaaagagctgacccttaggacaagagattaccttgtttcctttggtgaatgtatgtcgacaagaatatttgctgcatatttgaacaaacttgggaaaaaagcacgccagtatgatgcatttgatattggctttataaccaccgatgatttcacaaatgcggatattcttgaagccacttaccctgctgttgcgaagaggctacatgaagactggatggatgaccctgctattcctatagtcactggttttcttgggaagggatgtaaatcatgtgctgtcaccactttaggcaggggtggtagtgacttgacagctacaaccattggcaaagccttgggattaagagaaatccaggtttggaaggatgtagatggtgtgttgacatgtgatcctaatatatatgcaaatgctatacccgtgccctacttgacttttgatgaggctgctgagcttgcctactttggtgcacaggttttgcatccccagtcaatgcgaccggctagggatggtgatattccagtgagagtaaagaactcatacaatcgtcatgcacctggtactgtcatcactaaatccagagatatgagcaagagcatattgactagcattgtgttgaaatctaatgttaccatgctggatatagtgagcacaaggatgcttggccaatacgggtttttagcaaaggtattctcaatatttgaagatttgggcatctctgttgactgtgtggctactagtgaagtcagcatctcgttgactctagatccatcaaaactatggagtcgtgaattgatccagcaggaacttgatcatgtcgttgaagagcttaaaaaatttgcagttgttcatctgctgcaacgtagatcgatcatctcactgatagggaatgtacagcgatcgtcattgattcttgaaaaggcattcaacgttctgcgaagaaatggtgttaatgtccagatgatctcacaaggggcgtccaaggtgaacatttccttggtagtcaatgacagtgaggcaaaacagtgcgtacaagccctccattcagcgttctttgagaatggcttcttgtcggaggtagagggagctgacgttccccagaacggagcctctctgaactcaaatggcgctgtctatggaaactagtcgactctgcaactgatttcttcaaaatttgtgtaccattggtaggttgaatggtggtgattcatagctatttatttagggcatcagtcatgttggtgcaaattttcttgatgttttaagagcttattaccagaacagtctgcatggtataccttgcgattgggtgctaccaagtagtagccaatgtcttggggatctgccacatgtttaaggcattccaaggcttatatgtatctgagttgtattgtatgtgagaactattgagttgtattgtggtgattaagtttggtagttttagactgaaaaaaaaaaaaaaaaaaaaa

SEQ ID NO: 84016 - protein, 581 aa, Zea mays
MASPPSIHGRSAPLRPKSRGWKGSRGSLSLDAPVAASKLRRERRPAPASVNPGPQCLRRRRGLAVRCQTGSTAPPVLRTEEAPAAAAGARNAQAGFTVVMKFGGSSLASAERMREVAGLILSFPDETPVVVLSAMGKTTNNLLLAGEKAVSCGAPKASEIPELAVIKDLHLRTVDELGLDRSIVSGLLDELEQLLKGVAMMKELTLRTRDYLVSFGECMSTRIFAAYLNKLGKKARQYDAFDIGFITTDDFTNADILEATYPAVAKRLHEDWMDDPAIPIVTGFLGKGCKSCAVTTLGRGGSDLTATTIGKALGLREIQVWKDVDGVLTCDPNIYANAIPVPYLTFDEAAELAYFGAQVLHPQSMRPARDGDIPVRVKNSYNRHAPGTVITKSRDMSKSILTSIVLKSNVTMLDIVSTRMLGQYGFLAKVFSIFEDLGISVDCVATSEVSISLTLDPSKLWSRELIQQELDHVVEELKKFAVVHLLQRRSIISLIGNVQRSSLILEKAFNVLRRNGVNVQMISQGASKVNISLVVNDSEAKQCVQALHSAFFENGFLSEVEGADVPQNGASLNSNGAVYGN

SEQ ID NO: 84017 - DNA, 3166 bp, Glycine max; identical to SEQ ID NO: 15109
  CDS (29)..(2779)

SEQ ID NO: 84018 - protein, 916 aa, Glycine max; identical to SEQ ID NO: 770

SEQ ID NO: 84019 - DNA, 1584 bp, Phaeosphaeria nodorum
  CDS (1)..(1584)
atgtctgcaatcgtcaacgggtacaaacatgagtctgagcggatagctcaccaggaagagaagcatttgccgggaggatgggtggtgctcaagttcggtggtacgagtgtgggcaagtttgcggagaatatagcgggcattgtcaaagctggcctgaaggacaatcgcgccgccatagtctgctccgcgcgcagcaacaacaccaagctcgaaggaacgacgaaccgcctcctccgcgctgctcgtgctgccgagaaacccgccaatcgcggatacgatgagattgttgaagcgattcgcaccgaccacatccaggctgcgacggactcgatcaatgatgctgcgatcctggcgaccttcaccgaagaggtcaatgccgaatgtgagagcctgaccaagattctggagtcggcgcaacatttggaggaagtcaccagccgcgccgaagacaagatcatcagcaagggcgagaagctgagctgtcgctacatggctgcgctcctgagtgaccgcggtacacctgcgcagttcgtcgatctatccgacattgtcaagtgcggcttgtcggaaaagggactgaacgaccagttctacaaggatctggccgagtctctgggcaaagaggtggcagcgtgcggcgacaaggtgccagtcatcacaggatattttggcaatgttcccggcggcattctcacctctattggacgcggatacacggatctttgcgctgccctagttgctgttggaatcaaggcgaaagagctacaggtctggaaagaggtggacggcatcttcaccgcggatcctcgcaaggttcctacagctgctctccttcctaccgtgacgccctctgaagccgccgaattgacgttctacggttccgaggtcatccaccccttcaccatggagcaggtcatccgcgcgcgcattccaatccgcatcaagaatgtcatgaacccgcgcaacgccggcaccatcatcttcccagacaaccttgccgcagttgatgatcgcgcgccgctcagggactcggcactcttccgcacccgctcgtccagtctcttgactaacctctcgggccccaagcgccctactgcagtcaccatcaagcacaacatcgtcgtgctcaatgtgcacagcaacaagcgcacccgcgcccacggcttcctgatgaacatctttagcatcctcgaccgctggcacttgtctgtcgacctcatttcctcgtctgaggtgcacgtgtccatggcactgcactccgagtccgccctgctcagtggcgggggtgaggatgagtacaagatccaagacaaggatctgcagggagcagtaaacgatctgggcacccttggcactatcgacattgtgcctgacatggctatcgtgagcttggtgggtaagcagttgaagaacatgattggtatcagtggaaagttcttcagcgtgctgggtcagaacaacatcaacattgagatgatctcgcagggtgccagcgagattaatatctcctgcgtcattgaggagcgcgaggccgaccgcgcattgaacgtcgtgcatacgaaccttttcacatttctagattaa

SEQ ID NO: 84020 - protein, 527 aa, Phaeosphaeria nodorum
MSAIVNGYKHESERIAHQEEKHLPGGWVVLKFGGTSVGKFAENIAGIVKAGLKDNRAAIVCSARSNNTKLEGTTNRLLRAARAAEKPANRGYDEIVEAIRTDHIQAATDSINDAAILATFTEEVNAECESLTKILESAQHLEEVTSRAEDKIISKGEKLSCRYMAALLSDRGTPAQFVDLSDIVKCGLSEKGLNDQFYKDLAESLGKEVAACGDKVPVITGYFGNVPGGILTSIGRGYTDLCAALVAVGIKAKELQVWKEVDGIFTADPRKVPTAALLPTVTPSEAAELTFYGSEVIHPFTMEQVIRARIPIRIKNVMNPRNAGTIIFPDNLAAVDDRAPLRDSALFRTRSSSLLTNLSGPKRPTAVTIKHNIVVLNVHSNKRTRAHGFLMNIFSILDRWHLSVDLISSSEVHVSMALHSESALLSGGGEDEYKIQDKDLQGAVNDLGTLGTIDIVPDMAIVSLVGKQLKNMIGISGKFFSVLGQNNINIEMISQGASEINISCVIEEREADRALNVVHTNLFTFLD

SEQ ID NO: 84021 - DNA, 1242 bp, Candidatus Kuenenia stuttgartiensis
  CDS (1)..(1242): transl_table=11
atgggactaattgttcaaaaatttggcggtacttctgttgctgatgctgaacgcataaaggctgctgccaggcgagttacagaaacatatgatgccgggaataaagtgattgttgttgtttctgcgaggggacaaacaactgatgagcttattgaacttgcaaatgaaattattgataaaccttctacacgcgaaatggatatgttattatcaacgggcgaacaggtttctattgccctcatggcaatggcaattcatgcgcttgggtatcctgcaatatcatttaccggtggtcaggtgggtatcgttacggatagttttcacacgaaggcgcgcatccgcaacatcaatgcagaccgaatccgcaaggaattagataatggctccattgttattgtagcgggttttcagggcattgacgtaaatgaaaacataaccaccctgggaagaggcggttctgatactacggcagtcgccctcgcatctattctgcatgcggacagatgtgatatttttacggacgtggatggaatttataccgccgacccaagaaaggtgccaaatgccagaaaactcaataaaatctcgtatgatgagattttagagcttgcgagcctgggcgcccaggtaatgcactcacgctcgatagaatttgcaaaaaaatacaatgtgcctttatacgttcgctcaagtttcaacaactctgaaggaacattgatatgtaaggagattgatgatatggaaaacattgttgtaagcggtgcaaccgtcagcaaaaacgatgcaaaaattactatcaggtctattcctgatgttcccggccaggcggcaaaaatatttcacgagatcgcgaaaaaaaatattaatgtggacatgatcattcaaaacgcaagtgtcgaaggacgcgctgacgtaacgtttactgtaccgcgaagtgatttgaaaaacgcgctggaaactgcagaaaagataaaaaaggacctctgggcaatggaggttttatacgatgacaaaatcgctaaactatccgtagtagggataggcatgcggagccattgtggtgtagcggaaaagatgttcagtatccttgctgaagaaaaaattaacatacagatgattagtacctctgaaataaaaatatcctgcataatcgatgaagctcacgccgaacgggcattaaatgcagtgcataaaatatttggattaaacctcgtcaaaaacgaagtggccgctaaggtctaa

SEQ ID NO: 84022 - protein, 413 aa, Candidatus Kuenenia stuttgartiensis
MGLIVQKFGGTSVADAERIKAAARRVTETYDAGNKVIVVVSARGQTTDELIELANEIIDKPSTREMDMLLSTGEQVSIALMAMAIHALGYPAISFTGGQVGIVTDSFHTKARIRNINADRIRKELDNGSIVIVAGFQGIDVNENITTLGRGGSDTTAVALASILHADRCDIFTDVDGIYTADPRKVPNARKLNKISYDEILELASLGAQVMHSRSIEFAKKYNVPLYVRSSFNNSEGTLICKEIDDMENIVVSGATVSKNDAKITIRSIPDVPGQAAKIFHEIAKKNINVDMIIQNASVEGRADVTFTVPRSDLKNALETAEKIKKDLWAMEVLYDDKIAKLSVVGIGMRSHCGVAEKMFSILAEEKINIQMISTSEIKISCIIDEAHAERALNAVHKIFGLNLVKNEVAAKV

SEQ ID NO: 84023 - DNA, 2754 bp, Medicago truncatula; identical to SEQ ID NO: 15113
  CDS (1)..(2754)

SEQ ID NO: 84024 - protein, 917 aa, Medicago truncatula; identical to SEQ ID NO: 15114

SEQ ID NO: 84025 - DNA, 1578 bp, Aspergillus oryzae
  CDS (1)..(1578)
atggaatctcggttgccatccaaattggaaccgttgtcgacatccaatagcgacctagtaggcccttcaaacggcaactgggttgtacaaaagtttggaggtaccagtgtgggcaagttcgcccttaatatcattgatcaagttgttctacctagccttttagatcacagtgtggcaatagtctgctctgcaagaagtagctctacaaaagctgaaggtactaccaatcggctgttacgcgcagcgcgggatgcagagaatgcggaatctaaaaactacgtctctctcgtcgaggcggtccgattggaacatatcgaagtagtcgagagtcaaattaattccaagggactaaggcttcagttagttaccgagattaacgatgaatgtgaaaaggttctgaaggtcttggaggctgctcagacgctcggggagatcagtgtccgctgtgtggataaagttatgagtacaggagagaagcttagttgtcgacttatggcagctttcctccaggaccgaggagtagattcggaatatgtggatttggctgagattgtcgactttactatctcaagccagggtctcgaccaggaattctacaacaacctcgccagcactctcggtaaaaaaatccgagcttgtgagggcagagttccagttgtaactgggttctttgggaccataccaggcggtcttcttgatcaaatagggcggggctatacagatctttgcgccgccctagtcgccgttgggatacgtgccaaagaactacaggtatggaaggaagtcgacggaatattcacagcagatccccggaaagtgccaactgcgcgtattcttccggcaatcacacctgcagaagccgctgaactgacattttatggctcagaggtcatccatccattcaccatggaacaagtcatccgcgcgagaattcccattcgtatcaagaatgtcatgaacccgaaaggcaatggcactatcattttccctgattcctcttataaattggagaaggcggccatagggcatgaccccagattgttccgtacacgcagtccaagtcttgtgcagacgccgaagcgtcctaccgctgtaactatcaagcacaagattctcgtgatcaatgtccactccaacaaacgctccctgtcgcatgggttctttgctggcatcttctctgtccttgaccgatggaggctctcaatcgatctgatatccaccagtgaagtgcatgtgtccatggctcttcattctgagtcgcctcttctcaatggagtcggcagggatgaatatcaaattattgacgaggacttgaagggcgcgttacgtgacctacagaaatatgggacagtcgatataatcccagagatggccatcctgagccttgttggcaaacaaatgaagaacatgattggtgttgccgggcggatgtttacaacccttggagaaaataatgtgaacattgagatgatctcccaaggtgcgagcgaaatcaatatatcatgcgtcatcgaagagagagacgcagaccgtgccctgaacattattcatacgagcatgttcacatttctagactag

SEQ ID NO: 84026 - protein, 525 aa, Aspergillus oryzae
MESRLPSKLEPLSTSNSDLVGPSNGNWVVQKFGGTSVGKFALNIIDQVVLPSLLDHSVAIVCSARSSSTKAEGTTNRLLRAARDAENAESKNYVSLVEAVRLEHIEVVESQINSKGLRLQLVTEINDECEKVLKVLEAAQTLGEISVRCVDKVMSTGEKLSCRLMAAFLQDRGVDSEYVDLAEIVDFTISSQGLDQEFYNNLASTLGKKIRACEGRVPVVTGFFGTIPGGLLDQIGRGYTDLCAALVAVGIRAKELQVWKEVDGIFTADPRKVPTARILPAITPAEAAELTFYGSEVIHPFTMEQVIRARIPIRIKNVMNPKGNGTIIFPDSSYKLEKAAIGHDPRLFRTRSPSLVQTPKRPTAVTIKHKILVINVHSNKRSLSHGFFAGIFSVLDRWRLSIDLISTSEVHVSMALHSESPLLNGVGRDEYQIIDEDLKGALRDLQKYGTVDIIPEMAILSLVGKQMKNMIGVAGRMFTTLGENNVNIEMISQGASEINISCVIEERDADRALNIIHTSMFTFLD

SEQ ID NO: 84027 - DNA, 1722 bp, Oryza sativa subsp
  CDS (1)..(1722)
atggcggcggcggcggctctccggtgcaacccgcggccctctgcggcggttgctctccgcggtgccgccgcagccccgcaggtcgggaatgaggctgccttcgagctgctggtcggtgccaccgagccttgcctgcggggccggaggaggggtgcggggattcggtgccagcgaagtgcggctgccagcgcggtcgtcgtcgagaagaagagtcgcgcggtggagccggcgcgggagggggccaatgccggtcacacggagtcggagctcaccgtggtgatgaagttcggcgggtcgtcagtggcgtcggccgagcggatgcgggaggtggccgatctcatcctcagcttccccgaggagcggccggtgatcgtactctccgccatggggaagaccaccaacaagcttctgatggctggggagaaagcggtgggctgtggtgcaacaaatgtgtcggagcttgatgagctcacctttattaaggaattgcattttgggaccattgatcaacttggattggataggtcaattgtttccggcttgtcggatgagcttgagcaacttcttaagggaattgctatgatgaaagagcttactcttaggacaagagactatcttgtttccttcggtgaatgcatgtcaacaaggatatttgcggcacttttgaataaacttggggtgaaagcacgtcagtatgatgcatttgaaataggctttataaccactgatgatttcacaaacgctgatattctggaagcaacttatcctgccattgcaaagaggctacatggggactgggttactggtcctgctattccaatagtcactggttttctcggaaagggatggaaaactggtgcaatcaccactttaggcaggggtggtagtgacctgacagctactaccattggcaaagccttgggattaagagaaatccaggtttggaaagatgttgatggtgttttaacttgtgatcctaatattcatccaaatgcgaaacctgtgccatacttgacatttgatgaggcagctgaacttgcctattttggtgcacaggttttgcatccacaatcgatgcgaccagctagagaaggtgatatacctgtcagggttaaaaactcttataaccgccgagcccctggtacactcattactaaagctagagatatgagtaagactgttttgactagtattgtacttaaatcaaatattacaatgcttgatatagtgagcacacggatgcttggacaatatggttttctagctaaggtcttttcaatttttgaagatttgggcatctctgttgattgtgtagctacaagtgaagtcagcatatctttgaccctggatccatcaaaactctggagtcgtgaattgatcaagcaggaacttgatcatgtcatcgaagaacttgaaaagatagcagttgttcacctactgcagcatagatcgataatttcgttaattggaaatgtgcagaggtcatctttgattcttgaaaaggctttcaacgttttacgtacaaatggagttaatgttcagatgatctcacaaggggcatccaaggtgaacatttccttggtggtccatgacagtgaggcaaagcagtgcgttcaagccctccactcagcattctttgagagtggtttcttgccagaagtcaatgatattctgcaggacgactctgtggcacattccaatggcacagtttacaggcattag

SEQ ID NO: 84028 - protein, 573 aa, Oryza sativa subsp
MAAAAALRCNPRPSAAVALRGAAAAPQVGNEAAFELLVGATEPCLRGRRRGAGIRCQRSAAASAVVVEKKSRAVEPAREGANAGHTESELTVVMKFGGSSVASAERMREVADLILSFPEERPVIVLSAMGKTTNKLLMAGEKAVGCGATNVSELDELTFIKELHFGTIDQLGLDRSIVSGLSDELEQLLKGIAMMKELTLRTRDYLVSFGECMSTRIFAALLNKLGVKARQYDAFEIGFITTDDFTNADILEATYPAIAKRLHGDWVTGPAIPIVTGFLGKGWKTGAITTLGRGGSDLTATTIGKALGLREIQVWKDVDGVLTCDPNIHPNAKPVPYLTFDEAAELAYFGAQVLHPQSMRPAREGDIPVRVKNSYNRRAPGTLITKARDMSKTVLTSIVLKSNITMLDIVSTRMLGQYGFLAKVFSIFEDLGISVDCVATSEVSISLTLDPSKLWSRELIKQELDHVIEELEKIAVVHLLQHRSIISLIGNVQRSSLILEKAFNVLRTNGVNVQMISQGASKVNISLVVHDSEAKQCVQALHSAFFESGFLPEVNDILQDDSVAHSNGTVYRH

SEQ ID NO: 84029 - DNA, 2361 bp, Oryza sativa subsp
  CDS (1)..(2361)
atgtggagcctcgccgtcgcgagcccgcaccccgccgccgccttcgccgcggcccgtccccgccgcggccctcgccccgccgccgccccctcccacagaggtgtgaatccgcagcggtggcgatgtgagaagactcaggcatggtcgttttggagctctctgtgggccagcgaccttccaggaggactttatggggatgtttcgaagaatatgctcaagccagctgctgctgtttcagttgagcaagctgaagctagtgctcaccttccaaaaggtgacatgtggtctgtgcataaatttggtgggacctgcatgggaacctcccagaggattcagaatgtggctgacataatccttcgcgacccttctgagaggaaactggtagttgtgtctgcaatgtctaaagtcactgacatgatgtacaaccttgtaaataaggctcaatcaagggatgattcttatatcactgcacttgatgaagttttcgagaagcatatggcagcagcaaaggatctgcttggaggagaggaccttgcaagattcttatctcagttgcacgcggatgtcagtaacctaaaagcaatgcttcgtgcaatttgcatagctgggcatgccacggagtctttctcagattttgttgttggacatggagagatatggtcagctcaattgttgtcatttgccataaagaagtctggaaccccttgcagttggatggacacacgagaagttttagttgtaaatcctacaggttccaaccaagtagatcctgactatttggaatctgagaaacgacttgagaaatggttcgctcgacagccagctgagacaataattgctactgggtttattgcgagtacacctgaaaacattcctacaaccttgaaaagagatggaagtgatttctctgcagccataattggttcacttgttaaggctggtcaggtcactatctggactgatgttgatggggtctttagtgcagatcccagaaaagttagcgaggctgtcatattaagcactttatcatatcaggaggcgtgggaaatgtcgtattttggggcaaatgtattacatccgcgtaccatcatacctgtgatgaaatacaatatcccaattgttataagaaatatgttcaatatttctgcccctggtaccatgatctgccagcagcctgcgaatgaaagtggtgatttggaggcttgcgtcaaagcatttgcaactatagataaattgtctcttgttaacgttgaaggaactggaatggctggtgttcctggtactgcaagtgccatatttggtgctgtgaaggatgttggagctaatgttatcatgatatcgcaggctagtagtgaacactccgtatgctttgctgtaccagaaaaggaagttgctgcagtttctgcagctttgcatgtcaggttccgtgaagcattatctgcaggcaggctatctaaggtcgaagtcattcataattgtagcatccttgctgctgtcggcctgaagatggcaagtactcctggggtcagtgcaaccctttttgatgcacttgcaaaggcaaatattaatgtaagggcaatagctcaaggttgtagtgagtacaacatcactgttgtattgaagcaagaggactgcgtaagggctcttagagctgctcactcaaggttcttcctctccaaaaccacacttgctgtcggaattattggacctgggttgattggtcgtactctccttaaccagctgaaggatcaggctgcagttcttaaggaaaatatgaacattgatctgcgtgtcatgggaatcactggttcgaggacaatggttttgagtgatacaggaatagatttggcccattggaaagagcagctacaaactgaagcagaaccagccaaccttgacaagtttgttgatcatttgtccgagaatcaattattccctaacagggttttggtggactgcacagcagacacaagtgttgcatcccactattatgactggttaaagaagggaatccatgtcatcacgccaaataagaaagcaaattcagggccactggacaagtatttgaaacttaggactctacaacgtgcatcatatacccattacttctatgaagcaactgttggtgctggccttcctatcattagcactctgcgcggtctcctggaaacaggtgacaagatattgcgtattgaggggatcttcagtggaacattgagttacattttcaacaattttgaaggaacaagagctttcagtgatgttgtttctgaagcaaaagaggctggatacactgaacctgatccaagagatgatctgtctggaactgatgtagccagaaaggtacttcttccatcatag

SEQ ID NO: 84030 - protein, 786 aa, Oryza sativa subsp
MWSLAVASPHPAAAFAAARPRRGPRPAAAPSHRGVNPQRWRCEKTQAWSFWSSLWASDLPGGLYGDVSKNMLKPAAAVSVEQAEASAHLPKGDMWSVHKFGGTCMGTSQRIQNVADIILRDPSERKLVVVSAMSKVTDMMYNLVNKAQSRDDSYITALDEVFEKHMAAAKDLLGGEDLARFLSQLHADVSNLKAMLRAICIAGHATESFSDFVVGHGEIWSAQLLSFAIKKSGTPCSWMDTREVLVVNPTGSNQVDPDYLESEKRLEKWFARQPAETIIATGFIASTPENIPTTLKRDGSDFSAAIIGSLVKAGQVTIWTDVDGVFSADPRKVSEAVILSTLSYQEAWEMSYFGANVLHPRTIIPVMKYNIPIVIRNMFNISAPGTMICQQPANESGDLEACVKAFATIDKLSLVNVEGTGMAGVPGTASAIFGAVKDVGANVIMISQASSEHSVCFAVPEKEVAAVSAALHVRFREALSAGRLSKVEVIHNCSILAAVGLKMASTPGVSATLFDALAKANINVRAIAQGCSEYNITVVLKQEDCVRALRAAHSRFFLSKTTLAVGIIGPGLIGRTLLNQLKDQAAVLKENMNIDLRVMGITGSRTMVLSDTGIDLAHWKEQLQTEAEPANLDKFVDHLSENQLFPNRVLVDCTADTSVASHYYDWLKKGIHVITPNKKANSGPLDKYLKLRTLQRASYTHYFYEATVGAGLPIISTLRGLLETGDKILRIEGIFSGTLSYIFNNFEGTRAFSDVVSEAKEAGYTEPDPRDDLSGTDVARKVLLPS

SEQ ID NO: 84031 - DNA, 2463 bp, Escherichia coli; identical to SEQ ID NO: 773
  CDS (1)..(2463): transl_table=11

SEQ ID NO: 84032 - protein, 820 aa, Escherichia coli; identical to SEQ ID NO: 774

SEQ ID NO: 84033 - DNA, 1695 bp, Glycine max
  CDS (1)..(1695)
atggcaagcgcgttgcagcagcttcaaggggttcaagggaaacttgctgtgagtatgagtgtgaggaggagcttgcatcattgcaagtctcaaattgggtttgcagcacttggtgctcctgtttgtgcaaggagagtttggggcaatagggtggcattcagtgtcactacttgcaaggcctcaacaagtgatgtgattgagaagaatgcgactgagaatgggatggtgagtagtgagggtgaaaccagtttcacttgtgtcatgaagtttggtggctcctctgtggcttctgctgataggatgaaagaggtggctacccttatattgagttttcccgaggagaggcctattgttgttctctctgctatgggaaaaacaacaaacaagcttttgctggctggagagaaagctgtgagttgtggtgttatcaatgtatcaagtattgaggagctttgctttataaaagacctgcatctaaggactgtggatcagcttggtgtggacggatctgttatttcaaagcatctagaagaattggagcaacttctgaaggggatagctatgatgaaagaattgactaaaaggactcaggactatttagtctcctttggagaatgcatgtcgacaaggatctttgctgcatatcttaataaaataggtgtcaaggctcgccaatatgatgcatttgagattggttttataacaactgacgacttcacaaatgcggacattttggaagcaacttatccagctgttgcaaagagattgcatggtgattggctctccgatcctgcaattgcaattgttactggcttccttggaaaggcccggaaatcatgtgcagtgacaacactgggaagagggggcagtgatttgacggctacaacaattgggaaagcactagggttgcctgagatccaggtatggaaggatgttgatggtgtcctaacctgtgatccaaatatatacccaaaagcagaacctgttccttatttgacatttgatgaggctgcagaactagcttactttggtgctcaggttctacatccacagtctatgagacctgccagagaaagtgatattcctgttagggttaaaaattcttacaaccctaaagctccaggtactctcatcaccaaggcaagagatatgagcaaggcagtattaacaagcattgttttgaaacgtaatgtgaccatgttggatatagcaagcactcgcatgcttggtcagtatggtttccttgctaaggtgttttcaatctttgaagagttaggcatatcagttgatgttgtagctacaagtgaagtcagtgtttccttgacactggatccatcaaagctatggagcagagagctaattcagcaggcaagtgaacttgaccatgttgtagaagaactcgagaaaatcgctgtggtgaatctcctacagaatagatccatcatctctctcattggaaatgttcagagatcatcactaatattggagaggctttcccgtgttcttcgaacccttggcgtcactgtgcaaatgatctcccagggtgcatctaaggtgaacatctcattggttgtaaatgacagtgaagcagagcagtgtgtgagggctctccactcagccttctttgagagtgagctctcagagttagagatggattacaaaaatggcaatggttctgttgatgagttatcttag

SEQ ID NO: 84034 - protein, 564 aa, Glycine max
MASALQQLQGVQGKLAVSMSVRRSLHHCKSQIGFAALGAPVCARRVWGNRVAFSVTTCKASTSDVIEKNATENGMVSSEGETSFTCVMKFGGSSVASADRMKEVATLILSFPEERPIVVLSAMGKTTNKLLLAGEKAVSCGVINVSSIEELCFIKDLHLRTVDQLGVDGSVISKHLEELEQLLKGIAMMKELTKRTQDYLVSFGECMSTRIFAAYLNKIGVKARQYDAFEIGFITTDDFTNADILEATYPAVAKRLHGDWLSDPAIAIVTGFLGKARKSCAVTTLGRGGSDLTATTIGKALGLPEIQVWKDVDGVLTCDPNIYPKAEPVPYLTFDEAAELAYFGAQVLHPQSMRPARESDIPVRVKNSYNPKAPGTLITKARDMSKAVLTSIVLKRNVTMLDIASTRMLGQYGFLAKVFSIFEELGISVDVVATSEVSVSLTLDPSKLWSRELIQQASELDHVVEELEKIAVVNLLQNRSIISLIGNVQRSSLILERLSRVLRTLGVTVQMISQGASKVNISLVVNDSEAEQCVRALHSAFFESELSELEMDYKNGNGSVDELS

SEQ ID NO: 84035 - DNA, 2463 bp, Escherichia coli; identical to SEQ ID NO: 15133
  CDS (1)..(2463): transl_table=11

SEQ ID NO: 84036 - protein, 820 aa, Escherichia coli; identical to SEQ ID NO: 15134

SEQ ID NO: 84037 - DNA, 2460 bp, Serratia marcescens; identical to SEQ ID NO: 775
  CDS (1)..(2460): transl_table=11

SEQ ID NO: 84038 - protein, 819 aa, Serratia marcescens; identical to SEQ ID NO: 776

SEQ ID NO: 84039 - DNA, 1710 bp, Arabidopsis thaliana
  CDS (1)..(1710)
atggcggctactagggttcgttgttgtcatagcaatgcagctttcaccagattgccacttacccgccaccgaaactcgccgacgctaccgatttctctaaatcgtgtcgatttccctacgctgaagaaattatcattacccattggagatggctcctccattagaaaggtttcaggttcaggcagcagaaacattgtgcgagctgtgttggaagagaagaagacagaggcgataacggaggtagatgagaagggtatcacgtgcgtgatgaagtttggtggatcttcggtggcgtcagctgagagaatgaaggaagttgctgatttgattttgacttttccggaagaaagtcccgtcattgttctctctgctatggggaaaactaccaacaatctcttgcttgcgggagagaaggcggttagttgtggtgtttctaatgcatctgagattgaggagttgagcattataaaggaattgcatatcaggacggtgaaagagctcaacattgatccctctgttattttgacctatttggaggaactggagcaactcctgaaaggcattgccatgatgaaggaattgacacttcgaaccagagattacttagtctcttttggagagtgtttgtctacaaggatttttgctgcttatcttaatacaatcggtgtcaaggcacgccaatatgatgcatttgaaattggtttcattacaacggatgatttcacaaatggggatatcctggaggcaacttatccagctgttgccaagagattatatgatgattggatgcatgatcctgctgttcctattgtaacaggtttccttgggaagggttggaaaactggtgcggttactaccttgggtaggggtggcagtgatttgacggcaaccacaattggtaaagcgttgggtttgaaagagattcaggtgtggaaagatgtcgatggtgttctaacatgtgaccctactatatataagcgagctacaccagtaccatatctgacatttgacgaagcagccgagctagcttattttggtgcacaggtcttgcacccacagtcaatgagaccagcaagagagggtgagattcctgttagggttaaaaattcttataaccctaaggctcctggaactatcatcactaaaacaagagacatgaccaagagtattctaacgagcattgttctgaaacgtaatgtgaccatgctggatatagcaagcacccgaatgcttggtcaagttggctttcttgcaaaggtattctcgatatttgaggagcttggcatttccgtagatgttgttgccactagtgaagtcagtatatctctgacactggatccttcaaaactttggagcagagaactgattcaacaggagcttgatcatgtagttgaagaactggagaaaattgcagttgtgaatcttctaaaaggaagagcaatcatctctctaattgggaatgttcaacattcctccctgattttagagagggcgtttcatgttctttataccaaaggtgtcaatgtccagatgatatcacaaggagcatccaaggtaaacatttcctttatagtaaacgaagctgaagctgaaggttgtgttcaggctcttcacaaatccttcttcgagagcggtgacctctcagagttattgatacaacccagacttggcaacgggtcacctgtcaggacactgcaagtagaaaattga

SEQ ID NO: 84040 - protein, 569 aa, Arabidopsis thaliana
MAATRVRCCHSNAAFTRLPLTRHRNSPTLPISLNRVDFPTLKKLSLPIGDGSSIRKVSGSGSRNIVRAVLEEKKTEAITEVDEKGITCVMKFGGSSVASAERMKEVADLILTFPEESPVIVLSAMGKTTNNLLLAGEKAVSCGVSNASEIEELSIIKELHIRTVKELNIDPSVILTYLEELEQLLKGIAMMKELTLRTRDYLVSFGECLSTRIFAAYLNTIGVKARQYDAFEIGFITTDDFTNGDILEATYPAVAKRLYDDWMHDPAVPIVTGFLGKGWKTGAVTTLGRGGSDLTATTIGKALGLKEIQVWKDVDGVLTCDPTIYKRATPVPYLTFDEAAELAYFGAQVLHPQSMRPAREGEIPVRVKNSYNPKAPGTIITKTRDMTKSILTSIVLKRNVTMLDIASTRMLGQVGFLAKVFSIFEELGISVDVVATSEVSISLTLDPSKLWSRELIQQELDHVVEELEKIAVVNLLKGRAIISLIGNVQHSSLILERAFHVLYTKGVNVQMISQGASKVNISFIVNEAEAEGCVQALHKSFFESGDLSELLIQPRLGNGSPVRTLQVEN

SEQ ID NO: 84041 - DNA, 2229 bp, Arabidopsis thaliana
  CDS (395)..(2029)
gaaagatgtcaacattatttcatggattaacacaaagtacaaattttagtagagtggcttactaatagctgaaagggtatctcgacccagagattgaatctgaaccgtccattctgggaagggcaaacaaaacagtgtttgtgtctcacgttctcttccttctctaatagagtcttaagccgctttttcactccttaaacccaaaaaaaaacattagtactatttccttcggagcctggccggcgaatccgacaggtcgtttcagctgtgtccgaaggaaagttccaatttttatctgtttttcttcacggaaatccagttaaggtttccacattgcacagctgtaccatttgtcgagatcacaacacgcaagtctcttagatttagcaagcttatggcttcattgcagttgtacggagttaaaactccagggcttgctttaagttcaaagaggcttgagtttgcttcaaagggggcatgtttttcagttacgttgccctcaagtagtgctgtctttagagacgtagagcattcttgtaggaatataggtttgagagttagttgtgaagctctaagagtcgatttgcttcaaagaaaagagcctgagacgtgcgattcaagcggaactggcaaagagttgacatgtgtaatgaaatttggcggttcatcagtggaatcagcagagaggatgaaagaagttgccaatcttatactcagctttccagatgagaggcccgtcattgtgctatcagcaatgggaaagacgactaataagcttttgaaggctggagagaaggctgttacttgcggtgtcactaacgtagaaagtattgaagaattgagctttataaaggaactccatttaagaactgctcatgagcttggagtggaaacaacggttattgaaaaacacctagaaggactacaccagcttctcaaaggcatatcaatgatgaaagagctaaccttacgcacaagggactacttggtttcatttggagagtgcatgtccacaaggcttttctctgcgtatctcaataaaattggccacaaagcgcgtcaatatgatgcatttgagatcggatttatcaccacagacgactttactaatgctgatatacttgaagcaacataccctgccgtctcaaaaacacttgttggcgactggagcaaggaaaatgcagtccctgttgttactggctacctcggaaagggatggaggtcttgtgctatcactacgctgggtaggggtggcagtgatttgacagctacaacgattgggaaagcgctaggactgcgggaaattcaggtttggaaagatgtggatggagttttgacttgtgatcctaacatatatcctggagctcaatctgttccgtacttaacgttcgatgaggcagctgagcttgcttactttggtgcccaggtgttgcatccactgtctatgaggccagcaagagatggcgacattcctgtgagggttaagaactcgtacaaccccactgctccaggaactgtcatcaccagatcaagagacatgagtaaggctgtgctaaccagcattgttctgaaacgtaatgtgaccatgttggacatagcaagcacccgtatgcttggccaatatggtttccttgccaaggtgtttaccacatttgaagatttaggtatatcggttgatgttgtggcaacaagtgaagttagtatatcattgacattggatccagcaaagctctggggtagagagttaattcagcgagtaaatgaactggataatttggtggaagagctagagaagattgctgttgtgaaactacttcaacgcagatcaatcatctctctcataggaaatgttcagaaatcctcactcatattagagaaggtgttccaagtatttagaagcaatggagtgaatgtgcagatgatctcgcagggtgcatctaaggtaaacatctcattgatagtgaatgatgaagaggcagagcaatgtgtgagggctctccactccgccttctttgagaccgatccttagtgcaacacagagcacccatctctctccttcaactctgcttctgtgcgtagtttaatgctaagaatgtgtcaagacttggaactatttcaaattcttgtccattgttgttgttgttgttgttgttgttgtgatacaatacatcataatttgagccaaagcctataatcttttaatttaaagagtacatagacaagctcaaa

SEQ ID NO: 84042 - protein, 544 aa, Arabidopsis thaliana
MASLQLYGVKTPGLALSSKRLEFASKGACFSVTLPSSSAVFRDVEHSCRNIGLRVSCEALRVDLLQRKEPETCDSSGTGKELTCVMKFGGSSVESAERMKEVANLILSFPDERPVIVLSAMGKTTNKLLKAGEKAVTCGVTNVESIEELSFIKELHLRTAHELGVETTVIEKHLEGLHQLLKGISMMKELTLRTRDYLVSFGECMSTRLFSAYLNKIGHKARQYDAFEIGFITTDDFTNADILEATYPAVSKTLVGDWSKENAVPVVTGYLGKGWRSCAITTLGRGGSDLTATTIGKALGLREIQVWKDVDGVLTCDPNIYPGAQSVPYLTFDEAAELAYFGAQVLHPLSMRPARDGDIPVRVKNSYNPTAPGTVITRSRDMSKAVLTSIVLKRNVTMLDIASTRMLGQYGFLAKVFTTFEDLGISVDVVATSEVSISLTLDPAKLWGRELIQRVNELDNLVEELEKIAVVKLLQRRSIISLIGNVQKSSLILEKVFQVFRSNGVNVQMISQGASKVNISLIVNDEEAEQCVRALHSAFFETDP

SEQ ID NO: 84043 - DNA, 2164 bp, Arabidopsis thaliana
  CDS (322)..(2001)
attattaagcagattcatattttggaaaagaacactgaagtcgaatgatcgttcgattctttcctttgcctataaacatttaacatccgagaccgagttcactccgcagccgtctaatctttttagcttgggatcttgaccgtctacgatactcgtcttgatacatagctcggagcttgtccggctttgtataagcaatcgtgagccctgtcaactggtgtgcgcactaagcaagcatactctattatttgtcgaaatcacaagagccagccagtctctctgagttctatcacaatcttcttcttcagagcttattgagtaatggcggcttcaatgcagttctacggagttaaaacaccagaacttgccttaaactcaaaaaggattgagtttagctcaaaggggctcaacttctcagcactcgtgtcctctgctcgtgtattctctagaaacgtagatcgttcttgtaagaacatcgctctgagagttacttgtgaagcgggaagagtggagctgctagagagaaaagcctcagagactttcaagttaaacaaaactgagaaaaaattgacctgtgtaatgaaattcggtggctcatcagtggcatcagcagaaaggatgatacaagttgccaaactcatactcagcttcccagatgagaagcctgttgttgtgctatcagcaatggcaaagaccaccaataagcttttgatggctggggagaaggctgtttgctgcggtgtcaccaacgtcgacactatcgaagagttgagctatataaaggaactccatataaggactgctcatgagcttggagtggaaacagcagttattgcagaacatctagaaggactggaacagcttcttaaaggcgtcgcaatgatgaaggaattaactttacgctcaagagactacttggtttcatttggagaatgcatgtccactaggctatttgctgcgtacctgaacaaaattgggcacaaagcacgacagtatgatgcatttgagatcgggattatcaccacagatgacttcactaatgctgatattcttgaggcaacatacccggcggtttcgaaaaagttacttggtgactggagcaaggaaaatgcactccccgttgtcacaggcttccttggaaagggatggagatcttgtgctgtaactacgcttggtagaggaggtagcgatttgactgcaacaacgatcgggaaggctttaggtttgcgggagatccaggtttggaaagatgtggatggagttttgacttgtgatcctaacatttactgcggagctcaacctgttccacacttgacatttgatgaggctgctgaacttgcttactttggtgcccaggtgttgcatccactttccatgcgcccagcgcgagaaggtaacattcctgtaagggttaagaactcttacaatcccactgctccaggaactgtcatcaccagatcaagagacatgagcaaggctgtattgaccagcatcgttctgaaacgtaatgtcaccatgttggacatcactagcacccgtatgctcggccaatatggtttccttgccaaggtgttttccacatttgaaaagttgggcatatctgtggatgttgttgcaaccagcgaagttagcatttctttgacattggatccttcaaagttctgtagcagagagttaattcaacacgagcttgatcaggtggtggaggaacttgagaagattgctgttgtaaatctgcttcgacacagatcaattatctctctcatcggaaatgttcagagatcatcattcatattagagaagggcttccgagtacttcgaaccaatgggattaatgtccagatgatctcccaaggtgcatctaaggtaaacatctcactgatagtgaatgatgatgaggcggagcattgtgtgaaggctctccactcggccttctttgagacagacacttgtgaagcagtctcagaatgcccgaccggctacatcgctgcctcttcgtgaaacctctaggtgcaacctgcaaggtctgaaagtactagctagtttgatgttatgattcttgtcagactggtattaggaaacaaagctcccattctccttgtgtaatataatgtaatttgattgggagatgtactggaaaatcaataagttttcctatttgaat

SEQ ID NO: 84044 - protein, 559 aa, Arabidopsis thaliana
MAASMQFYGVKTPELALNSKRIEFSSKGLNFSALVSSARVFSRNVDRSCKNIALRVTCEAGRVELLERKASETFKLNKTEKKLTCVMKFGGSSVASAERMIQVAKLILSFPDEKPVVVLSAMAKTTNKLLMAGEKAVCCGVTNVDTIEELSYIKELHIRTAHELGVETAVIAEHLEGLEQLLKGVAMMKELTLRSRDYLVSFGECMSTRLFAAYLNKIGHKARQYDAFEIGIITTDDFTNADILEATYPAVSKKLLGDWSKENALPVVTGFLGKGWRSCAVTTLGRGGSDLTATTIGKALGLREIQVWKDVDGVLTCDPNIYCGAQPVPHLTFDEAAELAYFGAQVLHPLSMRPAREGNIPVRVKNSYNPTAPGTVITRSRDMSKAVLTSIVLKRNVTMLDITSTRMLGQYGFLAKVFSTFEKLGISVDVVATSEVSISLTLDPSKFCSRELIQHELDQVVEELEKIAVVNLLRHRSIISLIGNVQRSSFILEKGFRVLRTNGINVQMISQGASKVNISLIVNDDEAEHCVKALHSAFFETDTCEAVSECPTGYIAASS

SEQ ID NO: 84045 - DNA, 2751 bp, Arabidopsis thaliana; identical to SEQ ID NO: 781
  CDS (1)..(2751)

SEQ ID NO: 84046 - protein, 916 aa, Arabidopsis thaliana; identical to SEQ ID NO: 782

SEQ ID NO: 84047 - DNA, 1248 bp, Aquifex aeolicus
  CDS (1)..(1248): transl_table=11
atgaaaatactcgttcagaagttcggcggaacctccgtgggaaccctagagaggatagaactttgtgcaaagagagtaataaaagcccttgaaaagggctacaaacccgttgttgtttcttccgcaatggctggagagactgactctttaatagaactcgccaaaaaagtacacccaagacccccggaaagggagatggacacactccttgcagtgggagaacaaaaggctatagccctctttgctatgactttaaataaactcggataccccgcggttagcctgtgcggctggcaggttcccataataacggacaacgttcacacaaaggcaagaatcagaaagataggtataagcagacttctcagcttaatagaggaaggatacattcccgtcgttgccggatttcagggagtgacggaagactgggaaataacgaccttagggagaggtggttccgacacgacagcggtagccctcgccgcagcccttaaagcggactgtgagataaacacggacgttcctggcgtatttaccgcagacccgaggatagtcccgaacgcaaagaagataaagaaaatttcttatgaagaaatgctggagctcgcatcccttggtgctaaggttatgcagataaggagcgttgagtttgctgcgaagtacaacgtcaggatacacgtgaggagtaccttctcggaggaggaggggacttggatagttccggaggatgaagtcatggaaaaggtagctgtaaggggaattaccgttgacacaaaagaaacgaggtttaccgttgtaagggttcccgacaagccgggaatagccgccgaaattttcaaagctctcggagatgcccacatagtggttgacatgattgtccagaacgtgtcccacgaaggttacacggatatgtccttcacggttaacaaaacggacgcggacaaggcagaagagatagtcaagaagatagcccagaagataggggcaaaggaagttgtaagggacgacaaagtagcgaaaatctctatagttggcatagggatgaagagcgcttacggcgtggcgggaaggatgttcgacatactcgccagaaacggtataaacataaaggctatatccacatccgaaataaagatatcctgtctcatagacgaaaagtacgcggagctcgccgtgagggcactccatgaggagttcatagaggaaatggaggaatttgaaactataaacgggaaaaataaagagtag

SEQ ID NO: 84048 - protein, 415 aa, Aquifex aeolicus
MKILVQKFGGTSVGTLERIELCAKRVIKALEKGYKPVVVSSAMAGETDSLIELAKKVHPRPPEREMDTLLAVGEQKAIALFAMTLNKLGYPAVSLCGWQVPIITDNVHTKARIRKIGISRLLSLIEEGYIPVVAGFQGVTEDWEITTLGRGGSDTTAVALAAALKADCEINTDVPGVFTADPRIVPNAKKIKKISYEEMLELASLGAKVMQIRSVEFAAKYNVRIHVRSTFSEEEGTWIVPEDEVMEKVAVRGITVDTKETRFTVVRVPDKPGIAAEIFKALGDAHIVVDMIVQNVSHEGYTDMSFTVNKTDADKAEEIVKKIAQKIGAKEVVRDDKVAKISIVGIGMKSAYGVAGRMFDILARNGINIKAISTSEIKISCLIDEKYAELAVRALHEEFIEEMEEFETINGKNKE

SEQ ID NO: 84049 - DNA, 1323 bp, Chlamydia pneumoniae
  CDS (1)..(1323): transl_table=11
gtgtctaagatagtttataaatttggtggcactagcttagcaactgctgagaatatctgtttggtttgtgatatcatttgcaaagataagccttcttttgttgttgtaagcgcaatcgccggtgtgacggacctccttgtagacttctgctcgtcttctttaagagaacgagaggaggtcttaagaaaaatagagggaaaacatgaggagattgtaaaaaacctagcgattccttttcctgtctctacatggacgtctcgactccttccctatctacaacatctggagatctcagatctcgattttgctcgtattttgtctttaggagaagatatttcagcttccctagttcgtgctgtttgtagcacccgtggttgggatttaggatttctcgaggcacgtagtgtcatcttaacagacgatagctaccgacgtgcctctccaaacctagatcttatgaaagcacattggcatcagctcgaactaaatcagccttcgtatattatccaggggttcatcggatctaatggtttgggagaaacagttcttcttgggcgcggaggcagtgattattcagcaactttgatcgcagagcttgcaagagcaacagaagtgcgtatttataccgatgttaatgggatctataccatggatcctaaagtgatttccgatgcacagcgcattcctgagctcagtttcgaagagatgcagaatttagcaagttttggtgctaaagtcctttatcctcctatgctctttccttgtatgcgtgcgggaattcctatttttgtgacatcaacatttgaccctgaaaaaggaggaacatgggtctatgctgtcgataagtctgtgagttatgaaccaagaataaaagctttatccttaagtcaataccaaagcttctgttctgtagactatactgtcctaggatgtgggggattagaagagattttaggcattttagaatcccatgggatagatcctgaattgatgatagcacaaaacaacgtcgttggatttgtaatggatgatgatatcatttctcaagaagctcaagagcaccttgtagatgttttatcgctatctagtgtcacacgcttgcatcatagtgttgcattgattaccatgatcggagataatctttcttctccaaaagttgtctcaacaattacggagaaactcagaggttttcaaggacctgtattttgtttttgccaaagttcaatggcattaagctttgttgttgcctcagagttggcagagggtattatagaagaattacataatgattatgtaaaacaaaaagctatagtcgccacgtag

SEQ ID NO: 84050 - protein, 440 aa, Chlamydia pneumoniae
MSKIVYKFGGTSLATAENICLVCDIICKDKPSFVVVSAIAGVTDLLVDFCSSSLREREEVLRKIEGKHEEIVKNLAIPFPVSTWTSRLLPYLQHLEISDLDFARILSLGEDISASLVRAVCSTRGWDLGFLEARSVILTDDSYRRASPNLDLMKAHWHQLELNQPSYIIQGFIGSNGLGETVLLGRGGSDYSATLIAELARATEVRIYTDVNGIYTMDPKVISDAQRIPELSFEEMQNLASFGAKVLYPPMLFPCMRAGIPIFVTSTFDPEKGGTWVYAVDKSVSYEPRIKALSLSQYQSFCSVDYTVLGCGGLEEILGILESHGIDPELMIAQNNVVGFVMDDDIISQEAQEHLVDVLSLSSVTRLHHSVALITMIGDNLSSPKVVSTITEKLRGFQGPVFCFCQSSMALSFVVASELAEGIIEELHNDYVKQKAIVAT

SEQ ID NO: 84051 - DNA, 1422 bp, Methanococcus jannaschii
  CDS (1)..(1422): transl_table=11
atgacaacagtaatgaagtttggaggaacttctgtaggttctggagaaagaattaggcatgtggcgaaaatagtaacaaagagaaaaaaagaggatgatgatgtggttgttgtagtttcagcaatgagtgaagtaactaacgcattggtggagatatctcagcaagctttagatgttagagatatcgcaaaagtaggagattttataaaatttattagagagaaacactacaaagctatagaagaagctataaaatcagaagaaattaaagaagaagtaaaaaaaataattgacagcaggattgaagaattagagaaggttttaattggtgtagcatacttaggggagcttacaccaaagtcaagagactatatattatcatttggagagaggttgtcctcaccaatattaagtggagctattagagatttaggagaaaagtctattgctttagaaggaggagaagcaggaataataacggataacaactttggaagtgcaagagttaaaagattagaggttaaagagagattgttaccattattaaaagagggcattattccagtggttacaggatttataggaaccactgaagagggttatataacaaccttaggaagaggcggaagtgattactcagccgctttaattggttatggcttagatgcagatattattgaaatttggacagatgtttctggagtttatacaacagacccaagattagttcctactgcaagaagaattccaaaacttagttacatagaggctatggaattagcatactttggagctaaggttttgcatccaagaactatagagccagctatggagaagggcattccaatattggtaaagaatacatttgagccagagagtgaaggaactttaataaccaacgatatggagatgagtgatagcatagttaaagctatatcaacaataaaaaatgtcgctttaataaacatatttggagctgggatggttggagttagtggaacagcggcaaggatattcaaagctttaggagaagaggaagttaatgtaattttaataagccaaggttcctctgaaacaaatatatccctcgttgtaagtgaggaggatgttgataaagcattaaaagcattaaagagagagtttggggattttggaaagaagagctttttaaacaataacttaattagggatgtgagtgttgataaagatgtttgtgttatttcagttgtaggggctggaatgagaggagctaaaggcatagctggaaagatattcactgctgtttctgaaagcggggcaaatataaagatgatagctcaaggttcatcagaagtgaatatatcatttgttattgatgaaaaggatttgttgaattgtgttagaaaattgcacgagaagtttattgaaaaaactaacagctaa

SEQ ID NO: 84052 - protein, 473 aa, Methanococcus jannaschii
MTTVMKFGGTSVGSGERIRHVAKIVTKRKKEDDDVVVVVSAMSEVTNALVEISQQALDVRDIAKVGDFIKFIREKHYKAIEEAIKSEEIKEEVKKIIDSRIEELEKVLIGVAYLGELTPKSRDYILSFGERLSSPILSGAIRDLGEKSIALEGGEAGIITDNNFGSARVKRLEVKERLLPLLKEGIIPVVTGFIGTTEEGYITTLGRGGSDYSAALIGYGLDADIIEIWTDVSGVYTTDPRLVPTARRIPKLSYIEAMELAYFGAKVLHPRTIEPAMEKGIPILVKNTFEPESEGTLITNDMEMSDSIVKAISTIKNVALINIFGAGMVGVSGTAARIFKALGEEEVNVILISQGSSETNISLVVSEEDVDKALKALKREFGDFGKKSFLNNNLIRDVSVDKDVCVISVVGAGMRGAKGIAGKIFTAVSESGANIKMIAQGSSEVNISFVIDEKDLLNCVRKLHEKFIEKTNS

SEQ ID NO: 84053 - DNA, 1266 bp, Mycobacterium smegmatis
  CDS (1)..(1266): transl_table=11
gtggcgctcgtcgtacagaaatacggcggatcctcggtggcggacgccgagaggatccgacgggtcgccgagcggatcgtcgagaccaagaaggcgggcaacgacgtcgtcgtcgtcgtctccgcgatgggtgacaccaccgatgacctgctggacctggcgcgccaggtgtcgcccgcgccgccgccgcgcgagatggacatgctgctgaccgccggtgagcggatctccaacgcgctggtcgcgatggccatcgaatcgctcggcgcgcaggcccggtccttcaccggatcgcaggccggtgtgatcaccacgggcacgcacggcaacgccaagatcatcgacgtcaccccgggccggttgcgcgacgcgctcgacgaggggcagatcgtgctggtcgccgggttccagggcgtcagccaggacagcaaggacgtcaccacgctgggacgcggcggttcggacaccacggccgtcgccgtggctgcggcactcgatgccgatgtctgcgagatctacaccgacgtcgacggcatcttcaccgcggacccgcgcatcgtgcccaacgcccgccacctcgacaccgtctccttcgaggagatgctggagatggcggcctgcggcgcgaaagttctgatgctgcgctgcgtcgagtacgcccgccgctacaacgtgcccatccacgtccggtcgtcgtattcggacaagcccggcaccatcgtcaaaggatcgatcgaggacatccccatggaagacgccatcctgaccggagtagcccacgaccgcagcgaggccaaggtcacggtggtcggtctgcccgacgttcccggctacgccgccaaggtgttccgcgcggtcgccgaggccgacgtgaacatcgacatggtgctgcagaacatctcgaagatcgaggacggcaagaccgacatcacgttcacgtgtgcgcgtgacaacggcccgcgggccgtagagaagctctcggcgctcaagagcgagatcggtttcagccaggtgctgtacgacgaccacatcggcaaggtgtcgctgatcggcgccggtatgcggtcgcatccgggcgtgacggccacgttctgcgaggcgctcgcggaggccggcatcaacatcgacctgatctcgacgtcggagatccgtatctcggtgctcatcaaggacaccgaactggacaaggcggtttcggcgctgcacgaggcgttcggcctcggcggcgacgacgaagccgtggtgtacgcgggaacggggcgctga

SEQ ID NO: 84054 - protein, 421 aa, Mycobacterium smegmatis
MALVVQKYGGSSVADAERIRRVAERIVETKKAGNDVVVVVSAMGDTTDDLLDLARQVSPAPPPREMDMLLTAGERISNALVAMAIESLGAQARSFTGSQAGVITTGTHGNAKIIDVTPGRLRDALDEGQIVLVAGFQGVSQDSKDVTTLGRGGSDTTAVAVAAALDADVCEIYTDVDGIFTADPRIVPNARHLDTVSFEEMLEMAACGAKVLMLRCVEYARRYNVPIHVRSSYSDKPGTIVKGSIEDIPMEDAILTGVAHDRSEAKVTVVGLPDVPGYAAKVFRAVAEADVNIDMVLQNISKIEDGKTDITFTCARDNGPRAVEKLSALKSEIGFSQVLYDDHIGKVSLIGAGMRSHPGVTATFCEALAEAGINIDLISTSEIRISVLIKDTELDKAVSALHEAFGLGGDDEAVVYAGTGR

SEQ ID NO: 84055 - DNA, 1560 bp, Schizosaccharomyces pombe
  CDS (1)..(1560)
atgtcaattgcaaagaatatagaaaacgatcctagcaaagggtgggttgttcaaaaattcggtggaaccagtgttggaaagttcccaattaaaattgctgttgatgttgcaaaggaatacctaagtactaagcgcgtagcattggtatgctctgctcgcagcacagataccaaagcagaaggcactactactagacttattagagcaacagaagcagcattgcgacctgctgtaggttctgtgcatgatttggttcgtattattgaaactgatcatgttcaagctgctcgtgatttcatccaggatgttggcattcaagacgaacttattgatgcttttcatgcagactgcgttgaattggaacagtacctaaatgctattagagttctttccgaggtttctcctcgtactcgtgatctcgtgattggcatgggggagcgtttaagttgccgatttatggcggcagttttgaaagatcaagggatcgattctgagtttattgatatgagtcatataattgacgagcaaagagagtggaggaatcttgatgcatccttttacgcatatcttgcttcccaacttgctagtaaagttaccgctgttggaaataaagtacctgtcgttactggcttttttggtatggtaccgggtggtcttttgtcgcaaattggccgtggttacaccgatttttgcgctgctttattagctgttggtcttaatgctgacgaacttcaaatatggaaggaagttgatggcattttcacagctgatccccgtaaggttccaactgctcgacttcttcctctcatcacacctgaagaagctgctgaacttacttattacggtagtgaagtcatccatcccttcactatgtcccaggttgttcacgctcgtattcctatccgaattaaaaacgttggcaacccacgtggaaagggaactgttatttttcctgatacaatttcacgtcatggtagtgctacacctcctcatcctcctaaaattatgcccgatgatatttctgctagcctcgctaacaaaggcgctaccgcggttactattaaagacaccattatggttattaatattcaatcgaatcgtaaaatatctgctcatggtttcttagcttccatatttgccattcttgataagtacaaattggctgttgacttgattactacttcagaagttcacgtctcaatggcgctttacgaagagtctgatgacggtaatatgcatgaggcattcgttgaattgcgtcgattgggaacgcttgatattctccatggtttagctattctatctcttgttggtaagcacatgagaaacactaccggttacgctggtcgtatgttttgcaaacttgctgaagcccaaatcaacattgagatgattagtcaaggtgctagtgaaatcaacatttcatgcgttattgacgagaaaatggctgtaaaggctcttaacgttattcataaagaattgcttgaacccttagctttacatgaagttccgtcacaggcctcgatgttggttgaaaagccttggctttacagtgcttaa

SEQ ID NO: 84056 - protein, 519 aa, Schizosaccharomyces pombe
MSIAKNIENDPSKGWVVQKFGGTSVGKFPIKIAVDVAKEYLSTKRVALVCSARSTDTKAEGTTTRLIRATEAALRPAVGSVHDLVRIIETDHVQAARDFIQDVGIQDELIDAFHADCVELEQYLNAIRVLSEVSPRTRDLVIGMGERLSCRFMAAVLKDQGIDSEFIDMSHIIDEQREWRNLDASFYAYLASQLASKVTAVGNKVPVVTGFFGMVPGGLLSQIGRGYTDFCAALLAVGLNADELQIWKEVDGIFTADPRKVPTARLLPLITPEEAAELTYYGSEVIHPFTMSQVVHARIPIRIKNVGNPRGKGTVIFPDTISRHGSATPPHPPKIMPDDISASLANKGATAVTIKDTIMVINIQSNRKISAHGFLASIFAILDKYKLAVDLITTSEVHVSMALYEESDDGNMHEAFVELRRLGTLDILHGLAILSLVGKHMRNTTGYAGRMFCKLAEAQINIEMISQGASEINISCVIDEKMAVKALNVIHKELLEPLALHEVPSQASMLVEKPWLYSA

SEQ ID NO: 84057 - DNA, 2553 bp, Saccharomyces cerevisiae
  CDS (365)..(1948)
ggatccttttctttctagaactcccctaatatcaactttttactctactgtggctctaaccacgtgtatttttcaggcccatgactcaccttttctttctttttcactagcaaacgaaaatttcatcatcactttttttttttttcactttccgtacgcagtcttctccagagattcttttagcttcgaagaaataatgtataatatccatatataagaatactgctggataattattttatttctattttaacagtgctctactcattgaaggatatttgtgtagccaatactctctccatcgcttaagctcacatagctatcgcattttatcacagaagctttcattttttttaacttttacatgccaatggatttccaacctacatcaagtcattcgaactgggtcgtgcaaaagttcggtggtacatctgtcggtaaatttcccgtccaaatagtggatgacattgtgaagcactattctaaacctgacggcccaaacaataatgtcgctgtcgtttgttccgcccgttcttcatacaccaaggctgaaggtaccacttctcgtcttttgaaatgttgtgatttggcttcgcaagaatctgaatttcaagacattatcgaagttatcagacaagaccatatcgataatgccgaccgcttcattctcaatcctgccttgcaagccaagttagtggatgataccaataaagaacttgaactggtcaagaaatatttaaatgcttcaaaagttttgggtgaagtgagttcacgtacagtagatctggtgatgtcatgtggtgagaagttgagttgtttgttcatgactgctttatgtaatgaccgtggctgtaaggccaaatatgtggatttgagccacattgttccctctgatttcagtgccagcgctttggataacagtttctacactttcctggttcaagcattgaaagaaaaattggccccctttgtaagtgctaaagagcgtatcgttccagtctttacagggttttttggtttagttccaactggtcttctgaatggtgttggtcgtggctataccgatttatgtgccgctttgatagcagttgctgtaaatgctgatgaactacaagtttggaaggaagttgatggtatatttactgctgatcctcgtaaggttcctgaagcacgtttgctagacagtgttactccagaagaagcttctgaattaacatattatggttccgaagttatacatccttttacgatggaacaagttattagggctaagattcctattagaatcaagaatgttcaaaatccattaggtaacggtaccattatctacccagataatgtagcaaagaagggtgaatctactccaccacatcctcctgagaacttatcctcatctttctatgaaaagagaaagagaggtgccactgctatcaccaccaaaaatgacattttcgtcatcaacattcattccaataagaaaaccctatcccatggtttcctagctcaaatatttaccatcctggataagtacaagttagtcgtagatttaatatctacttctgaagttcatgtttcgatggctttgcccattccagatgcagactcattaaaatctctgagacaagctgaggaaaaattgagaattttaggttctgttgatatcacaaagaagttgtctattgtttcattagttggtaaacatatgaaacaatacatcggcattgctggtaccatgtttactactcttgctgaagaaggcatcaacattgaaatgatttctcaaggggcaaatgaaataaacatatcctgcgttatcaatgaatctgactccataaaagcgctacaatgtattcatgccaagttactaagtgagcggacaaatacttcaaaccaatttgaacatgccattgatgaacgtttagaacaattgaaaagacttggaatttaaatccacctttcttcttcactttaatgatagaatattaattttccctttatatatatatatatatatatatacgcgcacatatatttacatatatattaatgttttgtaacctatattggggcgattattccctaaatgtaatgtcagggttatactgtatcaattgctaaagtagatctcattcatcgagagcataggatgaaataaaagatacaagaacgtggcggacaagaagaaattttacgaaataagatcggctaaagctttcgctaaatgcttctttgaagtgaaatttaacggcttgtacttaacttcaggttttataacgtatgcatgaagtgattgaattgcgcaattagtggtcctggaaagcaaatccccatcactgacatcactagtgattttatttttatcaagcgcaagatactcgcataatttacccatcacttgatcaaacttcgggaaggtaaatcttctaggaacctttgttaacttttcaatttccacaattttaaggtgtgtctccaaatcacggatggttaaaaagttgcctccaaataccaaagagtctactggtgtataaactgcatgaatatatccagctg

SEQ ID NO: 84058 - protein, 527 aa, Saccharomyces cerevisiae
MPMDFQPTSSHSNWVVQKFGGTSVGKFPVQIVDDIVKHYSKPDGPNNNVAVVCSARSSYTKAEGTTSRLLKCCDLASQESEFQDIIEVIRQDHIDNADRFILNPALQAKLVDDTNKELELVKKYLNASKVLGEVSSRTVDLVMSCGEKLSCLFMTALCNDRGCKAKYVDLSHIVPSDFSASALDNSFYTFLVQALKEKLAPFVSAKERIVPVFTGFFGLVPTGLLNGVGRGYTDLCAALIAVAVNADELQVWKEVDGIFTADPRKVPEARLLDSVTPEEASELTYYGSEVIHPFTMEQVIRAKIPIRIKNVQNPLGNGTIIYPDNVAKKGESTPPHPPENLSSSFYEKRKRGATAITTKNDIFVINIHSNKKTLSHGFLAQIFTILDKYKLVVDLISTSEVHVSMALPIPDADSLKSLRQAEEKLRILGSVDITKKLSIVSLVGKHMKQYIGIAGTMFTTLAEEGINIEMISQGANEINISCVINESDSIKALQCIHAKLLSERTNTSNQFEHAIDERLEQLKRLGI

SEQ ID NO: 84059 - DNA, 1680 bp, Oryza sativa
  CDS (1)..(1680)
atggcgatcgctctccgattagcggccgcgccgctccgcctccgcctcgtctcgccggcccctccggcgatcggcggcgcgggagatggaggacgacgaggaggaggaggagcagctcgtatcggtgtcctgggcagggctcgctgccgccgccgccgcggcggaggcgggagactggaggtggcggcggcggccgccgatgactccgctcgctgtcgggccaagggagtgggcgccgccgccgccgcggcggaaaccctaggtgggatcggggtgggaggtggggaccagctgagcgtggtgatgaagttcggggggtcgtcggtgtcgtcggcggcgaggatgcgggaggtggcgggcctcatcctcgccttccccgaggagcgccccgtcgtcgtcctctccgccatggggaagaccaccaatctcctcctcctcgctggtgagaaggcagtgggatgcggcgtgatccgtgtttcggaaattgaagagtggaatttgatcaaagatctacacattaaaactgtggaggaacttgcactgccaagatctgtaatacacactatgctggatgaactggagcagctcttgaaaggtattgcaatgatgaaagagctgacacttcggaccactgactaccttgtttcatttggggagtgcatgtctacacggatttttgctgcttatttgaacaaaatcggagtaaaagcacggcagtacgacgcatttgatattggtttcataacaacagacgatttcggaaacgcggacatcttggaggcaacttatcctgctgttgcgaagagattacatggagactggattcgtgatccagcgatacctattgttactgggttccttgggaagggctggaaatcaggcgctgtaaccactttaggccgaggtggcagtgacttgactgctacaaccattggtaaagccctggggttgagagaaattcaggtatggaaagatgttgatggtgtactgacctgtgatccaaatatctacccgaatgcaaccactgtgccatacttaacatttgaagaggcagcagaacttgcttattttggtgcccaggtattacatccacaatctatgagacctgctagagaaggtgatataccagtcagggttaagaattcgtacaaccctaaagctccaggcaccctgatcactaaacaaagagagatggataaggttgtgctaactagcatagtgctcaagtcaaatgtcactatgttggatatagtaagcactcggatgcttggtcaatttggttttctggcaaaggtcttctctatattcgaagatctagggatatctgtagattgtgtggctactagtgaagttagtatttctgtgtcgcttgatccatcaaagatctggagcagggaacttattcaacaggaacttgaccatgtagttgaagagcttgagaaaattgcagttgtccatctacttcagcagagggcaataatatcactcattggaaacgtacggcgatcatctcttatactggaaaaggcctttcaagtgttgaggaaaagcggggtgaatgtccagatgatctcgcaaggtgcatccaaggtagtccttgataagactgttctcacacttgacaacgctgtatccatgtcctggttcctgatatcaatgttgccgccttcaacaggttaa

SEQ ID NO: 84060 - protein, 559 aa, Oryza sativa
MAIALRLAAAPLRLRLVSPAPPAIGGAGDGGRRGGGGAARIGVLGRARCRRRRGGGGRLEVAAAAADDSARCRAKGVGAAAAAAETLGGIGVGGGDQLSVVMKFGGSSVSSAARMREVAGLILAFPEERPVVVLSAMGKTTNLLLLAGEKAVGCGVIRVSEIEEWNLIKDLHIKTVEELALPRSVIHTMLDELEQLLKGIAMMKELTLRTTDYLVSFGECMSTRIFAAYLNKIGVKARQYDAFDIGFITTDDFGNADILEATYPAVAKRLHGDWIRDPAIPIVTGFLGKGWKSGAVTTLGRGGSDLTATTIGKALGLREIQVWKDVDGVLTCDPNIYPNATTVPYLTFEEAAELAYFGAQVLHPQSMRPAREGDIPVRVKNSYNPKAPGTLITKQREMDKVVLTSIVLKSNVTMLDIVSTRMLGQFGFLAKVFSIFEDLGISVDCVATSEVSISVSLDPSKIWSRELIQQELDHVVEELEKIAVVHLLQQRAIISLIGNVRRSSLILEKAFQVLRKSGVNVQMISQGASKVVLDKTVLTLDNAVSMSWFLISMLPPSTG

SEQ ID NO: 84061 - DNA, 1698 bp, Oryza sativa
  CDS (1)..(1698)
atggcggtggcgctccggttcgcggccgtcgcgcgggactcgccggcggccgccgctccccccagggtggggagggagcagcagtatctcgcgtgcgcggcggcggcgaggccgggagggaggtgttcgaggaggaggggattggtggtgcggtgccagagcggggcggcggcggttgtcctcaacaaggacgacgcggcgtcggtggccgccgccgccgcctcctccgcgacggggttcaccgtcgccatgaagttcggcgggtcgtcggtggcgtcggcggagcggatgcgggaggtggccgatctcatactcagcttccccgaggagactcccgttgttgttctctccgccatggggaagaccaccaataacctcctcctggccggagagaaggctgtcagctgcggcgccccgaaggcgtctgaaattcccgagctcgcagttatcaaggagctccatgttaggactattgatgagcttggattggatagatcgattgtttcaggtttattggaagaattggaacaacttcttaagggtgttgctatgatgaaagaactaactcctaggacacgggattaccttgtttccttcggtgaatgcatgtctacaagaatatttgctgcatatttgaataaacttgggaaaaaggctcggcagtatgatgcatttgatattggctttataactactgatgatttcacaaatgcggacattcttgaagcgacatatcctgctgttgcaaagaggttacagggtgattggattgacgaccctgctattcctatagttactggtttccttggaaaaggatggaaatcatgtgctgtcaccactttaggcagaggtggcagcgacttgactgctaccaccattggcaaagcgttgggattaagagagatccaggtatggaaggatgttgatggtgtgttgacatgtgatcctaatatttgtgcgaacgcgatacctgtaccctacttgacttttgaggaggcagctgaacttgcctactttggtgcacaggttttgcatccccaatcaatgagaccagccaaagaaggtgatataccagttagagttaagaattcatataaccgtcgagcacctggtactgttattactaaaacaagagatttgagcaagagtatattaaccagcattgtattgaagtcaaacattactatgctggatatagtgagcacaaggatgcttggccagtatggttttctggcgaaggttttctcaatatttgaagatttaggtatctctgttgattgtgtggctaccagtgaagtcagtatatcattgacactagatccatcaaaactatggtgtcgtgaattgatccagcaggaacttgatcatgtagttgaagaacttgaaaaaattgcagttgttcatctactgcagcacaggtctatcatctcactgatagggaatgtacagagatcgtcattgattcttgagaaggctttcaatgttctacggagaaatggcgttaacgtccagatgatctcacaaggggcatccaaggtgaacatttcattggtggtccatgatagcgaggcgaaacagtgtatacaggcccttcattcagcattctttgagaacggtttcttgtcagaagttgaggaagaggatcttcaacacaatggctctcctgtgagcccaaatggtgtcatttacggaaactag

SEQ ID NO: 84062 - protein, 565 aa, Oryza sativa
MAVALRFAAVARDSPAAAAPPRVGREQQYLACAAAARPGGRCSRRRGLVVRCQSGAAAVVLNKDDAASVAAAAASSATGFTVAMKFGGSSVASAERMREVADLILSFPEETPVVVLSAMGKTTNNLLLAGEKAVSCGAPKASEIPELAVIKELHVRTIDELGLDRSIVSGLLEELEQLLKGVAMMKELTPRTRDYLVSFGECMSTRIFAAYLNKLGKKARQYDAFDIGFITTDDFTNADILEATYPAVAKRLQGDWIDDPAIPIVTGFLGKGWKSCAVTTLGRGGSDLTATTIGKALGLREIQVWKDVDGVLTCDPNICANAIPVPYLTFEEAAELAYFGAQVLHPQSMRPAKEGDIPVRVKNSYNRRAPGTVITKTRDLSKSILTSIVLKSNITMLDIVSTRMLGQYGFLAKVFSIFEDLGISVDCVATSEVSISLTLDPSKLWCRELIQQELDHVVEELEKIAVVHLLQHRSIISLIGNVQRSSLILEKAFNVLRRNGVNVQMISQGASKVNISLVVHDSEAKQCIQALHSAFFENGFLSEVEEEDLQHNGSPVSPNGVIYGN

SEQ ID NO: 84063 - DNA, 1701 bp, Zea mays
  CDS (1)..(1701)
atggcaatcccagtgcgatcggctgccgcgccccgccgcctcgttccgtcgatacctccggcgagctctggacatgttcgaggactggcgtgcttcggtacccgaaccgggcctcgcggtgcaagagggttgtcaatggtggtcgccgactccaccagccgtcgggccaagcaagcggacggcggggacggcgtccttggggcgcctgttctcggagggctcgggatggagggattgggggatcagctcagcgtggtgatgaagttcggggggtcctcggtgtcgtcggccgcgaggatggctgaggtggccggcctcatcctgacgttccccgaggagcgccccgtcgtcgttctctctgccatggggaaaaccaccaacaaccttctccttgctggagagaaggcagtagggtgtggagttatccatgtttctgaaatcgaagagtggaatatggtcaaaagcctacatatcaagacggtggatgaacttggacttccaagatctgtaatacaagacatgctagatgaactggagcaactattgaaaggtatcgctatgatgaaagagctgacgcctaggaccagtgactaccttgtttcatttggagaatgcatgtccaccaggattttttctgcttatttgaacaaaattcgtgtcaaggcacggcaggggccatgtaaccagcctagctgcaaatccccatatgacgcatttgatattggtttcattacaactgttgaatttggtaatgcggatatcttagaagcaacctatcctgctgttgcgaagagacttcatggggactggatacaggatccagcgatacctgttgttactgggttccttgggaagggctggaaatctggtgctgtaactactttaggccgaggtggtagtgacttgactgctacaaccattggtaaagccttgggactgagagaaattcaggtatggaaagatgttgatggtgtacttacttgtgatccaaatatctacccacatgcaaagactgttccatacttaacatttgaagaggccacagaacttgcttattttggtgctcaggttttgcatccacaatcgatgagacctgctagagaaggtgatattccagttagggttaagaattcatacaaccctaaagctccaggcacccttattaccagacaaagagacatggataaggttgtactaactagcatagtgctcaagtcaaatgtcactatgttggacattgtgagcactcggatgcttggtcagtatggttttctggcaagggtatttgctatatttgaagatctatgtatatctgtggattgtgttgctaccagtgaagttagtgtttctgtgtcacttgatccatcaaagatctggagtagggaactgatacagcaggaacttgaccatgtagttgaagagcttgagaaaatagcaattgttcgtctacttcagcagagggcgataatttcacttatcggaaatgtggagcaatcgtctctcatactagaaaagacgggacgtgtgctgaggaaaagtggggttaatgttcagatgatctcgcaaggagcgtcaaaggttaacatgtcgctgatagtccatgatagcgatgcaaaggcactcgtagaagcccttcatcaggcgttctttgaagacgatgtcctatcacaagtcgaagcggagaacctactcgtgggctga

SEQ ID NO: 84064 - protein, 566 aa, Zea mays
MAIPVRSAAAPRRLVPSIPPASSGHVRGLACFGTRTGPRGARGLSMVVADSTSRRAKQADGGDGVLGAPVLGGLGMEGLGDQLSVVMKFGGSSVSSAARMAEVAGLILTFPEERPVVVLSAMGKTTNNLLLAGEKAVGCGVIHVSEIEEWNMVKSLHIKTVDELGLPRSVIQDMLDELEQLLKGIAMMKELTPRTSDYLVSFGECMSTRIFSAYLNKIRVKARQGPCNQPSCKSPYDAFDIGFITTVEFGNADILEATYPAVAKRLHGDWIQDPAIPVVTGFLGKGWKSGAVTTLGRGGSDLTATTIGKALGLREIQVWKDVDGVLTCDPNIYPHAKTVPYLTFEEATELAYFGAQVLHPQSMRPAREGDIPVRVKNSYNPKAPGTLITRQRDMDKVVLTSIVLKSNVTMLDIVSTRMLGQYGFLARVFAIFEDLCISVDCVATSEVSVSVSLDPSKIWSRELIQQELDHVVEELEKIAIVRLLQQRAIISLIGNVEQSSLILEKTGRVLRKSGVNVQMISQGASKVNMSLIVHDSDAKALVEALHQAFFEDDVLSQVEAENLLVG

SEQ ID NO: 84065 - DNA, 1698 bp, Zea mays
  CDS (1)..(1698)
atggcggcgccggctctccgtatcactgcgcggctgggacttgcacttgacggtgccaccgccgcgagacggcgcgaggcctcggcgcctgtggcggtgccggccgcgccgtggctgaagaaggcggcggtccggtgccagcgagccgtcggtgccgctgttgccgagaagaaggatgcgccggtatcggttgcgcaggagagaagcggcgacgggggcgcggcgccggagctcaccgtcgtgatgaagttcggcgggtcgtcagtggcctcggccgagcggatgcgggaggtggcagacctcatcctcagcttccccgaggagcacccggtcgtcgtgctctcagcgatgggaaagaccaccaacaaactcctcatggctggggaaaaggcagtgggctgtggtgcgaccaacgtctcggagcttgatgagctctcctttgtaaaagaattgcatcttgggacgcttgatcagcttgggctagataaatcaattgtttgtggtttgttggatgaacttgaacaacttcttaagggaattgctatgatgaaagagctgactcttaggacacgagattatctagtttcatttggtgaatgcatgtctacaagaatatttgctgcacttttaaacaaaattggagtaaaagctcggcagtatgatgcatttgatcttggctttataactaccgatgatttcacaaatgcggatattctggaagcaacttatcctgctgttgcaaggaggctacatgtggaatggattaatgatcctgctatacctatagtcactggctttcttggcaagggatggagatctggtgcaataactaccttgggcaggggtggtagcgacttgacagctacaaccattggcaaagccttgggattaagagaaattcaggtttggaaagatgttgatggtgttttaacatgtgacccaaatatccatcctaaggcaaaacctgtgccatacttgacatttgatgaggcagctgaacttgcctattttggagcgcaggttttgcatccacaatcaatgcggccagctagagaaggcgatgtacctgtgagggttaagaattcttataaccgtcgagcccctggtacccttatcactaaagcaagagatatgagtaagactgttttgactagcattgttttgaaatcaaatattacaatgcttgatatagtcagcacacgcatgcttggccagtacggttttctagctaaggttttttcgatatttgaagacttgggcatctctgttgattgtgtggctaccagtgaagtcagcatatctttgacactggatccatcgaaactatggagttgtgaattggttcagcacaaaaatgaacttgatgatgttattgaagagcttgagaagatagcagttgttcatctactgcagaacaggtcaataatatctttaattggaaatgtgcagaggtcgtctttgattcttgaaaaggctttcaatgttctacgaagaaacggtgtcaatgtccagatgatatcgcaaggggcgtccaaggtgaacatttccttggtggtccatgacagtgaggcaaaacagtgtgttcaagccctccactccgcgttctttgagaatggtttcttgttggaagctgatgagttggatgttcagcatgatggctttacatcgcattccaatggcacaatccacagccattag

SEQ ID NO: 84066 - protein, 565 aa, Zea mays
MAAPALRITARLGLALDGATAARRREASAPVAVPAAPWLKKAAVRCQRAVGAAVAEKKDAPVSVAQERSGDGGAAPELTVVMKFGGSSVASAERMREVADLILSFPEEHPVVVLSAMGKTTNKLLMAGEKAVGCGATNVSELDELSFVKELHLGTLDQLGLDKSIVCGLLDELEQLLKGIAMMKELTLRTRDYLVSFGECMSTRIFAALLNKIGVKARQYDAFDLGFITTDDFTNADILEATYPAVARRLHVEWINDPAIPIVTGFLGKGWRSGAITTLGRGGSDLTATTIGKALGLREIQVWKDVDGVLTCDPNIHPKAKPVPYLTFDEAAELAYFGAQVLHPQSMRPAREGDVPVRVKNSYNRRAPGTLITKARDMSKTVLTSIVLKSNITMLDIVSTRMLGQYGFLAKVFSIFEDLGISVDCVATSEVSISLTLDPSKLWSCELVQHKNELDDVIEELEKIAVVHLLQNRSIISLIGNVQRSSLILEKAFNVLRRNGVNVQMISQGASKVNISLVVHDSEAKQCVQALHSAFFENGFLLEADELDVQHDGFTSHSNGTIHSH

SEQ ID NO: 84067 - DNA, 2751 bp, Glycine max; identical to SEQ ID NO: 797
  CDS (1)..(2751)

SEQ ID NO: 84068 - protein, 916 aa, Glycine max; identical to SEQ ID NO: 798

SEQ ID NO: 84069 - DNA, 2763 bp, Zea mays
  CDS (1)..(2763)
atgaggagcctcaccgtggcaagccgccacccgggcgccgctttctctacccgccgccgcccccttcttcaccccgccgcagccggaagggactcgaccttccagcggtgctggcgatgggaaaaaactcaggacagctccttcgggagctcactaaggaccagccgccttccaagaactgtgcacggagatattttgaagaatttgctcgcaccaactgctggtgctgtttcagttgagcaagctgaagctattgctgacctcccaaaaggtgacatgtggtcggtgcacaagtttggtggcacatgcatggggacctctgagagaattcacaatgttgctgatatagtccttcgtgatccttctgagaggaaactggtagttgtatctgcaatgtctaaggttaccgacatgatgtataatcttgtaaacaaggctcaatcaagggatgattcttacattgctgtactggatgaagtttttgataagcatatgacaacagcaaaggatttgcttgctggagaagaccttgcaagattcctgtctcagttacatgcagacatcagtaacctaaaagcaatgcttcgggccatatatatagctgggcatgcaacagagtctttctctgattttgttgttggtcatggagagttatggtctgctcaaatgttatcatatgcaatacagaagtctggaacaccatgcagttggatggatacaagggaagttctagttgtgaatccgtcaggagccaaccaggtagatcctgactatttggaatctgaaaaacgacttgaaaaatggttttctcgatgtccggctgagacaataattgctactgggtttattgcgagtacacctgaaaacatcccaacaaccttaaaaagagatggaagtgatttctctgcagccataattggttcccttgttaaggctcgccaggtgaccatctggactgatgttgatggggtatttagtgcagatcccagaaaagttagtgaggctgtaatcttaagcacattgtcgtatcaggaggcctgggaaatgtcatattttggggcaaatgtcttgcatccacgtactattatacctgtgatgaaatataatatccctattgttataaggaacatattcaatacttctgcccctggaactatgatctgtcaacagcctgctaatgaaaacggtgatttggaggcttgtgtcaaagcttttgcaactatagataaattggctttggttaatgtcgaagggactggaatggctggtgtcccaggtacagcaaatgccatatttggtgctgtgaaggatgttggagcaaatgttatcatgatatcacaggctagcagtgaacactctgtatgctttgctgttccagaaaaggaagttgcattggtttctgcagccttgcatgctaggtttcgtgaagcattggcagcagggaggttatctaaggttgaagtcattcataattgtagcatccttgctactgtcggcctgaggatggcaagtacacctggagtcagcgcgaccctttttgatgcactagctaaggcaaatattaatgtaagggcgatagctcaaggttgcagtgagtacaacattactattgtactgaagcaagaagactgcgtgcgggctctgagagctgcccactcaaggttcttcctctccaaaaccacactggctgttggcatcattggacctgggttgattggtcgcacactacttaatcagctgaaggatcaggctgctgtcctcaaggaaaatatgaacattgatttgcgtgtcatgggaatagctggttctaggacaatgcttttaagtgatataggagtagatttgacccagtggaaagagaagctacaaactgaagcagaacctgccaatcttgataagtttgttcatcatttgtctgagaatcactttttccctaacagagttttggtagattgcacagcagatacaagtgttgcatctcactattatgattggctaaagaaaggaatccatgtcatcactccaaacaagaaagcaaattcagggccacttgacaggtatcttaaacttagaactcttcagcgtgcatcatatactcattacttctatgaagcaactgttggtgctggcctccctatcattagcactctgcgtggtctcctagagacaggtgacaagatattgcgcattgaagggattttcagtggaacgttaagttatatttttaacaacttcgaaggagcaagaacctttagtgatgttgttgctgaagcaaaaaaagcaggatacacagaaccagatccaagagatgatctgtctggtactgatgttgccaggaaggtcataattcttgcaagggaatctggtttggggcttgaactttctgatattcctgtacgaagtcttgtgccagaggcacttaagtcatgtacctcagccgacgaatacatgcagaagttaccatcttttgacgaggattgggcaagagagaggaaaaatgctgaagctgcgggagaagttctgcggtatgttggagtggtggatgtggtcagcaagaaggggcaggtggagctgcgagcctacaagagggaccacccgttcgcgcagctatctggttccgacaacatcatagccttcaccacctcgaggtacaaggatcagccactgatcgtgcgaggtccgggggctggtgcggaagtgactgcaggaggcgtcttctgcgacatactgcgcctgtcttcctaccttggtgccccctcgtag

SEQ ID NO: 84070 - protein, 920 aa, Zea mays; identical to SEQ ID NO: 780

SEQ ID NO: 84071 - DNA, 2757 bp, Zea mays; identical to SEQ ID NO: 15163
  CDS (1)..(2757)

SEQ ID NO: 84072 - protein, 918 aa, Zea mays; identical to SEQ ID NO: 630

SEQ ID NO: 84073 - DNA, 26 bp, Artificial sequence
  primer
atgtctgaaattgttgtctccaaatt

SEQ ID NO: 84074 - DNA, 27 bp, Artificial sequence
  primer
ttactcaaacaaattactatgcagttt

SEQ ID NO: 84075 - protein, 717 aa, Artificial sequence
  consensus sequence
  Variant (2)..(2): Xaa in position 2 is any amino acid
  Variant (7)..(7): Xaa in position 7 is any amino acid
  Variant (10)..(30): Xaa in position 10 to 30 is any amino acid
  Variant (31)..(38): Xaa in position 31 to 38 is any or no amino acid
  Variant (40)..(40): Xaa in position 40 is any amino acid
  Variant (43)..(46): Xaa in position 43 to 46 is any amino acid
  Variant (47)..(53): Xaa in position 47 to 53 is any or no amino acid
  Variant (55)..(56): Xaa in position 55 to 56 is any amino acid
  Variant (58)..(70): Xaa in position 58 to 70 is any amino acid
  Variant (71)..(139): Xaa in position 71 to 139 is any or no amino acid
  Variant (141)..(143): Xaa in position 141 to 143 is any amino acid
  Variant (144)..(145): Xaa in position 144 to 145 is any or no amino acid
  Variant (148)..(199): Xaa in position 148 to 199 is any amino acid
  Variant (200)..(223): Xaa in position 200 to 223 is any or no amino acid
  Variant (226)..(226): Xaa in position 226 is any amino acid
  Variant (228)..(236): Xaa in position 228 to 236 is any amino acid
  Variant (237)..(241): Xaa in position 237 to 241 is any or no amino acid
  Variant (249)..(250): Xaa in position 249 to 250 is any amino acid
  Variant (252)..(259): Xaa in position 252 to 259 is any amino acid
  Variant (261)..(266): Xaa in position 261 to 266 is any amino acid
  Variant (267)..(267): Xaa in position 267 is any or no amino acid
  Variant (270)..(270): Xaa in position 270 is any amino acid
  Variant (272)..(273): Xaa in position 272 to 273 is any amino acid
  Variant (275)..(275): Xaa in position 275 is any amino acid
  Variant (278)..(282): Xaa in position 278 to 282 is any amino acid
  Variant (284)..(292): Xaa in position 284 to 292 is any amino acid
  Variant (294)..(295): Xaa in position 294 to 295 is any amino acid
  Variant (297)..(300): Xaa in position 297 to 300 is any amino acid
  Variant (303)..(303): Xaa in position 303 is any amino acid
  Variant (306)..(318): Xaa in position 306 to 318 is any amino acid
  Variant (320)..(362): Xaa in position 320 to 362 is any amino acid
  Variant (363)..(406): Xaa in position 363 to 406 is any or no amino acid
  Variant (408)..(411): Xaa in position 408 to 411 is any amino acid
  Variant (412)..(412): Xaa in position 412 is any or no amino acid
  Variant (414)..(422): Xaa in position 414 to 422 is any amino acid
  Variant (424)..(438): Xaa in position 424 to 438 is any amino acid
  Variant (439)..(663): Xaa in position 439 to 663 is any or no amino acid
  Variant (665)..(669): Xaa in position 665 to 669 is any amino acid
  Variant (670)..(671): Xaa in position 670 to 671 is any or no amino acid
  Variant (673)..(675): Xaa in position 673 to 675 is any amino acid
  Variant (676)..(677): Xaa in position 676 to 677 is any or no amino acid
  Variant (679)..(679): Xaa in position 679 is any amino acid
  Variant (680)..(680): Xaa in position 680 is any or no amino acid
  Variant (682)..(693): Xaa in position 682 to 693 is any amino acid
  Variant (694)..(695): Xaa in position 694 to 695 is any or no amino acid
  Variant (697)..(711): Xaa in position 697 to 711 is any amino acid
  Variant (712)..(716): Xaa in position 712 to 716 is any or no amino acid
VXKFGGXSVXXXXXXXXXXXXXXXXXXXXXXXXXXXXXVXSAXXXXXXXXXXXTXXLXXXXXXXXXXXXXXXXXXXXXXXXXXXXXXXXXXXXXXXXXXXXXXXXXXXXXXXXXXXXXXXXXXXXXXXXXXXXXXXXXXDXXXXXGEXXXXXXXXXXXXXXXXXXXXXXXXXXXXXXXXXXXXXXXXXXXXXXXXXXXXXXXXXXXXXXXXXXXXXXXXXXXXGFXGXXXXXXXXXXXXXXLGRGGSDXXAXXXXXXXXAXXXXXXXDVXGXXTXDPXXXXXAXXXXXXXXXEXXEXXXXGAXVLXXXXXXXXXXXXXPXXXXXXXXXXXXXXXXXXXXXXXXXXXXXXXXXXXXXXXXXXXXXXXXXXXXXXXXXXXXXXXXXXXXXXXXXXXXXXXXXXXXXXXGXXXXXFXXXXXXXXXVXXXXXXXXXXXXXXXXXXXXXXXXXXXXXXXXXXXXXXXXXXXXXXXXXXXXXXXXXXXXXXXXXXXXXXXXXXXXXXXXXXXXXXXXXXXXXXXXXXXXXXXXXXXXXXXXXXXXXXXXXXXXXXXXXXXXXXXXXXXXXXXXXXXXXXXXXXXXXXXXXXXXXXXXXXXXXXXXXXXXXXXXXXXXXXXXXXXXXXXXXXXXXXXXXXXXXXXXXXXXXXXXXXXXXXXXXXXXXXXXGXXXXXXXGXXXXXFXXLXXXXXXXXXXXXXXSXXXXXXXXXXXXXXXXXXXXH

SEQ ID NO: 84076 - protein, 48 aa, Artificial sequence
  protein pattern
  Variant (2)..(4): Xaa in position 2 to 4 is any amino acid
  Variant (5)..(6): Xaa in position 5 to 6 is any or no amino acid
  Variant (8)..(8): Xaa in position 8 is any amino acid
  Variant (10)..(10): Xaa in position 10 is Ile, Met or Val
  Variant (11)..(11): Xaa in position 11 is any amino acid
  Variant (12)..(12): Xaa in position 12 is Ser or Thr
  Variant (13)..(13): Xaa in position 13 is any amino acid
  Variant (16)..(20): Xaa in position 16 to 20 is any amino acid
  Variant (22)..(23): Xaa in position 22 to 23 is any amino acid
  Variant (24)..(24): Xaa in position 24 is Ile, Leu, Met or Val
  Variant (25)..(30): Xaa in position 25 to 30 is any amino acid
  Variant (32)..(33): Xaa in position 32 to 33 is any amino acid
  Variant (34)..(34): Xaa in position 34 is Glu, Asn or Gln
  Variant (35)..(35): Xaa in position 35 is any amino acid
  Variant (36)..(36): Xaa in position 36 is Ala, Ser or Thr
  Variant (37)..(38): Xaa in position 37 to 38 is any amino acid
  Variant (40)..(40): Xaa in position 40 is Ala or Ser
  Variant (41)..(41): Xaa in position 41 is any amino acid
  Variant (42)..(42): Xaa in position 42 is Ile or Val
  Variant (43)..(43): Xaa in position 43 is Ile, Leu, Met or Val
  Variant (44)..(47): Xaa in position 44 to 47 is any amino acid
  Variant (48)..(48): Xaa in position 48 is Ile, Leu, Met or Val
IXXXXXVXGXXXXDPXXXXXAXXXXXXXXXEXXXXXXXGXXXXXXXXX

SEQ ID NO: 84077 - protein, 15 aa, Artificial sequence
  protein pattern
  Variant (2)..(2): Xaa in position 2 is any amino acid
  Variant (4)..(4): Xaa in position 4 is any or no amino acid
  Variant (6)..(6): Xaa in position 6 is any or no amino acid
  Variant (9)..(9): Xaa in position 9 is any amino acid
  Variant (10)..(10): Xaa in position 10 is Ser or Thr
  Variant (12)..(12): Xaa in position 12 is Ala, Ser, Thr or Val
  Variant (13)..(13): Xaa in position 13 is any amino acid
  Variant (14)..(14): Xaa in position 14 is Phe, Ile, Leu, Met or Val
  Variant (15)..(15): Xaa in position 15 is Ala or Gly
LXRXGXSDXXAXXXX

SEQ ID NO: 84078 - protein, 10 aa, Artificial sequence
  protein pattern
  Variant (2)..(2): Xaa in position 2 is any amino acid
  Variant (7)..(7): Xaa in position 7 is Ser or Thr
  Variant (8)..(8): Xaa in position 8 is Cys or Ser
  Variant (9)..(9): Xaa in position 9 is Leu, Met or Val
  Variant (10)..(10): Xaa in position 10 is Ala, Gly or Ser
VXKFGGXXXX

SEQ ID NO: 84079 - DNA, 1452 bp, Synechocystis sp.
  CDS (1)..(1452): transl_table=11
atggtcaacctcaatcaacaagatttgcccctggtcaatgcgttaaaagccctagctcaacaaccggatacgcctttttatgcgccgggccataaaaggggtcagggtatttcccctagttttaaacaatggttggggccaaacctcttccaagctgatctgccggaattgccggaattagataatctctttgctcccaccggggcgatcgccaaagctcaggagttagccgcggatttatggggggcagaacacacttggttttctgttaacggttccaccgccggtattgtggccgcaattttggccacctgtggggatggggataaaattctcttgcctcggaatgttcaccaagcggcgatcgccggcattatccatgctggggcagtgccaatatttttggaaccggaggttaaccccgattgggatttggctttgggggtgacggaggaaactttaagtaaagcattgcaagaacatgacgatgcaaaagcagtatttttgctcaatcctacctaccacggtgttgtgggggacttacaaaaattaattaaattaagtcatagagttaacctacctgtcattgttgatgaagcccacggtgcccattttgctttccatccatccttacccagaccggctttagaattaggggcggatattgtcatccaatccacccataaaatgctgggagctttgagtcaatgtgccatgatccatggccaaggaaacttaattaatcccccaagaattagtcaatgtttgcaattaattcaatccactagtcccaattatgttttattggcttccctcgatgatgcgcggcaccaaatggccaatggcggcagagaaaagatggcggaattattgaattttaccctccattatcgacaacaattaagtcaaattcctgggttaactttattagaaattaccaaacctttgcccggagctttaatcctcgatcccacccgcattaccgtcgatgtcactgcctggggaatgtcaggatttgaggtagatgatttgttacgggaaaagtttcaaattacagcggaattgcccaccctaaggcagttaagttttatcgttagtattggcaatcaagcccaggatttaggacatttattggaagctttaacccagttagcacctacgaatcctcaacaaccttttcacctaactttacccgtcttacccggtactattctggctatgactccccgccgagcggcccatgctgcccaaaaatcggtaaccgttaatgaagcgattgggaaaattagtgctggtctgctttgcccctatccccccggtattcccgtccttgttcccggagaaattatcaccccggaggcgatcgcctttttgacagaagttttaaatttagggggtaccatcagcggtttagctagtgaggaattaacccatttggctgtggtgaattaa

SEQ ID NO: 84080 - protein, 483 aa, Synechocystis sp.
MVNLNQQDLPLVNALKALAQQPDTPFYAPGHKRGQGISPSFKQWLGPNLFQADLPELPELDNLFAPTGAIAKAQELAADLWGAEHTWFSVNGSTAGIVAAILATCGDGDKILLPRNVHQAAIAGIIHAGAVPIFLEPEVNPDWDLALGVTEETLSKALQEHDDAKAVFLLNPTYHGVVGDLQKLIKLSHRVNLPVIVDEAHGAHFAFHPSLPRPALELGADIVIQSTHKMLGALSQCAMIHGQGNLINPPRISQCLQLIQSTSPNYVLLASLDDARHQMANGGREKMAELLNFTLHYRQQLSQIPGLTLLEITKPLPGALILDPTRITVDVTAWGMSGFEVDDLLREKFQITAELPTLRQLSFIVSIGNQAQDLGHLLEALTQLAPTNPQQPFHLTLPVLPGTILAMTPRRAAHAAQKSVTVNEAIGKISAGLLCPYPPGIPVLVPGEIITPEAIAFLTEVLNLGGTISGLASEELTHLAVVN

SEQ ID NO: 84081 - DNA, 1458 bp, Zea mays
  CDS (1)..(1458)
atgcctctggtctgtgcactgcaattaactgccagacaagatgtttcctgctttcacttcccaggacacaacagaggaaaagctgctccatcttccttgtcgaaactcattggctcaggggcatttctgcatgacttgcccgagctacccgagctcgatgatctcttctccccaaaaggtgtgattctagatgcccagaggcgagcagctcaactgtttgggtcatctaaaacttggttccttgtcaacggaacgacctgtggaatccaggcctcagtgatggctacctgttctcctggcgactacctcattgtgccacggaactgccacctttcagtgatctctgcgctggtcttgtctggtgtggtgcctaaatacataataccagaatataattctgggtgggacattgctggtggtatcaccccgctgcagctggatgaagcagtaaaagagctggaggaggatgggaagagggtaggcgctgttcttgttacttcacccacctaccatggtgtatgcagcaatgtgcaaggtattgtcagtgtttgtcatccacgaggcattccggttatagttgatgaagcgcatggtgcacatttcaggttccatgacagtttgccaagcactgcaattgagcaaggtgctgacctagctgtgcaatccacacacaaggtcctgtgctcccttacacagtcttcaatgcttcacatgtctggagatcttgtcgatgtagataaagtaagccagtgccttcagctcctccagagctcgagcccgagttaccttctactgtcatctttagatgccgcgagagatcagctgagccagaacacaaatatatttgatgagccattagctatagcatcggaaacaaaagacctgctggcgagaatccctgggatatctgttctagacttaccatgctttgcttctgatttccctgccattgatccgttgcgcatcacactcagtgcctcagatctgcaattatcgggatacgaagccgatgacattttatatgaaggccatcaaatcgtatctgagcttgttggcacaagggccgtgacatttgcagtcaacttaggaaccagagtgcaggacgctgagaagcttgtgcagtctgcaaagcatctatcagaaaaacatttctttgcaaatagcctgaaacccgtgaaggagaatcgtgtgcatggcccattagagaatatctctgtgcatctgagtccaagagaggccttctttacagagaagaggagagtgaaaatcgaggacagccttggtgaaatctgtggtgagctaatatgcccgtatccacctggtatcccagttctgattccaggcgaggtagtaacccatgattcactgtcctacttgatgagcgttagacaccaaggcatcacgatcagtggagcggctgatgctgagctaaattccattctggtgtgcgacttatga

SEQ ID NO: 84082 - protein, 485 aa, Zea mays
MPLVCALQLTARQDVSCFHFPGHNRGKAAPSSLSKLIGSGAFLHDLPELPELDDLFSPKGVILDAQRRAAQLFGSSKTWFLVNGTTCGIQASVMATCSPGDYLIVPRNCHLSVISALVLSGVVPKYIIPEYNSGWDIAGGITPLQLDEAVKELEEDGKRVGAVLVTSPTYHGVCSNVQGIVSVCHPRGIPVIVDEAHGAHFRFHDSLPSTAIEQGADLAVQSTHKVLCSLTQSSMLHMSGDLVDVDKVSQCLQLLQSSSPSYLLLSSLDAARDQLSQNTNIFDEPLAIASETKDLLARIPGISVLDLPCFASDFPAIDPLRITLSASDLQLSGYEADDILYEGHQIVSELVGTRAVTFAVNLGTRVQDAEKLVQSAKHLSEKHFFANSLKPVKENRVHGPLENISVHLSPREAFFTEKRRVKIEDSLGEICGELICPYPPGIPVLIPGEVVTHDSLSYLMSVRHQGITISGAADAELNSILVCDL

SEQ ID NO: 84083 - DNA, 1461 bp, Kineococcus radiotolerans SRS30216
  CDS (1)..(1461): transl_table=11
atggaccactcccgcacccccgtcctggaggcgatcgaggccttccacgcccgaggcgacgtggtgttcggtcctcccgggcaccgccagggtctcggggtggacccccgggtcctcgccgtcctgggccggggaaccttcgccgcggacatcctcaccctcaacggcctcgacgaccgccgggagtcgcagggcgtcgtcagccaggccgaggagctcatggccgacgccgtcggggccgaccgggcgttcttctccacctgcggcagctcgctgtcggtcaagtccgcgatgatctccgtcgccgggccgggggagaagctgctggtctcgcgcaacgcgcacaagtccgtcatcgccggcgtcatcatctccggcatcgaccccgtctgggtgcacccgcacttcgaccccgagcgccacctcgcgcacccgccggagcccgccgacgtccgcgccgcgctgcgggccaaccccgacgccaaggggatgctgctcatctcgcccaccgactggggcacctgcgccgacatcggcggcgtcgccgaggtctgccacgagttcggcgtccccctcatcgtcgacgaggcgtggggggcgcacctgcccttccaccccgacctgcccgagtgggggatgaacgtcggcgccgacctcgtcgtcaccagcgtccacaagatgggcggggcgatcgagcagagctccgtcttccacctcaagggcgaccgcatcgaccccgacgtcctctccgcgcgcgaggacctgctggggacgacgagttcctccccgctggtctacgccagcctcgacgggtggcgccggcagatggtggagcagggccgggaactcctcggcgccgcgctggaacgcacccggcggctgcgggccgcggtcggcgggatcgagggcctggacgtcctgggggaggaggtcctcggcgccgggggtgcgttcgagctggaccccttcgccgtgaccgtcgacgtgcgcgggctgggcatcaccgggttccaggccggggactggctgcggtcggcgtgccaggtcgacatcggttccgccgacacccgccgcatcggggcgcgcctgacgtacgccgacgacgacgcccggctggagcggctgctggagtccctgcggcgcctggccgccgagagcggcgacctggagcgccaaccgccggtggacctgccgcgcccgggggcgctggagctggagaacgcgatgctgccccgcgacgcgttcttcggacccaccgagcaggtcccggccgcggaggccgtcggccgcatcgccgccgaggtcgtgagcccctacccgccgggggtcccggtgctcacgccgggcgaggtcgtcggcgccgaggtcgtggactacctgcgctccggcgtcgcggccgggatgctcgtccccgacgccgccgacggttcggtggagaccctgcgggtcgtcgcccgctga

SEQ ID NO: 84084 - protein, 486 aa, Kineococcus radiotolerans SRS30216
MDHSRTPVLEAIEAFHARGDVVFGPPGHRQGLGVDPRVLAVLGRGTFAADILTLNGLDDRRESQGVVSQAEELMADAVGADRAFFSTCGSSLSVKSAMISVAGPGEKLLVSRNAHKSVIAGVIISGIDPVWVHPHFDPERHLAHPPEPADVRAALRANPDAKGMLLISPTDWGTCADIGGVAEVCHEFGVPLIVDEAWGAHLPFHPDLPEWGMNVGADLVVTSVHKMGGAIEQSSVFHLKGDRIDPDVLSAREDLLGTTSSSPLVYASLDGWRRQMVEQGRELLGAALERTRRLRAAVGGIEGLDVLGEEVLGAGGAFELDPFAVTVDVRGLGITGFQAGDWLRSACQVDIGSADTRRIGARLTYADDDARLERLLESLRRLAAESGDLERQPPVDLPRPGALELENAMLPRDAFFGPTEQVPAAEAVGRIAAEVVSPYPPGVPVLTPGEVVGAEVVDYLRSGVAAGMLVPDAADGSVETLRVVAR

SEQ ID NO: 84085 - DNA, 2142 bp, Escherichia coli O157:H7 EDL933
  CDS (1)..(2142): transl_table=11
atgaacatcattgccattatgggaccgcatggcgtcttttataaagatgagcccatcaaagaactggagtcggcgctggtggcgcaaggctttcagattatctggccacaaaacagcgttgatttgctgaaatttatcgaacataaccctcgaatttgcggcgtgatttttgactgggatgaatacagtctcgatttatgtagcgatatcaatcagcttaatgaatatctcccgctttatgccttcatcaacacccactcgacgatggatgtcagcgtgcaggatatgcggatggcgctctgtttttttgaatatgcgctggggcaggcggaagatatcgccattcgtatgcgtcagtacaccgacgaatatcttgataacattaccccaccgttcacgaaagccttgtttacctacgtcaaagagcggaagtacaccttttgtacgccgggtcatatgggcggcaccgcatatcaaaaaagcccggttggctgtctgttttatgactttttcggcgggaatacccttaaggctgatgtctctatttcggtcaccgagcttggttcgttgctcgaccacaccgggccacacctggaagcggaagagtacatcgcgcggactttcggcgcggaacagagttatatcgttaccaacggaacatcgacgtcgaacaaaattgtgggtatgtacgccgcgccatccggcagtacgctgttgattgaccgcaattgtcataaatcgctggcgcatctgttgatgatgaacgatgtagtgccagtctggctgaaaccgacgcgtaatgcgttggggattctgggtgggatcccgcgccgtgaatttactcgcgacagcatcgaagagaaagtcgctgccaccacgcaggcacaatggccggttcatgcggtgattaccaactcaacctatgatggcttgctctacaacaccgactggatcaaacagacgctggatgtcccgtcgatccacttcgattccgcctgggtgccgtacacccattttcatccgatctaccaggggaaaagtggtatgagcggcgagcgtgttgcgggaaaagtgatcttcgaaacgcaatcgacccacaaaatgctggcggcgttatcgcaggcttcgctgatccacattaaaggtgagtatgacgaagaggcgtttaacgaagcctttatgatgcataccaccacctcgcccagttatcccattgttgcttcggttgagacggcagcagcgatgctgcgtggtaatccgggcaaacggctgattaaccgttcagtagaacgagctctgcattttcgcaaagaggtccagcggctgcgggaagagtctgacggttggtttttcgatatctggcaaccgccgcaggtggatgaagccgaatgctggcccgttgcgcctggcgaacaatggcacggctttaacgatgcggatgccgatcatatgttcctcgatccggttaaagtcactattctgacgccggggatggacgagcagggcaatatgagcgaggaggggatcccggcggcgctggtggcgaagttcctcgatgagcgtgggatcgtggtagagaaaaccggcccatataacctgctgtttctctttagtattggcatcgataaaaccaaagcaatgggattattgcgtgggttgacggaatttaaacgctcttacgatctcaatctgcgaatcaaaaatatgcttccggatctgtacgcagaagatcccgatttctaccgcaatatgcgtattcaggatctggcgcaagggatccataagctgattcgtaaacacgatcttcccggtttgatgttgcgggcattcgatactttgccggagatgatcatgacgccacatcaggcatggcagagacagattaaaggtgaagtagaaaccattgcgctggaacaactggtcggtagagtatcggcaaatatgatcctgccttatccaccgggcgtaccgctgttgatgcctggagaaatgctgaccaaagagagccgcacagtactcgattttctactgatgctttgttccgtagggcaacattaccccggttttgaaacggatattcacggtgcgaaacaggacgaagacggcgtttaccgcgtacgagtcctaaaaatggcgggataa

SEQ ID NO: 84086 - protein, 713 aa, Escherichia coli O157:H7 EDL933
MNIIAIMGPHGVFYKDEPIKELESALVAQGFQIIWPQNSVDLLKFIEHNPRICGVIFDWDEYSLDLCSDINQLNEYLPLYAFINTHSTMDVSVQDMRMALCFFEYALGQAEDIAIRMRQYTDEYLDNITPPFTKALFTYVKERKYTFCTPGHMGGTAYQKSPVGCLFYDFFGGNTLKADVSISVTELGSLLDHTGPHLEAEEYIARTFGAEQSYIVTNGTSTSNKIVGMYAAPSGSTLLIDRNCHKSLAHLLMMNDVVPVWLKPTRNALGILGGIPRREFTRDSIEEKVAATTQAQWPVHAVITNSTYDGLLYNTDWIKQTLDVPSIHFDSAWVPYTHFHPIYQGKSGMSGERVAGKVIFETQSTHKMLAALSQASLIHIKGEYDEEAFNEAFMMHTTTSPSYPIVASVETAAAMLRGNPGKRLINRSVERALHFRKEVQRLREESDGWFFDIWQPPQVDEAECWPVAPGEQWHGFNDADADHMFLDPVKVTILTPGMDEQGNMSEEGIPAALVAKFLDERGIVVEKTGPYNLLFLFSIGIDKTKAMGLLRGLTEFKRSYDLNLRIKNMLPDLYAEDPDFYRNMRIQDLAQGIHKLIRKHDLPGLMLRAFDTLPEMIMTPHQAWQRQIKGEVETIALEQLVGRVSANMILPYPPGVPLLMPGEMLTKESRTVLDFLLMLCSVGQHYPGFETDIHGAKQDEDGVYRVRVLKMAG

SEQ ID NO: 84087 - DNA, 1476 bp, Streptococcus pneumoniae TIGR4
  CDS (1)..(1476): transl_table=11
ttgaaagagttagatcaaaaccaagccccaatttatgaggccttggtgaagttacgcaagaaaaggattgttccctttgatgttccaggtcacaagcgtggacggggaaatccagaacttgtcgaactcttaggagaaaaatgtgtaggcattgatgtcaattcgatgaaacctttggataatttaggccatcctatttcgattattcgtgatgcagaggagctggctgcagatgcttttggagctagccatgcctttctaatgattggtggaacaacttcatcggtgcagactatgattctggcaacctgcaaggcaggagataagattattctgccacgaaatgtccataaatctgctatcaatgcgttggttctatgtggtgccattcccatctatatcgagatgagtgtagatcctaagattggtatcgctttaggtcttgaaaatgaccgagtagcacaggccataaaggaccatccagatgctaaggctatcctaatcaacaatcctacttactacggcatctgttcagacctaaaggggttgacagaaatggctcatgaagctggcatgatggttttagtagatgaagcccacggagcgcatttgcatttcactgataaacttccaatttctgctatggatgcaggggctgatatggcagcagtttccatgcataagtctggtgggagtttgacccaaagctccattttacttatcggggagcagatgaattctgaatacgttcgtcagataattaacctgacccagtctacatctgcctcttacttgttgatggctagtttggatatttcacgtcgcaacttggcccttcgtggtaaagagtcgtttgagaaagtcattgagctatctgagtatgcccgccgtgaaatcaatgctatcggtggctactatgcctactcaaaagagttaatagacggtgtttcggtttgcgattttgacgtaactaagctgtcagtttacactcagggtattggcttaacaggtatcgaggtttatgacctcttgcgagacgaatacgacattcagatcgagtttggtgatatcggcaatatcttggcctatatttccatcggcgaccgcatccaagacatcgagcgcttggttggtgctctggctgatattaagagactctattcaagagatggaaaagatttgatagcaggagaatatattcagcccgagttagtgctgtctccgcaagaagccttctattcagaaagaaaaagtttaactttggatgattctgttggacaggtctgtggagaatttgttatgtgttaccctccaggtattcctatcttggctcctggtgaacgcattacacgagaaattgtcgactatatccaattcgccaaggaacgtggttgctccctccaagggacggaagatccagaggtcaatcatatcaacgttattaagagaaagacaaactataagaaaagtcaatag

SEQ ID NO: 84088 - protein, 491 aa, Streptococcus pneumoniae TIGR4
MKELDQNQAPIYEALVKLRKKRIVPFDVPGHKRGRGNPELVELLGEKCVGIDVNSMKPLDNLGHPISIIRDAEELAADAFGASHAFLMIGGTTSSVQTMILATCKAGDKIILPRNVHKSAINALVLCGAIPIYIEMSVDPKIGIALGLENDRVAQAIKDHPDAKAILINNPTYYGICSDLKGLTEMAHEAGMMVLVDEAHGAHLHFTDKLPISAMDAGADMAAVSMHKSGGSLTQSSILLIGEQMNSEYVRQIINLTQSTSASYLLMASLDISRRNLALRGKESFEKVIELSEYARREINAIGGYYAYSKELIDGVSVCDFDVTKLSVYTQGIGLTGIEVYDLLRDEYDIQIEFGDIGNILAYISIGDRIQDIERLVGALADIKRLYSRDGKDLIAGEYIQPELVLSPQEAFYSERKSLTLDDSVGQVCGEFVMCYPPGIPILAPGERITREIVDYIQFAKERGCSLQGTEDPEVNHINVIKRKTNYKKSQ

SEQ ID NO: 84089 - DNA, 1464 bp, Clostridium acetobutylicum ATCC 824
  CDS (1)..(1464): transl_table=11
ttgtataaattaaatcaaaatgaaacaccactttttaacgctttgatggaatatgtaaatagagatactattccctttcacgtaccaggacataaaaaaggtaatggaattgataaggaattcaaaaactttatcggtgagaacccttttaaaattgatgtaactgtattcaaattggtagacagcttacaccaccctacaggtcctataaaaaaggctcaagaattagctgctgatgcctacggttccaaggctgctttttattctgtaaacggaacttctggagctatacaaggtatgattctatctgtagtaggtgatggagataaaataatagtgcctagaaacgttcataaatctgtaactgccggaatcattctaagtggtgctgtacctgtatatatgcatccagaagtcgatagaagagttggaatagcccatggtgtatctccagaaactgttggagaaactcttaaaaataatcctgatgcaaaggctgtacttcttataaatcctacatattacggagtatctacagatataaaaaaaatagctgatatagttcacagctatgatatacctctcatcgttgatgaggctcatggacctcatttgagttttaatgatagacttcctgtatcagctttgaaagccggagcagatatgtgtgctcaaagtacacataaaataataggtgctcttactcaaatgtctcttctacatgtaaactcagatagaatagatatgaacagagttcagcaaataatgaatctacttcaaaccacatcaccatcctacatattgatggcttctatggattgcgctagacgacaaatagctcttcacggaaaggaactattagatggcacaatagatttatgcaattatgcaaggcgtgaaataaataaaatacctggcttctattgctttggtgaagaagttttagggaaacccggatcatatgctttcgatccaactaagcttacaattacctgcactgatttaggaataacaggttatgatcttgatatgcttttagccaatgattaccacatacaagtggagctttctgatttatataatgtacttgctgtgggttcttttggtgatacaaaagagaatattgatgctttaattaatgctttaagacaaataagcaaaagtatttcttcaactgttaaaaataagaagaattcatttatcgatattcccgatgtacccgagagaatactttcacctagagatgcatttaatggtgcaaaggaatccatgctaattaaagacagcgtaggtaaaacaagcggagaatttttaatggcttatccgccaggcatacctgtactatgtccaggagaaattataacccaggaaataattgactacgtcagcgacttaaaagctgctggtctatatgttcaaggaacagaagatcctgatgtaaattatataaaggtactaaaataa

SEQ ID NO: 84090 - protein, 487 aa, Clostridium acetobutylicum ATCC 824
MYKLNQNETPLFNALMEYVNRDTIPFHVPGHKKGNGIDKEFKNFIGENPFKIDVTVFKLVDSLHHPTGPIKKAQELAADAYGSKAAFYSVNGTSGAIQGMILSVVGDGDKIIVPRNVHKSVTAGIILSGAVPVYMHPEVDRRVGIAHGVSPETVGETLKNNPDAKAVLLINPTYYGVSTDIKKIADIVHSYDIPLIVDEAHGPHLSFNDRLPVSALKAGADMCAQSTHKIIGALTQMSLLHVNSDRIDMNRVQQIMNLLQTTSPSYILMASMDCARRQIALHGKELLDGTIDLCNYARREINKIPGFYCFGEEVLGKPGSYAFDPTKLTITCTDLGITGYDLDMLLANDYHIQVELSDLYNVLAVGSFGDTKENIDALINALRQISKSISSTVKNKKNSFIDIPDVPERILSPRDAFNGAKESMLIKDSVGKTSGEFLMAYPPGIPVLCPGEIITQEIIDYVSDLKAAGLYVQGTEDPDVNYIKVLK

SEQ ID NO: 84091 - DNA, 1476 bp, Streptococcus pneumoniae R6
  CDS (1)..(1476): transl_table=11
ttgaaagagttagatcaaaaccaagccccaatttatgagtccttggtgaagttacgcaagaaaaggattgttccctttgatgttccaggtcacaagcgtggacggggaaatccagaacttgtcgaactcttaggagaaaaatgtgtaggcattgatgtcaattcgatgaaacccttggataatttaggccatcctatttcgattattcgtgatgcagaggagctggctgcagatgcttttggagctagccatgcctttctaatgattggtggaacaacttcatcggtgcagactatgattctggcaacctgcaaggcaggagataagattattctgccacgaaatgtccataaatctgctatcaatgcgttggttctatgtggtgccattcccatctatatcgagatgagtgtagatcctaagattggtatcgctttaggtcttgaaaatgaccgagtagcacaggccataaaggaccatccagatgctaaggctatcctaatcaacaatcctacttactacggcatatgttcagacctaaaggggttgacagaaatggctcatgaagctggcatgatggttttagtagatgaagcccatggagcgcatttgcatttcactggtaaacttccaatttctgctatggatgcaggagctgatatggcagcagtttccatgcataagtctggtgggagtttgacacaaagttcgcttcttttaatcggggagcagatgaatcccgagtacgttcgtcagattataaacctgacacagtctacatctgcctcttacttattgatggctagtttggatatttcacgtcgcaacttggcccttcgtggtaaagagtcgtttgaggaagtcattgagctatccgagtacgctcgtcatgaaatcaatgccattggcggttactatgcttactcaaaagagttaatagatggtgtgtcggtctgtgattttgatgtaaccaagttgtcagtttacactcagggaataggcttaacaggtatcgaggtttatgacctcttgcgagacgaatacgacattcagatcgagtttggtgatatcggcaatatcttggcctatatttccatcggcgaccgcatccaagacatcgagcgcttggttggtgctctggctgatattaagagactctattcacgagatgggaaggacttaatagctggagaatatattcagcccgagttggtgctgtctccacaagaagccttctattcagagagaaaaagtttgaccttagatgagtctgttggacaggtctgtggagaatttgtcatgtgctatcctccagggattcctatcttggctcctggtgaacgcattacacgagaaattgtagactatatccaattcgccaaggaacgtggttgctccctccaagggacggaagatccagaggtcaatcatatcaacgttattaagagaaagacaaactataagaaaagtcaatag

SEQ ID NO: 84092 - protein, 491 aa, Streptococcus pneumoniae R6
MKELDQNQAPIYESLVKLRKKRIVPFDVPGHKRGRGNPELVELLGEKCVGIDVNSMKPLDNLGHPISIIRDAEELAADAFGASHAFLMIGGTTSSVQTMILATCKAGDKIILPRNVHKSAINALVLCGAIPIYIEMSVDPKIGIALGLENDRVAQAIKDHPDAKAILINNPTYYGICSDLKGLTEMAHEAGMMVLVDEAHGAHLHFTGKLPISAMDAGADMAAVSMHKSGGSLTQSSLLLIGEQMNPEYVRQIINLTQSTSASYLLMASLDISRRNLALRGKESFEEVIELSEYARHEINAIGGYYAYSKELIDGVSVCDFDVTKLSVYTQGIGLTGIEVYDLLRDEYDIQIEFGDIGNILAYISIGDRIQDIERLVGALADIKRLYSRDGKDLIAGEYIQPELVLSPQEAFYSERKSLTLDESVGQVCGEFVMCYPPGIPILAPGERITREIVDYIQFAKERGCSLQGTEDPEVNHINVIKRKTNYKKSQ

SEQ ID NO: 84093 - DNA, 2142 bp, Salmonella typhimurium LT2
  CDS (1)..(2142): transl_table=11
atgaacatcatcgccattatggggccgcacggggtttattataaagatgaacccatcaaggagcttgagcgtgcattacaatccctgggatttcaaattatctggccgcaaaatagcgttgacttgttgaagtttattgaacataacccgcgcatctgcggcgttatttttgactgggatgaatacagtctcgacctttgtagcgaaatcaaccagctaaatgaataccttcctctctacgcctttatcaataccaactccacgctggacgttagcgttcacgatatgcgcatggcgctgtggttttttgagtatgcattggggctggctgaagatatcgcgacgcgcattcatcaatatacaaacgaatatctcgataatattacgccgccgtttaccaaagcgctttttacctacgccaaagaaggaaaatataccttttgtacgccgggtcatatggcgggaacggcgtatcagaaaagcccgccaggctgcctgttttatgacttttttggcggcaataccttaaaagctgatgtgtcgatttcggtgactgaactgggatcgctgctggatcacaccgggccgcatctggaagcggaagagtatatcgcccgtacttttggcgccgagcagagctatatggtgacgaacggtacgtcgacctcgaataaaattgtcggtatgtatgccgcgcctgcgggaagtacgctacttattgatcgtaattgtcataaatcgctggcgcatttgctgatgatgagcgatgtggtgcctctctggttgaagccgacgcgcaatgcgctcggcattctcggcggtattccccgaagggaatttacccgtgcaagcatcgaaagcaagatagaggagacccctcaggcgcaatggccggtgcatgcggttatcaccaattcgacttacgatggtctgctgtataacactaactggatcaagcaaatgctggacgttccctcgatccattttgattccgcctgggtaccctatacccatttccatccgatctaccaggggaaaagcgggatgagcggcgatcgggtgcccggaaaagtgattttcgaaacgcaatccacccataaaatgctggcggctttttcgcaggcgtcgcttattcatatcaaaggggaatatgacgaagagacgtttaacgaagcgtttatgatgcacacttccacatcgccgagctatcccattgtcgcctctatcgagaccgcagcggcgatgctgcgcggcaatccagggaaaagattgattaatcgttcggtggaacgggcgctccattttcgtaaagaggtacagcggctacgtgaagagtccgatagctggttctttgatatctggcagccggaagaggttgatgaggccgaatgctggccggtcacgccgggagaaacctggcatggcttcaccgatgccgatgacgatcatatgttcctcgatccggttaaggtgacaatcctgacgccggggatggatgaacagggcaacatgagcgaagaggggatacccgccgcgctggtggcgaagttccttgatgagcgaggcgtggtggtggaaaaaaccgggccgtataatctgctgtttttgttcagcatagggattgataagacccgtgcgatggggctgctgcgcggactgacggaatttaaacgcgcctacgatcttaacctgcgcgtcaaaaatatgttgccggatctgtatgcggaagatccggatttttatcgcaatatgcgcattcaggatctggcgcaggggatccataaactgatccgccagcacgatcttccggggctgatgctgcgggcgttcgaggttttaccggagatgatcatgaccccgcaccaggcctggcagcgtcagatcaaaggtgaggtggaaaccgtggcgctcgatcaactgccagggcgcgtttccgcgaatatgatcctgccttatccgccaggcgttccgctgttgatgcccggcgagaggatcacgcaacagagtcgggccgtgctcgattttctgctgatgctctgctcgattggccagcattatcccggttttgaaacggatattcacggcgcgaaacggaatgaagacggggtgtaccaggtacgagtcttaaaacacgcctgctag

SEQ ID NO: 84094 - protein, 713 aa, Salmonella typhimurium LT2
MNIIAIMGPHGVYYKDEPIKELERALQSLGFQIIWPQNSVDLLKFIEHNPRICGVIFDWDEYSLDLCSEINQLNEYLPLYAFINTNSTLDVSVHDMRMALWFFEYALGLAEDIATRIHQYTNEYLDNITPPFTKALFTYAKEGKYTFCTPGHMAGTAYQKSPPGCLFYDFFGGNTLKADVSISVTELGSLLDHTGPHLEAEEYIARTFGAEQSYMVTNGTSTSNKIVGMYAAPAGSTLLIDRNCHKSLAHLLMMSDVVPLWLKPTRNALGILGGIPRREFTRASIESKIEETPQAQWPVHAVITNSTYDGLLYNTNWIKQMLDVPSIHFDSAWVPYTHFHPIYQGKSGMSGDRVPGKVIFETQSTHKMLAAFSQASLIHIKGEYDEETFNEAFMMHTSTSPSYPIVASIETAAAMLRGNPGKRLINRSVERALHFRKEVQRLREESDSWFFDIWQPEEVDEAECWPVTPGETWHGFTDADDDHMFLDPVKVTILTPGMDEQGNMSEEGIPAALVAKFLDERGVVVEKTGPYNLLFLFSIGIDKTRAMGLLRGLTEFKRAYDLNLRVKNMLPDLYAEDPDFYRNMRIQDLAQGIHKLIRQHDLPGLMLRAFEVLPEMIMTPHQAWQRQIKGEVETVALDQLPGRVSANMILPYPPGVPLLMPGERITQQSRAVLDFLLMLCSIGQHYPGFETDIHGAKRNEDGVYQVRVLKHAC

SEQ ID NO: 84095 - DNA, 1380 bp, Listeria monocytogenes EGD-e
  CDS (1)..(1380): transl_table=11
atgagaaatcaatctaaaatgcctttagtggaacggttagatgctcatgctaagtcttgcccaatatcactccatgttcctggacacaaaagtggagcaatttatccagatgcatggcaaaaattattgaaatgggatgtaacagaaattactggaatggacgatttgcaccaccctgaagatgtgattttggaagcagaagagttacttgcggaatgttatggaagtaaaaaaagctattttctagtcaacggaacaagcggaggaaacgtggcggttattatggcaactttaaagcgtggggagaaagttttagtgccaagagatgcgcataaatcaatcttgcatggtatcgaactggcaggcggagaaccgattttcttaaccccagcgacaaataaagaagttggcgtcgcgagtggtgtgacaaccgaacttctcgaagaaacattacataatcacccagatgtaaaactatgtattttcacttatccgagctactacggaacgacttttaacttgcaaaaatgtattcgaattgcgcatgattttggcgcggttgtatttgttgatgaagcgcacggagcccattttttaacaagttctgaatttccgaaaagtgcagtggagcttggtgcggatgtggttgttcagtcggcgcataagacgttgccggcgctaacgatgggatcctatttacatgtcgttaatgatttaccgatttttgaaaaactagcttattatctgcaagtattccaaacgagcagcccgtcttatttaattatggcgtcactagatgcggcgaggaaatatgtggcaacttacacagcggcagacgtcgaagctttttggaaaatgcgtgccagatggattaaatggctaacgaagaataaatttgaagtcattttgccagatgatccacttaaaatcatcgtgcgcaaaacaggctacacggggtacgaactgcaagccatttttgaagaaagttcttatttcccagagcttgccgacgagtcgcaagtgttactgattttaccattaatcaaaaaaggaattgatttcacgccaatcagccggattcattcaccgatgaaaaaagaaatcgcgaaagagccgtacgaaatgtcgacaccttgcgcgtcaggtcttgctttaacttatgaagaaatgcacgcacgcgcgaccgaattcgtattactagatgaagctacgacacgcgtttcggctgaaacaatctcgctctatccgccgggaattcccgcaatcatccgcggagaaggcatcaccgaaaagcatatccgcgaactaaaaaacattcgcacacgccactaccaaggcggcgaaaaactagccgagaattacatccgtgtattccgctaa

SEQ ID NO: 84096 - protein, 459 aa, Listeria monocytogenes EGD-e
MRNQSKMPLVERLDAHAKSCPISLHVPGHKSGAIYPDAWQKLLKWDVTEITGMDDLHHPEDVILEAEELLAECYGSKKSYFLVNGTSGGNVAVIMATLKRGEKVLVPRDAHKSILHGIELAGGEPIFLTPATNKEVGVASGVTTELLEETLHNHPDVKLCIFTYPSYYGTTFNLQKCIRIAHDFGAVVFVDEAHGAHFLTSSEFPKSAVELGADVVVQSAHKTLPALTMGSYLHVVNDLPIFEKLAYYLQVFQTSSPSYLIMASLDAARKYVATYTAADVEAFWKMRARWIKWLTKNKFEVILPDDPLKIIVRKTGYTGYELQAIFEESSYFPELADESQVLLILPLIKKGIDFTPISRIHSPMKKEIAKEPYEMSTPCASGLALTYEEMHARATEFVLLDEATTRVSAETISLYPPGIPAIIRGEGITEKHIRELKNIRTRHYQGGEKLAENYIRVFR

SEQ ID NO: 84097 - DNA, 1467 bp, Nostoc sp. PCC 7120
  CDS (1)..(1467): transl_table=11
atgcttgatcaaaaccaaacaccactaatagaatctataaaagcttgtactgctcgacatcatgcagcgttttatactcctgggcataagcaggggagggggattgctcaacctttggctgatttgttgggtaaagcggtatttagtgctgatttgacggagttggctgatttagataatttatctgcgccccaaggagtgattcaggaagcccaacaattagcggcggcggcgtttggtgcctcacagacatggtttttggtcaatggttctacttgcggtgtcgaggcggcaattctggctacttgtagaccgggggataaaattattttgcctcggaatgtacattcatcggcgatcgctggtttaattctctctggtgctatcccgatttttatttatcctgaatatgacccagttttagatatcgcccatagcatcacgcctgaggctgtaaaagcagctttgcaacaacatcctgatgctaaagcggtgttgacagtttaccctacatattacggtgtatgtggggatttagaggcgatcgcccaagtcacccaccactacaatattcctttactagtagatgaagcccacggcgcacacttcgcttttcacccagaattacccacctcggccttagccgcaggtgcagatttaactgtacagtcgattcacaaggtactgggtgcaatgacgcaagcttcaatgcttcacatccaaggtgacagaataaatgcggttcgagttagtcaggctttgcagctgctacagtctactagccccagttatgtacttctagcttccctggatgcggctcgtcaacaaatggctttgtctggtaaacagttaatgtcccgtaccttacaactagcgaatgaagccagagaaagaattagtcaaattcctggcttatcagttttacagcctcctaccaagacaccatcaccagggtttacaactttggataaaacacgcttaactgtgactgtttccggcttgggtttaacgggttttgcggcggaagaaattttagatgaacaactgggggtaacggctgaatttgctacgttgcaacatctcacctttattattagcttgggaaacacagctactgatattgagcagttagtccaaggtttcacaactttagcagaaacaacactgcctactaaggcattagtcaacccaaaagttaatagtaatctggaatatttttcagaaatttctccccgtgatgccttttttgccgatagtgaaacgttatccatcgaacaggcgtgcgatggcatttgtgcagaaattgtctgtccttatcccccaggaatccccgtccttatgccaggagaagttatcacaaaacccgccattgaatatttgcaacatatccaaagtttaggcggattcattactggttgtgccgatactagtctgaatactttaaaagttttagtcaatagtcattag

SEQ ID NO: 84098 - protein, 488 aa, Nostoc sp. PCC 7120
MLDQNQTPLIESIKACTARHHAAFYTPGHKQGRGIAQPLADLLGKAVFSADLTELADLDNLSAPQGVIQEAQQLAAAAFGASQTWFLVNGSTCGVEAAILATCRPGDKIILPRNVHSSAIAGLILSGAIPIFIYPEYDPVLDIAHSITPEAVKAALQQHPDAKAVLTVYPTYYGVCGDLEAIAQVTHHYNIPLLVDEAHGAHFAFHPELPTSALAAGADLTVQSIHKVLGAMTQASMLHIQGDRINAVRVSQALQLLQSTSPSYVLLASLDAARQQMALSGKQLMSRTLQLANEARERISQIPGLSVLQPPTKTPSPGFTTLDKTRLTVTVSGLGLTGFAAEEILDEQLGVTAEFATLQHLTFIISLGNTATDIEQLVQGFTTLAETTLPTKALVNPKVNSNLEYFSEISPRDAFFADSETLSIEQACDGICAEIVCPYPPGIPVLMPGEVITKPAIEYLQHIQSLGGFITGCADTSLNTLKVLVNSH

SEQ ID NO: 84099 - DNA, 1455 bp, Clostridium perfringens str. 13
  CDS (1)..(1455): transl_table=11
gtgaaaagactttctcaagaaaatgctcctatttatgaagcattaaaatggtacaagaatcaaagaattgttccttttgatgtaccaggtcataaacaaggaagaggaaatacagaattaagagaatttttaggtgaagattgtgtttcagtagatgtaaattcaatgaaacccttagataatctttgtcatccaacttctgtaataaaggatgcagaagaattagcagctgaggcctttggtgctgataaggcatttttcatggttaatggaaccacatcagctgtacaagccatgataatgagtgtttgcaaagatggagataagattataatgcctaggaatgtgcatagatctgcaataaattctttaataataacaggggtaactcctgtgtatataaatccaggaattcatggtagacttggaatttctctaggaatggcaatggaagatataaaaaaggccattaaggaaaatccagatgctaaggctatttttgttaataacccaacatactatgggatttgctctaatttaagagaaatagttaagttagctcatgaaaataatatgtatgtcttagttgatgaagctcatggaactcatttttattttgataaaagacttccagtatcagctatggaggcaggggcagatatggcagctgttagcatacataaaacaggaggctcattaactcagagttctatgttgcttatgaagtgtaatagaattaagccagattatgtgagaacaataataaacttaacacaaacaactagtggttcttatttacttttatcttctttagatattgctagaagaaatttagccttaaatggagaaaaaatatttgaagaggttgttggaatagctgaatatgcaagagaagaaataaataagataggtggttattacgctttctcaaaagaaataaataatggtgatgatatttatgattttgatgtaactaagcttactataaacactttagaaactggacttgctggaatagaagtttatgacatattaagagatgattatggaattcaaatagagcttggagatgtggctaatattcttgccataatatcagttggagatactagatataacattgagagattagtttcagctttaagtgagattaagagaattcatgaaaaagataaaaaagatatttttgaccacgaatatatagatcctatagttaaggttaagccaaaagaggctttttatgctgataagaagaaggttcttttaagagaaagtgaaggattaatttctggagaatttgtaatgtgttatccaccaggaattccaatacttgccccaggagagcttataactaaggagactatagactatattgagtattctaagaaaaagggaagtttagttacaggccctgaagatatggaaattgaatatataaatgttttagattgttag

SEQ ID NO: 84100 - protein, 484 aa, Clostridium perfringens str. 13
MKRLSQENAPIYEALKWYKNQRIVPFDVPGHKQGRGNTELREFLGEDCVSVDVNSMKPLDNLCHPTSVIKDAEELAAEAFGADKAFFMVNGTTSAVQAMIMSVCKDGDKIIMPRNVHRSAINSLIITGVTPVYINPGIHGRLGISLGMAMEDIKKAIKENPDAKAIFVNNPTYYGICSNLREIVKLAHENNMYVLVDEAHGTHFYFDKRLPVSAMEAGADMAAVSIHKTGGSLTQSSMLLMKCNRIKPDYVRTIINLTQTTSGSYLLLSSLDIARRNLALNGEKIFEEVVGIAEYAREEINKIGGYYAFSKEINNGDDIYDFDVTKLTINTLETGLAGIEVYDILRDDYGIQIELGDVANILAIISVGDTRYNIERLVSALSEIKRIHEKDKKDIFDHEYIDPIVKVKPKEAFYADKKKVLLRESEGLISGEFVMCYPPGIPILAPGELITKETIDYIEYSKKKGSLVTGPEDMEIEYINVLDC

SEQ ID NO: 84101 - DNA, 2352 bp, Fusobacterium nucleatum subsp. nucleatum ATCC 25586
  CDS (1)..(2352): transl_table=11
atgtctaaattagaccaaaataagacaccattatttacagtattaaaagatgaatatgtgagaagaaatatacttccatttcatgttcctggacataaaagaggaaaaggagttgatgaagaattttataacttcatgggagaggctcctttttcaatagatgtaacaatttttaaaatggttgatggtcttcatcatccaaaaagttgtattaaagaatctcaagaattagttgcagatgcttatggggttaaacatagtttctttgcagtaaatggaacttctggtgctatacaagcaatgataatgtcagttgtaaaagcaggggaaaaaatattagtaccaagaaatgttcataaatcagtttcagcaggaattattttaagtggttctgaacctgtgtatatgaatcctgaaattgatgaaaatttaggaattgctttaggtgttaaaccacaaacagttgaaaatatgttaaaacaagatccagacatagcagctgttcttattataaatccaacttattatggggtagcaacagatattaaaaagatagcagacatagttcatagctatgatatacctcttattgtagatgaagctcatggaccacatttacactttcatgatgaattaccagtttcagctgttgatgctggagcagatatctgtactcaaagtacacataaaattttaggtgctatgactcaaatgtctcttattcatgtaaattcagatagagttaatgttgaaaaagtaaaacaaattttaagtttactccatacaacttctccatcatatccattgatggcatctcttgattgtgcaagaaggcaaatagctacacaagggcaagaattgcttacaagaactattgagcttgctaaatattttagaagagaagctaatagaatacctggaatttattgttttggagaagaacttgttggaaaagatggtttctttgcttttgacccaacaaaaattacaatatctgcaaaagaactaggacttaagggtggagagcttgaaagcctacttgtagatgactacaatattcaaatggaattatcagactactataacactttagggcttattacaataggagatacagaagaaagtgtaaataaattgctagatgctttaagagatataagcagaagattttttggaaaaggaaaaacattagaaaaaaatattataaaacttcctgaaactcctgaattagtattaatgccaagagaagctttttacagtgaaaagaataaagttccatttaaagaaagtgttggaaaaatatctggtgaaatgataatggcatatccacctggtatcccaataattattgcaggagaaagaataagtcaagatataattgatcatattgaagaattaaaagaagctgatttacatattcaaggtatggaagacccagaacttgaaaccataaatgtaattgaagaagaagacgctatttacttatacactgaaaagatgaaaaatgttcttattggagtgcaaacaaatcttggagttaataaaacaggaactgaatttggaccagatgatttaattcaagcttatccagatacttttgatgaaatggaattaatttctgttgaaagacaaaaagaagacttcaatgataaaaaattaaaattcaaaaatacagttttagatacttgtgaaaagatagctaagagagttaatgaagctgtaattgatggatatagaccaatacttgttggaggagaccactcaatttcattaggaagtgtatcaggtgtttctctagaaaaagaaattggagttttatggataagtgctcatggagatatgaatacccctgaaagtacacttacaggaaatattcatggaatgccattagctttacttcaaggtctaggagatagggaacttgtaaattgtttctatgaaggagctaaacttgacagcagaaatattgttatctttggtgcaagagaaattgaagttgaagaaagaaaaattattgaaaaaactggtgtaaagattgtttattatgatgatattctaagaaaaggtatagataatgttttagacgaagtgaaagattatctaaaaattgataatttacatatcagtatagatatgaatgtatttgacccagaaattgctcctggtgtatctgtacctgttagaagaggaatgtcttatgatgaaatgtttaaatcattgaaatttgcatttaaaaattactcagttacatcagcagatattacagaatttaatccattgaatgatattaacggaaaaactgctgaacttgtaaatggtatagtacaatatatgatgaacccagattattaa

SEQ ID NO: 84102 - protein, 783 aa, Fusobacterium nucleatum subsp. nucleatum ATCC 25586
MSKLDQNKTPLFTVLKDEYVRRNILPFHVPGHKRGKGVDEEFYNFMGEAPFSIDVTIFKMVDGLHHPKSCIKESQELVADAYGVKHSFFAVNGTSGAIQAMIMSVVKAGEKILVPRNVHKSVSAGIILSGSEPVYMNPEIDENLGIALGVKPQTVENMLKQDPDIAAVLIINPTYYGVATDIKKIADIVHSYDIPLIVDEAHGPHLHFHDELPVSAVDAGADICTQSTHKILGAMTQMSLIHVNSDRVNVEKVKQILSLLHTTSPSYPLMASLDCARRQIATQGQELLTRTIELAKYFRREANRIPGIYCFGEELVGKDGFFAFDPTKITISAKELGLKGGELESLLVDDYNIQMELSDYYNTLGLITIGDTEESVNKLLDALRDISRRFFGKGKTLEKNIIKLPETPELVLMPREAFYSEKNKVPFKESVGKISGEMIMAYPPGIPIIIAGERISQDIIDHIEELKEADLHIQGMEDPELETINVIEEEDAIYLYTEKMKNVLIGVQTNLGVNKTGTEFGPDDLIQAYPDTFDEMELISVERQKEDFNDKKLKFKNTVLDTCEKIAKRVNEAVIDGYRPILVGGDHSISLGSVSGVSLEKEIGVLWISAHGDMNTPESTLTGNIHGMPLALLQGLGDRELVNCFYEGAKLDSRNIVIFGAREIEVEERKIIEKTGVKIVYYDDILRKGIDNVLDEVKDYLKIDNLHISIDMNVFDPEIAPGVSVPVRRGMSYDEMFKSLKFAFKNYSVTSADITEFNPLNDINGKTAELVNGIVQYMMNPDY

SEQ ID NO: 84103 - DNA, 1488 bp, Thermoanaerobacter tengcongensis MB4
  CDS (1)..(1488): transl_table=11
ttgaaaaagctagatcaaactcaaacccctttatttgacgctctaatggaatatgtgaataataatacaattcccttccacgtaccgggacacaaaaaaggggagggaatggccaaaaaatttctagactttgttggaaaaaatgtgctctcaatggatgtaactgtgtttcagcaagtagacagcttgcacaaaccaacaggtcctatcaaatacgctcaagagttggcagcagaagcttttggagcagacgcaacatttttctcaatacacggaacctctggagccatccaagctatgattttaagcgtaatgggagaagatgaaaaaatcattgtaccaagaaacattcacaagtctgtgacctccggaatcatattaagtggcgctataccaatttacatgcagccagaaattgacaaaaatatcggggttgccttgaacgtcacccctgagacggtcgaaaaaactttaagacagcatcctgatgcaaaagcggttttaatcatcaacccaacttattacggagtttctacagacatagtaaaaattgctgaaattgtccacgattatggagcaattttaatggtagatgaagctcatggccctcaccttaaatttaacgaaaaattgcccatttcggctatggaagcaggagccgatatatgcgctcaaagcactcataaaattattggttctatgacacaaagttcaatgcttcatgtaaaaggagacaggatagatataaacagggtaaagcaggtgatgagcttattacagaccacaagcccttcatatatactcctggcgtcactggacgtagcaagaatgcaaatggctacagaaggaaaggaacttctggacaggactatcgaattagctgaatacgccagaagagagataaataaaattaaagggctttactgctttggcgaagaaatagtaggtcgcgatggcgcttatgattttgaccctacaaaagtgaccataactgccaaaggattaggtataactgggcatcaactggaaagaatcttagcagaaaaatactacattcaagtagagctttcggacatgtacaatgtcctctgcgtattctcaattggagacacaaaagaaaaagtagattacttgcttcgcgctttaagagagataagcgacgaattgtacgacgaaaacatagaagtagcaaagccaatagatattccagaaattcccgaattagtagtttcacctagatatgcctttaacgctcctacagtggctcttcctctgagagaaagtgtagggcagataagcgcagaatttttaatggcatatccacctggaataccagtgctctgccctggcgaaagaataacaatggaaattatagaatacgtcgaaaaaatgaaagaggcaaatttaagcattcaaggcacagaagacccagaggcaaattatataaaggtggtaaattacagacaggctctaaatgtaatcgcataa

SEQ ID NO: 84104 - protein, 495 aa, Thermoanaerobacter tengcongensis MB4
MKKLDQTQTPLFDALMEYVNNNTIPFHVPGHKKGEGMAKKFLDFVGKNVLSMDVTVFQQVDSLHKPTGPIKYAQELAAEAFGADATFFSIHGTSGAIQAMILSVMGEDEKIIVPRNIHKSVTSGIILSGAIPIYMQPEIDKNIGVALNVTPETVEKTLRQHPDAKAVLIINPTYYGVSTDIVKIAEIVHDYGAILMVDEAHGPHLKFNEKLPISAMEAGADICAQSTHKIIGSMTQSSMLHVKGDRIDINRVKQVMSLLQTTSPSYILLASLDVARMQMATEGKELLDRTIELAEYARREINKIKGLYCFGEEIVGRDGAYDFDPTKVTITAKGLGITGHQLERILAEKYYIQVELSDMYNVLCVFSIGDTKEKVDYLLRALREISDELYDENIEVAKPIDIPEIPELVVSPRYAFNAPTVALPLRESVGQISAEFLMAYPPGIPVLCPGERITMEIIEYVEKMKEANLSIQGTEDPEANYIKVVNYRQALNVIA

SEQ ID NO: 84105 - DNA, 1479 bp, Streptomyces coelicolor A3(2)
  CDS (1)..(1479): transl_table=11
atgacagtcgatcaccgccgagcaccggtcctggaagccctcgtcgaataccgccgtgcgggacggctgtcgttcacgccgcccggacacaagcaggcgcgcggggcggaccccgcggtgcgcgaggtgctgggtgacgccgtgttccacggggacgtgctggcgacggccggactcgacgaccggctcacccggggacgggtgctgcagcgcgcccaggagctgatggcggacgccgtgcacgccgatcacaccttcttcacgacgtgcgggagttccctgtcggtgaaggcggcgatgctggcggtggcggggccgcacgagaagctgctgatcggccgggacgcccacaagtccgtggtctcggggctgatcctgtccggcatcgagccggtgtgggtcgaaccgcgctgggacgcggaacggcatctggcccatccgccgtccgccgagtcgttcgaggaggcgttcggggcgcatcccgacgccaagggtgccctgatcaccagcccgacgccgtacggggcgagcgccgatctgcgggccgtcgccgaggtgtgccacgggcgctcgctgccgctgatcgtcgacgaggcttggggggcgcatctgcctttccacccggatctgccgtcctgggcgatggacgcgggggccgacatctgcgtgaccagcatccacaagatgggcagcggtctcgaacagggctcggtgttccacctgcgcggcgacctggtgccgcccaagctgctcggtatgcgcgccgacctgctgagcaccaccagcccgtcggtgctgatcttcgccggtctcgacgggtggcgccgccagatggcgctcggcgggcaggagctgatgggcggcgcgctggagctggcggccggtgtccgggcggccgtcgaggagatcgacggcatgcacgtcaacgaccgcgaggacttctgcggtcccgggctggcccacggcttcgatccgctgccggtcgtcatcgacctcgaagggctcggtgtctcgggcttccgggcggcggactggctgcgggagcaccgcggtgtggtcgcccacctcaccgaccaccgccgtatcggcgcgcagatcacccacggcgacgaccgggggaccgccggcgaactgctcaccgccctcaaggacctcgccctcgccgcccccggcctgggatcggctccgggcgtcgaggtgccgtcgccggccgagctgcggatgcctcaggtgtgcctgccccgggacgcgttcttcggccccaccgaggacgtgcccctggaccgggccgccggccgggtcgcggcggagatgatcactccgtatccgcccggcattccggccgtgctgccgggcgagcggctggccgagccggtcctgcgctatctgcgcagtggcctggaggcggggatgtacctccccgacccgaccgatccggcgctggagacggtcagggtcgtcgcggagcacggtgcgtga

SEQ ID NO: 84106 - protein, 492 aa, Streptomyces coelicolor A3(2)
MTVDHRRAPVLEALVEYRRAGRLSFTPPGHKQARGADPAVREVLGDAVFHGDVLATAGLDDRLTRGRVLQRAQELMADAVHADHTFFTTCGSSLSVKAAMLAVAGPHEKLLIGRDAHKSVVSGLILSGIEPVWVEPRWDAERHLAHPPSAESFEEAFGAHPDAKGALITSPTPYGASADLRAVAEVCHGRSLPLIVDEAWGAHLPFHPDLPSWAMDAGADICVTSIHKMGSGLEQGSVFHLRGDLVPPKLLGMRADLLSTTSPSVLIFAGLDGWRRQMALGGQELMGGALELAAGVRAAVEEIDGMHVNDREDFCGPGLAHGFDPLPVVIDLEGLGVSGFRAADWLREHRGVVAHLTDHRRIGAQITHGDDRGTAGELLTALKDLALAAPGLGSAPGVEVPSPAELRMPQVCLPRDAFFGPTEDVPLDRAAGRVAAEMITPYPPGIPAVLPGERLAEPVLRYLRSGLEAGMYLPDPTDPALETVRVVAEHGA

SEQ ID NO: 84107 - DNA, 1419 bp, Oceanobacillus iheyensis HTE831
  CDS (1)..(1419): transl_table=11
atgaagttggatcaatcttatatgccattcgtagatcatttaagaaatttcagttcaaagagaccggtatcattccatgttccagggcataagcatggggcggtttttcctgaagcagctagagaattatttggctctattttatctgtagatgtaactgaaatagcaggaatggatgacttgcatgcaccaagtgagatcatcgcagaagcagaaaaactagcaacagattatttcaattctgaccatacattttttttagttggaggatctacatcaggtaatctagcaatgattatggcagcatgtaatccgggagatgaggtaatcgtccaacggaattgtcataaatcaattatgaatggcttagaacttgcaggtgcaaagccaatatttatagctccagagtggagagatgatttacaacgatataccgcaccaacatatgatagcataaaacaagcaatgttgaggtttccgaatgcaaaggctcttattctcacctatccagattactttggggcggtttttgatattcagtccatgattgaattagcacacacctatcatattccagtatttgttgatgaagcacatggcgtccatttttcatcatctgaaatgtttccacaatcggctttacagttaggagcagatgttgtagtacaatccgcacataaaatggctccagctatgacaatggctgcatatttacatattggcacttcacgtgtagaaaaacatcgacttgcttattatttgcaaatgttacagtcgagtagtccatcttatccgataatggcttctttggatgtagcaagattttatttagcgcaattatcaaaagaaaaaatccgaggtatcttaaatagtgtagaaaacgtaagaaacatattctccggggcatcattttgggaattggtacctcatgatgatccgttaaaattaacgttccacgtgaaacatggctataaaataagtgagatagaatcgatgctcgaatatcatggaatttatccagagttaacgacagaaaatcaattcttattcatacatggtttagcgccttttgtagaacaagattatttgaaaaaaacaatacaattgatagaggaagaattaaaaaaatcagtgaaacatgctacaatagaaggggcaaagctttttaccaatcctatagaggaactagcattgtcataccaagaaatgaaacacattacatcacttcttgtcccatttgctcaaagtgaaggtgaaattgcagcagaggcagtgatcccatatccccctggtattccagtcatactcaaaggcgagagaattacgaaggcgcatattacaaagattcagcttttgattcaacaaggagtaaccattcagcaacgggaagaaggaatacgtatatataggaaggcatga

SEQ ID NO: 84108 - protein, 472 aa, Oceanobacillus iheyensis HTE831
MKLDQSYMPFVDHLRNFSSKRPVSFHVPGHKHGAVFPEAARELFGSILSVDVTEIAGMDDLHAPSEIIAEAEKLATDYFNSDHTFFLVGGSTSGNLAMIMAACNPGDEVIVQRNCHKSIMNGLELAGAKPIFIAPEWRDDLQRYTAPTYDSIKQAMLRFPNAKALILTYPDYFGAVFDIQSMIELAHTYHIPVFVDEAHGVHFSSSEMFPQSALQLGADVVVQSAHKMAPAMTMAAYLHIGTSRVEKHRLAYYLQMLQSSSPSYPIMASLDVARFYLAQLSKEKIRGILNSVENVRNIFSGASFWELVPHDDPLKLTFHVKHGYKISEIESMLEYHGIYPELTTENQFLFIHGLAPFVEQDYLKKTIQLIEEELKKSVKHATIEGAKLFTNPIEELALSYQEMKHITSLLVPFAQSEGEIAAEAVIPYPPGIPVILKGERITKAHITKIQLLIQQGVTIQQREEGIRIYRKA

SEQ ID NO: 84109 - DNA, 1461 bp, Clostridium tetani E88
  CDS (1)..(1461): transl_table=11
ttgtacagattaaatcaatcagaaactccattatttgatgcgttaatggaatatgtgaatagacaaactataccttttcacgttcctggtcataaaaaaggagtaggaatagatgaggaatttaaaaattttataggtgagaatccttttaaaatcgatgttactgtttttaaactagtggatagcttacatcatcctacaggtcctataaaaaaagctcaagcattagcttctgatgcatatggctctgatgcttcatttttttgtattcatggtacctctggtgctatacaggcaatgataatgtctgtggtgaaatctggtgataaaataattatcccaagaaatgtccataaatcagtaacttctggcattatattaagtggggctacccccatttatatgcaaccagaattagataaaagagttggtatcgctcatggcgttactcctgaaactgtagaaaaaacattaaaagaaaatcctgacgctaaagcagttttaataattaatccaacttattatggcgttgctactgatattaagaaaatagcagatatagttcataattatgatattcctttaattgtagatgaagctcatggtcctcatttagcttttaacgatacacttccaatatcagctattgaagctggtgctgatatttgttgccaaagtacacataaaataataggtgctctaactcaatgttcattacttcacgttcgttctaaaagtatagatgtaaatagagttcagcaaatgttaagtttacttcaaactacatctccttcatatatattaatggcttcacttgactgtgctagaagacaaatagctttaaatggtaaggaattattagataaatccatagctttatctaactatgcccgtgaagaaataaataaaattcctggcttctattgtttcggtaaagaaattgttggaagacctggtgtttttgctatagatcctactaaaataactataacctgtagagatttaggtattactggttttgaattagatatgattttatctaaccaatatcacattcaactagaattatcagatttatataatggtcttgctgtaggctcctttggagatacaaaggaaaatatagatgcactaattaatgcactaaaagaaataagtaaagagtatgtaaataatgagaataaaaaatctgactttatagatataccagctataccaaagcaagttcaaattcctagagatgcttttaatagtgaaaaagtagttcttcctttaaaagatagtgaaggaagagttagtggggaatttttaatggcttatcctcctggaatacctgtactttgccctggggaaataattactcaagaaataattgattatatacaaaaattaaaagatactggtctttatgtacaaggtacagaagatttagaagtgaattttataaaagttgtaaaataa

SEQ ID NO: 84110 - protein, 486 aa, Clostridium tetani E88
MYRLNQSETPLFDALMEYVNRQTIPFHVPGHKKGVGIDEEFKNFIGENPFKIDVTVFKLVDSLHHPTGPIKKAQALASDAYGSDASFFCIHGTSGAIQAMIMSVVKSGDKIIIPRNVHKSVTSGIILSGATPIYMQPELDKRVGIAHGVTPETVEKTLKENPDAKAVLIINPTYYGVATDIKKIADIVHNYDIPLIVDEAHGPHLAFNDTLPISAIEAGADICCQSTHKIIGALTQCSLLHVRSKSIDVNRVQQMLSLLQTTSPSYILMASLDCARRQIALNGKELLDKSIALSNYAREEINKIPGFYCFGKEIVGRPGVFAIDPTKITITCRDLGITGFELDMILSNQYHIQLELSDLYNGLAVGSFGDTKENIDALINALKEISKEYVNNENKKSDFIDIPAIPKQVQIPRDAFNSEKVVLPLKDSEGRVSGEFLMAYPPGIPVLCPGEIITQEIIDYIQKLKDTGLYVQGTEDLEVNFIKVVK

SEQ ID NO: 84111 - DNA, 1404 bp, Gloeobacter violaceus PCC 7421
  CDS (1)..(1404): transl_table=11
gtggaaaccactccgctctgggatgcgctgagggccgtcgctctagcctcgggcacgggctttcacaccccgggccacaacggcggggcgggcctgccgccagccctcaaacactggccggattggggccgtctggacctgaccgaacttgcaggactcgacaacctgcacgctcccaccggggtgatcgcccacgcgcaacggctcgcggcggcagtttggggagccgagcgcagttggtttctggtcaacggtgcgaccgccggaatccaggcgatgctgcttgcggcactcgggcaggggcagaaggtgctcgtgcccagaaactgtcaccaaagtatcgtgcacgccctggtgctgagcggcgcggtgccggtgttcgtccaacctgtatgggacaggcgctggcagttggcccacggactgacggcgacgacggtggaagccgccctggccgtccacccggacatccgggcggtggtggcggtgcacccgacgtacttcggggcggtgggcgagacgcgggccatcgccagggtcgcccacgcaaaagggattgcgctgttggtcgatgccgcccacggcgcccatctgcgcttccatccggacttgcccgagtgcgcactcgcagcgggagcggacttggtcgtccattccgcccacaagacactgcccgccctcacccaggcggcactccttcaccagcagggcaccctggtggacccggccagggtggagatggctctgaaccttctgcaaaccaccagcccgagctacttgctgatggcctcgctcgatctggcccgcgcccacatggtccgccacggccgcgagcagctcgggcacatcctggagatggcccatagactgcgacacaaactgcccttcgcggtgctcgggggcgacggaacgcctggcttcgatccgacccgcctggtcatcgacgtgggtgagaaaggctggagcggtcacgccgctgagacctggctggagcaaaacgcccaggtgcgtgcggagatggccacccaccgccacctggtcttcatcctcaatagcgcccacaccgaattcgacggcgagcaactgcaagcatcccttctggccctggcaacggcccaaccgaccggggcaacgccgccggatctgcttccaccgccgcttccggagctgcgctattcaccccgcgaagctttcggccgctcccaccggagcgttcccctagccgcggcagccggactgaccagtgcggccgatgtctgcacctacccgcccggagtgccggtgctgctgccgggggaagtggttgccgcccagagcgtcgagtatttgggcgccgccattgacactggggccgagacagtcgggatcgacgggcgcggacacatccgggtcactattgactaa

SEQ ID NO: 84112 - protein, 467 aa, Gloeobacter violaceus PCC 7421
METTPLWDALRAVALASGTGFHTPGHNGGAGLPPALKHWPDWGRLDLTELAGLDNLHAPTGVIAHAQRLAAAVWGAERSWFLVNGATAGIQAMLLAALGQGQKVLVPRNCHQSIVHALVLSGAVPVFVQPVWDRRWQLAHGLTATTVEAALAVHPDIRAVVAVHPTYFGAVGETRAIARVAHAKGIALLVDAAHGAHLRFHPDLPECALAAGADLVVHSAHKTLPALTQAALLHQQGTLVDPARVEMALNLLQTTSPSYLLMASLDLARAHMVRHGREQLGHILEMAHRLRHKLPFAVLGGDGTPGFDPTRLVIDVGEKGWSGHAAETWLEQNAQVRAEMATHRHLVFILNSAHTEFDGEQLQASLLALATAQPTGATPPDLLPPPLPELRYSPREAFGRSHRSVPLAAAAGLTSAADVCTYPPGVPVLLPGEVVAAQSVEYLGAAIDTGAETVGIDGRGHIRVTID

SEQ ID NO: 84113 - DNA, 1401 bp, Prochlorococcus marinus str. MIT 9303
  CDS (1)..(1401): transl_table=11
atgggctttcttcccctgttgactcgcgaccgtggtcgcagcttgcatctccccgctcatggtcgtggggctggcttgcctgacgatctgcgtgcaatgttgcgccatcgagctggcatctgggatctgccggaacttcctgagttgggtgggccattgatgcagcagggggcggtggcagagagtcaaaggcaggcagcgattgctatcggggctgagcgaggttggtatggcgtcaatggcgcgacaggcctcttgcaggctgctctcttggcaatagcaaggcctggtcaggctgtgttgatgcctcgaaatgtccatcgcagcctcattcaggcttgtgttttgggcgatctcacgcctgtcttgtttgacctgcctttcatggttgatcggggtcatgtgtttccccctgatggaccttggttgaaggacgttttgaatgaacttcctatcgctggtgttgagatcgctgcagctgtgttggtgcatcccacttatcagggctatgcgacggatctcaagcccatggttgttgagcttcattctcggggttggccggtattagtggatgaggctcatggtgctcatttcgctagtcgggtggatgcatctttgcctgattctgcgatcacagcaggtgctgacttaatcgtccactcattgcacaaatctgctgccggtttgactcagaccgcagtgctttggagccaaggggatcgcgttgatcccaacgctgtcgagcgcagtctcggctggttgcaaaccaccagtccaagcgcactcttgctggcttcttgtgaagcgtcgctgagtgacttgtgcaagcctgcaggcttgcacaagctgggaacacgcctcaaggatgctcgcgaattggcggttcaacttcgtcagttgggattgcctttgcttgagaaccaggatcccttgcggctgattttgcacaccgctgcagagggtatcagcggacttgaagcagatgcttggctgatggccagggggctggtgggcgaacttccagaaccaggctgcctaacgttctgtcttggcttggcgccccagcgtggattggtcaggctgatgcatcgtcgctggcggggactccttgcagccaaaggtaagggcctacctttgccagtctttacgcccccgccactgccgcgcattacagcaccagcaatggcttgcggcttggcttggcgcgctcaaagtcagagagtgtcgattgctgatgcggtagggagagtcgcggcggagttaatctgtccctatcctccagggattcccttgctagtgccaggtgagaagctggatcacagacgtgtggactggcttttagagcagcagaacctttggcccgagcagatcgctggtacggtaaaagttctggccttgtaa

SEQ ID NO: 84114 - protein, 466 aa, Prochlorococcus marinus str. MIT 9303
MGFLPLLTRDRGRSLHLPAHGRGAGLPDDLRAMLRHRAGIWDLPELPELGGPLMQQGAVAESQRQAAIAIGAERGWYGVNGATGLLQAALLAIARPGQAVLMPRNVHRSLIQACVLGDLTPVLFDLPFMVDRGHVFPPDGPWLKDVLNELPIAGVEIAAAVLVHPTYQGYATDLKPMVVELHSRGWPVLVDEAHGAHFASRVDASLPDSAITAGADLIVHSLHKSAAGLTQTAVLWSQGDRVDPNAVERSLGWLQTTSPSALLLASCEASLSDLCKPAGLHKLGTRLKDARELAVQLRQLGLPLLENQDPLRLILHTAAEGISGLEADAWLMARGLVGELPEPGCLTFCLGLAPQRGLVRLMHRRWRGLLAAKGKGLPLPVFTPPPLPRITAPAMACGLAWRAQSQRVSIADAVGRVAAELICPYPPGIPLLVPGEKLDHRRVDWLLEQQNLWPEQIAGTVKVLAL

SEQ ID NO: 84115 - DNA, 1461 bp, Clostridium thermocellum ATCC 27405
  CDS (1)..(1461): transl_table=11
atggtgctaagaatgaaccagcttaagacaccggtttttgatgctgtgaaaagatacgttgaaagcaatgtgatacagtttcatgtaccgggtcacaagcagggagctggtcttgaggagcttagagagtatataggcgaaacagcgcttaaaatggatgcaaacggtatggaggatttggattttgccaacaaccccacgggggttatttatgagtcggagatgctggcagctcaggcatttggggctcagcatgcttattttttggtaaacgggactacgtccggtgttcaggcaatgattatgagtgcttgtgaaccgggagacaaaataatacttccgagaaatgcgcacaagtccacgataggtggaattatattaagcggtgccgtgccggtgtatgtgcagcccgaaataaatgaaaaactgggcattgccatgggaattacggtggaaagcctgaaaaaggcaataaaggaaaacccccatgcaaaagctgtgttcattatcaatccgacttattatggaatagcctcggatttaaaatccctcgtaagaattgcccacaggtacgaaatggctgttttggtggatgaggctcacggtgcgcatatgtcttttcatgatgattttcctctgacggcaatggaagtcggtgccgatatgagtgccgtaagtactcacaaaacgggaggttcactgacacaaagttctttgctgcttttaaggggaaacatgatcagccctgaaagagtaaaacaggttttaaaccttacatatacttccagcgcatcatatcttttgatgtgttcccttgacattgcaagaaaacagcttgccacaaaaggaagcgacatgttggaggaaactttgaggcttgccagaatggcaagagaggagataaacaaaattgaaggtttgtatgccttcgggaaagaacttataggaacaccgggatgtcatgattttgatgaaacaaaactgggtatatgtgtatcaggcttgggatataccggatatgagatggaagcgaaactcagaaaagaatacaatatacagattgaaatgtcggatctttcaaatatactggcaatagtaagcataggtgacagggaagaaaacttggtggcccttataaacgcactgaaagatattgcggccaaaacagagaaaaaggaatatcccaaaccgccgattattcctccgactcccaaaatgatagtttcacccagggacgctttttacagccccaagaaaatagtcccgttggacaaatctgtgggagagatatcgggagaaatggttatggcttaccctccgggcataccggttgtatgcatgggtgagagaattactcaggacatagtggattacataaagatactgaaggagcagaaaacccagctgcaaggcacggcggatccatacattgatcatataatggttcttggtgttgattga

SEQ ID NO: 84116 - protein, 486 aa, Clostridium thermocellum ATCC 27405
MVLRMNQLKTPVFDAVKRYVESNVIQFHVPGHKQGAGLEELREYIGETALKMDANGMEDLDFANNPTGVIYESEMLAAQAFGAQHAYFLVNGTTSGVQAMIMSACEPGDKIILPRNAHKSTIGGIILSGAVPVYVQPEINEKLGIAMGITVESLKKAIKENPHAKAVFIINPTYYGIASDLKSLVRIAHRYEMAVLVDEAHGAHMSFHDDFPLTAMEVGADMSAVSTHKTGGSLTQSSLLLLRGNMISPERVKQVLNLTYTSSASYLLMCSLDIARKQLATKGSDMLEETLRLARMAREEINKIEGLYAFGKELIGTPGCHDFDETKLGICVSGLGYTGYEMEAKLRKEYNIQIEMSDLSNILAIVSIGDREENLVALINALKDIAAKTEKKEYPKPPIIPPTPKMIVSPRDAFYSPKKIVPLDKSVGEISGEMVMAYPPGIPVVCMGERITQDIVDYIKILKEQKTQLQGTADPYIDHIMVLGVD

SEQ ID NO: 84117 - DNA, 1476 bp, Clostridium difficile 630
  CDS (1)..(1476): transl_table=11
atggatagcgagtttgcaaatgcagttgaattaagctatgagtgtgctccattattagagtcgttaaaggaatactcagagaaagatatagcttgttttgatgtgcctggacatgtaaaaaatagaggtgtagctatattaaataaatatctaggtgaaagtctcatgaaaatggatataaattcatcaccaactatggataatgtatctgcgccaaatgggattataaaaaatgcacaagatttgctagcacaagcatatatggctgatgaggcattctttataacgaatggcacaactcaagcaatacatgcaatgattttgagtgttataaaaccaggtgaaaaagtattacttccaagaaatatacataaatcagtaataaatgcgttaatactttgtggaggaataccaatatttatacaaccagaatttgatgaaaaactaggtataagtttaaatattactcttgaaaaagttagaacagagatagaaaaagattgtaatataaaagcattatttttccttaatccaacttactatggagtttgtgcagaccttgagagtattatagaactatgccataaaaataatgttttagtgttagttgatgaagctcatggtgcacattttccatttcatttagatttacctccttctgcaataagtttgggagctgatatggtagctgtaagtatacataaaactggaggagcattgacacaatcttcagcactcttattgaatagagataatgtaagttttgaaaaggttcttcaatcaatcaatatgctacaatcaacatcagcatcttatttgcttatggcaagtatagatggtgctagagttaatctagttgagaatggtgaaaagcaattgtcaaaagcattaaatctatctaggtatgcaaaatctaaattgaacaaaattgatggaataaaagttttatctacagaaatattgaaacaaaaaggtgttaaatttatagatgaaacaaaattgtgtataaatgtaaaagaattaaatttgactggatttgaagtatacgatttattatataaaaatttttcaattcaagtagaattgggagattcatataatatactggcacttgtgtccattggaacaaataaatcagatatagatagattagtaaaagcactttctataattgcaaaggtttatagaaaagaatcaacattaaatgaatttaatatggttcaaataaatccaattattaaacttaatccaagagaagctttttatgcaccaaaggaaagtgtagaaatcaattcatgtatagatagaatttgtggagaatcaataatggcatatccaccaggtataccgattattgctccaggagaattgataacagaagaaattatggagtatattattttcttaaaaaatagcaatgcgtatcttacagatgtacaagataaaaacttagatagaatactagtaataaaataa

SEQ ID NO: 84118 - protein, 491 aa, Clostridium difficile 630
MDSEFANAVELSYECAPLLESLKEYSEKDIACFDVPGHVKNRGVAILNKYLGESLMKMDINSSPTMDNVSAPNGIIKNAQDLLAQAYMADEAFFITNGTTQAIHAMILSVIKPGEKVLLPRNIHKSVINALILCGGIPIFIQPEFDEKLGISLNITLEKVRTEIEKDCNIKALFFLNPTYYGVCADLESIIELCHKNNVLVLVDEAHGAHFPFHLDLPPSAISLGADMVAVSIHKTGGALTQSSALLLNRDNVSFEKVLQSINMLQSTSASYLLMASIDGARVNLVENGEKQLSKALNLSRYAKSKLNKIDGIKVLSTEILKQKGVKFIDETKLCINVKELNLTGFEVYDLLYKNFSIQVELGDSYNILALVSIGTNKSDIDRLVKALSIIAKVYRKESTLNEFNMVQINPIIKLNPREAFYAPKESVEINSCIDRICGESIMAYPPGIPIIAPGELITEEIMEYIIFLKNSNAYLTDVQDKNLDRILVIK

SEQ ID NO: 84119 - DNA, 1482 bp, Bacillus thuringiensis serovar konkukian str. 97-27
  CDS (1)..(1482): transl_table=11
gtgtatagattgtcccaatacgaaacaccattgtttaccgctttagttgagcacagtaagcgaaatccaattcaattccatattccaggtcataaaaaagggcaaggcatggatcctgaatttcgcgaatttattgggcataatgcattagcaattgatttaattaacattgcgccgctcgatgatttacatcatccaaaaggtatgattaaagaagcacaagatttagcagccgctgcatttggcgcggatcatactttcttttctattcaaggtacaagtggcgcaataatgacaatggtgatgagcgtttgcggtcctggtgacaaaatactagtgccacgaaacgtgcataaatcagtaatgtcagctattattttctcaggtgcaaaacctattttcatgcatcctgaaatcgatccaaaacttggtatttcacatggaatcacaatccaatctgtcaaaaaagcacttgaagagcactcagatgcgaaaggcttacttgttattaatccaacatactttggctttgctgcggacttagaacagattgtacaattagcacattcttacgatatccctgtactcgttgatgaggctcatggtgttcatattcattttcacgatgaattgccgatgtcagcgatgcaagccggtgcagatatggcagcaacgagtgttcacaaattaggtggatctttaacgcaaagttctattcttaatgtaaaagaaggccttgtgaacgtaaaacatgttcaatctattattagcatgcttacgactacatcaacgtcttacatcttgttagcctccctagatgttgctagaaaacgtcttgctacagaaggaaaggcgctcatagaacaaacaatacaattagcggaacaagttcgtaatgctataaatgatattgaacatctttactgtccagggaaagaaatgctaggtacggatgctacttttaactatgatcctacaaagataattgtatctgtaaaagatttaggtattacaggccatcaggctgaagtatggcttagagagcaatataacattgaagtagaactctcagatttatacaacatactatgtcttgtcacttttggggatacagaaagtgagacgaatacacttattgcagcattacaagatttatcagcaacatttaaaaataaagctgataaaggtgttcgaatacaagtagaaattccagaaatacctgtgttagcactttctcctcgagatgctttttattcggaaacagaagtcatcccatttgaaaatgcagcaggtcgtattatagctgatttcgttatggtttatccgccagggattccaatctttactccgggggaaattattacacaagacaacttagagtatattcgtaaaaacttagaagcaggtttacctgtacaaggtcctgaagatatgacattacaaacattacgcgtgatcaaagagtacaagcctatcagttga

SEQ ID NO: 84120 - protein, 493 aa, Bacillus thuringiensis serovar konkukian str. 97-27
MYRLSQYETPLFTALVEHSKRNPIQFHIPGHKKGQGMDPEFREFIGHNALAIDLINIAPLDDLHHPKGMIKEAQDLAAAAFGADHTFFSIQGTSGAIMTMVMSVCGPGDKILVPRNVHKSVMSAIIFSGAKPIFMHPEIDPKLGISHGITIQSVKKALEEHSDAKGLLVINPTYFGFAADLEQIVQLAHSYDIPVLVDEAHGVHIHFHDELPMSAMQAGADMAATSVHKLGGSLTQSSILNVKEGLVNVKHVQSIISMLTTTSTSYILLASLDVARKRLATEGKALIEQTIQLAEQVRNAINDIEHLYCPGKEMLGTDATFNYDPTKIIVSVKDLGITGHQAEVWLREQYNIEVELSDLYNILCLVTFGDTESETNTLIAALQDLSATFKNKADKGVRIQVEIPEIPVLALSPRDAFYSETEVIPFENAAGRIIADFVMVYPPGIPIFTPGEIITQDNLEYIRKNLEAGLPVQGPEDMTLQTLRVIKEYKPIS

SEQ ID NO: 84121 - DNA, 1338 bp, Staphylococcus aureus subsp. aureus MRSA252
  CDS (1)..(1338): transl_table=11
atgaagcaacctattttaaataaattagaaagtttaaatcaagaagaagcgatttctttgcatgttccgggtcataaaaatatgactatcggtcatttatctcaattatcaatgacaatggataaaactgaaatacctggattagatgatttacatcatcctgaagaagtcattttgaaaagtatgaagcaggtggagaaacattcagattatgatggttatttcttagtgaatggcaccacttcgggaatattatctgtcatccagtctttttcacagaaaaaaggcgatatcttaatggcaagaaatgtacataaatctgtattacatgcgctcgatattagccaacaagaagggcattttattgaaacgcatcaaagtccgttaacgaatcattataataaagttaatttaagccgtttgaataatgacggtcacaaacttgttgtgttgacttatcctaactattacggtgaaacatttaatgtagaagaggttatcaaatctttgcaccaattaaatattcctgtactcattgacgaagcacacggcgcgcactttggattgcaaggatttccagattctacattaaattatcaagctgactatgttgttcaatcttttcataaaacgttaccagctttaacgatgggctcggtactttatattcataaaaatgcaccttatagagaaaatattatagaatatctaagctacttccaaacatctagtccttcatatttgattatggctagtttagagtcagctgcccagttctataaaacatatgatagtaccttgttttttgctaagagagcgcaattaatcgaatgtttggagaataaaggttttgaaatgcttcaagttgatgatccgttgaagctgttgataaaatatgaaggctttacaggtcatgatattcaaaattggtttatgaatgcacatatctatttagaattagcggacgactatcaagcattagcgatattgccgttatggcatcatgatgatacgtatttatttgattcgcttttacgtaaaattgaagatatgattttaccgaaaaaatcagtttctaaagttaaacaaacacaacttttaacaactgaaggtaactataaaccaaaacgctttgaatatgttacttggtgtgatttgaaaaaggcaaaaggtaaagttttggcgcgacatattgtcccgtatccgccagggattcctattattttcaaaggagaaacaataactgaaaatatgatagaattggtaaatgaatatctggaaactggaatgatagttgaaggaattaaaaataataaaattttagttgaggatgaataa

SEQ ID NO: 84122 - protein, 445 aa, Staphylococcus aureus subsp. aureus MRSA252
MKQPILNKLESLNQEEAISLHVPGHKNMTIGHLSQLSMTMDKTEIPGLDDLHHPEEVILKSMKQVEKHSDYDGYFLVNGTTSGILSVIQSFSQKKGDILMARNVHKSVLHALDISQQEGHFIETHQSPLTNHYNKVNLSRLNNDGHKLVVLTYPNYYGETFNVEEVIKSLHQLNIPVLIDEAHGAHFGLQGFPDSTLNYQADYVVQSFHKTLPALTMGSVLYIHKNAPYRENIIEYLSYFQTSSPSYLIMASLESAAQFYKTYDSTLFFAKRAQLIECLENKGFEMLQVDDPLKLLIKYEGFTGHDIQNWFMNAHIYLELADDYQALAILPLWHHDDTYLFDSLLRKIEDMILPKKSVSKVKQTQLLTTEGNYKPKRFEYVTWCDLKKAKGKVLARHIVPYPPGIPIIFKGETITENMIELVNEYLETGMIVEGIKNNKILVEDE

SEQ ID NO: 84123 - DNA, 1410 bp, Symbiobacterium thermophilum IAM 14863
  CDS (1)..(1410): transl_table=11
atggcggaggagcaggcccggacgccgctgttttcggcgctgagggagtacgttgcgcgggtccgggcgccgctgcacgtgcccgggcacaagatgggacgcgccgcgccctcggcgtggcgggagttcctggggccgaatgcactggcgatcgacctgacggaggcgccggggctggacgacctgcacgcgccggagggggtcatcgccgaggcccaggagctggcggcccgggcgttcggcgcgtggcggagttattttctggtgggcggtaccaccgccggcctgcacgccctcatcctcgccgcctgccatccgggagaggcgatcgcggtgccgcgcaacgcgcaccgctccgtgctgggcgccctgattctggccggggtccgtcctcactgggtgagggtggccttcgacccggacctgggcatcgccacgggcccggtcctcacgtcgctggaggaggcgctttccggcgccgcggccgcggtgctggtccatcccacgtattacggcatcgccggagacacggccgccgcgatcgacctgatccaccgcgcggccgtcccggccctggtggacgaggcgcacggcgcccacttcccgttccaccccgcgctgccgccctcggccctggaactgggcgcggacggcgtcgtgcagtcgctgcacaagaccgggggcagcctgacccagtcgtccctgtgccacctggggcacggcagccgcatcgcccccgaacggctgcaggagatgctgcggctcgtgcagtccacaagcccgtcgtacctgctcatggcttccctggacctggcccggcgcgagctggccctcgggggccgggaggcctgggggcgggccctggagctggcccacgaggcgaaacggcgcatcgacgccctgcccgggctccgggtgcgccccaccgacgacccgaccaagctgctcatcgacgtgcggggacggtccatttcgggcttccgggcggcggagcggctctgggaggaggccggcgtcgccgtcgaggcctccgggctgacctacgtgctcgccgtgctctcgcccggggactcccgggagcagatcgacgccctggtcgcggggctggagcggctgtcctccgagggggatgtcccggcccttccgccggagccgccctggcccgaggtggttctgccgccgcgggaggcatacttagcccgtaagaaggcggttccgcttcgccaggcccgggggcgcatcgcggcggagctggtggccccgtacccgccgggcattccggtggtggccccgggtgagcggctgacggctgacgtgctggactacctccggcgcgccgccgatgccggctggcaccttcagggcccggcagaccccgcgctgcgaagcatccaggtcgtggaggagtga

SEQ ID NO: 84124 - protein, 469 aa, Symbiobacterium thermophilum IAM 14863
MAEEQARTPLFSALREYVARVRAPLHVPGHKMGRAAPSAWREFLGPNALAIDLTEAPGLDDLHAPEGVIAEAQELAARAFGAWRSYFLVGGTTAGLHALILAACHPGEAIAVPRNAHRSVLGALILAGVRPHWVRVAFDPDLGIATGPVLTSLEEALSGAAAAVLVHPTYYGIAGDTAAAIDLIHRAAVPALVDEAHGAHFPFHPALPPSALELGADGVVQSLHKTGGSLTQSSLCHLGHGSRIAPERLQEMLRLVQSTSPSYLLMASLDLARRELALGGREAWGRALELAHEAKRRIDALPGLRVRPTDDPTKLLIDVRGRSISGFRAAERLWEEAGVAVEASGLTYVLAVLSPGDSREQIDALVAGLERLSSEGDVPALPPEPPWPEVVLPPREAYLARKKAVPLRQARGRIAAELVAPYPPGIPVVAPGERLTADVLDYLRRAADAGWHLQGPADPALRSIQVVEE

SEQ ID NO: 84125 - DNA, 1467 bp, Symbiobacterium thermophilum IAM 14863
  CDS (1)..(1467): transl_table=11
gtgaatcagcacgagactccgctgttcaccgggctggtgcggcacgccgagcgcaatccgatccagtttcacattcccggccacaagaagggcacagggatggcgccggaattccgcgcgtacatcggcgagcgcgcactggccattgacctgatcaacatcgcgccgctcgacgacctgcacaacccccacggcatcatccgggaggcgcaggccctggccgccgaggccttcggggcggaccactccttcttcagcgtccagggcaccagcggagcgatcatcgcgatgatcatgaccgtctgcggccccggcgacaagattctggtcccccgcaacgtgcacaagtcggtcctcaccggcattgtgctgtcgggggccctgcccatattcatgaaccccgacctggactacgagctgggcatcgcccatggggtgagcctggaggcggtgcgccacgccctggaccagcaccccgacgccaagggcgtgctggtgatcaacccgacctattacggcgtggcggcggacctgaaggggatcgtcgagctggcccactcccgcggggtgccggtcctggtggacgaggcccacggcgtccacctgtgctttcacgacgagctgccgctctcggccatgcaggccggcgcggacatggcggccacctcggtgcacaagctgggcggttcgctgacgcagaccagcatcctcaacgtgcgcgaggggttcatcaaccccgggcgggtgcaggcgattctgtccatgctgacgaccacttccacctcgtacctgctgctggcctcgctggacgtcgcccgcaagcaactggccacccgggggcgggagctgatcgaccgggcggtccgcctcgccgagcgcgcccgccgggagatcgcggagatccccggcctgtactgcctcgggcccgacgtggtcggccagtcgtcgtcccgcttcgacctcgacccgacgaagctctgcatcaacgtgaaggagctgggcgtgaccggcgtggaggtcgaggcgatcctccgggaggaatttaacattgaagtggaactctcggacctctacaacatcctgtgcatcatctcgctgggcgacacggcggaggacgtggacgcgctggtggccgcgctcggggagatctcccgccgcttctaccggcagcgcccggccaacgtggtgaaggtcaaggtgcctgtgacgcctatcctcgccatgcatccccgcaccgcgttctacgcggagaccgaggtggtgccgatccgcgaggcggagggccgggtgatcgccgagtcgatcatggtgtatccccccgggatccccatcctgctgccgggggagatcgtggcggaggagaacctggattacctggaggagtgcatccaggcggggctgccggtccaggggaccgaggaccccgagatccggatggtaaaggtcgtgaaggacgctcaccgttaa

SEQ ID NO: 84126 - protein, 488 aa, Symbiobacterium thermophilum IAM 14863
MNQHETPLFTGLVRHAERNPIQFHIPGHKKGTGMAPEFRAYIGERALAIDLINIAPLDDLHNPHGIIREAQALAAEAFGADHSFFSVQGTSGAIIAMIMTVCGPGDKILVPRNVHKSVLTGIVLSGALPIFMNPDLDYELGIAHGVSLEAVRHALDQHPDAKGVLVINPTYYGVAADLKGIVELAHSRGVPVLVDEAHGVHLCFHDELPLSAMQAGADMAATSVHKLGGSLTQTSILNVREGFINPGRVQAILSMLTTTSTSYLLLASLDVARKQLATRGRELIDRAVRLAERARREIAEIPGLYCLGPDVVGQSSSRFDLDPTKLCINVKELGVTGVEVEAILREEFNIEVELSDLYNILCIISLGDTAEDVDALVAALGEISRRFYRQRPANVVKVKVPVTPILAMHPRTAFYAETEVVPIREAEGRVIAESIMVYPPGIPILLPGEIVAEENLDYLEECIQAGLPVQGTEDPEIRMVKVVKDAHR

SEQ ID NO: 84127 - DNA, 1443 bp, Bacillus licheniformis ATCC 14580
  CDS (1)..(1443): transl_table=11
atgaagacacctttatatacagcattggtgaaccatgctgaaggacatcattattcttttcacgttccgggacatcacaatggagatgtcttttttgatgaagcaaaaactttttttgaaacgattctcaaagtggatctaactgaactgacaggactggatgatttacatgagccatctggcgtcatcaaggaagcacaggatttagtttcgcggctttacggagcggaagaaagcttttttctcgtcaatggttcgaccgttgggaatctggctatgatcctggctgtttgtcagccgggtgatacgatactcgttcagcgtaactgccataagtctgtatttcatgcgattgaactttcaggcgcccatccggtttttttgacaccggaaattgatgaggcgatggctgttcccacacatatactgtacgaaacagttgaagatgcaatttcacaatatccgcacgcaaaagggatcgtgttgacatatccaaattactacggccatgcagttgatctgaagccgatcatagaaaaggcccaccaacacgatatttccgttttagtcgacgaggctcacggcgcccattttgtgctgggccatccatttccccagtcgtcgttgaaagcgggcgctgatgccgtcgtccagtccgcgcataaaacgctcccggcgatgacgatggggtcctatctgcatcttaacagcggcaggatcaacagggacagactggcatactatctgtccgtgcttcaaagcagcagtccttcctacccaattatggcatctttggatatagctagggcatacgccgaagatatcttgaaaacaaatcgaacagccgatattgagaaagagctcatcaatatgagagaagtcttttctcaaataaacggagctgatattgtcgagccggctgatgcccgtatccggcaagatccgcttaagctgtgtatcagatcagcgtacggccactccggttttgaactgaaatccatatttgaagcaaacggcatccatcctgaattggcagatgaaaggcaagtcctgttgatcctgccgcttgaaggaaaaaatatgcccgcgccggaactgatcagcacaatcagtaaagacatgaaagatacagcagttcgaaatgatcttcctgccggaatcggaatcccttctgaaaaagtcacggctttgccttaccggaaaagcaagttgtctgccttcaaaaaagaatcggtgccttttaccgaagcagcgggcagaataagcgccgaatcggtcacaccttatcctccgggcattccgttgatcatggcgggtgagagaataacaaaagagacgatcagccggctgacgcggctcgtcgatctgaatgtacacattcagggcagcaatcagctcaaacaaaagcaattaactgtatatatagaagaggagaaatcatga

SEQ ID NO: 84128 - protein, 480 aa, Bacillus licheniformis ATCC 14580
MKTPLYTALVNHAEGHHYSFHVPGHHNGDVFFDEAKTFFETILKVDLTELTGLDDLHEPSGVIKEAQDLVSRLYGAEESFFLVNGSTVGNLAMILAVCQPGDTILVQRNCHKSVFHAIELSGAHPVFLTPEIDEAMAVPTHILYETVEDAISQYPHAKGIVLTYPNYYGHAVDLKPIIEKAHQHDISVLVDEAHGAHFVLGHPFPQSSLKAGADAVVQSAHKTLPAMTMGSYLHLNSGRINRDRLAYYLSVLQSSSPSYPIMASLDIARAYAEDILKTNRTADIEKELINMREVFSQINGADIVEPADARIRQDPLKLCIRSAYGHSGFELKSIFEANGIHPELADERQVLLILPLEGKNMPAPELISTISKDMKDTAVRNDLPAGIGIPSEKVTALPYRKSKLSAFKKESVPFTEAAGRISAESVTPYPPGIPLIMAGERITKETISRLTRLVDLNVHIQGSNQLKQKQLTVYIEEEKS

SEQ ID NO: 84129 - DNA, 1482 bp, Bacillus cereus E33L
  CDS (1)..(1482): transl_table=11
gtgtatagattgtcccaatacgaaacaccattgtttaccgctttagttgagcacagtaagcgaaatccaattcaattccatattccaggtcataaaaaagggcaaggcatggatcctgaatttcgcgaatttattgggcataatgcattagcaattgatttaattaacattgcgccgctcgatgatttacatcatccaaaaggtatgattaaagaagcacaagatttagcagccgctgcatttggtgcggatcatactttcttttctattcaaggtacaagtggcgcaataatgacaatggtaatgagcgtttgcggtcctggtgacaaaatactagtgccacgaaacgtgcataaatcagtaatgtcagctattattttctcaggtgcaaaacctattttcatgcatcctgaaatcgacccaaaacttggtatttcacatggaatcacaatccaatctgtcaaaaaagcacttgaagagcactcagatgcgaaaggcttacttgttattaatccaacatactttggctttgctgcggacttagagcagattgtacaattagcacattcttacgatatccctgtactcgttgatgaggctcatggtgttcatattcattttcacgatgaactgccgatgtcagcgatgcaagccggtgcagatatggcagcaacgagtgttcacaaattaggtggatctttaacgcaaagttctattcttaatgtaaaagaaggccttgtgaacgtaaaacatgttcaatctattattagcatgcttacgactacatcaacgtcttatatcttgttagcctccctagatgttgctagaaaacgtcttgctacagaaggaaaggcactcatagaacaaacaatacaattagctgaacaagttcgtaatgctataaatgatattgaacatctttactgtccagggaaagaaacgctaggtacggatgctacttttaactatgatcctacaaagataattgtatctgtaaaagatttaggtattacaggccatcaggctgaagtatggcttagagagcaatataacattgaagtagaactctcagatttatacaacatactatgtcttgtcacttttggggatacagaaagtgagacgaatacacttattgcggcattacaagatttatcagcaacatttaaaaataaagctgataaaggtgttcaagtgcaagtagaaattccagaaatacctgtgttagcactttctcctcgagatgctttttattcggaaacagaagtcatctcatttgaaaatgcagcaggtcgtattatagctgatttcgttatggtttatccgccagggattccaatctttactccgggggaaattattacacaagacaacttagagtatattcgtaaaaacttagaagcaggtttacctgtacaaggtcctgaagatatgacattacaaacattacgcgtgatcaaagagtacaagcctatcagttga

SEQ ID NO: 84130 - protein, 493 aa, Bacillus cereus E33L
MYRLSQYETPLFTALVEHSKRNPIQFHIPGHKKGQGMDPEFREFIGHNALAIDLINIAPLDDLHHPKGMIKEAQDLAAAAFGADHTFFSIQGTSGAIMTMVMSVCGPGDKILVPRNVHKSVMSAIIFSGAKPIFMHPEIDPKLGISHGITIQSVKKALEEHSDAKGLLVINPTYFGFAADLEQIVQLAHSYDIPVLVDEAHGVHIHFHDELPMSAMQAGADMAATSVHKLGGSLTQSSILNVKEGLVNVKHVQSIISMLTTTSTSYILLASLDVARKRLATEGKALIEQTIQLAEQVRNAINDIEHLYCPGKETLGTDATFNYDPTKIIVSVKDLGITGHQAEVWLREQYNIEVELSDLYNILCLVTFGDTESETNTLIAALQDLSATFKNKADKGVQVQVEIPEIPVLALSPRDAFYSETEVISFENAAGRIIADFVMVYPPGIPIFTPGEIITQDNLEYIRKNLEAGLPVQGPEDMTLQTLRVIKEYKPIS

SEQ ID NO: 84131 - DNA, 1491 bp, Bacillus licheniformis ATCC 14580
  CDS (1)..(1491): transl_table=11
atgaaggtgggaaaacaattgttgcagcacgaaacacccctatataccggattaaaaaaacacgccggcaaaaacccgatccagttccatataccggggcacaaaaaaggctctgggatggaccctgaattcagggagtttatcggagaaaatgcattaagcatagatttaatcaacatcgagcctctcgacgatctgcacgcgccgaaaggaataatcaaacaggcgcaggatctggcggctgaagcattcggagccgactacacgttcttttccgtccagggaacgagcggcgccatcatgacgatggtcatggccgtatgcggacccggagacaaaatcatcgtcccgagaaatgttcataaatcggtgatgtcagcgatcgtcttctcaggcgccgtaccgatcttcatccatccggaaatcgacgatgagctggggatttcacacgggatcacccctgaatcagcgaaaaaagcgctgcttgagcatcctgacgcaaaaggactgctcgtcatcaacccgacttatttcggcatagctgcagacttaaaaagcatcgtcgagctggctcattcttttcatgtcccggtgctagttgacgaggcgcacggcgttcatatccacttccatgaagatctgcctctttcggcaatgcaggccggagcggatatggcggcgacgagcgttcataagctcggaggatcccttacacaaagttcgattctcaatatgaaagaaggtctggtttcaaaggaaagggtgcaatcgattttaagcatgctgacgacgacatcgacctcctatctattgctcgcttcgcttgatgtcgccagaaaacgcttagccacagagggacacgaactgatcgaacaaacgattaagctcgccaacgaaacaagggaacgcatcaataatatcaacgggatttcatgcgtcgggagggaaatcctcggctccaaagcggcttttgactatgatccgaccaaattgatcatatctgtgaaagacctcggcctgaccggtcatgatgtggaaaaatggctgcgcgagtcatgccaaatcgaagtggagctttctgacttatacaacatcctgtgcatttttacaccgggagaccggaaagaggatgcagatgcgttaattaaaggattaaccgagattgctcaacaggccgcttcatctgcggaaaacagacgcaagcctgaagtgcttctgccaaacattccggcgcttgcgatgacaccgcgtgacgctttttacgcaaacacggagatcattccgttcaaaaaagcagctggcagaatgattgccgagtttgttatggtttatccgccagggataccgatcttcattccgggcgagatcattaccgaggataatatcaactacatcgaaaagaacctggaagctgggctgcctgttcagggaccggaagatgacaccctccatatgatccgcgttattaaagaacagcaggcaatcctgtaa

SEQ ID NO: 84132 - protein, 496 aa, Bacillus licheniformis ATCC 14580
MKVGKQLLQHETPLYTGLKKHAGKNPIQFHIPGHKKGSGMDPEFREFIGENALSIDLINIEPLDDLHAPKGIIKQAQDLAAEAFGADYTFFSVQGTSGAIMTMVMAVCGPGDKIIVPRNVHKSVMSAIVFSGAVPIFIHPEIDDELGISHGITPESAKKALLEHPDAKGLLVINPTYFGIAADLKSIVELAHSFHVPVLVDEAHGVHIHFHEDLPLSAMQAGADMAATSVHKLGGSLTQSSILNMKEGLVSKERVQSILSMLTTTSTSYLLLASLDVARKRLATEGHELIEQTIKLANETRERINNINGISCVGREILGSKAAFDYDPTKLIISVKDLGLTGHDVEKWLRESCQIEVELSDLYNILCIFTPGDRKEDADALIKGLTEIAQQAASSAENRRKPEVLLPNIPALAMTPRDAFYANTEIIPFKKAAGRMIAEFVMVYPPGIPIFIPGEIITEDNINYIEKNLEAGLPVQGPEDDTLHMIRVIKEQQAIL

SEQ ID NO: 84133 - DNA, 1470 bp, Synechococcus elongatus PCC 6301
  CDS (1)..(1470): transl_table=11
atggccaagccgctctttgaccaactgctggcgagcgctcagcaggcccgcgctccttttcacacgccgggacacaagctcgggcgggcgatcgcaacccatcttcaacaggcctggggatcagccattttccagagtgatctacccgagttaccggagttggataatctctacgccgccagcggggttttagccgagagtcaagcccaagcagcggaggtgtttggggccgatcgcagctggtttttggtcaatggctcgactggcggactgttggccgcgattttgaccatctgcagtcccggcgatcgcctgctgttgccccgcaatgctcaccgatcgctgttgagtggctgcattttgagcggcgcgatgccggtttggatcacgccaccggaggcggcagactttgacctagttggtgtcccaacgcctgaacaagtcgctacagcactggctcaggatccgcagatcaaagcagttgtgcttgtctcaccgacctacgaaggagtctgcgcggatgtggctgcgatcgccgcgatcgcacacaatcacaacctgccgctgattattgatgccgctcacggcgcgcatttgggcttccatcctgacctcccgcgatcgcccttacatgaaggcgcagatttggttgtccaatcaactcacaagctactgggagcgttgactcaagccgccatgctgcactgcaagggcgatcgcattgatcctgaacggctcagccaatccttagctctggtgcagagcagtagcccgagttacctcttgctagcctcgctggaagcggcaacagaacagatgcgaacttcagcccaagacttactccaagtcaccattgatctcgctcgccaagcccatcagcgactggccgagttgccgggtctgcagttacccgctctaaagatcggcaatcgcgagggctttccccagtgggaccgaacacggctggtgatcaactttcagtcctgcggctggagcggcttctgcgccgatgaatatttgcacgagcaatggcaagttacggcggagttgcccagcctctcgaatcttgtttttcatctcagcttgggtaaccgtattgaagacatcgatcgcctcgtcacagcctgcgatcgcctcctctctcaggaacatcaagaggaactgccaccgcgtctgccggtttggttagaacccgaaaccatcctgagccctcgccaagcttggttttctcgccatcaaaccgtcagtgcagagcaagcgatcggcgcgatcgcggcagaatgtgtttggccctacccgcccgggattcccgttttggtggctggcgagcggatttcgaagagcgcagtagactatctgcgacaggtacagacgaccggcggcattctcagcgggtgcgctgaccctgaactaaccaccctgcgcatcgtgcaggactctgacacgattcatgcctcctgcctctcctga

SEQ ID NO: 84134 - protein, 489 aa, Synechococcus elongatus PCC 6301
MAKPLFDQLLASAQQARAPFHTPGHKLGRAIATHLQQAWGSAIFQSDLPELPELDNLYAASGVLAESQAQAAEVFGADRSWFLVNGSTGGLLAAILTICSPGDRLLLPRNAHRSLLSGCILSGAMPVWITPPEAADFDLVGVPTPEQVATALAQDPQIKAVVLVSPTYEGVCADVAAIAAIAHNHNLPLIIDAAHGAHLGFHPDLPRSPLHEGADLVVQSTHKLLGALTQAAMLHCKGDRIDPERLSQSLALVQSSSPSYLLLASLEAATEQMRTSAQDLLQVTIDLARQAHQRLAELPGLQLPALKIGNREGFPQWDRTRLVINFQSCGWSGFCADEYLHEQWQVTAELPSLSNLVFHLSLGNRIEDIDRLVTACDRLLSQEHQEELPPRLPVWLEPETILSPRQAWFSRHQTVSAEQAIGAIAAECVWPYPPGIPVLVAGERISKSAVDYLRQVQTTGGILSGCADPELTTLRIVQDSDTIHASCLS

SEQ ID NO: 84135 - DNA, 1479 bp, Bacillus clausii KSM-K16
  CDS (1)..(1479): transl_table=11
atgggacacgaccaagaacaaaccccgttatttacgggtttaaccgaatatgccaaaaaagagccaatcccttttcatataccaggccataaacgaggagcaggcatggacgccgattttcgcacttttataggcgaagaagcgctgtccattgacttgattaacattgcccctctcgatgacttacaccatcctcatggcattattgatcaatctcagcaattggcagccaaagcatttggagctgattatacatttttctctgtacaaggcacaagcggggccatcatgactatgattatgagcgtatgtgggccaggcgataaaattattgtccctcgcaacgttcataaatccattatgtcagcgattattttttgcggggcattgcctgtgtttatccatccagaactcgactttgaacatgggattgctcacggggtagcgacagagtcagttgccaaagcgatacgcgctcatcctgacgcaaaagccgtccttgtgatcaaccctacttactacggatttacttgcgatttaaaggcgattgtcgaattagcccatcaagcgggcattcctgtacttgttgatgaagcacacggcgtacacatccattttaatgagcgtctgccggtaagcgcaatgcaagcaggagcagacatggcagcgacgagcgtgcataaattaggaggttcgctgacacaaagttccatattaaatattcgtgccgggcttgtatccgttgaacatacaacggccgttatgagcatgctgacaaccacatcgacttcttatttgctccttgcctccctggatgcggcgagaaaacatctggctacaaaaggagcccaactcctcgatgagaccatcgacttgtcgatttggatgcgccatgcaattaatgagattgacggactatactgccttggcagcgaaaaactccatggatccgctgtattttcccatgaccccacgaagctattaatttctttaaaaggcttaaacatttctggttttgccgcagaagtttggctacgggaccattacaatattgaagttgaactttccgacttgtacaatattctttgcatcattaccattggcgatacagaggaaaagcttgctttgttgctgagagcattaacgcaactggcgctggaattttcttcaacggctaatcgttgtgcgtctttacccgtccatgtcgccaatattccaacgcttgccctttcgccgcgtgaagccttttatgcgcaaacagaaacagtgccatttgatgaatctgttggccggattattgccgagtttattatggtctatcctccaggcatccctattcttagcccaggggaattgatcagtgaagaaaacctcgcttatgtaaaagaaaacttgaaagctggccttcctgtccaaggtccagaagacgctacactttccaacttgaaagtgattaaagagcaacgcgccattcgataa

SEQ ID NO: 84136 - protein, 492 aa, Bacillus clausii KSM-K16
MGHDQEQTPLFTGLTEYAKKEPIPFHIPGHKRGAGMDADFRTFIGEEALSIDLINIAPLDDLHHPHGIIDQSQQLAAKAFGADYTFFSVQGTSGAIMTMIMSVCGPGDKIIVPRNVHKSIMSAIIFCGALPVFIHPELDFEHGIAHGVATESVAKAIRAHPDAKAVLVINPTYYGFTCDLKAIVELAHQAGIPVLVDEAHGVHIHFNERLPVSAMQAGADMAATSVHKLGGSLTQSSILNIRAGLVSVEHTTAVMSMLTTTSTSYLLLASLDAARKHLATKGAQLLDETIDLSIWMRHAINEIDGLYCLGSEKLHGSAVFSHDPTKLLISLKGLNISGFAAEVWLRDHYNIEVELSDLYNILCIITIGDTEEKLALLLRALTQLALEFSSTANRCASLPVHVANIPTLALSPREAFYAQTETVPFDESVGRIIAEFIMVYPPGIPILSPGELISEENLAYVKENLKAGLPVQGPEDATLSNLKVIKEQRAIR

SEQ ID NO: 84137 - DNA, 1467 bp, Anabaena variabilis ATCC 29413
  CDS (1)..(1467): transl_table=11
atgctcgatcaaaaccaaacaccattaatcgatgggataaaagcttgtatcgctcgtcctcatgcagcgttttatactcctgggcataagcgggggcgggggattgctcaacctttggctgatttgttgggtgaagctgtgtttggtgctgatttgacggagttggctaatttagataatttatctgcaccccaaggagtgattcaggaagcccaacgattagcggcggcggcttttggtgctgcacagacatggtttttagtcaatggttctacttgcggtgtcgaggcagcaattatggctacttgtagaccaggggataagattattttgcctcggaatgtacattcatcggcgatcgctggtttaattctctctggtgctatcccaatctttattcatcctgaatatgaccaggttttagatattgcccacagtatgacacctgaggctgtaaaagctgctttgcaacaacatcctgatgctaaagcggtgttggcagtttaccctacatattacggtgtgtgtggggatttagaagcgatcgcccaaatcacccaccaatacaatattcctctacttgtagatgaagcccacggcgcacacttcacttttcacccagaattacctaccccagccttagccgcaggtgcagacttaactgtacagtccattcacaaggtactgggtgcaatgacgcaagcttcgatgttacacatccaaggtgacagaataaatgcggttagagttagtcaggctttgcaactgctacagtccactagccccagttatgtacttctagcttctctggatgcggctcgtcaacaaatggctttgtgtgggaaacagttaatgtcccgtaccttacaactagccaatgaagctagagaaagaattagtcaaattcctggcttatcagttttacaacctcctaccatgacaccatcatcagggtttacaactttggataaaacacgcttaactatcactgtttccggcttgggtttaacgggttttgcggcggaagaaattttagatgaacaactgggggtaacggctgaatttgccactttcaagcatctcacctttattattagcttgggaaacacaactgctgatattgagcagttagtccaaggtttcacaactttagcagaaacaacaccgcctgctaaggcattagtcaacccaagagttaatagtaatctggaatatttttcagagatttccccccgtgatgccttttttgccgatagtgaaacattatccatcgaacaggcgcgcgatcgcatttgtgcagaaattatctgtccttatcccccaggaatccccgttattatgccaggagaagttatcacaaaacctgccattgaatatttacaacacatccaaagttcaggcggatttattactggttgtgccgatactagtctgagtactttaaaggtgttagtcattggtcattag

SEQ ID NO: 84138 - protein, 488 aa, Anabaena variabilis ATCC 29413
MLDQNQTPLIDGIKACIARPHAAFYTPGHKRGRGIAQPLADLLGEAVFGADLTELANLDNLSAPQGVIQEAQRLAAAAFGAAQTWFLVNGSTCGVEAAIMATCRPGDKIILPRNVHSSAIAGLILSGAIPIFIHPEYDQVLDIAHSMTPEAVKAALQQHPDAKAVLAVYPTYYGVCGDLEAIAQITHQYNIPLLVDEAHGAHFTFHPELPTPALAAGADLTVQSIHKVLGAMTQASMLHIQGDRINAVRVSQALQLLQSTSPSYVLLASLDAARQQMALCGKQLMSRTLQLANEARERISQIPGLSVLQPPTMTPSSGFTTLDKTRLTITVSGLGLTGFAAEEILDEQLGVTAEFATFKHLTFIISLGNTTADIEQLVQGFTTLAETTPPAKALVNPRVNSNLEYFSEISPRDAFFADSETLSIEQARDRICAEIICPYPPGIPVIMPGEVITKPAIEYLQHIQSSGGFITGCADTSLSTLKVLVIGH

SEQ ID NO: 84139 - DNA, 1329 bp, Carboxydothermus hydrogenoformans Z-2901
  CDS (1)..(1329): transl_table=11
atgtcaggtttaatagataaaatccaaaaacatatccaaaaaaaacctatctctttccacatgcccggtcataaaaatggccggtttataccgaaaaaagtaaaaaatcttttaggagaaaaatatttcaaagcagatttaaccgagcttccgggtctcgataacctttatgcgccggaagaggccatacttaaattagaggagaaactttcccgctactttggtttaccccgggcgcatctatcggttaacggctctacggcggcggtaatagccttactgctttcgttttttcggccgggtgaaaaaatagcaattgatcggatgtcccacgtatctctgtaccatgggatggttttaggggatttaattccggaatttatctatcctcattgggacgaggagtacggacttccggtaaataagactcctaaagctcacaacaaaagttattttctgaccaaccccgactaccaggggctaatccgggatttaacggagcttaaaaccgaccggctccttctggatgcggcccacgggggtttaattcctctatggcgaccggatttttttaaaaacattgcaggatttgcggtaagcctgcataaaaccggtccctttcccaatcctctggcggcggtggtttttcgggataaagggatagaagtgaaacgggcgctaaacttaatccaaactaccagcccttcgtaccccttaatggctgcggccgagggcggggtggacatgctattaaaggttggtgcacgagcctttcaaaaagccaaggagctttcggaccattttaaggagtacttgaaaaaacgggggatcgggtttcttcaggataaatacccggcggaccctttaaaagttaccataaaagcggcggatttgggtgtttccggagaaaaaattgccgcaaagttaatgaaaaagggaatttatccggaggcttacggtccgggttatgtgctttttatgttttccccgggtaataccgaaaaagatgtcaaaaagcttataaacattattgaaacaataaaaggtacagataaaaaaatctttatcccgaaaaatccttttagttttcagccagaactaaaattaaccccgcgggaagtgtattatgcccaagaaaagcttgtggatttaaaagcttcagtgggttatactgcccgggatggggttacggtttaccctccgggagcaccggtactctatccgggggaagaaattactaaagaagcagtggagtatttagagtatcatttaaacttgggagtaaaggtaaccgggatatatgatggcaggataaaggtggtaaggtaa

SEQ ID NO: 84140 - protein, 442 aa, Carboxydothermus hydrogenoformans Z-2901
MSGLIDKIQKHIQKKPISFHMPGHKNGRFIPKKVKNLLGEKYFKADLTELPGLDNLYAPEEAILKLEEKLSRYFGLPRAHLSVNGSTAAVIALLLSFFRPGEKIAIDRMSHVSLYHGMVLGDLIPEFIYPHWDEEYGLPVNKTPKAHNKSYFLTNPDYQGLIRDLTELKTDRLLLDAAHGGLIPLWRPDFFKNIAGFAVSLHKTGPFPNPLAAVVFRDKGIEVKRALNLIQTTSPSYPLMAAAEGGVDMLLKVGARAFQKAKELSDHFKEYLKKRGIGFLQDKYPADPLKVTIKAADLGVSGEKIAAKLMKKGIYPEAYGPGYVLFMFSPGNTEKDVKKLINIIETIKGTDKKIFIPKNPFSFQPELKLTPREVYYAQEKLVDLKASVGYTARDGVTVYPPGAPVLYPGEEITKEAVEYLEYHLNLGVKVTGIYDGRIKVVR

SEQ ID NO: 84141 - DNA, 1470 bp, Synechococcus elongatus PCC 7942
  CDS (1)..(1470): transl_table=11
atggccaagccgctctttgaccaactgctggcgagcgctcagcaggcccgcgctccttttcacacgccgggacacaagctcgggcgggcgatcgcaacccatcttcaacaggcctggggatcagccattttccagagtgatctacccgagttaccggagttggataatctctacgccgccagcggggttttagccgagagtcaagcccaagcagcggaggtgtttggggccgatcgcagctggtttttggtcaatggctcgactggcggactgttggccgcgattttgaccatctgcagtcccggcgatcgcctgctgttgccccgcaatgctcaccgatcgctgttgagtggctgcattttgagcggcgcgatgccggtttggatcacgccaccggaggcggcagactttgacctagttggtgtcccaacgcctgaacaagtcgctacagcactggctcaggatccgcagatcaaagcagttgtgcttgtctcaccgacctacgaaggagtctgcgcggatgtggctgcgatcgccgcgatcgcacacaatcacaacctgccgctgattattgatgccgctcacggcgcgcatttgggcttccatcctgacctcccgcgatcgcccttacatgaaggcgcagatttggttgtccaatcaactcacaagctactgggagcgttgactcaagccgccatgctgcactgcaagggcgatcgcattgatcctgaacggctcagccaatccttagctctggtgcagagcagtagcccgagttacctcttgctagcctcgctggaagcggcaacagaacagatgcgaacttcagcccaagacttactccaagtcaccattgatctcgctcgccaagcccatcagcgactggccgagttgccgggtctgcagttacccgctctaaagatcggcaatcgcgagggctttccccagtgggaccgaacacggctggtgatcaactttcagtcctgcggctggagcggcttctgcgccgatgaatatttgcacgagcaatggcaagttacggcggagttgcccagcctctcgaatcttgtttttcatctcagcttgggtaaccgtattgaagacatcgatcgcctcgtcacagcctgcgatcgcctcctctctcaggaacatcaagaggaactgccaccgcgtctgccggtttggctagaacccgaaaccatcctgagccctcgccaagcttggttttctcgccatcaaaccgtcagtgcagagcaagcgatcggcgcgatcgcggcagaatgtgtctgcccctacccgcccgggattcccgttttgctgcctggcgagcggatttcgaagagcgcagtagactatctgcgacaggtacagacgaccggcggcattctcagcggctgcgctgaccctgaactaaccaccctgcgcatcgtgcaggactctgacacgattcatgcctcctgcctctcctga

SEQ ID NO: 84142 - protein, 489 aa, Synechococcus elongatus PCC 7942
MAKPLFDQLLASAQQARAPFHTPGHKLGRAIATHLQQAWGSAIFQSDLPELPELDNLYAASGVLAESQAQAAEVFGADRSWFLVNGSTGGLLAAILTICSPGDRLLLPRNAHRSLLSGCILSGAMPVWITPPEAADFDLVGVPTPEQVATALAQDPQIKAVVLVSPTYEGVCADVAAIAAIAHNHNLPLIIDAAHGAHLGFHPDLPRSPLHEGADLVVQSTHKLLGALTQAAMLHCKGDRIDPERLSQSLALVQSSSPSYLLLASLEAATEQMRTSAQDLLQVTIDLARQAHQRLAELPGLQLPALKIGNREGFPQWDRTRLVINFQSCGWSGFCADEYLHEQWQVTAELPSLSNLVFHLSLGNRIEDIDRLVTACDRLLSQEHQEELPPRLPVWLEPETILSPRQAWFSRHQTVSAEQAIGAIAAECVCPYPPGIPVLLPGERISKSAVDYLRQVQTTGGILSGCADPELTTLRIVQDSDTIHASCLS

SEQ ID NO: 84143 - DNA, 1410 bp, Moorella thermoacetica ATCC 39073
  CDS (1)..(1410): transl_table=11
gtgaagacccaagggcaggcgcctctatgggaggcgcttttaaactatcgtcagcaaggacttaattcctggcatactcccggtcacaaggacggggcctataccttgcccctgtggcgggatttcctgggcgcggccctggctctggacctgactgaggtacctggcctggataacctggcctgtcccgggggggctatcgccgccgcccaggagcgggcggcccgcttttatggcgcagcccggacttttttcctggtaaacggtgcgagcgccggcctgatggccgtcatcctggccacctgccgccccggggatgaagttttgctgccccggtacgcccaccgggcggtttttaatggcctgattttaagtggggcccggccggtttacctggccacggaatggctggccagcccgggcctgcccctgggggtagccccggaaagcctggccggaaccttaagggaacatcccggggccaggctcctgctcctggtccatcctacctatgaaggtgtagtaccccggagcgaagaactaattgccctggcccacgcccacggcgtggcggtcctggccgatgccgcccatggggcccactttggcctggctccgggcctgccaccgtctcccctggacctgggggctgattttgtcgtccagagtagccataaaaccctggcggccctgacccaggcagccatgctgcacctgcgggaggaggcagcggcagcaagggtggcggcagccctgaacctgctccagactaccagtccttcctacctcctgctggcttccctggatacggcccgtctcctggcggaagaacggggccggcaggactggggtctgacggtagcccgggctaccgcggcccgggccaggctggatcgggccggactaccgcccctggcaatggcagatgttaccgggccggcggccagcggcctggatgtaacccgcctgctcctgcctacggcgcccctgggccggaggggaacggaggtggctgccaccctgcgccgcgccggccaggaggtagaactggcgggagaggattatatcgtggtaatcatcacccccggcgacggtgaggagaaaatcgaggccctggtgaccgccctgctggccctgccgcgatccgacagtaggcagccggcagctttagccccggcaccgcccgtcaggatacccgagacggctttgacgccccgggaggcctggcttgccccccggcgggagttgcccctgggggaggctacggggaagattgccgccgaactcatctccccctgcccgccgggcctggccctgacggtaccgggggaggttctgacgccggaggtcctcgagcggctcagggatttacggggaccgtctggccgggtgctggtagtggatggctaa

SEQ ID NO: 84144 - protein, 469 aa, Moorella thermoacetica ATCC 39073
MKTQGQAPLWEALLNYRQQGLNSWHTPGHKDGAYTLPLWRDFLGAALALDLTEVPGLDNLACPGGAIAAAQERAARFYGAARTFFLVNGASAGLMAVILATCRPGDEVLLPRYAHRAVFNGLILSGARPVYLATEWLASPGLPLGVAPESLAGTLREHPGARLLLLVHPTYEGVVPRSEELIALAHAHGVAVLADAAHGAHFGLAPGLPPSPLDLGADFVVQSSHKTLAALTQAAMLHLREEAAAARVAAALNLLQTTSPSYLLLASLDTARLLAEERGRQDWGLTVARATAARARLDRAGLPPLAMADVTGPAASGLDVTRLLLPTAPLGRRGTEVAATLRRAGQEVELAGEDYIVVIITPGDGEEKIEALVTALLALPRSDSRQPAALAPAPPVRIPETALTPREAWLAPRRELPLGEATGKIAAELISPCPPGLALTVPGEVLTPEVLERLRDLRGPSGRVLVVDG

SEQ ID NO: 84145 - DNA, 1500 bp, Moorella thermoacetica ATCC 39073
  CDS (1)..(1500): transl_table=11
atgctggaccagaccaggacaccggtctttacggcgataaaacaatatatagatgatgaggttattcccttccacgtgcccggacacaagcagggccgggccctgccggagtttaaggagtatgtgggcgaacgggtcctggccatggatttgacctgtgttccgggcctggataatatctgcaacccccgggatgtcatccgggaggcggaggaactgacggcggcggcctacggagcggaacacgctttttttctcgtcaacggcaccacctccggcatccaggccatgatcctggccgtctgccagccaggggacaagattatcattccccgcaacgcccatcgctcggccctggggggccttatcctgagcggggcccggccggtatatattgaaccggagatcaacgctgactttggtatctccatgggtataaccccggaacaagtggaagcggccttaagggaacacccggacgcgaaagcagtcttcgttatcagccccaattactacggcaccgtccctccgttaaaggaaatcgttgctatagcccatagctatgacgtgccggtattggtcgatgaggcccacggtgcccacctgaagttccatccggcgctacctccttcagccatggaggcgggggcggacctggcggcaaccagtgcccataagttagccggttccctgacccagagttcctatctcctgctccaggggggaaggctggatcctaagcatatcaaagcggtccttaacctttcccagaccaccagtccttcttatatcctcctggcttccctggacgtagccagaaagcagatgatcctcaagggccggaaactcttggaacggaccctggagatagcccattggatccgcggagagctatcccgcatcgaaggcctggccattatgggtgaagaggttacctccctgcctggttgcagttacctggaccccaccaagattactgtcaacgtccaggggctggggttgtccggttatgaaatggaaacccttttacgccgggagtataaaatccaggtcgagctctccgacctctataacgtcctgctcctggtttccataggtgataatgaggagaccgccggtaagctggtagctgcctttaaagatatagccaggaagcgctccttaaagaacgtagtccgcttttgcccgcccttgccggccattccccgcatggcggtcttgccccgggaagccttttacagccagacttattgcctggaattggattatgcggaaggagaaatcagcgccgaagccattaccgcctacccgccgggtatccccctggtctgcccgggagaggttattaccagggagattatagattacgttaacctgctgaaaagagagcatgccgacttgcaggggccggaagacccggaactcaaggttatccgcgtcttgaaggatacggtgagtatgctcgaacacggggcggccagccgggccgggctggcctga

SEQ ID NO: 84146 - protein, 499 aa, Moorella thermoacetica ATCC 39073
MLDQTRTPVFTAIKQYIDDEVIPFHVPGHKQGRALPEFKEYVGERVLAMDLTCVPGLDNICNPRDVIREAEELTAAAYGAEHAFFLVNGTTSGIQAMILAVCQPGDKIIIPRNAHRSALGGLILSGARPVYIEPEINADFGISMGITPEQVEAALREHPDAKAVFVISPNYYGTVPPLKEIVAIAHSYDVPVLVDEAHGAHLKFHPALPPSAMEAGADLAATSAHKLAGSLTQSSYLLLQGGRLDPKHIKAVLNLSQTTSPSYILLASLDVARKQMILKGRKLLERTLEIAHWIRGELSRIEGLAIMGEEVTSLPGCSYLDPTKITVNVQGLGLSGYEMETLLRREYKIQVELSDLYNVLLLVSIGDNEETAGKLVAAFKDIARKRSLKNVVRFCPPLPAIPRMAVLPREAFYSQTYCLELDYAEGEISAEAITAYPPGIPLVCPGEVITREIIDYVNLLKREHADLQGPEDPELKVIRVLKDTVSMLEHGAASRAGLA

SEQ ID NO: 84147 - DNA, 1455 bp, Mycobacterium sp. MCS
  CDS (1)..(1455): transl_table=11
atggactctgaccggcacacgcgcgcaccgctgttcgaggcgctgcgccggttcgtcgaacgcgatcaggcgccgttctacagtcccggccacaagggcggccgcacgctggacccgtggttccgcgaacacatcgccgccgtcgacctcaacaatctcgcggacctcgacacgctgcactgccccagcgggccgatcctcgaagccgaagaactgatcgccgatgcgtggggcgccaaggcgagcttcatcctcgtgcaggggtcgaccggcggcaacatcgcggtcgcgttgtcggcgctgcgacccggcgatccggtgctggtgcagcgcaacgcccacaagtcggtgctggccggtctggtccagtccggtgcgcggccgatctggctgacgccgcagtgggatgcggatttcggtgtcgcgcacggccttccggtcgaccgcgtcgaggcggctctgaccgccgagaccgcggccgcgctgtggatactgcaccccacctacttcgggacgaccgccgacatcgccgcgctcaccgcggtgtgccgccgccacggcatcccgctgctcgccgacggcgcccactccccgcacttcgccttccaccccgacctgccggccgccgccgagaccgcaggggcggcggcgaccgtgcagtcggtgcacaagatcctctccgggctcagccaggccgcggtgctgcacgtcgacaccgatcagctggacgtgccgacggtgcgccgcgcgctgcagctggtccagaccaccagcccgcatttcgcgatcatggcgtcgatcgatctggcccgccgccagatggtggaggacggccgccgcctcctcgacgagacgctgcggcgcgcccgcgacaccgctgcgcggctggcccagatcccgggactacgcgtgctgagcgaccacgacctcaccggtccggggtccggactccaccagcgcgacgagaccaaactgctgatcgggacgcacggactggccgccgacgcatccgacatcctggcgcggctgacccgggaacacggcgtgcagcccgaactcgccggcgccggccacatcctgtgcatcaccacgatcggcaacaccgacgccgacatggaccggctggtcgacggcctgaccgatgtcgccctggcggtgggccggcgcgacggcgggtgcccgcccgatgtgggcggtgcgctcgacctggccccggagatcgtgctgaccccgcgcgaggccttcttcgccgacgtggacacggtttccctgcgcgcggcggtcggccgcatcgccgccgaaccgatcacgccctacccgccgggcattccgctggtgatgcccggcgaacgcctcagcgccgaggtcgtcgacgtactcgacggcctgcgcggtgcgggcaacccgatcagcgcggcggaccccaccctcgagcgggtgaccgtcgtccggtga

SEQ ID NO: 84148 - protein, 484 aa, Mycobacterium sp. MCS
MDSDRHTRAPLFEALRRFVERDQAPFYSPGHKGGRTLDPWFREHIAAVDLNNLADLDTLHCPSGPILEAEELIADAWGAKASFILVQGSTGGNIAVALSALRPGDPVLVQRNAHKSVLAGLVQSGARPIWLTPQWDADFGVAHGLPVDRVEAALTAETAAALWILHPTYFGTTADIAALTAVCRRHGIPLLADGAHSPHFAFHPDLPAAAETAGAAATVQSVHKILSGLSQAAVLHVDTDQLDVPTVRRALQLVQTTSPHFAIMASIDLARRQMVEDGRRLLDETLRRARDTAARLAQIPGLRVLSDHDLTGPGSGLHQRDETKLLIGTHGLAADASDILARLTREHGVQPELAGAGHILCITTIGNTDADMDRLVDGLTDVALAVGRRDGGCPPDVGGALDLAPEIVLTPREAFFADVDTVSLRAAVGRIAAEPITPYPPGIPLVMPGERLSAEVVDVLDGLRGAGNPISAADPTLERVTVVR

SEQ ID NO: 84149 - DNA, 1629 bp, Trichodesmium erythraeum IMS101
  CDS (1)..(1629): transl_table=11
atgtttgaccaaactaagacaccaatagttgaaactcttcaaaatctcacccaaaaatttcatgcccctttctatgcaccagggcataaacatggaaaaagcattccacaatccctgagtgaattattaggaaaaaaagtctttccagcagatttaccagaattaccagaactagataacttattcgctccagacggtgtaattcaagaagctcaagaattagcagcagaaaccttcggcgcattacacaccagatttatagtcaacggttctacttcaggaattattgccggaattctagctacttgtggaaatggagataaaataattttacctcggaatattcatcaatctgtaatctctggcttaattctatctggagcaattccgatttttatcgatccagaatatgatttaaattgggatattcctctcagcattactcccgaatctattacccaaacattagcaaaacaccctgatactaaagcagttatgatagtttatcctacttatcatggtgtttgtggaaatattagagcgatcgcccaacaagtccacaaatataatattcctctattagtagatgaagctcacggagctcactttgcttttcattcagaattgccaataccagcattattaagtggagcagatttaagtgtacagtcaactcataaaactctaggagctatgactcaagcatcaatgcttcatgttggtagtaatcgtattgatcttgatcgacttgagcaagcattacagatattacagtctagtagtcccagttatctacttctagcttctcttgatgctgccagacaacaaatggctttatttggtgaggaactaatgagccaaaccctggaattagctaaaaatgctagaaacagaattagtcaactctcgaattattcagtattcaatctaaaaagaagggaaaagaagacagaagaaagaaattttacttgcttatcaaaagattcagatttattaaagaatagggttaaagaagatattggggactcaggagcaatattctcaaatcctaatactcaacttccaactcccaactaccctcccaattttctaattaagaattatttcaacccaggatttattgctcttgatcttacaagattaactattaaagtttctcagattggattcagtggttatcaggctgatgaaattttacatcaggaattaggagttacttgtgagttacccagttttctaaatctgacatttattatttctccaggaaatacaaaggcagatattaatcaattagtaactggtttgattagtttaaggcatcggggtaggattaatttacctactaacgatggaacaaaatttgaccttaaagtgaatgatttttcaatacctatttctcctagagatgctttttttgctcagaagaattgtttacccattaaaaaatctgtaggatatatcagtgccgaattaatttgtccctatccaccaggtattccagtattaatacctggtgaaattattacagaaaagcatattcagatacttgaacaagtccaggctaatggtggcataatagtaggatgtagtgaccctattcttaaaactatcaaagtctctagattttag

SEQ ID NO: 84150 - protein, 542 aa, Trichodesmium erythraeum IMS101
MFDQTKTPIVETLQNLTQKFHAPFYAPGHKHGKSIPQSLSELLGKKVFPADLPELPELDNLFAPDGVIQEAQELAAETFGALHTRFIVNGSTSGIIAGILATCGNGDKIILPRNIHQSVISGLILSGAIPIFIDPEYDLNWDIPLSITPESITQTLAKHPDTKAVMIVYPTYHGVCGNIRAIAQQVHKYNIPLLVDEAHGAHFAFHSELPIPALLSGADLSVQSTHKTLGAMTQASMLHVGSNRIDLDRLEQALQILQSSSPSYLLLASLDAARQQMALFGEELMSQTLELAKNARNRISQLSNYSVFNLKRREKKTEERNFTCLSKDSDLLKNRVKEDIGDSGAIFSNPNTQLPTPNYPPNFLIKNYFNPGFIALDLTRLTIKVSQIGFSGYQADEILHQELGVTCELPSFLNLTFIISPGNTKADINQLVTGLISLRHRGRINLPTNDGTKFDLKVNDFSIPISPRDAFFAQKNCLPIKKSVGYISAELICPYPPGIPVLIPGEIITEKHIQILEQVQANGGIIVGCSDPILKTIKVSRF

SEQ ID NO: 84151 - DNA, 1458 bp, Mycobacterium smegmatis str. MC2 155
  CDS (1)..(1458): transl_table=11
atggaccaaaccgagacgcctctgctcgacgcgctgaacgagtaccacgcgtccaaccggtacggctactccccgcccggccatcgacagggccgcggcgtcgacgaccgtgtgctgcgtgtgctgggacgcgaaccgttcctcagtgatgtgctggccaacggcggcttggacgaccgccgcagcagcaacggctacctgcagaaagccgaggatctgatggccgaggcggtgggagccgacaccgcgtggttctccacctgtggcagttcgctgtcggtcaaggccgcgatgatggccgtcgcgggcggcgacggcagcctgctgctgagtcgcgacagccacaagtctgtggtcgccggcctgatcttctcgggtgtgatgccacgctggatcacgccacggtgggacgccgaccggcacctgtcgcacccgccgtcgcccgaggaggtcgaggagacctggcggcggtatcccgacgccgccggtgcgctgatcgtgagcccgagcccgtacggcacgtgtgccgatctcgccggcatcgccgacgtatgccatgcccggggtaaaccgctgatcgtcgacgaggcctggggcgcccacctgccgttccacgagaacctgccgacatgggccatgaacgcgggcgcggatgtgtgcgtggtcagcgtgcacaagatgggcgcgggtttcgagcagggctcggcgttccacctgcaaggtgatctcatcgatcaggaccggttgtccgcgtgtgccgacctgctgatgaccacgagcccgaatgtgctggtgtacagcgcgatcgacggctggcgacggcagatggtcgaacacggccaccgattgttcggtgcggcactcgatctcgccgatgacacccgccgtcgcatcgaggagatcgacgacgtcgaggtgctcgacgaagaattactcggcgcgcaggcctcgcacgatctggaccggttgcagatcctcatcgacgtgtcggccaccggcacctcgggctaccaggccgccgactggctgcgggagaactgccaggtggacgtcgggatgtccgaccatcgccggatcctggccaccatgtcggtggccgacggatccgataccgcggggcgcctgctgcacgcactgtcgttgtggcgcaaggccgcagatgacttcgcgccgccgcccccgatcgatctcccgtcgccggccgaactccagttgacaacgaagacctctccgcgggatgcgttcttcgccgaggtcgaacagatcccggtcgagcatgcggtgggccgcatcgccgccgagcagatcacaccctatccgcccgggatccccgcggtggtgccgggggagcgactcaacgaagcagtgctcgactacctcgtgaccggcgtgcaggcgggtatgaacctgccggatccggccgatccgcagatgggctccatccgggtcatggcctga

SEQ ID NO: 84152 - protein, 485 aa, Mycobacterium smegmatis str. MC2 155
MDQTETPLLDALNEYHASNRYGYSPPGHRQGRGVDDRVLRVLGREPFLSDVLANGGLDDRRSSNGYLQKAEDLMAEAVGADTAWFSTCGSSLSVKAAMMAVAGGDGSLLLSRDSHKSVVAGLIFSGVMPRWITPRWDADRHLSHPPSPEEVEETWRRYPDAAGALIVSPSPYGTCADLAGIADVCHARGKPLIVDEAWGAHLPFHENLPTWAMNAGADVCVVSVHKMGAGFEQGSAFHLQGDLIDQDRLSACADLLMTTSPNVLVYSAIDGWRRQMVEHGHRLFGAALDLADDTRRRIEEIDDVEVLDEELLGAQASHDLDRLQILIDVSATGTSGYQAADWLRENCQVDVGMSDHRRILATMSVADGSDTAGRLLHALSLWRKAADDFAPPPPIDLPSPAELQLTTKTSPRDAFFAEVEQIPVEHAVGRIAAEQITPYPPGIPAVVPGERLNEAVLDYLVTGVQAGMNLPDPADPQMGSIRVMA

SEQ ID NO: 84153 - DNA, 1515 bp, Nostoc punctiforme PCC 73102
  CDS (1)..(1515): transl_table=11
atgctcaatcaaaaccaaacaccattattagatgcgttaaaagccaatgcagcaagacctcatgcacctttttacaccccaggacataaacaaggtgagggaattcctcaacctttggctgacttacttggtaaagctgtatttcgcgctgatttaaccgaattagcagatttagataatctctttgcaccccaaggcgtgattcaagaagcacaacaactggcggctgaagcgtttggcgcttcgcaaacatggtttcttgtcaacggttctacctgtgggattgaagcggctattcttgctacctgtggcacaggtgataaaatcattttgcctcgcaatgtccattcttctgcgatcgctggtttaattctctctggtgcaataccaatttttctcaatcctgaatacgatccagttttagatattgcccacagcatcacgcccaatgctttagaatctgcactccaacaacatcccgacgctaaagcagtgttgacagtttatccaacatattacggcgtttgtggagatttgagtgcgatcgccaatattacccatcaatacaatatccctttactcgtagatgaggcacacggcgcacactttgcttttcatcccgaattacccactccagccttagccgcaggtgcagatttaactgtacaatccatccacaaagtacttggtgcaatgacacaggcatcaatgctgcatatccaaggagataggatagattgcgatcgcatcagtaaagctttgcaactagtacaatctaccagtcctagttatttacttttagcttctttagatgcagcgcgtcagcaaatggtactccacggaaaaatgctgatgtctcgcacattgcaacttgccaatgaagctagaacaataatcagccaaattcctggattatctgttttacagattcttagccccccttatcaaggggggttggggggatcttcttctctaggtggtttggtgggatctcccggctttgtggctttagacaaaacgcggctaactgtcactgtttctggtttaggcttaaccggatttgaagcagatgaaattctggatgaaaaatttgctgtcactgctgaattcgcctcactgcaacacctcacctttatcattagtttagggaacaccccagccgatattaagcaattagtgcaaggttttaccattcttgccaaagaatatcgcgcaactaacttgaatgttacaaatcctaatttgcagaatcttttaactacacagggtcatactttacatttttctccccgtgaagccttttttgctctcagcgaaacattgcctttagcacaaacaagcgatcgcatttgcgctgaaatcatctgtccctatcccccaggaattcctgtgttaatgccgggagaaatcatcactaaacctgtccttgattacttgcaacaaattcaaggaatggggggatttatcagtggttgcaatgattccagcctcaaaactttgaaagttgtgaaataa

SEQ ID NO: 84154 - protein, 504 aa, Nostoc punctiforme PCC 73102
MLNQNQTPLLDALKANAARPHAPFYTPGHKQGEGIPQPLADLLGKAVFRADLTELADLDNLFAPQGVIQEAQQLAAEAFGASQTWFLVNGSTCGIEAAILATCGTGDKIILPRNVHSSAIAGLILSGAIPIFLNPEYDPVLDIAHSITPNALESALQQHPDAKAVLTVYPTYYGVCGDLSAIANITHQYNIPLLVDEAHGAHFAFHPELPTPALAAGADLTVQSIHKVLGAMTQASMLHIQGDRIDCDRISKALQLVQSTSPSYLLLASLDAARQQMVLHGKMLMSRTLQLANEARTIISQIPGLSVLQILSPPYQGGLGGSSSLGGLVGSPGFVALDKTRLTVTVSGLGLTGFEADEILDEKFAVTAEFASLQHLTFIISLGNTPADIKQLVQGFTILAKEYRATNLNVTNPNLQNLLTTQGHTLHFSPREAFFALSETLPLAQTSDRICAEIICPYPPGIPVLMPGEIITKPVLDYLQQIQGMGGFISGCNDSSLKTLKVVK

SEQ ID NO: 84155 - DNA, 1473 bp, Bacillus anthracis str. A2012
  CDS (1)..(1473): transl_table=11
  misc_feature (106)..(106): y is t or c
ttgtcccaatacgaaacaccattgtttaccgctttagttgagcacagtaagcgaaatccaattcaattccatattccaggtcataaaaaagggcaaggcatggatyctgaatttcgcgaatttattgggcataatgcattagcaattgatttaattaacattgcgccgctcgatgatttacatcatccaaaaggtatgattaaagaagcacaagatttagcagccgctgcatttggtgcggatcatactttcttttctattcaaggtacaagtggcgcaataatgacaatggtgatgagcgtttgcggtcctggtgacaaaatactagtgccacgaaacgtgcataaatcagtaatgtcagctattattttctcaggtgcaaaacctattttcatgcatcctgaaatcgatccaaaacttggtatttcacatggaatcacaatccaatctgtcaaaaaagcacttgaagagcactcagatgcgaaaggcttacttgttattaatccaacatactttggctttgctgcggacttagaacagattgtacaattagcacattcttacgatatccctgtactcgttgatgaggctcatggtgttcatattcattttcacgatgaactgccgatgtcagcgatgcaagccggtgcagatatggcagcaacgagtgttcacaaattaggtggatctttaacgcaaagctctattcttaatgtaaaagaaggccttgtgaacgtaaaacatgttcaatctattattagcatgcttacgactacatcaacgtcttacatcttgttagcctccctagatgttgctagaaaacgtcttgctacagaaggaaaggcgctcatagaacaaacaatacaattagcggaacaagttcgtaatgctataaatgatattgaacatctttactgtccagggaaagaaatgctaggtacggatgctacttttaactatgatcctacaaagataattgtatctgtaaaagatttaggtattacaggccatcaggctgaagtatggcttagagagcaatataacattgaagtagaactctcagatttatacaacatactatgtcttgtcacttttggagatacagaaagtgagacgaatacacttattgcagcattacaagatttatcagcaatatttaaaaataaagctgataaaggtgttcgaatacaagtagaaattccagaaatacctgtgttagcactttctcctcgagatgctttttattcggaaacagaagtcatcccatttgaaaatgcagcaggtcgtattatagctgatttcgttatggtttatccgccagggattccaatctttactccgggggaaattattacacaagacaacttagagtatattcgtaaaaacttagaagcaggtttacctgtacaaggtcctgaagatatgacattacaaacattacgcgtgatcaaagagtacaagcctatcagttga

SEQ ID NO: 84156 - protein, 490 aa, Bacillus anthracis str. A2012
  misc_feature (36)..(36): The Xaa at location 36 stands for Pro, or Ser.
MSQYETPLFTALVEHSKRNPIQFHIPGHKKGQGMDXEFREFIGHNALAIDLINIAPLDDLHHPKGMIKEAQDLAAAAFGADHTFFSIQGTSGAIMTMVMSVCGPGDKILVPRNVHKSVMSAIIFSGAKPIFMHPEIDPKLGISHGITIQSVKKALEEHSDAKGLLVINPTYFGFAADLEQIVQLAHSYDIPVLVDEAHGVHIHFHDELPMSAMQAGADMAATSVHKLGGSLTQSSILNVKEGLVNVKHVQSIISMLTTTSTSYILLASLDVARKRLATEGKALIEQTIQLAEQVRNAINDIEHLYCPGKEMLGTDATFNYDPTKIIVSVKDLGITGHQAEVWLREQYNIEVELSDLYNILCLVTFGDTESETNTLIAALQDLSAIFKNKADKGVRIQVEIPEIPVLALSPRDAFYSETEVIPFENAAGRIIADFVMVYPPGIPIFTPGEIITQDNLEYIRKNLEAGLPVQGPEDMTLQTLRVIKEYKPIS

SEQ ID NO: 84157 - DNA, 1482 bp, Crocosphaera watsonii WH 8501
  CDS (1)..(1482): transl_table=11
atgacaagatcatcagactttttcctttctcgtcaagagagtacaccacttattgatgttttgaccaccttaaaaaacaaacccgatgctgctttttatgttcccggccataaacggggacaaggaattagcgattcgttacggtacttgttaggggagggggtgtttcaagccgacataccagaattaccagaattgggaagcttgtttgcccccgatgaggctatggccaaagcccaaattctagcatctgaagcctttggggctgatcgaacttggtttctggttaatgggtcaacttgtggcattattgctgcaatagcagcaacttgtaaccctggtgataagattattgtaccccgtaatgttcatcaatctttcattatggggttaattgtctctggggcggttcccatttttcttaatcctgaatatgatccaatatgggatcttaccctcagtatcaccccatactctttagaaaaagttttaaaagagaattctgatgtcaaagccgtgtttttggtttaccccacctatcacggggtttgtggtgacattcgctctatagttgctattacccgacgttacaacatacccttattggtggatgaggcacacggggcgcattttaagtttcatgacgctctgcccccttctgctttatccttgggggcagatttgactgtacaatcgacccataaggtattaggagctatgactcaggcttctatgttacacatacagggcgcgcgcattgatccccaaaagattagtcaagcattacagttagtggagtctaccagccctagctatatattattatcttctttggatggggcgagacaacaaatggctttacagggagaaagattattaactcacacccttgagttagcacaaatagctgttgaaaatatcaagaagattgataatttaggggttttagagttcacagaaaagcggccaggatttcatgatttagatattactcgcttgactgttaatgtcacggctttaggtataagtggtttagaggttgatgatatttttcgggaaaaattacaggttactgctgaattaccaatgttgtctcatttagcttttgttatttctattggtaacacaaaaaaggatattaatcagttaattaatgctttccgaatactcaatcattctttctcctcatctcctgatctacctttatcttcagcgccacatccccttcacccatctcctctcaaattatccccccgtgaggcttttttcgctcctaaacaatcagtcgccattgaacaatgtatcggtaaaataagcggtgaattaatttgtccttatccccctggtattcctgtattaatgccaggagaaatcattaccagtgaagcgatcgcctatttaaagaaaatacaaaaactaggagggatgattactgggtgtactgatactaatttaaacaaacttaatattattttaaattaa

SEQ ID NO: 84158 - protein, 493 aa, Crocosphaera watsonii WH 8501
MTRSSDFFLSRQESTPLIDVLTTLKNKPDAAFYVPGHKRGQGISDSLRYLLGEGVFQADIPELPELGSLFAPDEAMAKAQILASEAFGADRTWFLVNGSTCGIIAAIAATCNPGDKIIVPRNVHQSFIMGLIVSGAVPIFLNPEYDPIWDLTLSITPYSLEKVLKENSDVKAVFLVYPTYHGVCGDIRSIVAITRRYNIPLLVDEAHGAHFKFHDALPPSALSLGADLTVQSTHKVLGAMTQASMLHIQGARIDPQKISQALQLVESTSPSYILLSSLDGARQQMALQGERLLTHTLELAQIAVENIKKIDNLGVLEFTEKRPGFHDLDITRLTVNVTALGISGLEVDDIFREKLQVTAELPMLSHLAFVISIGNTKKDINQLINAFRILNHSFSSSPDLPLSSAPHPLHPSPLKLSPREAFFAPKQSVAIEQCIGKISGELICPYPPGIPVLMPGEIITSEAIAYLKKIQKLGGMITGCTDTNLNKLNIILN

SEQ ID NO: 84159 - DNA, 1488 bp, Exiguobacterium sibiricum 255-15
  CDS (1)..(1488): transl_table=11
gtgcaaacaaaaagcttaacacagctcgatacacctttattcgatgcgctgcttgcgcatgcgaaacgtcaaccaattcaatttcatattcccggtcataaaaatggccaagggatggatcctgcttttcgatcattcatcggtcaaaacgcgcttgatatcgatttaatcaatatcgcgccactcgatgatttacatcatccgaaaggaatcatcaaggatgcacatcaactagcagcccaagcctttcatgcagacgaaacatttttctccgttcaaggaacctcgaccgccatcatggcaatgatcatgagtgtcgtcggtccggatgataaaattctagttcctcggaacgttcataaatcggtcatgtcggctatcgttctttctggagcgcacccgattttcattcacccggagtttgacgaaatgttcggtatcgctcacggtatcacaccaagcgccgtcgagcgtgccctcagtcttcacccggatacaaaagcggtcctcgtcatcaatccgacgtacttcggcgttgcaggtgacttagagagcatcgtcacccttgctcatagcaaaggcatccccgtcctcgtcgacgaagcacacggcgttcacatcgcattccacgatgatatgccgctttctgcgatgcaggctggtgcagatcttgctgcgacaagtgttcataaattaggaggatcacttaccggcagttccgtcttgaatgtccgccgcggtctcgtctcgccggataaagtacaagctgtcctgtcgatgttgacgacgacttctacgtcgtatcttttactggcatcactcgactgcgcccgccggcatctcgcgatcaacggagaagcgatgaaccgtcgcgcgctcgaactggcgacacggatgcggatgggactggcaaaacttccttatctcgcagtatttggtgaatcggaccttcattccagtgcgacatttgcctttgatccgacaaaagttctgatttccgtcaaaggactcggcatctccggtcatcttgtcgaagaatttttacgggacgaacatcgcatcgaagtggaactgtccgacttaaacaacatcttgctgatcatcacttccggtgattcggaagagacgattgatgccttgcttgcaggaatggctgatctcgtagagcgtcatcgggatacaggggctaaaacatcttctcactcgatcgtcttacccgacattccggcactcgctctcagtccgcgtgatgctttttatgaagaaacggaaaccattccacttgcagacgctgtcggccggatttcggcagagttcatgatggtctatccacccggcattccgattttcattccgggtgaaatgattacgacagacaatttagcgtacatcaaagaaaatatcgaagccggtcttcctgtccaaggactcgaagatcatacacttgagaccattaaagtcattcaacaatcgaatgcaattcgttaa

SEQ ID NO: 84160 - protein, 495 aa, Exiguobacterium sibiricum 255-15
MQTKSLTQLDTPLFDALLAHAKRQPIQFHIPGHKNGQGMDPAFRSFIGQNALDIDLINIAPLDDLHHPKGIIKDAHQLAAQAFHADETFFSVQGTSTAIMAMIMSVVGPDDKILVPRNVHKSVMSAIVLSGAHPIFIHPEFDEMFGIAHGITPSAVERALSLHPDTKAVLVINPTYFGVAGDLESIVTLAHSKGIPVLVDEAHGVHIAFHDDMPLSAMQAGADLAATSVHKLGGSLTGSSVLNVRRGLVSPDKVQAVLSMLTTTSTSYLLLASLDCARRHLAINGEAMNRRALELATRMRMGLAKLPYLAVFGESDLHSSATFAFDPTKVLISVKGLGISGHLVEEFLRDEHRIEVELSDLNNILLIITSGDSEETIDALLAGMADLVERHRDTGAKTSSHSIVLPDIPALALSPRDAFYEETETIPLADAVGRISAEFMMVYPPGIPIFIPGEMITTDNLAYIKENIEAGLPVQGLEDHTLETIKVIQQSNAIR

SEQ ID NO: 84161 - DNA, 1452 bp, Desulfitobacterium hafniense DCB-2
  CDS (1)..(1452): transl_table=11
atgccttcactacgacaaagcaaggctcctgtctatgaggcgctgctcaaatataaatccatgcgtgtggtgccttttgatgtgcccgggcataaacaggggagaggaaaccctgaattgacggagtttctgggtgagaaatgtctgtccgtagatgtcaactccatgaaaccattggataaccttggccaccccgtttcggtgatcaaggaaggggaagaattggctgccgaagcttttggagctcatcatgctttttttatggtgaatggaaccacctcagcggtacaagctatggtcatgagcgcttgcaagctgggtgagaaaatcatcatgccccgcaacgttcatcgcagtgccattaacgctctcatcatcagcggggctattccggtgtatgtcaatcctggtgtcaataaggaactgggtatccccttaggaatgtctgtggctgatgtcagaaaagccatcaaggaaaatccggacgctaaagctattctggttaataatccaacctattatgggatttgttccgatttgaagaccatcactgagctggcccatgaacacagtatgctggtcttagtggatgaggcccatggcacccatttttattttggcgaaaatatgcccatcagtgctatggcagcgggagcggatatggcggcggtcagcatgcataaaacggggggcagtcttacccaaagctctttcctgttgatcggcaaacgcttgaatgtgggacgggttcggcatatgattaatctaacccagaccaccagcgcttcctatctgctgttatcctccctggacatttcgcggcgcaacttagccttaaacggccagcgtatctttgacaaggcactctatctggctaattatggccgtgatgaagtcaataagctggggggctattatgcgtttggcaaagagctgaacaatggggattcggtctacgattttgactgcaccaagctctccattcacacccgggatatcgggctggccggcatcgaggtctatgacatcctgcgggatgactatgggattcagatcgaattcggcgatatcggcaacattctggctattatatccgtgggggatcgggctcttgctttggagcgtctggtctcggctttggcggagattaaacggcgctatcagcgggataaaacgggcatgtttgatcatgagtatattaaccctgtggtggtcatgggaccccagcaggctttttatgcccagcagcgctccctgcccatccaggaaagcaaaggtaaggtcagcggggaattcgtcatggcttatcctccgggtataccgatcttggctccaggggaaaaaatcacggaggatattattgactatatcgcttattctaaggctaaaggctgtttcctgaccggaacagaggatatggacattgaaaatatcaaagtcgtggaggaatag

SEQ ID NO: 84162 - protein, 483 aa, Desulfitobacterium hafniense DCB-2
MPSLRQSKAPVYEALLKYKSMRVVPFDVPGHKQGRGNPELTEFLGEKCLSVDVNSMKPLDNLGHPVSVIKEGEELAAEAFGAHHAFFMVNGTTSAVQAMVMSACKLGEKIIMPRNVHRSAINALIISGAIPVYVNPGVNKELGIPLGMSVADVRKAIKENPDAKAILVNNPTYYGICSDLKTITELAHEHSMLVLVDEAHGTHFYFGENMPISAMAAGADMAAVSMHKTGGSLTQSSFLLIGKRLNVGRVRHMINLTQTTSASYLLLSSLDISRRNLALNGQRIFDKALYLANYGRDEVNKLGGYYAFGKELNNGDSVYDFDCTKLSIHTRDIGLAGIEVYDILRDDYGIQIEFGDIGNILAIISVGDRALALERLVSALAEIKRRYQRDKTGMFDHEYINPVVVMGPQQAFYAQQRSLPIQESKGKVSGEFVMAYPPGIPILAPGEKITEDIIDYIAYSKAKGCFLTGTEDMDIENIKVVEE

SEQ ID NO: 84163 - DNA, 1485 bp, Bacillus sp. SG-1
  CDS (1)..(1485): transl_table=11
gtgtcgaatgaattgtcacaatacaaaactcctttatttaccggcttagtagaacatagtaaaaaaaatcccgtacagtttcacattcccggccataaaaaagggaccggcatggaccctgaattcagaaacttcatcggggataatgcattctcaatcgacttgatcaatatcgggccgctggatgatcttcaccagccaaaagggatgattaaagaagcccagaagcttgcagcagaagcgtttggtgcagattataccttcttctcagtgcaaggtaccagcggagccatcatgacgatggtcatgtctgtatgcggaccaggagagaaaatcattgtgccgcgtaatgttcataaatccgttatgagtgcgattgtcttttcgggtgccactcccattttcatacatcctgaagttgatgaagatttagggatctcccatggcatcacgacggattcagtggcaagagccctggaacagcatcccgatgctaagggtgtactggtcattaatccaacctacttcggtatttctgccgatctgaaaaaaatcgttgaaattgcccattcttttgacgtgcctgttcttgtggatgaggctcatggcgtccatattcacttccatgaagaccttccgatatcggccatgcaggcaggagcggacatggctgctacaagtgtacacaaactgggtggatcaatgacgcaaagttctgtgttgaatataaaaaccgggcttgtatcccctaagcgcgtccaaaccattttaagcatgctgacaaccacttcaacatcctatctattacttgcttcattggatgttgcaaggaaaaggcttgctacggaggggagagagctgatagaaaacaccatccagctttctgaaaccatcagggaaaaagttaatcgtatcgaaagtctctattgtgttggaaaagaaatattgggtaccaaggcaacctttgattatgacccgacaaaattgattatttctgtcaaacagctgggaatcagcggattcgatgcagagaaatggttaagggaagtttacaatattgaggtagaaatgtctgatatgtataacatcctctgcatcattacgccgggtgacactagtgctgaaggcgataaattggttgaggcactaacagagttatcctatcagttctctgataaagaaggattctcagaaactgttgaagtcctccttccggatataccgctcctgtctatgactccaagggatgctttctatgctgatacagaagtaattccgatcgaacagacagtaggacgcatcattgccgagtttatcatggtatatccaccggggattccgatttttatccccggagagatcattacatctgaaaaccttacgtatatccaaaagaatgttgaagccggattgccagttcagggacctgaagaatttgacctcagtcacctacgtgtcataaaagaacacaaagccatccgataa

SEQ ID NO: 84164 - protein, 494 aa, Bacillus sp. SG-1
MSNELSQYKTPLFTGLVEHSKKNPVQFHIPGHKKGTGMDPEFRNFIGDNAFSIDLINIGPLDDLHQPKGMIKEAQKLAAEAFGADYTFFSVQGTSGAIMTMVMSVCGPGEKIIVPRNVHKSVMSAIVFSGATPIFIHPEVDEDLGISHGITTDSVARALEQHPDAKGVLVINPTYFGISADLKKIVEIAHSFDVPVLVDEAHGVHIHFHEDLPISAMQAGADMAATSVHKLGGSMTQSSVLNIKTGLVSPKRVQTILSMLTTTSTSYLLLASLDVARKRLATEGRELIENTIQLSETIREKVNRIESLYCVGKEILGTKATFDYDPTKLIISVKQLGISGFDAEKWLREVYNIEVEMSDMYNILCIITPGDTSAEGDKLVEALTELSYQFSDKEGFSETVEVLLPDIPLLSMTPRDAFYADTEVIPIEQTVGRIIAEFIMVYPPGIPIFIPGEIITSENLTYIQKNVEAGLPVQGPEEFDLSHLRVIKEHKAIR

SEQ ID NO: 84165 - DNA, 1590 bp, Medicago truncatula
  CDS (1)..(1590)
atgcttggtgcagaaagaagcactgcactacaagaatacgagcaagagaagagcattgggacagtgaatactgcatcaatcacgaacaacaccgttttgttcagcaattcaccagtgcttcagcagagtggcctacctcctctagtcagtgcattgaaagcctcagctgaagaaaatgctgccagctttcactttccaggacacaacagaggccatgccgctccttcttcgttgactcaactcattggagtaagaccatatgctcatgatttgtctagcattccagagcttgacaacctcttttgtccccaagggcccatattagaagcacaaagagaagcatccaaactgttcggatcatcagagacatggtttcttgtcaacggtactacttgtggagtccaggcagcaataatggcaacctgttcaccgggagaatatctgattcttcctaggaattctcatttatcagctatatctgccatggttttatctggtgcatcgcctaagtacattattcctgactataaaaatgattgggacatcgctggtggcgtcactccattacaggtattgaatgctatccaggaactagaattggaaggaaagaaagcagcagcagttttcatcacttcacctacttaccatggtgtttgcagtaacttgagtgatatttctgctttgtgtcattctcgtaaaattcctttgattgttgatgaagctcatggagcacatctaggattacattctgaactgcctagctcagccctccagcaaggggctgatctaactgtacaatctactcacaaggttctttcctctcttactcaatcgtctatgctgcacatgtcgggcgacattgtagataaggaaaaaatatctaggtgtctccaaacactgcaaagcacaagtcctagttaccttcttttggcatccctagatgctgctagagctcaacttagtgaaagccctgctattgtatttaaacaagcgattgaattagcaaatgaagcaaagtttttgctaaaacgaatccctggcgtctcagtgcttgagaattcaagctttccaaattttcccgcatttgatccattccggcttactgtaggcttttgggagcttggtttatcaggttaccaagcaaatgaaatcttatgcagggattttggaatcgtccgtgagcttgttgggtataaatctatcacttatgtacttaatcttggaacttgtagagaccatgtccaaaggcttttatcgggagcaaagtatctagctgcagtatattcttccattcagcaacgtaaagacaaagtacttactgatcatgcaccctttgatgatataatcatgagcttgacacctagagatgcattctttgcaagtaaaagaaaagtaatggtgaaagagagcattggtaaggtttcgggggagcttgtatgtccataccctccaggcataccggtattgatcccaggcgaggttattactgagaaagcagtcgattatctactccatgtaagaagtgaaggtgctgatattagtggagcatctgatcccttactttcttcgatagttgtctgcaatgtatag

SEQ ID NO: 84166 - protein, 529 aa, Medicago truncatula
MLGAERSTALQEYEQEKSIGTVNTASITNNTVLFSNSPVLQQSGLPPLVSALKASAEENAASFHFPGHNRGHAAPSSLTQLIGVRPYAHDLSSIPELDNLFCPQGPILEAQREASKLFGSSETWFLVNGTTCGVQAAIMATCSPGEYLILPRNSHLSAISAMVLSGASPKYIIPDYKNDWDIAGGVTPLQVLNAIQELELEGKKAAAVFITSPTYHGVCSNLSDISALCHSRKIPLIVDEAHGAHLGLHSELPSSALQQGADLTVQSTHKVLSSLTQSSMLHMSGDIVDKEKISRCLQTLQSTSPSYLLLASLDAARAQLSESPAIVFKQAIELANEAKFLLKRIPGVSVLENSSFPNFPAFDPFRLTVGFWELGLSGYQANEILCRDFGIVRELVGYKSITYVLNLGTCRDHVQRLLSGAKYLAAVYSSIQQRKDKVLTDHAPFDDIIMSLTPRDAFFASKRKVMVKESIGKVSGELVCPYPPGIPVLIPGEVITEKAVDYLLHVRSEGADISGASDPLLSSIVVCNV

SEQ ID NO: 84167 - DNA, 1653 bp, Medicago truncatula
  CDS (1)..(1653)
atggtgtattcttcacttccacttccagtactctcattccctttcattcccaaaaggaggccaaaatgcttttctgaaagaagcactgcactacaagaatacgagcaagaggagagcattgggacagtgaatactgcatcaatcacgaacaacaccgttttgttcagcaattcaccagtgcttcagcagagtggcctacctcctctagtcagtgcattgaaagcctcagctgaagaaaatgctgccagctttcactttccaggacacaacagaggccatgccgctccttcttcgttgactcaactcattggagtaagaccatatgctcatgatttgtctagcattccagagcttgacaacctcttttgtccccaagggcccatattagaagcacaaagagaagcatccaaactgttcggatcatcagagacatggtttcttgtcaacggtactacttgtggagtccaggcagcaataatggcaacctgttcaccgggagaatatctgattcttcctaggaattctcatttatcagctatatctgccatggttttatctggtgcatcgcctaagtacattattcctgactataaaaatgattgggacatcgctggtggcgtcactccattacaggtattgaatgctatccaggaactagaattggaaggaaagaaagcagcagcagttttcatcacttcacctacttaccatggtgtttgcagtaacttgagtgatatttctgctttgtgtcattctcgtaaaattcctttgattgttgatgaagctcatggagcacatctaggattacattctgaactgcctagctcagccctccagcaaggggctgatctaactgtacaatctactcacaaggttctttcctctcttactcaatcgtctatgctgcacatgtcgggcgacattgtagataaggaaaaaatatctaggtgtctccaaacactgcaaagcacaagtcctagttaccttcttttggcatccctagatgctgctagagctcaacttagtgaaagccctgctattgtatttaaacaagcgattgaattagcaaatgaagcaaagtttttgctaaaacgaatccctggcgtctcagtgcttgagaattcaagctttccaaattttcccgcatttgatccattccggcttactgtaggcttttgggagcttggtttatcaggttaccaagcaaatgaaatcttatgcagggattttggaatcgtccgtgagcttgttgggtataaatctatcacttatgtacttaatcttggaacttgtagagaccatgtccaaaggcttttattgggagcaaagcatctagctgcagtatattcttccattcagcaacgtaaagacaaagtacttactgatcatgcaccctttgatgatataatcatgagcttgacacctagagatgcattctttgcaagtaaaagaaaagtaatggtgaaagagagcattggtaaggtttcgggggagcttatatgtccataccctccaggcataccggtattgatcccaggcgaggttattactgagaaagcagtcgattatctactccatgtaagaagtgaaggtgctgatattagtggagcatctgatcccttactttcctcgatagttgtctgcaatgtatag

SEQ ID NO: 84168 - protein, 550 aa, Medicago truncatula
MVYSSLPLPVLSFPFIPKRRPKCFSERSTALQEYEQEESIGTVNTASITNNTVLFSNSPVLQQSGLPPLVSALKASAEENAASFHFPGHNRGHAAPSSLTQLIGVRPYAHDLSSIPELDNLFCPQGPILEAQREASKLFGSSETWFLVNGTTCGVQAAIMATCSPGEYLILPRNSHLSAISAMVLSGASPKYIIPDYKNDWDIAGGVTPLQVLNAIQELELEGKKAAAVFITSPTYHGVCSNLSDISALCHSRKIPLIVDEAHGAHLGLHSELPSSALQQGADLTVQSTHKVLSSLTQSSMLHMSGDIVDKEKISRCLQTLQSTSPSYLLLASLDAARAQLSESPAIVFKQAIELANEAKFLLKRIPGVSVLENSSFPNFPAFDPFRLTVGFWELGLSGYQANEILCRDFGIVRELVGYKSITYVLNLGTCRDHVQRLLLGAKHLAAVYSSIQQRKDKVLTDHAPFDDIIMSLTPRDAFFASKRKVMVKESIGKVSGELICPYPPGIPVLIPGEVITEKAVDYLLHVRSEGADISGASDPLLSSIVVCNV

SEQ ID NO: 84169 - DNA, 1734 bp, Medicago truncatula
  CDS (1)..(1734)
atggtgtatatttcgttctcactattacttccactctcgttccctttgaatcccaaaaacccaaaacggttttcagaatgtccttacaaattcaatttcaggatttcattgacgattccctcttattcctctcaggaaagaagcattgcactgccagaatatgggaaatacgagagcgttgggacagtgagcacagaatcaatcacaaacaatcccaatgaatgcagcaattcaccagagattcggcagagtggcctacctcctttagtcagtgcattgaaagcctcagctgaagaaaatgctgctacttttcactttcctggacataacagaggccatgctgctcctgcctcgatgactcgactcattggaagaagaccatatgttcatgatttacccgagcttcctgaacttgacaacctcttctgtccccaaggacctatattagaagcacaaacagaagcatccaaactttttggttcatcagagacatggtttcttgtcggaggtactacttgtgggattcaggcagcaataatggcaacctgttcaccaggagaatttcttattcttcctcgaaattgtcatttatcagctatatctgccatggtattatccggtgcagtgcctaagtacattgttcctgactataaaaatgactgggacatcgctggtggtgtcacgccattacaggtattgagtgctatccaggaactagaattggaaggaaaaaaagcagcagcagttttcatcacttcacctacttatcatggtatttgcagtaacttgagtgacatttccgagttgtgtcattcccgtaaaattcctctgattgttgatgaagctcacggtgcacatctaggatttcattctgaactgcctagctcagccctccagcaaggggctgatctaactgtacagtctactcacaaggttctttgctctcttactcagtcatctatgctgcacatgtcaggtgacattgtagataaggaaaaaatatctaggtgtctccaaactctccaaagcacaagtcctagttaccttcttttggcatccctagatgctgccagagctcaacttagtgaaagccctgatactgtattcaaccaagcgattgaattagcaaatgaagcaaagtcctctcttaaacgattccctggaatcttagtgcttgagaattctagctttctgaccattcgtgcaattgatccattgcggcttactgtaggtttttgggagcttggtttatcaggttacgaagcggatgaaatcttatatcgggattttggaattgtttgtgaactcgttgggaataaatctatcacttatgcacttaatcttggaacctgtagggaccatgtccaaaggcttttatcgggaataaagcatctagctgcaacatatccttccattcagcaacctaaagacgaagtacttactgaacacacaccctttgatgatataatcacaagcttgacccccagagatgcattttttgcaagcaaaagaaaagtaacgataaaggagagcattggtaaggtttcgggggagcttatttgtccatatcctccaggcatacctgtattgattcccggtgaggttattactgagagagccgtcaattatctactccatgtaagaagcaaaggtgctgatattagtggagcatctgatcccttactttcttctatagttgtctgcaatgtacataaaaaacagctggtctcataa

SEQ ID NO: 84170 - protein, 577 aa, Medicago truncatula
MVYISFSLLLPLSFPLNPKNPKRFSECPYKFNFRISLTIPSYSSQERSIALPEYGKYESVGTVSTESITNNPNECSNSPEIRQSGLPPLVSALKASAEENAATFHFPGHNRGHAAPASMTRLIGRRPYVHDLPELPELDNLFCPQGPILEAQTEASKLFGSSETWFLVGGTTCGIQAAIMATCSPGEFLILPRNCHLSAISAMVLSGAVPKYIVPDYKNDWDIAGGVTPLQVLSAIQELELEGKKAAAVFITSPTYHGICSNLSDISELCHSRKIPLIVDEAHGAHLGFHSELPSSALQQGADLTVQSTHKVLCSLTQSSMLHMSGDIVDKEKISRCLQTLQSTSPSYLLLASLDAARAQLSESPDTVFNQAIELANEAKSSLKRFPGILVLENSSFLTIRAIDPLRLTVGFWELGLSGYEADEILYRDFGIVCELVGNKSITYALNLGTCRDHVQRLLSGIKHLAATYPSIQQPKDEVLTEHTPFDDIITSLTPRDAFFASKRKVTIKESIGKVSGELICPYPPGIPVLIPGEVITERAVNYLLHVRSKGADISGASDPLLSSIVVCNVHKKQLVS

SEQ ID NO: 84171 - DNA, 1458 bp, Selenomonas ruminantium
  CDS (1)..(1458): transl_table=11
atggatcgaatcaatcaacataccgcgccggtttatgaggcaatgctggaactgcgcaaacggcgtgttgttccgtttgatgtgcccggacataagcgggggcggggcaatccggagctggtggattttcttggagaaaaatgcgtaggagtggatgtcaactctatgaagatgttggataacctgagtcatcctatctcggttatcaaagaagcagaagagctgacagccgatgccttcggtgcacagcacgcgttctttatggtgcacggtaccacttcggcggtacaggcaatggtgctttcgactgtgcgggcgggagaagaaatcctcttgccccgcaatgtgcataagagcgtcatcaatgcgctggtgctctgtggcggtattcccgtctatgtgccggtgcgggtgaatcatcagatcggtattgccacgggcatggccttgtccgatgtggagcgggccatccggcagcatccccaggcaaggccatctttgtcaataatccgacttactatggcattgcctctggacctcaagggcattgtggagctggcccatcaggccggcatgaaggtgctggttgatgaagcccatggcacccatctgtacttcggggataatctgcccatttccggcatggcagccggcgcggatctggcggcggtttccatgcataaatccggtggcagcctgacccagagttccatcatgctctgcggcaaagatgttgatgcggaatacgtgcagcagatcatcaatctgacgcagaccaccagtgcgtcctatctgttgatttccagccttgacctctcccgccggaatctggccctgcatggccgggagtcctttgagaaggtcagctccatggccgaatatgcccgggcggaaatcaatgaaatcggcggtttctatgcctatggacgggagcttatcgatggggacagtgtctttgactttgatgtgaccaaactctccgtatttacgcagggcattggcatgacgggcattgaggtctacgatatgctgcgggatgagtacgacatccagatcgaattcggggatatcggcaacattttggcttatatttccatcggcgaccgcatccgtgatatcgagcggctggtgggggcgctggaggatattgccgatcgctcggcggcagcggatcggaaagaactctactgtggggaattcattgccccagagctcgtgatgagtccccgggaggctttctatgcccagggcgagaaactgcctttggagaaaactgtaggccgggtagccggggaaatgctcatgtgctatccgccggggattcccatcctgacaccgggcgagcgcatcactcaggagatcccggattatatcgaatacgcccgggaaaagggctgttccctgcagggaacccaggatccggagtgcagggaaatgcgcattctgacagagatttga

SEQ ID NO: 84172 - protein, 485 aa, Selenomonas ruminantium
MDRINQHTAPVYEAMLELRKRRVVPFDVPGHKRGRGNPELVDFLGEKCVGVDVNSMKMLDNLSHPISVIKEAEELTADAFGAQHAFFMVHGTTSAVQAMVLSTVRAGEEILLPRNVHKSVINALVLCGGIPVYVPVRVNHQIGIATGMALSDVERAIRQHPQARPSLSIIRLTMALPLDLKGIVELAHQAGMKVLVDEAHGTHLYFGDNLPISGMAAGADLAAVSMHKSGGSLTQSSIMLCGKDVDAEYVQQIINLTQTTSASYLLISSLDLSRRNLALHGRESFEKVSSMAEYARAEINEIGGFYAYGRELIDGDSVFDFDVTKLSVFTQGIGMTGIEVYDMLRDEYDIQIEFGDIGNILAYISIGDRIRDIERLVGALEDIADRSAAADRKELYCGEFIAPELVMSPREAFYAQGEKLPLEKTVGRVAGEMLMCYPPGIPILTPGERITQEIPDYIEYAREKGCSLQGTQDPECREMRILTEI

SEQ ID NO: 84173 - DNA, 1641 bp, Oryza sativa subsp
  CDS (1)..(1641)
atgcggcatgttgtagtacaatgtgccacttcatgggacactccaagaacgtctactactaatggttcacatgctgaaccttcagcagttgtcaaagctggtactgcccctctgattcaggcactgaaatcaactgcaaatcaagatgtttcttgctttcactttcctggacataatagagggaaagcttctcctccttcattgtcagaacttattggctcaaggacatttttgcatgacttacctgagctacctgagcttgatgatctcttctcccctaaaggtgtgattttagatgctcagaagcgagcagctgaactatttggatcatttaaaacatggttcctggtcaatggaagtacatgtggaatccaggcctcagtgatggctacctgttcccctggtgactacctcatcatacctcgaaattgtcatatttcagtgatctctgcactggttttgtctggtgctgtgcccaaatatatagtacctgagtacaattccgggtgggacattgctgggggtattaccccatcgcaggtggataaagtggttaaggaactggaggaggacagaaagaaggtaggtgctgttcttgttacatcaccaacctatcatggcatatgcagcaatatacaaggaattgtcaatgtttgccacctgcaaggcattcctgttatagttgacgaggcgcatggtgcccatttcaggtttcacagaaattttccaagcagcgcaactgagcaaggtgccgacttggttgtgcaatccacacacaaggttctgtgctcgcttacacagtcctcaatgcttcacatggctggagatcttgtggatgcagataaagtaagccaatgcctccaattgctccagagctcaagcccaagttaccttctactctcttctttggatgccgcaagggctcagctgagtgagaatgcagaatcttttgatgaaccagtatctatggctttagaaacaaaacatcagctgaggattatcccaggaatatctgttttggacttatcaagctttctttctgattttcctgctattgatcccttgcgtatcacattaagtgcttcagatctgcaattatctggatatgaagcagatgattttttagctgaggagcatcaaattgtatctgagctggtcggtacacaggccgtgacatttgcagtcaacttagggaccagaaggcatgatgttcagaggcttgtacattctgtaaagcatctgtcagaaaaatacttctctgaaaatgggtccagttccagaaaagagaatcctgctagtagcccactggacaagttctccatcaagttgacaccaagggaggccttctttttaaagaagaggagagtgtccatcgaggatagccttggtgagatttgtggtgagcttatctgcccttatccaccaggtatcccggtgctgatcccaggtgagatagtaacgcaggattcactgtcatacttgatggatgtcagggacaacggcatagcaatcagtggagcagctgatggtgagctcaagtccattatgctttcctctccagaacggaagcggaagcctcaatctgaacatagcatcaggtacaagtttgcacacctgcatggttctccagaagcatgttga

SEQ ID NO: 84174 - protein, 546 aa, Oryza sativa subsp
MRHVVVQCATSWDTPRTSTTNGSHAEPSAVVKAGTAPLIQALKSTANQDVSCFHFPGHNRGKASPPSLSELIGSRTFLHDLPELPELDDLFSPKGVILDAQKRAAELFGSFKTWFLVNGSTCGIQASVMATCSPGDYLIIPRNCHISVISALVLSGAVPKYIVPEYNSGWDIAGGITPSQVDKVVKELEEDRKKVGAVLVTSPTYHGICSNIQGIVNVCHLQGIPVIVDEAHGAHFRFHRNFPSSATEQGADLVVQSTHKVLCSLTQSSMLHMAGDLVDADKVSQCLQLLQSSSPSYLLLSSLDAARAQLSENAESFDEPVSMALETKHQLRIIPGISVLDLSSFLSDFPAIDPLRITLSASDLQLSGYEADDFLAEEHQIVSELVGTQAVTFAVNLGTRRHDVQRLVHSVKHLSEKYFSENGSSSRKENPASSPLDKFSIKLTPREAFFLKKRRVSIEDSLGEICGELICPYPPGIPVLIPGEIVTQDSLSYLMDVRDNGIAISGAADGELKSIMLSSPERKRKPQSEHSIRYKFAHLHGSPEAC

SEQ ID NO: 84175 - DNA, 2142 bp, Escherichia coli
  CDS (1)..(2142): transl_table=11
atgaacatcattgccattatgggaccgcatggcgtcttttataaagatgagcccatcaaagaactggagtcggcgctggtggcgcaaggctttcagattatctggccacaaaacagcgttgatttgctgaaatttatcgagcataaccctcgaatttgcggcgtgatttttgactgggatgagtacagtctcgatttatgtagcgatatcaatcagcttaatgaatatctcccgctttatgccttcatcaacacccactcgacgatggatgtcagcgtgcaggatatgcggatggcgctctggttttttgaatatgcgctggggcaggcggaagatatcgccattcgtatgcgtcagtacaccgacgaatatcttgataacattacaccgccgttcacgaaagccttgtttacctacgtcaaagagcggaagtacaccttttgtacgccggggcatatgggcggcaccgcatatcaaaaaagcccggttggctgtctgttttatgattttttcggcgggaatactcttaaggctgatgtctctatttcggtcaccgagcttggttcgttgctcgaccacaccgggccacacctggaagcggaagagtacatcgcgcggacttttggcgcggaacagagttatatcgttaccaacggaacatcgacgtcgaacaaaattgtgggtatgtacgccgcgccatccggcagtacgctgttgatcgaccgcaattgtcataaatcgctggcgcatctgttgatgatgaacgatgtagtgccagtctggctgaaaccgacgcgtaatgcgttggggattcttggtgggatcccgcgccgtgaatttactcgcgacagcatcgaagagaaagtcgctgctaccacgcaagcacaatggccggttcatgcggtgatcaccaactccacctatgatggcttgctctacaacaccgactggatcaaacagacgctggatgtcccgtcgattcacttcgattctgcctgggtgccgtacacccattttcatccgatctaccagggtaaaagtggtatgagcggcgagcgtgttgcgggaaaagtgatcttcgaaacgcaatcgacccacaaaatgctggcggcgttatcgcaggcttcgctgatccacattaaaggcgagtatgacgaagaggcctttaacgaagcctttatgatgcataccaccacctcgcccagttatcccattgttgcttcggttgagacggcggcggcgatgctgcgtggtaatccgggcaaacggctgattaaccgttcagtagaacgagctctgcattttcgcaaagaggtccagcggctgcgggaagagtctgacggttggtttttcgatatctggcaaccgccgcaggtggatgaagccgaatgctggcccgttgcgcctggcgaacagtggcacggctttaacgatgcggatgccgatcatatgtttctcgatccggttaaagtcactattttgacaccggggatggacgagcagggcaatatgagcgaggaggggatcccggcggcgctggtagcaaaattcctcgacgaacgtgggatcgtagtagagaaaaccggcccttataacctgctgtttctctttagtattggcatcgataaaaccaaagcaatgggattattgcgtgggttgacggaattcaaacgctcttacgatctcaacctgcggatcaaaaatatgctacccgatctctatgcagaagatcccgatttctaccgcaatatgcgtattcaggatctggcacaagggatccataagctgattcgtaaacacgatcttcccggtttgatgttgcgggcattcgatactttgccggagatgatcatgacgccacatcaggcatggcaacgacaaattaaaggcgaagtagaaaccattgcgctggaacaactggtcggtagagtatcggcaaatatgatcctgccttatccaccgggcgtaccgctgttgatgcctggagaaatgctgaccaaagagagccgcacagtactcgattttctactgatgctttgttccgtcgggcaacattaccccggttttgaaacggatattcacggcgcgaaacaggacgaagacggcgtttaccgcgtacgagtcctaaaaatggcgggataa

SEQ ID NO: 84176 - protein, 713 aa, Escherichia coli
MNIIAIMGPHGVFYKDEPIKELESALVAQGFQIIWPQNSVDLLKFIEHNPRICGVIFDWDEYSLDLCSDINQLNEYLPLYAFINTHSTMDVSVQDMRMALWFFEYALGQAEDIAIRMRQYTDEYLDNITPPFTKALFTYVKERKYTFCTPGHMGGTAYQKSPVGCLFYDFFGGNTLKADVSISVTELGSLLDHTGPHLEAEEYIARTFGAEQSYIVTNGTSTSNKIVGMYAAPSGSTLLIDRNCHKSLAHLLMMNDVVPVWLKPTRNALGILGGIPRREFTRDSIEEKVAATTQAQWPVHAVITNSTYDGLLYNTDWIKQTLDVPSIHFDSAWVPYTHFHPIYQGKSGMSGERVAGKVIFETQSTHKMLAALSQASLIHIKGEYDEEAFNEAFMMHTTTSPSYPIVASVETAAAMLRGNPGKRLINRSVERALHFRKEVQRLREESDGWFFDIWQPPQVDEAECWPVAPGEQWHGFNDADADHMFLDPVKVTILTPGMDEQGNMSEEGIPAALVAKFLDERGIVVEKTGPYNLLFLFSIGIDKTKAMGLLRGLTEFKRSYDLNLRIKNMLPDLYAEDPDFYRNMRIQDLAQGIHKLIRKHDLPGLMLRAFDTLPEMIMTPHQAWQRQIKGEVETIALEQLVGRVSANMILPYPPGVPLLMPGEMLTKESRTVLDFLLMLCSVGQHYPGFETDIHGAKQDEDGVYRVRVLKMAG

SEQ ID NO: 84177 - DNA, 2148 bp, Escherichia coli O157
  CDS (1)..(2148): transl_table=11
atgaacgttattgcaatattgaatcacatgggggtttattttaaagaagaacccatccgtgaacttcatcgcgcgcttgaacgtctgaacttccagattgtttacccgaacgaccgtgacgacttattaaaactgatcgaaaacaatgcgcgtctgtgcggcgttatttttgactgggataaatataatctcgagctgtgcgaagaaattagcaaaatgaacgagaacctgccgttgtacgcgttcgctaatacgtattccactctcgatgtaagcctgaatgacctgcgtttacagattagcttctttgaatatgcgctgggtgctgctgaagatattgctaacaagatcaagcagaccactgacgaatatatcaacactattctgcctccgctgactaaagcactgtttaaatatgttcgtgaaggtaaatatactttctgtactcctggtcacatgggtggtactgcattccagaaaagcccggtaggtagcctgttctatgatttctttggtccgaataccatgaaatctgatatttccatttcagtatctgaactgggttctctgctggatcacagtggtccacacaaagaagcagaacagtatatcgctcgcgtctttaacgcagaccgcagctacatggtgaccaacggtacttccactgcgaacaaaattgttggtatgtactctgctccggcaggcagcaccattctgattgaccgtaactgccacaaatcgctgacccacctgatgatgatgagcgatgttacgccaatctatttccgcccgacccgtaacgcttacggtattcttggtggtatcccacagagtgaattccagcacgctaccattgctaagcgcgtgaaagaaacaccaaacgcaacctggccggtacatgctgtaattaccaactctacctatgatggtctgctgtacaacaccgacttcatcaagaaaacactggatgtgaaatccatccactttgactccgcgtgggtgccttacaccaacttctcaccgatttacgaaggtaaatgcggtatgagcggtggccgtgtagaagggaaagtgatttacgaaacccagtccactcacaaactgctggcggcgttctctcaggcttccatgatccacgttaaaggtgacgtaaacgaagaaacctttaacgaagcctacatgatgcacaccaccacttctccgcactacggtatcgtggcgtccactgaaaccgctgcggcgatgatgaaaggcaatgcaggtaagcgtctgatcaacggttccattgaacgtgcgatcaaattccgtaaagagatcaaacgtctgagaacggaatctgatggctggttctttgatgtatggcagccggatcatatcgatacgactgaatgctggccgctgcgttctgacagcacctggcacggcttcaaaaacatcgataacgagcacatgtatcttgacccgatcaaagtcaccctgctgactccggggatggaaaaagacggcaccatgagcgactttggtattccggccagcatcgtggcgaaatacctcgacgaacatggcatcgttgttgagaaaaccggtccgtataacctgctgttcctgttcagcatcggtatcgataagaccaaagcactgagcctgctgcgtgctctgactgacttcaaacgtgcgttcgacctgaacctgcgtgtgaaaaacatgctgccgtctctgtatcgtgaagatcctgaattctatgaaaacatgcgtattcaggaactggctcagaatatccacaaactgattgttcaccacaatctgccggatctgatgtatcgcgcatttgaagtgctgccgacgatggtaatgactccgtatgctgcattccagaaagagctgcacggtatgaccgaagaagtttacctcgacgaaatggtcggtcgtattaacgccaatatgatccttccgtatccgccgggagttcctctggtaatgccgggtgaaatgatcaccgaagaaagccgtccggttctggagttcctgcagatgctgtgtgaaatcggcgctcactatccgggctttgaaaccgatattcacggtgcataccgtcaggctgatggccgctataccgttaaggtattgaaagaagaaagcaaaaaataa

SEQ ID NO: 84178 - protein, 715 aa, Escherichia coli O157
MNVIAILNHMGVYFKEEPIRELHRALERLNFQIVYPNDRDDLLKLIENNARLCGVIFDWDKYNLELCEEISKMNENLPLYAFANTYSTLDVSLNDLRLQISFFEYALGAAEDIANKIKQTTDEYINTILPPLTKALFKYVREGKYTFCTPGHMGGTAFQKSPVGSLFYDFFGPNTMKSDISISVSELGSLLDHSGPHKEAEQYIARVFNADRSYMVTNGTSTANKIVGMYSAPAGSTILIDRNCHKSLTHLMMMSDVTPIYFRPTRNAYGILGGIPQSEFQHATIAKRVKETPNATWPVHAVITNSTYDGLLYNTDFIKKTLDVKSIHFDSAWVPYTNFSPIYEGKCGMSGGRVEGKVIYETQSTHKLLAAFSQASMIHVKGDVNEETFNEAYMMHTTTSPHYGIVASTETAAAMMKGNAGKRLINGSIERAIKFRKEIKRLRTESDGWFFDVWQPDHIDTTECWPLRSDSTWHGFKNIDNEHMYLDPIKVTLLTPGMEKDGTMSDFGIPASIVAKYLDEHGIVVEKTGPYNLLFLFSIGIDKTKALSLLRALTDFKRAFDLNLRVKNMLPSLYREDPEFYENMRIQELAQNIHKLIVHHNLPDLMYRAFEVLPTMVMTPYAAFQKELHGMTEEVYLDEMVGRINANMILPYPPGVPLVMPGEMITEESRPVLEFLQMLCEIGAHYPGFETDIHGAYRQADGRYTVKVLKEESKK

SEQ ID NO: 84179 - DNA, 1482 bp, Bacillus anthracis
  CDS (1)..(1482): transl_table=11
gtgtatagattgtcccaatacgaaacaccattgtttaccgctttagttgagcacagtaagcgaaatccaattcaattccatattccaggtcataaaaaagggcaaggcatggatcctgaatttcgcgaatttattgggcataatgcattagcaattgatttaattaacattgcgccgctcgatgatttacatcatccaaaaggtatgattaaagaagcacaagatttagcagccgctgcatttggtgcggatcatactttcttttctattcaaggtacaagtggcgcaataatgacaatggtgatgagcgtttgcggtcctggtgacaaaatactagtgccacgaaacgtgcataaatcagtaatgtcagctattattttctcaggtgcaaaacctattttcatgcatcctgaaatcgatccaaaacttggtatttcacatggaatcacaatccaatctgtcaaaaaagcacttgaagagcactcagatgcgaaaggcttacttgttattaatccaacatactttggctttgctgcggacttagaacagattgtacaattagcacattcttacgatatccctgtactcgttgatgaggctcatggtgttcatattcattttcacgatgaactgccgatgtcagcgatgcaagccggtgcagatatggcagcaacgagtgttcacaaattaggtggatctttaacgcaaagctctattcttaatgtaaaagaaggccttgtgaacgtaaaacatgttcaatctattattagcatgcttacgactacatcaacgtcttacatcttgttagcctccctagatgttgctagaaaacgtcttgctacagaaggaaaggcgctcatagaacaaacaatacaattagcggaacaagttcgtaatgctataaatgatattgaacatctttactgtccagggaaagaaatgctaggtacggatgctacttttaactatgatcctacaaagataattgtatctgtaaaagatttaggtattacaggccatcaggctgaagtatggcttagagagcaatataacattgaagtagaactctcagatttatacaacatactatgtcttgtcacttttggagatacagaaagtgagacgaatacacttattgcagcattacaagatttatcagcaatatttaaaaataaagctgataaaggtgttcgaatacaagtagaaattccagaaatacctgtgttagcactttctcctcgagatgctttttattcggaaacagaagtcatcccatttgaaaatgcagcaggtcgtattatagctgatttcgttatggtttatccgccagggattccaatctttactccgggggaaattattacacaagacaacttagagtatattcgtaaaaacttagaagcaggtttacctgtacaaggtcctgaagatatgacattacaaacattacgcgtgatcaaagagtacaagcctatcagttga

SEQ ID NO: 84180 - protein, 493 aa, Bacillus anthracis
MYRLSQYETPLFTALVEHSKRNPIQFHIPGHKKGQGMDPEFREFIGHNALAIDLINIAPLDDLHHPKGMIKEAQDLAAAAFGADHTFFSIQGTSGAIMTMVMSVCGPGDKILVPRNVHKSVMSAIIFSGAKPIFMHPEIDPKLGISHGITIQSVKKALEEHSDAKGLLVINPTYFGFAADLEQIVQLAHSYDIPVLVDEAHGVHIHFHDELPMSAMQAGADMAATSVHKLGGSLTQSSILNVKEGLVNVKHVQSIISMLTTTSTSYILLASLDVARKRLATEGKALIEQTIQLAEQVRNAINDIEHLYCPGKEMLGTDATFNYDPTKIIVSVKDLGITGHQAEVWLREQYNIEVELSDLYNILCLVTFGDTESETNTLIAALQDLSAIFKNKADKGVRIQVEIPEIPVLALSPRDAFYSETEVIPFENAAGRIIADFVMVYPPGIPIFTPGEIITQDNLEYIRKNLEAGLPVQGPEDMTLQTLRVIKEYKPIS

SEQ ID NO: 84181 - DNA, 1476 bp, Bacillus halodurans
  CDS (1)..(1476): transl_table=11
ttgtctcgtcaagaacagacccccctcttctcgggagtcgttgctcacgctaaacataaccctgtacaatttcatattcccggtcataaaaaaggagctggtatggacccagcgttccgttcatttatcggtgacaatgctctatcgatcgatttaatcaatataggcccgcttgacgatctacatcatccccatgggatcattaaagaagcacaagagttagccgccgaagcatttggggcagatcatacgtttttttctgtccaagggacaagcggtgccatcatgacgatgattatgtccgttgtcgggcctggtgaaaagatcatcgtgccacgaaatgttcacaagtcgatcatgtctgcgatcgttttttcaggagcgacacctgtgttcatccatccagaaatcgatccccttctagggatttcccatggaatcacgattgaagcggtggaaaaggcgcttgacgctcaccctgatgccaaaggacttcttgttattaacccgacatactttggcattgctgcaaacttaaaaaaaattgtagagctttgccatagcagggacgttcctgttcttgtcgatgaagcgcatggggtgcacattcatttccatgaagcccttcccttatcggcaatgcaggccggagctgatatggcggcaacgagtgttcataagcttggaggttccttgacacagagctccattttaaatgttcgcgaaggcctcgtctctgcgaagcgtgtgcaaacgattataagtatgctaacaacaacctccacgtcctatttgctcctcgcctcccttgatgcggcgagaaagcatttagcgacaaacggtagagatcttattggctataccattcagttggctgatcaggcaagagatcaaattaacgccattgatggcttgtactgtgtcggcaaggagattcttggaacgattgctacctatgattacgatccaacgaaactgatcatttctgtgaagaatcttggaattactggctacgatgcagaagtatggttaagggaacattatcagatcgaggttgagctgtcagatctatataatattctttgcatcgtttcctttggtgacactgagcgggagatggatctgcttgtcaaagctctctctgagctggctgacctgcacaaacatgggatttgtgaacggagtccagtctctgtctacgttccaaatatccctacactcgccatgtctccgcgagatgccttttatgctgaaactgaggtcgttccattcgaagattctgtcggacgtaccattgcagaatttattatggtttaccccccaggaattccaatcctaattcctggtgaaattataaccgaaagcaatctcgcctacattcgtgaaaacaaccgtgccggtcttcctgtgcaaggtccagaagacgacacctttcgaacgttgcgtgtcataaaagagcacgaagccatccgttaa

SEQ ID NO: 84182 - protein, 491 aa, Bacillus halodurans
MSRQEQTPLFSGVVAHAKHNPVQFHIPGHKKGAGMDPAFRSFIGDNALSIDLINIGPLDDLHHPHGIIKEAQELAAEAFGADHTFFSVQGTSGAIMTMIMSVVGPGEKIIVPRNVHKSIMSAIVFSGATPVFIHPEIDPLLGISHGITIEAVEKALDAHPDAKGLLVINPTYFGIAANLKKIVELCHSRDVPVLVDEAHGVHIHFHEALPLSAMQAGADMAATSVHKLGGSLTQSSILNVREGLVSAKRVQTIISMLTTTSTSYLLLASLDAARKHLATNGRDLIGYTIQLADQARDQINAIDGLYCVGKEILGTIATYDYDPTKLIISVKNLGITGYDAEVWLREHYQIEVELSDLYNILCIVSFGDTEREMDLLVKALSELADLHKHGICERSPVSVYVPNIPTLAMSPRDAFYAETEVVPFEDSVGRTIAEFIMVYPPGIPILIPGEIITESNLAYIRENNRAGLPVQGPEDDTFRTLRVIKEHEAIR

SEQ ID NO: 84183 - DNA, 1473 bp, Bacillus subtilis
  CDS (1)..(1473): transl_table=11
ttgtcgcaacatgaaacacccttatacacaggactgaaaaagcatgcaagcagacagcctgttcaattccacattcccggccataaaaaaggggcaggaatggacccagaattcagacaatttatcggtgaaaacgcgttaagcatagatttgattaatattgaaccattagacgatctgcacgcgccaaaaggcattattaaacaagcacaagatctggctgctgaagcatttggagcggatcatacatttttttctgttcaaggaacaagcggcgccattatgacaatggtaatggctgtttgcggacctggtgataaaattattattccaagaaatgttcataaatcaattatgacagctattgtattttccggagcggttccaatttttattcatcctgaaattgacaatgaattgggcatctcccacggaattacacttgaatctgctaaacgggcgcttaccgagcatccggatgcaaaagggcttctcgtcatcaacccgacatatttcggtgttgcagccgacttaaaaagcatcgtagaactcgctcattcgtttgatgtgccagtgcttgtggatgaagcacacggcgttcacattcattttcacgacgaattgccgctatcggctatgcaggcaggagcggacatagcagcgacaagtgtacacaagctgggcggatcactgacacaaagctctattttaaacatgagagaaggccttgtatctaaagacagagtgcaatccatcctgagcatgctgacaactacgtcaacttcttacttgcttctcgcttctttggatgttgccagaaaacgccttgcaacagaaggccgccagcttgctgaggaaacactcaagcttgccaatcagacgagagatcgcctcaatcagattgaaggcatttattgtgtcggttctgagattcttgggtcgaaagcagcttacagctatgatccgacaaaattgattatctctgtgaaaagtcttggcctgacaggacatgacgtggaaaaatggcttcgtgaatcctttaatattgaggtggagctttctgatctgtacaatattttgtgtattttcactcctggtgacagccaaaatgatgcagaccggcttgtagaggctttaactgagatcgcacagcaaatgtcagaacaagatgtaacacatcagcaaactgaggttctgcttccagaaatacctttattggcaatgactccgcgtgatgctttctatgcaaatacggaagtcatcccattaaaagaagcatccggacggattattgctgaatttgtcatggtatatccgcctggtattccaatcttcatcccaggagaaattattacagaagaaaacatcagctacatttttaaaaaccttgacgcaggcctccctgttcaaggacctgaggactcgactttacatatgatccgggtcatcaaagaacaaaaagcaattcaataa

SEQ ID NO: 84184 - protein, 490 aa, Bacillus subtilis
MSQHETPLYTGLKKHASRQPVQFHIPGHKKGAGMDPEFRQFIGENALSIDLINIEPLDDLHAPKGIIKQAQDLAAEAFGADHTFFSVQGTSGAIMTMVMAVCGPGDKIIIPRNVHKSIMTAIVFSGAVPIFIHPEIDNELGISHGITLESAKRALTEHPDAKGLLVINPTYFGVAADLKSIVELAHSFDVPVLVDEAHGVHIHFHDELPLSAMQAGADIAATSVHKLGGSLTQSSILNMREGLVSKDRVQSILSMLTTTSTSYLLLASLDVARKRLATEGRQLAEETLKLANQTRDRLNQIEGIYCVGSEILGSKAAYSYDPTKLIISVKSLGLTGHDVEKWLRESFNIEVELSDLYNILCIFTPGDSQNDADRLVEALTEIAQQMSEQDVTHQQTEVLLPEIPLLAMTPRDAFYANTEVIPLKEASGRIIAEFVMVYPPGIPIFIPGEIITEENISYIFKNLDAGLPVQGPEDSTLHMIRVIKEQKAIQ

SEQ ID NO: 84185 - DNA, 1443 bp, Bacillus subtilis
  CDS (1)..(1443): transl_table=11
atgaacacacctttatataaagcattaattcaacatgcgagaagaaattctcattcatttcatgttccgggacatcacaatggagatgtcttttttgatgacgctaagtcaatattcgatccgcttctcaccattgatgtaactgaactggcaggactggatgatctccatcatccttctggggtgattaaggaagctcaggagcttgccagtcaattatatggatcggcggaaagtttttttctggtaaatggtacgactgtcggaaacttagcgatgattttatctgtttgtgaacctggtgatacaattctggttcaaagaaactgtcataaatctgtatttcatgctgttgatttgtccggtgctgagccggtttatcttgcacctgacgttgattcagcgatgcatgtgcctacgcatgttccgcttggaacaattaaagaggccctggaagcatatccagatgcgaaaggcttggtactgaccaatccgacatattacggacatagtgctgatttgactgagatcattactgaagcccatcattacgggattcctgttttggtcgatgaagcgcatggcgcacattttattttaggtgagccttttccggtctcagctttaaaaatgggggcagatattgttgttcagtcggcccacaaaacgttgccagccatgacgatgggttcttatttgcatctcaacagcagctgcaggattaacagggatcgggtggcagagtatttaaaccgattacaaagcagcagcccgtcttatccgattatggcttcgttagatattgcccgcgcttatgtacagcatattatagaagaacaaaagctttctgacattctgcagcggatagaaacacttaaacaaacgtttgattcacttacaaatgcagaagctgttaaccctgctaatccactgatcatcacggatccgctaaagctcacaattcgttcaaaacgcgggcattctggctatacgctgcaaagcattttagagcgtgccaacatattcactgagcttgctgatgaaaatcaagttctgctcgttctcccattgggaggaaaacggagaataaacgctgaaatcattagaagcatcgatgaagagattgagaaaacgcctccggatcagacgtttgtttctgcagaatggggtgtgcagcctgttactgtcttgccttatccaaaaaaggtcttacattcgtttaagaaagaatatgtgagctttgaggaagcagctggccggcttaatgcagaagatatcatcccttatcctccgggtatcccgatgattatggcgggagaaagaataacaaaagaaagtgtgcaaaagctcagccgcttgatcagcatgaaaacgcatgttcaagggaatatgaaaatcaaagagaaacaactacttgtttatatagaagaggagaaatcatga

SEQ ID NO: 84186 - protein, 480 aa, Bacillus subtilis
MNTPLYKALIQHARRNSHSFHVPGHHNGDVFFDDAKSIFDPLLTIDVTELAGLDDLHHPSGVIKEAQELASQLYGSAESFFLVNGTTVGNLAMILSVCEPGDTILVQRNCHKSVFHAVDLSGAEPVYLAPDVDSAMHVPTHVPLGTIKEALEAYPDAKGLVLTNPTYYGHSADLTEIITEAHHYGIPVLVDEAHGAHFILGEPFPVSALKMGADIVVQSAHKTLPAMTMGSYLHLNSSCRINRDRVAEYLNRLQSSSPSYPIMASLDIARAYVQHIIEEQKLSDILQRIETLKQTFDSLTNAEAVNPANPLIITDPLKLTIRSKRGHSGYTLQSILERANIFTELADENQVLLVLPLGGKRRINAEIIRSIDEEIEKTPPDQTFVSAEWGVQPVTVLPYPKKVLHSFKKEYVSFEEAAGRLNAEDIIPYPPGIPMIMAGERITKESVQKLSRLISMKTHVQGNMKIKEKQLLVYIEEEKS

SEQ ID NO: 84187 - DNA, 1563 bp, Oryza sativa
  CDS (1)..(1563)
atgcggcatgttgtagtacaatgtgccacttcatgggacactccaagaacgtctactactaatggttcacatgctgaaccttcagcagttgtcaaagctggtactgcccctctgattcaggcactgaaatcaactgcaaatcaagatgtttcttgctttcactttcctggacataatagagggaaagcttctcctccttcattgtcagaacttattggctcaaggacatttttgcatgacttacctgagctacctgagcttgatgatctcttctcccctaaaggtgtgattttagatgctcagaagcgagcagctgaactatttggatcatttaaaacatggttcctggtcaatggaagtacatgtggaatccaggcctcagtgatggctacctgttcccctggtgactacctcatcatacctcgaaattgtcatatttcagtgatctctgcactggttttgtctggtgctgtgcccaaatatatagtacctgagtacaattccgggtgggacattgctgggggtattaccccatcgcaggtggataaagtggttaaggaactggaggaggacagaaagaaggtaggtgctgttcttgttacatcaccaacctatcatggcatatgcagcaatatacaaggaattgtcaatgtttgccacctgcaaggcattcctgttatagttgacgaggcgcatggtgcccatttcaggtttcacagaaattttccaagcagcgcaactgagcaaggtgccgacttggttgtgcaatccacacacaaggttctgtgctcgcttacacagtcctcaatgcttcacatggctggagatcttgtggatgcagataaagtaagccaatgcctccaattgctccagagctcaagcccaagttaccttctactctcttctttggatgccgcaagggctcagctgagtgagaatgcagaatcttttgatgaaccagtatctatggctttagaaacaaaacatcagctgaggattatcccaggaatatctgttttggacttatcaagctttctttctgattttcctgctattgatcccttgcgtatcacattaagtgcttcagatctgcaattatctggatatgaagcagatgattttttagctgaggagcatcaaattgtatctgagctggtcggtacacaggccgtgacatttgcagtcaacttagggaccagaaggcatgatgttcagaggcttgtacattctgtaaagcatctgtcagaaaaatacttctctgaaaatgggtccagttccagaaaagagaatcctgctagtagcccactggacaagttctccatcaagttgacaccaagggaggccttctttttaaagaagaggagagtgtccatcgaggatagccttggtgagatttgtggtgagcttatctgcccttatccaccaggtatcccggtgctgatcccaggtgagatagtaacgcaggattcactgtcatacttgatggatgtcagggacaacggcatagcaatcagtggagcagctgatggtgagctcaagtccattatggtatgcaacgtgtga

SEQ ID NO: 84188 - protein, 520 aa, Oryza sativa
MRHVVVQCATSWDTPRTSTTNGSHAEPSAVVKAGTAPLIQALKSTANQDVSCFHFPGHNRGKASPPSLSELIGSRTFLHDLPELPELDDLFSPKGVILDAQKRAAELFGSFKTWFLVNGSTCGIQASVMATCSPGDYLIIPRNCHISVISALVLSGAVPKYIVPEYNSGWDIAGGITPSQVDKVVKELEEDRKKVGAVLVTSPTYHGICSNIQGIVNVCHLQGIPVIVDEAHGAHFRFHRNFPSSATEQGADLVVQSTHKVLCSLTQSSMLHMAGDLVDADKVSQCLQLLQSSSPSYLLLSSLDAARAQLSENAESFDEPVSMALETKHQLRIIPGISVLDLSSFLSDFPAIDPLRITLSASDLQLSGYEADDFLAEEHQIVSELVGTQAVTFAVNLGTRRHDVQRLVHSVKHLSEKYFSENGSSSRKENPASSPLDKFSIKLTPREAFFLKKRRVSIEDSLGEICGELICPYPPGIPVLIPGEIVTQDSLSYLMDVRDNGIAISGAADGELKSIMVCNV

SEQ ID NO: 84189 - DNA, 1626 bp, Zea mays
  CDS (1)..(1626)
atggctcgctgcgttgccggcagctgccctcccgtcaccttcgcgtgttgcccccgccggactggacgaagtgctgttgttcagtgtggcactgcatcgagcacaccagcaatatctggaaccggaccttcatcatctggatcctcggggcttgttcaagattgtactgcccctctggtctgtgcactgcaattaactgccagacaagatgtttcctgctttcacttcccaggacacaacagaggaaaagctgctccatcttccttgtcgaaactcattggctcaggggcatttctgcatgacttgcccgagctacccgagctcgatgatctcttctccccaaaaggtgtgattctagatgcccagaggcgagcagctcaactgtttgggtcatctaaaacttggttccttgtcaacggaacgacctgtggaatccaggcctcagtgatggctacctgttctcccggcgactacctcattgtgccacggaactgccacatttcagtgatctctgcgctggtcttgtctggtgtggtgcctaaatacataataccagaatataattctgggtgggacattgctggtggtatcaccccgctgcagctggatgaagcagtaaaagagctggaggaggatggaaagagggtaggcgctgttcttgttacttcacccacctaccatggtgtatgcagcaatgtgcaaggtattgtcagtgtttgtcatccacgaggcattccggttatagttgatgaagcgcatggtgcacatttcaggttccatgacagtttgccaagcactgcaattgagcaaggtgctgacctagctgtgcaatccacacacaaggtcctgtgctcccttacacagtcttcaatgcttcacatgtctggagatcttgtcgatgtagataaagtaagccagtgccttcagctcctccagagctcgagcccgagttaccttctactgtcatctttagatgccgcgagagatcagctgagccagaacacaaatatatttgatgagccattagctatagcatcggaaacaaaagacctgctggcgagaatccctgggatatctgttctagacttaccatgctttgcttctgatttccctgccattgatccgttgcgcatcacactcagtgcctcagatctgcaattatcgggatacgaagccgatgacattttatatgaaggccatcaaatcgtatctgagcttgttggcacaagggccgtgacatttgcagtcaacttaggaaccagagtgcaggacgctgagaagcttgtgcagtctgcaaagcatctatcagaaaaacatttctttgcaaatagcctgaaacccgtgaaggagaatcgtgtgcatggcccattagagaatatctctgtgcatctgagtccaagagaggccttctttacagagaagaggagagtgaaaatcgaggacagccttggtgaaatctgtggtgagctaatatgcccgtatccacctggtatcccagttctgattccaggcgaggtagtaacccatgattcactgtcctacttgatgagcgttagacaccaaggcatcacgatcagtggagcggctgatgctgagctaaattccattctggtgtgcgacttatga

SEQ ID NO: 84190 - protein, 541 aa, Zea mays
MARCVAGSCPPVTFACCPRRTGRSAVVQCGTASSTPAISGTGPSSSGSSGLVQDCTAPLVCALQLTARQDVSCFHFPGHNRGKAAPSSLSKLIGSGAFLHDLPELPELDDLFSPKGVILDAQRRAAQLFGSSKTWFLVNGTTCGIQASVMATCSPGDYLIVPRNCHISVISALVLSGVVPKYIIPEYNSGWDIAGGITPLQLDEAVKELEEDGKRVGAVLVTSPTYHGVCSNVQGIVSVCHPRGIPVIVDEAHGAHFRFHDSLPSTAIEQGADLAVQSTHKVLCSLTQSSMLHMSGDLVDVDKVSQCLQLLQSSSPSYLLLSSLDAARDQLSQNTNIFDEPLAIASETKDLLARIPGISVLDLPCFASDFPAIDPLRITLSASDLQLSGYEADDILYEGHQIVSELVGTRAVTFAVNLGTRVQDAEKLVQSAKHLSEKHFFANSLKPVKENRVHGPLENISVHLSPREAFFTEKRRVKIEDSLGEICGELICPYPPGIPVLIPGEVVTHDSLSYLMSVRHQGITISGAADAELNSILVCDL

SEQ ID NO: 84191 - DNA, 22 bp, Artificial sequence
  primer
atggtcaacctcaatcaacaag

SEQ ID NO: 84192 - DNA, 21 bp, Artificial sequence
  primer
ttaattcaccacagccaaatg

SEQ ID NO: 84193 - protein, 590 aa, Artificial sequence
  consensus sequence
  Variant (2)..(16): Xaa in position 2 to 16 is any amino acid
  Variant (17)..(17): Xaa in position 17 is any or no amino acid
  Variant (19)..(20): Xaa in position 19 to 20 is any amino acid
  Variant (24)..(25): Xaa in position 24 to 25 is any amino acid
  Variant (27)..(31): Xaa in position 27 to 31 is any amino acid
  Variant (32)..(42): Xaa in position 32 to 42 is any or no amino acid
  Variant (44)..(45): Xaa in position 44 to 45 is any amino acid
  Variant (46)..(49): Xaa in position 46 to 49 is any or no amino acid
  Variant (51)..(56): Xaa in position 51 to 56 is any amino acid
  Variant (57)..(57): Xaa in position 57 is any or no amino acid
  Variant (60)..(60): Xaa in position 60 is any amino acid
  Variant (62)..(63): Xaa in position 62 to 63 is any amino acid
  Variant (65)..(67): Xaa in position 65 to 67 is any amino acid
  Variant (69)..(70): Xaa in position 69 to 70 is any amino acid
  Variant (72)..(75): Xaa in position 72 to 75 is any amino acid
  Variant (77)..(79): Xaa in position 77 to 79 is any amino acid
  Variant (81)..(85): Xaa in position 81 to 85 is any amino acid
  Variant (87)..(89): Xaa in position 87 to 89 is any amino acid
  Variant (91)..(105): Xaa in position 91 to 105 is any amino acid
  Variant (107)..(112): Xaa in position 107 to 112 is any amino acid
  Variant (115)..(115): Xaa in position 115 is any amino acid
  Variant (117)..(117): Xaa in position 117 is any amino acid
  Variant (119)..(126): Xaa in position 119 to 126 is any amino acid
  Variant (128)..(129): Xaa in position 128 to 129 is any amino acid
  Variant (131)..(134): Xaa in position 131 to 134 is any amino acid
  Variant (136)..(160): Xaa in position 136 to 160 is any amino acid
  Variant (161)..(176): Xaa in position 161 to 176 is any or no amino acid
  Variant (180)..(180): Xaa in position 180 is any amino acid
  Variant (182)..(193): Xaa in position 182 to 193 is any amino acid
  Variant (195)..(196): Xaa in position 195 to 196 is any amino acid
  Variant (197)..(201): Xaa in position 197 to 201 is any or no amino acid
  Variant (208)..(208): Xaa in position 208 is any amino acid
  Variant (210)..(212): Xaa in position 210 to 212 is any amino acid
  Variant (213)..(218): Xaa in position 213 to 218 is any or no amino acid
  Variant (220)..(225): Xaa in position 220 to 225 is any amino acid
  Variant (226)..(227): Xaa in position 226 to 227 is any or no amino acid
  Variant (231)..(234): Xaa in position 231 to 234 is any amino acid
  Variant (236)..(236): Xaa in position 236 is any amino acid
  Variant (239)..(243): Xaa in position 239 to 243 is any amino acid
  Variant (246)..(268): Xaa in position 246 to 268 is any amino acid
  Variant (269)..(272): Xaa in position 269 to 272 is any or no amino acid
  Variant (274)..(274): Xaa in position 274 is any amino acid
  Variant (277)..(279): Xaa in position 277 to 279 is any amino acid
  Variant (284)..(284): Xaa in position 284 is any amino acid
  Variant (287)..(319): Xaa in position 287 to 319 is any amino acid
  Variant (320)..(388): Xaa in position 320 to 388 is any or no amino acid
  Variant (390)..(401): Xaa in position 390 to 401 is any amino acid
  Variant (402)..(403): Xaa in position 402 to 403 is any or no amino acid
  Variant (405)..(410): Xaa in position 405 to 410 is any amino acid
  Variant (411)..(418): Xaa in position 411 to 418 is any or no amino acid
  Variant (420)..(426): Xaa in position 420 to 426 is any amino acid
  Variant (427)..(427): Xaa in position 427 is any or no amino acid
  Variant (429)..(441): Xaa in position 429 to 441 is any amino acid
  Variant (443)..(447): Xaa in position 443 to 447 is any amino acid
  Variant (448)..(450): Xaa in position 448 to 450 is any or no amino acid
  Variant (452)..(479): Xaa in position 452 to 479 is any amino acid
  Variant (480)..(521): Xaa in position 480 to 521 is any or no amino acid
  Variant (523)..(524): Xaa in position 523 to 524 is any amino acid
  Variant (526)..(539): Xaa in position 526 to 539 is any amino acid
  Variant (540)..(543): Xaa in position 540 to 543 is any or no amino acid
  Variant (545)..(553): Xaa in position 545 to 553 is any amino acid
  Variant (560)..(562): Xaa in position 560 to 562 is any amino acid
  Variant (566)..(567): Xaa in position 566 to 567 is any amino acid
  Variant (569)..(579): Xaa in position 569 to 579 is any amino acid
  Variant (580)..(589): Xaa in position 580 to 589 is any or no amino acid
PXXXXXXXXXXXXXXXXFXXPGHXXGXXXXXXXXXXXXXXXXGXXXXXXDXXXXXXXLDXLXXPXXXIXXAXXXXAXXXGXXXXXFXXXGXXXXXXXXXXXXXXXGXXXXXXRNXHXSXXXXXXXXGXXPXXXXPXXXXXXXXXXXXXXXXXXXXXXXXXXXXXXXXXXXXXXXXXPTYXGXXXXXXXXXXXXHXXXXXXXVDEAHGXHXXXXXXXXXPXXXXXXXXGADXXXXSXHKXXXXXTQXXXXXXXXXXXXXXXXXXXXXXXXXXXSXSYXXXASLDXARXXXXXXXXXXXXXXXXXXXXXXXXXXXXXXXXXXXXXXXXXXXXXXXXXXXXXXXXXXXXXXXXXXXXXXXXXXXXXXXXXXXXXXXXXXXXXXXXXXXXXXDXXXXXXXXXXXXXXGXXXXXXXXXXXXXXLXXXXXXXXEXXXXXXXXXXXXXGXXXXXXXXLXXXXXXXXXXXXXXXXXXXXXXXXXXXXXXXXXXXXXXXXXXXXXXXXXXXXXXXXXXXXXXXXXXXXXXPXXAXXXXXXXXXXXXXXXXXXGXXXXXXXXXYPPGIPXXXPGEXXTXXXXXXXXXXXXXXXXXXXXXG

SEQ ID NO: 84194 - protein, 25 aa, Artificial sequence
  protein pattern
  Variant (2)..(10): Xaa in position 2 to 10 is any amino acid
  Variant (15)..(15): Xaa in position 15 is Ile or Val
  Variant (17)..(17): Xaa in position 17 is Ile, Leu or Val
  Variant (18)..(18): Xaa in position 18 is Phe, Ile, Leu or Val
  Variant (19)..(20): Xaa in position 19 to 20 is any amino acid
  Variant (23)..(23): Xaa in position 23 is any amino acid
  Variant (24)..(24): Xaa in position 24 is Ile, Leu or Val
  Variant (25)..(25): Xaa in position 25 is Ala, Gly, Ser or Thr
GXXXXXXXXXYPPGXPXXXXGEXXX

SEQ ID NO: 84195 - protein, 24 aa, Artificial sequence
  protein pattern
  Variant (2)..(4): Xaa in position 2 to 4 is any or no amino acid
  Variant (8)..(11): Xaa in position 8 to 11 is any amino acid
  Variant (13)..(13): Xaa in position 13 is any amino acid
  Variant (16)..(16): Xaa in position 16 is any amino acid
  Variant (17)..(17): Xaa in position 17 is Ala, Gly, Ile or Leu
  Variant (18)..(18): Xaa in position 18 is any amino acid
  Variant (19)..(19): Xaa in position 19 is Ala, Gly or Ser
  Variant (20)..(20): Xaa in position 20 is Phe, Leu or Met
  Variant (21)..(21): Xaa in position 21 is Glu, Ser or Thr
  Variant (22)..(23): Xaa in position 22 to 23 is any amino acid
  Variant (24)..(24): Xaa in position 24 is Ala or Ser
AXXXGADXXXXSXHKXXXXXXXXX

SEQ ID NO: 84196 - protein, 20 aa, Artificial sequence
  protein pattern
  Variant (2)..(6): Xaa in position 2 to 6 is any amino acid
  Variant (7)..(7): Xaa in position 7 is any or no amino acid
  Variant (9)..(10): Xaa in position 9 to 10 is any or no amino acid
  Variant (12)..(12): Xaa in position 12 is Ile, Leu, Pro or Val
  Variant (13)..(13): Xaa in position 13 is Ile or Leu
  Variant (14)..(14): Xaa in position 14 is Leu or Met
  Variant (15)..(15): Xaa in position 15 is Ala, Cys or Ser
  Variant (17)..(17): Xaa in position 17 is Ile, Leu or Met
  Variant (18)..(18): Xaa in position 18 is Asp or Glu
  Variant (19)..(19): Xaa in position 19 is any amino acid
  Variant (20)..(20): Xaa in position 20 is Ala or Ser
LXXXXXXSXXYXXXXSXXXX

SEQ ID NO: 84197 - protein, 17 aa, Artificial sequence
  protein pattern
  Variant (2)..(8): Xaa in position 2 to 8 is any amino acid
  Variant (11)..(11): Xaa in position 11 is Ala or Glu
  Variant (13)..(13): Xaa in position 13 is His or Trp
  Variant (15)..(15): Xaa in position 15 is Ala, Pro, Thr or Val
  Variant (17)..(17): Xaa in position 17 is Phe, Ile, Leu or Met
HXXXXXXXVDXAXGXHX

SEQ ID NO: 84198 - DNA, 1437 bp, Glycine max
  CDS (1)..(1437)
atggaagcacattctgctttctctattgaaaggtcaaatgctaatgacatggggatgtctgaagcatttccctcatcgttgcctgtccttccatcgcctctagaagagacataccccaaattatctgattctagaccagcttttatggaaaaagaacttaaaacaaaaccttttacacattcaagtcatttaacttccagcggagcagttgggcatatgttttcatcttctcctggatattcaactgatcttcatcactcatccttttcatctcatgaaaaacaacctagaaatactcattttatttcacaatcattaagtaacatcacttcatttccattatcatattcttcaaatactggaccaccaacttcagcaacaccaagccattattccaaagaaagcagtgtttcctggcatacagattccctgccaagctttctggattttcctgaaaatggctctattgataataatcgggtagaaagtagtgcctgccctataatggcatctgaggagtattctaagcaaaatgattggcaggagtgggctgagaggctaatcagtgatgatgacactttgactactaattggaatgaccttcttgctgacaacattcaagatcttgagccaaaggtgccactccaagttccaaaaccacggccacagattccaggacatcaatcccaaggtcatcaacaacttcctgcttcatatggagaaaattgcactggtgctgccctctcttcctcagcaaattctgctcctgctaagtcacgaatgcgttggacaccagaacttcatgaggcgtttgtggaggctgtcaaccaacttggggggagtgaaaaagctactccaaagggcgtgctgaagctcatgaaagttgaaggattaactatatatcatgttaaaagccatttgcagaaatacaggacagctagatatagaccggagtcatctgaaggagttatggacaaaaaaacaagttccgttgaagagatggcatctctagatttgagaactggtattgagatcactgaagctctacgactacaaatggaggttcagaagcggttgcatgaacagcttgagattcaaagaaatctacagttgcgaatagaagaacaaggaaggtacctccagatgatgtttgagaagcaatgtaaacctggaaatgaaacgttcaaggcaccatcatctatcattgagactccatctggggggtcttcaaatgctacgaaagattcccttgccaaaaatgaaatggaagcatcacaagtgaaccatggcaggtcaggacctgatcaggttaagggcagtacgacatttgaggaaggctcattggaaaagtgcgggaagcctgattctcccaaaactgaacatgctattgctagtgaagatagtgctcaagccccgaagcgtcaaagaactgagtaa

SEQ ID NO: 84199 - protein, 478 aa, Glycine max
MEAHSAFSIERSNANDMGMSEAFPSSLPVLPSPLEETYPKLSDSRPAFMEKELKTKPFTHSSHLTSSGAVGHMFSSSPGYSTDLHHSSFSSHEKQPRNTHFISQSLSNITSFPLSYSSNTGPPTSATPSHYSKESSVSWHTDSLPSFLDFPENGSIDNNRVESSACPIMASEEYSKQNDWQEWAERLISDDDTLTTNWNDLLADNIQDLEPKVPLQVPKPRPQIPGHQSQGHQQLPASYGENCTGAALSSSANSAPAKSRMRWTPELHEAFVEAVNQLGGSEKATPKGVLKLMKVEGLTIYHVKSHLQKYRTARYRPESSEGVMDKKTSSVEEMASLDLRTGIEITEALRLQMEVQKRLHEQLEIQRNLQLRIEEQGRYLQMMFEKQCKPGNETFKAPSSIIETPSGGSSNATKDSLAKNEMEASQVNHGRSGPDQVKGSTTFEEGSLEKCGKPDSPKTEHAIASEDSAQAPKRQRTE

SEQ ID NO: 84200 - DNA, 1848 bp, Glycine max
  CDS (272)..(1501)
caaaagcaagagcctatagttgacggcgttggttggggttctaagattgttttgtttgagttaaacgcgacaaactcaaatacgtgtgcattacaactcctaacccctcaccatcctcttcttctctctcattcatacccctccttttttatttgtattctcagctttttagattccgtttctggtttttcccaattccatagtactctgttatcatcgtcatccctttataggacagacaaagctgattcacttaggagcctcgagagctatgtctacatcttctcgtgctcttcccactccattggaaaacaagtatatgaaacccccagattcttttcagctttcgccagtcagagatctgactgcaaattctgcctcatcaaattcaatcagaagtgctgggaagatgttttcttcaccttctaaatgtcccgatgacttccctttttcctctgtttcacagcatgataggcaatatcaagatcccccctttgtttctcagacaattggtgatagcgtgtcttccgaaatacattcaatgacattcatttctcaccctcaagaaaatgaagatctttcctggggaccagatccatgtcaggatattcttggctttcctgaaaatgtttctgtccagcatgatcaggtggaaaacaatggttgttacataaatgatgataatgtcaaaagatctgattttggggagtgggttgatcagttaatgtcaattgatgattctcttcacccgagctggagtcagcttcttgctgatgacaatgtagcagaaccaaaaccaaaggcatctcaggttcctccgcagcagcatataccatctggagaagttgttggtaattcagcatcaactgcatcgcagactaaggctagaatgcgttggactccagaacttcacgaggcctttgtggaagcagttaatcaccttggtggtagtgagaaggctactccaaagggtgtgttgaatcaaatgaaagttgaagggcttactatctatcatgtaaaaagccacttgcagaagtatagaactgccagatacaaaccagagccatcagaaggaacgtctgagaaaaaggtgactccaatggaagaaatgaaatctctagacttgaaaacgagtaaggggatcactgaagcattacgtttacagatggaactccagaagcgacttcacgaacaacttgagatccaaagaaagttgcagattcaaattgaagaccaagggaaacgtcttcagatgatgtttgagaaacagagagagatgggtgacagcaaggttaacgtctccttggacgagccttctgctgctgcaccatcagacacagtagaaaccacaaatgaggaacgccacaaatttgaaagcattccaaaagccatacccgaagagaaggagtcaagcacaacaaaacaaattgcaggtgaagctgaagaaatgatcaaggaagatgaagttgcaccacccacaaaacgggtgaaaagttcgtaacagcaggatcgttgttttatgccttctagatttgtttaatattcttagactggtttggactccatggaacttgtagaaatattattggatccaaggatgtttcaacttgctcatttatcacagccatttcctatgaaaatatggcatgagtgccacaagtaatggtggctcattgtgatggaaattttgttaccatcctcttagtggtccttgaggtttttttttttttcttttctttttcacatgtaaactagcatttatttatacctgtgtttaatgtattatatagaaaatcagaattgaaaaataaaagtaatattaagactccaaagaaataatacattttc

SEQ ID NO: 84201 - protein, 409 aa, Glycine max
MSTSSRALPTPLENKYMKPPDSFQLSPVRDLTANSASSNSIRSAGKMFSSPSKCPDDFPFSSVSQHDRQYQDPPFVSQTIGDSVSSEIHSMTFISHPQENEDLSWGPDPCQDILGFPENVSVQHDQVENNGCYINDDNVKRSDFGEWVDQLMSIDDSLHPSWSQLLADDNVAEPKPKASQVPPQQHIPSGEVVGNSASTASQTKARMRWTPELHEAFVEAVNHLGGSEKATPKGVLNQMKVEGLTIYHVKSHLQKYRTARYKPEPSEGTSEKKVTPMEEMKSLDLKTSKGITEALRLQMELQKRLHEQLEIQRKLQIQIEDQGKRLQMMFEKQREMGDSKVNVSLDEPSAAAPSDTVETTNEERHKFESIPKAIPEEKESSTTKQIAGEAEEMIKEDEVAPPTKRVKSS

SEQ ID NO: 84202 - DNA, 1933 bp, Hordeum vulgare
  CDS (155)..(1510)
ctccgtcgcgacacatcaccccagccagaattcccccttcctgtcatctcctcccccaaaagccgcaccgatcgagcagcttcctcacaacccaacccaggaacatatcgaaaccaatttatgggaaagaagcaaagcttatccacaattcttgatgaggaggtgtgatctgagacagtgtcacaacagcagggtttctggaggaatgtcatcctctttacctattctgccaaattctctgaaagaaaccttccatgggccttataatccgcagctcactccgatgcaaaggcaactgacgagtgattttgtgcccttatatcagagtgcatttccgtctgctactttgcacccaagagctggtgctatgagatcatcatattcagcatcattaggatactcagctaatcctcttgattctgtgcctaaccatgagaggcagtctatggttgctcctttcgctcctcagtcatcagatatcgaagtatttcaggccttatctaataatatccctggaggacacactgaggcaacttggttcccaggttcagctgatagtttatcagactacagggataacatccctgcttctggtagtcagatccagaatagcggtcctgctgtgacatctgatgtggttgctaaacaaaatgaatggtgggcagacataatgaatgatgattggagagatattctagatgcaacggctgctgatccccagtcaaagtccatggttcagccttccaattcggctgcatcacagcctgctgtcaaccagccagcttcatctcatggtggagagatttgcaatgtagctagtcctcccaatggcaactctgcagccaaacaacggatgaggtggactccagaactccatgaatgcttcgtagactctgtaaataagcttggtggtagcgaaaaagctactcccaagggtgtgctgaagcttatgaaagttgacggtttgacaatatatcatgtgaaaagccatctgcagaagtaccgaacagctcgctataagccagacgtaacggaaggtacagcagacaaaaggactaccactgaagagttgactctagacctgaaatcgagcatggatcttactgaagcgttgcgccttcagatggaagttcagaaacgtcttcatgaacaacttgagacccagagaaagttgcagttgcgaattgaagaacaagggaagtatcttcagatgatgtttgaaaagcagtctaaatctaatacggagaaggggcaggatctatcctcgggagctacaacaaccctatcatctgatccgagccattctgcaaacagaaatagggataatgatgcagctgatgacctacatagaacaggagagaaccctgtgagtgccgaaataggagaaacttccatgcatgcaggtggcaaccgggagatggcagaaatcgagtcttctgacccccttgcaaatactaatgatggttctaaggccccgcaagagaagtgccgaagggtgcatgatagttaaccatgagttcggtaattcagatcacagcagtcaatcaacatactaggtaaaaaaatggtttcattccgtgtcgatgctgatctgcaagtctattgagcctagccaccttaattatctaaatggaatctcttggtggccgcttgtataaactgctagcaataaatcaaattatcttctgacgtatggtaattggtaaataagtatgccttgaggtctagctatctttctagatatatagttgttatttgaggtgtcaagtggcagaagactgaactgctagaaagctagtctttgtcttgatgctcagaatattgaaatacctgaccctgttttggtttgggtattgcaatttttagagtgactgctacgtattggctgaactcatgatgattgcaaggttttgtgttaaaaaaaaaaaaaaaa

SEQ ID NO: 84203 - protein, 451 aa, Hordeum vulgare
MRRCDLRQCHNSRVSGGMSSSLPILPNSLKETFHGPYNPQLTPMQRQLTSDFVPLYQSAFPSATLHPRAGAMRSSYSASLGYSANPLDSVPNHERQSMVAPFAPQSSDIEVFQALSNNIPGGHTEATWFPGSADSLSDYRDNIPASGSQIQNSGPAVTSDVVAKQNEWWADIMNDDWRDILDATAADPQSKSMVQPSNSAASQPAVNQPASSHGGEICNVASPPNGNSAAKQRMRWTPELHECFVDSVNKLGGSEKATPKGVLKLMKVDGLTIYHVKSHLQKYRTARYKPDVTEGTADKRTTTEELTLDLKSSMDLTEALRLQMEVQKRLHEQLETQRKLQLRIEEQGKYLQMMFEKQSKSNTEKGQDLSSGATTTLSSDPSHSANRNRDNDAADDLHRTGENPVSAEIGETSMHAGGNREMAEIESSDPLANTNDGSKAPQEKCRRVHDS

SEQ ID NO: 84204 - DNA, 1329 bp, Arabidopsis thaliana
  CDS (1)..(1329)
atgacacttgctagcgattttggttttccatccgctatatcttcatcttttacaattctagaagagagataccacaataactttcctaacactttgtgtgtttcatcaggacaggaatcgatgaataacaaccccgtcccctgtcaggtgtttcctctggtctctggtggtagttctggtgggaatttgttttcatcttcttccggattctgcaatggtgtctatgtttcatcttcctcccaggcacggccatctgtttctaccgtgccaagagacagaattactgttgctcacgtctctggtgaagggcagaggcaggaatgccctgtggaaacacattccttgcaattgatcaatcaacctcaagaacagaaaattatgacttggtcttcagaccagattcggggcttcttcgattttcctgttccagatccacaagcagcgagcagcagaactatggtttcatccaaggaagtgctttcaaaatgcgaatggccagactgggcggatcagttgatctctgatgatagtcttgaaccaaattggtcggagcttctaggtgatcctaatgtactcaatctatattcaaagatagaaacacagtcttctgatatagcaaggcaagagatcgtctttagaaatcagcatcaggtggatccatcaatggagccgtttaatgccaaaagcccaccagctagttcaatgacatctaagcaaagaatgcgttggacaccagaacttcatgaagcatttgtcgaagctatcaatcagctcggtggtagtgaacgagccacccctaaggctgttttgaagctcatcaatagccctgggttgaccgtttatcatgtcaaaagccatttgcagaaatacagaactgcaaggtataaaccagagctttccaaagatacagaagaacctctagtaaagaatttgaaaaccattgaagatatcaaatctcttgacttgaagacgagcattgaaatcactgaagctctccggttacagatgaaagttcaaaaacaactccacgagcaacttgagatccaaagatcactgcagttacaaatcgaagaacaaggtcggtatcttcagatgatgattgagaaacaacagaagatgcaagagaacaaaaaagactctacttcctcatcatcaatgccagaagctgacccttcagctccatcaccaaacctttcacaacctttcctccataaagcaaccaattcagaaccatcaataactcagaaactgcagaatggttctagcacaatggatcaaagtgaatctacttctgggactagtaatagaaaacgggttagagaagattag

SEQ ID NO: 84205 - protein, 442 aa, Arabidopsis thaliana
MTLASDFGFPSAISSSFTILEERYHNNFPNTLCVSSGQESMNNNPVPCQVFPLVSGGSSGGNLFSSSSGFCNGVYVSSSSQARPSVSTVPRDRITVAHVSGEGQRQECPVETHSLQLINQPQEQKIMTWSSDQIRGFFDFPVPDPQAASSRTMVSSKEVLSKCEWPDWADQLISDDSLEPNWSELLGDPNVLNLYSKIETQSSDIARQEIVFRNQHQVDPSMEPFNAKSPPASSMTSKQRMRWTPELHEAFVEAINQLGGSERATPKAVLKLINSPGLTVYHVKSHLQKYRTARYKPELSKDTEEPLVKNLKTIEDIKSLDLKTSIEITEALRLQMKVQKQLHEQLEIQRSLQLQIEEQGRYLQMMIEKQQKMQENKKDSTSSSSMPEADPSAPSPNLSQPFLHKATNSEPSITQKLQNGSSTMDQSESTSGTSNRKRVRED

SEQ ID NO: 84206 - DNA, 1230 bp, Arabidopsis thaliana
  CDS (1)..(1230)
atggaggctcgtccagttcatagatcaggttcgagagacctcacacgcacttcttcaatcccatctacacaaaaaccttcaccagtagaagatagtttcatgagatcagataacaacagtcagttaatgtctagaccattaggacaaacctaccatttactttcatctagtaacggtggagctgttggacatatatgttcttcttcatcatctggttttgcaaccaatctccattactcaactatggtatctcatgagaaacaacaacactacacaggaagcagcagtaataatgctgtgcagacaccaagcaacaacgatagtgcttggtgtcatgattcattgccaggagggtttcttgacttccatgaaaccaacccggcgattcaaaacaactgtcagattgaggatggtggcattgcggctgcttttgatgacattcaaaaacgaagtgattggcatgaatgggctgaccatttgatcactgatgatgatcctttgatgtctactaactggaatgatctcttgcttgaaacaaattccaattcagattcaaaggaccagaagacactgcaaattccgcaacctcagattgttcagcagcaaccttctccgtctgtggaattgcgacctgttagcacaacatcttcaaacagcaataacggaacgggcaaggcacgaatgcgttggacgccagagcttcacgaggcttttgttgaggctgtcaacagtcttggcggtagtgaaagagctactcctaaaggggtactgaagattatgaaagttgaaggcttgactatatatcatgttaaaagccatttacagaaatataggacagctagatatcggccagaaccatcagaaactggttcgccagaaaggaagttgacaccgcttgaacatataacatctcttgatttgaaaggtgggataggtattacagaggctctacgacttcagatggaagtacagaagcaactccatgagcagctcgagattcaaagaaacctgcaactccgaatagaagaacaaggcaagtacctgcaaatgatgttcgagaagcaaaactctggtcttaccaaagggacagcctcaacatcagattccgcagccaaatctgaacaagaagacaagaagactgctgattcgaaggaggttccagaagaagaaaccaggaaatgtgaggaactagaatctccacagccaaagcgtcccaaaatcgataattga

SEQ ID NO: 84207 - protein, 409 aa, Arabidopsis thaliana
MEARPVHRSGSRDLTRTSSIPSTQKPSPVEDSFMRSDNNSQLMSRPLGQTYHLLSSSNGGAVGHICSSSSSGFATNLHYSTMVSHEKQQHYTGSSSNNAVQTPSNNDSAWCHDSLPGGFLDFHETNPAIQNNCQIEDGGIAAAFDDIQKRSDWHEWADHLITDDDPLMSTNWNDLLLETNSNSDSKDQKTLQIPQPQIVQQQPSPSVELRPVSTTSSNSNNGTGKARMRWTPELHEAFVEAVNSLGGSERATPKGVLKIMKVEGLTIYHVKSHLQKYRTARYRPEPSETGSPERKLTPLEHITSLDLKGGIGITEALRLQMEVQKQLHEQLEIQRNLQLRIEEQGKYLQMMFEKQNSGLTKGTASTSDSAAKSEQEDKKTADSKEVPEEETRKCEELESPQPKRPKIDN

SEQ ID NO: 84208 - DNA, 1242 bp, Arabidopsis thaliana
  CDS (1)..(1242)
atgactctggctaatgatttcggatattcgaccgctatgtcttcatcttattcagctcttcatactagtgtagaagacagataccacaagttgcctaactctttttgggtttcatcaggtcaggaactgatgaataaccctgtaccgtgtcagtcggtctctggtggcaattctggtggttatttgtttccttcttcctctggatactgcaatgtttcagctgtcttgcctcatggaaggaatttgcaaaaccagccacctgtttccaccgtgcctagagacagattggctatgcaggattgtcctttgatagctcaatcctcgttgattaatcatcaccctcaagagttcatagatccacttcatgagttctttgatttctctgatcatgttcctgttcagaatctacaagcagagagtagtggagtaagggtggactcatccgtggaacttcataagaaaagtgaatggcaagattgggcagatcagctgatttctgttgacgatggttctgagccaaattggtctgaacttcttggagattcaagttcccacaatccaaattcagagatacctacaccatttttggatgtaccaaggctagatataacagctaaccagcagcaacagatggtttcatcagaggaccagctcagcggcagaaactcatcatctagtgtagcaacatctaaacaacgtatgcgttggacaccagaacttcacgaggcattcgttgaagctgttaatcagcttggtggtagtgaacgagccacccctaaggctgttttgaagctcttgaataaccctggcttgaccatttatcatgtaaaaagccatttgcagaaatatagaacggcaaggtataaaccggagacttcggaagttacaggagaacctcaagagaagaagatgacatctattgaagatatcaaatctcttgacatgaaaacgagcgttgagatcacacaagctctacggttacaaatggaagtgcagaaacgtctccacgagcagctcgagatccaacggtcactgcagttacagattgaaaaacagggccggtacctacagatgatgttcgagaaacaacaaaagatacaagacaacaagagctcttcttcagaagcatcaccaaagcaatgcaatggttcatttgcagaagttgaagttggtcttgagacactaacaggggaccaaaatgaatctgcttcagcatcaaggaaacgtgtcagagaagattaa

SEQ ID NO: 84209 - protein, 413 aa, Arabidopsis thaliana
MTLANDFGYSTAMSSSYSALHTSVEDRYHKLPNSFWVSSGQELMNNPVPCQSVSGGNSGGYLFPSSSGYCNVSAVLPHGRNLQNQPPVSTVPRDRLAMQDCPLIAQSSLINHHPQEFIDPLHEFFDFSDHVPVQNLQAESSGVRVDSSVELHKKSEWQDWADQLISVDDGSEPNWSELLGDSSSHNPNSEIPTPFLDVPRLDITANQQQQMVSSEDQLSGRNSSSSVATSKQRMRWTPELHEAFVEAVNQLGGSERATPKAVLKLLNNPGLTIYHVKSHLQKYRTARYKPETSEVTGEPQEKKMTSIEDIKSLDMKTSVEITQALRLQMEVQKRLHEQLEIQRSLQLQIEKQGRYLQMMFEKQQKIQDNKSSSSEASPKQCNGSFAEVEVGLETLTGDQNESASASRKRVRED

SEQ ID NO: 84210 - DNA, 1113 bp, Arabidopsis thaliana
  CDS (1)..(1113)
atgaataaccctgtaccgtgtcagtcggtctctggtggcaattctggtggttatttgtttccttcttcctctggatactgcaatgtttcagctgtcttgcctcatggaaggaatttgcaaaaccagccacctgtttccaccgtgcctagagacagattggctatgcaggattgtcctttgatagctcaatcctcgttgattaatcatcaccctcaagagttcatagatccacttcatgagttctttgatttctctgatcatgttcctgttcagaatctacaagcagagagtagtggagtaagggtggactcatccgtggaacttcataagaaaagtgaatggcaagattgggcagatcagctgatttctgttgacgatggttctgagccaaattggtctgaacttcttggagattcaagttcccacaatccaaattcagagatacctacaccatttttggatgtaccaaggctagatataacagctaaccagcagcaacagatggtttcatcagaggaccagctcagcggcagaaactcatcatctagtgtagcaacatctaaacaacgtatgcgttggacaccagaacttcacgaggcattcgttgaagctgttaatcagcttggtggtagtgaacgagccacccctaaggctgttttgaagctcttgaataaccctggcttgaccatttatcatgtaaaaagccatttgcagaaatatagaacggcaaggtataaaccggagacttcggaagttacaggagaacctcaagagaagaagatgacatctattgaagatatcaaatctcttgacatgaaaacgagcgttgagatcacacaagctctacggttacaaatggaagtgcagaaacgtctccacgagcagctcgagatccaacggtcactgcagttacagattgaaaaacagggccggtacctacagatgatgttcgagaaacaacaaaagatacaagacaacaagagctcttcttcagaagcatcaccaaagcaatgcaatggttcatttgcagaagttgaagttggtcttgagacactaacaggggaccaaaatgaatctgcttcagcatcaaggaaacgtgtcagagaagattaa

SEQ ID NO: 84211 - protein, 370 aa, Arabidopsis thaliana
MNNPVPCQSVSGGNSGGYLFPSSSGYCNVSAVLPHGRNLQNQPPVSTVPRDRLAMQDCPLIAQSSLINHHPQEFIDPLHEFFDFSDHVPVQNLQAESSGVRVDSSVELHKKSEWQDWADQLISVDDGSEPNWSELLGDSSSHNPNSEIPTPFLDVPRLDITANQQQQMVSSEDQLSGRNSSSSVATSKQRMRWTPELHEAFVEAVNQLGGSERATPKAVLKLLNNPGLTIYHVKSHLQKYRTARYKPETSEVTGEPQEKKMTSIEDIKSLDMKTSVEITQALRLQMEVQKRLHEQLEIQRSLQLQIEKQGRYLQMMFEKQQKIQDNKSSSSEASPKQCNGSFAEVEVGLETLTGDQNESASASRKRVRED

SEQ ID NO: 84212 - DNA, 1350 bp, Arabidopsis thaliana
  CDS (1)..(1350)
atgtacatcaaagcaatcatgaacagacacaggcttctctcagcggcaacagatgaatgcaataaaaaacttggtcaagcttgctcttcttctttatctccagtccataactttctgaatgtccagccagaacaccggaaaactcctttcataaggtcacaatctccagattcacctggtcagctatggccaaagaatagttctcagagcaccttctctcggtcttccaccttttgcacaaacctctacttgtcatcatcttcaacctctgagactcagaaacatctaggaaacagtcttcctttcctccctgatccctcctcttacacccactcagcttctggtgtggagtctgcaagatctccatctattttcactgaggatttgggcaatcaatgtgatggaggcaactccgggtcgcttctcaaagacttccttaatctttctggagatgcttgttccgatggcgattttcatgattttggctgttcgaatgacagctattgcttatcagatcaaatggaattacagttcctgtctgatgaacttgagctggctatcacagaccgcgctgaaactcccaggcttgatgagatctatgaaacgccattggcgtcaaatccagtgacgagattgagtccaagccaaagctgtgttcctggagcaatgtctgtagacgtagtttcatctcacccttctccgggatcagcagccaatcaaaagtcgagaatgagatggactcctgagctccacgagtcttttgtaaaggcggtgatcaaacttgaagggcctgaaaaggccactccaaaggctgttaagaagctcatgaatgttgagggcttgacgatctatcatgtaaaaagccacttgcagaagtatagactagccaagtatatgccagagaaaaaagaagagaaaaggactgataactcagaagaaaagaaactggctttgagtaagagtgaagctgacgagaagaagaaaggggccatacaattaactgaagcactgcgtatgcagatggaagttcagaagcaattgcatgaacagctggaggtgcaacgggtgcttcagctacgaattgaagagcatgctaaatacttggaaaagatgttggaagaacaacgcaaaacaggaaggtggatttcttcttcttcgcagacagtgttatcacctagtgatgactctataccagattctcaaaacatgtccaaaaccaaagcatcttcgcctcagccgccattacctgcagagaacaaagcgtcggaaaccgaagacgataaatgtgaaagccctcagaaacgtcgcaggcttgagaacatagctgaatctgaagatcctaagaggtag

SEQ ID NO: 84213 - protein, 449 aa, Arabidopsis thaliana
MYIKAIMNRHRLLSAATDECNKKLGQACSSSLSPVHNFLNVQPEHRKTPFIRSQSPDSPGQLWPKNSSQSTFSRSSTFCTNLYLSSSSTSETQKHLGNSLPFLPDPSSYTHSASGVESARSPSIFTEDLGNQCDGGNSGSLLKDFLNLSGDACSDGDFHDFGCSNDSYCLSDQMELQFLSDELELAITDRAETPRLDEIYETPLASNPVTRLSPSQSCVPGAMSVDVVSSHPSPGSAANQKSRMRWTPELHESFVKAVIKLEGPEKATPKAVKKLMNVEGLTIYHVKSHLQKYRLAKYMPEKKEEKRTDNSEEKKLALSKSEADEKKKGAIQLTEALRMQMEVQKQLHEQLEVQRVLQLRIEEHAKYLEKMLEEQRKTGRWISSSSQTVLSPSDDSIPDSQNMSKTKASSPQPPLPAENKASETEDDKCESPQKRRRLENIAESEDPKR

SEQ ID NO: 84214 - DNA, 1404 bp, Oryza sativa subsp
  CDS (1)..(1404)
atgagcacacagagtgtcattgctgtaaagcaattcagtggccctgacaaaatcgcacaagcatacactgttccacagccatcagctcatgtgctctccaacgctaactatgactatgatctctgtggttcaacaaatagtacctcattatcatgtgctatccaatcctcaaacattaagaccgaatcaatcagttcatctagcctgccaaagatccttccatttagtactgactcaaatggtgaaagttcactttctcgcatgtcgcaagccgagttttcggacccaattttgtctagttcttctacattttgtacaagtctgtacacctcatcaccgatgaactctggttcatgccgaaaaaccggttatttgcctttcctgccacaacctcctaaatgtgagcagcagcagaattcagttgggcaatcatccagctctctgatgctccttgatgctgatctcagaaatagtggtcatgctgatgatgaacacacagatgacctcaaggactttcttaacctctcttcagattgtagcttccatgggaaatgcagtgccatggcttataatgagcagatggagtttcagttcttgtctgaacagctcggaattgcgatctcaaacaatgaggagagtcctcggttagatgacatatacgacagaccaccgcaacttatgtctcttccagtgtcatcttgctctgatcaggaggatctgcaggatgcaagatctcctgctaaagttcagttgagttcatctcggtcttcatctggaactgcatcatgtaacaaaccaagactgaggtggacaccggagctccacgagcgtttcgtagatgccgtgaacaagcttgaagggccagaaaaggcaactcccaagggtgttctgaagcttatgaaggtagagggcttgaccatctatcatataaagagccacttacagaagtatcggcttgcgaagtatcttccagagacaaaagaagacaagaagcaagaagaaaagaaaacaaaatcagtggctaatggaaatgatcatgcaaaaaagaagagtgctcaaatggcagaagctcttcggatgcaaatggaggtccagaaacaactccatgaacaactagaggtacaaaggcaattacagctgcgcatagaggaacacgcaagatatttgcagaagatattggaagaacaacagaaagcaagagaatccatatcctcaatgactagtacaacagaaggagaatctcctgaattcgcaccgatggagaaaaccgaggacaaagcagaaacctcttcagcacctttgtcaaagtgtagaattacagatactgatgcagaatgccattcaaaagttgataataaaaagacaaagcctcaggctgatcttgaaatggtgcatgacgaataa

SEQ ID NO: 84215 - protein, 467 aa, Oryza sativa subsp
MSTQSVIAVKQFSGPDKIAQAYTVPQPSAHVLSNANYDYDLCGSTNSTSLSCAIQSSNIKTESISSSSLPKILPFSTDSNGESSLSRMSQAEFSDPILSSSSTFCTSLYTSSPMNSGSCRKTGYLPFLPQPPKCEQQQNSVGQSSSSLMLLDADLRNSGHADDEHTDDLKDFLNLSSDCSFHGKCSAMAYNEQMEFQFLSEQLGIAISNNEESPRLDDIYDRPPQLMSLPVSSCSDQEDLQDARSPAKVQLSSSRSSSGTASCNKPRLRWTPELHERFVDAVNKLEGPEKATPKGVLKLMKVEGLTIYHIKSHLQKYRLAKYLPETKEDKKQEEKKTKSVANGNDHAKKKSAQMAEALRMQMEVQKQLHEQLEVQRQLQLRIEEHARYLQKILEEQQKARESISSMTSTTEGESPEFAPMEKTEDKAETSSAPLSKCRITDTDAECHSKVDNKKTKPQADLEMVHDE

SEQ ID NO: 84216 - DNA, 1380 bp, Oryza sativa subsp
  CDS (1)..(1380)
atggcggacaagggaggccgccccactgcagcattgaacggaggagatgtgtcagccctaggagaggagaagctttctttttttggaaaatcgagtcaacaaaagagaataagcaccaatcagctctacaattctggaattccggtgactgtgccatcgcctctgcctgctataccagctaccctggatgaaaacattcccaggattccagatgggcagaatgttccgcgggagagagaattgagaagcacacctatgccacctcatcagaatcagagtactgttgctcctcttcatgggcattttcagtccagtaccgggtctgttgggcctctgcgttcgtcccaggcgataaggttctcttcagtttcaagcaatgagcaatatacaaatgccaatccttacaattctcaaccgccgagtagtgggagttcttcaacgctcaattatggatcacaatatggaggctttgaaccttccttgactgattttccaagagatgctgggccgacgtggtgtcctgatccagttgatggcttgcttggatatacagatgatgtccctgctgggaacaatttgactgaaaacagttctattgcagctggtgatgaacttgccaagcaaagtgaatggtggaatgattttatgaattatgactggaaagatattgataacacagcttgtactgaaactcaaccacaggttggaccagctgcgcaatcatctgtcgcagttcaccaatcagctgcccaacaatcagtttcatctcaatcaggagaaccttctgcagttgctataccctcgccctctggtgcctccaatacctccaactccaagacacgaatgagatggactcctgaacttcatgagcgctttgtagatgctgtcaatctacttggtggcagtgaaaaagctactcccaagggtgtgttaaagctaatgaaggcagacaatttgaccatttatcatgttaaaagtcaccttcagaaatacagaacagctcgatacagaccagaattgtctgaaggttcttcagaaaagaaggcagcctcaaaagaggacataccatcaatagatctgaaaggagggaactttgatctcactgaggcattgcgtctccagttagaactccaaaagaggcttcatgaacagcttgagatccaaagaagtttgcagctgagaattgaggagcaagggaagtgccttcagatgatgctcgagcagcagtgcatacctgggacagacaaggcggtggatgcttcaacctcagcagaaggaacaaagccatcttctgatcttccagaatcttctgccgtgaaggatgttccagaaaacagtcagaacggaatagccaaacaaacaggcatgagaatccattaa

SEQ ID NO: 84217 - protein, 459 aa, Oryza sativa subsp
MADKGGRPTAALNGGDVSALGEEKLSFFGKSSQQKRISTNQLYNSGIPVTVPSPLPAIPATLDENIPRIPDGQNVPRERELRSTPMPPHQNQSTVAPLHGHFQSSTGSVGPLRSSQAIRFSSVSSNEQYTNANPYNSQPPSSGSSSTLNYGSQYGGFEPSLTDFPRDAGPTWCPDPVDGLLGYTDDVPAGNNLTENSSIAAGDELAKQSEWWNDFMNYDWKDIDNTACTETQPQVGPAAQSSVAVHQSAAQQSVSSQSGEPSAVAIPSPSGASNTSNSKTRMRWTPELHERFVDAVNLLGGSEKATPKGVLKLMKADNLTIYHVKSHLQKYRTARYRPELSEGSSEKKAASKEDIPSIDLKGGNFDLTEALRLQLELQKRLHEQLEIQRSLQLRIEEQGKCLQMMLEQQCIPGTDKAVDASTSAEGTKPSSDLPESSAVKDVPENSQNGIAKQTGMRIH

SEQ ID NO: 84218 - DNA, 1659 bp, Oryza sativa subsp
  CDS (1)..(1659)
atgcggcggagcggagccccgccacaagaaaattactcggagagccgcgtgcgtctagttcagataaacctcgcgtacagtgcattcatcccgacagattggaacaacttggagacagctgagtcaaggcctaaatccacgggattaaacaaggttcgagccttcgaggagccaatgaggcgagcatgttctgctgccccttcagggtttcagaagacgagcttgcgaattccatccccctccacccacgaagcaccaaccggcgcgcagcaaaagaccagaaaattaaagccaggagcagaaaacaaccaatcatatcctgttggagtgcgtctttacaaactagagctggagactaaaaagaaccagataagcaaagaaaatgatagcgaggatatcatgaacaccaagaagattaagctgcacgactgccacttcggctcgccgctatgtgacccttcgccggcgccgcacctgctgagctccgccgccgccgccgggctgtcgttccacccggggctcgtgagctcggcggcgcagcaccagcagcacggcgcgggcggctggctgcacgaggagtactacgcgccgaggtcgtcgccgccgtcgtcgcttctcgcgcagacctgcgtcggctccaacgcgaccgcgttctacgccgccgagaacctgccgcagttcgacttcccagctctcggtacggcggcggcggcggcggccaaggcgccgttccggtcgtcggagagcgagctgtaccggccggtcgacccgctgctcctccgtgcggaccactcggtgaggacgtactacgtccggccgcagaagcgggattccggcgagaggacaccattgccgccgccgtcgcagcaacagcatcaggacagaatccacgggctcttcgccggcgctcccaccactcggcttctcagcggcgaacccaaaatccactcgtttccacctcaagtggcggcgaagccgattctgccggcgatggatgcgccgagcctgcagaaccagatggagaatcagctgacaaggaactgcatcggcgcggcaactccggtgacccccaccggaaacctcgccggatcaggtgcgccgagcaagacgcggatcaggtggacgcaggacctgcacgagcggttcgtcgactgcgtcaatcagctcggcggcgcagacaaggcaactccgaaggggattctgaagctgatgaattcggatggcctgacgatctaccacatcaagagccatctccagaaatatcgcatagcgaagtacatgccagcgtcatctgaagggaagcaactggagaaaagagcaacaggaaatgacatgcagaatctggaccccaaaactggaatgcaaatcacggaagcactgcgtgttcagctcgacgtgcagaggcgcctccatgaacagctagagattcagagaaatctgcagctgaggatagaggagcaggggaagaggctgcagaagatgttcgaggaccagctgaaggcgagcaggagcgtgatggaaccgcaggagctggacgacgtcgtcgcattcgccgccggcgacggagacgacgacgcgttcgatgacgtcgacgtgcagctgctggccgtcgctggcagcggctatgacgacgccgggttccagtccaaaataagctag

SEQ ID NO: 84219 - protein, 552 aa, Oryza sativa subsp
MRRSGAPPQENYSESRVRLVQINLAYSAFIPTDWNNLETAESRPKSTGLNKVRAFEEPMRRACSAAPSGFQKTSLRIPSPSTHEAPTGAQQKTRKLKPGAENNQSYPVGVRLYKLELETKKNQISKENDSEDIMNTKKIKLHDCHFGSPLCDPSPAPHLLSSAAAAGLSFHPGLVSSAAQHQQHGAGGWLHEEYYAPRSSPPSSLLAQTCVGSNATAFYAAENLPQFDFPALGTAAAAAAKAPFRSSESELYRPVDPLLLRADHSVRTYYVRPQKRDSGERTPLPPPSQQQHQDRIHGLFAGAPTTRLLSGEPKIHSFPPQVAAKPILPAMDAPSLQNQMENQLTRNCIGAATPVTPTGNLAGSGAPSKTRIRWTQDLHERFVDCVNQLGGADKATPKGILKLMNSDGLTIYHIKSHLQKYRIAKYMPASSEGKQLEKRATGNDMQNLDPKTGMQITEALRVQLDVQRRLHEQLEIQRNLQLRIEEQGKRLQKMFEDQLKASRSVMEPQELDDVVAFAAGDGDDDAFDDVDVQLLAVAGSGYDDAGFQSKIS

SEQ ID NO: 84220 - DNA, 1524 bp, Oryza sativa subsp
  CDS (1)..(1524)
atggcggtgatgcggtcatactggtcgttgtcccacctcacctcgccggccatggtggacaagggaggccgccccactacagcattgaacggaggagtggtaggcgacgtatttcttggcagcgaggcacctgtggtgacttcgtcaatttcaaaatatgctggtctagtcttcggaggtgctcatagggatgtgtcagccctaggagaggagaagctttctttttttggaaaatcgagtcaacaaaagagaataagcaccaatcagctctacaattctggaattccggtgactgtgccatcgcctctgcctgctataccagctaccctggatgaaaacattcccaggattccagatgggcagaatgttccgcgggagagagaattgagaagcacacctatgccacctcatcagaatcagagtactgttgctcctcttcatgggcattttcagtccagtaccgggtctgttgggcctctgcgttcgtcccaggcgataaggttctcttcagtttcaagcaatgagcaatatacaaatgccaatccttacaattctcaaccgccgagtagtgggagttcttcaacgctcaattatggatcacaatatggaggctttgaaccttccttgactgattttccaagagatgctgggccgacgtggtgtcctgatccagttgatggcttgcttggatatacagatgatgtccctgctgggaacaatttgactgaaaacagttctattgcagctggtgatgaacttgccaagcaaagtgaatggtggaatgattttatgaattatgactggaaagatattgataacacagcttgtactgaaactcaaccacaggttggaccagctgcgcaatcatctgtcgcagttcaccaatcagctgcccaacaatcagtttcatctcaatcaggagaaccttctgcagttgctataccctcgccctctggtgcctccaatacctccaactccaagacacgaatgagatggactcctgaacttcatgagcgctttgtagatgctgtcaatctacttggtggcagtgaaaaagctactcccaagggtgtgttaaagctaatgaaggcagacaatttgaccatttatcatgttaaaagtcaccttcagaaatacagaacagctcgatacagaccagaattgtctgaaggttcttcagaaaagaaggcagcctcaaaagaggacataccatcaatagatctgaaaggagggaactttgatctcactgaggcattgcgtctccagttagaactccaaaagaggcttcatgaacagcttgagatccaaagaagtttgcagctgagaattgaggagcaagggaagtgccttcagatgatgctcgagcagcagtgcatacctgggacagacaaggcggtggatgcttcaacctcagcagaaggaacaaagccatcttctgatcttccagaatcttctgccgtgaaggatgttccagagaacagtcagaacggaatagccaaacaaacaggcatgagaatccattaa

SEQ ID NO: 84221 - protein, 507 aa, Oryza sativa subsp
MAVMRSYWSLSHLTSPAMVDKGGRPTTALNGGVVGDVFLGSEAPVVTSSISKYAGLVFGGAHRDVSALGEEKLSFFGKSSQQKRISTNQLYNSGIPVTVPSPLPAIPATLDENIPRIPDGQNVPRERELRSTPMPPHQNQSTVAPLHGHFQSSTGSVGPLRSSQAIRFSSVSSNEQYTNANPYNSQPPSSGSSSTLNYGSQYGGFEPSLTDFPRDAGPTWCPDPVDGLLGYTDDVPAGNNLTENSSIAAGDELAKQSEWWNDFMNYDWKDIDNTACTETQPQVGPAAQSSVAVHQSAAQQSVSSQSGEPSAVAIPSPSGASNTSNSKTRMRWTPELHERFVDAVNLLGGSEKATPKGVLKLMKADNLTIYHVKSHLQKYRTARYRPELSEGSSEKKAASKEDIPSIDLKGGNFDLTEALRLQLELQKRLHEQLEIQRSLQLRIEEQGKCLQMMLEQQCIPGTDKAVDASTSAEGTKPSSDLPESSAVKDVPENSQNGIAKQTGMRIH

SEQ ID NO: 84222 - DNA, 1167 bp, Medicago truncatula
  CDS (1)..(1167)
atgtcttcgtctattccatcttcctcgatgcaggctgcatcaatcaattccaatatcagaagtgttggacacatgttttcaaccccttctgaacagcctgataacgtccatttttcctctgcttcagaaatacattctatgacattccctcaagaaagtgatgttatgtcctggggaactgatccatttgaagatattcttcaatttcatgataatgttcccacccagaatgaccatgtggaatacaatggttctgaagtcttgggtggaaatgccaaaacaacggatttcaaggagtgggttgatcagttgatgtcagtcgatgatgattctattcagcctaattggaatgaacttctcggcgacaataatatggcagaaccaaaatcacaggatgcacaaatgtccccttctctcttgatgcaagagactcaggtttcacagcagcagtatataccatcactaccatctaaagaagttaatgatcttcccaattcttctgtgtcgactacatcgcaatctaagcctagaatgcgttggactccagaacttcatgaggcctttgtggaagcagtcaatcagcttggtggtagcgagaaggctactccaaagggtgtcttgaacttgatgaaagttgagggccttaccatctatcatgtgaaaagccatctgcagaaatatagaactgccagatacaaaccagaatcatcagaaggaattccagagaagaagttgacttcaatcgacgaaatgccgtctatagacttaaaaacgcctaaggggattacagaagcattgcggctgcagatggaactccagaagcggcttcatgaacaacttgagattcaaagaaatttacagattcagattgagaaccaagggaagcatctacagatgatgtttgagcaacagatgaagtcggatgagccttctgctccactatcaagtgccgcggtaccttctccagttgaaaatttagaaaacacaaatgaaggtcacgaaaaaattggaatcaatggcagcgcttcagagaacatgcctgaaggaagttcccagaatacaagcacagagcaaaagggagatgatgctaaagctaccggtgaacttgagctgggagaagaccaacttaccgcaccacccacaaaacgagtgaagactgacaagtag

SEQ ID NO: 84223 - protein, 388 aa, Medicago truncatula
MSSSIPSSSMQAASINSNIRSVGHMFSTPSEQPDNVHFSSASEIHSMTFPQESDVMSWGTDPFEDILQFHDNVPTQNDHVEYNGSEVLGGNAKTTDFKEWVDQLMSVDDDSIQPNWNELLGDNNMAEPKSQDAQMSPSLLMQETQVSQQQYIPSLPSKEVNDLPNSSVSTTSQSKPRMRWTPELHEAFVEAVNQLGGSEKATPKGVLNLMKVEGLTIYHVKSHLQKYRTARYKPESSEGIPEKKLTSIDEMPSIDLKTPKGITEALRLQMELQKRLHEQLEIQRNLQIQIENQGKHLQMMFEQQMKSDEPSAPLSSAAVPSPVENLENTNEGHEKIGINGSASENMPEGSSQNTSTEQKGDDAKATGELELGEDQLTAPPTKRVKTDK

SEQ ID NO: 84224 - DNA, 1224 bp, Oryza sativa subsp
  CDS (1)..(1224)
atgaatcagcttcgcaatggaaaagttccccaatatctttcgccagctataactgtagtaccagaactctctgaagttacatttcctagtttttcagagcatagaccatcctatatcgaaagggagcagtgtggtagttctatcaactcatttgatgcttctactccaatgtgtatgttagcttccaactttacatcagatctttatatcaacaaaagtgaatcacctaacggcaagctttcttctgaatcatatgctattgatacctctggatgtgattcttccttgccgccaacacagtcattatacaagggtaatccaagttctttaaggatggtttatcctaaagtatctgaacagaatagttggagtcaagaaccactgcctggaccatttgtttgtccaactagtgttgatttcttcgatcaacaagatatgactatttttgaccaacaaatacaagataacattgcagcaagtcctagcaccaaccttgcaaagcaaaatgagtggttctcatctggcacttccttgcagtatttggaaagttcggtgtctgctggttctgtgctgaaggctgttgatgcgacaagtacaacaccttcaaattatttgcattgtcatgcacagagaaatacatcaaatcctcccaacttcaatgaaatttgttctggtaatatcgcttcttcaaacattgctccaaccaaaccaaggatgcgatggacacctgagctccatgagcggtttgttgatgctgttaacaagcttggtggaagtgaaaaagcaactccaaaagctgtccagaaagttatgaaggttgacggcttaactatataccatgtaaaaagccatctacagaagtatcgcacagttcatcatcgacctcaactatctgatggtgaatctgcgaaaagtggccaaacggatgaagtttcttctcagcccttgaaaggcatggaaaccacctgtgaaggattaagggtccagattggcttgcagaaacaacttcacgaacaacttgagatccaaagaaagctgcagctgcaagtagaagaacacagcaagtacctcgccatgataatcgagaagcagagcgagagcctaagacaactgggagcattaccaagatctctagatgcacccactcaggttttggataacagggaaacgtgcgagggacaaacaggagatgctgattcagcagagcaaaaacctgagaaatga

SEQ ID NO: 84225 - protein, 407 aa, Oryza sativa subsp
MNQLRNGKVPQYLSPAITVVPELSEVTFPSFSEHRPSYIEREQCGSSINSFDASTPMCMLASNFTSDLYINKSESPNGKLSSESYAIDTSGCDSSLPPTQSLYKGNPSSLRMVYPKVSEQNSWSQEPLPGPFVCPTSVDFFDQQDMTIFDQQIQDNIAASPSTNLAKQNEWFSSGTSLQYLESSVSAGSVLKAVDATSTTPSNYLHCHAQRNTSNPPNFNEICSGNIASSNIAPTKPRMRWTPELHERFVDAVNKLGGSEKATPKAVQKVMKVDGLTIYHVKSHLQKYRTVHHRPQLSDGESAKSGQTDEVSSQPLKGMETTCEGLRVQIGLQKQLHEQLEIQRKLQLQVEEHSKYLAMIIEKQSESLRQLGALPRSLDAPTQVLDNRETCEGQTGDADSAEQKPEK

SEQ ID NO: 84226 - DNA, 1209 bp, Arabidopsis thaliana
  CDS (1)..(1209)
atgaataacaaccccgtcccctgtcaggtgtttcctctggtctctggtggtagttctggtgggaatttgttttcatcttcttccggattctgcaatggtgtctatgtttcatcttcctcccaggcacggccatctgtttctaccgtgccaagagacagaattactgttgctcacgtctctggtgaagggcagaggcaggaatgccctgtggaaacacattccttgcaattgatcaatcaacctcaagaacagaaaattatgacttggtcttcagaccagattcggggcttcttcgattttcctgttccagatccacaagcagcgagcagcagaactatggtttcatccaaggaagtgctttcaaaatgcgaatggccagactgggcggatcagttgatctctgatgatagtcttgaaccaaattggtcggagcttctaggtgatcctaatgtactcaatctatattcaaagatagaaacacagtcttctgatatagcaaggcaagagatcgtctttagaaatcagcatcaggtggatccatcaatggagccgtttaatgccaaaagcccaccagctagttcaatgacatctaagcaaagaatgcgttggacaccagaacttcatgaagcatttgtcgaagctatcaatcagctcggtggtagtgaacgagccacccctaaggctgttttgaagctcatcaatagccctgggttgaccgtttatcatgtcaaaagccatttgcagaaatacagaactgcaaggtataaaccagagctttccaaagatacagaagaacctctagtaaagaatttgaaaaccattgaagatatcaaatctcttgacttgaagacgagcattgaaatcactgaagctctccggttacagatgaaagttcaaaaacaactccacgagcaacttgagatccaaagatcactgcagttacaaatcgaagaacaaggtcggtatcttcagatgatgattgagaaacaacagaagatgcaagagaacaaaaaagactctacttcctcatcatcaatgccagaagctgacccttcagctccatcaccaaacctttcacaacctttcctccataaagcaaccaattcagaaccatcaataactcagaaactgcagaatggttctagcacaatggatcaaagtgaatctacttctgggactagtaatagaaaacgggttagagaagattag

SEQ ID NO: 84227 - protein, 402 aa, Arabidopsis thaliana
MNNNPVPCQVFPLVSGGSSGGNLFSSSSGFCNGVYVSSSSQARPSVSTVPRDRITVAHVSGEGQRQECPVETHSLQLINQPQEQKIMTWSSDQIRGFFDFPVPDPQAASSRTMVSSKEVLSKCEWPDWADQLISDDSLEPNWSELLGDPNVLNLYSKIETQSSDIARQEIVFRNQHQVDPSMEPFNAKSPPASSMTSKQRMRWTPELHEAFVEAINQLGGSERATPKAVLKLINSPGLTVYHVKSHLQKYRTARYKPELSKDTEEPLVKNLKTIEDIKSLDLKTSIEITEALRLQMKVQKQLHEQLEIQRSLQLQIEEQGRYLQMMIEKQQKMQENKKDSTSSSSMPEADPSAPSPNLSQPFLHKATNSEPSITQKLQNGSSTMDQSESTSGTSNRKRVRED

SEQ ID NO: 84228 - DNA, 1242 bp, Arabidopsis thaliana
  CDS (1)..(1242)
atgactctggctaatgatttcggatattcgaccgctatgtcttcatcttattcagctcttcatactagtgtagaacacagataccacaagttgcctaactctttttgggtttcatcaggtcaggaactgatgaataaccctgtaccgtgtcagtcggtctctggtggcaattctggtggttatttgtttccttcttcctctggatactgcaatgtttcagctgtcttgcctcatggaaggaatttgcaaaaccagccacctgtttccaccgtgcctagagacagattggctatgcaggattgtcctttgatagctcaatcctcgttgattaatcatcaccctcaagagttcatagatccacttcatgagttctttgatttctctgatcatgttcctgttcagaatctacaagcagagagtagtggagtaagggtggactcatccgtggaacttcataagaaaagtgaatggcaagattgggcagatcagctgatttctgttgacgatggttctgagccaaattggtctgaacttcttggagattcaagttcccacaatccaaattcagagatacctacaccatttttggatgtaccaaggctagatataacagctaaccagcagcaacagatggtttcatcagaggaccagctcagcggcagaaactcatcatctagtgtagcaacatctaaacaacgtatgcgttggacaccagaacttcacgaggcattcgttgaagctgttaatcagcttggtggtagtgaacgagccacccctaaggctgttttgaagctcttgaataaccctggcttgaccatttatcatgtaaaaagccatttgcagaaatatagaacggcaaggtataaaccggagacttcggaagttacaggagaacctcaagagaagaagatgacatctattgaagatatcaaatctcttgacatgaaaacgagcgttgagatcacacaagctctacggttacaaatggaagtgcagaaacgtctccacgagcagctcgagatccaacggtcactgcagttacagattgaaaaacagggccggtacctacagatgatgttcgagaaacaacaaaagatacaagacaacaagagctcttcttcagaagcatcaccaaagcaatgcaatggttcatttgcagaagttgaagttggtcttgagacactaacaggggaccaaaatgaatctgcttcagcatcaaggaaacgtgtcagagaagattaa

SEQ ID NO: 84229 - protein, 413 aa, Arabidopsis thaliana
MTLANDFGYSTAMSSSYSALHTSVEHRYHKLPNSFWVSSGQELMNNPVPCQSVSGGNSGGYLFPSSSGYCNVSAVLPHGRNLQNQPPVSTVPRDRLAMQDCPLIAQSSLINHHPQEFIDPLHEFFDFSDHVPVQNLQAESSGVRVDSSVELHKKSEWQDWADQLISVDDGSEPNWSELLGDSSSHNPNSEIPTPFLDVPRLDITANQQQQMVSSEDQLSGRNSSSSVATSKQRMRWTPELHEAFVEAVNQLGGSERATPKAVLKLLNNPGLTIYHVKSHLQKYRTARYKPETSEVTGEPQEKKMTSIEDIKSLDMKTSVEITQALRLQMEVQKRLHEQLEIQRSLQLQIEKQGRYLQMMFEKQQKIQDNKSSSSEASPKQCNGSFAEVEVGLETLTGDQNESASASRKRVRED

SEQ ID NO: 84230 - DNA, 1332 bp, Arabidopsis thaliana
  CDS (1)..(1332)
atgaacagacacaggcttctctcagcggcaacagatgaatgcaataaaaaacttggtcaagcttgctcttcttctttatctccagtccataactttctgaatgtccagccagaacaccggaaaactcctttcataaggtcacaatctccagattcacctggtcagctatggccaaagaatagttctcagagcaccttctctcggtcttccaccttttgcacaaacctctacttgtcatcatcttcaacctctgagactcagaaacatctaggaaacagtcttcctttcctccctgatccctcctcttacacccactcagcttctggtgtggagtctgcaagatctccatctattttcactgaggatttgggcaatcaatgtgatggaggcaactccgggtcgcttctcaaagacttccttaatctttctggagatgcttgttccgatggcgattttcatgattttggctgttcgaatgacagctattgcttatcagatcaaatggaattacagttcctgtctgatgaacttgagctggctatcacagaccgcgctgaaactcccaggcttgatgagatctatgaaacgccattggcgtcaaatccagtgacgagattgagtccaagccaaagctgtgttcctggagcaatgtctgtagacgtagtttcatctcacccttctccgggatcagcagccaatcaaaagtcgagaatgagatggactcctgagctccacgagtcttttgtaaaggcggtgatcaaacttgaagggcctgaaaaggccactccaaaggctgttaagaagctcatgaatgttgagggcttgacgatctatcatgtaaaaagccacttgcagaagtatagactagccaagtatatgccagagaaaaaagaagagaaaaggactgataactcagaagaaaagaaactggctttgagtaagagtgaagctgacgagaagaagaaaggggccatacaattaactgaagcactgcgtatgcagatggaagttcagaagcaattgcatgaacagcaggaggtgcaacgggtgcttcagctacgaattgaagagcatgctaaatacttggaaaagatgttggaagaacaacgcaaaacaggaaggtggatttcttcttcttcgcagacagtgttatcacctagtgatgactctataccagattctcaaaacatgtccaaaaccaaagcatcttcgcctcagccgccattacctgcagagaacaaagcgtcggaaaccgaagacgataaatgtgaaagccctcagaaacgtcgcaggcttgagaacatagctgaatctgaagatcctaagaggtag

SEQ ID NO: 84231 - protein, 443 aa, Arabidopsis thaliana
MNRHRLLSAATDECNKKLGQACSSSLSPVHNFLNVQPEHRKTPFIRSQSPDSPGQLWPKNSSQSTFSRSSTFCTNLYLSSSSTSETQKHLGNSLPFLPDPSSYTHSASGVESARSPSIFTEDLGNQCDGGNSGSLLKDFLNLSGDACSDGDFHDFGCSNDSYCLSDQMELQFLSDELELAITDRAETPRLDEIYETPLASNPVTRLSPSQSCVPGAMSVDVVSSHPSPGSAANQKSRMRWTPELHESFVKAVIKLEGPEKATPKAVKKLMNVEGLTIYHVKSHLQKYRLAKYMPEKKEEKRTDNSEEKKLALSKSEADEKKKGAIQLTEALRMQMEVQKQLHEQQEVQRVLQLRIEEHAKYLEKMLEEQRKTGRWISSSSQTVLSPSDDSIPDSQNMSKTKASSPQPPLPAENKASETEDDKCESPQKRRRLENIAESEDPKR

SEQ ID NO: 84232 - DNA, 1665 bp, Arabidopsis thaliana
  CDS (1)..(1665)
atgtacatcaaagcaatcatgaacagacacaggcttctctcagcggcaacagatgaatgcaataaaaaacttggtcaagcttgctcttcttctttatctccagtccataactttctgaatgtccagccagaacaccggaaaactcctttcataaggtcacaatctccagattcacctggtcagctatggccaaagaatagttctcagagcaccttctctcggtcttccaccttttgcacaaacctctacttgtcatcatcttcaacctctgagactcagaaacatctaggaaacagtcttcctttcctccctgatccctcctcttacacccactcagcttctggtgtggagtctgcaagatctccatctattttcactgaggatttgggcaatcaatgtgatggaggcaactccgggtcgcttctcaaagacttccttaatctttctggagatgcttgttccgatggcgattttcatgattttggctgttcgaatgacagctattgcttatcagatcaaatggaattacagttcctgtctgatgaacttgagctggctatcacagaccgcgctgaaactcccaggcttgatgagatctatgaaacgccattggcgtcaaatccagtgacgagattgagtccaagccaaagctgtgttcctggagcaatgtctgtagacgtagtttcatctcacccttctccgggatcagcagccaatcaaaagtcgagaatgagatggactcctgagctccacgagtcttttgtaaaggcggtgatcaaacttgaagggcctgaaaaggccactccaaaggctgttaagaagctcatgaatgttgagggcttgacgatctatcatgtaaaaagccacttgcagaagtatagactagccaagtatatgccagagaaaaaagaagagaaaaggactgataactcagaagaaaagaaactggctttgagtaagagtgaagctgacgagaagaagaaaggggccatacaattaactgaagcactgcgtatgcagatggaagttcagaagcaattgcatgaacagctggaggtgcaacgggtgcttcagctacgaattgaagagcatgctaaatacttggaaaagatgttggaagaacaacgcaaaacaggaaggtggatttcttcttcttcgcagacagtgttatcacctagtgatgactctataccagattctcaaaacatgtccaaaaccaaagcatcttcgcctcagccgccattacctgcagagaacaaagcgtcggaaaccgaagacgataaatgtgaaagccctcagaaacgtcgcaggcttgagaacatagctgaatctgaagatcctaagagatctttgtcagaaacgtgtaaacttattacggatattgaggatgtcactgccttcactgtgagaaaagaatctttaattctgtgtttgtgtgtgtataggtcactgaccttcatgcatacaattacttacgggaagcaaaacaacttgagcaaaattcttcactctcatcagtcatcactctctctctctcttggaaaagtcaaaatcaagggtttcgtcgtcgctttgactggcttggactcgcttggtggggttttctgtaaaaaagttgtttgctttgatcttctgtgttacaatggagaaaatttctctgaatga

SEQ ID NO: 84233 - protein, 554 aa, Arabidopsis thaliana
MYIKAIMNRHRLLSAATDECNKKLGQACSSSLSPVHNFLNVQPEHRKTPFIRSQSPDSPGQLWPKNSSQSTFSRSSTFCTNLYLSSSSTSETQKHLGNSLPFLPDPSSYTHSASGVESARSPSIFTEDLGNQCDGGNSGSLLKDFLNLSGDACSDGDFHDFGCSNDSYCLSDQMELQFLSDELELAITDRAETPRLDEIYETPLASNPVTRLSPSQSCVPGAMSVDVVSSHPSPGSAANQKSRMRWTPELHESFVKAVIKLEGPEKATPKAVKKLMNVEGLTIYHVKSHLQKYRLAKYMPEKKEEKRTDNSEEKKLALSKSEADEKKKGAIQLTEALRMQMEVQKQLHEQLEVQRVLQLRIEEHAKYLEKMLEEQRKTGRWISSSSQTVLSPSDDSIPDSQNMSKTKASSPQPPLPAENKASETEDDKCESPQKRRRLENIAESEDPKRSLSETCKLITDIEDVTAFTVRKESLILCLCVYRSLTFMHTITYGKQNNLSKILHSHQSSLSLSLGKVKIKGFVVALTGLDSLGGVFCKKVVCFDLLCYNGENFSE

SEQ ID NO: 84234 - DNA, 1269 bp, Arabidopsis thaliana
  CDS (1)..(1269)
atggaggctcgtccagttcatagatcaggttcgagagacctcacacgcacttcttcaatcccatctacacaaaaaccttcaccagtagaagatagtttcatgagatcagataacaacagtcagttaatgtctagaccattaggacaaacctaccatttactttcatctagtaacggtggagctgttggacatatatgttcttcttcatcatctggttttgcaaccaatctccattactcaactatggtatctcatgagaaacaacaacactacacaggaagcagcagtaataatgctgtgcagacaccaagcaacaacgatagtgcttggtgtcatgattcattgccaggagggtttcttgacttccatgaaaccaacccggcgattcaaaacaactgtcagattgaggatggtggcattgcggctgcttttgatgacattcaaaaacgaagtgattggcatgaatgggctgaccatttgatcactgatgatgatcctttgatgtctactaactggaatgatctcttgcttgaaacaaattccaattcagattcaaaggaccagaagacactgcaaattccgcaacctcagattgttcagcagcaaccttctccgtctgtggaattgcgacctgttagcacaacatcttcaaacagcaataacggaacgggcaaggcacgaatgcgttggacgccagagcttcacgaggcttttgttgaggctgtcaacagtcttggcggtagtgaaagagctactcctaaaggggtactgaagattatgaaagttgaaggcttgactatatatcatgttaaaagccatttacagaaatataggacagctagatatcggccagaaccatcagaaactgaattcaatgtaaaaactaaagtttctttgatcactacaggttcgccagaaaggaagttgacaccgcttgaacatataacatctcttgatttgaaaggtgggataggtattacagaggctctacgacttcagatggaagtacagaagcaactccatgagcagctcgagattcaaagaaacctgcaactccgaatagaagaacaaggcaagtacctgcaaatgatgttcgagaagcaaaactctggtcttaccaaagggacagcctcaacatcagattccgcagccaaatctgaacaagaagacaagaagactgctgattcgaaggaggttccagaagaagaaaccaggaaatgtgaggaactagaatctccacagccaaagcgtcccaaaatcgataattga

SEQ ID NO: 84235 - protein, 422 aa, Arabidopsis thaliana
MEARPVHRSGSRDLTRTSSIPSTQKPSPVEDSFMRSDNNSQLMSRPLGQTYHLLSSSNGGAVGHICSSSSSGFATNLHYSTMVSHEKQQHYTGSSSNNAVQTPSNNDSAWCHDSLPGGFLDFHETNPAIQNNCQIEDGGIAAAFDDIQKRSDWHEWADHLITDDDPLMSTNWNDLLLETNSNSDSKDQKTLQIPQPQIVQQQPSPSVELRPVSTTSSNSNNGTGKARMRWTPELHEAFVEAVNSLGGSERATPKGVLKIMKVEGLTIYHVKSHLQKYRTARYRPEPSETEFNVKTKVSLITTGSPERKLTPLEHITSLDLKGGIGITEALRLQMEVQKQLHEQLEIQRNLQLRIEEQGKYLQMMFEKQNSGLTKGTASTSDSAAKSEQEDKKTADSKEVPEEETRKCEELESPQPKRPKIDN

SEQ ID NO: 84236 - DNA, 1413 bp, Mesembryanthemum crystallinum
  CDS (1)..(1413)
atgaatatgcgtcctgctttaccaatgcagacatcaggtgggaattgtttcaacgagttgaaggtttctggaccatactcttctcagctaccagttctgcctaatccattagaagattttccaaaatcaccagacccatttgctgtgtcctcatctagggaaatgattccaaaccccttacaaatacaggctaatcctatggtttctcactttgggtcctctcacaatagttctacttatgcgtctggattcccgacagatctgcactttccgtctttctcacctcgtgaaaggcaatctcagaattctcctttgggaggtggagttgcttttccgccaagtcagaatacctctccagatgttcaatctgctgggtttatcaattatcaaaaagaagatgatgacaattcttggagtactggtcatctccaggatttacttgattttcctgaaggcattcccgttagtaatggtcaagtgggaaccagtacagaagtaatgtcaaatgacaaccatgtcaagagaattggttggagggagttgacagaagatctttatgctgactccatagagcccaactggaacgactttcttgctgattcaaatgtggcagaccagcagccaaaggtaacccaaccatcttctgatgttagagtgcatcagccgctaattcagcagcagctttctttaccacctagagaagtgtctgctgctgctaatcagacatctgctgctgctaatcagacatctgctgctcattcaaataggccccgcatgcgttggacaccggaacttcatgaagcctttgtggatgctgtcaatcagcttggcggtagtgaaagagctactccaaagggtgttctaaggcacatgaatgtcgaaggcttaactatctatcatgtgaagagccacctacagaaatataggaccgcaagggttagaccagaatcatcagaaggaaattcagagagaagagctagttctgttgacccggtttcatctgtagacttgaaaacgagcgttacaattactgaggcattaagaatgcaaatggaagttcagaagcagcttcatgaacagcttgagatacaacgaaaactccagttacaaatcgaagagcaggggaaatacctactacaaatgctagagaatcagaacaaagtggaaaaggaaaaattgaaccctgatggctcctctgctcataatgacaagtcagagggctcccagcctgaaccttcccgagaaggggcggtcattagtatttcaagccaaggtccgggagagagctctcatggatcgaaagggaagcaaaaggccccagaagccgacaccactggggaccaccaccttgaagacggaggttcaaaccctccacccatgaagcgagcaagaacagatgattcatttctttag

SEQ ID NO: 84237 - protein, 470 aa, Mesembryanthemum crystallinum
MNMRPALPMQTSGGNCFNELKVSGPYSSQLPVLPNPLEDFPKSPDPFAVSSSREMIPNPLQIQANPMVSHFGSSHNSSTYASGFPTDLHFPSFSPRERQSQNSPLGGGVAFPPSQNTSPDVQSAGFINYQKEDDDNSWSTGHLQDLLDFPEGIPVSNGQVGTSTEVMSNDNHVKRIGWRELTEDLYADSIEPNWNDFLADSNVADQQPKVTQPSSDVRVHQPLIQQQLSLPPREVSAAANQTSAAANQTSAAHSNRPRMRWTPELHEAFVDAVNQLGGSERATPKGVLRHMNVEGLTIYHVKSHLQKYRTARVRPESSEGNSERRASSVDPVSSVDLKTSVTITEALRMQMEVQKQLHEQLEIQRKLQLQIEEQGKYLLQMLENQNKVEKEKLNPDGSSAHNDKSEGSQPEPSREGAVISISSQGPGESSHGSKGKQKAPEADTTGDHHLEDGGSNPPPMKRARTDDSFL

SEQ ID NO: 84238 - DNA, 1317 bp, Arabidopsis thaliana
  CDS (1)..(1317)
atgacacttgctagcgattttggttttccatccgctatatcttcatcttttacaattctagaagagagataccacaataactttcctaacactttgtgtgtttcatcaggacaggaatcgatgaataacaaccccgtcccctgtcaggtgtttcctctggtctctggtggtagttctggtgggaatttgttttcatcttcttccggattctgcaatggtgtctatgtttcatcttcctcccaggcacggccatctgtttctaccgtgccaagagacagaattactgttgctcacgtctctggtgaagggcagaggcaggaatgccctgtggaaacacattccttgcaattgatcaatcaacctcaagaacagaaaattatgacttggtcttcagaccagattcggggcttcttcgattttcctgttccagatccacaagcagcgagcagcagaactatggtttcatccaaggaagtgctttcaaaatgcgaatggccagactgggcggatcagttgatctctgatgatagtcttgaaccaaattggtcggagcttctaggtgatcctaatgtactcaatctatattcaaaggttcaaacacagtcttctgatatagcaaggcaagagatcgtctttagaaatcagcatcaggtggatccatcaatggagccgtttaatgccaaaagcccaccagctagttcaatgacatctaagcaaagaatgcgttggacaccagaacttcatgaagcatttgtcgaagctatcaatcagctcggtggtagtgaacgagccacccctaaggctgttttgaagctcatcaatagccctgggttgaccgtttatcatgtcaaaagccatttgcagaaatacagaactgcaaggtataaaccagagctttccaaagatacagtaaagaatttgaaaaccattgaagatatcaaatctcttgacttgaagacgagcattgaaatcactgaagctctccggttacagatgaaagttcaaaaacaactccacgagcaacttgagatccaaagatcactgcagttacaaatcgaagaacaaggtcggtatcttcagatgatgattgagaaacaacagaagatgcaagagaacaaaaaagactctacttcctcatcatcaatgccagaagctgacccttcagctccatcaccaaacctttcacaacctttcctccataaagcaaccaattcagaaccatcaataactcagaaactgcagaatggttctagcacaatggatcaaagtgaatctacttctgggactagtaatagaaaacgggttagagaagattag

SEQ ID NO: 84239 - protein, 438 aa, Arabidopsis thaliana
MTLASDFGFPSAISSSFTILEERYHNNFPNTLCVSSGQESMNNNPVPCQVFPLVSGGSSGGNLFSSSSGFCNGVYVSSSSQARPSVSTVPRDRITVAHVSGEGQRQECPVETHSLQLINQPQEQKIMTWSSDQIRGFFDFPVPDPQAASSRTMVSSKEVLSKCEWPDWADQLISDDSLEPNWSELLGDPNVLNLYSKVQTQSSDIARQEIVFRNQHQVDPSMEPFNAKSPPASSMTSKQRMRWTPELHEAFVEAINQLGGSERATPKAVLKLINSPGLTVYHVKSHLQKYRTARYKPELSKDTVKNLKTIEDIKSLDLKTSIEITEALRLQMKVQKQLHEQLEIQRSLQLQIEEQGRYLQMMIEKQQKMQENKKDSTSSSSMPEADPSAPSPNLSQPFLHKATNSEPSITQKLQNGSSTMDQSESTSGTSNRKRVRED

SEQ ID NO: 84240 - DNA, 1287 bp, Oryza sativa
  CDS (1)..(1287)
atgtcatcctccttgcctattctaccgaaatctttgaaagatatcccaagatcccataatacccagaatattctgatgccagggcaactgccaaatgattctatgcctttgcaccagagtgcaactcaatcttctatttcgcacccaagagccagtgttgtcagatcatcatattcagcaatgttaggatatgctgctaacccaattgattctgtgtctagccatgaggggcattttatggctgctccctttatttctcagtcgtcgaatgctgaaatgctccagtatttatgtaataataatacccatgggggacacactgtgccaacctttttcccagctcctgcctgtggcgcgccagattacatggatactataactgtccctgataatcacacccagagcggctcctctactgttacatctgatgctgctaaacaaaatgaatggtgggcagatataatgaatgatgactggaaagatattctagatgcaacagctactgattctcagtcaaagtccatggcccaaccttccaattctgctgcatcacagcctgctttcaatcagtcaacttcatcccatagtggcgatatttgtcctgtcacaagtcctcctcccaacaacagcaatgcctctgcaagtaaacaacggatgagatggaccccggaattgcatgaatcttttgtccatgctgtaaataagcttggtggtagtgaaaaagctactccaaaaggtgtgctcaagcttatgaaagttgatggtttgacaatctatcatgttaagagtcatctgcagaagtaccgcacagctcgctacaagccagacctatcagaaggtaaaacacaagaagggaaaactaccgatgagttgtctttggacctgaaagcgagcatggatcttactgaagcactgcgccttcagatggaagttcagaagcgccttcatgaacaactcgagattcagaggaaattgcagcttcgaattgaagaacaagggaaatatctgcagaagatgtttgaaaagcaatgtaaatccagcacacagagtgtgcaggatccatcgtctggagatacagcaactccatctgagccaagcaattctgtagacaaggacagtgaggctgccttggacccaaacagaataggagacaaccaccctaaaaattctaccaatgtaggtgccaacctgaaaactgcagcaaccgagtcccctgattccccagtaattgcaactgatggatcggagctcccccaagagaagcgtcgtagagtgcatgaatcttga

SEQ ID NO: 84241 - protein, 428 aa, Oryza sativa
MSSSLPILPKSLKDIPRSHNTQNILMPGQLPNDSMPLHQSATQSSISHPRASVVRSSYSAMLGYAANPIDSVSSHEGHFMAAPFISQSSNAEMLQYLCNNNTHGGHTVPTFFPAPACGAPDYMDTITVPDNHTQSGSSTVTSDAAKQNEWWADIMNDDWKDILDATATDSQSKSMAQPSNSAASQPAFNQSTSSHSGDICPVTSPPPNNSNASASKQRMRWTPELHESFVHAVNKLGGSEKATPKGVLKLMKVDGLTIYHVKSHLQKYRTARYKPDLSEGKTQEGKTTDELSLDLKASMDLTEALRLQMEVQKRLHEQLEIQRKLQLRIEEQGKYLQKMFEKQCKSSTQSVQDPSSGDTATPSEPSNSVDKDSEAALDPNRIGDNHPKNSTNVGANLKTAATESPDSPVIATDGSELPQEKRRRVHES

SEQ ID NO: 84242 - DNA, 1440 bp, Oryza sativa
  CDS (1)..(1440)
atgagctcccagagtgttgttgcagtgaagcagattactgctccggacaaaatagtggaaacctgtccatccacaaaacattctgcacataagctgttcgatgttaaaccggattttcaagggttgatagatgacaatttgtcatcctccagtcagtcctcaagcatcaagattgagctgatcagatcatcaagcttgccaaatatactgccgtttcagaaaagaagctctgaacctgaacctgaaagtccactgtctcatgtttcacatcccaatgtttcagagccagtttactcaaattcttcaaccttctgcacaagtttgttttcgtcgtcgtcgatggagacggagccgtgccggcaattgggcactctaccattcctgcctcaccctcctaagtgtgagcagcaggtttcagcagggcactcatcaagctcctccctgctagtacctggtggtgatggtgatattggcaatgctcatgatgaacctgaacagtcagatgatctgaaggatttcctcaatctctctggaggagatgcttctgatggcagcttccatggagaaaacaatgccatggcttttgctgagcagatggagttccagttcttgtctgagcagctagggattgccatcactgacaatgaggagagccctcggttagatgacatatacggcacgccgccgcaactttcatcacttccagtatcatcttgctccaaccagagtgtacagaaagcaggatctcctgtgaaagttcagcttagctcgcctcggtcatcttcgggatccgcgacaactaacaaggcgaggttgaggtggacactggagctccatgagcgttttgtagaggctgtgaacaagctagatggacctgaaaaggcaactcctaaaggtgtgctgaaacttatgaaagtagaaggcctgactatctaccatgtaaagagtcatttgcagaagtatcgcctcgcaaaatatctcccagagactaaggaagacaagaaggcatcctcagaggataagaaatctcagtcaggtagcagtggaaatgattcagtcaaaaagaagaacttacaagtggcagaagctctacgaatgcaaatggaggttcagaaacagcttcatgaacagttagaggtgcaaaggcaactgcagctgcgaatcgaagaacacgcaagatacctgcagagaatactggaagagcagcacaaggtcagcatcagcagcaactccctctcactgaaacccccagccgaatcgcaaccggaatcgccaaaaccaacatcagaaaagaaggaggccgaatccgaagcaggcgccgccacttcagctcagccatcatccgaggataaatcaccagacgcagaatgcaagtcgtcgccgccggtgggtagcaagagagctagggttcatgtcggcgatgagcaccagtgttcatag

SEQ ID NO: 84243 - protein, 479 aa, Oryza sativa
MSSQSVVAVKQITAPDKIVETCPSTKHSAHKLFDVKPDFQGLIDDNLSSSSQSSSIKIELIRSSSLPNILPFQKRSSEPEPESPLSHVSHPNVSEPVYSNSSTFCTSLFSSSSMETEPCRQLGTLPFLPHPPKCEQQVSAGHSSSSSLLVPGGDGDIGNAHDEPEQSDDLKDFLNLSGGDASDGSFHGENNAMAFAEQMEFQFLSEQLGIAITDNEESPRLDDIYGTPPQLSSLPVSSCSNQSVQKAGSPVKVQLSSPRSSSGSATTNKARLRWTLELHERFVEAVNKLDGPEKATPKGVLKLMKVEGLTIYHVKSHLQKYRLAKYLPETKEDKKASSEDKKSQSGSSGNDSVKKKNLQVAEALRMQMEVQKQLHEQLEVQRQLQLRIEEHARYLQRILEEQHKVSISSNSLSLKPPAESQPESPKPTSEKKEAESEAGAATSAQPSSEDKSPDAECKSSPPVGSKRARVHVGDEHQCS

SEQ ID NO: 84244 - DNA, 1281 bp, Oryza sativa
  CDS (1)..(1281)
atggagagaataagcaccaatcagctctacaattctggaattccggtgactgtgccatcgcctctgcctgctataccagctaccctggatgaaaacattcccaggattccagatgggcagaatgttccgcgggagagagaattgagaagcacacctatgccacctcatcagaatcagagtactgttgctcctcttcatgggcattttcagtccagtaccgggtctgttgggcctctgcgttcgtcccaggcgataaggttctcttcagtttcaagcaatgagcaatatacaaatgccaatccttacaattctcaaccgccgagtagtgggagttcttcaacgctcaattatggatcacaatatggaggctttgaaccttccttgactgattttccaagagatgctgggccgacgtggtgtcctgatccagttgatggcttgcttggatatacagatgatgtccctgctgggaacaatttgactgaaaacagttctattgcagctggtgatgaacttgccaagcaaagtgaatggtggaatgattttatgaattatgactggaaagatattgataacacagcttgtactgaaactcaaccacaggttggaccagctgcgcaatcatctgtcgcagttcaccaatcagctgcccaacaatcagtttcatctcaatcaggagaaccttctgcagttgctataccctcgccctctggtgcctccaatacctccaactccaagacacgaatgagatggactcctgaacttcatgagcgctttgtagatgctgtcaatctacttggtggcagtgaaaaagctactcccaagggtgtgttaaagctaatgaaggcagacaatttgaccatttatcatgttaaaagtcaccttcagaaatacagaacagctcgatacagaccagaattgtctgaaggttcttcagaaaagaaggcagcctcaaaagaggacataccatcaatagatctgaaaggagggaactttgatctcactgaggcattgcgtctccagttagaactccaaaagaggcttcatgaacagcttgagatccaaagaagtttgcagctgagaattgaggagcaagggaagtgccttcagatgatgctcgagcagcagtgcatacctgggacagacaaggcggtggatgcttcaacctcagcagaaggaacaaagccatcttctgatcttccagaatcttctgccgtgaaggatgttccagagaacagtcagaacggaatagccaaacaaacaggcatgagaatccattaa

SEQ ID NO: 84245 - protein, 426 aa, Oryza sativa
MERISTNQLYNSGIPVTVPSPLPAIPATLDENIPRIPDGQNVPRERELRSTPMPPHQNQSTVAPLHGHFQSSTGSVGPLRSSQAIRFSSVSSNEQYTNANPYNSQPPSSGSSSTLNYGSQYGGFEPSLTDFPRDAGPTWCPDPVDGLLGYTDDVPAGNNLTENSSIAAGDELAKQSEWWNDFMNYDWKDIDNTACTETQPQVGPAAQSSVAVHQSAAQQSVSSQSGEPSAVAIPSPSGASNTSNSKTRMRWTPELHERFVDAVNLLGGSEKATPKGVLKLMKADNLTIYHVKSHLQKYRTARYRPELSEGSSEKKAASKEDIPSIDLKGGNFDLTEALRLQLELQKRLHEQLEIQRSLQLRIEEQGKCLQMMLEQQCIPGTDKAVDASTSAEGTKPSSDLPESSAVKDVPENSQNGIAKQTGMRIH

SEQ ID NO: 84246 - DNA, 1281 bp, Oryza sativa
  CDS (1)..(1281)
atggagagaataagcaccaatcagctctacaattctggaattccggtgactgtgccatcgcctctgcctgctataccagctaccctggatgaaaacattcccaggattccagatgggcagaatgttccgcgggagagagaattgagaagcacacctatgccacctcatcagaatcagagtactgttgctcctcttcatgggcattttcagtccagtaccgggtctgttgggcctctgcgttcgtcccaggcgataaggttctcttcagtttcaagcaatgagcaatatacaaatgccaatccttacaattctcaaccgccgagtagtgggagttcttcaacgctcaattatggatcacaatatggaggctttgaaccttccttgactgattttccaagagatgctgggccgacgtggtgtcctgatccagttgatggcttgcttggatatacagatgatgtccctgctgggaacaatttgactgaaaacagttctattgcagctggtgatgaacttgccaagcaaagtgaatggtggaatgattttatgaattatgactggaaagatattgataacacagcttgtactgaaactcaaccacaggttggaccagctgcgcaatcatctgtcgcagttcaccaatcagctgcccaacaatcagtttcatctcaatcaggagaaccttctgcagttgctataccctcgccctctggtgcctccaatacctccaactccaagacacgaatgagatggactcctgaacttcatgagcgctttgtagatgctgtcaatctacttggtggcagtgaaaaagctactcccaagggtgtgttaaagctaatgaaggcagacaatttgaccatttatcatgttaaaagtcaccttcagaaatacagaacagctcgatacagaccagaattgtctgaaggttcttcagaaaagaaggcagcctcaaaagaggacataccatcaatagatctgaaaggagggaactttgatctcactgaggcattgcgtctccagttagaactccaaaagaggcttcatgaacagcttgagatccaaagaagtttgcagctgagaattgaggagcaagggaagtgccttcagatgatgctcgagcagcagtgcatacctgggacagacaaggcggtggatgcttcaacctcagcagaaggaacaaagccatcttctgatcttccagaatcttctgccgtgaaggatgttccagagaacagtcagaacggaatagccaaacaaacagaatcaggtgacagataa

SEQ ID NO: 84247 - protein, 426 aa, Oryza sativa
MERISTNQLYNSGIPVTVPSPLPAIPATLDENIPRIPDGQNVPRERELRSTPMPPHQNQSTVAPLHGHFQSSTGSVGPLRSSQAIRFSSVSSNEQYTNANPYNSQPPSSGSSSTLNYGSQYGGFEPSLTDFPRDAGPTWCPDPVDGLLGYTDDVPAGNNLTENSSIAAGDELAKQSEWWNDFMNYDWKDIDNTACTETQPQVGPAAQSSVAVHQSAAQQSVSSQSGEPSAVAIPSPSGASNTSNSKTRMRWTPELHERFVDAVNLLGGSEKATPKGVLKLMKADNLTIYHVKSHLQKYRTARYRPELSEGSSEKKAASKEDIPSIDLKGGNFDLTEALRLQLELQKRLHEQLEIQRSLQLRIEEQGKCLQMMLEQQCIPGTDKAVDASTSAEGTKPSSDLPESSAVKDVPENSQNGIAKQTESGDR

SEQ ID NO: 84248 - DNA, 1350 bp, Zea mays
  CDS (1)..(1350)
atgaggaagtttaatctgatgcagtctcaaaagagcagagttttgggagcaatgtcatcctctttgcctattctgccaaatcctttgaaagggagcttcccaaggcctcataacccccagcatattcctatgttgaggcagctgcctgatgactctatgcccttgtgtattgacacacatcagtctgttagtttgcacccaagagctggtgttatcggggtaccatattcaggctacactgctagtccacttgattctgtgtctaaccttgatagccagacaatggctgcaccctttatttctcagtcatccaattttgaagctctccagtctctatctgataataccccagaaacacacactaaggcagcctggttcacatcttctatggatgtttcaccactcaacacagataatattgctgcttctgatgttaatcaaatccatagtatacgtcctgctatgacatctgatgagagtgctacacaaaatgattggtgggcagatataatgaatgatgattggaaagatattcttgacgcaacagctactgattcccactcaaaagccatgattcaaatttccaactcagctacatcactacctgcagtaaatcagtcagcttcatctcatagtagggagatttgtcctgttgctagtcctcccaatagcagcaatgcttcagttgccaaacaacggatgagatggaccccagaactccatgaatgttttgtagatgctgtaaatcagcttggcggtagcgaaaaagctactcctaagggtgtgctaaagcttatgaaagttgatggtttgactatatatcatgtcaaaagccacctgcagaagtaccgcacagcccgctataaaccagacctgtcagaaggtacatcggaaaaaaggacagccactgaagagctggtcctggacctgaaaacgagcatggatcttactgaagcgctgcgccttcagatggaagtccagaaacggcttcatgaacagcttgagattcagagaaaattgcagttgcggattgaagagcaaggaaagtatctgcagatgatgtttgaaaagcagagtcaatcgagcacggagaaagtccaggatccatcctcaagggatacaacagctaaaccgtcatctaatcagagccagtctacaaacaaggatagtggtgcaaccatggacccaaatggaacaggagacatcgcacggactgcagaactgggagaacgttcgtctgaactaggtgtaaaacagaaactcgtagagatcgaatctggtaccgaagtagccacaggcgacagatctaagatctcccaagagaagcggcgcaaactgcaagatagttaa

SEQ ID NO: 84249 - protein, 449 aa, Zea mays
MRKFNLMQSQKSRVLGAMSSSLPILPNPLKGSFPRPHNPQHIPMLRQLPDDSMPLCIDTHQSVSLHPRAGVIGVPYSGYTASPLDSVSNLDSQTMAAPFISQSSNFEALQSLSDNTPETHTKAAWFTSSMDVSPLNTDNIAASDVNQIHSIRPAMTSDESATQNDWWADIMNDDWKDILDATATDSHSKAMIQISNSATSLPAVNQSASSHSREICPVASPPNSSNASVAKQRMRWTPELHECFVDAVNQLGGSEKATPKGVLKLMKVDGLTIYHVKSHLQKYRTARYKPDLSEGTSEKRTATEELVLDLKTSMDLTEALRLQMEVQKRLHEQLEIQRKLQLRIEEQGKYLQMMFEKQSQSSTEKVQDPSSRDTTAKPSSNQSQSTNKDSGATMDPNGTGDIARTAELGERSSELGVKQKLVEIESGTEVATGDRSKISQEKRRKLQDS

SEQ ID NO: 84250 - DNA, 1437 bp, Glycine max
  CDS (1)..(1437)
atggaagcacattctgctttctctattgaaaggtcaaatgctaatgacatggggatgtctgaagcatttccctcatcgttgcctgtccttccatcgcctctagaagagacataccccaaattatctgattctagaccagcttttatggaaaaagaacttaaaacaaaaccttttacacattcaagtcatttaacttccagcggagcagttgggcatatgttttcatcttctcctggatattcaactgatcttcatcactcatccttttcatctcatgaaaaacaacctagaaatactcattttatttcacaatcattaagtaacatcacttcatttccattatcatattcttcaaatactggaccaccaacttcagcaacaccaagccattattccaaagaaagcagtgtttcctggcatacagattccctgccaagctttctggattttcctgaaaatggctctattgataataatcgggtagaaagtagtgcctgccctataatggcatctgaggagtattctaagcaaaatgattggcaggagtgggctgagaggctaatcagtgatgatgacactttgactactaattggaatgaccttcttgctgacaacattcaagatcttgagccaaaggtgccattccaagtttcaaaaccactttcacagattccaggacatcaatcccaaggtcatcaacaacttcctgcttcatatggagaaaattgcgctggtgctgccctctcttcctcagcaaattctgctcctgctaagtcacgaatgcgttggacaccagaacttcatgaggcgtttgtggaggctgtcaaccaacttggggggagtgaaaaagctactccaaagggcgtgctgaagctcatgaaagttgaaggattaactatatatcatgttaaaagccatttgcagaaatacaggacagctagatatagaccggagtcatctgaaggagatatggagaaaaaaacaagttccgttgaagagatggcatctctagatttgagaactggtattgagatcactgaagctctacgactacaaatggaggttcagaagcggttgcatgaacagcttgagattcaaagaaatctacagttgcgaatagaagaacaaggaaggtacctccagatgatgtttgagaagcaatgtaaacctggaaatgaaacgttcaaggcaccatcatctatcattgagactccatctggggggtcttcaaatgctacgaaagattcccttgccaaaaatgaaatggaagcatcacaagtgaaccatggcaggtcaggacctgatcaggttaagggcagtacgacatttgaggaaggctcattggaaaagtgcgggaagcctgattctcccaaaactgaacatgctattgctagtgaagatagtgctcaagccccgaagcgtcaaagaactgagtaa

SEQ ID NO: 84251 - protein, 478 aa, Glycine max
MEAHSAFSIERSNANDMGMSEAFPSSLPVLPSPLEETYPKLSDSRPAFMEKELKTKPFTHSSHLTSSGAVGHMFSSSPGYSTDLHHSSFSSHEKQPRNTHFISQSLSNITSFPLSYSSNTGPPTSATPSHYSKESSVSWHTDSLPSFLDFPENGSIDNNRVESSACPIMASEEYSKQNDWQEWAERLISDDDTLTTNWNDLLADNIQDLEPKVPFQVSKPLSQIPGHQSQGHQQLPASYGENCAGAALSSSANSAPAKSRMRWTPELHEAFVEAVNQLGGSEKATPKGVLKLMKVEGLTIYHVKSHLQKYRTARYRPESSEGDMEKKTSSVEEMASLDLRTGIEITEALRLQMEVQKRLHEQLEIQRNLQLRIEEQGRYLQMMFEKQCKPGNETFKAPSSIIETPSGGSSNATKDSLAKNEMEASQVNHGRSGPDQVKGSTTFEEGSLEKCGKPDSPKTEHAIASEDSAQAPKRQRTE

SEQ ID NO: 84252 - DNA, 1455 bp, Glycine max
  CDS (1)..(1455)
atggaagcacgttctgctttctctattgacagatcaaatgctaagcaactcaataacatggggatgtctgaagcatttccctcatcattgcctgcccttccatcgcctctagaagagacataccctaaattatctgattctaaaccagtttttatggaaaaagagcttaaaacaaaaccttatacacattcaagtcatttaacttccagcggagcagttgggcatatgttttcatcttctcctggatattcaactgatcttcatcactcatccttttcatcttatgaaaaacaacctagaaatactcattttatttcacaaccattgggtaacatggcttcattgccattatcttattcttcaaatagtgaaccaataccttctacaacgtcaaccccttattccaatggaaacagtgtttcctggcatacagattctctgcctagctttcttgatttcacagccaatacctccattgataatagtcaagtagaaaaccgtgcctgcaatatcatggcaactgaagagtattctaagcgaaatgattggcaggagtgggctgaccaattaatcagtgatgttgatcctttgacttctaactggaatgatcttcttgctgacaacattcaagatctggaaccaaaggtcacaaaatcatcttcacaacttccaatagaacaccaatcccaaagccatcaacaacttcctgcttcatctggagaaaatcgtgttggtgttgccccaacttcctcaacaaattctgcacctgccaagccacggatgcgctggacacctgagcttcatgaggcatttgtggaggctgtcaaccaacttggtgggagtgaaagagctacccctaaaggtgtgctgaagctcatgaaagttgaaggattaactatataccatgttaaaagccacctacagaaatacaggacagctagatatagacctgagtcatctgaaggagctgcagagaaaaatctaagtccaattgaagagatgtcatctctggatttgaaaactggtattgagatcactgaagctctgaggttgcagatggaggttcagaagcggttgcatgaacagcttgagattcaaagaaatctacagttgcgaatagaagaacaaggaaggtaccttcagatgatgtttgagaagcagtgcaaacctggcattgaaacatggaaggcatcatcatctgtcatcgagagtcaatctggagtgtcttctgatgccatcaaagattctccagccaaaactgaatcagaaaccatcaaggtggaccattgcaagtcaggagctgatcaggctaatggcattaccacagttgaggaaagcgcattggaagtgggtgagaagcaggatgctcctgaaagtcaagcttctgagaatcctgagcaacatgctagtgaagatagtgctaaagcctcaaagcgtccaaggacagaggagtaa

SEQ ID NO: 84253 - protein, 484 aa, Glycine max
MEARSAFSIDRSNAKQLNNMGMSEAFPSSLPALPSPLEETYPKLSDSKPVFMEKELKTKPYTHSSHLTSSGAVGHMFSSSPGYSTDLHHSSFSSYEKQPRNTHFISQPLGNMASLPLSYSSNSEPIPSTTSTPYSNGNSVSWHTDSLPSFLDFTANTSIDNSQVENRACNIMATEEYSKRNDWQEWADQLISDVDPLTSNWNDLLADNIQDLEPKVTKSSSQLPIEHQSQSHQQLPASSGENRVGVAPTSSTNSAPAKPRMRWTPELHEAFVEAVNQLGGSERATPKGVLKLMKVEGLTIYHVKSHLQKYRTARYRPESSEGAAEKNLSPIEEMSSLDLKTGIEITEALRLQMEVQKRLHEQLEIQRNLQLRIEEQGRYLQMMFEKQCKPGIETWKASSSVIESQSGVSSDAIKDSPAKTESETIKVDHCKSGADQANGITTVEESALEVGEKQDAPESQASENPEQHASEDSAKASKRPRTEE

SEQ ID NO: 84254 - DNA, 1230 bp, Glycine max
  CDS (1)..(1230)
atgtctacatcttctcgtgttcttcccactccattggaaaacaagtatatgaaacccccagattcttttcagctttcgccagtcagagatctgactgcaaattcagcctcatcaaattcaatcagaagtgctgggaagatgttttcttcaccttctaaatgtcccgatgacttccctttttcctctgtttcacagcatgataggcaatatcaagatcccccctttgtttctcagacaattggtgatagcgtgtcttccgaaatacattcaatgacattcatttctcaccctcaagaaaatgaagatctttcctggggaccagatccatgtcaggatattcttggctttcctgaaaatgtttctgtccagcatgatcaggtggaaaacaatggttgttacataaatgatgataatgtcaaaagatctgattttggggagtgggttgatcagttaatgtcaattgatgattctcttcacccgagctggagtcagcttcttgctgatgacaatgtagcagaaccaaaaccaaaggcatctcaggttcctccgcagcagcatataccatctggagaagttgttggtaattcagcatcaactgcatcgcagactaaggctagaatgcgttggactccagaacttcacgaggcctttgtggaagcagttaatcaccttggtggtagtgagaaggctactccaaagggtgtgttgaatcaaatgaaagttgaagggcttactatctatcatgtaaaaagccacttgcagaagtatagaactgccagatacaaaccagagccatcagaaggaacgtctgagaaaaaggtgactccaatggaagaaatgaaatctctagacttgaaaacgagtaaggggatcactgaagcattacgtttacagatggaactccagaagcgacttcacgaacaacttgagatccaaagaaagttgcagattcaaattgaagaccaagggaaacgtcttcagatgatgtttgagaaacagagagagatgggtgacagcaaggttaacgtctccttggacgagccttctgctgctgcaccatcagacacagtagaaaccacaaatgaggaacgccacaaatttgaaagcattccaaaagccatacccgaagagaaggagtcaagcacaacaaaacaaattgcaggtgaagctgaagaaatgatcaaggaagatgaagttgcaccacccacaaaacgggtgaaaagttcgtaa

SEQ ID NO: 84255 - protein, 409 aa, Glycine max
MSTSSRVLPTPLENKYMKPPDSFQLSPVRDLTANSASSNSIRSAGKMFSSPSKCPDDFPFSSVSQHDRQYQDPPFVSQTIGDSVSSEIHSMTFISHPQENEDLSWGPDPCQDILGFPENVSVQHDQVENNGCYINDDNVKRSDFGEWVDQLMSIDDSLHPSWSQLLADDNVAEPKPKASQVPPQQHIPSGEVVGNSASTASQTKARMRWTPELHEAFVEAVNHLGGSEKATPKGVLNQMKVEGLTIYHVKSHLQKYRTARYKPEPSEGTSEKKVTPMEEMKSLDLKTSKGITEALRLQMELQKRLHEQLEIQRKLQIQIEDQGKRLQMMFEKQREMGDSKVNVSLDEPSAAAPSDTVETTNEERHKFESIPKAIPEEKESSTTKQIAGEAEEMIKEDEVAPPTKRVKSS

SEQ ID NO: 84256 - DNA, 1254 bp, Zea mays
  CDS (1)..(1254)
atggagaggttaagcaccaaccagctctacagttctggtgttcctgtaaccgtaccaacatctctgccttgtataccagtctctctggatgagagcttcccgaggcttcccgatgcacagagtgttttgatggagagagaattgaggagcactccactaccacctcaccagacaactgttgctcctatccgtggtctgtttcactccaatactggatctgttggtcctttgtgctcacctccgtctgtaaggttctcttcgcattcaaatcctgagcaataccccaaccacaattcatacaattctcaagtaccaagcactgcaagttcctcaacgctgaattatgggtcacaatatggaggctttgaaccatccataaccgatttcccaagagacattgaaccaacttggtgccccgatccagttgagagcattcttggatactctggtgatgtccctgctgggaataatttgactgggaccacttctattggagcttcagatgatcttactaagcaaactgaatggtggacagagtttatgaatgaggattggaaggacatggttgataacccgacttccacagaaactcaaccggttgggcaacctgtgcaatcatccaactcagttcaccaatcagctacccaacaaacagtttcatctcaatctgttgaaccgttggcagttgtagcaccctcacccactgctggctccaatactggcaaggcacgcatgagatggactcctgagcttcacgagcgctttgtggatgctgtcaatatacttggtggcagtgaaaaagcaactcctaagggtgtcctgaagctaatgaaggcagacaatttgaccatttatcatgtaaaaagtcatcttcagaaatacagaacagctagatacagaccagagttatctgaaggctcttctgaaaagaaagtggcatcaaaagaagatataccatctattgacttgaaagggagttttgatctcactgaagcacttaggctccagttggaacttcaaaagcggcttcatgaacagcttgagatacaaagaagtttgcagctaagaatcgaggaacaagggaagtgtcttcagatgatgctagagcagcagtgcatacccggggcagaaaaggcgcaggatgcttcaaccgctgcagatgaattgaggtcaccttctgagattccagaatcttctaccgtcaaggaagttccagaaaacagtcaaaatggatcaaccaagcaaacaaaataa

SEQ ID NO: 84257 - protein, 417 aa, Zea mays
MERLSTNQLYSSGVPVTVPTSLPCIPVSLDESFPRLPDAQSVLMERELRSTPLPPHQTTVAPIRGLFHSNTGSVGPLCSPPSVRFSSHSNPEQYPNHNSYNSQVPSTASSSTLNYGSQYGGFEPSITDFPRDIEPTWCPDPVESILGYSGDVPAGNNLTGTTSIGASDDLTKQTEWWTEFMNEDWKDMVDNPTSTETQPVGQPVQSSNSVHQSATQQTVSSQSVEPLAVVAPSPTAGSNTGKARMRWTPELHERFVDAVNILGGSEKATPKGVLKLMKADNLTIYHVKSHLQKYRTARYRPELSEGSSEKKVASKEDIPSIDLKGSFDLTEALRLQLELQKRLHEQLEIQRSLQLRIEEQGKCLQMMLEQQCIPGAEKAQDASTAADELRSPSEIPESSTVKEVPENSQNGSTKQTK

SEQ ID NO: 84258 - DNA, 1353 bp, Zea mays
  CDS (1)..(1353)
atgaggaactttaatctgatgcagtctcaaaagagcagagttttgggagcaatgtcatcctctttgcctattctgccaaatcctttgaaagggagcttcccaaggcctcataacccccagcatattcctatgttgaggcagctgcctgatgactctatgcccttgtgtattgacacacatcagtctgctagtttgcacccaagagctggtgttatcggggtaccatattcaggctacactgctagtccacttgattctgtgtctaaccttgatagccagacaatggctgcaccctttatttctcagtcatccaattttgaagctctccagtctctatctgataataccccagaaacacacactaaggcagcctggttcacatcttctatggatgtttcaccactcaacacagataatattgctgcttctgatgttaatcaaatccatagtatacgtcctgctatgacatctgatgagagtgctacacaaaatgattggtgggcagatataatgaatgatgattggaaagatattcttgacgcaacagctactgattcccactcaaaagccatgattcaaatttccaactcagctacatcactacctgcagtaaatcagtcagcttcatctcatagtagggagatttgtcctgttgctagtcctcccaatagcagcaatgcttcagttgccaaacaacggatgagatggaccccagaactccatgaatgttttgtagatgctgtaaatcagcttggcggtagcgaaaaagctactcctaagggtgtgctaaagcttatgaaagttgatggtttgactatatatcatgtcaaaagccacctgcagaagtaccgcacagcccgctataaaccagacctgtcagaaggtacatcggaaaaaaggacagccactgaagagctggtcctggacctgaaaacgagcatggatcttactgaagcactgcgccttcagatggaagtccagaaacggcttcatgaacagcttgagattcagagaaaattgcagttgcggattgaagagcaaggaaagtatctgcagatgatgtttgaaaagcagagtcaatcgagcacggagaaagtccaggatccatcctcaagggatacaacagctaaaccgtcatctaatcagagccagtctacaaacaaggatagtggtgcaaccatggacccaaatggaacaggagacatcgcacggactgcagaactgggagaacgttcgtctgaattaggtgtaaaacagaaactcgtagagatcgaagaatctggtaccgaagtagccacaggcgacagatctaagatctcccaagagaagcggcgcaaactgcaagatagttaa

SEQ ID NO: 84259 - protein, 450 aa, Zea mays
MRNFNLMQSQKSRVLGAMSSSLPILPNPLKGSFPRPHNPQHIPMLRQLPDDSMPLCIDTHQSASLHPRAGVIGVPYSGYTASPLDSVSNLDSQTMAAPFISQSSNFEALQSLSDNTPETHTKAAWFTSSMDVSPLNTDNIAASDVNQIHSIRPAMTSDESATQNDWWADIMNDDWKDILDATATDSHSKAMIQISNSATSLPAVNQSASSHSREICPVASPPNSSNASVAKQRMRWTPELHECFVDAVNQLGGSEKATPKGVLKLMKVDGLTIYHVKSHLQKYRTARYKPDLSEGTSEKRTATEELVLDLKTSMDLTEALRLQMEVQKRLHEQLEIQRKLQLRIEEQGKYLQMMFEKQSQSSTEKVQDPSSRDTTAKPSSNQSQSTNKDSGATMDPNGTGDIARTAELGERSSELGVKQKLVEIEESGTEVATGDRSKISQEKRRKLQDS

SEQ ID NO: 84260 - DNA, 21 bp, Artificial sequence
  primer
atggaagcacattctgctttc

SEQ ID NO: 84261 - DNA, 22 bp, Artificial sequence
  primer
ttactcagttctttgacgcttc

SEQ ID NO: 84262 - protein, 241 aa, Artificial sequence
  consensus sequence
  Variant (2)..(9): Xaa in position 2 to 9 is any amino acid
  Variant (10)..(11): Xaa in position 10 to 11 is any or no amino acid
  Variant (13)..(49): Xaa in position 13 to 49 is any amino acid
  Variant (50)..(96): Xaa in position 50 to 96 is any or no amino acid
  Variant (98)..(98): Xaa in position 98 is any amino acid
  Variant (109)..(109): Xaa in position 109 is any amino acid
  Variant (112)..(112): Xaa in position 112 is any amino acid
  Variant (116)..(116): Xaa in position 116 is any amino acid
  Variant (122)..(122): Xaa in position 122 is any amino acid
  Variant (127)..(127): Xaa in position 127 is any amino acid
  Variant (133)..(135): Xaa in position 133 to 135 is any amino acid
  Variant (153)..(153): Xaa in position 153 is any amino acid
  Variant (155)..(155): Xaa in position 155 is any amino acid
  Variant (158)..(158): Xaa in position 158 is any amino acid
  Variant (161)..(174): Xaa in position 161 to 174 is any amino acid
  Variant (175)..(190): Xaa in position 175 to 190 is any or no amino acid
  Variant (192)..(192): Xaa in position 192 is any amino acid
  Variant (194)..(198): Xaa in position 194 to 198 is any amino acid
  Variant (199)..(199): Xaa in position 199 is any or no amino acid
  Variant (205)..(205): Xaa in position 205 is any amino acid
  Variant (207)..(207): Xaa in position 207 is any amino acid
  Variant (209)..(209): Xaa in position 209 is any amino acid
  Variant (212)..(212): Xaa in position 212 is any amino acid
  Variant (222)..(222): Xaa in position 222 is any amino acid
  Variant (226)..(226): Xaa in position 226 is any amino acid
  Variant (232)..(233): Xaa in position 232 to 233 is any amino acid
  Variant (236)..(236): Xaa in position 236 is any amino acid
  Variant (238)..(238): Xaa in position 238 is any amino acid
  Variant (240)..(240): Xaa in position 240 is any amino acid
DXXXXXXXXXXLXXXXXXXXXXXXXXXXXXXXXXXXXXXXXXXXXXXXXXXXXXXXXXXXXXXXXXXXXXXXXXXXXXXXXXXXXXXXXXXXXXXXKXRMRWTPELHEXFVXAVNXLGGSEXATPKXVLKLMXXXGLTIYHVKSHLQKYRTAXYXPEXSEXXXXXXXXXXXXXXXXXXXXXXXXXXXXXXDXKXXXXXXTEALRXQXEXQKXLHEQLEIQRXLQLXIEEQGXXLQXMXEXQ

SEQ ID NO: 84263 - protein, 60 aa, Artificial sequence
  protein pattern
  Variant (2)..(2): Xaa in position 2 is any amino acid
  Variant (13)..(13): Xaa in position 13 is any amino acid
  Variant (16)..(16): Xaa in position 16 is Asp, Glu, His or Lys
  Variant (18)..(18): Xaa in position 18 is Ile or Val
  Variant (19)..(20): Xaa in position 19 to 20 is any amino acid
  Variant (22)..(22): Xaa in position 22 is Glu or Gly
  Variant (24)..(24): Xaa in position 24 is Pro or Ser
  Variant (26)..(26): Xaa in position 26 is Lys or Arg
  Variant (31)..(31): Xaa in position 31 is Ala or Gly
  Variant (33)..(35): Xaa in position 33 to 35 is any amino acid
  Variant (36)..(36): Xaa in position 36 is Ile, Leu or Met
  Variant (37)..(37): Xaa in position 37 is any amino acid
  Variant (38)..(38): Xaa in position 38 is Ala, Asn, Ser or Val
  Variant (39)..(39): Xaa in position 39 is Asp, Glu or Pro
  Variant (40)..(40): Xaa in position 40 is Gly or Asn
  Variant (43)..(43): Xaa in position 43 is Ile or Val
  Variant (55)..(55): Xaa in position 55 is any amino acid
  Variant (57)..(57): Xaa in position 57 is Lys or Arg
  Variant (59)..(59): Xaa in position 59 is any amino acid
KXRMRWTPELHEXFVXAXXXLXGXEXATPKXVXXXXXXXXLTXYHVKSHLQKYRXAXYXP

SEQ ID NO: 84264 - protein, 41 aa, Artificial sequence
  protein pattern
  Variant (5)..(5): Xaa in position 5 is Leu or Met
  Variant (7)..(7): Xaa in position 7 is Leu or Met
  Variant (8)..(8): Xaa in position 8 is Glu or Lys
  Variant (9)..(9): Xaa in position 9 is Leu or Val
  Variant (12)..(12): Xaa in position 12 is Gln or Arg
  Variant (19)..(19): Xaa in position 19 is any amino acid
  Variant (22)..(22): Xaa in position 22 is any amino acid
  Variant (25)..(25): Xaa in position 25 is Ile or Leu
  Variant (26)..(26): Xaa in position 26 is Gln or Arg
  Variant (29)..(29): Xaa in position 29 is Asp, Glu or Asn
  Variant (30)..(30): Xaa in position 30 is any amino acid
  Variant (31)..(31): Xaa in position 31 is Ala or Gly
  Variant (32)..(32): Xaa in position 32 is Lys or Arg
  Variant (33)..(33): Xaa in position 33 is any amino acid
  Variant (35)..(36): Xaa in position 35 to 36 is any amino acid
  Variant (37)..(37): Xaa in position 37 is Ile or Met
  Variant (38)..(38): Xaa in position 38 is Phe, Ile or Leu
  Variant (40)..(40): Xaa in position 40 is any amino acid
EALRXQXXXQKXLHEQLEXQRXLQXXIEXXXXXLXXXXEXQ

SEQ ID NO: 84265 - DNA, 921 bp, Synechocystis sp.
  CDS (1)..(921): transl_table=11
atgcatagtcctaataaatttacctctgggcccaaacagtttctggagtcggaagccattacctcctatgctgatgccgctgtggtggtggtgcccattccctatgaggcaactacttcctaccgtaagggttgtgagcatggccctgaggcggtgctagaagcttcggaccagttggaagcctatgacgaagagttgggcacttccccctgccatgatttgggtatttacacctgcgctcccctggcggacagcaataagcatcccgctttggctggagacgccatggtaacggaggtttgtgacggcattgccccttttgtggaagacggtaaatttgtagtggcgatcggtggggaacatgccattaccactggggtagtgcgggctatgcaaagggggacatcggagccttttacggtggtgcaaattgatgcccatggggatatgcgggacaaatttgaaggttcctgccataaccatgcctgtgtaatgcgccgggtgttggaattgggcttacccactctgccgatcgccattcgggccatttgtcaggaagaggcagatttgattcgggaaaaaaatattcctgtgttttgggccagggaaatggccgataatcccaattggattaacgaggcgatcgccagcatcaccacacaaaaagtctttctcaccattgatatggacggttttgatccggggtttatgccgggagtcggcacccctgaaccgggggggctaggttggtatgaagggttaaattttttccgccgtctttttcaaaccaagcaagtaattggttgcgacttgatggaactggccccagtgcgaggctcggtggtgtcggaattttctaccgctaaactagcctataagttgatgggttactggggagagtcccaacggaaaaaactctaa

SEQ ID NO: 84266 - protein, 306 aa, Synechocystis sp.
MHSPNKFTSGPKQFLESEAITSYADAAVVVVPIPYEATTSYRKGCEHGPEAVLEASDQLEAYDEELGTSPCHDLGIYTCAPLADSNKHPALAGDAMVTEVCDGIAPFVEDGKFVVAIGGEHAITTGVVRAMQRGTSEPFTVVQIDAHGDMRDKFEGSCHNHACVMRRVLELGLPTLPIAIRAICQEEADLIREKNIPVFWAREMADNPNWINEAIASITTQKVFLTIDMDGFDPGFMPGVGTPEPGGLGWYEGLNFFRRLFQTKQVIGCDLMELAPVRGSVVSEFSTAKLAYKLMGYWGESQRKKL

SEQ ID NO: 84267 - DNA, 828 bp, Archaeoglobus fulgidus DSM 4304
  CDS (1)..(828): transl_table=11
atgcacatcgattcctacttttccctttcaaactgcgatgccgaggaggctgaatacctaatctacggtatcccctacgacgcaactcagtcgttcaagcctggctctcgcttcgctcccaacgcgataagagaggcaagctggaatctggagtcctattcgaacctttttgacgtggagctttcgctggtcaaagtgggcgatgcgggcaacataaactgcgatggcggttttgagcagattgttgagagaacgaaggaatttcttggtgaagttgagggttttcccgtagccattggtggagagcactcaatcagctttgcagcaacgagcaagttcagaaaagcgtgcttcgtcgttttcgatgcgcactttgatttgagagacgagttcgatggggacaggttcaaccacgcctgcacaacgcggagaatctttgagagcgggatgcgggtggcaattttcggcgtcaggagcggtattaaagaggagaagaggtttgcggaggaaaacggaataaaatacctccacgcgtgggactttgaggtcgagaaggcggttaaaatggtggaggactttgacaaaatctacgtttcccttgacgtggacgctttcgaccccgccttcgctcccggcgtttcaacgcctgagccttttggtttgaagcctatagattttattaggttttttgcaggcatagcagacagagttgttggttttgatgttgtagaggttgttcccgactcgaacaaggttactcagactctcgctgcgaaaatcatacttgaggccattgcggcaaaggtcaggtgtgatattccgaaataa

SEQ ID NO: 84268 - protein, 275 aa, Archaeoglobus fulgidus DSM 4304
MHIDSYFSLSNCDAEEAEYLIYGIPYDATQSFKPGSRFAPNAIREASWNLESYSNLFDVELSLVKVGDAGNINCDGGFEQIVERTKEFLGEVEGFPVAIGGEHSISFAATSKFRKACFVVFDAHFDLRDEFDGDRFNHACTTRRIFESGMRVAIFGVRSGIKEEKRFAEENGIKYLHAWDFEVEKAVKMVEDFDKIYVSLDVDAFDPAFAPGVSTPEPFGLKPIDFIRFFAGIADRVVGFDVVEVVPDSNKVTQTLAAKIILEAIAAKVRCDIPK

SEQ ID NO: 84269 - DNA, 912 bp, Thermoplasma volcanium GSS1
  CDS (1)..(912): transl_table=11
ttgggaggcaatgggcgtgagaaagatcatgcttcagaattaagatctatttttagccttaaaaagatagcggatgctgtaaacggctatgaggaagcaaaatacgttgtatttggaatcccatttgataatacgtctagctatagacgtggatcaaagtatgcaccggattctataagaggagcatacgtgaacttggaatcatacgaatattcctatgggatcgatctcctagcatctggcatggcggatctaggggatatggaagaatcggaagacgtagagtatgtgatagatacagttgaaagtgtggtttctgctgtgatgagcgatggaaaaataccaataatgctaggcggagagcactcaataaccgttggtgcagtaagggctcttcctaaagatgtggatcttgttattgtggatgcgcattcggatttcagatcatcgtatatgggcaacaaatacaaccatgcatgcgtaactcgaagagcattggatctgttgggagaaggaaggattacttctatagggataagatctgtttctagggaagaatttgaagatccagattttaggaaggtatcctttatttcatcctttgatgttaagaagaacggtatcgataagtatatagaagaagttgataggaagagtagaagggtgtatatatccgtagacatggacggcatagatcctgcatacgcaccagctgtaggtactcctgaaccatttggccttgctgatacagatgtacggcgccttattgaacggctttcttacaaagctgttggtttcgatatagttgaattctcaccgctatacgataacggaaatacatctatgcttgccgcaaaattactacaggttttcatagcaagtagagaaaaatactataaagaacacatttaa

SEQ ID NO: 84270 - protein, 303 aa, Thermoplasma volcanium GSS1
MGGNGREKDHASELRSIFSLKKIADAVNGYEEAKYVVFGIPFDNTSSYRRGSKYAPDSIRGAYVNLESYEYSYGIDLLASGMADLGDMEESEDVEYVIDTVESVVSAVMSDGKIPIMLGGEHSITVGAVRALPKDVDLVIVDAHSDFRSSYMGNKYNHACVTRRALDLLGEGRITSIGIRSVSREEFEDPDFRKVSFISSFDVKKNGIDKYIEEVDRKSRRVYISVDMDGIDPAYAPAVGTPEPFGLADTDVRRLIERLSYKAVGFDIVEFSPLYDNGNTSMLAAKLLQVFIASREKYYKEHI

SEQ ID NO: 84271 - DNA, 852 bp, Pyrococcus abyssi GE5
  CDS (1)..(852): transl_table=11
atgctactgtacacttatcgctcgttcgacatggagctgccaactgttagcatagaggaggctgattacgttataatgggactgcccttcgatggcaccacgagctataagccaggagctaggtttggaccggttttaataaggcaggctactttaaaccttgaaagttacatcctcgactacgacgtggatatagctgagctaaagatagcagacgctggagatgtagcattaccggtaaacgttgaggatgcaataaaggtgggcattgaagccataaaggagctaagatcggtgaatcggaaggccctacccatattcctcggaggagaacactcaatgacgtacccgccagtagcggttcttaaaccgaaaagctacgtcgtcttcgatgcacaccttgacttaagggactcctaccaaggatcaaggttcaatcatgcttgcgttgctagaagaatacacgaaaatggcgttgaagttgctatctttggcgttaggagtggaaccagggaagaagtaaagtacgctacggaaaacggcattgaatgggttcatgcaagggattataatttcgacgcattcgttgatctagttgccagtctatcagagccaatctacgtctcaattgacatagacgtttttgatatccccctcgtcccagaaactggaacacctgagcctggaggattaagattttgggatgtggtgaatgcgttggagtggcttacggagagaaagaatgtcgttggattcgatataatggaagtttcgggagataaactgggtaacgttacttcaataaccgctgcaaagcttctatttcacatcttaggaatgagctcaaggtga

SEQ ID NO: 84272 - protein, 283 aa, Pyrococcus abyssi GE5
MLLYTYRSFDMELPTVSIEEADYVIMGLPFDGTTSYKPGARFGPVLIRQATLNLESYILDYDVDIAELKIADAGDVALPVNVEDAIKVGIEAIKELRSVNRKALPIFLGGEHSMTYPPVAVLKPKSYVVFDAHLDLRDSYQGSRFNHACVARRIHENGVEVAIFGVRSGTREEVKYATENGIEWVHARDYNFDAFVDLVASLSEPIYVSIDIDVFDIPLVPETGTPEPGGLRFWDVVNALEWLTERKNVVGFDIMEVSGDKLGNVTSITAAKLLFHILGMSSR

SEQ ID NO: 84273 - DNA, 852 bp, Pyrococcus horikoshii OT3
  CDS (1)..(852): transl_table=11
atgctactttacacgtatcgctcattcgacatggaactcccaacggtggatatcaaagatgctgactacataatcctgggattaccatttgatggtaccacaagctataaaccaggagcaagattcgggccagtactaattaggcaggctaccctaaatcttgaaagttacatcttagattatgatattgacattgcagaattgaaaattgccgatgcgggggatgtagcactaccggtgagcatagaagatgcgataaaggtagcagttgaaaccattaaagaagttagaagtattaaccctagagcactaccaatcttcctgggaggagagcattcaatgacttacccaccagttaaagtcctcgaacctaaaagctacgttgttttcgatgctcatctagacttaagggattcctatcaagggtcgaggtttaatcatgcatgcgttgcgaggagaatacacgaaatgggggtaaaggttgcaatatttggggttaggagtggaactagagaagaggtcatgtttgcaagtcagagtggaatagaatgggttcacgctagggattacaattttgacgcattcgttgatttagtttcatctcttcccgaaccggtttacgtttccatagatgtggatgtctttgatcttcccttagttccagaaactggaacgccggaacctggagggcttggattctgggaggtcatagaggccctagaatggctcaccaaaagaaagaaggtagcaggtttcgatataatggaagtatctggagatagattgggaaactcaacctcgataaccgcggctaagctcctcttctatgtaataggtatgagtgctaggtga

SEQ ID NO: 84274 - protein, 283 aa, Pyrococcus horikoshii OT3
MLLYTYRSFDMELPTVDIKDADYIILGLPFDGTTSYKPGARFGPVLIRQATLNLESYILDYDIDIAELKIADAGDVALPVSIEDAIKVAVETIKEVRSINPRALPIFLGGEHSMTYPPVKVLEPKSYVVFDAHLDLRDSYQGSRFNHACVARRIHEMGVKVAIFGVRSGTREEVMFASQSGIEWVHARDYNFDAFVDLVSSLPEPVYVSIDVDVFDLPLVPETGTPEPGGLGFWEVIEALEWLTKRKKVAGFDIMEVSGDRLGNSTSITAAKLLFYVIGMSAR

SEQ ID NO: 84275 - DNA, 939 bp, Aeropyrum pernix K1
  CDS (1)..(939): transl_table=11
gtggagaccggttcgagggccagggacctttacctgctgaggcctcccgagcctgtcttcggcattcagaggagcagggaggaaagcctcttcagcgttataggggttccctacgactccacatcctccttcaggcctggccagaggttcgcccccagggagattaggcgggcttcaatcgagctagagtccaacggctactacgtcgagggagacatagaccgtgttcctatagccgacgagggtgatgtggcagcggtccccggcagcaccctgcttacgctcgagagggtcgcgagggttgttgaggacctggcccgtgagggtaaagtgcctgtggtgctgggtggcgagcacctagtaactctgggtgcgcttagagggcttgcagcagcaggcgttaaaccctgcgttgtcgtcctcgacgcccacttcgaccttaggaacgactatctaggggagaggtttagccacgcgacagtgtttagaagggtcctggaggagctgggcgtaaagctgctgtacataggggttagggcttacgaggcgggcgaggagaggctggcggtcgagtcggggcttatcgactatgttcctatgaggagaatggatatcgtgggcgtcgatggcgctgtattagctgcccgccgcttcaccggcgactgcgagaaaatctacataagcatagacatggatttctacgacccagcctacgctccaggcgttggaaaccccgagcccgggggggccagctccagggagggtttagcgctggcttcgcagctgggtgacaggagggtttgcgggattgatgtagttgaggtttcccctccctacgatccaggcggggccacctccctgctggcggctaagacccttcaggaactcttgatatccgtctggcaaagatggggagtcggtagaagcgcatctagttga

SEQ ID NO: 84276 - protein, 312 aa, Aeropyrum pernix K1
METGSRARDLYLLRPPEPVFGIQRSREESLFSVIGVPYDSTSSFRPGQRFAPREIRRASIELESNGYYVEGDIDRVPIADEGDVAAVPGSTLLTLERVARVVEDLAREGKVPVVLGGEHLVTLGALRGLAAAGVKPCVVVLDAHFDLRNDYLGERFSHATVFRRVLEELGVKLLYIGVRAYEAGEERLAVESGLIDYVPMRRMDIVGVDGAVLAARRFTGDCEKIYISIDMDFYDPAYAPGVGNPEPGGASSREGLALASQLGDRRVCGIDVVEVSPPYDPGGATSLLAAKTLQELLISVWQRWGVGRSASS

SEQ ID NO: 84277 - DNA, 861 bp, Methanothermobacter thermautotrophicus str. Delta H
  CDS (1)..(861): transl_table=11
ttgcttatccacacccatgagcccctcaaatttgctttttccaccacagaccatgaaaggatcccggaactctcctttggaataatgggggtcccctttgattccacgacaagctatgtgccgggggcacgtttcggaccaatggctgtcagggaggcatcatacagctttgaagcatacaacctgcgtttttcagagaatgtgaaggttaaaagttttgattttggagaccttgaggtttcccctggcaacttcatgaagacagcgggtttcataggggactctgtgtctgaagtcctggatatgggccttaaaccactcataattggcggtgagcatacggtcaccctccccgtgatcgagaatctgcctgaacatgattccctgacagtggttcacctggatgcccacatggacctggcagatacctacgccggagaaaggtactcacatgccaccgtcatgaggagggtccatgagcttggagccgagataatacagataggtattagatcagcatcatcggaggaggcggaatttgcaggggaggagggtgtcaggttctgcatggcccatgaggtcatgggggaccctgccggtgccattgaactcatagatggtatccggggcccggtctacatttcggtggacatggatgtccttgaccctgcctatgctccatctgtgggtaacccggcacctgccggactcacaccccacatcatggaggaacttgtcctcgcactctcaggtaaggatgtggtgggccttgatgtggttgaggtcgcatcgggtggcatggctgacccaacatctgtaaacgcagccaaaataatctacgacattctaacactcctctga

SEQ ID NO: 84278 - protein, 286 aa, Methanothermobacter thermautotrophicus str. Delta H
MLIHTHEPLKFAFSTTDHERIPELSFGIMGVPFDSTTSYVPGARFGPMAVREASYSFEAYNLRFSENVKVKSFDFGDLEVSPGNFMKTAGFIGDSVSEVLDMGLKPLIIGGEHTVTLPVIENLPEHDSLTVVHLDAHMDLADTYAGERYSHATVMRRVHELGAEIIQIGIRSASSEEAEFAGEEGVRFCMAHEVMGDPAGAIELIDGIRGPVYISVDMDVLDPAYAPSVGNPAPAGLTPHIMEELVLALSGKDVVGLDVVEVASGGMADPTSVNAAKIIYDILTLL

SEQ ID NO: 84279 - DNA, 894 bp, Sulfolobus solfataricus P2
  CDS (1)..(894): transl_table=11
gtgagcgatggaagattactttatttaaatgagaatagtaggaaatttgctggatttaacaaggaaaaatccccatttgtaataattggaatacctatggacattacgagtagttataggcctggaagtagatttgctccgtcttcaattagagaatcggctcaatatattgaattttattcaatacgaaatgatgtagatatgggggaaataggtttcaatgatgtaggtgatataattctacatccttcaaacgttgaggagaatttaagtagaatatccagtgtgattagttatttccaagaaagtgggaagatcactatttctataggaggagagcatacaataaccgcgggaataataaaggggactaagagagaaggattatgcctagttagcttcgatgcacatttagatttaagagacgagtatatgggatatagatatgatcacgcttgtgttatgaggagaatatctgaatatggtgtgaaaattattgaagtcggtactagggcagttagtaaagaggaaatagaatatgctaaacaaaagggtatactcttcttcacccctcagcaaattagacttttaggagtcaaggaaactgcaagaagaataattacctcaacgcaagaatgtaaatcgctctatatctcagttgatatggatgggatagatccagcttatgcacccggcgtagcaacaccagaaccagatggattagaccccactaacctgttagatattattaacttaattgcagataaaagagttatagggtttgatattgtggaagtttctccttcttatgacacctcaggaataactagtgtattggcttccagaataattctggagacagcagctacagtttataaagctagatcgctttaa

SEQ ID NO: 84280 - protein, 297 aa, Sulfolobus solfataricus P2
MSDGRLLYLNENSRKFAGFNKEKSPFVIIGIPMDITSSYRPGSRFAPSSIRESAQYIEFYSIRNDVDMGEIGFNDVGDIILHPSNVEENLSRISSVISYFQESGKITISIGGEHTITAGIIKGTKREGLCLVSFDAHLDLRDEYMGYRYDHACVMRRISEYGVKIIEVGTRAVSKEEIEYAKQKGILFFTPQQIRLLGVKETARRIITSTQECKSLYISVDMDGIDPAYAPGVATPEPDGLDPTNLLDIINLIADKRVIGFDIVEVSPSYDTSGITSVLASRIILETAATVYKARSL

SEQ ID NO: 84281 - DNA, 912 bp, Thermoplasma acidophilum DSM 1728
  CDS (1)..(912): transl_table=11
ttgggagaccatggggatgcgaaagatcatgcttcagaactgaaggatattttttcgctgaagaagatcgcggacgccaagtacagctatgaagacagcgactatgtgatatttggcgtcccatttgacaacacatcaagctacaggcggggctcgaaatacgcccccgattccataagatcggcatacgtgaatctggaatcgtttgaattctcctaccggtttgacctgctcagggccagaatatcggatcttggtgacatggaagaatccgaggacgtggagtacgttgtcgaccaggtcgatcgtgtaacgaagatggtattcagcgatggaaagatacctataatgctgggcggtgaacactccataaccgttggtgccgtcagaaactttcctgaagacgtgcacatggtaatagtggatgcgcattccgatttcagggattcgtacatgggaaacaaactgaaccatgcctgcgttacgaaacgcgcgctggagatactgggcccaaacaggataacctcaatagggacaagatcggtttctctggaggaataccaggatcctgactttgaaaaggtggaattcataccgtcattcagcgtccgggaatacggcatcgaacggttcataaatgacatagagaggaggcccggaagggtttacatatccatcgatatggacggaatagatccagcgtatgcgcccgctgtgggaacaccggagccattcggccttaccgattatgaggtcaggcggcttgtggagaggctttcctacaaggccataggcatggatataaacgaattttccccgctgtacgataacggcaacacgtccatgctggcgggcaaattaatacaggtcttcatagccagcagggaaaaatacaggatagagcatatataa

SEQ ID NO: 84282 - protein, 303 aa, Thermoplasma acidophilum DSM 1728
MGDHGDAKDHASELKDIFSLKKIADAKYSYEDSDYVIFGVPFDNTSSYRRGSKYAPDSIRSAYVNLESFEFSYRFDLLRARISDLGDMEESEDVEYVVDQVDRVTKMVFSDGKIPIMLGGEHSITVGAVRNFPEDVHMVIVDAHSDFRDSYMGNKLNHACVTKRALEILGPNRITSIGTRSVSLEEYQDPDFEKVEFIPSFSVREYGIERFINDIERRPGRVYISIDMDGIDPAYAPAVGTPEPFGLTDYEVRRLVERLSYKAIGMDINEFSPLYDNGNTSMLAGKLIQVFIASREKYRIEHI

SEQ ID NO: 84283 - DNA, 1014 bp, Brucella melitensis 16M
  CDS (1)..(1014): transl_table=11
atgaccgacaagcttacctccgcgccaaagcatggacatacgagcatgctttattccaaggttcacacggatctcgacacgctcgacgcccacatcgcctttcttggtattccttacggctctgcctatacgatcgatgaagtcaccaacgaccagacgcgggcgccgacagcagtgcgccaggcgaccgaccgtgccgtccgcaacctcgaccggtatgacttcgacgtcgatggccctctctacgatggccgtgccatcaaggcggtcgattgcggcgatgtggtgggcgaccccaaggaccctggcgcacattaccgcaatgcggaagcagccgttcgcaagattctcgccgccggcgtcctgcccctcatcatcgggggcgatcacggcatcccgatcccggtcctgcgcgcctatgacgatcaggggccgatcaccctgatccagatcgacgcccatctggactggcgtgatcacatcaatggtgtgcatgacggcctttcaagcccgatccgccgcgcttcggaaatggcgcatgtcaaggatatcttccagatcggcatccgcgcccagggcacggcacgccccgaagaatacgaggccgcgagagcttacggctccaatatcatcacagcttacgaattgcatgatgtcggcatggacgccattctcgatcgtattcccgatggcgggcgctattacatcaccatcgatgccgacgggatcgatccttccgtcatgcctgcggtggctggtcccgcctttggcggtgtgacctatgcccagacgcgcaaactcctgcatggccttgtcaagaaggggcgcgtcgtcggcatggatatcgtggagattacgccttccaaggatgtaaaccagcttaccgcgatcgccgccggacgtttcttcgtcaacctgattggtgctgccgtgcgcgccgactatttcggcacgaaagcagagcttgaaacggccgctggcaaaaccatgaaaccggcccacgccgcagcctga

SEQ ID NO: 84284 - protein, 337 aa, Brucella melitensis 16M
MTDKLTSAPKHGHTSMLYSKVHTDLDTLDAHIAFLGIPYGSAYTIDEVTNDQTRAPTAVRQATDRAVRNLDRYDFDVDGPLYDGRAIKAVDCGDVVGDPKDPGAHYRNAEAAVRKILAAGVLPLIIGGDHGIPIPVLRAYDDQGPITLIQIDAHLDWRDHINGVHDGLSSPIRRASEMAHVKDIFQIGIRAQGTARPEEYEAARAYGSNIITAYELHDVGMDAILDRIPDGGRYYITIDADGIDPSVMPAVAGPAFGGVTYAQTRKLLHGLVKKGRVVGMDIVEITPSKDVNQLTAIAAGRFFVNLIGAAVRADYFGTKAELETAAGKTMKPAHAAA

SEQ ID NO: 84285 - DNA, 966 bp, Pyrococcus furiosus DSM 3638
  CDS (1)..(966): transl_table=11
atgaagatccagaggaagctgctaaggcagaaggtctcatttgacttttcttttcttttgataaaattcttaaactcttctctagctcgtctttttggtgatgacatgctgttacatacctacaaatcatttgatatggaactgccactagtcaacataaaagatgccgactacgtgattctgggccttccctatgatgggactacaagctataagccaggtgcaaggtttggtccagttttaataaggcaagctactctaaattttgagagctacattttggattatgacgttgatttagccgaagctaagatagctgacgctggagatgtagcactacctgtgagtatagaagaggcactaaaggtcgctgaggaaactgtgagagagttgagagaaataaatcccaaagctttgccaatattcctaggtggagagcattctatgacgctagccccagtaagagtcctcaaacctaagagttatgtagtctttgatgcgcatttggacttaagagacagctacgggggttcaaagttcaaccatgcttgtgttgctagaagaataaatgagttgagagtagaagtggcaatatttggagtgaggagtgggactaaggaggaggtggattttgcacggaaaaacggaatagagtggattcatgcaagagactacagctttgaagcgtttgtagatattgttagcactctaccagagcccatatacctttcaattgacatagataccttcgatgcatctctagttcctgaaactggaaccccagagcctggaggattaagattctgggacgttgtggaagctttagaatggttatcagagagcagggaagtcattgggatagatataatggaagttggaggagaaaagctgggcaatgtaacagccttaactggggcaaagctcctcttctacctcctgggaatgttcgaggggattaagaaatga

SEQ ID NO: 84286 - protein, 321 aa, Pyrococcus furiosus DSM 3638
MKIQRKLLRQKVSFDFSFLLIKFLNSSLARLFGDDMLLHTYKSFDMELPLVNIKDADYVILGLPYDGTTSYKPGARFGPVLIRQATLNFESYILDYDVDLAEAKIADAGDVALPVSIEEALKVAEETVRELREINPKALPIFLGGEHSMTLAPVRVLKPKSYVVFDAHLDLRDSYGGSKFNHACVARRINELRVEVAIFGVRSGTKEEVDFARKNGIEWIHARDYSFEAFVDIVSTLPEPIYLSIDIDTFDASLVPETGTPEPGGLRFWDVVEALEWLSESREVIGIDIMEVGGEKLGNVTALTGAKLLFYLLGMFEGIKK

SEQ ID NO: 84287 - DNA, 876 bp, Methanosarcina acetivorans C2A
  CDS (1)..(876): transl_table=11
atgtttttacccaattcctttatagatgctctcgcagactatgaatctgcacgctatgttattttcggcgtaccttttgacaatacttcctcgtatcgtgcaggtagccgctgggctccggatgcgatgaggcaggtttccgcaaattttgagagttataacccgactttcgacattgaccttgtggaccttccgatttatgatgccggaaacctggaaacctcagcttcggttgacgagaccttaagggatctttatgaagatgtaaagggcctgctgaacgacgggaagcttcccatcatgcttggaggcgaacattcccttacctattctacggtaaaggcatgtgccgagtttgcaggagatgatttcggagtccttatccttgatgcccacttcgacctcaggcaggagtacaggggattcaaacataaccatgcctgtgtgtccaggaacattctcgagcaggtcacgaagaacctcgtttccataggcataaggagcggcccggaagaagaatgggtttttgccagggaaaataacctgaaatactacacggcagatgatgttgagtcaacaggcatggtcgaagtcctcaaagaagcaattgaatggctgaactgcagccagctctacctttcccttgatatggatgcaatagaccctgcttatgccccggggctcggcacacctgaaccgtttggtctcagtgcccgggacgtcaggactgcaataaggacacttgctcctttttcaatggcttttgacattgttgaaattgcccccgaatacgattcgggacagacagccatgctcggagcaaaacttatgagggagttcattgcctcccatgcaaaaagctgcactaaaatataa

SEQ ID NO: 84288 - protein, 291 aa, Methanosarcina acetivorans C2A
MFLPNSFIDALADYESARYVIFGVPFDNTSSYRAGSRWAPDAMRQVSANFESYNPTFDIDLVDLPIYDAGNLETSASVDETLRDLYEDVKGLLNDGKLPIMLGGEHSLTYSTVKACAEFAGDDFGVLILDAHFDLRQEYRGFKHNHACVSRNILEQVTKNLVSIGIRSGPEEEWVFARENNLKYYTADDVESTGMVEVLKEAIEWLNCSQLYLSLDMDAIDPAYAPGLGTPEPFGLSARDVRTAIRTLAPFSMAFDIVEIAPEYDSGQTAMLGAKLMREFIASHAKSCTKI

SEQ ID NO: 84289 - DNA, 882 bp, Thermoanaerobacter tengcongensis MB4
  CDS (1)..(882): transl_table=11
ttgatgaggtgtaaaatgggagagagagtaaatttcatagatacaggaaagtttttaaccgctactaaggaatatgaggaggcagacattgtcttggtaggggtacctatggattacagcgtcagctttaagcctggtacccgctttggtccttcttctataaggcaggcctcctatgggcttgaaacttacagcgtttaccttgacaggcgcttagaagacaaaaaaatatgtgatttgggagatttggtgctgccttatggaaatatagagaaaagcttgagattaattgaggaagttgctgaaaaaatagtcaaagatggaaaaaagggcattttcttaggcggagagcatttgattacttatgggattttaaaaagttatataaaaaaatacggagataagttggctattttacactttgacgctcacacagacctaagagaagaattttttgatgagccctattcccacgctactgtattaagaaaagtatgggaactaagccctaaagttaaaatatatcactttggcataaggtctggagaaaaagaggagtttgaatttgccgaaaaaaatacaaatatgtttttgtatgaggtggtagaacctctaaaaaatgtgatgaaggagataaaagaaaattttatatacataacctttgatatagacgtattagatcctgcttttgcaccagggactggaacgccagaacccggtgggataacggcaaaagaggccttagaagccatccaccttttaaaagattttaatgtgatagggatggatttagtagaagtatctcctccttatgacgtcgcaggtattacatctatacttgcggcaaaacttgtaagagaagctattctctctttcttttaa

SEQ ID NO: 84290 - protein, 293 aa, Thermoanaerobacter tengcongensis MB4
MMRCKMGERVNFIDTGKFLTATKEYEEADIVLVGVPMDYSVSFKPGTRFGPSSIRQASYGLETYSVYLDRRLEDKKICDLGDLVLPYGNIEKSLRLIEEVAEKIVKDGKKGIFLGGEHLITYGILKSYIKKYGDKLAILHFDAHTDLREEFFDEPYSHATVLRKVWELSPKVKIYHFGIRSGEKEEFEFAEKNTNMFLYEVVEPLKNVMKEIKENFIYITFDIDVLDPAFAPGTGTPEPGGITAKEALEAIHLLKDFNVIGMDLVEVSPPYDVAGITSILAAKLVREAILSFF

SEQ ID NO: 84291 - DNA, 876 bp, Methanosarcina mazei Go1
  CDS (1)..(876): transl_table=11
atgtttttacccaattcctttatagatgccctcgcagactacgaatctgcacgctacgtaatttttggcgtaccctttgataatacctcttcataccgtgcaggcagccgctgggctccggatgctatgaggcaggtttctgcaaattttgagagttataacccggttttcgacatagaccttgtagaccttccgatatatgatgcaggaaacctggaaacttcagcctcggttgacgagaccctgagagacctttacgaagaggtaaaggctctgctgaacaacggaaagcttcctattatgcttgggggcgagcactccctgacttattctacggtcaaagcctgtgcggaattcgcaggggatgatttcggagtccttattcttgatgcccactttgacctcagggaggagtacagagggttcaaacacaaccatgcatgtgtatcccggaatattctggaaaatatcacggataatctcgtttctataggtataaggagcgggcccgaagaagaatggatttttgccagagaaaataagctgaaatactacacggcagatgatgttgaatccataggcatggtagaagtcctcaaagaagcgattgaatcgcttgactgcagccagctctacctttcccttgatatggatgcaatagatcccgcgtatgcccccggactgggaacacctgaacctttcgggctgagtgccagggatgtcaggactgcgataaggacccttgccccttactcaatggctttcgatgttgttgaaattgcccctgaatacgactccggacagacagcgatgctcggagcaaaacttatgagagaatttattgcctctcatgcaaaaagctgcatcaaaaaataa

SEQ ID NO: 84292 - protein, 291 aa, Methanosarcina mazei Go1
MFLPNSFIDALADYESARYVIFGVPFDNTSSYRAGSRWAPDAMRQVSANFESYNPVFDIDLVDLPIYDAGNLETSASVDETLRDLYEEVKALLNNGKLPIMLGGEHSLTYSTVKACAEFAGDDFGVLILDAHFDLREEYRGFKHNHACVSRNILENITDNLVSIGIRSGPEEEWIFARENKLKYYTADDVESIGMVEVLKEAIESLDCSQLYLSLDMDAIDPAYAPGLGTPEPFGLSARDVRTAIRTLAPYSMAFDVVEIAPEYDSGQTAMLGAKLMREFIASHAKSCIKK

SEQ ID NO: 84293 - DNA, 969 bp, Streptomyces coelicolor A3(2)
  CDS (1)..(969): transl_table=11
atgagcagcaacgagacgccccgcggtcccgtcgactcctcccggatcccgcggtacgccgggcccgcgaccttcgcccggctcccgcgcctggacgaggtcggcgccgccgacgtcgccgtcgtgggcgtgccgttcgactcgggcgtctcctaccggcccggcgcccgcttcggcggcaacgccatccgcgaggcctcccgcctgctgcgcccctacaacccggcgcaggacgcctcccccttcgccctcgcccaggtcgcggacggcggcgacatcgccgtgaacccgttcaacatccacgaggccgtcgagacgatcgaggccgccgccgacgacctcctcggcaccggcgcccgcctgatgaccctgggcggcgaccacaccatcgccctgccgctgctccgctcggtcgccaagaagcacggccccgtcgccctgctccacttcgacgcccacctggacacctgggacacctacttcggcgccgagtacacgcacggcacccccttccggcgggcggtggaggagggcgtcctcgacacctcggccctctcccacgtcggcacccgcggtcccctgtacggcaagaaggacctcaccgacgacgagaagatgggcttcggcatcgtcacgtcggcggacgtctaccgccgcggcgccgacgagatcgccgaccagctcaggcagcgcatcggggaccgcccgctgtacatctccatcgacatcgactgcctcgaccccgcccacgcccccggcaccggcacccccgaggccggcggcatgacctcccgcgagctgctggagatcctgcgcggcctggcctcctgcaacctggtctccgccgacgtcgtcgaggtggctcccgcctacgaccacgcggagatcacgtcggtggccgcgtcccacaccgcctacgaactgaccacgatcatgtcccgccagatcgccgaggcgcgtacgaagtga

SEQ ID NO: 84294 - protein, 322 aa, Streptomyces coelicolor A3(2)
MSSNETPRGPVDSSRIPRYAGPATFARLPRLDEVGAADVAVVGVPFDSGVSYRPGARFGGNAIREASRLLRPYNPAQDASPFALAQVADGGDIAVNPFNIHEAVETIEAAADDLLGTGARLMTLGGDHTIALPLLRSVAKKHGPVALLHFDAHLDTWDTYFGAEYTHGTPFRRAVEEGVLDTSALSHVGTRGPLYGKKDLTDDEKMGFGIVTSADVYRRGADEIADQLRQRIGDRPLYISIDIDCLDPAHAPGTGTPEAGGMTSRELLEILRGLASCNLVSADVVEVAPAYDHAEITSVAASHTAYELTTIMSRQIAEARTK

SEQ ID NO: 84295 - DNA, 882 bp, Coxiella burnetii RSA 493
  CDS (1)..(882): transl_table=11
atgaaatgcctccctcctgaaaaagcctttttaggactcgaaccgcaaaaggctgtcccttatgaaaaagccaaagcggtgatcattccttttgggcttgaacgttcggtcagctatgggggagggacggcacaagggccggcggcaatgattgaagcgtcttttgaagtggaattatttgatgaagcgctttggtgcgaaccttattgcgatatcggcatcgtgacgttggaagaacctaaaatcgaagctgatatgcaaagcgcattgaaacaactggaaacgttagtgcaacaggtattagatgacgaaaaattccccttcgtttttggaggcgagcattccataacggcgggttctattcgcccatttgtgaacgcctatgataacttagcgattttacattttgatgctcatgcagatttgcgcgatggttatgaaggcgagcattattcgcacgcctctgctattagacgctgtttggactatcctagtgtggaagtcatttcagtgggtattcgaaatatttcagcggaagaaattcccttttttgaagccaaccgcaatcgcattcatatttattgggcgaaagataaaaaaacttgggatattaatgaaatcattgcgcctttaaaaaatcgccctatttatctgactttcgatcttgacggttttgatgcaagcttaatgcctgccactgggacccccgaacctggcggccttttttggaatgacgctcaagaaattattactgcggccggtcaagtgggcactattgtaggcgctgatattaatgaattagcacctatccctggattccacagttgcgattttttagccgcaaaattagcttacaaaattctttcatccgccttcaaatag

SEQ ID NO: 84296 - protein, 293 aa, Coxiella burnetii RSA 493
MKCLPPEKAFLGLEPQKAVPYEKAKAVIIPFGLERSVSYGGGTAQGPAAMIEASFEVELFDEALWCEPYCDIGIVTLEEPKIEADMQSALKQLETLVQQVLDDEKFPFVFGGEHSITAGSIRPFVNAYDNLAILHFDAHADLRDGYEGEHYSHASAIRRCLDYPSVEVISVGIRNISAEEIPFFEANRNRIHIYWAKDKKTWDINEIIAPLKNRPIYLTFDLDGFDASLMPATGTPEPGGLFWNDAQEIITAAGQVGTIVGADINELAPIPGFHSCDFLAAKLAYKILSSAFK

SEQ ID NO: 84297 - DNA, 912 bp, Prochlorococcus marinus subsp. marinus str. CCMP1375
  CDS (1)..(912): transl_table=11
atgaataaaagtaaccaaaacaaagatccaatctttaattgtgatgatgctatttatatgtgtgcaaagcgagaagtagataattgcaacctaggcatctatggtgttaattatgatggaacgacgtcttttaggccaggagctagatttggcccttcttcaattagacaggttagtaatggaatagaatctttttgtccacaattaaaccttgatcttgaagatattaattttacagattttggtaacttagaaataaattttggagctccagaaccagttattaagaaagtaaaaactgcttcgaatttcatttattctttaggaatgaaaccattgctcattggtggtgagcattcaattaccattggatcaattcaatcaactatagaatatttcccgaacttaatacttatacaattagatgcacatgcagatctcagagaagaatggctaggatccaaatttaaccatgcatgtgttatgcgaagatgtcttgaaatgataagtagtgaaagagtctttcaagttggaataagaagcggtacaaaaaaagaaatgcatgagttaagaaagacaaaaagattggtaaatttcatttcaggacaacctgcaaaagaactatataacgcattaaatccacataaaggtaaacctatttacttaactgttgatgtagattggtttgatcctagtgttatatcagggacaggaactcctgaaccaggaggtttcacttggcaagacttttctgcaataattaatgttcttcaaaaccataaaataattggtgcagatattgtggaattagcgccacagttagatccatctggagtaagtagtatagtaggtgcaaaaataactagaagtttaataatgttgctcagcatttctcaatcaacaattagataa

SEQ ID NO: 84298 - protein, 303 aa, Prochlorococcus marinus subsp. marinus str. CCMP1375
MNKSNQNKDPIFNCDDAIYMCAKREVDNCNLGIYGVNYDGTTSFRPGARFGPSSIRQVSNGIESFCPQLNLDLEDINFTDFGNLEINFGAPEPVIKKVKTASNFIYSLGMKPLLIGGEHSITIGSIQSTIEYFPNLILIQLDAHADLREEWLGSKFNHACVMRRCLEMISSERVFQVGIRSGTKKEMHELRKTKRLVNFISGQPAKELYNALNPHKGKPIYLTVDVDWFDPSVISGTGTPEPGGFTWQDFSAIINVLQNHKIIGADIVELAPQLDPSGVSSIVGAKITRSLIMLLSISQSTIR

SEQ ID NO: 84299 - DNA, 885 bp, Prochlorococcus marinus subsp. pastoris str. CCMP1986
  CDS (1)..(885): transl_table=11
atgatcaataaaaatttatttgataacgaaagtgcaatttttatgggagccaaaagaaatccagatgattgttcaattggaatatttggagtcaattatgacggtacatgctcttataagtcagggactagatttggtccaaatgccataaggctagtaagcacatgcttagagacattttgtccaagattaggaaaggatttagaagattttaattatgttgattttggttcactagaaatagataaaaatgactcaatatctgtcattaaagcagtcaaatcagcaacagatttcattatgagtagcaagcttactcccattatgcttggaggtgagcactctattactagtggtgctattgaggcgttagtaaatagatatccagatctgattttaattcaactagatgctcatgcagatctaagaacctcatatatggggaatgaacatagtcatgcttgtgcaatgcaaagatgcttagatattttacctgaaaaaaagattttgcaagtcggaataagaagtggtaccaaagaagaatttaaatttatgagtcaaaaaaagcaattagtaaaattcttgccaggagggaatgctcaagaatttaaaaaagcccttcttccttactctaattcgccaatatatttaacaatagatttggattggtttgatccaagtttattacctggtacgggaactccagaaccaggaggttttttttggaatgactttgaagtaattcttgaaactctaaaagaatttagaattgtcgcttcagatattgtggaattatctccagaaattgacaatagcggagttagtagtatagttgccgcaaaagtactgagaagcttaattatgtcagtacaaaatatgcaataa

SEQ ID NO: 84300 - protein, 294 aa, Prochlorococcus marinus subsp. pastoris str. CCMP1986
MINKNLFDNESAIFMGAKRNPDDCSIGIFGVNYDGTCSYKSGTRFGPNAIRLVSTCLETFCPRLGKDLEDFNYVDFGSLEIDKNDSISVIKAVKSATDFIMSSKLTPIMLGGEHSITSGAIEALVNRYPDLILIQLDAHADLRTSYMGNEHSHACAMQRCLDILPEKKILQVGIRSGTKEEFKFMSQKKQLVKFLPGGNAQEFKKALLPYSNSPIYLTIDLDWFDPSLLPGTGTPEPGGFFWNDFEVILETLKEFRIVASDIVELSPEIDNSGVSSIVAAKVLRSLIMSVQNMQ

SEQ ID NO: 84301 - DNA, 861 bp, Synechococcus sp. WH 8102
  CDS (1)..(861): transl_table=11
atgacccctttcgacagcgaaggcggcatcttcatgggatcccggcgcgacccagccggctgccgcgtcggcctgttcggcgttccctacgacggcaccacctcctttcggccaggcacccgtttcggacctgcagcgatccgtgaggtcagccaaggcctggaaacctattgcccgcagcttgatctggatctagaggatctggcctatgccgatctcggtgctgttgatatccccttcggtgcaccggaaccggtcgtgaacgccgtgcagcaggccacgacggctgtgctcgatctgggtctgaaacctctgatgctgggcggtgagcattcgatcagctccggcgctgtggccgccgttgccaaccaacatcccgatctggtgctggtgcagctggatgcccatgccgatctcagagaggagtggctcggtacccgccacagccacgcctgcgccatgcggcgctgcctggaggtgctgcccagtggcgacctgctgcagctggcgattcgcagcggcacccgcagcgaattccatgagctgcacagcagtggtcgacgcatggatgacgtccaggccctgagggatgccatggctccctggaccggccgcccgatttatctcaccgtggatctggactggtttgatccagccgttctgcctggaacgggtacccccgagccagggggcttcctatggggggatttcgcggccgtagttgatgtgctgagtggccatcggcttgtggctggcgacgtggtggaactggcaccgcaactcgacagcagtggggtcagctccgttctggccgccaaagtgacacgcagcctgattttgctattgggtgccgatcaataa

SEQ ID NO: 84302 - protein, 286 aa, Synechococcus sp. WH 8102
MTPFDSEGGIFMGSRRDPAGCRVGLFGVPYDGTTSFRPGTRFGPAAIREVSQGLETYCPQLDLDLEDLAYADLGAVDIPFGAPEPVVNAVQQATTAVLDLGLKPLMLGGEHSISSGAVAAVANQHPDLVLVQLDAHADLREEWLGTRHSHACAMRRCLEVLPSGDLLQLAIRSGTRSEFHELHSSGRRMDDVQALRDAMAPWTGRPIYLTVDLDWFDPAVLPGTGTPEPGGFLWGDFAAVVDVLSGHRLVAGDVVELAPQLDSSGVSSVLAAKVTRSLILLLGADQ

SEQ ID NO: 84303 - DNA, 1197 bp, Magnaporthe grisea 70-15
  CDS (1)..(1197)
atgaggcctgtggtctacctcgccgcgttgctcgccactgctggtgcagctgttgcgtgcgctggtggtaagcatcatgacgaccatgaatggaccaaagaagagttggacgagctagaaagaaaatggggaatggagtggccatttgttggcattggatcctttgctcatcttaaatacgtaaaatgcctcacgacaccgagtgaggactttgatattgcaatcgtaggtgcaccttttgacacagccgtcagctatcgtcctggagcccggttcggccccagggctatccgccaggcatcaagcagacagaccacctttcgtggcttcaacccccgtgcaaatatcaacccgtaccaaaactgggcaaagatcatcgactgcggtgacatcccagtcacgccagtggacaacgccgtggcgctcacgcagatgacggcagcctttggcgagcttggcatgcacaagccgacctcgggtcttctgcaaaggcccaagctggtgacgctgggaggcgaccactcgctcgcgttggcagccctccgagcgctcaagaagatccacggcaagccgatccgggtgctgcactttgatgcgcacctggatacttggcacccggccaagtacccttcggcgtggccgtcagagcaggcccacttcaaccacggcagcatgttttggctcgcgggctccgagggcctcatctccaactcgagcgacgcgccgtcggtgcacgcgggcctgcgcacgcgcctgagcggcgacgactggggcgactacgacgacgacacggcgcagaactggaagcgcatcgccgccgacgacattgacgagctgggcgcctcgggagtcgtccgcaccatcatgtctcacctcggcaccgaagaccccgtgtacctctcggtcgacattgacgtcctcgacccagcttttgccccgggcacgggcacgcccgagcccggcggctggaccacccgtgagcttatccggatcctgcgcggaatcgaggacctcaacgtcgtaggtgccgacatcgtcgaggtctcgccggcgtaccagggcgccggggaggagacggcgcttgctggggcgcaggtcgcctacgagatcatctcgagcatggtcaagaaggggatgaaggagatggggaaggagacggcgagtgggttcattggtgtcgagcgtgatgagctgtga

SEQ ID NO: 84304 - protein, 398 aa, Magnaporthe grisea 70-15
MRPVVYLAALLATAGAAVACAGGKHHDDHEWTKEELDELERKWGMEWPFVGIGSFAHLKYVKCLTTPSEDFDIAIVGAPFDTAVSYRPGARFGPRAIRQASSRQTTFRGFNPRANINPYQNWAKIIDCGDIPVTPVDNAVALTQMTAAFGELGMHKPTSGLLQRPKLVTLGGDHSLALAALRALKKIHGKPIRVLHFDAHLDTWHPAKYPSAWPSEQAHFNHGSMFWLAGSEGLISNSSDAPSVHAGLRTRLSGDDWGDYDDDTAQNWKRIAADDIDELGASGVVRTIMSHLGTEDPVYLSVDIDVLDPAFAPGTGTPEPGGWTTRELIRILRGIEDLNVVGADIVEVSPAYQGAGEETALAGAQVAYEIISSMVKKGMKEMGKETASGFIGVERDEL

SEQ ID NO: 84305 - DNA, 1149 bp, Gibberella zeae PH-1
  CDS (1)..(1149)
atgaagctcttgaacctcctctcattggcggggctggcagcagcttgcgctcatgatcatgacgataagcaatggaccaaggaggaactcaacgagctcgaggataaatggggttacgaatggccttttgctggcatcaacacctttgcccatcttaagcatgtcaagtgtctgactgaacccactgagccattcgacatcgccatcgtgggtgtccccttcgacacagccgtgagctaccgcccaggagctcgctttgggcctcgagcaatccgctcagcatctgcccgccaaacatcgatgcgtggcttcaacccccgagctggtatcaacccgtatcagaattgggccaagattgttgactgtggcgatgtttctgtcacaccaattgataacggcattgctcgtgagcagatgactcaggcgttcaagcagcttggtcgtcgtagaactgtttctgcgctggcacccaaggctcgccttgtgacattgggtggtgatcactcgctggctctccctgctttgcgagctctgaacgagatccacggaaagcctatccaggttttgcactttgatgctgcctatccctcatggtggggagcaactcactttaaccacggctccatgttctggatggcgaatcaagaaggtttactatccaactcgtctactgagcgctctgtccacgccggtctgcgcacccgtctcacaggcaccgacttctccgaccatgaagacgattcatcacaaggctgggtccgtttcactgccgacgatatcgatgaccttggcacaaagggcatcatagacggtatcctcaaggtgcttggtactgaaaaccccgtctatctctccgtcgacattgacgttctcgaccctgcctttgcgcctggcacaggtacccctgagcctggcggttggtccacccgcgaattcatccgcatcattcgtgggcttgagggcctgaatcttgttggtgctgatgttgtcgaggtatctcctgcttaccaaaatggaggtgaggagacagcacttgctgctgcccaggttgtctatgagattattagctccatggtcaagaggagtcttcaagatggcggcaaggagggcaacggcggcaatgcagctgaggctaaggacgagttgtaa

SEQ ID NO: 84306 - protein, 382 aa, Gibberella zeae PH-1
MKLLNLLSLAGLAAACAHDHDDKQWTKEELNELEDKWGYEWPFAGINTFAHLKHVKCLTEPTEPFDIAIVGVPFDTAVSYRPGARFGPRAIRSASARQTSMRGFNPRAGINPYQNWAKIVDCGDVSVTPIDNGIAREQMTQAFKQLGRRRTVSALAPKARLVTLGGDHSLALPALRALNEIHGKPIQVLHFDAAYPSWWGATHFNHGSMFWMANQEGLLSNSSTERSVHAGLRTRLTGTDFSDHEDDSSQGWVRFTADDIDDLGTKGIIDGILKVLGTENPVYLSVDIDVLDPAFAPGTGTPEPGGWSTREFIRIIRGLEGLNLVGADVVEVSPAYQNGGEETALAAAQVVYEIISSMVKRSLQDGGKEGNGGNAAEAKDEL

SEQ ID NO: 84307 - DNA, 1386 bp, Ustilago maydis 521
  CDS (1)..(1386)
atgattaccagaaagaacgctttgatcctggcctttgtcctggcttgtgcatccttagccagttcgcatgcaagcccgcattctcccggactcgaccaagagcatcacggtgcaggagcgcacagctctgccgaatacgcgcccatccctctggttgagttcccctccaacgatatcgacgatccttggacgaaaaagtattccggcgtcgcaaagcctgcttactctggcgtgaacacttacgcccacttgcctactgtcaagtgccttgatgatcccagccagttgttcgacgtagccgtgctcgggatcccttacgacctcaccgtaacctatcgacccggtgccagattcgggccgaatgcgattcgtcaagctagcagacggcagagagcgggcagaacgtactctttgtatcatgctcaagacccgtacaataccggtttgcgatttctagactgtgacgacattcccacttctggatttgatcctgctttggcgatcgatcagatcgaagctgggtatacttcgcttttgcaacgtcgagctgcttccgatccatcgcttagcttctcttcaactccaccaaactcagtagtttcgaccaaatcgtggcaagcattctccaacgcaggcttggcaaaagacggcagatcgcaccccaagatcgtctccatgggtggagatcacacgattgtgctgccgatccttcgatcgctctaccgagtatatggacccatcgcggtgattcactttgatgcacatctcgacacatggcctccagaggtctcacctgcaggctcgccaacgcgccaacaccagatccagcacggcacctttttctggcaagctgcgctcgaaggacttatcgcacgcaatcaatccattcacgccggcatccgtacacgactcggctcctacgacgacattcaacacgacgcatcgatcggcttcgacatcatcacctccgatgacattgacgaccttggcattccggctatcatccaaaacatccggtctcgtgttggcgccatgcccgtctatctcagtatcgatattgatacgctcgatccgggctttgctccgggcacaggcacgttggaatccgcaggttggagccccagagagctgaggaggattttgagaggactggaagggctgaactttgtcggatttgatttggtagaagtgagcccagcgtatgaccaggccgagatcacagcgtatgcagcaagcgatttgatctacgaattcatgaatctcttgattagcggcaacaacttgcaagcggatggaaaggttgctgagcccaagaggaaaggtaggcgggcacagaaagcaaaaggcgtcgttgcatctctcttcaatcatggggacgaactgtaa

SEQ ID NO: 84308 - protein, 461 aa, Ustilago maydis 521
MITRKNALILAFVLACASLASSHASPHSPGLDQEHHGAGAHSSAEYAPIPLVEFPSNDIDDPWTKKYSGVAKPAYSGVNTYAHLPTVKCLDDPSQLFDVAVLGIPYDLTVTYRPGARFGPNAIRQASRRQRAGRTYSLYHAQDPYNTGLRFLDCDDIPTSGFDPALAIDQIEAGYTSLLQRRAASDPSLSFSSTPPNSVVSTKSWQAFSNAGLAKDGRSHPKIVSMGGDHTIVLPILRSLYRVYGPIAVIHFDAHLDTWPPEVSPAGSPTRQHQIQHGTFFWQAALEGLIARNQSIHAGIRTRLGSYDDIQHDASIGFDIITSDDIDDLGIPAIIQNIRSRVGAMPVYLSIDIDTLDPGFAPGTGTLESAGWSPRELRRILRGLEGLNFVGFDLVEVSPAYDQAEITAYAASDLIYEFMNLLISGNNLQADGKVAEPKRKGRRAQKAKGVVASLFNHGDEL

SEQ ID NO: 84309 - DNA, 1197 bp, Cryptococcus neoformans var. neoformans B-3501A
  CDS (1)..(1197)
atgtatgggcggctcggtgtctccattcttctgatggcagctgcatcaaatgtactagccaaaattcaagaagacgacggttatagcgaacagctcgacccctggaacgacgaatatgcgaacactccagacttgagcttcagtggagtagcaagttttgcccatctcccacataaaaggtgcttggacgtcaaggatgcagcatttgatattgctctattgggtgtgccttttgactctgctgtttcatttcggcctggcgcgaggtttggaccatacgctttgagaagtggctcacgaaggcagcggcctgaccgtggctacaacagcaggttagaagtcaacccatattcaggagatctctccatacttgattgtggtgacgttcctgtgacacctttcgatcctgcaactgcggtaaagcaaatcaactcagcatatcgatccttactccatcatcctgttgtatcaccagaaaagatgcaaaacctaaacatgcagcgaggtctcgatggaaagatacacccccggatcatcactctgggcggcgatcataccattgttcttcctatcctcaatgccgttcatgaagtctacgggccagtctctgtcattcattttgatgctcatatcgacacatggaacccacacagatatgttggcagtgtctcggtccaggctgaccttaaccatgggactttcttttggcatgcgtacgagaaaggtttcataaagcctaattcatccatccatgctggtataaggacccgctttgggggcccccaagatttggaagatgatgtgactgcaggatttgatcttatccatactttcgatttggatgactttgggattgactggatcacagagaagattaaaaacagaatcggtgatgggccggtcgtgattagccttgacgtcgatgtcatggatcctgcctttgtacctgctactggtaccccggagtccggtggatggacttctcgagagcttcgtaggatccttcactcacttattgggctcaatatcgtagccttggacattgtggaactttcgcctgcttatgataccaatgccgagatatcggccattgccgcagcggacatggtgtacgactttttgtctatcctcgctctcggtgtagagcatcgcaacgacggcgtcagtgggacaaagacattgaaggatgagctttga

SEQ ID NO: 84310 - protein, 398 aa, Cryptococcus neoformans var. neoformans B-3501A
MYGRLGVSILLMAAASNVLAKIQEDDGYSEQLDPWNDEYANTPDLSFSGVASFAHLPHKRCLDVKDAAFDIALLGVPFDSAVSFRPGARFGPYALRSGSRRQRPDRGYNSRLEVNPYSGDLSILDCGDVPVTPFDPATAVKQINSAYRSLLHHPVVSPEKMQNLNMQRGLDGKIHPRIITLGGDHTIVLPILNAVHEVYGPVSVIHFDAHIDTWNPHRYVGSVSVQADLNHGTFFWHAYEKGFIKPNSSIHAGIRTRFGGPQDLEDDVTAGFDLIHTFDLDDFGIDWITEKIKNRIGDGPVVISLDVDVMDPAFVPATGTPESGGWTSRELRRILHSLIGLNIVALDIVELSPAYDTNAEISAIAAADMVYDFLSILALGVEHRNDGVSGTKTLKDEL

SEQ ID NO: 84311 - DNA, 900 bp, Prochlorococcus marinus str. NATL1A
  CDS (1)..(900): transl_table=11
atgaccaaatccaacctcaaagatctatcactatttaataacgatggtggaatatttttgggcgcccaaagaggcatcgatcaatgcagagtgtcacttttaggagttccttatgatggaacttgttgctttagacctggtgcaagatttggaccttctgctgttagggaagatagttatggaattgaaacatattgtccgcaattaaatttagatttagaagatataaaatttgctgatataggttcattagatgttccccttggagatgcaaaattaacacttgattatataaaagatgctacaaatattttacttaaaaataatttaaagcctcttattattggtggtgagcattcaataacaagtgggattattaaatcaataattactaagtatcctgacttgattatgcttcaattagatgctcatgcagaccttagagatgaatggttaggtagtaaatttagtcatgcatgtactatgaaaagatgtttagaaatactacctagcaaaaagatttttcaaataggaataagaagtggaacaaaatcagaatttcttgaaatgaataatagtaaaaggttaattcaacatactttaggggagaatgcaaaatctttagaagaagctctaaaaagttttaaaggtagaccaatctatttaacttttgatttagattggtttgatccctctgtaatgccaggaacaggcactcctgagcccggaggctatttttggggagattttgcagcaataataaatgtgattaagtctcataatttaattggtgctgatgtagtcgaattatctcctaaattagataacactggtattagtagcatccttgctgcaaaagttgtacgttcattaattctgttgttggacaaatcatcctaa

SEQ ID NO: 84312 - protein, 299 aa, Prochlorococcus marinus str. NATL1A
MTKSNLKDLSLFNNDGGIFLGAQRGIDQCRVSLLGVPYDGTCCFRPGARFGPSAVREDSYGIETYCPQLNLDLEDIKFADIGSLDVPLGDAKLTLDYIKDATNILLKNNLKPLIIGGEHSITSGIIKSIITKYPDLIMLQLDAHADLRDEWLGSKFSHACTMKRCLEILPSKKIFQIGIRSGTKSEFLEMNNSKRLIQHTLGENAKSLEEALKSFKGRPIYLTFDLDWFDPSVMPGTGTPEPGGYFWGDFAAIINVIKSHNLIGADVVELSPKLDNTGISSILAAKVVRSLILLLDKSS

SEQ ID NO: 84313 - DNA, 915 bp, Prochlorococcus marinus str. MIT 9303
  CDS (1)..(915): transl_table=11
atgacccaaaacacaacaaccactcaagcaagattcgacagcgaaggtgccatcttcatggctgcccgtcgcgaccctaccggttgcaacgtcggactttttggcgtgccttacgacggcacctcttcattccgtccaggcagccgcttcggtccggcagccatccgcgacgtcagcaacggcctagaaacctactgccctcagcttgatctggatctagaagagattgccttcaccgatcttggcgcccttgacattcccttcggcgaccctaagcccgttgtagaagcagtcaaaaaagccacccaaaacgtgctgcagatgggtctcaggccgctgatgctaggcggcgagcactcgatcagctccggagcagtggctgcaatcactgaatctcattcagatctcgtgctgttgcaactggatgcacatgcagacctccgccaagaatatctaggtgcgcgacacagccatgcctgtgccatgcgccgttgcctcgaggtactgcccagcgctcagctgctgcagttagcaatccgcagtggcacacgcgcagaatttcaggaactacacgatcagcaacggctggtgaaccacaaccctggccaagcagcgactgatctagctaaagcccttgcaccccatcaaggcaaacctctctatctcaccgtggatttggattggttcgacccatccgtactgccggggaccgggacacctgaaccaggcggttttctatggcgcgattttgccgccgtcgtggatgtaatacgacaccatcagcttgtcggcgccgacgtggtggaactcgccccccaacttgatccttcagggatgagtagtgtgctcggcgccaaggtgacccgcagcctgctcatgctgctcagcctgtgtgcaacatctgagcaaaattga

SEQ ID NO: 84314 - protein, 304 aa, Prochlorococcus marinus str. MIT 9303
MTQNTTTTQARFDSEGAIFMAARRDPTGCNVGLFGVPYDGTSSFRPGSRFGPAAIRDVSNGLETYCPQLDLDLEEIAFTDLGALDIPFGDPKPVVEAVKKATQNVLQMGLRPLMLGGEHSISSGAVAAITESHSDLVLLQLDAHADLRQEYLGARHSHACAMRRCLEVLPSAQLLQLAIRSGTRAEFQELHDQQRLVNHNPGQAATDLAKALAPHQGKPLYLTVDLDWFDPSVLPGTGTPEPGGFLWRDFAAVVDVIRHHQLVGADVVELAPQLDPSGMSSVLGAKVTRSLLMLLSLCATSEQN

SEQ ID NO: 84315 - DNA, 1098 bp, Mycobacterium sp. JLS
  CDS (1)..(1098): transl_table=11
ttggcagccagtgcattcggacccgacatcactttcctcggcgtccctcgatgcgacctctccgatgcgtcgacgtacgccgacgccgacatcgtcatcctcggtgcacccctcgacggcggtacgacctaccgctcaggtgcccggttcgggccatcggcgctgcgccaggcgtgctacctgccccaggacgggtcgcggcccagcctggcgctgcgggtcgacggactcaaggatctccgggtgtacgacgccggcgacgtcgccctctacagcggcaacgtcgaacaggcggtgcagttgatcgaggatgaggtgttcacgatctccgccgcgggcgcgattcccatcatcctcgggggcgatcacacgatcgcctggccggaccataccggggtggcccgccaacacggtttcggcaaggtgtcgatgatccacttcgacgcccacgccgacaccggcgacatccacgcgggttcccttgtgggtcatggcaccccgatgcgaaggttgatcgagtccggggcgctgcgcggtgaccggttcctgcagttggggttgcgcggctactggcccgacgagccggtgctgcagtggatggccgcccagggtctgcggtcctacgagatgaccgagatcgtggcacgcggcctcgagacctgtctgaccgaggcgttcgagatcgccaccgacgactgtgagggcgtgttcctgtccgtcgacatcgacgtctgcgatcccgggcatgcccccggcaccggaacccctgagccgggcggcttctcggcgcgccaactgctcgacgcggtccgccggatctgctacgagcttccggtgctcggcgtcgacgtcgtcgaggtcgccccgccctacgaccatgccgacatcaccgcactgctcggcaaccgcgtggtgctggaggtcatctcggcgatcgcgcggcgccggaaggacgccgcggccggcaccacctgggatcccagccaacctctgctcgcgggccgggaggtcgacgagcagatgcgcctgatcgccgagggtgaggacgcgcgccgccgccgcgagggcggtgggcggcctcaccatcatcaccactga

SEQ ID NO: 84316 - protein, 365 aa, Mycobacterium sp. JLS
MAASAFGPDITFLGVPRCDLSDASTYADADIVILGAPLDGGTTYRSGARFGPSALRQACYLPQDGSRPSLALRVDGLKDLRVYDAGDVALYSGNVEQAVQLIEDEVFTISAAGAIPIILGGDHTIAWPDHTGVARQHGFGKVSMIHFDAHADTGDIHAGSLVGHGTPMRRLIESGALRGDRFLQLGLRGYWPDEPVLQWMAAQGLRSYEMTEIVARGLETCLTEAFEIATDDCEGVFLSVDIDVCDPGHAPGTGTPEPGGFSARQLLDAVRRICYELPVLGVDVVEVAPPYDHADITALLGNRVVLEVISAIARRRKDAAAGTTWDPSQPLLAGREVDEQMRLIAEGEDARRRREGGGRPHHHHH

SEQ ID NO: 84317 - DNA, 1038 bp, Mycobacterium sp. JLS
  CDS (1)..(1038): transl_table=11
gtgcagacgctcaaacttcatggccggattgtgtcaaacgtcgacgcgacacgcatcggtgccggccgcaggctgaggtccatgaccggacacatcctgggcgccgtgcccgccaccgaggtgccccgctacgccggcaagagcaccttcgcccgcatcgccgacatcggggaggtcagtgactacgacatcgcgatcctcggtgtcccgttcgacggcggcacgtcataccggcccggtgcgcgcttcggacccatgggggtgcgccaggccgcgcgcacgctgcgccccgggtaccacgtcgaactcggggtcgcgccgctggaacgggtgcaggtcgtcgacgccggtgacgtcaccgtcaccccctacgacatcgccgaggcctgccgccagatccagaaccacgccgccgacatcctcggcggcgggtcccgccggatcgtggccatcggcggcgaccacaccatcgcgctgcccaacctgcgcgcgctgcacgcggtgcacggcccggtggccctggtgcacttcgatgcccacctcgacacctgggacacctacttcaacgccccggtcacgcacggcacgatcttccgtcgggcgttcgaggaaggcctgctggtcgaggaccactccatccacgtcggtatccgaggacccatctacgaccagatcgacctgcatgaggacgcggagatgggattcaagatcatccgggcgggcgacctggacgtgatcgggatcgacgccgcggtcgacaccgtgcgccgccgggtcggggacgcgccggtgtatctgtccgtcgacatcgacgtgctcgacccggcgttcgcccccggcaccggcaccccggaatccgggggcctcaccgccagggaactgctgcgcatgctgcggcggttgcacgggctcaacatcgtcggtggtgatgtggtggaggtggcgcccgcctacgaccacgccgagatcacctgtgtcgcagccgcgaccgtcgtattcgacctggtgtcgctgatggtcgccggaggtgcgggctaa

SEQ ID NO: 84318 - protein, 345 aa, Mycobacterium sp. JLS
MQTLKLHGRIVSNVDATRIGAGRRLRSMTGHILGAVPATEVPRYAGKSTFARIADIGEVSDYDIAILGVPFDGGTSYRPGARFGPMGVRQAARTLRPGYHVELGVAPLERVQVVDAGDVTVTPYDIAEACRQIQNHAADILGGGSRRIVAIGGDHTIALPNLRALHAVHGPVALVHFDAHLDTWDTYFNAPVTHGTIFRRAFEEGLLVEDHSIHVGIRGPIYDQIDLHEDAEMGFKIIRAGDLDVIGIDAAVDTVRRRVGDAPVYLSVDIDVLDPAFAPGTGTPESGGLTARELLRMLRRLHGLNIVGGDVVEVAPAYDHAEITCVAAATVVFDLVSLMVAGGAG

SEQ ID NO: 84319 - DNA, 885 bp, Synechococcus sp. WH 7803
  CDS (1)..(885): transl_table=11
atgacaaccaacggattggacagcgttggggctgaggagatgtttgaccaagacggagcgatcttcatgggcgctcgccgcgatccatccgactgtcaggtcggtgtgttcggcgtgccctacgacggcaccacatcattccgccctggaacccggttcggccctgccgcgatccgagaggtcagttccggcctggagacgtactgcccgcagctcgatcgagacctcgacaccctggcctacgccgatctcggcgcgctcaacatcgcctatggagcacccgagcccgtcgtgcaggccgttgaacaggcaacggccaggattcttgccctgggccttaaaccgctgatgctcggtggggaacactccatcacctccggcgccgtcgcggctgtggccagggagcatcctgatttggtgctggtgcaactggatgcccatgccgatctcaggcagacctggctgggcgcaagccacagccatgcctgcgccatgcgccgctgcctggaggtgctgcccagtgaagacctgctgcaaatcgccatccgcagcggaacggcggatgaattttcagaactgcatcgcagcagccgcttggttcctctgcatcagctgcatcagaggctcagcgctctgcgcggacggccgatctatctcactgtggatctcgactggttcgaccctgccgtgatgccaggcacggggacacctgaacccggggggttcacctggcctgacttcgctgcgctggtcgatgcgctgcaacaccacaatcttatggccgcagacgttgttgaactcgcgcctcagctcgatcccagcgggatcagcagtgtgctggcagccaaggtcacccggagtttgctgctcttaatgactcaataa

SEQ ID NO: 84320 - protein, 294 aa, Synechococcus sp. WH 7803
MTTNGLDSVGAEEMFDQDGAIFMGARRDPSDCQVGVFGVPYDGTTSFRPGTRFGPAAIREVSSGLETYCPQLDRDLDTLAYADLGALNIAYGAPEPVVQAVEQATARILALGLKPLMLGGEHSITSGAVAAVAREHPDLVLVQLDAHADLRQTWLGASHSHACAMRRCLEVLPSEDLLQIAIRSGTADEFSELHRSSRLVPLHQLHQRLSALRGRPIYLTVDLDWFDPAVMPGTGTPEPGGFTWPDFAALVDALQHHNLMAADVVELAPQLDPSGISSVLAAKVTRSLLLLMTQ

SEQ ID NO: 84321 - DNA, 882 bp, Thermus thermophilus HB27
  CDS (1)..(882): transl_table=11
atgcgcctcgtcttcggcgaaaaggacgccccctacgaggaggcgcgggtcgtcgtcctgcccgtgccctacgacctctccctctcctttctcccgggggcccggaggggccccgaggccatcctcctggcgagccgggagcttgagccctttcttttggagctaggcgccgcccccgaggaggtggggatccacgcggccgagcccgtgccctgggtggcggggatggccgaggaaagccaccgcctgatccgggaggaggccttaaagcacctccgggcggggaagtggctggtggccctgggcggggaccactccgtcacccaccccctggtccaggcccaccgggaggccctgggggagttctccctcctccacgtggacgcccacgccgacctctacccggagtggcagggctcggtctactcccacgcaagccccttctaccgcctcctcacggaggggtttcccctggtccaggtagggatccgggccatggaccgggactccctgcgcttggcccgaaagaggggcgtggccctctttcccgcccaccggatccaccgggaagggcttcccctggacgagatccttgaggccctggggaagcgggtctacatcagcctggactttgacgccctggacccctccctcatgcccagcgtgggcacgccccttcccggggggctttcctaccgccaggtggtggacctcctcgaggccgtcttccgcgagaaggaggtggtggggatggacttcgtggagctctccccgaacggccagttccacgccgagatgaccgcggcccagctcgtctaccacgccatcggcctgaaagggcttcaggcgggctggctttcccgggaggtggaccacatttag

SEQ ID NO: 84322 - protein, 293 aa, Thermus thermophilus HB27
MRLVFGEKDAPYEEARVVVLPVPYDLSLSFLPGARRGPEAILLASRELEPFLLELGAAPEEVGIHAAEPVPWVAGMAEESHRLIREEALKHLRAGKWLVALGGDHSVTHPLVQAHREALGEFSLLHVDAHADLYPEWQGSVYSHASPFYRLLTEGFPLVQVGIRAMDRDSLRLARKRGVALFPAHRIHREGLPLDEILEALGKRVYISLDFDALDPSLMPSVGTPLPGGLSYRQVVDLLEAVFREKEVVGMDFVELSPNGQFHAEMTAAQLVYHAIGLKGLQAGWLSREVDHI

SEQ ID NO: 84323 - DNA, 873 bp, Desulfovibrio vulgaris subsp. vulgaris str. Hildenborough
  CDS (1)..(873): transl_table=11
atgacagactcgccgcacaagcgttttctggcttccgaactggacgatatcgcgccggaagaggcccggttccatgtcatccccgcgcctttcgaagcctctgtctcgtatggagggggaacgggcgcagggcctgacgccatcctcgacgcctctgaccagcttgagttgtgggacgggttatccatcccggcggcgcagggcatccacacgcacccccccgtggactgcacgggcgacgccgaggcggttctcgaccgcatctcccgagcgacccgaagcgttcttgatgcgggggggacgcctgtcctgctgggtggtgagcacaccgtcacctatggggcacttgcggccctgcgtgaacggttcggccgattcggggtggtgcagttcgatgcccatgccgacttgcgcgacagctacgaggggtcgcggtggagtcacgccagcgtgatgcggcgtgccgtgtccgaccttgggctaccgcttgtgcagtacggggtgcgcgccttgtgcacggaagaggtggctttccggcgtgaagccggggtgacgcactgggatgcggcgcaactggcccgttcaggcgtgcctgcacgaccgcttcccgatgactttccggaaagtgtctatgtgactttcgatgtggacggcctcgacccttccatcatgcccgccacgggaacgcccgtgccgggtgggcttggctggtatgatgccctgcggctggtggaacgttccgtgtccggacgcagggtgctcggtttcgatgtcgttgaactcgcccccatcgcaggatggcacgccgccgatttcgcggcagcgcggctggtctacgacatcatgggcatcatccagcgcatggcccgatga

SEQ ID NO: 84324 - protein, 290 aa, Desulfovibrio vulgaris subsp. vulgaris str. Hildenborough
MTDSPHKRFLASELDDIAPEEARFHVIPAPFEASVSYGGGTGAGPDAILDASDQLELWDGLSIPAAQGIHTHPPVDCTGDAEAVLDRISRATRSVLDAGGTPVLLGGEHTVTYGALAALRERFGRFGVVQFDAHADLRDSYEGSRWSHASVMRRAVSDLGLPLVQYGVRALCTEEVAFRREAGVTHWDAAQLARSGVPARPLPDDFPESVYVTFDVDGLDPSIMPATGTPVPGGLGWYDALRLVERSVSGRRVLGFDVVELAPIAGWHAADFAAARLVYDIMGIIQRMAR

SEQ ID NO: 84325 - DNA, 873 bp, Bacillus cereus E33L
  CDS (1)..(873): transl_table=11
atgcgttttgatgaagcttattcaggtaaagtatttattaaaagtcatccaagttttgaagagtcagaggtagttatttacgggatgcctatggattggacagtaagttaccgtccaggatctcgctttggccctgcacgtattcgtgaagtatcaatcggtcttgaagaatatagtccgtatttagatcgtgaactagaagaggtaaaatattttgatgcgggtgatattccattaccatttggaaacgcacaacgcagcttagacatgattgaagaatatgtatcaaaacttttagatgccggtaagtttccactaggtctcggcggtgagcacttagtgtcttggccaatttttaaggcaatggcaaaaaaatatccggatttagcaatcatccatatggatgctcatactgatttacgtgaatcgtatgaaggggagcctttatcccactctacacctattcgtaaagtgtgtgatttaattggtccggaaaacgtatattctttcggaattcgttctggaatgaaggaagaatttgaatgggcgaaagaagtaggtatgaacttatacaaatttgacgtattagaaccgttaaaagaagtattgccgaaacttgcaggacgcccagtctatgtcacaatcgacattgatgtattagacccagctcacgctccaggaacaggaacgttagaagctggtggtatcacatctaaagaattattagattccatcgtagcaattgcaaattcaaatataaatgtagttggagcagacttagtagaggtagctcctgtctacgaccatagtgatcaaacaccagtcgcagcaagcaaattcgtgcgggaaatgctgctcggttgggtgaaataa

SEQ ID NO: 84326 - protein, 290 aa, Bacillus cereus E33L
MRFDEAYSGKVFIKSHPSFEESEVVIYGMPMDWTVSYRPGSRFGPARIREVSIGLEEYSPYLDRELEEVKYFDAGDIPLPFGNAQRSLDMIEEYVSKLLDAGKFPLGLGGEHLVSWPIFKAMAKKYPDLAIIHMDAHTDLRESYEGEPLSHSTPIRKVCDLIGPENVYSFGIRSGMKEEFEWAKEVGMNLYKFDVLEPLKEVLPKLAGRPVYVTIDIDVLDPAHAPGTGTLEAGGITSKELLDSIVAIANSNINVVGADLVEVAPVYDHSDQTPVAASKFVREMLLGWVK

SEQ ID NO: 84327 - DNA, 873 bp, Bacillus licheniformis ATCC 14580
  CDS (1)..(873): transl_table=11
atgagatttgatgaagcatattccggcaaggtgtttatcgcaagccgccccgattgggaagaggcggacgccatcctttacggcatgccgatggattggacggtcagctaccgtcccggctcccgcttcggtccggcgagaatccgcgaggtgtccatcggacttgaagaatacagcccttatttggacagggagctggaagaggttcatttctttgacgccggcgacatcccgctgcctttcgggaacccgcagaagagcctcgacatgattgaagaatatgtcgacagcattttagataaaggaaaattcccgctcggtatggggggagagcatctcgtttcatggccggtcattaaagcgatgtacaaaaaatatcccgatcttgccatcatccatatggatgcgcacacagatctccgcgtcgactatgaaggagagccgctctcgcattcgacgccgatccgtaaagccgcggaactgatcggacccggcaatgtctattcattcggcatccgctccggcatgaaagaagaatttgaatgggcaaaagaaaacggcatgcacatttctaaatttgaagtgcttgagccgcttaaagccgtcctgccgaaactcgcggggcgtccggtttatgtgacgatcgacatcgatgtcttagatcccgcgcatgcgccgggaaccggtacggttgacgccggaggcatcacatccaaagagctgctcgcttcgattcacgaaatcgcccgctcagacgtcaatgtcgttggaggagaccttgtcgaagtcgctcctgtctatgaccattcggaacaaaccgcaaatacggcaagcaagctgattcgcgaaatgctgctcggctgggtgaaataa

SEQ ID NO: 84328 - protein, 290 aa, Bacillus licheniformis ATCC 14580
MRFDEAYSGKVFIASRPDWEEADAILYGMPMDWTVSYRPGSRFGPARIREVSIGLEEYSPYLDRELEEVHFFDAGDIPLPFGNPQKSLDMIEEYVDSILDKGKFPLGMGGEHLVSWPVIKAMYKKYPDLAIIHMDAHTDLRVDYEGEPLSHSTPIRKAAELIGPGNVYSFGIRSGMKEEFEWAKENGMHISKFEVLEPLKAVLPKLAGRPVYVTIDIDVLDPAHAPGTGTVDAGGITSKELLASIHEIARSDVNVVGGDLVEVAPVYDHSEQTANTASKLIREMLLGWVK

SEQ ID NO: 84329 - DNA, 963 bp, Burkholderia pseudomallei K96243
  CDS (1)..(963): transl_table=11
atgaatgaaacgctctacggcgacggcgcgatccgccgcccttccatctacggttcctcggtcgaaaacacttacgcgggcgtgctgtcgttcatgcggcgcaactacacgcgcgatctcggcggtgtcgacgtcgccgtctgcggcgtgccgctcgatctcgcgacgacgttccgctccggcgcgcgcctgggccctgcggcggtacgcgcggcgagcgtgcagcttgccgaactgcgcccgtacccttgggggttcgatccgttcgacgatctcgcggtgatcgactatggcgactgctggttcgacgcgcacaatccgctgtcgatcaagcccgcgatcgtcgagcacgcgcgcacgatcctgcaatcgggcgcggcgatgctgacgttgggcggcgatcactacatcacgtatccgctgctgatcgcgcacgcacagcggcacggcaagccgctgtcgctgattcacttcgacgcgcattgcgacacctgggccgacgacgcgcccgacagcctcaatcacggcacgatgttctacaaggcggtcaacgaagggctgatcgatccgaagacgtcggtgcaggtcggcatccgtacgtggaacgacgattacctcggcatccacgtgctcgacgccgcctgggtgcacgagcacgggccgcgcgcgacggccgagcgcatcgcgtcgatcgtcggcggccggcccgcgtatctgacgttcgacatcgattgcctcgatcccgcgttcgcgccgggcacgggcacgccggtcgcgggcgggctgtcgtccgcgcaggcgctcgcgatcgtgcgcggtctcggcggcgtgaacctgatcggtgcggacgtcgtcgaagtcgcgcccgcgtatgaccagagcgagatcaccgcgatcgccgccgcgcacgtcgcgtgcgatctgctgtgcctgtggcggcagcgcaagacgggcgcgcgctga

SEQ ID NO: 84330 - protein, 320 aa, Burkholderia pseudomallei K96243
MNETLYGDGAIRRPSIYGSSVENTYAGVLSFMRRNYTRDLGGVDVAVCGVPLDLATTFRSGARLGPAAVRAASVQLAELRPYPWGFDPFDDLAVIDYGDCWFDAHNPLSIKPAIVEHARTILQSGAAMLTLGGDHYITYPLLIAHAQRHGKPLSLIHFDAHCDTWADDAPDSLNHGTMFYKAVNEGLIDPKTSVQVGIRTWNDDYLGIHVLDAAWVHEHGPRATAERIASIVGGRPAYLTFDIDCLDPAFAPGTGTPVAGGLSSAQALAIVRGLGGVNLIGADVVEVAPAYDQSEITAIAAAHVACDLLCLWRQRKTGAR

SEQ ID NO: 84331 - DNA, 849 bp, Silicibacter pomeroyi DSS-3
  CDS (1)..(849): transl_table=11
atgagcatcttcctcgacagcgaactcaccaccgccgaacggggcgaggacgcccgtttccgcatcattccggtgccgctggagcgtaccgtctcttacggttcgggcacggcgggcggtccggctgcgatcatcgaagcgtctaacgagctggaacgcatcaccaacggcgccgagccctgcgcgcagggcatctacaccgaaccgccgctcgactgcgacggcccgctgcccgaggtgatggaacgtctggcacagcggaccgaggccgccatccgcgcgggccgcgtaccggtcatgctggggggcgagcattcgctcagcttcggcgcggtgatgggtgtggcgcgcgccctgggacagccgcttgggctggtgcagatcgacgcccatgccgacctgcgcatcgcctatcagggcgagaaacacagccacgcctcggtcatgcacctgctcgccgaagagggtattcggctggcgcaattcggcgtccgcgctctttgccagcaggaaatggacgagcgtgccagacacggcgtgttctacaaggatgccgaggagctggtcaccaccaacatccatgccatcgacctgcccgaggatttcccccagctggtctatgtcagtttcgatgtcgacgggctggacccggcccagatgcccgccaccggcacgccggtgcccggcgggctggggtattatcaggcgctgcatctggtcgagcacgcgctcaagggtcgcaaatgcgttggccttgacgtggtggaactggcgccggacggcaatgccgcctgggatttcaccgccgcccagatcgtctatcggctgatggcggcctgtaccgcctga

SEQ ID NO: 84332 - protein, 282 aa, Silicibacter pomeroyi DSS-3
MSIFLDSELTTAERGEDARFRIIPVPLERTVSYGSGTAGGPAAIIEASNELERITNGAEPCAQGIYTEPPLDCDGPLPEVMERLAQRTEAAIRAGRVPVMLGGEHSLSFGAVMGVARALGQPLGLVQIDAHADLRIAYQGEKHSHASVMHLLAEEGIRLAQFGVRALCQQEMDERARHGVFYKDAEELVTTNIHAIDLPEDFPQLVYVSFDVDGLDPAQMPATGTPVPGGLGYYQALHLVEHALKGRKCVGLDVVELAPDGNAAWDFTAAQIVYRLMAACTA

SEQ ID NO: 84333 - DNA, 948 bp, Silicibacter pomeroyi DSS-3
  CDS (1)..(948): transl_table=11
atgagcgatttcaaccagcccatcggcggcaatgatctggcccggttctcggggccgaataccttcatgcggctgccgcaagcgcaggcccttgatgggctggatgtggccattctggggattccgatggatatcggcacctcgtggcgctcgggcacacggttcgggccgaaacagatccgggcggaaagcgcgatgatccggccctataacatggcgacgggcgcggcgccgttcgacagtttgcagatcgccgatatcggcgatctggcgatcaacacgttttcgctggccgacagcctccgcatcatcaaggagagctatgacgcgatcctgacccatgacgtgatcccggtggcgatgggaggggaccattcgatcaccctgccgatcctgcgcgccatcgcggccagacatggcccggtggcgctggtgcatgtagatgcccatgcggatgtgaacgaccagatgtttggcgagcgtgaaacccacggcaccgtgttccgccgcgcctatgaggaagggctgatccagcccgacaagacctatcagatcggcattcgcggctcgggctacgccgccaccgattttaccgaggcgcagggctggggctttcagcagttcccggcctgggagctgtggcacaagtcgctggtcaatctgggcaccgagattcgccgcgatatcggcgaccgtccggtctatgtcacctatgatatcgacagtctggatcccgcctatgcaccgggcacgggcacgcccgagatcggcgggctgaccacgccgcaggcgctggagctgatccagtcgctgagggggctgaagatcgtcggctgcgatctggtcgaggtgtcgcccccctatgacacctcgggcaataccgcgctgaccgcggccaacctgctttatgaactgctctgcgtgctgcccggcgtgcaggcgcgctga

SEQ ID NO: 84334 - protein, 315 aa, Silicibacter pomeroyi DSS-3
MSDFNQPIGGNDLARFSGPNTFMRLPQAQALDGLDVAILGIPMDIGTSWRSGTRFGPKQIRAESAMIRPYNMATGAAPFDSLQIADIGDLAINTFSLADSLRIIKESYDAILTHDVIPVAMGGDHSITLPILRAIAARHGPVALVHVDAHADVNDQMFGERETHGTVFRRAYEEGLIQPDKTYQIGIRGSGYAATDFTEAQGWGFQQFPAWELWHKSLVNLGTEIRRDIGDRPVYVTYDIDSLDPAYAPGTGTPEIGGLTTPQALELIQSLRGLKIVGCDLVEVSPPYDTSGNTALTAANLLYELLCVLPGVQAR

SEQ ID NO: 84335 - DNA, 879 bp, Bacillus clausii KSM-K16
  CDS (1)..(879): transl_table=11
atgcgatttgacgaggcatactcaggcaaagtgtttattatgagccgcgccagttatgaagaggcagatgccgtcatttacggcatgccgatggactggaccgtttcctttcgtccaggttcccgttttggcccggcgcggatccgtgaagcttccttagggcttgaagaatacagcccctatgccgacaagcatttggaagaaatcaactattttgatgcaggcgacattcctttgccatttggcaatgcagcgcgaagcctagacattgtggaggaatacgttgattcccttttagcagatggcaagttccctctaggcctgggcggcgaacatttgctgtcatggccgatttttaaagcgatgtatcggaaatatcccgacttagcgatcatccatattgatgcccatgctgacttgcgcgaacaatatgaaggcgaggcgctatcccattctacgccgattcgcaaagcgtgtgagctaattggagccgagaacgtttattcatttggcatccgctcaggcatgcgtgaggaatttgcttacgcaaaggaagcaggtatgcatctctataaatttgacgtggcagagccgttaaaaaacgtgctgccccatctatcagggcggcccgtttacattacgattgacattgatgtattggatccggcacacgcgcctggcacaggcacagccgaagctggggggattacgtcaaaagagctgctcgaagcgcaaatgctgctctcccaagcagacattcaaattgtaggcgctgatctcgtggaagtagcaccagcttatgatccgactgagcaaacagccattgctgccagcaagtttgtgcgtgagatgcttctcggttgggtgcataaaagataa

SEQ ID NO: 84336 - protein, 292 aa, Bacillus clausii KSM-K16
MRFDEAYSGKVFIMSRASYEEADAVIYGMPMDWTVSFRPGSRFGPARIREASLGLEEYSPYADKHLEEINYFDAGDIPLPFGNAARSLDIVEEYVDSLLADGKFPLGLGGEHLLSWPIFKAMYRKYPDLAIIHIDAHADLREQYEGEALSHSTPIRKACELIGAENVYSFGIRSGMREEFAYAKEAGMHLYKFDVAEPLKNVLPHLSGRPVYITIDIDVLDPAHAPGTGTAEAGGITSKELLEAQMLLSQADIQIVGADLVEVAPAYDPTEQTAIAASKFVREMLLGWVHKR

SEQ ID NO: 84337 - DNA, 822 bp, Thermococcus kodakarensis KOD1
  CDS (1)..(822): transl_table=11
atgctcttcggaattccagaatccaaaaacccgaacctcctgctccttggaatccgctgggacggctcttcctcctacagaaagggcgcgagggacggcccaaaggccataagggaggcaacatcaagcgagctatacaacagctacacagagaatctcgtcaaccttgcggagagatggcggtacagagaccttggcgacgtggaggggaaatccttcgcggaggttcttgagagggtgaggaagctcgtgggggagaactacagtggtgagaggtttctcttcctcggcggcgaccactccataacctacgccaccttcagggccctcagggaggcgagcgggaaagagtttgggctgatatacttcgacgcccaccccgacctctatccccattatgagggcgacccctactcccacgcctgccccgtgaggcgcctcgtggaggagggctgggttaggggcgaaaacgttgttcaggtggggataagggccccaactcctgaacagcttgacttcgctgagagagaaggcatactgatttactccgcctcggaagtgtggaagggggccgaggtggaggttcccttcgagagggcctacctctccttcgacctcgacgtcctcgacccggcgtttgcccccggcgttggaaacccggagcctggaggcctcagcacgagggagctcattgagctcataaaaagcattgacgccgaggttgtggccttcgacgtggtagagctcaacccgcgctatgacgtgagcaacgtaacggccttcgcagctgctaagataatcagagaagtcctcgggaggtga

SEQ ID NO: 84338 - protein, 273 aa, Thermococcus kodakarensis KOD1
MLFGIPESKNPNLLLLGIRWDGSSSYRKGARDGPKAIREATSSELYNSYTENLVNLAERWRYRDLGDVEGKSFAEVLERVRKLVGENYSGERFLFLGGDHSITYATFRALREASGKEFGLIYFDAHPDLYPHYEGDPYSHACPVRRLVEEGWVRGENVVQVGIRAPTPEQLDFAEREGILIYSASEVWKGAEVEVPFERAYLSFDLDVLDPAFAPGVGNPEPGGLSTRELIELIKSIDAEVVAFDVVELNPRYDVSNVTAFAAAKIIREVLGR

SEQ ID NO: 84339 - DNA, 867 bp, Thermococcus kodakarensis KOD1
  CDS (1)..(867): transl_table=11
atggagttcctgtacacgtatgagactctcaagctggagttcccgctcgtagaacccgagaaagccaggttcatcctgctgggggttcccttcgacgggactacgagctacaaagctggggcacgcttcgggccgaccctaataaggcaggcgactctgaaccttgagagctacatcctagactacgaccttgacatagcggagctcccaatagccgacatcggagacattgccgtcgtcgcaggagacccgaggaaaacggcagacagggtaagggaaacccttgaagagctcaagaaggcaaacccaaaggctattccaatcctcctaggcggagaacattcccagacgcttggagcagttgaagcactgaagccagcaagctacgtcgtcttcgacgcccacctcgacctgcgcaacagctacgaagacaacccctacaaccatgcctgcgtcgcgaggcggatcagcgagctaggggtaaaggaagcgatattcggaatcaggagtggcaccaaagaggaagtcgattttgcaagggagagggatatcccgtgggtgcacgcgagggactacagctttgacgccttcgttgacctcgtagaggcccttcccgaaccggtttacctctcaatcgacatcgacgtctttgacctctctatggtgccctcaacgggcactcctgaggcgggaggtttaaggttctgggaggtagtggaggcaatagaatggctggtcgagaagaaggagatagcgggctttgacataatggaggttgcaggtgaaaagctcggcgatccgacggcattgacggctgcaaagctcctcttctactccattggtgcaatggcaaaattcgggcgctga

SEQ ID NO: 84340 - protein, 288 aa, Thermococcus kodakarensis KOD1
MEFLYTYETLKLEFPLVEPEKARFILLGVPFDGTTSYKAGARFGPTLIRQATLNLESYILDYDLDIAELPIADIGDIAVVAGDPRKTADRVRETLEELKKANPKAIPILLGGEHSQTLGAVEALKPASYVVFDAHLDLRNSYEDNPYNHACVARRISELGVKEAIFGIRSGTKEEVDFARERDIPWVHARDYSFDAFVDLVEALPEPVYLSIDIDVFDLSMVPSTGTPEAGGLRFWEVVEAIEWLVEKKEIAGFDIMEVAGEKLGDPTALTAAKLLFYSIGAMAKFGR

SEQ ID NO: 84341 - DNA, 975 bp, Thermobifida fusca YX
  CDS (1)..(975): transl_table=11
gtgagggaaggcggtaatcccgtgagcacaccgatcggtcccaccgactccagcttggttccccggtttgctggtccggcgacttttgcccgactgccccgcaccgatgaggtagccaagaccgatatcgccgtggtcggtatcccgttcgacagcggtgtgtcctaccgtcccggcgcccggttcggtcctgctgctatccgtgaggctagtcggctgctgcgcccctacaacccggggttggatgtgtccccgttcgctgaagtccaggtggccgacggcggtgacatcgcggtcaacccgttcgcgatcaaggaggccattgcaacggtcgaagcctcagccagcgagttgttgtctcagggtactcgcttggtgactttgggtggagaccacacgatcgcgttgccgctgctccgcgccgtgcaccgggtgcacgggccggtggcgctcctgcacttcgacgcccatttggacacgtgggacacctatttcggtgagccttacacgcacggcaccccgttccgccgtgccgtggaggaggggattctcgacacggaagccctcacccacgtggggatccgcggccccctctacggcaagaaggacttggaggacgaccgccggttcggtttcggtatcgtcaccgccgcggacgtgatgcgccgcggggtggacgagatcgctgacatggtgcggcagcggatcgggaaccggccgctatacgtgtccgtggacatcgacgtcctcgacccggcgcacgctcccggcaccggcaccccggaggcgggcggcctgaccagccgggaactgttggagctgctgcgtgggctggcctcctgcaacctggtgggggccgacgtggtggaggtttcccccgcatacgaccacgcgcagatcacggcgaccgcggccgcccacgtcgcctacgacttggtgtcccttctcgcgttgaccgcgaagaaggaccgctag

SEQ ID NO: 84342 - protein, 324 aa, Thermobifida fusca YX
MREGGNPVSTPIGPTDSSLVPRFAGPATFARLPRTDEVAKTDIAVVGIPFDSGVSYRPGARFGPAAIREASRLLRPYNPGLDVSPFAEVQVADGGDIAVNPFAIKEAIATVEASASELLSQGTRLVTLGGDHTIALPLLRAVHRVHGPVALLHFDAHLDTWDTYFGEPYTHGTPFRRAVEEGILDTEALTHVGIRGPLYGKKDLEDDRRFGFGIVTAADVMRRGVDEIADMVRQRIGNRPLYVSVDIDVLDPAHAPGTGTPEAGGLTSRELLELLRGLASCNLVGADVVEVSPAYDHAQITATAAAHVAYDLVSLLALTAKKDR

SEQ ID NO: 84343 - DNA, 900 bp, Prochlorococcus marinus str. NATL2A
  CDS (1)..(900): transl_table=11
atgaccaaatccaacctaagagatctatcactatttaataacgatggtgcaatatttatgggcgcccaaagagacatcgatcaatccagagtgtcgcttttaggagttccttatgatggaacttgttgctttaggcctggtgcaagatttggtccttctgctattagggaagatagttatggaattgaaacatattgtccgcaattagatttagatttagaagatattaactttactgatataggttcattagatgttccccttggagatgcagaattaacacttgattatataagcgatgctacaaatattttacttaaaaataatttaaagcctcttattattggtggagaacattcaataacaattgggattattaaatcaataattactaattatcctgacttaattatgcttcaattagatgctcacgcagaccttagagatgaatggttaggtagtaaattaagtcatgcatgtactatgaaaagatgtttagaaatactacctagcaaaaagatctttcaaataggaataagaagtggaacaaaatcagaatttcttgaaatgaataatagtaaaaggttcattcaacatactttaggagagaatgcaaaatctttagaagaagctctaaaaagttttaaagggagaccaatctatttaacttttgatttagattggtttgatccctctgtaatgccaggaactggcactcctgagcccgggggctatttttggggagattttgcagcaataataaatgtgattaagtctcataacttaattggtgctgatgtagtcgaattatctcccaaattagataccactggtattagtagcatccttgctgcaaaagttatacgttcattaattatgttattggacaaatcatcctaa

SEQ ID NO: 84344 - protein, 299 aa, Prochlorococcus marinus str. NATL2A
MTKSNLRDLSLFNNDGAIFMGAQRDIDQSRVSLLGVPYDGTCCFRPGARFGPSAIREDSYGIETYCPQLDLDLEDINFTDIGSLDVPLGDAELTLDYISDATNILLKNNLKPLIIGGEHSITIGIIKSIITNYPDLIMLQLDAHADLRDEWLGSKLSHACTMKRCLEILPSKKIFQIGIRSGTKSEFLEMNNSKRFIQHTLGENAKSLEEALKSFKGRPIYLTFDLDWFDPSVMPGTGTPEPGGYFWGDFAAIINVIKSHNLIGADVVELSPKLDTTGISSILAAKVIRSLIMLLDKSS

SEQ ID NO: 84345 - DNA, 876 bp, Methanosarcina barkeri str. Fusaro
  CDS (1)..(876): transl_table=11
atgtttttacccaattcctttatagacgctcttgcagactatgaatctgcacgttatgttatcttcggcgtgccttttgataatacctcttcttacagggcaggcagccgttgggctcctgacgctatgcggcaggcttctgcaaattttgagagttacaatcctactttcgacatagaccttgtcgatcttccgatctatgatgccggaaacctggaaacttcagctttggttgacgagactctgcagaacctctacgaagctacaaaagacctccttaatgatggaaagcttcccattatgcttggtggagagcattcgctaactttcgctatggtgaaagcctgcgccgaacttgcaggagaagatttcggggtccttgtcctagatgcccattttgacctcagggaagaatacaggggctttaagtataaccatgcctgtgtgtcccgaaatattctcagtgaggttactaagaatcttgtttctataggcataagaagcggcccggaagaagaatgggtttttgccagggaaaataacctgcagtattatacagctgatgatgtggaatccactggcatggtagagatccttaaagaagccctcgagtggcttgattgcagccagatctatctttcccttgatatggatgcaatagacccgtcttatgctcctggtctcggcacgcctgagcctttcggcctgagtgcgcgagatgtaaggactgcaataaggacgcttgctcctttttcaatggcttttgatgttgtagaaattgcccctgaatatgattccgggcaaactgccatgcttggggcaaaattgatgagggaatttattgcttcccatgcaaagagttgcaggaaagcatga

SEQ ID NO: 84346 - protein, 291 aa, Methanosarcina barkeri str. Fusaro
MFLPNSFIDALADYESARYVIFGVPFDNTSSYRAGSRWAPDAMRQASANFESYNPTFDIDLVDLPIYDAGNLETSALVDETLQNLYEATKDLLNDGKLPIMLGGEHSLTFAMVKACAELAGEDFGVLVLDAHFDLREEYRGFKYNHACVSRNILSEVTKNLVSIGIRSGPEEEWVFARENNLQYYTADDVESTGMVEILKEALEWLDCSQIYLSLDMDAIDPSYAPGLGTPEPFGLSARDVRTAIRTLAPFSMAFDVVEIAPEYDSGQTAMLGAKLMREFIASHAKSCRKA

SEQ ID NO: 84347 - DNA, 864 bp, Carboxydothermus hydrogenoformans Z-2901
  CDS (1)..(864): transl_table=11
atgcttcctgttgaaaaatttactggttttatgggcagttccgacaattatgaaggtgctgcctttgttttatttggtattcctatggattttaccgtcagttttcggccaggtgcccgcatggctccccagcatatccgtcaggtttcctttggtttagaggagtatgactgggatttggaaaaaagtcttaatgacgtaaacttttacgatatgggagatgtagcgcttactttgggcaggattgaagaaagctttaccagcatccggacagtaacgaaaaaagtgttgagtgacggtaaaattccgctaattatcggtggcgaacatttaattacttatccggtgatcctggaatttgccgaaaagtatcccgatttagctgtagttcactttgacgctcatgcggatttgcgggatcattatcagggagaaaaactttcccatgcaacggttatgcggcgtgtagcggaaattattgggccgcaaaacatttatcatatcggtatccgttccggtacccaagaggaaaaggagtttattacaaaaaaatcaaactatcttggccaaaacgtattggcgggcgtagaaaaagcgttggaaaaacttgggcaaaagccggtgtttatttccctggatattgatgtggtagatccggcctttgccccgggaaccggaaccccggaaccggggggagctaccagcattgagataatggaagccattgtaaaacttagttctttaaatattgttggcatggatttagttgaagtattgcccgtctatgatccttcggaacgtacatcgctcttggcggccaaaattttgcgccgggcattgttatcttttaatattaccaggtaa

SEQ ID NO: 84348 - protein, 287 aa, Carboxydothermus hydrogenoformans Z-2901
MLPVEKFTGFMGSSDNYEGAAFVLFGIPMDFTVSFRPGARMAPQHIRQVSFGLEEYDWDLEKSLNDVNFYDMGDVALTLGRIEESFTSIRTVTKKVLSDGKIPLIIGGEHLITYPVILEFAEKYPDLAVVHFDAHADLRDHYQGEKLSHATVMRRVAEIIGPQNIYHIGIRSGTQEEKEFITKKSNYLGQNVLAGVEKALEKLGQKPVFISLDIDVVDPAFAPGTGTPEPGGATSIEIMEAIVKLSSLNIVGMDLVEVLPVYDPSERTSLLAAKILRRALLSFNITR

SEQ ID NO: 84349 - DNA, 876 bp, Synechococcus sp. CC9605
  CDS (1)..(876): transl_table=11
atgaccgcacatccgccgagtgggctgttcgacactgacggcaccattttcatgggatcccggcgcaaccctgccgactgccgcgttggcctctttggtgtgccgtacgacggcaccacctcctttcgaccgggcacccgctttggccccgccgccatccgagaggtgagcgctggcctggagacctattgcccgcaactcaacctggatctggaggacctcaactttgccgatctcggtgccgtggagattcccttcggcaaccctgagccggttctgaccaaggtgaagcaggcaaccgaagccgtgctcgccctgggcctcaggcccctgatgctgggcggagagcattcgatcagctccggagccgtggaagccgtggcacaacgcaaccccgatctggtgctggtgcaactggatgcccatgccgatctcagggacaactggctgggggcccgccacagccatgcctgcgccatgcgccgctgtctggaggtccttcccagccagacgctgtttcagctcgcgatccgcagtggcacgcgcgaggaattcaccgaactgcacgagagcggacggctgatgcccagcatcgatgcccttcaacaggcgctcgctcccttgcagggaaaacccatctatctcaccgtcgacctcgactggtttgacccttcagttctgccgggcacgggcacccctgaacccggtggttaccactggtctgacttcgccagcctgatcgcgatgctccaggagcatcacctggtggcggccgatgtggtggaactggccccacaactcgacaccagcggcatcagctcagtcctggccgccaaggtgacccgcagcctgcttctcctcctcggtgccgattaa

SEQ ID NO: 84350 - protein, 291 aa, Synechococcus sp. CC9605
MTAHPPSGLFDTDGTIFMGSRRNPADCRVGLFGVPYDGTTSFRPGTRFGPAAIREVSAGLETYCPQLNLDLEDLNFADLGAVEIPFGNPEPVLTKVKQATEAVLALGLRPLMLGGEHSISSGAVEAVAQRNPDLVLVQLDAHADLRDNWLGARHSHACAMRRCLEVLPSQTLFQLAIRSGTREEFTELHESGRLMPSIDALQQALAPLQGKPIYLTVDLDWFDPSVLPGTGTPEPGGYHWSDFASLIAMLQEHHLVAADVVELAPQLDTSGISSVLAAKVTRSLLLLLGAD

SEQ ID NO: 84351 - DNA, 900 bp, Desulfovibrio desulfuricans G20
  CDS (1)..(900): transl_table=11
atgagtttgtgcgaacatgaagagcgttttctggactccgagctggagcctgtggcgcccggaaaggcgcggtttcatattattccggcgggctacgaagcctctgtatcgtacggcggaggcaccttcagggggcctgccgccattctggccgcatcgcggcagctggagctgtgggacgggctgtccgacccttcacggctggggctgttcacccactgccctgtggactgcgatgcagaaacggcagaggtgctgatgcgtatcgaagcctcggtgcaggccgcgctggacgctgcgccggagaatccgcctgtgcctgtgctgctgggcggagagcataccgtcacgctgggagcgctgagggctttgtataaacggtacggatcgttcggggtggtgcagtttgacgcgcatgccgatctgagagaacgctacgacggtaccccctacagccacgcctgcgtcatgcgcagggcgcttgaaatgggcctgccgctggtgcaggtgggcgtgcgtgcctgcagcgaagaagaagtccgggtgcgcacggcacatggcgtgacatgctgggacgcccgtcagctggcggaacacggcctgccggagcatattctgccgccggactttccctcgcgggtgtatgtgacgtttgatgtggacgggctggaccctgcggtcatacgcgccacgggaacccccgtgccgggaggactgggctggtgggacgctcagcacatgctgcggcaggcagtggaagggcgccatgtccttggtatggatgtcgtggaactggcaccggatcttggtgacattgcctcggactttgccgcggcgcaactggtgtacaacatgatgggcatggtgcagcggcatgccgctgcaaaggggcgcgtctga

SEQ ID NO: 84352 - protein, 299 aa, Desulfovibrio desulfuricans G20
MSLCEHEERFLDSELEPVAPGKARFHIIPAGYEASVSYGGGTFRGPAAILAASRQLELWDGLSDPSRLGLFTHCPVDCDAETAEVLMRIEASVQAALDAAPENPPVPVLLGGEHTVTLGALRALYKRYGSFGVVQFDAHADLRERYDGTPYSHACVMRRALEMGLPLVQVGVRACSEEEVRVRTAHGVTCWDARQLAEHGLPEHILPPDFPSRVYVTFDVDGLDPAVIRATGTPVPGGLGWWDAQHMLRQAVEGRHVLGMDVVELAPDLGDIASDFAAAQLVYNMMGMVQRHAAAKGRV

SEQ ID NO: 84353 - DNA, 882 bp, Prochlorococcus marinus str. MIT 9312
  CDS (1)..(882): transl_table=11
atgataaaaaatttatttgataacgaaaatgcgatttttatgggagcaaaaagaagccctaatgattgcgtaattggtatctttggagtcaattatgatgggacatgttcgttcaaaccaggagctagatttggtccagaagcgataagacaagtcagttcttgtttagaaacatattgtccaaaactcaataaagacttagaggatattatgtatgttgattttgggtcaatactaattgataaaaatgactcaaagtccgttattgaatcagtcaaattagcaacaaattttttaattaataaacgccttagtcctattatgcttggaggcgaacactctattacaacgggtgctattgaagcattagtaaaaaaatatccagatttgatattggttcaacttgatgctcatgcagatttaagagaatcatatataggaaatcaatatagtcatgcttgtgccatgaaaagatgcttagaggtgcttcctgaaaagaaaattttgcaagtaggaataagaagtgggactaaagaagaatttcaaattatgcataacaacaatcaattagttaacttttatccaggcggaaatgcacaagagttaaaaaaagctcttctaccatactctaagtctccaatctatttaacaatagatttagattggtttgatcccagtttattagcagggacgggaactccagaaccgggaggatttttttggaatgattttgaggaaatcctgaaaactttaaaagactttagaattgtggcttcagatattgtggaattatctccagaaattgataaaagcggagttagtagcatagttgcagccaaagtacttagaagcttaattttgtcattagaaaatatgcaataa

SEQ ID NO: 84354 - protein, 293 aa, Prochlorococcus marinus str. MIT 9312
MIKNLFDNENAIFMGAKRSPNDCVIGIFGVNYDGTCSFKPGARFGPEAIRQVSSCLETYCPKLNKDLEDIMYVDFGSILIDKNDSKSVIESVKLATNFLINKRLSPIMLGGEHSITTGAIEALVKKYPDLILVQLDAHADLRESYIGNQYSHACAMKRCLEVLPEKKILQVGIRSGTKEEFQIMHNNNQLVNFYPGGNAQELKKALLPYSKSPIYLTIDLDWFDPSLLAGTGTPEPGGFFWNDFEEILKTLKDFRIVASDIVELSPEIDKSGVSSIVAAKVLRSLILSLENMQ

SEQ ID NO: 84355 - DNA, 891 bp, Moorella thermoacetica ATCC 39073
  CDS (1)..(891): transl_table=11
atgaataactccgctatcttagaaggctttaccaggggccagggattcctggccagcagcgacgattttgccggggcccgtgctgtcctggccggcattccctttgatgccaccaccagctttcgtcccggcacccgctggggcccccgggccatccgttccgtatcagaagtcctggaggaatacagcccctacctgcagcgggagctgacgggagttcccttttacgacgcgggagacctcgacctcccgccgggcagggtggaggccagtttagaacgaatggaggcggcggccgacgctatttttgccgccgccaggatcccattttttatggggggggagcacctggtgagctatcccctcatccgggctgcctaccggcactatcccgatctggccgttctccatttcgacgcccatgccgacctgcgggaggattacctgggggaaaggttctcccatgccaccgtcatgcgtctggtggcggaggagatcggccccgatcgcctctaccagtttggcatccggtccggtacctggggcgaattcgcctacggccaggaagaaaccaatttttttatggacgtgattaccccgcccctggccaaactggtaccggaactggtccggcgccccttgtatgtgaccatagatatcgacgtggtcgacccggcctttgcccccggtaccggtacccccgaaccggggggctgcccgccgggggagatctttaaagccatccagatcctgcagggggccaatgtagtcgcctttgacctggtggaggtctgcccggcctacgaccagagcgacattaccgccatcctggcggccaagatcctccgcgaggccattctggcctggggagggaaaaacgaccaggcctga

SEQ ID NO: 84356 - protein, 296 aa, Moorella thermoacetica ATCC 39073
MNNSAILEGFTRGQGFLASSDDFAGARAVLAGIPFDATTSFRPGTRWGPRAIRSVSEVLEEYSPYLQRELTGVPFYDAGDLDLPPGRVEASLERMEAAADAIFAAARIPFFMGGEHLVSYPLIRAAYRHYPDLAVLHFDAHADLREDYLGERFSHATVMRLVAEEIGPDRLYQFGIRSGTWGEFAYGQEETNFFMDVITPPLAKLVPELVRRPLYVTIDIDVVDPAFAPGTGTPEPGGCPPGEIFKAIQILQGANVVAFDLVEVCPAYDQSDITAILAAKILREAILAWGGKNDQA

SEQ ID NO: 84357 - DNA, 876 bp, Desulfitobacterium hafniense Y51
  CDS (1)..(876): transl_table=11
atgtccaaggagacgctcatgaagatgacagaaagccccggtgtgtttatgggaggagaaaccccttatgaagaggctgacgcagtaattttggggattcctatggattatacggtgagttttcgcccgggtacccgtttgggccccctgagtatccgcaatgtctccatcgggattgaggaatatagtgtgtatctggataaggatctctctgattatgcttattgcgattgtggagatttaagcctgccctttggcaatgttgaaaaatctttgcaagtgatcgaagcggctgcccggcaggtggtagaagacgggaaatttcccattttcttagggggagaacacctggttacctatcctttgcttaaacccttcattgagaagtatcctgagctccgggtggtgcattttgacgcccatgccgatttgcgtacagattactccggtgagcctaattcccatgctacggtgatgcgcaaaatctcggaagctctggggccccaccgggtctaccagtttggcatacgctccggaacccgggaggaattcctttttgctaaggaacacaatcatttggtggtagaagaggttttggagcccctcaaggctgtcctgccggagcttaaagggaagccggtctatgtgacgctagatattgatgtggtggatccggcctttgccccaggcactgggactcaggaagccggtggatgtacttcccgggaaatcatcaaagccgttcatgccctcagtgagctggatgtggtgggctttgatctggtggaagtatcccctcttatggacaccagtgagcgtacggctcttttagcagcgaagatcgtaagggaagcaattttgagttttgtaaaataa

SEQ ID NO: 84358 - protein, 291 aa, Desulfitobacterium hafniense Y51
MSKETLMKMTESPGVFMGGETPYEEADAVILGIPMDYTVSFRPGTRLGPLSIRNVSIGIEEYSVYLDKDLSDYAYCDCGDLSLPFGNVEKSLQVIEAAARQVVEDGKFPIFLGGEHLVTYPLLKPFIEKYPELRVVHFDAHADLRTDYSGEPNSHATVMRKISEALGPHRVYQFGIRSGTREEFLFAKEHNHLVVEEVLEPLKAVLPELKGKPVYVTLDIDVVDPAFAPGTGTQEAGGCTSREIIKAVHALSELDVVGFDLVEVSPLMDTSERTALLAAKIVREAILSFVK

SEQ ID NO: 84359 - DNA, 870 bp, Methanococcoides burtonii DSM 6242
  CDS (1)..(870): transl_table=11
atgttctaccagcccggcatgatggatgcactggcagattacgattctgccagctacgtcatatttggagtaccatttgatcgtacatcatcgttcagggctgggagcagatgggctcctgacgctataaggagcgccactgcaaattttgaaagttataactctttttatgatatcgatatttcagagatccctgcccacgatgcaggaaatttcgaagcaggagctcttgtggacgatgtccttgatgagctttatcttgatgtcattaacatcgttgatgatggaaagctcccaataatgataggtggagaacattccctaacactaccatgtatgaaagcctgtgcaaaacatgcaggagaggatttcggagtagttgtattggatgcacattttgacctccgggatgagtttgagggaatgaagtataatcatgcttgtgtttcccgccatattctcgaagaggtcactgagaactatgtcagcataggcattcgaagcggtccaaaggaagaatgggactatgccaaagagaacaacgttcgttactatactcccgaagatgttacagagaaagggataaagggacttaccaacgagattagagaatatcttgattgtgagaatatctacatatcccttgacatggatgcacttgaccctgcgtttgcaccgggagtgggaacaccggaaccatttggacttacatccgtgcaagttagggacatcatacgggaattcgcacccattgccagaggttttgatgtgatggagatatccccggagtatgatagcggtcagactgcgatacttggtgcaaaatacattcgcgaattcattgctgcacatgctgcttcaataaaatga

SEQ ID NO: 84360 - protein, 289 aa, Methanococcoides burtonii DSM 6242
MFYQPGMMDALADYDSASYVIFGVPFDRTSSFRAGSRWAPDAIRSATANFESYNSFYDIDISEIPAHDAGNFEAGALVDDVLDELYLDVINIVDDGKLPIMIGGEHSLTLPCMKACAKHAGEDFGVVVLDAHFDLRDEFEGMKYNHACVSRHILEEVTENYVSIGIRSGPKEEWDYAKENNVRYYTPEDVTEKGIKGLTNEIREYLDCENIYISLDMDALDPAFAPGVGTPEPFGLTSVQVRDIIREFAPIARGFDVMEISPEYDSGQTAILGAKYIREFIAAHAASIK

SEQ ID NO: 84361 - DNA, 948 bp, Silicibacter sp. TM1040
  CDS (1)..(948): transl_table=11
atgagcgagttcaatcaacccatcagcggcaatgatctggcgcggttctcggggccgggcacctttatgcgcctgccgcaggccacctcgctagagggtctggatgtggcggtgctgggtgtgccgatggatattggcacctcctggcgttccgggacgcggttcgggcccaagcagatccgcgccgagagcgcgatgatccgcccgtacaacatggccaccggggctgcgccttttgatgcgctcaacattgccgatattggcgatctggcgatcaatacgttcaacctcgcggagtcgctgcgcatcatcgaagacagctatgacgcgatcctcggttcgggcgtgcttccctttgcgatggggggcgatcactcgatcaccctgccgatcctcagggcgatggcgcgcaggtatggcccggttgcggtgatccatgtggatgcccatgcggacgtcaatgacgagatgtttggcgagcgcgaaacccacggcaccgtgttccgccgcgcctatgaagaggggcttctggaggcggataaagtttatcagattggtctgcgcggtaccggctatggaccggatgatttcaaagagccgcagagctggggctttcagcattttgtcgcctccgagctctggaaccgatcgctgcacaatatgggggcggaaatccgtcgcgatattggcgggcgtccggtctatatctcctatgatatcgacagtcttgatcccgccttcgcgccgggcaccggcacgccggaaattggcgggctgaccaccatgcaggcgctggagctgatccgcgccttcaaggggctcaatgtcgtgggatgtgatcttgtcgaagtctcgccgccctacgacccttcggggaatacggcgcttgtagcagccaatctgatctatgagatgctgtgcatcctgccaggacgggatagggcgtaa

SEQ ID NO: 84362 - protein, 315 aa, Silicibacter sp. TM1040
MSEFNQPISGNDLARFSGPGTFMRLPQATSLEGLDVAVLGVPMDIGTSWRSGTRFGPKQIRAESAMIRPYNMATGAAPFDALNIADIGDLAINTFNLAESLRIIEDSYDAILGSGVLPFAMGGDHSITLPILRAMARRYGPVAVIHVDAHADVNDEMFGERETHGTVFRRAYEEGLLEADKVYQIGLRGTGYGPDDFKEPQSWGFQHFVASELWNRSLHNMGAEIRRDIGGRPVYISYDIDSLDPAFAPGTGTPEIGGLTTMQALELIRAFKGLNVVGCDLVEVSPPYDPSGNTALVAANLIYEMLCILPGRDRA

SEQ ID NO: 84363 - DNA, 954 bp, Rubrobacter xylanophilus DSM 9941
  CDS (1)..(954): transl_table=11
ttgacccgctacgagccggaggactcgttcgtgaccccgcgcttctcgggggtgcgcaccttcatgaggctgccgcacaacagggacctcgacaacgccgacgccgccgtcgtcggcgcgcccttcgacacgggggccaccttccgcgtcggggcgcgcttcggccccgaggccataaggagcgtctcgcacctcttgaggcgccacaacccctccctgggcgtgaccctcttcgaccacctctcggtcatagactacggcgacgtgccggtggtccccggctacatcgaggagagctacgcgcgcatagaggaggggctcgcccccctgcacgaggccggggtcttcccggtggtgctcggcggcgaccactcgatagcattaccggagcttagggcggcggccagagcgcacgggccgctggcgctggtgcagttcgactcgcaccccgacacctgggacgcctacttcgggatgaggcacacgcacgggacgccgttcaggcgggcggtcgaggaggggttgctcgatccctcccgctcggtgcaggtggggatgcgcggctcgatctacgacgagcgcgactgggacgacgcccgcgagatgggcttcgacctcgtgccgaccgacgaggtgagggagctcggcatcccggcggtcatagagcgcatccgcgagcgggtgggggaggcgaaggcctacgtctccttcgacgtggacttcgtggacccggcctacgccccggggacggggacgccggagatagggggctttacgagcagggaggcgcaggagctcgtgcgggggctcgcggggctcgagatcgtgggctgcgacgtggtcgaggtggcccccgcctacgactcgccgggccagatcacggcgctccttgcggcgaacatcgcccacgagctcctgagcctccacgccctgaggaagaagagccttggttag

SEQ ID NO: 84364 - protein, 317 aa, Rubrobacter xylanophilus DSM 9941
MTRYEPEDSFVTPRFSGVRTFMRLPHNRDLDNADAAVVGAPFDTGATFRVGARFGPEAIRSVSHLLRRHNPSLGVTLFDHLSVIDYGDVPVVPGYIEESYARIEEGLAPLHEAGVFPVVLGGDHSIALPELRAAARAHGPLALVQFDSHPDTWDAYFGMRHTHGTPFRRAVEEGLLDPSRSVQVGMRGSIYDERDWDDAREMGFDLVPTDEVRELGIPAVIERIRERVGEAKAYVSFDVDFVDPAYAPGTGTPEIGGFTSREAQELVRGLAGLEIVGCDVVEVAPAYDSPGQITALLAANIAHELLSLHALRKKSLG

SEQ ID NO: 84365 - DNA, 948 bp, Mesorhizobium sp. BNC1
  CDS (1)..(948): transl_table=11
atgccatccaagaccatcgaccacgccttcaccgcgcggcagatcacgggagccgccggcgacccgacttacgcgggcgccctctccttcatgcgccgcaaattcacaaaggatgtgaagggcgcggatgccgtggtgtggggcataccgttcgatgccgcggtttcgaaccggccgggcgcgcgcttcgggccgcaggcgatccgccgcgcctccgtcatcttcgacaacgacccgcaatacccgtttcacctcgatctgttcgatacgctcgccgtggtcgactatggcgattgcctgctcgactatggccgtcacgaccttactcccgcggccatagagaccgaggcttcgaagatcctggaatcgggcgccttcctcgtcacactcggcggcgaccatttcgtcacctggccgctgctcagggcgcatgcggcccgacacggacccctcgccctcgtccagttcgatgcgcatcaggacacctggtgggacgacggcaaccgtatcgaccacggctccttcgtcgggcgggcggtacgggacggcgtgatcgatcccgcccgctccatccaggtcggcatccgcacccatgcgccggaggattgcggcctcaagatcgtgcatggctacgaccttgaggaaattcgtgccgccgaaatcgcgcgcatgatcgccgagcgggtgggcgacgcgccggcctatatcaccttcgatatcgattgcctggaccccgcctttgcgccgggcacgggcacgccggttgcgggcgggccttcgacagcgaagatgctctccatccttcgccagctcggcgggctcaacatcgtgggtgctgacgtggtggaggtttcgcccccttatgaccatgccgatgtcacggccattgccggggcctccatcgccatgcactatctggggcttctggcggagaagcgacggccataa

SEQ ID NO: 84366 - protein, 315 aa, Mesorhizobium sp. BNC1
MPSKTIDHAFTARQITGAAGDPTYAGALSFMRRKFTKDVKGADAVVWGIPFDAAVSNRPGARFGPQAIRRASVIFDNDPQYPFHLDLFDTLAVVDYGDCLLDYGRHDLTPAAIETEASKILESGAFLVTLGGDHFVTWPLLRAHAARHGPLALVQFDAHQDTWWDDGNRIDHGSFVGRAVRDGVIDPARSIQVGIRTHAPEDCGLKIVHGYDLEEIRAAEIARMIAERVGDAPAYITFDIDCLDPAFAPGTGTPVAGGPSTAKMLSILRQLGGLNIVGADVVEVSPPYDHADVTAIAGASIAMHYLGLLAEKRRP

SEQ ID NO: 84367 - DNA, 912 bp, Trichodesmium erythraeum IMS101
  CDS (1)..(912): transl_table=11
atgtcaacaatttactctaccttgcttctaccattcattggttcagaaattgagccagattacactaccgctaaagtagtaattgtaccaattccttatgaggcaactactacttatagaagaggttgtgttaatggtccagcagtattattaaatgcatctcaacagttagaatgttatgacgaagaattagatagggaaacaggtttggaagttggtatctatactcacgaacctatagcagatactcgtaatggaaaaaaaattactccattagatatgctaaaagtaactcaagaaacagtggaaaaattagttagtgatggaaagtttgtgattgctataggtggagaacatagtattacaaatgggatagtaaaagcttataaaaaattatattttgatgaaccttttaccgtgattcaaatagatgctcatggagatttgcgatatgaatatgaaggttcaatatataatcatgcctgtgtaatgcggcggatatttgagatggggttaccaatggtacaaataggtattcgggcaatttgtaaagaagaagctgatttaataaaggataaaaatttaactgtttttaaagcaagagaaatagctattcagccagattggatggaaagagtaatctctagtattcagactaaaaatgtgtttttaacgatagatttagatggaattgacccaacattaattcctggagttggcacaccagaaccaggaggactaaattggtattctttaactacatttttacgaagaatatttgaattatatcaagtattaggttgtgacattatggagttggctccaattactgattcggtagtatctgagtttactgcagcaaaattagtttataaacttgttggttatcaagcattagctcaagactggtag

SEQ ID NO: 84368 - protein, 303 aa, Trichodesmium erythraeum IMS101
MSTIYSTLLLPFIGSEIEPDYTTAKVVIVPIPYEATTTYRRGCVNGPAVLLNASQQLECYDEELDRETGLEVGIYTHEPIADTRNGKKITPLDMLKVTQETVEKLVSDGKFVIAIGGEHSITNGIVKAYKKLYFDEPFTVIQIDAHGDLRYEYEGSIYNHACVMRRIFEMGLPMVQIGIRAICKEEADLIKDKNLTVFKAREIAIQPDWMERVISSIQTKNVFLTIDLDGIDPTLIPGVGTPEPGGLNWYSLTTFLRRIFELYQVLGCDIMELAPITDSVVSEFTAAKLVYKLVGYQALAQDW

SEQ ID NO: 84369 - DNA, 879 bp, Synechococcus sp. CC9311
  CDS (1)..(879): transl_table=11
atgaacaatcccaaaagccaaacgattgatcagagcctgtttgatgacgaaggtgccatttttatgggaggacagcgagatccagagggatgccggatcgccttgtttggcgtgccctatgacggcaccacctcgttccgaccaggcacccgatttggcccagccgcgattcgtgaagtgagcacaggtcttgagacctactgcccccagctggatcgagacctcgaagacatcccttacgccgacattggagccgttgagattccctatggcgacccacagcccgttgtggatgccgtgcgccacgccactggcaccgtgctggctgcaggcatgaagccgctgatgcttggcggtgagcattccatcagctctggtgcggttgctgctgtggcggagcaacaccccgacctcgtgctggtgcaactcgatgcccatgccgacttacggaatgagtggcttggatcccgtcacagccatgcctgcgccatgcgccgctgtttggaggtgctgcctagccaacaacttttacagatcgcgatccgcagcggcacctttgaagaattcaaagagctacatcgcaatgaaaggctgatctcagttcaagagatccccgagcgaatgaccccactcaggggacggccgatctacctcaccgtggacctcgactggttcgacccggccgtaatgccggggacagggaccccagagccaggtggttttatttggaacgatttcgcagctgtgatcaacgagctgcgccaccatcgcctcatgggcgcagatgtggtggagctcgctcctcaactcgattcaagtgggatcagtagcgtcttggccgccaaagtcacccgcagcctgctgctgttgatggcttag

SEQ ID NO: 84370 - protein, 292 aa, Synechococcus sp. CC9311
MNNPKSQTIDQSLFDDEGAIFMGGQRDPEGCRIALFGVPYDGTTSFRPGTRFGPAAIREVSTGLETYCPQLDRDLEDIPYADIGAVEIPYGDPQPVVDAVRHATGTVLAAGMKPLMLGGEHSISSGAVAAVAEQHPDLVLVQLDAHADLRNEWLGSRHSHACAMRRCLEVLPSQQLLQIAIRSGTFEEFKELHRNERLISVQEIPERMTPLRGRPIYLTVDLDWFDPAVMPGTGTPEPGGFIWNDFAAVINELRHHRLMGADVVELAPQLDSSGISSVLAAKVTRSLLLLMA

SEQ ID NO: 84371 - DNA, 891 bp, Magnetococcus sp. MC-1
  CDS (1)..(891): transl_table=11
atgcccaatataccctatccatccttcggcgaaacccccccagcaaccctggaagaagcccgcgtggttattctacccctgccctacgaaggaaccgtaagctacggcaccggtacctcccaaggcccccgcgccatcctagaagcctcaaaacaactggaagtctgggacgaactgcacggacgcgaaatcctgccagaactgcctacccataccctgcaacccccctcattggaaaacctaaaccccgaacaggtggtacaacgtatctacgcaaccacactacctcacctgcaagcaggccgtatggtggtgggcctagggggcgaacactccgtcaccgaaggggtcatcaaggcctaccaaaccatccacggcaacgactttaccgtggtgcaaatcgacgcccacgccgacctgcgcaatagctaccacgataccccccactcccacgcctgcatcatgcgccgtgtatgggatatgggcctcaacgccgtgcaattgggcatccgctccatcagccgcgaagagatccgccatgtgcgctataacggcctcaatgagcgaatcttctgggcccgagatatcgtgcgctggcaccgccaaaataatacccaatggctcgaccgcatgggcgcactactcaaacccaaagtgttcctaaccatcgacctagatggcttcgacccctctgtggtgcccggtaccggtaccccagaacccggtggactggattggtatatggtgggcgaaatcatcgaccgtatcaccgcccaatgcgaaatcatcggctttgatatcaccgaactggcccccatccccaaccaacaagcctccgaattcctggccgcccggttggtacagcggattttgggctatatcaaaccctaa

SEQ ID NO: 84372 - protein, 296 aa, Magnetococcus sp. MC-1
MPNIPYPSFGETPPATLEEARVVILPLPYEGTVSYGTGTSQGPRAILEASKQLEVWDELHGREILPELPTHTLQPPSLENLNPEQVVQRIYATTLPHLQAGRMVVGLGGEHSVTEGVIKAYQTIHGNDFTVVQIDAHADLRNSYHDTPHSHACIMRRVWDMGLNAVQLGIRSISREEIRHVRYNGLNERIFWARDIVRWHRQNNTQWLDRMGALLKPKVFLTIDLDGFDPSVVPGTGTPEPGGLDWYMVGEIIDRITAQCEIIGFDITELAPIPNQQASEFLAARLVQRILGYIKP

SEQ ID NO: 84373 - DNA, 972 bp, Mycobacterium smegmatis str. MC2 155
  CDS (1)..(972): transl_table=11
gtggaaggccagccgtacgtgcggtcggcgtcgggcaaggtgggccaggtcaacgccaccgaggtgccgcggtacgcgggcatcgcgacgttcgcgcgtctgccgcagcggttcgaggtcctcgaccacgacatcgcggtggtgggtgtgccgttcgacagcggtgtcacctaccggcccggtgcccgcttcggcccgtcggccatccgcgaggcgtcgcgtctgctcaagccgtaccaccccgcgctcgacgtgagcccgttcgcgcaggcccaggtggtcgatgccggtgatctcggggtcaacccgttcaacatcgacgaggccgtcgggcagatccgtgacggcgtgaccgaactgctggaccgccccgaccagcgcgtggtgctgctcggcggggaccacacgatcgcgctgcccgctctgcaggcgatgcacgccatccacggcccggtcgcgctcgtgcacttcgacgcacatctcgacacgtgggacacctatttcggggcgccgtgcacgcacggcacgcccttccgtcgcgcgtcggaacaggggctcatcgtgaaaggacattcggcgcacgtcggcatccgcggatcgctgtacgaccgcgccgatctgctcgacgacgagtccctcggattcacggtcgtgcactgccgcgacatcgaccgcatcggtgtcgacggtgtcatctcgcgcatccacgagcgggtcggcgagtatccggtgtacgtgtcgatcgacatcgacgtcctcgacccggcgttcgcgcccggcacgggaacgcccgagatcggcggcatgaccagccgtgaactcgtcgcggtgctgcgcgcgatgcgtggcctcaacatcgtgggcgccgacatcgtcgaggtcgcccccgcgtacgacagcggcgacgtcaccgcggtcgcggccgctaacctggcctacgaattgattacgctgatggccgatggcttctga

SEQ ID NO: 84374 - protein, 323 aa, Mycobacterium smegmatis str. MC2 155
MEGQPYVRSASGKVGQVNATEVPRYAGIATFARLPQRFEVLDHDIAVVGVPFDSGVTYRPGARFGPSAIREASRLLKPYHPALDVSPFAQAQVVDAGDLGVNPFNIDEAVGQIRDGVTELLDRPDQRVVLLGGDHTIALPALQAMHAIHGPVALVHFDAHLDTWDTYFGAPCTHGTPFRRASEQGLIVKGHSAHVGIRGSLYDRADLLDDESLGFTVVHCRDIDRIGVDGVISRIHERVGEYPVYVSIDIDVLDPAFAPGTGTPEIGGMTSRELVAVLRAMRGLNIVGADIVEVAPAYDSGDVTAVAAANLAYELITLMADGF

SEQ ID NO: 84375 - DNA, 960 bp, Mycobacterium smegmatis str. MC2 155
  CDS (1)..(960): transl_table=11
atgaccgccaccagcacccccatcggccccgtcgacgcctccaaggtgccgcgtttcgccgggccggcgacgttcgcgcgcctgccgcgcctggaccaggtgaccaaggccgacgtcgtgatcgccggtgtgccgttcgacaccggcgtgtcctaccgccccggcgcccgcttcggccccacccacgtgcgcgagtcctcgcgccttttgcggccctacaaccccggcctggacgtgtcgccgttcgaggtcgtacaggtcgccgacgccggcgacatcgcggtgaacccgttcaacatccacgaggccatcgagaccatcgagggcgccgcacgcgacatcaccgccgacggaaagaaactcgtgaccatcggcggcgaccacacgatcgcgctgcccttgctgcgcgcggcggccgccaagcacggtcccgtcgcgctcgtgcatttcgacgcccacctcgacacgtgggacacctatttcggcgccgagtacactcacggcaccccgttccgccgcgcggtcgaggaaggcatcctcgacaccgaggcgctgtcgcacgtcggcacccgcggtccgctgtacggcaagaaggacctcgaggacgaccgacgtttcgggttcggcatcgtcacctcctcggacgtctactaccagggcgtgcgggaggtcgtcgacaagctgcgccaacgcgtcggcaaccggccggtctacctgtcgatcgacatcgacgtgctcgatccggcccacgcacccggcaccggcacgcccgaggccggcggcatgaccagccgcgaactgctggagatcctgcgcggtttccgcggtctcaacctcgtgggcgcagacgtcgtcgaggtggccccggcctacgaccatgccgagatgacgggtgtggccgccgcgcacgtcgcctacgacctggtgtcgctgctcgccctcggccccgacgaagcctga

SEQ ID NO: 84376 - protein, 319 aa, Mycobacterium smegmatis str. MC2 155
MTATSTPIGPVDASKVPRFAGPATFARLPRLDQVTKADVVIAGVPFDTGVSYRPGARFGPTHVRESSRLLRPYNPGLDVSPFEVVQVADAGDIAVNPFNIHEAIETIEGAARDITADGKKLVTIGGDHTIALPLLRAAAAKHGPVALVHFDAHLDTWDTYFGAEYTHGTPFRRAVEEGILDTEALSHVGTRGPLYGKKDLEDDRRFGFGIVTSSDVYYQGVREVVDKLRQRVGNRPVYLSIDIDVLDPAHAPGTGTPEAGGMTSRELLEILRGFRGLNLVGADVVEVAPAYDHAEMTGVAAAHVAYDLVSLLALGPDEA

SEQ ID NO: 84377 - DNA, 1032 bp, Magnetospirillum magnetotacticum MS-1
  CDS (1)..(1032): transl_table=11
atgcccgagggcggagcggacgatacggcgggcgcgcggaccgagcggctggcccgcttccgtccggcttcggggatggagacgccgcgcttctccgggctttcgagcttcatgcgacttccggtgatcgatccccgggcggcgcccggcctgatcgagatcggcctgatcggcatccccttcgacggcaccaccacgaaccgcccgggggcccgtctcggcccccgggcggtgcgcgaggcttccaccggcacgcgggcgctcaaccatgccacgggggtggcgccctacgatctcgccgcctgcgccgatctcggcgacgtgccggtcaatcccgtggacgccgccgagaccgaccggcggatcgaggccttctaccggccgctggccgagggcgggatcgtgccgctctcggtcggcggcgaccatttcgtcacctacccggtgctgcgggcgctgggcgcagaccggcccctcggcctgatccatatcgacgcccacagcgacaccgacgacgcgcaatacggtggcgcgcgcctcacccacggcacgccgttccgccgggcggtcgaagccggcgtcctcgatccgaggcgctgcgtgcagatcggcatccgcggcagcatggacgcggccgacgagcgggcctgggccctgggccagggcatccggatcatcgagatggaggaggtctgcgcccgcggcctgccggaggtggccgccgaggcccgggcggtggtgggcgaggcgccggcctatctcagcttcgacatcgacgccctcgaccctgccttcgcccccggcaccggcacgccggagatcggcggcttcaccacccgggaggccctgcacctgctgcgcggctttcgcggcctcgacctcgtcggcgcggatctggtggaggtcgcgcccccgctcgacccggcggggatcacggcgctcgccggcgcggggctcgccttcgagatcctgtgcctgctggccgagcgggtcgccgcgcggcaccgcgcggcgcgggagggcgaaggttga

SEQ ID NO: 84378 - protein, 343 aa, Magnetospirillum magnetotacticum MS-1
MPEGGADDTAGARTERLARFRPASGMETPRFSGLSSFMRLPVIDPRAAPGLIEIGLIGIPFDGTTTNRPGARLGPRAVREASTGTRALNHATGVAPYDLAACADLGDVPVNPVDAAETDRRIEAFYRPLAEGGIVPLSVGGDHFVTYPVLRALGADRPLGLIHIDAHSDTDDAQYGGARLTHGTPFRRAVEAGVLDPRRCVQIGIRGSMDAADERAWALGQGIRIIEMEEVCARGLPEVAAEARAVVGEAPAYLSFDIDALDPAFAPGTGTPEIGGFTTREALHLLRGFRGLDLVGADLVEVAPPLDPAGITALAGAGLAFEILCLLAERVAARHRAAREGEG

SEQ ID NO: 84379 - DNA, 894 bp, Bacillus cereus G9241
  CDS (1)..(894): transl_table=11
atgaaaaaagaaatctcagttattggagttccaatggatttagggcagatgcgtcgtggcgttgatatgggaccgagcgcaatccgttatgcaggggtaattgaaagaattgaagaaattggatatgacgttaaagatatgggagatatatgtatagagagagaaaaagagatagatgaaaatacaaaattaagaaaccttacacaagttgcaactgtatgtaatgaattagcaagtaaggtggatcatattatagaagaaggtcgttttccacttgtattaggtggcgatcatagtatcgctatcggtacattagctggtgtggcgaaacattataaaaacctaggtgttatttggtacgatgcacatggcgatttaaatacagaagaaacttcaccatctgggaatattcacggtatgtcacttgcagcaagtttaggctatggacatcccacgcttgtagatttatacggagcatatccaaaggtgaaaaaagagaatgttgtaattatcggtgcacgtgcattagatgaaggagaaaaagactttattcgcaatgaaggtattaaagtattttcaatgcacgagattgatcgtatggggatgacggccgttatggaagaaacaatcgcgtacttatctcataccgatggcgtacacttatcattagatttagatggtcttgatcctcatgatgcaccaggtgttggaacgcctgtaattggcggtctatcttatcgtgaaagccacttggcgatggaaatgttagcagaagctgatattgttacatctgcggaatttgttgaggtaaatacgattttagatgagcgaaatagaacggcaacaacagcggttgctttaatgggttctttattcggtgaaaaactaaaataa

SEQ ID NO: 84380 - protein, 297 aa, Bacillus cereus G9241
MKKEISVIGVPMDLGQMRRGVDMGPSAIRYAGVIERIEEIGYDVKDMGDICIEREKEIDENTKLRNLTQVATVCNELASKVDHIIEEGRFPLVLGGDHSIAIGTLAGVAKHYKNLGVIWYDAHGDLNTEETSPSGNIHGMSLAASLGYGHPTLVDLYGAYPKVKKENVVIIGARALDEGEKDFIRNEGIKVFSMHEIDRMGMTAVMEETIAYLSHTDGVHLSLDLDGLDPHDAPGVGTPVIGGLSYRESHLAMEMLAEADIVTSAEFVEVNTILDERNRTATTAVALMGSLFGEKLK

SEQ ID NO: 84381 - DNA, 873 bp, Exiguobacterium sibiricum 255-15
  CDS (1)..(873): transl_table=11
atgcggtttgatgaagcttactcaggtaaggtatttatcgcgagtcaaccgactcacgaagatgcaaaaggtgtgttgtacggtatgccgatggactggacggtcagtttccgtcccggttcacggtttggtccggcccggatccgtgaagtgtcactcggactcgaagaatacagtccatatcttgacggtgatatcgccgatgcaaaattatttgacgccggtgacatcccgttgccgttcggtaatgcgcaaaaatcacttgatatgattgaagagtacgtcgactcgttgttgacggcaggcaagttcccgcttggtatgggcggcgaacacctcgtcacgtggccagtcgtcaaagcctttgataaacattacgaagatttcgtcgtgctgcattttgatgcacacacggatttacgtgattcgtatgaaggcgaaccattatcacattcaacaccacttaaaaagattgcgaatttgatcggaccggaaaactgttattcgttcgggattcgttcaggaatgaaagaagagttcgaatgggcaaaaacgtccggttacaacctgttcaaatacgaaatcgttgaaccgttgaaagccgttttaccaaagcttgccggtaaaaaggtctacgtgacgatcgatatcgatgtccttgatccgtcagcggcaccgggaacgggaacacaggaaatcggcggcgtgacgacaaaggaattacttgaagtcgtccatatgattgcacgggctgatgttgatgtcatcggagccgatctcgtcgaggtttgcccggcgtatgaccagtcggacatgacagcgattgcggctgctaaagtcttgcgtgaaatgatgatcgggttcattaaataa

SEQ ID NO: 84382 - protein, 290 aa, Exiguobacterium sibiricum 255-15
MRFDEAYSGKVFIASQPTHEDAKGVLYGMPMDWTVSFRPGSRFGPARIREVSLGLEEYSPYLDGDIADAKLFDAGDIPLPFGNAQKSLDMIEEYVDSLLTAGKFPLGMGGEHLVTWPVVKAFDKHYEDFVVLHFDAHTDLRDSYEGEPLSHSTPLKKIANLIGPENCYSFGIRSGMKEEFEWAKTSGYNLFKYEIVEPLKAVLPKLAGKKVYVTIDIDVLDPSAAPGTGTQEIGGVTTKELLEVVHMIARADVDVIGADLVEVCPAYDQSDMTAIAAAKVLREMMIGFIK

SEQ ID NO: 84383 - DNA, 951 bp, Croceibacter atlanticus HTCC2559
  CDS (1)..(951): transl_table=11
atgagtacaactaaaaattatgcaggcattccagatgaatttgcgaatgcagaaacttctaaaatcgttcttattcctgttccttatgatggtacaagtacttggggaaaaggagcagataaaggtcctgaggcatttttacacgcttcagaacaaatggaattgtatgatatagaaacagagacagaggtttataaacaaggcgtatatcttgcagatcctgttacagaaagtgagacgccaaaaaaaatggctaaagccgttcatgatattacaaaaggacatataaaacgcaacaagtttgtaaccttatttggtggagaacattcaatatctataggagctataagagcttttaatgagtgttttgaagatttaacagtcttacaaatagatgcccatacagatcttagaaagaaatatgaaggcagcaaatacaaccatgcatgtgctgtttatgaagctaatgaaactactaaccttatacaagtaggcatacgtagtatggacatagccgaaacaacagtaatgaataaagacaatgtcttttttgctcacgatatggcaacagatgattattggatggataatgctgtagagttaatgacagataatgtttacatcacttttgatttagatgcattcgacccatcaatcatgccatctactggaacaccagaaccaggaggattactttggtatgagactttagaatttctaaaaaaggtatttaccgaaaaaaatgtggtagggtttgatattgttgagctttgcccaaataaaaatgacaagtcttcagactttttagcagctaaactctattacaagatgcttacatacaagtttgaaaacgaagctatcgatgcagcttttgatcacgaatctgaatacaatgcatcacaaaaaaaacaactttctaacaaaacacaacacgacgattatgagcaataa

SEQ ID NO: 84384 - protein, 316 aa, Croceibacter atlanticus HTCC2559
MSTTKNYAGIPDEFANAETSKIVLIPVPYDGTSTWGKGADKGPEAFLHASEQMELYDIETETEVYKQGVYLADPVTESETPKKMAKAVHDITKGHIKRNKFVTLFGGEHSISIGAIRAFNECFEDLTVLQIDAHTDLRKKYEGSKYNHACAVYEANETTNLIQVGIRSMDIAETTVMNKDNVFFAHDMATDDYWMDNAVELMTDNVYITFDLDAFDPSIMPSTGTPEPGGLLWYETLEFLKKVFTEKNVVGFDIVELCPNKNDKSSDFLAAKLYYKMLTYKFENEAIDAAFDHESEYNASQKKQLSNKTQHDDYEQ

SEQ ID NO: 84385 - DNA, 960 bp, Roseovarius nubinhibens ISM
  CDS (1)..(960): transl_table=11
atgagcggacatggctatgagagcgggcggttgaacctgccgtttgtggggatttcgacctttggcaaatcgccttatcagcccgattgggacgcgatagaggccgatgtcgccatcctcggcgcgccgttcgatttcggcacgcaatggcggtccggggcgcggtttgggccgcgcggcattcgcgaggcctcgacgcttttctcctttggtcatggcggtgcctatgaccacgaggatgacatcacctatctgcccgccgacaaggtgcggatggtcgatctgggtgacgccgatatcatccacaccgacaccgaacagagccatgccaatatcgaatttggcgtgcgcaagatcctcgcagcgggggcgctgccggtggtgctcggcggcgatcattcgatcaacatcccctgtatcaacgcctttgagggccaagagccgatccatatcgtgcagatcgacgcccatctcgatttcgtcgatgagcgccacggcgtccgccatggccatggcaacccgatgcgccgcgcggcggaaaagccctatgtcaccgggctcagccagatcggcatccgcaatgtgagctcgaccgccaaggagggctatgacgatgcccgcgccatgggctcggacatcctgtcggtgcgccagttccgcaagctgggcgtcgacgccgtgctcgaccggatccccgcgggcgtgcgctattacgtgaccatcgacatcgacgggtttgatccctcgattgcgccgggcaccggcacgccgagccatggcggatttctctattacgaggtgctcgaactgctggacgggctggcgcggcgcggcgatgtggtggggatggatctggtcgaagtggccccggattacgaccattccggcagcacgacgatccttgcggcacagatcctgatgaacgccattggaagggtcttgcaccaccgggcggggtag

SEQ ID NO: 84386 - protein, 319 aa, Roseovarius nubinhibens ISM
MSGHGYESGRLNLPFVGISTFGKSPYQPDWDAIEADVAILGAPFDFGTQWRSGARFGPRGIREASTLFSFGHGGAYDHEDDITYLPADKVRMVDLGDADIIHTDTEQSHANIEFGVRKILAAGALPVVLGGDHSINIPCINAFEGQEPIHIVQIDAHLDFVDERHGVRHGHGNPMRRAAEKPYVTGLSQIGIRNVSSTAKEGYDDARAMGSDILSVRQFRKLGVDAVLDRIPAGVRYYVTIDIDGFDPSIAPGTGTPSHGGFLYYEVLELLDGLARRGDVVGMDLVEVAPDYDHSGSTTILAAQILMNAIGRVLHHRAG

SEQ ID NO: 84387 - DNA, 891 bp, Prochlorococcus marinus str. MIT 9211
  CDS (1)..(891): transl_table=11
atgaaaatcaatcaaaacctaacatttaataatagtgaggggatatttatcggcagccaaacaaactgcaaagattgcaagattggcatctacggtgttccttatgatggaacaacatcatttagaccaggtacgcgcttcggtccatctgcaataaggaacattagcaatggaattgaatctttctgcccacaattaaatcttgatcttgaagacttaaaatatgttgatcttggctctttagatattccttttggagcaccagaaaaagttataaatctagtaaagcaagccactattctacttatgcaaaaagggatcaaacctttattacttggaggagagcattccattacagaaggtgcaatagcaggaatagtagattttcatcctgaactaattattcttcaattagatgcccatgctgatcttcgagatgaatggttaggttcaaagcataatcatgcttgcgtaatgcgtagatgcatagaaattttaccaagcaaaaaaatctttcaaatgggtattcgaagcggaactagtaaggaatttaaagagcttaaagaaaagaaaagattaatttctcatcaaagtgggcaggttgccaagagtctagataaggcaatgcagccttatctaggcatgcctatttatttaacattagatctcgattggttcgacccaagtgtgatgcctgggacgggaacaccagaacccggtggatttttatggcaagactttgcagctgtaatagaggtaattaaaaaacataatttaattgctgcagatatagttgaattagctcctaagttagatcattctgaaattagtagtattcttgccgcaaaaattgctcgaagtctaatcatgttactatcgctagaaaaataa

SEQ ID NO: 84388 - protein, 296 aa, Prochlorococcus marinus str. MIT 9211
MKINQNLTFNNSEGIFIGSQTNCKDCKIGIYGVPYDGTTSFRPGTRFGPSAIRNISNGIESFCPQLNLDLEDLKYVDLGSLDIPFGAPEKVINLVKQATILLMQKGIKPLLLGGEHSITEGAIAGIVDFHPELIILQLDAHADLRDEWLGSKHNHACVMRRCIEILPSKKIFQMGIRSGTSKEFKELKEKKRLISHQSGQVAKSLDKAMQPYLGMPIYLTLDLDWFDPSVMPGTGTPEPGGFLWQDFAAVIEVIKKHNLIAADIVELAPKLDHSEISSILAAKIARSLIMLLSLEK

SEQ ID NO: 84389 - DNA, 861 bp, Synechococcus sp. RS9917
  CDS (1)..(861): transl_table=11
atgacctaccgcccacgcttcgacaccgacggcgccatcttcatgggctccaggcgcgaccccggcggctgccgcgtcggcctgttcggtgtgccctacgacggcaccacctccttccgccccggcacccgcttcgggccggccgccattcgggaggtgagttcgggcctggaaacctattgcccccagctggacttagacctggaggcgatggccttcgccgatctgggtgctgtcgacattccctttggcgatccggagccggtggtggaggcggtcaagcaggccaccgacgccgtgctctccctggggctcaaaccgctgatgctcggcggtgagcactcgatcagttccggcgccgtggcggcggtggcggataagcatcccgatctggcgctggtgcagctcgatgcccacgccgacctgcgccacgactggctgggtgcccaccacagccatgcctgcgccatgcgccgctgcctcgaggtgctgcccagtcagcagctgctgcagcttgccatccgcagtggcacccgtgaggagttcctggagctccgtcaaaccggacgcctgatcgcccgcgagcggatgctcgaggccctgcaaccgctgcgggggattcccctctacctcaccgtcgatctcgactggtttgatccagcggtgatggccggcaccggaacccctgaacccggcggcttcctctggagcgacttcgccgagctggtggcggaactgagtcaccacaacctggtggcagccgatgtggtggaactggcaccccagctggatccctcgggcgtgagcagcgtgttggcgagcaaggtggtgcggagcctgctcatgctgctgcatcagtag

SEQ ID NO: 84390 - protein, 286 aa, Synechococcus sp. RS9917
MTYRPRFDTDGAIFMGSRRDPGGCRVGLFGVPYDGTTSFRPGTRFGPAAIREVSSGLETYCPQLDLDLEAMAFADLGAVDIPFGDPEPVVEAVKQATDAVLSLGLKPLMLGGEHSISSGAVAAVADKHPDLALVQLDAHADLRHDWLGAHHSHACAMRRCLEVLPSQQLLQLAIRSGTREEFLELRQTGRLIARERMLEALQPLRGIPLYLTVDLDWFDPAVMAGTGTPEPGGFLWSDFAELVAELSHHNLVAADVVELAPQLDPSGVSSVLASKVVRSLLMLLHQ

SEQ ID NO: 84391 - DNA, 927 bp, Synechococcus sp. WH 5701
  CDS (1)..(927): transl_table=11
atggctgtttccgctgcactggatcgtctcgagtccgacctgttcgatcgcgatggcgccatcttcatgggatcgcggcgcgaccccgagggttgccgggtggccctcttcggggtgccctacgacggcaccacctccttcaggccgggcacccgcttcgggccggcggcgatccgggaggtgagcagcgggctggaaacctacgacccccagctggatctcgatctcgacgacctcgccttcgcggatctgggggcggtggccattcccttcggtgcgcccgagccggtggtggccgctgtcggagaggccaccagtgcggtgctggagctggggctgcggccgctgatgctcggcggtgagcactcgatcagcagtggcgcggtagccgccgtggccgcccgccatcccgacctggtcctggtgcagctcgatgcccacgccgatctgcgccagagctggctgggggcacgacacagccacgcctgtgcgatgcgccgctgcctggaggtgctcccctccggcgatctgctccaggtggcgatccgcagcggcacccgcgaggagttcgaggagctgcgccgcagtggccggctggtggggcagggcccgggcctgtcgctgcagcccgagcggctgcaggcggagctcgctgcagccctcgcgcccctgcggggccggccgatctacctcaccgtcgacctcgactggttcgatccagccgtgctgcccggcaccggcacccccgagcccgggggctaccactggggccacttcgcggggctgctggaggaactgcgccaccaccagctggtggccgccgatgtggtcgaactcgcccccggcctggatcccactggcgtgagcgcggtgctggcggcgaaggtgacccgcagcctgctgctgctgctgggccaggctcagtag

SEQ ID NO: 84392 - protein, 308 aa, Synechococcus sp. WH 5701
MAVSAALDRLESDLFDRDGAIFMGSRRDPEGCRVALFGVPYDGTTSFRPGTRFGPAAIREVSSGLETYDPQLDLDLDDLAFADLGAVAIPFGAPEPVVAAVGEATSAVLELGLRPLMLGGEHSISSGAVAAVAARHPDLVLVQLDAHADLRQSWLGARHSHACAMRRCLEVLPSGDLLQVAIRSGTREEFEELRRSGRLVGQGPGLSLQPERLQAELAAALAPLRGRPIYLTVDLDWFDPAVLPGTGTPEPGGYHWGHFAGLLEELRHHQLVAADVVELAPGLDPTGVSAVLAAKVTRSLLLLLGQAQ

SEQ ID NO: 84393 - DNA, 885 bp, Synechococcus sp. WH 7805
  CDS (1)..(885): transl_table=11
atgaagacaaacggattggacacctttgcagctgaggagttatttgaccaagacggagggatcttcatgggcgctcgccgcgatccatccggctgtcaggtcggtgtattcggcgtgccctatgacggaaccacatcgttccgccctgggacccggttcggccctgcagcaattcgcgaggtcagccccggtctggagacgtactgcccgcagctcgatcgagacctcgacaccctggactacgccgatctcggcacactcaacatcgccttcggagcacccgagcctgtggtggaggccgttaaacgggcaacgtcagaaattcttgccctgggcctcaaaccgctgatgctcggtggagagcattccatcagctctggcgccgtagccgctgtggccaaagaccatcctgatctggtgctggtgcaactcgatgcccatgcagacctgaggcagtcctggctcggcgcaagccacagccacgcctgcgccatgcgccgctgcttggacgtgctgccgagcggcgatcttcttcagatcgccatccgcagcggaacggccgaggaattctcagaactgcatcgcagtggccgcttgattccactgcatcagatgagccaaaagctcagcgatctgcgcggacgaccgatctacctcaccgtggatctcgactggttcgaccctgcggtgatgccaggcaccggaacacctgaacccgggggattcacctgggctgatttcgctgttctgatcaatgagttgcaacatcaccacctggtgggcgcggatgttgttgaactggcccctcaactggatcccagcggcatcagcagcgtgctcgctgccaaggtcacccgaagcctgctgctgctgatggctcaataa

SEQ ID NO: 84394 - protein, 294 aa, Synechococcus sp. WH 7805
MKTNGLDTFAAEELFDQDGGIFMGARRDPSGCQVGVFGVPYDGTTSFRPGTRFGPAAIREVSPGLETYCPQLDRDLDTLDYADLGTLNIAFGAPEPVVEAVKRATSEILALGLKPLMLGGEHSISSGAVAAVAKDHPDLVLVQLDAHADLRQSWLGASHSHACAMRRCLDVLPSGDLLQIAIRSGTAEEFSELHRSGRLIPLHQMSQKLSDLRGRPIYLTVDLDWFDPAVMPGTGTPEPGGFTWADFAVLINELQHHHLVGADVVELAPQLDPSGISSVLAAKVTRSLLLLMAQ

SEQ ID NO: 84395 - DNA, 936 bp, Flavobacteria bacterium BBFL7
  CDS (1)..(936): transl_table=11
atgagcaattcaaactatgcaggaattccagatgaatatgctggattagataatgcatcaattgttttaattccagttccttatgacggaacaagcacctggcaaaaaggcgcagataaaggtccagaagcttttctagacgctagtgcaaatatggaattatacgatattgaaacagatacagaagtgtatcatcatggagtctttcttgcagatgctgttacagaaaacagctcgccagaagcaatggtagatgccgttcacgctactactaaaaagtatattaaaaaaaataagtttgtaactcttttcggtggagaacattctatttctataggaagtatacgcgcttttaatgaaatgtatgagaacctgagtgtacttcaaatcgatgctcatgcagatttgagaaaggaatatgatggtagtagttgtaatcacgcctgcgccgtttatgaagcaagtcagaaaacaaacctagttcaagtaggaatacgctctatggatagtatagaagtaggtattaatgatgacgataaaatatttttggctcatgaaatggttcaagatgactactggcaagaaaaagctactgaagcacttacagaaaatgtatttatcaccatcgacttagatgcttttgacccatcgatatgtccatctactggcacgcctgaacctggtgggcttttctggtatgaaacattagatttcttaaaaatggtatttgcagagaagaacgtggtaggttttgacattgttgaattatgtcctaatccatcagagaaatcatcagattttcttgctgcaaaactgtattataaaatgctgagctataaatttaaagacattgctctagaaggagaagatggctatgaagcaaataatgcttttaccaaatctggattaaaaaaaatgaaaaacatagaagattaa

SEQ ID NO: 84396 - protein, 311 aa, Flavobacteria bacterium BBFL7
MSNSNYAGIPDEYAGLDNASIVLIPVPYDGTSTWQKGADKGPEAFLDASANMELYDIETDTEVYHHGVFLADAVTENSSPEAMVDAVHATTKKYIKKNKFVTLFGGEHSISIGSIRAFNEMYENLSVLQIDAHADLRKEYDGSSCNHACAVYEASQKTNLVQVGIRSMDSIEVGINDDDKIFLAHEMVQDDYWQEKATEALTENVFITIDLDAFDPSICPSTGTPEPGGLFWYETLDFLKMVFAEKNVVGFDIVELCPNPSEKSSDFLAAKLYYKMLSYKFKDIALEGEDGYEANNAFTKSGLKKMKNIED

SEQ ID NO: 84397 - DNA, 888 bp, delta proteobacterium MLMS-1
  CDS (1)..(888): transl_table=11
atgcaaaccgaggtgtcatatccgtcgtttttgggtgacgaagcggtggtggccggagccgaccggatcgccgtgctgtcggcgccgctggccaataccgtcagctggggcggaggcaccgagcatggtccggccgccattttagaggcctctttggccctggaagtctttgatgacgaattactgcaggagaccgtccaggccggcatcgtcacccgcccacccctggccctggcgggcctggattcggccacggcctgtcgcctggtcgacgaggcggtgagtgtcgagttggcggccgggctttttccggtgctgctggggggggagcacacggtcagtggcccggcggcgctggccatgcaacgttattatccggcgcttcatgtggtccaggtggatgcccatcttgatctgcgccgggagtatgacggcaccccgctgagccatgcctgcgtgatgcgccggatcgccgaggcgggaatggctttcagccaggtggggattcgttcttttgcggccgaagagtggcaactggtgcagcaacggggctggcagcctttcaccatggcccggatcagaagccgcgaggattggcttgaacaactgctggccgaaatcaaaggcccggtttacctcaccgtcgatgtcgatggtctggacccggcgatcatgccggccaccggcacccccgagcccgacggtctttactggccccagttgatcgccctggcccgggccctggccaccggacccggcctggtggggctggatgtggtcgagctggcacccaaaccgggccttgcacatgccgccttcaccgccgccaaattcatctatcgtaccctggggtatgctttccccacaagcgttcaccagggccgatga

SEQ ID NO: 84398 - protein, 295 aa, delta proteobacterium MLMS-1
MQTEVSYPSFLGDEAVVAGADRIAVLSAPLANTVSWGGGTEHGPAAILEASLALEVFDDELLQETVQAGIVTRPPLALAGLDSATACRLVDEAVSVELAAGLFPVLLGGEHTVSGPAALAMQRYYPALHVVQVDAHLDLRREYDGTPLSHACVMRRIAEAGMAFSQVGIRSFAAEEWQLVQQRGWQPFTMARIRSREDWLEQLLAEIKGPVYLTVDVDGLDPAIMPATGTPEPDGLYWPQLIALARALATGPGLVGLDVVELAPKPGLAHAAFTAAKFIYRTLGYAFPTSVHQGR

SEQ ID NO: 84399 - DNA, 888 bp, delta proteobacterium MLMS-1
  CDS (1)..(888): transl_table=11
atgcaaaccgaggtgtcatatccatcgtttttgggtgacgaagcggtggtggccggagccgaccggatcgccgtgctgtcggcgccgctggccaataccgtcagctggggcggaggggccgagcatggtccggccgccattttagaggcctctttggccctggaagtctttgatgacgagctgctgcaggagaccgtccaggccggcatcgtcacccgcccacccctggccctggcgggcctggactcggccacggcctgtcgcctggtcgacgaggcggtgagtgtcgagttggcggccgggctttttccggtgctgctggggggggagcacacggtcagtggcccggcggcgctggccatgcaacgttattatcccgcgctccatgtggtccaggtggatgcccatctcgatctgcgccgggagtacgacggcaccccgctgagccatgcctgcgtgatgcgccggatcgccgaggcggggatggctttcagccaggtggggattcgttcttttgcggccgaagagtggcaactggtgcagcaacggggctggcagcctttcaccatggcccggatcagaagccacgaggattggcttgaacaactgctggccgaaatcaaaggcccggtttacctcaccgtcgatgtcgatggtctggacccggcgatcatgccggccaccggcacccccgagcccgacggtctttactggccccagttgatcgccctggcccgggccctggccaccggacccggcctggtggggctggatgtggtcgagctggcacccaaaccgggccttgcacatgccgccttcaccgccgccaaattcatctatcgtaccctggggtatgctttccccacaagcgttcaccagggccgatga

SEQ ID NO: 84400 - protein, 295 aa, delta proteobacterium MLMS-1
MQTEVSYPSFLGDEAVVAGADRIAVLSAPLANTVSWGGGAEHGPAAILEASLALEVFDDELLQETVQAGIVTRPPLALAGLDSATACRLVDEAVSVELAAGLFPVLLGGEHTVSGPAALAMQRYYPALHVVQVDAHLDLRREYDGTPLSHACVMRRIAEAGMAFSQVGIRSFAAEEWQLVQQRGWQPFTMARIRSHEDWLEQLLAEIKGPVYLTVDVDGLDPAIMPATGTPEPDGLYWPQLIALARALATGPGLVGLDVVELAPKPGLAHAAFTAAKFIYRTLGYAFPTSVHQGR

SEQ ID NO: 84401 - DNA, 894 bp, Rickettsiella grylli
  CDS (1)..(894): transl_table=11
atgcattgcatagaacccaaaaaagcctttttaggcttagcgcaagaagatgccgttgattatgaaaaggcgaaagccgtgatcatcccgtttggtctagaaaattcggttacgtatggtaaagggacggctaaaggaccggctgccattattcgcgcctcttatgaagttgaattgtttgatgaacaattatggtgtgaaccttttcgtcaaattggcattgttacattaaacgaacctaaaattgatgctgaaatgccgaaggctttacaacaattagaaacgattgttgaaaaagtattaaaggataaaaaatttccatttgttttgggcggagaacacgcaattacgataggtgccattcgtccttatttaaaaaaatataatgatctgatcttactgcattttgatgcccatgctgatttacgcgatggttaccaaggacaacattattcccatgcttccgcgataagacgttgtttagatcatgactcattgaatgttgtttccgtgggaattcgtaatgtttcaagagaagaaattcctttcattgaagaaaaccgtgatagaattcatctatattggggaaaagataaaaaaaaatgggatatcaacacgatcgtctcccatttaaaaaaccggcctatttatttaacatttgatgttgacgcatttgattccagtgtgatgccagctacaggaactcctgaacccggtggtttattttgggaagacgcactcgaaattattacggcagcaagtcaagtaggacggatagttggagcagatatcaatgagctcgcgccgattcctcaattacctagttgtgattttttagttgcaaagctagtctataaaattctttctttattcgctctcgacgagcggttataa

SEQ ID NO: 84402 - protein, 297 aa, Rickettsiella grylli
MHCIEPKKAFLGLAQEDAVDYEKAKAVIIPFGLENSVTYGKGTAKGPAAIIRASYEVELFDEQLWCEPFRQIGIVTLNEPKIDAEMPKALQQLETIVEKVLKDKKFPFVLGGEHAITIGAIRPYLKKYNDLILLHFDAHADLRDGYQGQHYSHASAIRRCLDHDSLNVVSVGIRNVSREEIPFIEENRDRIHLYWGKDKKKWDINTIVSHLKNRPIYLTFDVDAFDSSVMPATGTPEPGGLFWEDALEIITAASQVGRIVGADINELAPIPQLPSCDFLVAKLVYKILSLFALDERL

SEQ ID NO: 84403 - DNA, 870 bp, Oceanobacter sp. RED65
  CDS (1)..(870): transl_table=11
atgagtaaaccgatttttttagaatctgaaatcgagcaaagcccaattgatcaggctgcgttttcagttttacccgttccttatgaaaaaaccgtttcttatggcggcggcacggcgttaggcccgaatgccatcattgttgccagtgagcaattagagacatgggatggtaagtctaatccttccgcattggggattcacacctgtgatacggtggattgccaagtggatccggatgtagtgattgagaatattgccaaagcgacccaagcaattttagaagcgggcagcatgccggtggtattgggcggcgagcataccgtgacctatggcgtaatcaaaggctatctaaacgcgggtattaaagactttggcgtggtacaaattgatgcccatgcggatttacgcgaagcttatgaaggcgataagttaagtcatgcttccgttatgaaacgggtagtggatgaaggcattccactttatcagttgggtattcgtgcttattgtgaagaagaaatggccattcgcgaaaagcatggggttcgttatcaagatgcggatgatatcgtaccgcaaaatattcaaagtattcagctgcctgacgactttccaaaaaacgtgtttttcacacttgatatcgatggcatggacccctctgtgtttccatccacaggtacccctgtacccggtggtttgagctggtatcaaacgcttaatttatttgagagtgttgctaagcaacgcaagatcattggttttgatgttatggagtttgctccgatagaaggtttccatgcgtatgactttagtgctgcgttactcacttataagttaatgggtattgtgcagcgcactcaattctcggcttaa

SEQ ID NO: 84404 - protein, 289 aa, Oceanobacter sp. RED65
MSKPIFLESEIEQSPIDQAAFSVLPVPYEKTVSYGGGTALGPNAIIVASEQLETWDGKSNPSALGIHTCDTVDCQVDPDVVIENIAKATQAILEAGSMPVVLGGEHTVTYGVIKGYLNAGIKDFGVVQIDAHADLREAYEGDKLSHASVMKRVVDEGIPLYQLGIRAYCEEEMAIREKHGVRYQDADDIVPQNIQSIQLPDDFPKNVFFTLDIDGMDPSVFPSTGTPVPGGLSWYQTLNLFESVAKQRKIIGFDVMEFAPIEGFHAYDFSAALLTYKLMGIVQRTQFSA

SEQ ID NO: 84405 - DNA, 858 bp, Desulfitobacterium hafniense DCB-2
  CDS (1)..(858): transl_table=11
atgaagatgacagaaagccccggtgtgtttatgggaggagaaaccccttatgaagaggctgacgcggtaattttggggattcctatggattatacggtgagttttcgcccgggtacccgtttgggccccctgagtatccgcaatgtctccatcgggattgaggaatatagtgtgtatctggataaggatctctctgattatgcttattgcgattgtggagatttaagcctgccctttggcaatgttgaaaaatctttgcaagtgatcgaagccgctgcccggcaggtggtagaagacgggaaatttcccattttcttagggggagaacacctggttacctatcctttgcttaaacccttcattgagaagtatcctgagctccgggtggtgcattttgacgcccatgccgatttgcgtacagattactccggtgagcctaattcccatgctacggtgatgcgcaaaatctcggaagctctggggccccaccgggtctaccagtttggcatacgctccggaacccgggaggaattcctttttgctaaggaacacaatcatttggtggtagaagaggttttggagcccctcaaggctgtcctgccggagcttaaagggaagccggtctatgtgacgctagatattgatgtggtggatccggcctttgccccaggcactgggactcaggaagccggtggatgtacttcccgggaaatcatcaaagccgttcatgccctcagtgagctggatgtggtgggctttgatctggtggaagtatcccctcttatggacaccagtgagcgtacggctcttttagcagcgaagatcgtaagggaagcaattttgagttttgtaaaataa

SEQ ID NO: 84406 - protein, 285 aa, Desulfitobacterium hafniense DCB-2
MKMTESPGVFMGGETPYEEADAVILGIPMDYTVSFRPGTRLGPLSIRNVSIGIEEYSVYLDKDLSDYAYCDCGDLSLPFGNVEKSLQVIEAAARQVVEDGKFPIFLGGEHLVTYPLLKPFIEKYPELRVVHFDAHADLRTDYSGEPNSHATVMRKISEALGPHRVYQFGIRSGTREEFLFAKEHNHLVVEEVLEPLKAVLPELKGKPVYVTLDIDVVDPAFAPGTGTQEAGGCTSREIIKAVHALSELDVVGFDLVEVSPLMDTSERTALLAAKIVREAILSFVK

SEQ ID NO: 84407 - DNA, 918 bp, Synechococcus sp. RS9916
  CDS (1)..(918): transl_table=11
atgaccagcccaagcatcgatctcgacaccttgtttgaccgcgaaggcgccatctacatgggcgcccgccgcgatcccagcggctgccaggtgggtctgtttggcgtgccctacgacggcaccacctccttccgccccggcacccgctttgggccggccgccgtgcgtgatgtgagcaacggcctggagagctactgcccccagctgcagatcgacctcgaggatctggcctatgccgacctcggcgccgtcgacattccgttcggcgccccggaaccggtggtggccgccgtgcatcgcgccacccgccaggtgctcgacctggggctcaaacccctgatgcttggaggtgagcactcgatcagcagcggtgccgtcggcgccgtcgccgagcagcatcccgatctggtgctgcttcagctcgacgcccacgccgatctgcgcgacagctggctgggggcccgccacagccatgcctgcgccatgcgccgctgtctggaggtgctccccagcggccagctgctgcaactggcgatccgcagtggcacacgcgaggaattccaggaactcgcccagacccagcgcctgatccaccaccggcccgaccaggacagcaccaccctggcggccagcctgcggcaggctttagccccccatcagggcaagccgctctatctcaccgtggatctcgactggttcgacccggcggtgatgcccggcaccggcactcctgaacccggcggcttcctctggccccacttcgccgccctgatcgaggtgctgcaagagcatcagctggtggccgccgacgtggtggaactggccccacaactggatccgaccggaatcagcagcgtgctggccagcaaggtgacccgcagcctgctgatgctgctcagcaacgaagggaatcagtag

SEQ ID NO: 84408 - protein, 305 aa, Synechococcus sp. RS9916
MTSPSIDLDTLFDREGAIYMGARRDPSGCQVGLFGVPYDGTTSFRPGTRFGPAAVRDVSNGLESYCPQLQIDLEDLAYADLGAVDIPFGAPEPVVAAVHRATRQVLDLGLKPLMLGGEHSISSGAVGAVAEQHPDLVLLQLDAHADLRDSWLGARHSHACAMRRCLEVLPSGQLLQLAIRSGTREEFQELAQTQRLIHHRPDQDSTTLAASLRQALAPHQGKPLYLTVDLDWFDPAVMPGTGTPEPGGFLWPHFAALIEVLQEHQLVAADVVELAPQLDPTGISSVLASKVTRSLLMLLSNEGNQ

SEQ ID NO: 84409 - DNA, 972 bp, Pseudomonas putida GB-1
  CDS (1)..(972): transl_table=11
atggcaaagcacggttacgagtctggccgcctgaacctgccctttgtgggccattgcacgttcgccaaggcgccggtatgcaccgactgggcggcaatcgacgccgatgtggcgattttgggtgcacccaacgacatgggcacccagtggcgttcgggtgcgcgctttgggccgcgcggcatccgtgaggcatcgaccttgttttccttcggccatgccggtgcctatgacttcgaagatgacgccacctacctgaccgaagaccaggtgcgcatggtcgatgtgggcgacgccgacatcgtgcacaccgacatggccagcagtaacgccaacatcgagtcggccgtgcggcagattcttgcggcgggggcgatgccggtggtgctgggcggtgaccattcggtgcatgccccggtgatcaaggcgttcgaaggccatgggccgatccacatcgtgcatttcgacgcccacctggatttcgtcgacgagcgccacggcgtgcgctacggccacggcagcccgctgcgccgcgcatcggagctggagcacatcgttggcatgacccaaatgggcatccgcaacgtgtcctcatccaaccgcgacgactacgacgccgcgcgtgacgccggttcgcagattctttcggtgcgtgacgtacgtcggttgggctgcgagggcgtgctggcgaaaattcctgaaggccgcaactactacatcaccatcgacatcgacggcttcgacccgtccatcgccccgggcactggcacgccgagccatggcggattcttgtactacgaagtgctggagatcatccaggccctggcccggcgcagccatggccgcatcgtcggcatggacctggtcgaagtggccccggcctacgaccccaccggcatgacctcgatcctggccgcacaattgctgatgaacagcatcggcttcatcttccacgcgcgcgccaacgcccgctga

SEQ ID NO: 84410 - protein, 323 aa, Pseudomonas putida GB-1
MAKHGYESGRLNLPFVGHCTFAKAPVCTDWAAIDADVAILGAPNDMGTQWRSGARFGPRGIREASTLFSFGHAGAYDFEDDATYLTEDQVRMVDVGDADIVHTDMASSNANIESAVRQILAAGAMPVVLGGDHSVHAPVIKAFEGHGPIHIVHFDAHLDFVDERHGVRYGHGSPLRRASELEHIVGMTQMGIRNVSSSNRDDYDAARDAGSQILSVRDVRRLGCEGVLAKIPEGRNYYITIDIDGFDPSIAPGTGTPSHGGFLYYEVLEIIQALARRSHGRIVGMDLVEVAPAYDPTGMTSILAAQLLMNSIGFIFHARANAR

SEQ ID NO: 84411 - DNA, 1044 bp, Pseudomonas putida GB-1
  CDS (1)..(1044): transl_table=11
atgtccctgcccgccggcaaaaccacacttgaaaggcgcgcggcggcacaggttcgaacaaacagaacaatcgaccgactgatgaggcccaccgtggacaagactctccaccaaccactgggcggcaacgaaatgccgcgtttcggcggcatcgccaccatgctccgtctcccccacctgcaaagcgccaaaggcctggatgccgccttcatcggcgtaccgttggacatcggaacctcgctgcgctccggcacccgcttcggcccacggcagatccgcgccgagtcggtgatgatccgcccctacaacatggccaccggtgccgccccgttcgactcgctgtcggtagccgacatcggtgacgtggcaatcaacaccttcaacctgctggacgccgtgcgcatcatcgaagaggcgtatgacgagatcgtcgagcacaacgtcatccccatgaccctgggtggcgaccacaccatcaccctgccaatcctgcgtgcgctgcacaagaagcacggcaagatcggcctggtacacatcgacgcccacgccgacgtcaacgaccacatgttcggcgagaagatcgcccacggcaccaccttccgccgcgccgtggaagaaggcctgctcgattgcgaccgcgtggtacagatcggcctgcgcgcccagggctataccgccgacgacttcaactggagccgccgccagggtttccgtgtggtccaggccgaagaatgctggcacaagtcgctggaacctttgatggccgaagtgcgggaaaaagtcggcggcggcccagtgtacctgtcgttcgacatcgacggcatcgacccggcctgggcacccggcaccggtaccccggaaatcggcggcttgaccaccatccaggcgatggagatcattcgcggctgccacggcctggacctgatcggctgtgacctcgtcgaagtctccccgccttacgacaccaccggcaacacctcgctgctcggtgccaacctgttgttcgagatgctctgcgtgctaccaggcgtcgtgcgccgctga

SEQ ID NO: 84412 - protein, 347 aa, Pseudomonas putida GB-1
MSLPAGKTTLERRAAAQVRTNRTIDRLMRPTVDKTLHQPLGGNEMPRFGGIATMLRLPHLQSAKGLDAAFIGVPLDIGTSLRSGTRFGPRQIRAESVMIRPYNMATGAAPFDSLSVADIGDVAINTFNLLDAVRIIEEAYDEIVEHNVIPMTLGGDHTITLPILRALHKKHGKIGLVHIDAHADVNDHMFGEKIAHGTTFRRAVEEGLLDCDRVVQIGLRAQGYTADDFNWSRRQGFRVVQAEECWHKSLEPLMAEVREKVGGGPVYLSFDIDGIDPAWAPGTGTPEIGGLTTIQAMEIIRGCHGLDLIGCDLVEVSPPYDTTGNTSLLGANLLFEMLCVLPGVVRR

SEQ ID NO: 84413 - DNA, 1023 bp, Oryza sativa
  CDS (1)..(1023)
atgggcggcgtggcggcgggcaccaggtggatccaccacgtccggcggctcagcgccgccaaggtgtcgacggacgccctggagcgcggccagagccgggtcatcgacgcctccctcaccctcatccgcgagcgcgccaagctcaaggcagagttgctgcgcgctcttggtggtgtgaaagcttcagcatgcctcttaggtgttcctcttggtcacaactcatcgttcttacagggacctgcatttgctcctccccggataagggaagccatttggtgtggaagtaccaactctagcacagaagaaggcaaagaactcaatgatcctcgagtgctaacagatgttggtgatgtccccatacaagagattcgtgactgtggtgttgaagatgacagattgatgaatgttgtaagcgagtctgtcaaaacagtgatggaggaagatcctcttcggccattggtcctgggaggcgatcactcaatatcttatccagttgttagggctgtgtctgaaaagcttggtggacctgttgacattcttcaccttgacgcacatccagatatctacgatgcttttgaaggaaacatctattcgcatgcttcttcatttgcaagaataatggaaggaggttatgctaggaggcttctacaggttggaatcagatcaattaccaaagaagggcgtgagcaggggaagagatttggtgtggaacagtatgagatgcgcactttttcaaaagatagggagaagcttgaaagtctgaaacttggggaaggtgtgaagggagtgtacatctcagttgacgtggactgcctcgatcccgctttcgcgccaggtgtctctcacattgagccaggaggcctctccttccgcgacgtgctcaacatcctccataacctgcaaggagatgttgtcgccggagatgtggtggagttcaacccgcagcgtgacacggtggacgggatgacggctatggttgcagccaagctggtccgggagctcacagccaagatctccaagtga

SEQ ID NO: 84414 - protein, 340 aa, Oryza sativa
MGGVAAGTRWIHHVRRLSAAKVSTDALERGQSRVIDASLTLIRERAKLKAELLRALGGVKASACLLGVPLGHNSSFLQGPAFAPPRIREAIWCGSTNSSTEEGKELNDPRVLTDVGDVPIQEIRDCGVEDDRLMNVVSESVKTVMEEDPLRPLVLGGDHSISYPVVRAVSEKLGGPVDILHLDAHPDIYDAFEGNIYSHASSFARIMEGGYARRLLQVGIRSITKEGREQGKRFGVEQYEMRTFSKDREKLESLKLGEGVKGVYISVDVDCLDPAFAPGVSHIEPGGLSFRDVLNILHNLQGDVVAGDVVEFNPQRDTVDGMTAMVAAKLVRELTAKISK

SEQ ID NO: 84415 - DNA, 1179 bp, Aspergillus oryzae
  CDS (1)..(1179)
atgctcgtcacaacagtgagccttctcgctctgtctgctgtggcttccgcccatggcaagcaccaaacccccatgtctggtccgcaccagaaactgtggtataacaccttgccaggagatggtggtactcaggccgattctgtcttctcaggcatttcgactttcgctcgcttgccctactttccctgtctctccagcgaggatgagaagtatgatattgccttcataggtgccccctttgacaccggcacctcctacagacccggtgccagatttggtcccagcggcatcagacaaggctcacgccgtctcaatctctacggtggctacaacgtccccctagaagccaacccctttgtcagtgatctgaaagtcatagactgcggcgacattcccgtcacctcctacgacaacgcctgggcaatccagcaaatcgaagaaggccacaacagcatcctgatgcgtaagcccttcaccgacgcaaacgaatatggcctctctcgagcaggcaagaccctcccccgcgtcatcaccctaggaggtgatcacaccatcacgctgcccctgctgcgcagtatcaacaaggcctatggccccgtcagtgtcattcacttcgatagccatctcgactcctggaaaccaaaggtcttcggtggctccccaagccaggtcgcttccgttaaccatggaacttacttctaccatgcggcgatggaaggccttcttaagaacgacacgaatattcacgctggtatccggactactctttcaggtccctcggattatgagaatgatggatactgtgggtttgagattgtagaggctagggagattgacacaatcggcacggacggtataatcaaaagaatccgcgaccgcgtcggtaccgaaaaccccgtttacctctccatcgacatcgacacgctggatcctgcctatgcccccgcaaccggcacccctgaaacaggtggctggtcaacccgcgaactgcgcacgatcatccgtggtctagacgggttgaatctcatcggggccgatatcgtggaggttgcacctgcttatgatactaatgcggagctgtcgactatggctgccgcggatgtgctttatgagattcttacgatgatggttaagaaggggccgttgactgttgattctgatggatctgttgacttgtag

SEQ ID NO: 84416 - protein, 392 aa, Aspergillus oryzae
MLVTTVSLLALSAVASAHGKHQTPMSGPHQKLWYNTLPGDGGTQADSVFSGISTFARLPYFPCLSSEDEKYDIAFIGAPFDTGTSYRPGARFGPSGIRQGSRRLNLYGGYNVPLEANPFVSDLKVIDCGDIPVTSYDNAWAIQQIEEGHNSILMRKPFTDANEYGLSRAGKTLPRVITLGGDHTITLPLLRSINKAYGPVSVIHFDSHLDSWKPKVFGGSPSQVASVNHGTYFYHAAMEGLLKNDTNIHAGIRTTLSGPSDYENDGYCGFEIVEAREIDTIGTDGIIKRIRDRVGTENPVYLSIDIDTLDPAYAPATGTPETGGWSTRELRTIIRGLDGLNLIGADIVEVAPAYDTNAELSTMAAADVLYEILTMMVKKGPLTVDSDGSVDL

SEQ ID NO: 84417 - DNA, 1017 bp, Solanum lycopersicum
  CDS (1)..(1017)
atgaagagtgctggaagtatgggaatcaactatatgcagaaattgctaacgtcaaatgttccaaaagaagtagtcaaaagaggacaggatcgtgttgtagaggcatctcttacacttattcgtgaaagagcaaaacttaagggagagcttgttcgtggacttggaggtgcagtagcgtcaacgtcacttcttggaattcctctgggacacaactcttcatttctccagggccctgcatttgctcctcctcttatacgagaggctatttggtgtggcagtacaaactccacaactgaggaaggaaaaatattagatgatcaacgtgtcttaactgatgttggtgatctgccagtacaagagttacgagacacaggcatagatgacgataggttgatgagtacagtaagtgaatctgtcaagctagttatggacgagaatccattgcgccccttggtgttagggggtgatcactctatatcctatcctgttgtaagagctgtgtctgaaaagcttggaggacctgttgatatccttcaccttgatgctcatcctgacatttatgatgcatttgaaggaaacaaatactcacatgcatcaagctttgcacgaataatggagggtggttatgctcgacgccttttgcaagttggaattagatcaattaatctagaaggtcgagaacaaggaaaaaggtttggtgtggagcaatatgaaatgcgaacattttccagagacagacaatttttggagaatctgaaacttggtgaaggtgtaaagggcgtgtatatatccgtggatgttgactgtttggatccagcatttgctcctggagtatctcattttgagtcaggcggtctctcgttccgcgatgttctaaacatactgcataaccttcaaggtgatatcgttggtgctgatgtcgttgagtacaacccacagcgtgatactgctgatggcatgactgcaatggttgctgcgaagctggtaagagaacttgctgccaagatgtccaagtga

SEQ ID NO: 84418 - protein, 338 aa, Solanum lycopersicum
MKSAGSMGINYMQKLLTSNVPKEVVKRGQDRVVEASLTLIRERAKLKGELVRGLGGAVASTSLLGIPLGHNSSFLQGPAFAPPLIREAIWCGSTNSTTEEGKILDDQRVLTDVGDLPVQELRDTGIDDDRLMSTVSESVKLVMDENPLRPLVLGGDHSISYPVVRAVSEKLGGPVDILHLDAHPDIYDAFEGNKYSHASSFARIMEGGYARRLLQVGIRSINLEGREQGKRFGVEQYEMRTFSRDRQFLENLKLGEGVKGVYISVDVDCLDPAFAPGVSHFESGGLSFRDVLNILHNLQGDIVGADVVEYNPQRDTADGMTAMVAAKLVRELAAKMSK

SEQ ID NO: 84419 - DNA, 1017 bp, Solanum lycopersicum
  CDS (1)..(1017)
atgaggagtgctggaagaatgggaatccattatatgcagaaattgcacgcgtcaaatgttccaaaagaattggtggaaaaaggacagaatcgtgttatagaggcatctcttacacttattcgtgaaagagcaaaacttaagggagagcttgttcgtgctcttggaggtgctgtagcctcaacgtctcttcttggagttcctctgggacataactcttcatttctccaggggccagcatttgctcctcctcgtatacgagaggctatgtggtgtggcagtacaaactctacaactgaggaaggaaaagaattagatgatccacgcatcttaactgatgttggtgatgtgcctgtgcaagagttacgagatgcaggtgtagatgatgataggttaatgagtatcataagcgaatctgtcaagctagttatggaagagaatccattgcgccccttggtgttagggggtgatcactctatatcctatcctgttgtaagagctgtgtctgaaaagcttggagggcctattgatatccttcaccttgatgctcatcctgacatttatcatgcctttgaaggaaacaaatactcacatgcatcaagctttgcacggataatggagggtggttatgctcgacggcttttgcaagtgggaattagatcaattaataaagaaggtcgagaacaaggaaaaaggttcggtgtggagcaatatgaaatgcgaacattttcccaagaccgacaatttttggagaatctgaaacttggcgaaggtgtgaagggcgtgtatatctcagtggatgttgactgtatggatccagcatttgctcctggagtatctcatatagaaccaggaggtctctctttccgcgatgttctaaacatactgcataaccttcaagctgatgttgttggtgctgatgtggttgagttcaacccgcagcgtgatactgttgatggcatgactgcaatggttgctgcgaagctggtaagagaacttactgccaagatatccaagtga

SEQ ID NO: 84420 - protein, 338 aa, Solanum lycopersicum
MRSAGRMGIHYMQKLHASNVPKELVEKGQNRVIEASLTLIRERAKLKGELVRALGGAVASTSLLGVPLGHNSSFLQGPAFAPPRIREAMWCGSTNSTTEEGKELDDPRILTDVGDVPVQELRDAGVDDDRLMSIISESVKLVMEENPLRPLVLGGDHSISYPVVRAVSEKLGGPIDILHLDAHPDIYHAFEGNKYSHASSFARIMEGGYARRLLQVGIRSINKEGREQGKRFGVEQYEMRTFSQDRQFLENLKLGEGVKGVYISVDVDCMDPAFAPGVSHIEPGGLSFRDVLNILHNLQADVVGADVVEFNPQRDTVDGMTAMVAAKLVRELTAKISK

SEQ ID NO: 84421 - DNA, 1026 bp, Pinus taeda
  CDS (1)..(1026)
atggggtccatgggaaaaatggtgatgaggtttctgcagaagcgtagtttggcaactttaccatcacaaatgatagagaagggccaaaaccgtgttgtggaagcttcccttaccctgatcagggagagagcaaaactcaaggcagaattggtgcaggcattgggaggctcaattgcaacgacttgccttctaggagttcctttggggcacaattcatctttccttcaaggccctgcattcgctcctcctcgcattcgagaagctatttggtgtggtagtacaaattccgcgactgagaaagggaaagaattgaaagactcgagagtgctgtcagatgctggagatgttccaattcaagaaatgcgagattgtgggattgaagatgagaggttaatgaaaactgtcagtgactctgtaaaaattgtaatggaggagcctccacttcgtccattggttttaggtggcgatcattcaatatcctacccagttgttaaggctgttacagaccaccttggagggccagtggatattcttcatttagatgctcatcctgatatttatgatgcttttgaaggaaataagtattcacatgcttcttcatttgcgcgaattatggagggtggtcatgcaaggcgacttttgcaagtgggcatcaggtctataacaaaggaaggtcgggagcaagggaaaagatttggagtagaacaatatgaaatgcacagtttcagtaaagatcgtgatttcttggagaatctgaaacttggggaaggtgtgaaaggcgtttatatctcaattgatgtggattgccttgatccggcatttgcacctggagtctcgcacctggaaccgggtggtctctcttttcgtggtgtcatgaaccttgtacaaaatttgcaaggagacattgtggcggctgatgttgtggaatttaatccacaacgtgacacagttgatggaatgacagcaatggttgctgcaaagcttgtaagagagctgacgtcaaagatgtctaagttggctcattga

SEQ ID NO: 84422 - protein, 341 aa, Pinus taeda
MGSMGKMVMRFLQKRSLATLPSQMIEKGQNRVVEASLTLIRERAKLKAELVQALGGSIATTCLLGVPLGHNSSFLQGPAFAPPRIREAIWCGSTNSATEKGKELKDSRVLSDAGDVPIQEMRDCGIEDERLMKTVSDSVKIVMEEPPLRPLVLGGDHSISYPVVKAVTDHLGGPVDILHLDAHPDIYDAFEGNKYSHASSFARIMEGGHARRLLQVGIRSITKEGREQGKRFGVEQYEMHSFSKDRDFLENLKLGEGVKGVYISIDVDCLDPAFAPGVSHLEPGGLSFRGVMNLVQNLQGDIVAADVVEFNPQRDTVDGMTAMVAAKLVRELTSKMSKLAH

SEQ ID NO: 84423 - DNA, 1029 bp, Arabidopsis thaliana
  CDS (1)..(1029)
atgtcgaggattattggtagaaaagggattaactatatccatagactaaattctgcgtcgttcacgagcgtatctgcttcttcaatcgagaaagggcaaaatcgtgtgattgatgcttcgttaactcttattcgtgaaagggcaaaactcaaaggagagttagtgcgtcttttaggtggagctaaagcttcaacatctcttcttggtgtaccacttggtcacaactcttcttttcttcaaggtcctgcttttgctcctcctcgtattcgagaagctatttggtgtggtagcacaaactctgccactgaagaagggaaggagttgaaggatccacgggttctaactgatgttggggatgttccggtacaagagattagagattgtggggttgatgatgatagactgatgaatgtcataagtgaatctgtgaagttggtgatggaagaggaaccattgcgtccgttggtcttaggtggagaccattccatatcttatcctgttgtgagagcggtttctgagaagcttggagggcctgtggacattcttcatcttgatgcacatccggatatatatgactgttttgaaggaaataagtactctcatgcatcttcttttgctcgtatcatggaaggtggctatgcgcgtaggcttttacaggttgggatcagatcgataaaccaggaaggacgggaacaaggcaagaggtttggagtagaacagtatgagatgcgaaccttctcgaaagatcgcccaatgttggaaaatctgaaattaggggaaggagtgaagggggtatacatctcgatagacgttgactgtctcgatccggcatttgcacctggagtgtcgcatatcgaaccaggaggtctctctttccgtgacgtccttaacatcttacacaaccttcaggcagatgttgtcggggctgacgttgtcgagttcaacccgcagcgtgatactgttgacggcatgacagcaatggttgcagctaagcttgttagagaattagctgcgaaaatctcgaaatga

SEQ ID NO: 84424 - protein, 342 aa, Arabidopsis thaliana
MSRIIGRKGINYIHRLNSASFTSVSASSIEKGQNRVIDASLTLIRERAKLKGELVRLLGGAKASTSLLGVPLGHNSSFLQGPAFAPPRIREAIWCGSTNSATEEGKELKDPRVLTDVGDVPVQEIRDCGVDDDRLMNVISESVKLVMEEEPLRPLVLGGDHSISYPVVRAVSEKLGGPVDILHLDAHPDIYDCFEGNKYSHASSFARIMEGGYARRLLQVGIRSINQEGREQGKRFGVEQYEMRTFSKDRPMLENLKLGEGVKGVYISIDVDCLDPAFAPGVSHIEPGGLSFRDVLNILHNLQADVVGADVVEFNPQRDTVDGMTAMVAAKLVRELAAKISK

SEQ ID NO: 84425 - DNA, 972 bp, Schizosaccharomyces pombe
  CDS (1)..(972)
atgtctcctcataaaatacccgaagtacatagacatattatgtctagtagatacatggagggaaatgccgtctctatcataaatatgccattttcaggcggtcaacccaaggacggtgctgaattggctccagaaatgattgaggcggctggattgcctgaagacttggagcgtcttggttatagtgtcaacgtcgttcaaaatcccaaatttaaaagtcgacctttaaaagaaggccctaatcaagccctcatgaaaaacccactctacgttagcaatgttactcgccaagttcgtaatattgttcaacaggaactagagaagcaaaggatcgcggtcaacattggaggagatcattcacttgccattggcactgttgaaggtgtacaagctgtctacgatgatgcttgtgtcttgtggattgatgcccatgctgatattaatacccccgattcatccccttcaaagaatcttcatggctgcccattgtccttttccttgggatatgccgaacctcttcctgaagagtttgcttggacaagaagagtaattgaagagcgtcgtcttgcgttcatcggtttgcgcgatttggatcctatggaacgtgcttttcttcgtgaacgcagcatcactgcttacactatgcacgatgttgataaatatggaatagccagagtagtagaaatggcattggaacacatcaatccaggaaggagacgtcccattcatctttcttttgacgtcgatgcctgtgatccaattgtcgctccagctactggaacccgtgtgccaggcggtttgacctttcgtgaagcaatgtacatttgtgaaagtgttgcagaaactggctctctagttgctgttgatgttatggaagttaacccacttttaggcaacaaagaggaagccaagacaactgtggatttagctcgctctattgttcgaacttgtcttggtcaaacgttattgtag

SEQ ID NO: 84426 - protein, 323 aa, Schizosaccharomyces pombe
MSPHKIPEVHRHIMSSRYMEGNAVSIINMPFSGGQPKDGAELAPEMIEAAGLPEDLERLGYSVNVVQNPKFKSRPLKEGPNQALMKNPLYVSNVTRQVRNIVQQELEKQRIAVNIGGDHSLAIGTVEGVQAVYDDACVLWIDAHADINTPDSSPSKNLHGCPLSFSLGYAEPLPEEFAWTRRVIEERRLAFIGLRDLDPMERAFLRERSITAYTMHDVDKYGIARVVEMALEHINPGRRRPIHLSFDVDACDPIVAPATGTRVPGGLTFREAMYICESVAETGSLVAVDVMEVNPLLGNKEEAKTTVDLARSIVRTCLGQTLL

SEQ ID NO: 84427 - DNA, 972 bp, Schizosaccharomyces pombe
  CDS (1)..(972)
atgtctcctcataaaattagtgataaccaccgtcatttgatgttaagtagatttatgatgggaaatggtgtttccatcataaacatgcctttctctggtggccagcccaaggacggtgcagagttggctcccgaaatggttgaaaaggctggccttgtggatgatttggaacaccttggatacgatgtcaagctcatccaaaaccccgaatttaaaagtcgtccttccaaggagggtcccaaccaggctttaatgaaaaaccctttatacgttagcaatgttactcgtcaagttcgtgatgctgtccaacgtgaattagaacagcaaagagttgttgtcaacattggcggtgatcattctcttgccattggtactgtggagggtgtgcaggccgtttatgatgatgcctgtgtcttgtggattgacgctcacgctgacattaacactcctgaatcttctccttctaaaaatcttcatggttgccccttgtcattttctttaggatacgccgagcctctccctgaagagtttgcttggaccaagagagttattgaagagcgtcgtctggcttttattggattgcgtgatttagatcctatggagcgcgcttttcttcgtgagcgtaacatagccgcttataccatgcaccacgtcgacaaatacggaattggccgtgtcgttgagatggcgatggagcacatcaatcctggtaagagacgacctgtccatctttccttcgatgttgacgcttgcgatcccatcgttgccccagccactggtacccgtgttccaggcggtttgactttccgtgaggcaatgtacatctgcgaagctgtagctgaatccggtacattggttgctgttgatgttatggaggttaatccactacttggtaatgaagaggaggccaagactacggtggacttggcccgctctatcgttcgtactagtcttggtcaaactttactttaa

SEQ ID NO: 84428 - protein, 323 aa, Schizosaccharomyces pombe
MSPHKISDNHRHLMLSRFMMGNGVSIINMPFSGGQPKDGAELAPEMVEKAGLVDDLEHLGYDVKLIQNPEFKSRPSKEGPNQALMKNPLYVSNVTRQVRDAVQRELEQQRVVVNIGGDHSLAIGTVEGVQAVYDDACVLWIDAHADINTPESSPSKNLHGCPLSFSLGYAEPLPEEFAWTKRVIEERRLAFIGLRDLDPMERAFLRERNIAAYTMHHVDKYGIGRVVEMAMEHINPGKRRPVHLSFDVDACDPIVAPATGTRVPGGLTFREAMYICEAVAESGTLVAVDVMEVNPLLGNEEEAKTTVDLARSIVRTSLGQTLL

SEQ ID NO: 84429 - DNA, 942 bp, Streptomyces clavuligerus
  CDS (1)..(942): transl_table=11
gtggagcgcatcgactcgcacgtttcaccccgctacgcacagatccccaccttcatgcgcctgccgcacgatccccagccccgcggctatgacgtggtggtcatcggagccccctacgacgggggcaccagctaccgtcccggcgcccggttcggcccccaggccatccgcagtgagtcgggcctcatccacggtgtcggcatcgaccggggccccggcacgttcgacctgatcaactgtgtcgacgccggggacatcaatctgacgccgttcgacatgaacatcgcgatcgacacggcgcagagccatctgtcgggcctgctgaaggccaacgccgcctttctgatgatcggcggcgaccactcgctgacggtggccgccctgcgcgcggtcgcggagcagcacggcccgctcgccgtggtgcacctggacgcgcactccgacaccaacccggccttctacgggggccggtaccaccacggcacccccttccggcacgggatcgacgagaagctgatcgacccggcggcgatggtccagatcggcatccggggccacaacccgaagccggactcgctcgactacgcccggggccacggcgtccgggtggtcacggcggacgagttcggcgagctgggggtgggcgggaccgccgacctcatccgcgagaaggtcggccagcggcccgtgtacgtctcggtcgacatcgacgtggtcgaccccgccttcgcccccggtacgggcacgcccgcgccgggcgggctcctctcgcgcgaggtgctggcgctgctgcgctgcgtgggtgacctgaagccggtcggcttcgacgtgatggaggtgtcacccctctacgaccacggcgggatcacttcgatcctggccacggagatcggtgcggaactgctctaccagtacgcccgagcccacagaacccagttgtga

SEQ ID NO: 84430 - protein, 313 aa, Streptomyces clavuligerus
MERIDSHVSPRYAQIPTFMRLPHDPQPRGYDVVVIGAPYDGGTSYRPGARFGPQAIRSESGLIHGVGIDRGPGTFDLINCVDAGDINLTPFDMNIAIDTAQSHLSGLLKANAAFLMIGGDHSLTVAALRAVAEQHGPLAVVHLDAHSDTNPAFYGGRYHHGTPFRHGIDEKLIDPAAMVQIGIRGHNPKPDSLDYARGHGVRVVTADEFGELGVGGTADLIREKVGQRPVYVSVDIDVVDPAFAPGTGTPAPGGLLSREVLALLRCVGDLKPVGFDVMEVSPLYDHGGITSILATEIGAELLYQYARAHRTQL

SEQ ID NO: 84431 - DNA, 873 bp, Bacillus anthracis
  CDS (1)..(873): transl_table=11
atgcgttttgatgaagcttattcaggtaaagtatttattaaaagtcatccaagttttgaagagtcagaggtagttatttacgggatgcctatggattggacagtaagttaccgtccaggatctcgctttggccctgcacgtattcgtgaagtatcaatcggtcttgaagaatatagtccgtatttagatcgtgaactagaagaggtaaaatattttgatgcgggtgatatcccattaccatttggaaatgcacaacgcagcttagacatgattgaagaatatgtatcaaaacttttagatgccggtaagtttccactaggtctcggcggtgagcacctagtgtcttggccaatttttaaggcaatggcaaaaaaatatccggatttagcaatcatccatatggatgctcatactgatttacgtgaatcgtatgaaggggagcctttatcccactctacacctattcgtaaagtgtgtgatttaattggtccggaaaacgtatattctttcggaattcgttctggaatgaaggaagaatttgaatgggcgaaagaagtaggtatgaacttatacaaatttgacgtattagaaccgttaaaagaagtattaccgaaacttgagggacgcccagtctatgtcacaatcgacattgatgtattagacccagctcacgctccaggaacaggaacgttagaagctggtggtatcacatctaaagaattattagattccatcgtagcaattgcaaattcaaatataaatgtagttggagcagacttagtagaagtagctcctgtctacgaccatagtgatcaaacaccagtcgcagcaagcaaattcgtgcgggaaatgctgctcggttgggtaaagtaa

SEQ ID NO: 84432 - protein, 290 aa, Bacillus anthracis
MRFDEAYSGKVFIKSHPSFEESEVVIYGMPMDWTVSYRPGSRFGPARIREVSIGLEEYSPYLDRELEEVKYFDAGDIPLPFGNAQRSLDMIEEYVSKLLDAGKFPLGLGGEHLVSWPIFKAMAKKYPDLAIIHMDAHTDLRESYEGEPLSHSTPIRKVCDLIGPENVYSFGIRSGMKEEFEWAKEVGMNLYKFDVLEPLKEVLPKLEGRPVYVTIDIDVLDPAHAPGTGTLEAGGITSKELLDSIVAIANSNINVVGADLVEVAPVYDHSDQTPVAASKFVREMLLGWVK

SEQ ID NO: 84433 - DNA, 873 bp, Bacillus subtilis
  CDS (1)..(873): transl_table=11
atgagatttgatgaagcttattcaggaaaagtatttatcgcgagccgtcccgagtgggaagaggcggacgccattctttacggcatgccgatggactggacagtcagctatcgcccgggctcacgctttggtccaagcagaatccgtgaggtgtcaatcggccttgaggaatacagcccatatttagaccgcgatctggctgacttgaacttctttgacgctggcgacattccgctgccgttcggaaatccgcagcgaagcctggatatgattgaagagtacgtggacagcattttagaaaaagggaagttcccaatgggtatgggcggggagcacctcgtgtcatggcctgtcattaaagcgatgtacaagaaatacccagaccttgcgattatccattttgacgcacatacagatcttcgtgttgattatgagggagaaccgctttctcactccacgccgatccgtaaggcggcagaattgatcggaccgcacaatgtgtattcattcggaatccgttccggcatgaaagaagagtttgaatgggcgaaggaaaacggcatgcacatctcaaaatttgaagtgcttgaaccgctgaaagaggtgcttccgaagctggcgggccgtccggtttatgtcacaattgacattgacgtattagaccctgcacacgcaccgggtacaggaacggttgacgccggcggcatcacgtctaaagaactgcttgcatcggtccatgaaattgcgcgttcagaggtaaacgtaaagggcgctgatttagtggaagtcgcgccggtatacgaccactcagagcaaacggcaaacacagccagcaaaatcatccgtgaaatgctgcttgggtttgtgaaataa

SEQ ID NO: 84434 - protein, 290 aa, Bacillus subtilis
MRFDEAYSGKVFIASRPEWEEADAILYGMPMDWTVSYRPGSRFGPSRIREVSIGLEEYSPYLDRDLADLNFFDAGDIPLPFGNPQRSLDMIEEYVDSILEKGKFPMGMGGEHLVSWPVIKAMYKKYPDLAIIHFDAHTDLRVDYEGEPLSHSTPIRKAAELIGPHNVYSFGIRSGMKEEFEWAKENGMHISKFEVLEPLKEVLPKLAGRPVYVTIDIDVLDPAHAPGTGTVDAGGITSKELLASVHEIARSEVNVKGADLVEVAPVYDHSEQTANTASKIIREMLLGFVK

SEQ ID NO: 84435 - DNA, 855 bp, Methanococcus jannaschii
  CDS (1)..(855): transl_table=11
atggaggagcactttattgatttatctaaatttatgatggcaaattgtccttatgaagaagctgagggagttatattttcaattccctatgatgaaacaacctcatttaaaccgggagcgagagagggaggaaacgctataagaacagcatcatggggtttagaaacatacagcccaattttagatagagatttggcagaattaaaatactgtgatttaaaagatttagatttgtatggaagtcaagaagaaatatttggcacaattcactcagtctcaagggaaatattaaaagaaaataaaaaaatcattgtttttggaggagagcattctataacttatccaataatcaaagctgtaaaagacatctatgatgattttattgttattcaatttgatgcccattgtgatttgagagatgaatatttgggtaataagctctctcatgcgtgtgttatgaggagagtttatgagctaaccaaaaatatattccaatttggaattagaagtggagataaagaggaatgggaccttgcaaggaaaaacaacctctatctaaagatggatctaatgaataaggatgatttagaatatataaagagcttagacaagccaatatatgtaactatagatatcgatgtgttagaccctgcctatgctccaggaactggaactccagaaccctgtggattttcaacaagagaactttttaactctttatatttattagaagaggttaaagataaaattattggttttgatatagttgaagtttctccgatttatgatattgccaatattacagcaataaccgctgctaaaatagcaagagaacttatgttgatgattctataa

SEQ ID NO: 84436 - protein, 284 aa, Methanococcus jannaschii
MEEHFIDLSKFMMANCPYEEAEGVIFSIPYDETTSFKPGAREGGNAIRTASWGLETYSPILDRDLAELKYCDLKDLDLYGSQEEIFGTIHSVSREILKENKKIIVFGGEHSITYPIIKAVKDIYDDFIVIQFDAHCDLRDEYLGNKLSHACVMRRVYELTKNIFQFGIRSGDKEEWDLARKNNLYLKMDLMNKDDLEYIKSLDKPIYVTIDIDVLDPAYAPGTGTPEPCGFSTRELFNSLYLLEEVKDKIIGFDIVEVSPIYDIANITAITAAKIARELMLMIL

SEQ ID NO: 84437 - DNA, 23 bp, Artificial sequence
  primer
atgcatagtcctaataaatttac

SEQ ID NO: 84438 - DNA, 20 bp, Artificial sequence
  primer
ttagagttttttccgttggg

SEQ ID NO: 84439 - protein, 323 aa, Artificial sequence
  consensus sequence
  Variant (2)..(2): Xaa in position 2 is any amino acid
  Variant (4)..(11): Xaa in position 4 to 11 is any amino acid
  Variant (12)..(15): Xaa in position 12 to 15 is any or no amino acid
  Variant (17)..(20): Xaa in position 17 to 20 is any amino acid
  Variant (22)..(24): Xaa in position 22 to 24 is any amino acid
  Variant (26)..(45): Xaa in position 26 to 45 is any amino acid
  Variant (46)..(56): Xaa in position 46 to 56 is any or no amino acid
  Variant (58)..(88): Xaa in position 58 to 88 is any amino acid
  Variant (89)..(130): Xaa in position 89 to 130 is any or no amino acid
  Variant (133)..(133): Xaa in position 133 is any amino acid
  Variant (135)..(152): Xaa in position 135 to 152 is any amino acid
  Variant (153)..(158): Xaa in position 153 to 158 is any or no amino acid
  Variant (162)..(162): Xaa in position 162 is any amino acid
  Variant (164)..(173): Xaa in position 164 to 173 is any amino acid
  Variant (174)..(182): Xaa in position 174 to 182 is any or no amino acid
  Variant (184)..(199): Xaa in position 184 to 199 is any amino acid
  Variant (200)..(216): Xaa in position 200 to 216 is any or no amino acid
  Variant (218)..(218): Xaa in position 218 is any amino acid
  Variant (220)..(253): Xaa in position 220 to 253 is any amino acid
  Variant (254)..(268): Xaa in position 254 to 268 is any or no amino acid
  Variant (270)..(272): Xaa in position 270 to 272 is any amino acid
  Variant (274)..(274): Xaa in position 274 is any amino acid
  Variant (276)..(277): Xaa in position 276 to 277 is any amino acid
  Variant (280)..(282): Xaa in position 280 to 282 is any amino acid
  Variant (284)..(285): Xaa in position 284 to 285 is any amino acid
  Variant (290)..(290): Xaa in position 290 is any amino acid
  Variant (293)..(312): Xaa in position 293 to 312 is any amino acid
  Variant (313)..(316): Xaa in position 313 to 316 is any or no amino acid
  Variant (318)..(318): Xaa in position 318 is any amino acid
  Variant (321)..(322): Xaa in position 321 to 322 is any amino acid
GXPXXXXXXXXXXXXGXXXXPXXXRXXXXXXXXXXXXXXXXXXXXXXXXXXXXXXXDXXXXXXXXXXXXXXXXXXXXXXXXXXXXXXXXXXXXXXXXXXXXXXXXXXXXXXXXXXXXXXXXXXXXXXXXXGGXHXXXXXXXXXXXXXXXXXXXXXXXXDAHXDXXXXXXXXXXXXXXXXXXXHXXXXXXXXXXXXXXXXXXXXXXXXXXXXXXXXXGXRXXXXXXXXXXXXXXXXXXXXXXXXXXXXXXXXXXXXXXXXXXXXXXXXXYXXXDXDXXDPXXXPXXGTPEXGGXXXXXXXXXXXXXXXXXXXXXXXXDXVEXXP

SEQ ID NO: 84440 - protein, 22 aa, Artificial sequence
  protein pattern
  Variant (2)..(2): Xaa in position 2 is Ile, Leu, Met or Val
  Variant (4)..(4): Xaa in position 4 is any amino acid
  Variant (5)..(5): Xaa in position 5 is Phe, Ile, Leu, Met or Val
  Variant (8)..(8): Xaa in position 8 is Ala, Gly, Ser or Thr
  Variant (9)..(10): Xaa in position 9 to 10 is any amino acid
  Variant (12)..(13): Xaa in position 12 to 13 is any or no amino acid
  Variant (15)..(19): Xaa in position 15 to 19 is any amino acid
  Variant (20)..(21): Xaa in position 20 to 21 is any or no amino acid
DXDXXDPXXXPXXGXXXXXXXG

SEQ ID NO: 84441 - DNA, 657 bp, Synechocystis sp.
  CDS (1)..(657): transl_table=11
atgatcagagttgaacaggtgagcaaaacctatggttccgtggcggtgttacggcaactatgtctaactattcctccagggggaaaaactgccattcttggccgttccggtagcggtaaaaccaccctcctgcgactgattgctggtctcgatcgcctggatggaggagaaatttaccttggcgatcgccaggttagttgtccccagcattatctaccgccccaccaaaggggtattggttttgtttttcaatctccggctctctggccccatctcactgtccagcaaaacatcgcttttggcctcgcccaccttagcaaaacagagcaacaagaacgcattgagccattgttagcacgattagctattgcccccctgatagatcgctatccccaccaactatcgggaggagaagctaaacgggtagcctttgcccgtaccctagctccccggccgccttttttactgttggatgaacccctttccaaccttgatcaaggtttaaaagaagagctactaacctatcttcaggattacttagacttcacccaggcttgtaccctctacgtcacccatgatttagctgaagcccaatttctaacctcggatattcagcttctccgggacggtcaattagtcccccattccaatccctaa

SEQ ID NO: 84442 - protein, 218 aa, Synechocystis sp.
MIRVEQVSKTYGSVAVLRQLCLTIPPGGKTAILGRSGSGKTTLLRLIAGLDRLDGGEIYLGDRQVSCPQHYLPPHQRGIGFVFQSPALWPHLTVQQNIAFGLAHLSKTEQQERIEPLLARLAIAPLIDRYPHQLSGGEAKRVAFARTLAPRPPFLLLDEPLSNLDQGLKEELLTYLQDYLDFTQACTLYVTHDLAEAQFLTSDIQLLRDGQLVPHSNP

SEQ ID NO: 84443 - DNA, 1059 bp, Agrobacterium rhizogenes
  CDS (1)..(1059): transl_table=11
atgggtgagatcagcgtaaaaaatatttcgaagagttgggccgacttcaaggcgctcaacaatatcaatctcgatgtacgggaaggcgagtttctctcgatccttggtccatccggttgcggcaagagcacgctgctgcgaattattgccggcctcgagagccccactgacggcgacatcgtgatcgccggcaagcaagtgaccaacgatccggtctggaaacgcaagatcggctttgttttccagaacttcgctctctggcctcacctgactgtcttcaaaaacgtcgccatgggccttgagctgcgaaaaacgccgaaggacgagcttcagcagcgtgtgaccaaagccttgcggatggttcagttggaggccctcgctgaccgccttccatcgcagctttccggtgggcagcagcagcgcgtagcgcttgcgcgagcaattgtcttgaaacccgatgtcttgcttctggatgagccgctgagcgcgctcgacaagaacctgcgacaggatatgcaggtggaacttaaggcactccagcgcacgcttggactgacaactgttttcgtcacgcacgaccaggaagaagcattgtctctttcagaccgcgttgtcgtgatgaacagaggtgtcatcgagcagctcgacacgccggacaacatctataacaagccggtttcggaatatgtcgcgcgctttgtcggagaagccttcttcttcaagggggaagtcaccggcagcaatgagctggtactggatggtggaaacgcggttgccgtgaaatcggatgtgcccgcagcggccggcaaggccgttgcttttgtccgtcccgaatgggtttcgttgagcaagcttgagagccagctcaatccggaggctctgcgcgggaccgtcgagcgattgatgttctttggccagtcgagcgactacatcgttcgtgtcggcgatgaacaaatgcgcgtcaagcgccacagcggcgatgccgcactcgccgagggcgatacggtcgcaatcaactgtatcgccaggctgcttccaaatgaagggagaagccaatga

SEQ ID NO: 84444 - protein, 352 aa, Agrobacterium rhizogenes
MGEISVKNISKSWADFKALNNINLDVREGEFLSILGPSGCGKSTLLRIIAGLESPTDGDIVIAGKQVTNDPVWKRKIGFVFQNFALWPHLTVFKNVAMGLELRKTPKDELQQRVTKALRMVQLEALADRLPSQLSGGQQQRVALARAIVLKPDVLLLDEPLSALDKNLRQDMQVELKALQRTLGLTTVFVTHDQEEALSLSDRVVVMNRGVIEQLDTPDNIYNKPVSEYVARFVGEAFFFKGEVTGSNELVLDGGNAVAVKSDVPAAAGKAVAFVRPEWVSLSKLESQLNPEALRGTVERLMFFGQSSDYIVRVGDEQMRVKRHSGDAALAEGDTVAINCIARLLPNEGRSQ

SEQ ID NO: 84445 - DNA, 1095 bp, Pyrococcus abyssi GE5
  CDS (1)..(1095): transl_table=11
atggtggaagttaggctcgaaaacttaactaagaaattcggaaactttacagcggtgaataagctaaacctaacgatcaaagatggtgagttcttagttctcctggggccgagtggctgtgggaagactacgacgctaaggatgattgcaggcttagaggaacctaccgagggcaagatatacttcggggatagggaagtgacgtatctgcctccaagggagaggaacataagcatggtctttcaaagctatgccgtttggcctcacatgacggtttacgataacatagcattcccactaaagataaagaagttccccagggatgagatagataagagggtaagatgggccgcggagcttttacaaatagaggaacttttagataggtatcctgcccagctctccggaggtcaaaggcaaagggttgccgtggccagggcaatagtcgttgagcccgatgttctcttaatggatgagccattaagcaatttggatgcgaagcttagggttgcgatgagagctgaaataaaaaagttgcaacagaagcttaaggtcaccacaatctacgttacccacgatcaagttgaggccatgacgatgggggataggattgcagttatgaacaggggacagttacttcaagttggacctcccacggaagtttaccttaagccaaactccgtcttcgtggccacattcatcggagctcccgagatgaacatagttgaagtctctgtaggagatggttacttagaggggaaagggttcaaaatagagttgccccaggatatcatggaactccttagggattacattggaaaaactgttctatttggaattagaccagagcacatgaccgttgaaggggttagcgagctagctcatatgaaaaagactgcaaagctcaatgctaaggttgatttcgttgaggccttgggaactgacaccatactccacgttaaatttggggatgagctagtcaaggttaagctccctgggcacattccaattgaagtcgggaaggaagtaaccatcgttatagaccttgacatgatgcacgtatttgacaaagatacagaaaaggcgataatatga

SEQ ID NO: 84446 - protein, 364 aa, Pyrococcus abyssi GE5
MVEVRLENLTKKFGNFTAVNKLNLTIKDGEFLVLLGPSGCGKTTTLRMIAGLEEPTEGKIYFGDREVTYLPPRERNISMVFQSYAVWPHMTVYDNIAFPLKIKKFPRDEIDKRVRWAAELLQIEELLDRYPAQLSGGQRQRVAVARAIVVEPDVLLMDEPLSNLDAKLRVAMRAEIKKLQQKLKVTTIYVTHDQVEAMTMGDRIAVMNRGQLLQVGPPTEVYLKPNSVFVATFIGAPEMNIVEVSVGDGYLEGKGFKIELPQDIMELLRDYIGKTVLFGIRPEHMTVEGVSELAHMKKTAKLNAKVDFVEALGTDTILHVKFGDELVKVKLPGHIPIEVGKEVTIVIDLDMMHVFDKDTEKAII

SEQ ID NO: 84447 - DNA, 1089 bp, Pyrococcus abyssi GE5
  CDS (1)..(1089): transl_table=11
atggttaggataaggctcgagaatatagttaagaaatttggaaatttcatagctttggacaacattaacctcgagataaaagacggcgagttcatggccctcctaggaccttcgggaagcggaaaatcaactttgctgtacacggtagctggaatatacaagccaacgtctggaaggatatactttgacgagagggatgttaccgagttacctccaaaagacaggaatataggcttagtttttcaaaactgggcactttatccacatatgacggtttataagaacattgcgttccccttagagctgagaaaggctcccaaagatgagatagatgaaaaagtcagaaaggtcgccaagatgctccacatagaaaagctcctcgacaggtatccgtggcaattaagtggaggacaacagcagagggttgcaattgccagggctttagtaaaggaacccgaagttctccttcttgacgagccgttaagtaatttggatgccttactgagattggaggttagagcagagctgaagaggcttcagaaggagcttgggataactaccatatacgtcacccacgaccaggcagaggccctagcaatggcggacaggatagccgtgataagggagggtaagatactccaagttggaactccggatgaggtttattacaagccgatgtacaagttcgtcggtggcttcctggggaatcctccaatgaacttcgtggaggccagagttgaggatggaaaattattaatatcggagaataattacatcccagttccaaagcagtacaggcaaatcatagagaggcttaacgttaaagatgtcataataggcttcagaccgcacgatgccgaagtgataaagggaatatcagaggggatagttggagaggtctactctttcgagccccttggaagggagcaaatcgtgacggtttcagtaaacgattctatagttaaggtctttgcacctgagggagagcatttcaacttcggcgaaaaggtaactatcaaattgaaagaaggatcggtagttcttttcgacaaaaagagcgagaaggcgcttgagtttctaaatgagtag

SEQ ID NO: 84448 - protein, 362 aa, Pyrococcus abyssi GE5
MVRIRLENIVKKFGNFIALDNINLEIKDGEFMALLGPSGSGKSTLLYTVAGIYKPTSGRIYFDERDVTELPPKDRNIGLVFQNWALYPHMTVYKNIAFPLELRKAPKDEIDEKVRKVAKMLHIEKLLDRYPWQLSGGQQQRVAIARALVKEPEVLLLDEPLSNLDALLRLEVRAELKRLQKELGITTIYVTHDQAEALAMADRIAVIREGKILQVGTPDEVYYKPMYKFVGGFLGNPPMNFVEARVEDGKLLISENNYIPVPKQYRQIIERLNVKDVIIGFRPHDAEVIKGISEGIVGEVYSFEPLGREQIVTVSVNDSIVKVFAPEGEHFNFGEKVTIKLKEGSVVLFDKKSEKALEFLNE

SEQ ID NO: 84449 - DNA, 1089 bp, Pyrococcus horikoshii OT3
  CDS (1)..(1089): transl_table=11
atggtagagatcaagctcgaaaatatagttaagaagtttggaaatttcacagcgctgaacaatataaatctaaagataaaagatggggagttcatggccttattgggaccatctggaagcggaaaatcaacactattatacacgatagctggaatttacaagccaacgtcgggtaagatatactttgacgagaaggatgtaacggaactaccacctaaggatagaaacgttggacttgttttccagaactgggctctttatcctcacatgactgtttacaagaacatagcctttccactagagcttagaaaagctccaagagaggaaatagacaaaaaagttagggaagttgcgaagatgctccacatagataaattactcaacagatatccatggcaactcagcggaggtcagcagcagagagttgcaatagcaagagcattagttaaagaaccggaggttcttctgctggatgagcctctcagcaacttagatgccctgttaagattggaagttagagcagaattgaagaggcttcaaaaagaactcggcataactaccgtgtacgtaacccacgatcaagcagaagctttagctatggccgataggatagccgtgataagggaaggtgagatactccaagttggaactcccgatgaagtctactataagccaaagtataaattcgttgggggcttccttggaaatccaccaatgaattttgtggaggccaaagtagaagatggaaaattggtaataacggaaaagagcaaattaccaatacccaagcaatacgttgagatagtcaaggaaactggaatcaccgaagtcataatagggttcagaccccacgatgctgagatagtgaagggtgagggagaagggatcgtcggagaggtttattcctttgagcccctaggaagggagcagatcgttacagtgtcagtaaatgattcgatcgttaaggtatttgcaccagagggggaacacttcagctttggagagaaggtaacgatcaaagttaaagaagaactactcgttctttttgataagaaaaccgagaaagcccttgaattctcaaagctttaa

SEQ ID NO: 84450 - protein, 362 aa, Pyrococcus horikoshii OT3
MVEIKLENIVKKFGNFTALNNINLKIKDGEFMALLGPSGSGKSTLLYTIAGIYKPTSGKIYFDEKDVTELPPKDRNVGLVFQNWALYPHMTVYKNIAFPLELRKAPREEIDKKVREVAKMLHIDKLLNRYPWQLSGGQQQRVAIARALVKEPEVLLLDEPLSNLDALLRLEVRAELKRLQKELGITTVYVTHDQAEALAMADRIAVIREGEILQVGTPDEVYYKPKYKFVGGFLGNPPMNFVEAKVEDGKLVITEKSKLPIPKQYVEIVKETGITEVIIGFRPHDAEIVKGEGEGIVGEVYSFEPLGREQIVTVSVNDSIVKVFAPEGEHFSFGEKVTIKVKEELLVLFDKKTEKALEFSKL

SEQ ID NO: 84451 - DNA, 1029 bp, Aeropyrum pernix K1
  CDS (1)..(1029): transl_table=11
ttggggggcgtcgaggtcaggcttgataacgtccacgccagctacggtgaggtggaggccctcaggggtgttagcttcagcttccccgagtcatccataacagctgtcctgggcccaagcggctgcggtaagactactatgctgaaggttatagcggggctcctgaagcctagaaggggccgggtgttcttcgggggtgtcgactatactggcctgccgcctgagaggaggagcgtgggcttcgttttccaggacctcgccctcttcccccatatgacagtctacgacaacgtcgccttcggcctcagggctagggggtttagcgggggcgaggttaggaggcaggttgagtgggcgcttgaaaccgtcggcctcacaccgccccgggagttcatggggaggagggttacaggcctcagcggggggcagcagcagcgggtggcgctcgcgagggccatcgcctacgagccgcccgtcctactcctggacgagcccctctcccacctagactttaagatcaggcagcggctcctcgccgagctgaagaggctgcagaggaagctgggttcaaccatgatatacgtgacccacgaccagtgggaggccatggagctggcggacacgctggttataatgagggatggtaggattgtgcagcatggtacgcccagcgaggtctacacgaggcctgccaacgtctacgtagccacgttcttcggcgacgccaacatcatccccaaagagcttctcaccccaggcagcgggggggagtgggccattatggtcaggcccgaggaccttgagatagttagaaacgggtccccagtcccccagggctggccgaggctggaggctgttgtggaggacctcgtgttccaggggcccctgataagggtcgagctcaggtggagggggggaaggttgagggctgtggtgccgaggaggacggcgtccagcctaccccggccaggtgaagccgtctcggtgacctggagtcctgataggggcgtggatgttgcgctcgagtag

SEQ ID NO: 84452 - protein, 342 aa, Aeropyrum pernix K1
MGGVEVRLDNVHASYGEVEALRGVSFSFPESSITAVLGPSGCGKTTMLKVIAGLLKPRRGRVFFGGVDYTGLPPERRSVGFVFQDLALFPHMTVYDNVAFGLRARGFSGGEVRRQVEWALETVGLTPPREFMGRRVTGLSGGQQQRVALARAIAYEPPVLLLDEPLSHLDFKIRQRLLAELKRLQRKLGSTMIYVTHDQWEAMELADTLVIMRDGRIVQHGTPSEVYTRPANVYVATFFGDANIIPKELLTPGSGGEWAIMVRPEDLEIVRNGSPVPQGWPRLEAVVEDLVFQGPLIRVELRWRGGRLRAVVPRRTASSLPRPGEAVSVTWSPDRGVDVALE

SEQ ID NO: 84453 - DNA, 1077 bp, Aeropyrum pernix K1
  CDS (1)..(1077): transl_table=11
gtggccgggatacggctcgagagcgttacgaaaaggttcggtaacactgttgcccttgatagagtgagcctgaatataagcgacggggagatcttcaccctcctaggccccagcggctgcggaaagacgactaccctaagggttatagcgggcttcgagacgcccgacgaggggagggtctacatagggtccagggatgttacgatgctgaagccttatgagaggaacacagccatggttttccaaaactacgctctctggccccatatgagggtgttcgacaatatagcgtacggcctcaagctcaggaagctccctaggagtgagattgttaggcgtgttaggtgggctgcggagctcttggagattgaccatcttttggatcgttacccccaccagctgagcggggggcagcagcagagggttgcagtggccagggccatagtgacggagcccgaggtcctcctcatggacgaacccctaagcaacctagacgcccacctgaggctgaaaatgcgtgaagaaatagttaggcttcagaagaggctcggggtcaccatagtatacgtaacccacgaccaggaggaggcccttagcataagccacagagtcgcagttatgaatagggggagggttgagcaggtcggcactcccatggaggtgtacgagaaaccggctacatacttcgttgcgacattcataggcaggtccaccgtgctggatggcagggtgtctgaggtcctcggcagcggaatggtcagggttgccttggaggggggattgtcaatagtgggtacagacatggaggggggtctcaggcagggtgagagggtgaaggtcgtgataaggcctgagagggtgaaggtcggccacgagtacaacggggagaacgtgttcgagggcaaagtctccctagccatgtttctcggctggaggacacagctcaaggtagaggttggcgggcaagagatcacaatctactcagacccgcgtagagcacccctccccggccagccggtgaggttctacatagaccccgaagaggccaaggtctacaggcaggctggcagcgcctag

SEQ ID NO: 84454 - protein, 358 aa, Aeropyrum pernix K1
MAGIRLESVTKRFGNTVALDRVSLNISDGEIFTLLGPSGCGKTTTLRVIAGFETPDEGRVYIGSRDVTMLKPYERNTAMVFQNYALWPHMRVFDNIAYGLKLRKLPRSEIVRRVRWAAELLEIDHLLDRYPHQLSGGQQQRVAVARAIVTEPEVLLMDEPLSNLDAHLRLKMREEIVRLQKRLGVTIVYVTHDQEEALSISHRVAVMNRGRVEQVGTPMEVYEKPATYFVATFIGRSTVLDGRVSEVLGSGMVRVALEGGLSIVGTDMEGGLRQGERVKVVIRPERVKVGHEYNGENVFEGKVSLAMFLGWRTQLKVEVGGQEITIYSDPRRAPLPGQPVRFYIDPEEAKVYRQAGSA

SEQ ID NO: 84455 - DNA, 1176 bp, Aeropyrum pernix K1
  CDS (1)..(1176): transl_table=11
ttggctagtgtgaagctcgagggtgtttggaaggtttttggtaatgttgttgctgttagggatgttaacctctatatcgaggataaggagttcgtctccatactgggccccagcggctccggcaaaactactctactctacttgatagcggggatttacaagcctagtaggggtaggatttattttaatgatgtagacgtcaccgacttgcctccgaacaagaggaacataggtctcgtgttccagaactacgccctctaccctcacatgacggtctatgaaaacatagccttcccgcttaggctcaggaactttggcgagccggctataaaggagaaggtattgagcgttgctaagctgctcggcatagaaggcctgctagacaggtatcccgcacagctgagcggggggcagcagcagcgggtggctctggcacgtgctcttgttaaggagcccgaggtcctgctcctcgacgagcccctgagcaacctggacgccctactgaggattaagataaggagtgagctgaagaagctgcagaaagaactggggataaccgccatatacgtgacccacgaccagagcgaggccctggctatggcagataggattgccatcatagcatccggggttatacagcaggtcggaaaaccctgggatgtctactataagcccaggaacgtcttcgtcgccagcttcataggcacgcctccagccaacctagtctccgtccccctcgacagcagcaggagatgcctcctgctaccaggtggtgggcgctactgcccgcccaggcgtatagccgagaagctagcggctgtgaagaccaactcagttatactgggcttccgccctgaggttgcagtgctctccgaaagcccgctgggcgactacgtgtccatggaggcagaggtgtatacggtcgagaccctggggcgcgagaacatagtgaccttgctggtgaacggtagccaggtgaaggttatcgtgccgcccgtggtagagcccaggcccggcagcaggatattcatcaacatagaggaagataaggtgatgtactttgacccggagacggagattaatgtagagtacctggaagtcccggggatggaagaggcaatagcggagtctgcgggcacgctaaggaagcaggagatggaggaggaatgggactag

SEQ ID NO: 84456 - protein, 391 aa, Aeropyrum pernix K1
MASVKLEGVWKVFGNVVAVRDVNLYIEDKEFVSILGPSGSGKTTLLYLIAGIYKPSRGRIYFNDVDVTDLPPNKRNIGLVFQNYALYPHMTVYENIAFPLRLRNFGEPAIKEKVLSVAKLLGIEGLLDRYPAQLSGGQQQRVALARALVKEPEVLLLDEPLSNLDALLRIKIRSELKKLQKELGITAIYVTHDQSEALAMADRIAIIASGVIQQVGKPWDVYYKPRNVFVASFIGTPPANLVSVPLDSSRRCLLLPGGGRYCPPRRIAEKLAAVKTNSVILGFRPEVAVLSESPLGDYVSMEAEVYTVETLGRENIVTLLVNGSQVKVIVPPVVEPRPGSRIFINIEEDKVMYFDPETEINVEYLEVPGMEEAIAESAGTLRKQEMEEEWD

SEQ ID NO: 84457 - DNA, 1080 bp, Thermotoga maritima MSB8
  CDS (1)..(1080): transl_table=11
atgcccagtatcagggttgtgaatctgaaaaagtacttcggaaaagtaaaagcggtggatggtgtgagttttgaagtgaaagatggagagttcgtagcgctgcttggtccatctggctgtggaaagaccacgactcttttgatgcttgccggtatatacaagcccacctctggtgagatctacttcgacgacgtgctggtcaacgacattcctccaaagtacagagaagtgggtatggtgttccaaaactacgcgctttatcctcatatgactgtttttgaaaacatagcctttccactcagggcaagaagaatctcaaaggacgaagtcgaaaaaagggtcgttgagatagcccggaaacttctcatagataatcttctcgacagaaagccaacccaactttccggaggacaacagcaaagagtggcgctcgcaagggctctggtgaagcaaccaaaggtgctccttttcgatgaaccactgtcaaacctggacgcaaacctcaggatgatcatgcgggcggaaataaaacaccttcagcaggaacttggaatcacctctgtttacgtcactcacgatcaggctgaggcgatgacgatggcttcaagaatcgctgttttcaatcaggggaaactcgttcagtatggaacacccgatgaggtttatgactctccaaagaacatgtttgtcgcctcgttcataggtaatcctccaacgaacttcctgagggatttctctgtctccgtggaaaacaaacaaacgattttgaaaagagacgatgtcatcattaaactgccagaaccagttgatgtaaaattgaaggaagtcgttgtcggcattagacctgagcactgcaggatttcccgcgagcgtgtggaaaactcaattcccggtgttgtctatgttgtagaaccattgggaagggatataatagtgaacgtgaaaacggagaaaggagagataataaaggtcttcggcgacactggaaaagccccacaaccgggtgagaatgtatttctggttcctgatctaaggaagattcatctgtttaatccagaaacggaggaaacgattctgtaa

SEQ ID NO: 84458 - protein, 359 aa, Thermotoga maritima MSB8
MPSIRVVNLKKYFGKVKAVDGVSFEVKDGEFVALLGPSGCGKTTTLLMLAGIYKPTSGEIYFDDVLVNDIPPKYREVGMVFQNYALYPHMTVFENIAFPLRARRISKDEVEKRVVEIARKLLIDNLLDRKPTQLSGGQQQRVALARALVKQPKVLLFDEPLSNLDANLRMIMRAEIKHLQQELGITSVYVTHDQAEAMTMASRIAVFNQGKLVQYGTPDEVYDSPKNMFVASFIGNPPTNFLRDFSVSVENKQTILKRDDVIIKLPEPVDVKLKEVVVGIRPEHCRISRERVENSIPGVVYVVEPLGRDIIVNVKTEKGEIIKVFGDTGKAPQPGENVFLVPDLRKIHLFNPETEETIL

SEQ ID NO: 84459 - DNA, 1068 bp, Thermotoga maritima MSB8
  CDS (1)..(1068): transl_table=11
ttggcgcaggtgaaaatagacggagtgaagaaatatttcgggaatgtgagggctctcgatggaatcgaccttgtcgtgaacgaaggggagttcctcgttcttctcggtccatctggttgtggaaagacgacccttctgaggtgtatagcgggtctcgaacaggtgaccgggggaaagatctttttcaacgatcgcgacgtgacgaaccttcctccaaaggacaggaacatttcgatggtcttccagagctacgcggtgtggccccacatgaaggtgtacgacaacatcgcgtatcctctgaaactgaaaaaagtcccgaaagaggagatagaaaagagggtaaagtgggcagcggatctccttcacatctccgaactcctcgacaggtaccccgcacagctctccggaggtcagagacagagggttgccgttgcccgagcgatcgttcacgaacccgaagtactcctgatggacgagcctctttccaatctggacgcacttttgagggtgaagatgagaagcgagctgaaaaagcttcaggaaagaattggagtcaccaccatctatgtgactcatgaccagacagaggccatgacgatgggagacagaatcgcggtgatgaaccagggaaagcttcagcaggttggaacgccctctgagatctatcaccatccggtgaacatcttcgtcgctggttttgtgggatcaccgcagatgaacttcttagagatggaagtgagatcggaaggaaatagcgttgtcctccaaaacggtgagataaagattcccgcgaagaccgatccaggtgcaaaaaaggtgatccttggtattcgaccggagaacgtctatctggaggaaaagccgaacactttgaagctggaaggagaggtttatttcgccgagaaactcatgtcggatacgattctccatctcaacgttggaagtgagaagatcgtcgcaaaaattccaggggatgtggatttcagaagcggtgagaagatcacgtttttcctggacgttgaaaagatccatctctttcaccctgagacgggagagagaatctcatga

SEQ ID NO: 84460 - protein, 355 aa, Thermotoga maritima MSB8
MAQVKIDGVKKYFGNVRALDGIDLVVNEGEFLVLLGPSGCGKTTLLRCIAGLEQVTGGKIFFNDRDVTNLPPKDRNISMVFQSYAVWPHMKVYDNIAYPLKLKKVPKEEIEKRVKWAADLLHISELLDRYPAQLSGGQRQRVAVARAIVHEPEVLLMDEPLSNLDALLRVKMRSELKKLQERIGVTTIYVTHDQTEAMTMGDRIAVMNQGKLQQVGTPSEIYHHPVNIFVAGFVGSPQMNFLEMEVRSEGNSVVLQNGEIKIPAKTDPGAKKVILGIRPENVYLEEKPNTLKLEGEVYFAEKLMSDTILHLNVGSEKIVAKIPGDVDFRSGEKITFFLDVEKIHLFHPETGERIS

SEQ ID NO: 84461 - DNA, 1059 bp, Pasteurella multocida subsp. multocida str. Pm70
  CDS (1)..(1059): transl_table=11
atgagctatattcaacttaatcatgtgatgaaaaaattcggcgatgtcattgccattcctgatctgagcctcagtattgaaaaaggggaatgtttttctatgttaggaccgtctggttgcggtaaaaccacgacattacgtatgatcgcaggatttgaagatttagacggcggagaaattcgtgtgggcgatcgtttactttcttccaaaatcactaatttctatttaccgccagagaagcgtaattttgggatggtgtttcaggcttttgcggtctggccgcatatgacggtatatgacaatgtggcatttcctctcaccttgaaaaatgtgtcaagacaggaaatcgaaaagcggacgaatgacgcgttaaaacacactaatttgctgaatgttgcacaaaaaagcccagatgatttatccggcgggggaaaacagcgtgtggcattagcacgtgctttggcgttaaatccagatgtgatgctacttgacgagccgttatccagtttagatccccatttaagggaagagatgcgctttgaaattaaagccctgcaacgtaaatttggtttttccattatttatgtgactcacgaccaagccgaagcaatggcgttatcggatcggattttggtaatgaggaaaggacttattgaacaaattgatacgccattgaatgtgtacaataacccaagcaataaatttgtgtttaattttattgggttatcgaatcaattacaggtcaatttatctccccaaggggtgtcttttgcagggctggatggtacttttcatattcaaccttcgcctccaatagcactggtgcaacaagggaaagcgattttagccacgcgcccgtcagaaattgattttgtcaatgaaggcggcgtaacaggcgttgtgaaacggcgttcttatttaggcgaagtaattgattacaatattgttgtgggtgatcaggaactccgtgtgcagaaagggcgtcgagatcccggaccaaaagagggtgaaagttgccaactcgtatttactcgattacattggtatcccgtggagtaa

SEQ ID NO: 84462 - protein, 352 aa, Pasteurella multocida subsp. multocida str. Pm70
MSYIQLNHVMKKFGDVIAIPDLSLSIEKGECFSMLGPSGCGKTTTLRMIAGFEDLDGGEIRVGDRLLSSKITNFYLPPEKRNFGMVFQAFAVWPHMTVYDNVAFPLTLKNVSRQEIEKRTNDALKHTNLLNVAQKSPDDLSGGGKQRVALARALALNPDVMLLDEPLSSLDPHLREEMRFEIKALQRKFGFSIIYVTHDQAEAMALSDRILVMRKGLIEQIDTPLNVYNNPSNKFVFNFIGLSNQLQVNLSPQGVSFAGLDGTFHIQPSPPIALVQQGKAILATRPSEIDFVNEGGVTGVVKRRSYLGEVIDYNIVVGDQELRVQKGRRDPGPKEGESCQLVFTRLHWYPVE

SEQ ID NO: 84463 - DNA, 996 bp, Pseudomonas aeruginosa PAO1
  CDS (1)..(996): transl_table=11
atgtcgttcgtcagcgtcgaacagctcgacaagagctacggtgccaccagcatcttccgcgatatcgacttcgccgccgcccgcggcgagttcgtcaccctgctcggccccagcggctgcggcaagtccaccctgctgcgctgcatcgccgggctgaccgaggtcgacagcgggcgcatcctcatcgacggcgaggatgtggtgcctttgccgccgcagaagcgcgggatcgccatggtgttccagagctacgcgctgttccccaacatgaccgtgcaacagaacgtcgccttcggcctgcgcatgcagaaggtgcctgcggcggaactgaagcagcgggtcgccgaagccatcgaactggtggaactgggcgagtacgccgcacgctacccgcaccaactctccggcggccagtgccagcgcgtggcgctggcccgctcgctggtgacgcgcccgcgcctgctgctgctcgacgagccgctgtcggccctcgacgcgcgcatccgcaagcacctgcgcgaacagatccgccgcatccagcaggagctggggctgaccacggtgttcgtcacccatgaccaggaggaagcgctgaccctgtccgaccgcatcgtcctgatgaacgccggacgcatcgtccagagcggcgacgcggagaccctctacaccgcgccggaaaacgccttcgccgccggcttcatcggcaactacaacctgctcgacgccgaacaggccagccgcctgctcggccagtcctgcgcgcaacaggtggcgatccgcccggaatccctgcgcctgggcaacgaaccgagcgaaggcgtgccggcgctggtacgctcgcacagtctgctcggcaacgtgatccgttaccgcgtcgaggccgccggggtggaactcaccgtcgacgtcctcaaccgcagcgcagaccgcctgtatccggccggcagtcagctgacgctggtcatcgatcgcaacagtattcgagaggtagcttga

SEQ ID NO: 84464 - protein, 331 aa, Pseudomonas aeruginosa PAO1
MSFVSVEQLDKSYGATSIFRDIDFAAARGEFVTLLGPSGCGKSTLLRCIAGLTEVDSGRILIDGEDVVPLPPQKRGIAMVFQSYALFPNMTVQQNVAFGLRMQKVPAAELKQRVAEAIELVELGEYAARYPHQLSGGQCQRVALARSLVTRPRLLLLDEPLSALDARIRKHLREQIRRIQQELGLTTVFVTHDQEEALTLSDRIVLMNAGRIVQSGDAETLYTAPENAFAAGFIGNYNLLDAEQASRLLGQSCAQQVAIRPESLRLGNEPSEGVPALVRSHSLLGNVIRYRVEAAGVELTVDVLNRSADRLYPAGSQLTLVIDRNSIREVA

SEQ ID NO: 84465 - DNA, 1032 bp, Halobacterium sp. NRC-1
  CDS (1)..(1032): transl_table=11
atgacgagcgtggagctacaggggttggtgcgtgcgttcgggtcgacgacgacggcggtcgacgacgtctcagtctccatcgccgacggcgagttcttcacgttggtggggccgtcgggctgcgggaagaccacgacgctgcgcctgatcgcagggttcgagacgccggaccgcggggagatcgtgttcggggatcggtcggtgagtggggtgccgcccgaggaccgcgacgtggggatcgtgttccagagttacgcgctgttcccacacatgaccgtgcgcgagaacgtcgcctacggcctgcggttccgggagccaccgggcggggcgtcgaccgaggagcgcgtcagcgagttgctgtcgctggtcgatctggcgggaaccggcgaccgggagccggcggcgctgtccggcggccaacagcagcgcgtggcgctagcgcgcgcgctcgcgcctgggccgagcgtgttgctgttggacgagccgatgagcgcgctggatgcgcggctgcgcgaccggctgcgtggcacgatcaaggagatccagcgcgaactcgatatcacgaccgtctacgtcacgcacgatcaggccgaggcgttgtcgatctccgaccgcgtggcggtgatgcgtgacggtgcggtggtccaggtcggcacgccggaggcggtctaccgagagccgtcctcgcggttcgtcgcggagttcgtcggcgagaacaacgtcgtgtcggggacggcggttccactcgaaacaggggggtcgagtgtgtcagtcaatggcgtgacgttcgaggtgtcggagtgcgtgacgggggacgtcgccgtcggtctgcggccggaggcgttgtccttcggttcgggtggagtcgggttcgatgtcaccgtcgagcgcacggcgttccggggtgacacctacacggtgtactgtgactgggccggcaccgaactgctcgtcaccacgcccgacccgccggaccgcggcccggcgaccgtgagcgttgcgtccgggggcatcgacgtgcttccggagtag

SEQ ID NO: 84466 - protein, 343 aa, Halobacterium sp. NRC-1
MTSVELQGLVRAFGSTTTAVDDVSVSIADGEFFTLVGPSGCGKTTTLRLIAGFETPDRGEIVFGDRSVSGVPPEDRDVGIVFQSYALFPHMTVRENVAYGLRFREPPGGASTEERVSELLSLVDLAGTGDREPAALSGGQQQRVALARALAPGPSVLLLDEPMSALDARLRDRLRGTIKEIQRELDITTVYVTHDQAEALSISDRVAVMRDGAVVQVGTPEAVYREPSSRFVAEFVGENNVVSGTAVPLETGGSSVSVNGVTFEVSECVTGDVAVGLRPEALSFGSGGVGFDVTVERTAFRGDTYTVYCDWAGTELLVTTPDPPDRGPATVSVASGGIDVLPE

SEQ ID NO: 84467 - DNA, 1059 bp, Escherichia coli O157:H7 EDL933
  CDS (1)..(1059): transl_table=11
  misc_feature (380)..(380): w is a or t
  misc_feature (388)..(388): s is g or c
atggagcgcactatgagtcagaaaaattttgtggaactgcgcaacgtcactaaacgattcggcagtaatacggttatcgacaatatcaatctcaccatcccacaagggcaaatggtgacgctgcttggcccttccggctgcggcaaaaccaccattttgcgtctggttgccgggctggaaaaaccgagtgaagggcaaatctttattgatggcgaagatgtcacgcatcgttccattcagcagcgcgatatctgcatggtgtttcagtcatacgctctgttcccgcatatgtcgctgggcgaaaacgtcggctacgggttaaagatgctcggcgtgtcgcgtagcgaagtaaagcagcgggtgaaagaggcgctggcaawggtggatstggaagggttcgaggaccgctatgtcgaccagatttccggtggtcagcaacagcgcgtggcgctggcccgcgcgttgatcctcaaaccaaaggtgctgctgtttgatgagccgttaagtaacctcgatgccaacctgcgccgcagcatgcgcgataagatccgcgagctgcaaaagcagtttaatatcacgtcgctctacgtgactcacgatcaaagtgaggccttcgcggtttccgacactgtgctggtgatgaataaaggtcacatcatgcagattggctcaccgcaggatctctatcgtcagccagcctcccgctttatggcaagttttatgggcgacgccaacctgttcccggcgaactttagcgaagagtatgtcgatatctacggttatcgcctgccgcgcgcggcgcatttcccggtgcaaggtagcggcaccgtcggcgttcgcccggaagccatcaccttaagcaatcacggcgaagagagtcagcgttgtgttattcgccatgtcgcctacatggggccgcagtacgaagtgaccgtagagtggcatggacaggagattttattacaagtaaacgccacccgtttacagcccgatattggtgagcactattacctcgaaatccatccttacgggatgtttgttttagcggatgcggcataa

SEQ ID NO: 84468 - protein, 352 aa, Escherichia coli O157:H7 EDL933
  misc_feature (127)..(127): The Xaa at location 127 stands for Lys, or Met.
  misc_feature (130)..(130): The Xaa at location 130 stands for Leu, or Val.
MERTMSQKNFVELRNVTKRFGSNTVIDNINLTIPQGQMVTLLGPSGCGKTTILRLVAGLEKPSEGQIFIDGEDVTHRSIQQRDICMVFQSYALFPHMSLGENVGYGLKMLGVSRSEVKQRVKEALAXVDXEGFEDRYVDQISGGQQQRVALARALILKPKVLLFDEPLSNLDANLRRSMRDKIRELQKQFNITSLYVTHDQSEAFAVSDTVLVMNKGHIMQIGSPQDLYRQPASRFMASFMGDANLFPANFSEEYVDIYGYRLPRAAHFPVQGSGTVGVRPEAITLSNHGEESQRCVIRHVAYMGPQYEVTVEWHGQEILLQVNATRLQPDIGEHYYLEIHPYGMFVLADAA

SEQ ID NO: 84469 - DNA, 723 bp, Escherichia coli O157:H7 EDL933
  CDS (1)..(723): transl_table=11
  misc_feature (85)..(85): r is g or a
  misc_feature (336)..(336): r is g or a
gtgattgaatttaaaaacgtctccaagcactttggcccaacccaggtgctgcacaatatcgatttgaacattgcccagggcgaartcgtggtgattatcgggccgtccggttccggtaaatcgaccctgctgcgctgcatcaacaaactggaagaaatcacctccggcgatctgattgtcgatggcctgaaggttaacgatccgaaagttgacgagcgcctgattcgccaggaagcaggtatggtgttccagcagttttacctcttcccgcatctgacggcgctggaaaacgtcatgtttggcccgctacgcgtgcgtggcgcgaacaaagaagargcggaaaaactggcacgtgagctgctggcgaaagtcggtctggcagaacgtgcacatcactacccttccgaactttctggtggtcaacagcagcgtgtggcgattgcccgcgcgctggcggtgaagccgaaaatgatgctgtttgatgaaccgacttccgctcttgacccggaactgcgccatgaagtgctgaaggttatgcaagatctggctgaagaagggatgacgatggtgatcgtgacccacgaaatcggttttgccgagaaagtagcttcgcgcctgatctttatcgacaaaggccggattgcggaagatggcgatccacaagtgttgattaaaaatccgccgagccagcgcttgcaggaatttttacagcacgtctcttaa

SEQ ID NO: 84470 - protein, 240 aa, Escherichia coli O157:H7 EDL933
  misc_feature (29)..(29): The Xaa at location 29 stands for Ile, or Val.
MIEFKNVSKHFGPTQVLHNIDLNIAQGEXVVIIGPSGSGKSTLLRCINKLEEITSGDLIVDGLKVNDPKVDERLIRQEAGMVFQQFYLFPHLTALENVMFGPLRVRGANKEEAEKLARELLAKVGLAERAHHYPSELSGGQQQRVAIARALAVKPKMMLFDEPTSALDPELRHEVLKVMQDLAEEGMTMVIVTHEIGFAEKVASRLIFIDKGRIAEDGDPQVLIKNPPSQRLQEFLQHVS

SEQ ID NO: 84471 - DNA, 1134 bp, Escherichia coli O157:H7 EDL933
  CDS (1)..(1134): transl_table=11
gtgaatgacgctatccctcgcccccaggcgaaaacccgtaaggcgctgaccccgctattagaaatccgcaatctgaccaaatcctacgatggtcagcatgcggttgatgatgtcagcctgaccatctacaaaggtgaaatctttgcgctgctgggcgcatccggctgtggcaagtccacgctgctgcgtatgctggcaggtttcgaacaaccttcagccgggcagattatgcttgatggcgtcgatttgtcacaggtgccgccttacctgcgccccatcaatatgatgtttcagtcttacgcgctgtttccgcatatgaccgtggaacagaacatcgcttttggcctgaaacaggacaaactaccgaaagcggaaattgccagccgggtcaatgagatgctcggccttgtgcatatgcaggagttcgccaaacgcaaaccgcatcagctttccggtggtcagcgacagcgtgtggcactggcccgaagccttgccaagcgcccgaaactattactgctcgacgagccgatgggcgcgctggataaaaagctgcgtgaccggatgcagcttgaagtggtggatattctggaacgcgtcggtgtgacttgtgtgatggtcacccacgatcaggaagaggcgatgaccatggcggggcgtatcgccattatgaatcgtgggaaatttgtccagattggcgaaccggaagagatctacgagcatccgactacccgctatagcgccgaatttattggctcggttaatgtctttgaaggtgtactcaaagagcgtcaggaagatggtctggtgctttattcgccggggctggtgcatccactgaaagtcgatgcggatgcttcagtggtcgataacgtgccggtacacgtagcgctgcgtccggaaaaaatcatgctttgcgaagagccgcccgccaatggttgtaacttcgcggtgggggaggtgatacacattgcctatctcggcgatctttcggtgtatcacgttcgtctgaaaagtgggcagatgattagcgcccagctacaaaacgcccatcgtcatcgtaaagggttaccgacctggggcgacgaagtgcgtttgtgctgggaagtggacagctgtgtggtgctgacggtttaa

SEQ ID NO: 84472 - protein, 377 aa, Escherichia coli O157:H7 EDL933
MNDAIPRPQAKTRKALTPLLEIRNLTKSYDGQHAVDDVSLTIYKGEIFALLGASGCGKSTLLRMLAGFEQPSAGQIMLDGVDLSQVPPYLRPINMMFQSYALFPHMTVEQNIAFGLKQDKLPKAEIASRVNEMLGLVHMQEFAKRKPHQLSGGQRQRVALARSLAKRPKLLLLDEPMGALDKKLRDRMQLEVVDILERVGVTCVMVTHDQEEAMTMAGRIAIMNRGKFVQIGEPEEIYEHPTTRYSAEFIGSVNVFEGVLKERQEDGLVLYSPGLVHPLKVDADASVVDNVPVHVALRPEKIMLCEEPPANGCNFAVGEVIHIAYLGDLSVYHVRLKSGQMISAQLQNAHRHRKGLPTWGDEVRLCWEVDSCVVLTV

SEQ ID NO: 84473 - DNA, 687 bp, Escherichia coli O157:H7 EDL933
  CDS (1)..(687): transl_table=11
ttgcaatgcgacaacctgtgcaaacgctatcaggaaggcagtgtgcaaaccgatgtactgcacaatgtcagtttcagcgtgggcgaaggtgaaatgatggcgatcgtcggtagctctggttccggtaaaagtaccttgctgcacctgctgggcgggctggatacaccaacctccggcgatgtgatctttaacggtcaaccgatgagcaaactgtcttcggcggcgaaagcagaactgcgcaaccagaagctgggctttatttatcagtttcaccacctgctgccggattttactgccctggaaaacgtggctatgccgctgctgattggcaagaaaaagcccgctgaaatcaacagccgtgcacttgagatgttaaaagcggtggggctggagcatcgtgcgaatcaccgcccatctgaactttctggcggcgaacgccagcgtgtggcgattgcccgtgcgctggtcaataacccgtggctggtactggcggatgaacctaccggtaacctcgatgcgcgtaacgcagacagcatcttccagttgcttggggaattgaatcgcttgcagggcaccgccttcctggtggttactcacgacctgcaactggcgaaacgtatgagccgccaactggagatgcgtgatggtcgtctgacggcggaactgagcctgatgggggcggagtaa

SEQ ID NO: 84474 - protein, 228 aa, Escherichia coli O157:H7 EDL933
MQCDNLCKRYQEGSVQTDVLHNVSFSVGEGEMMAIVGSSGSGKSTLLHLLGGLDTPTSGDVIFNGQPMSKLSSAAKAELRNQKLGFIYQFHHLLPDFTALENVAMPLLIGKKKPAEINSRALEMLKAVGLEHRANHRPSELSGGERQRVAIARALVNNPWLVLADEPTGNLDARNADSIFQLLGELNRLQGTAFLVVTHDLQLAKRMSRQLEMRDGRLTAELSLMGAE

SEQ ID NO: 84475 - DNA, 945 bp, Sulfolobus solfataricus P2
  CDS (1)..(945): transl_table=11
gtgattacgctaaaggaagttacgaagttttttgggagttttaaggttatagacagcattagccttaatgtggagaaaggagaatttttcgtaattttaggtaaatccggttctggcaaaactaccttgttaagactaattgcgggtttagaaaaagttagtagtgggaaaatacttattagtaacgaagacgtcactgatttaccaccctccaagagagatattgggatggtttttcagagttatgcgttatatccaaataaaaaagtctttgagaacttgatgattgcattggaaaattcggaaattaacaagaaggataaggaggagagaattatagaaatctcgaagcaactcgaaatatatcatttaatggataaatatccagctcaactctctggaggacaacaacagagagtcgctatagctaaagcactagtgaagagaccaaaagtattattgatggacgaacccttatctaacctcgacgtacagctaaggtattcagcgaggaaattaatcaagaaagttcaaaaggagtttaatatcacaacaatatatgttacgcatgattcaaatgaagccttagcaattgcagatagaattggtgtaattgataaaggtagactattgcaagtgggaatacctgaagatatctataataatccattaagtaaagaggtagcgtctttagttggtaatcctccaatgagtttcgttaaaattgatgggaagataattggcgttagaccagataacatcattataaaggataatggaacgtatgagggaattgtgagtaattgtgaattttggggttcatactatttaatttacatagatttcatcgataatgaagttaaagctataagtaaggaaaggattaaggagggttctaaggttaaattcgacttcattagttataaggtgtttagtaatgattaa

SEQ ID NO: 84476 - protein, 314 aa, Sulfolobus solfataricus P2
MITLKEVTKFFGSFKVIDSISLNVEKGEFFVILGKSGSGKTTLLRLIAGLEKVSSGKILISNEDVTDLPPSKRDIGMVFQSYALYPNKKVFENLMIALENSEINKKDKEERIIEISKQLEIYHLMDKYPAQLSGGQQQRVAIAKALVKRPKVLLMDEPLSNLDVQLRYSARKLIKKVQKEFNITTIYVTHDSNEALAIADRIGVIDKGRLLQVGIPEDIYNNPLSKEVASLVGNPPMSFVKIDGKIIGVRPDNIIIKDNGTYEGIVSNCEFWGSYYLIYIDFIDNEVKAISKERIKEGSKVKFDFISYKVFSND

SEQ ID NO: 84477 - DNA, 1134 bp, Agrobacterium tumefaciens str. C58
  CDS (1)..(1134): transl_table=11
atggaaaccgtatccggcgcagcttttgactttaatcctgatttgagcgatcaacataattcgcaaagcagggcaggattggaaatggcaggcagcgcagcgcttgaactgaaatcggtgggaaaaagattcggcgatacggatgttctgtccgatattgatctttccgttgagcgtggcgaaattatttgcctcgttggacgttcaggctgtggaaaatcgactttgctgcgtatcgtggccggcgtggagacgccggatcgcggcagcgtctccctcaatggcaatgttgttgccgggcccgccgcctttgtcgagccggaaaagcgcaatatcggttttgtctttcaggattacgctttgttcccgcatctgaccgtggagcagaatgtcatgttcggcctccgggcgctgccgaaggcagaggcgcgtcgccgtgcagcggaaatgatcgaacatgttcatctgcaggatctggctaaacgttatccgcacacactttcgggcggtgagcagcagcgcgtggcactcgcccgcgcgctcgccccgcagcccggcctgctgctgatggatgagcccttttccaacctggaccgcggattacgcgacaatgtgcgtgaggaaacactcggccttctgcggcaactgggcaccacggcgatcatggttacccatgacccggaagaggcgctatcggcaggtgaccgtgtagtgctgatgcagcgcgggcgcatcgtccagagcggtacgggttacgaaatccatgacaatcccaaaagccgctatgccgccgattttttctgcgccttcaacaagatcgaaggccgggtgaaacagggccgggtcgaaacgccgcttgggctgctgggcgatgcctccgatctgcctgatggcctcgccgcgatcgcctatgttcgccccaatgcgatttcgatcatcgaggatggcgccgcgagagaaggcattgccggcgaaatatcgagccgtgtcttcctcggcgagatcgagcagcttggcatagccgtgcccggactgccctccgatctgcgcgtcaggacgatgcagcgcacgcccgccagaaccaaggccgtgcgttttggcatcgatcccaagggggtcctcatatttacctga

SEQ ID NO: 84478 - protein, 377 aa, Agrobacterium tumefaciens str. C58
METVSGAAFDFNPDLSDQHNSQSRAGLEMAGSAALELKSVGKRFGDTDVLSDIDLSVERGEIICLVGRSGCGKSTLLRIVAGVETPDRGSVSLNGNVVAGPAAFVEPEKRNIGFVFQDYALFPHLTVEQNVMFGLRALPKAEARRRAAEMIEHVHLQDLAKRYPHTLSGGEQQRVALARALAPQPGLLLMDEPFSNLDRGLRDNVREETLGLLRQLGTTAIMVTHDPEEALSAGDRVVLMQRGRIVQSGTGYEIHDNPKSRYAADFFCAFNKIEGRVKQGRVETPLGLLGDASDLPDGLAAIAYVRPNAISIIEDGAAREGIAGEISSRVFLGEIEQLGIAVPGLPSDLRVRTMQRTPARTKAVRFGIDPKGVLIFT

SEQ ID NO: 84479 - DNA, 1158 bp, Agrobacterium tumefaciens str. C58
  CDS (1)..(1158): transl_table=11
atggcaaagacactcggaccggtcaaacgcaaattcagcccttgggacaatcccgatgcggtgcctttcatccgatttgaaaacgtcaccaagcgctttggcgattttgtcgccgtcaacaatctgacgctcgatatttacgagcgcgaattcttctcgctgcttggtccttccggttgcggcaagaccacgctgatgcgcatgctggccggtttcgaggaaccgaccgagggtcgtatcctgctgcaaggcaaggatatttccggcgtgccgccctataagcgccccaccaacatgatgttccagtcctatgcgcttttcccgcatatgtcggtggaaaagaacgtcgccttcggcctcgagcaggatggccttcccaaggcggatatcgctgcccgcgtcgaggaaatgctgcggctcgtcaagctcacggagtttgccaagcgcaagccaagccagctttccggtggccagcgccagcgcgtggcgctcgcccgttcgcttgccaagcggccgaaggtgctgctgctggacgaaccgctcggcgcgctcgacaagaagctgcgcgaagaaacgcagttcgagctgatggatatccagaccaatctcggtctcaccttcctcatcgtcacccatgatcaggaagaggcgatgacggtgtcggaccgcatcgcggtcatggacaagggcaacgtcgtgcaggtggcgacgccggccgagatctatgaagcgccgaatacccgttatgtggccgacttcatcggcgacatcaatattttcgacgcccacgtcgtggccaacgcctccgatatcggcaagcccggtctggtgacgatggactgcgacggtctgaaagtttcagtggaacaggagtgtgccgccgccgccggcagccaggtggcttacgccattcgcccggaaaaggtccgcatctcgctcgaccagcccgccgacagcagcatcaattccgcctatggcgaagtctgggacatcggttatctcggtgatttttcggtattcatcgtcaagctggccgatggtcgcgtcatccgcgccgcgcaggcgaacgtctcgcgtctcgtcgatcgccccatcactttcggcgatatggtgtggctgaactggaaaccggattcagggcttgtcctgacacgctga

SEQ ID NO: 84480 - protein, 385 aa, Agrobacterium tumefaciens str. C58
MAKTLGPVKRKFSPWDNPDAVPFIRFENVTKRFGDFVAVNNLTLDIYEREFFSLLGPSGCGKTTLMRMLAGFEEPTEGRILLQGKDISGVPPYKRPTNMMFQSYALFPHMSVEKNVAFGLEQDGLPKADIAARVEEMLRLVKLTEFAKRKPSQLSGGQRQRVALARSLAKRPKVLLLDEPLGALDKKLREETQFELMDIQTNLGLTFLIVTHDQEEAMTVSDRIAVMDKGNVVQVATPAEIYEAPNTRYVADFIGDINIFDAHVVANASDIGKPGLVTMDCDGLKVSVEQECAAAAGSQVAYAIRPEKVRISLDQPADSSINSAYGEVWDIGYLGDFSVFIVKLADGRVIRAAQANVSRLVDRPITFGDMVWLNWKPDSGLVLTR

SEQ ID NO: 84481 - DNA, 1056 bp, Agrobacterium tumefaciens str. C58
  CDS (1)..(1056): transl_table=11
ttgaaaggcatcttcatggaagtgaaagtttccggcatcaccaagcagttcgatcggtttccggcgctgaacgacgtgtcgctcgatatacgctcgggcgagctgatcgcactgctcggtccttccggttccggcaagacgacgctattgcgtctgatcgccggcctcgaacagccaacgcagggccagattttcttcggcgacgaggatgcctcgcaccgcacggtgcaggagcgcaatgtgggtttcgtgtttcagcactatgcgctgttccgccacatgacggttgccgacaacatcgccttcggcctgaaggtgcgcccttccgcctcccgcccgccgaaagcggaaatccgccggcgggtttcggaacttctcgacatggtccatctgaccggcctcgaaaagcgctatccgacccagctttccggcggccagcgccaacgcgtggcgctggcgcgcgccgtcgccatcgagccgaaggtgctgcttctggacgaacccttcggtgctctcgacgccaaggtgcgcaaggagttgcgccgctggctgcgcgaattccacgaccgcaccggccacaccaccgtcttcgtcacccatgatcaggaagaagcactcgaactcgccgaccgcgtcgtcgtcatgagccagggcaaaatcgaacaggtcggcacggcagacgatgtctacgatacgcccaactctccttttgttttctccttcattggcgaatcctccagcctgcccgtgacgatccgggacggccatgtgctgttccagggcgaaagcatcggcataaacgagggcggcacaggcgagggcgagctgttcttccgcccggaagatgtggtgctgacggacgaaaaggatgcgctttacggcaaggtcaccacctgtcgccgcctcgcgggcacccgcatcgccgaaatcgacatcgccaataacggccatgagccctatcatctcgaaatcgaggtgccgctcaacgctgccgtggccgttggtgcggagctgcgttttcgcccgacccggtggaaggtgtttggcaagaaatag

SEQ ID NO: 84482 - protein, 351 aa, Agrobacterium tumefaciens str. C58
MKGIFMEVKVSGITKQFDRFPALNDVSLDIRSGELIALLGPSGSGKTTLLRLIAGLEQPTQGQIFFGDEDASHRTVQERNVGFVFQHYALFRHMTVADNIAFGLKVRPSASRPPKAEIRRRVSELLDMVHLTGLEKRYPTQLSGGQRQRVALARAVAIEPKVLLLDEPFGALDAKVRKELRRWLREFHDRTGHTTVFVTHDQEEALELADRVVVMSQGKIEQVGTADDVYDTPNSPFVFSFIGESSSLPVTIRDGHVLFQGESIGINEGGTGEGELFFRPEDVVLTDEKDALYGKVTTCRRLAGTRIAEIDIANNGHEPYHLEIEVPLNAAVAVGAELRFRPTRWKVFGKK

SEQ ID NO: 84483 - DNA, 789 bp, Agrobacterium tumefaciens str. C58
  CDS (1)..(789): transl_table=11
ttgtcacatctcgtggaaatagacagtgtcgacatgcgttacggcggctctgccggcacgcttgccgtctccggcctgaacctggcggtcgacaagggtgaattcgcggcggtcgtcggcccgtcgggctgcggtaagtccacgctgatgaagctggtgacagggctgcatattccgcagaggggcaatgtcatcgtcgccggacggcaggtcaccgaacccgtctccatcgtcggcatggcgtttcagaacccgacgatgctgccctggcgcacgacgctggaaaacatcctgctgccgctcgaaatcgttgagaaacaccgtcgccggctgcgcgcccacaaggcgagctatgtcgcgaaagccgagcgtcttctggaaatcgtcggcttgaaggggtttggctccaaatacccttggcagctttccggcggcatgcagcagcgcgccaatctctgccgggccctgatccacgaaccggaacttctgatgcttgacgagcctttcggcgcgctcgatgccttcacccgcgaagagctgtggtgcgtcatccgcgatctgcatgccgcgcagcgcgtcaccatcattctcgtgacccatgatctgcgcgaagcgacctttctggcggacaagattttcgtcatgagcgcaaggcccggccgggtgttggcggaacaccgcgtgccgttcgcccgtccgcgccagctcgatatcatgtatgacaagggtttcaacgacatggtgcaggaactgcatggcgaaatcgcgcaggcgagggtggcggcatga

SEQ ID NO: 84484 - protein, 262 aa, Agrobacterium tumefaciens str. C58
MSHLVEIDSVDMRYGGSAGTLAVSGLNLAVDKGEFAAVVGPSGCGKSTLMKLVTGLHIPQRGNVIVAGRQVTEPVSIVGMAFQNPTMLPWRTTLENILLPLEIVEKHRRRLRAHKASYVAKAERLLEIVGLKGFGSKYPWQLSGGMQQRANLCRALIHEPELLMLDEPFGALDAFTREELWCVIRDLHAAQRVTIILVTHDLREATFLADKIFVMSARPGRVLAEHRVPFARPRQLDIMYDKGFNDMVQELHGEIAQARVAA

SEQ ID NO: 84485 - DNA, 1152 bp, Agrobacterium tumefaciens str. C58
  CDS (1)..(1152): transl_table=11
atgcccgctattgaactcaacaatatctcgaagaaattcggtgcgaaggaagtcattcgcgacatcaatgtctcgatcgaagagggagatttcctcgtccttctcggtccttctggctgtggcaaatccacgcttttgcgtatgctcgcaggccttgaaagcatttccggcggggaaatcctgatcggcggcaggcgggtcgatcaattgccgcccggcgagcgcgatatcgccttcgtgtttcagtcctacgcgctttacccgcatctttccgtgcgcaggaacatgtccttcccgctgttgatgcagcagtttcgctggtggcaccacctgccgatcatcggcggtctggcaaaacgccggatcgagaaatcatcaagcgtcgttgaaaaagtcgcgaggattgcaaaaatcctcggactgacggagatgctcgaccgtttcccgcgtacgctttccggcggacagcgccagcgcgtcgcccttgggcgagccatggtgcgggagccggaagtgttcctgatggacgagccgctctccaatctggacgccaagcttcgaacctccatgcgttcggagatttcacgcctgcaccaggagatcggtggaacctttgtctacgtgacgcatgaccaggtcgaagccatgaccatgggcacaaaaatcgccctgatgcgcgaaggcatcatccagcaattcggaacggcgcgcgaaatctataccgatccggccaatacctatgtcgcccgcttcatcggcacgccgccgatgaacctgatcgtcactgacaaaaagcctgatggcctcttcatcggctccacctccatccgcgtggatgtgccacagtcggagacggcttccaccgtgttgctgggtgttcggccaaacgccctctccctgacgacggaaccgaccgaagcctccctgcggggggaggtcgtgatggtcgaacatatcggcgcagattcgatcatcgccgttcgcctcaaagacggccgcacggcgcatgacgaggacggcgatatggatgcggtgatggtgaccgttcccggatattgcacgctttcattgcgccaggaggtttcgctgacgatcgatcccggtcaggccatcctgttttcggccgtgacgggcgagcggatccgatcgtga

SEQ ID NO: 84486 - protein, 383 aa, Agrobacterium tumefaciens str. C58
MPAIELNNISKKFGAKEVIRDINVSIEEGDFLVLLGPSGCGKSTLLRMLAGLESISGGEILIGGRRVDQLPPGERDIAFVFQSYALYPHLSVRRNMSFPLLMQQFRWWHHLPIIGGLAKRRIEKSSSVVEKVARIAKILGLTEMLDRFPRTLSGGQRQRVALGRAMVREPEVFLMDEPLSNLDAKLRTSMRSEISRLHQEIGGTFVYVTHDQVEAMTMGTKIALMREGIIQQFGTAREIYTDPANTYVARFIGTPPMNLIVTDKKPDGLFIGSTSIRVDVPQSETASTVLLGVRPNALSLTTEPTEASLRGEVVMVEHIGADSIIAVRLKDGRTAHDEDGDMDAVMVTVPGYCTLSLRQEVSLTIDPGQAILFSAVTGERIRS

SEQ ID NO: 84487 - DNA, 1059 bp, Agrobacterium tumefaciens str. C58
  CDS (1)..(1059): transl_table=11
atgagctttttgacacttagcaacatcaagaaatccttcggctccgtgcaggtcgtgcatgatttcaacatggccatcgaaaagggcgaattcgtctcctttctcgggccatcgggctgtggcaagaccaccgtgctgcgcatgatcgccggtttcgaaatcccgaccggcggatcgatcgtcatcaacggcaaggaccagacgacgctcagaccgaaccagcgcaatatcggcatggtgttccaggcctatgccctgttcccgaacatgaatgtctatgaaaacgtcgccttcggtctgaaagtcgccggcaaaccaaaagccgagatcgacgcccgcgtgaaggaaatgctccagctcatccatctggaacatctggcggaccgctacccctatcagatgtcgggcggtcagcagcagcgcgtggcgctcgcccgggcgcttgcgccgaagccggaagtgcttctgctggacgaaccgctctccgccctcgacgccaagatccgcgtctcgctgcgtgaggaaatccgccagatccagcagaaactcggcatcaccaccattttcgtgacccacgatcaggaagaggccctgtcgatatccgaccgcatcgtcgtgatgaatggcggccgtgccgaccagatcggttcgcccttcgatatctacaacaaacccgccacccgcttcgtcgcctccttcgtcggtacgttgaacctcatcgacgccaccgtggtggattcctcatccaataccatccgtgtcggagagcagcagatcaccctgccgaagccggtcgatgcagcgaatggcgaaaaaatcacgctggcacttcgcccggaagcaggttccctcggcagcgatgcgaaaggcgatgttgccatttccggcctcgtcacctccagccagttcctcggctccgtcatccgcacccgccttgatctgggcggttcgacgctgtccttcgacatgttcaacgaccccggcacagcgccgcccgctgtcggtgagcgggtgacactgaaattcgctgccggcgacctgatgctcatcaaggactga

SEQ ID NO: 84488 - protein, 352 aa, Agrobacterium tumefaciens str. C58
MSFLTLSNIKKSFGSVQVVHDFNMAIEKGEFVSFLGPSGCGKTTVLRMIAGFEIPTGGSIVINGKDQTTLRPNQRNIGMVFQAYALFPNMNVYENVAFGLKVAGKPKAEIDARVKEMLQLIHLEHLADRYPYQMSGGQQQRVALARALAPKPEVLLLDEPLSALDAKIRVSLREEIRQIQQKLGITTIFVTHDQEEALSISDRIVVMNGGRADQIGSPFDIYNKPATRFVASFVGTLNLIDATVVDSSSNTIRVGEQQITLPKPVDAANGEKITLALRPEAGSLGSDAKGDVAISGLVTSSQFLGSVIRTRLDLGGSTLSFDMFNDPGTAPPAVGERVTLKFAAGDLMLIKD

SEQ ID NO: 84489 - DNA, 1059 bp, Agrobacterium tumefaciens str. C58
  CDS (1)..(1059): transl_table=11
atggcaccggtgaatattcagaacgtccagaagcgcttcggctccgtcaacgtcattcatggcatcgatatcgacatcaaggatggcgaattcgtcgtgcttgtcggcccctccggctgcggcaaatctaccctgctgcgcatgatcgccggacttgaagagctgagcgacggcgaaatccacatcggcccgcgcgaggtcagccacctgcctgcccgtgaccgcgatatcgccatggtcttccagaactacgcgctttatccgcacatgacggtgaaggataatatgggcttcgcgctgaagttgaagaaggtgagcgcggacgaaaccaaggccaaggtggacagagccgccgccattctggggctggaaaaactgctcgaccgttatccgcgccagctctccggcggccagcgtcaacgtgtcgccatgggccgcgctctggtgcgcgatccgcaggtcttcctgttcgatgaaccgctctccaatctcgacgccaagctgcgcgtgcagatgcgcggcgagatcaaggccatgcaccagcgcatcggcacgacgaccatttacgttacccacgaccaggtggaagccatgaccatggccgacaagatcgtggtgctgcatgatggcatcatcgagcagatcggcgcgccgctggagctttacgacaatcccgcaaacctcttcgttgccggcttcatcggttcgcccgccatgaatttcattcgtggccgggtggaggaaggcgtcttccgcaccataaaaggcctcagcctgccgctgcccgcccatgccgatatcggcaagctcggcggccgcgacctcgtctatggcgtacggccggaacatatccgcgccgccgagagtggtatcgagggccgggtcgaactggttgaaggcaccggctcggaaatctacaccaagctcaattgcaagggcgatgagatcgcctgcctgttccgcgagcggctcaatgtccgcttcggcgatacgatccacattgccattgatccggcaacggtgcatctgttcgacaaggacagcggcaagcgcatctga

SEQ ID NO: 84490 - protein, 352 aa, Agrobacterium tumefaciens str. C58
MAPVNIQNVQKRFGSVNVIHGIDIDIKDGEFVVLVGPSGCGKSTLLRMIAGLEELSDGEIHIGPREVSHLPARDRDIAMVFQNYALYPHMTVKDNMGFALKLKKVSADETKAKVDRAAAILGLEKLLDRYPRQLSGGQRQRVAMGRALVRDPQVFLFDEPLSNLDAKLRVQMRGEIKAMHQRIGTTTIYVTHDQVEAMTMADKIVVLHDGIIEQIGAPLELYDNPANLFVAGFIGSPAMNFIRGRVEEGVFRTIKGLSLPLPAHADIGKLGGRDLVYGVRPEHIRAAESGIEGRVELVEGTGSEIYTKLNCKGDEIACLFRERLNVRFGDTIHIAIDPATVHLFDKDSGKRI

SEQ ID NO: 84491 - DNA, 732 bp, Agrobacterium tumefaciens str. C58
  CDS (1)..(732): transl_table=11
atgccggaagtaatcgttgaaaacgttcacaagagctttggcgctctggaagtcctcaaaggcgtgtcgctgacggtcggtcgtggcgaagtctttgccctcatcggccgctcgggttcgggtaaaagcacgctgctgcgttgcatgaacgggctggagaagatcaattcgggccgcatcgaaatcgccggccatgcgctgggcggagatgccacggcgctgcgcaagctgcgcaccgacgtcggcatcgtgttccagagctacaatcttttcccgcatctgacggtcggtgagaacatcatgcttgcgccgcgcatcgtcaaggatgtggcaaaatcggaaacgaaggacattgcccgcgaggtcctgcaactcgtcggtctgtcggagaagttcgattcctatccagaccagctttccggcggccagcagcagcgcgtggcgattgcccgttcgctcgccatgcggccgaaggtgatgctgttcgacgaggtgacctcggcgctcgatcccgaactgacggaagaagtactgaccgtcatggaaaacctcgccaagggcggcatgaccatgatcctcgtcacccacgaaatggcctttgcgcgccgtgtggcgaccgaaaccatcttcatgcacaagggcaagatctgggagcagggccgctcggcagaacttttcgccaatccgcaaacgccggaactccggcaattcgtcaaggccgatgtgaaatag

SEQ ID NO: 84492 - protein, 243 aa, Agrobacterium tumefaciens str. C58
MPEVIVENVHKSFGALEVLKGVSLTVGRGEVFALIGRSGSGKSTLLRCMNGLEKINSGRIEIAGHALGGDATALRKLRTDVGIVFQSYNLFPHLTVGENIMLAPRIVKDVAKSETKDIAREVLQLVGLSEKFDSYPDQLSGGQQQRVAIARSLAMRPKVMLFDEVTSALDPELTEEVLTVMENLAKGGMTMILVTHEMAFARRVATETIFMHKGKIWEQGRSAELFANPQTPELRQFVKADVK

SEQ ID NO: 84493 - DNA, 1041 bp, Agrobacterium tumefaciens str. C58
  CDS (1)..(1041): transl_table=11
atggcgacaatcgaactcaatcaactcgtgaagcgctacggcaaggtcgaagcggtcaaaggcatagacctggccattgaagacggtgaattcgtcgttttcgtcggaccctccggctgcggaaaatccaccacgctgcgcatgatcgccgggctggaagagatttccgacggcacgttgaagatcgccggaaacgtcgtcaacgagaaggaaccgaaacagcgcaacatcgccatggtcttccagaactatgcaatctacccgcatatgacggttcgccagaatattggcttcgggctttacaccgcaaaactcgacaagacggaaaagaaccggcgcatcgaagaggcaggccgggtgctggggcttgaggccctgctcgaccgccgtcccgcggccctgtcgggcggccagcgccagcgtgtcgccatcggccgcgccatggtgcgtgatcccgccgccttcctgttcgatgagccgctgtccaatctcgacgctcagttgcgttcacagatgcgcattgaaatcaagcgcttgcaccaacgtcttaagacgacaaccgtctacgtcacccatgatcaggtggaagccatgaccatggctgaccgtatcgtagtgatgaaggatggtcatattctccaggtcggcacaccgacggagctttacgaaacgcctgtcgatattttcaccgcccgcttcatcggcagtccttccatgaacctgctgcggggttcaagaacaaccaacagcgtcgccccctccgccgcgggcgaccttctggtcggtgttcgtccgcatgacctgctggttggtgaaagccaagcccagcagggagtatttacgcttgagggaaccgtaaccgccgtcgagcccctcggcccggaaacgctggttcatctggataccgacacgacgtccgtgatcgccacggcgagggggaaatccattcccgctgtcggcagccggttgcaatgccaggcggaggcaggcgcgctctatcttttcgatgcgaagacggaaaagcttctgggccgcgcatga

SEQ ID NO: 84494 - protein, 346 aa, Agrobacterium tumefaciens str. C58
MATIELNQLVKRYGKVEAVKGIDLAIEDGEFVVFVGPSGCGKSTTLRMIAGLEEISDGTLKIAGNVVNEKEPKQRNIAMVFQNYAIYPHMTVRQNIGFGLYTAKLDKTEKNRRIEEAGRVLGLEALLDRRPAALSGGQRQRVAIGRAMVRDPAAFLFDEPLSNLDAQLRSQMRIEIKRLHQRLKTTTVYVTHDQVEAMTMADRIVVMKDGHILQVGTPTELYETPVDIFTARFIGSPSMNLLRGSRTTNSVAPSAAGDLLVGVRPHDLLVGESQAQQGVFTLEGTVTAVEPLGPETLVHLDTDTTSVIATARGKSIPAVGSRLQCQAEAGALYLFDAKTEKLLGRA

SEQ ID NO: 84495 - DNA, 1041 bp, Agrobacterium tumefaciens str. C58
  CDS (1)..(1041): transl_table=11
atgagtgaactcgagatcagcaatatcagcaaggattacggggcgagccgggcgcttcatccggtatcgatcaccgtggagcggggcgagttcgtcaccattcttggtccctccggttgcggcaagtcgacgcttttgcgcatcctcaccggcatcagccagccttcgggcggcgaaatccggctgggcggcaagcgtattgatcaggcgcagccggaagcgcgcgatatcgccatggtattccagtcctatgcgcttttcccgcatatgtcggtcgcgaaaaaccttggcttcggtctgaagatgaagaaggtcgcgaaggacgagcgtgcccgccgcatcgcccatgcgctggaaatttgcaatctcaccgggctagtggatcgcatgcctcggcaattgtccggtgggcagcagcagcgtgtggcgctggcgcgcgccatcgtcatgcagccgagcctgcttctcttcgacgagccgctctccaacctcgacgccaagctccgcgacacactgcgccatgagttgaccgaactgcaccgccgtatcggcgccaccagcctttatgtgacgcatgatcaggccgaggcgatggcgatgtcggaccggatcgtcgtcatgaatgccggccgggtggtcgagatcggcacgccgcttgagctttaccgcgcaccgaaacacgcctttaccgccggctttctcggccagaccaatcttctgccggtctccgctgagggccagcaggcgcaattgccctggggccagtccgtgacattggatcaggctgctgccggcaatgtgcagatttccgctcgcccggaaaacatccacatctgcgccgatcaggccggtgacggcacggtttccgccgtttccttcatgggtgcgaatgcgctttacaccgtcgagatcggcggtcgccagatccgggtcagccagtccggcgcggaaacgctgatcgatgccggacagagggtcgcgctgcagtttcccggctcagtccatcttcttgatgacagtgtggcgggggaggcggcatga

SEQ ID NO: 84496 - protein, 346 aa, Agrobacterium tumefaciens str. C58
MSELEISNISKDYGASRALHPVSITVERGEFVTILGPSGCGKSTLLRILTGISQPSGGEIRLGGKRIDQAQPEARDIAMVFQSYALFPHMSVAKNLGFGLKMKKVAKDERARRIAHALEICNLTGLVDRMPRQLSGGQQQRVALARAIVMQPSLLLFDEPLSNLDAKLRDTLRHELTELHRRIGATSLYVTHDQAEAMAMSDRIVVMNAGRVVEIGTPLELYRAPKHAFTAGFLGQTNLLPVSAEGQQAQLPWGQSVTLDQAAAGNVQISARPENIHICADQAGDGTVSAVSFMGANALYTVEIGGRQIRVSQSGAETLIDAGQRVALQFPGSVHLLDDSVAGEAA

SEQ ID NO: 84497 - DNA, 1083 bp, Agrobacterium tumefaciens str. C58
  CDS (1)..(1083): transl_table=11
atgaccaaaccgctcctgcaaattcgcggaatccgcaagcaatacggaccgttggtcgccgttcaggatgtcaatctcgacgttcagccgggcgagttcatgaccttcctcggtccttccggttccggcaagagcaccactctttatatccttgccggtttcgaacagccgacctcgggggatatcctgctgaacggcgagagcctgctgtcgactccatcgcacaagcgcaatatcggcatggtcttccagcgttacaccctgtttccgcatctgtcggtcggcgaaaacatcgcctttccgctgaaagttcgccgcaggagcaaggcggacatcgatgccaaggtgaaggagatgctgcggctcgtccgcctcgaaggtttcgaggacaggaagcccgcgcagatgtccggcggtcagcagcagcgcgtggcgctggcgcgtgcgcttgcttatgatccgccggtacttttgatggatgagccgctgtcggcgctcgacaagaagctgcgcgaggaaatccaattcgaaatccgtcgcatccaccagcagacggaagtgacgatcctttacgtcacccatgatcaggaagaagccttgcgtctttctgaccggatcgccgtgttttccaagggggtgatcgatcagatcggcacggggcccgagctttatgctcatcctactacccgtttcgtggctgaattcattggtgacagcgatttcatcgcctgcgatctgatcgcggcatcgggcggcaaggcgacggtgtcgcttggccgggatatcatcttcgatcatattcccatgcatggcgaggccgcgccgggcaagaaagcggcactgatgctgcgtccggaacgcctgcagctcagccgcaacagaccggttgcttccgccggttttcaggccacggtcagcgacatcaccttccttggcaacaatgtccatgtggttgctcataccggttcgggcgaaccgcttgccgtgcggctgccctttggccacgaggcgatttccggtctcaaccggggcgacctcgtgcacttggccttcgacccggcgtcagcccaggttttctgttga

SEQ ID NO: 84498 - protein, 360 aa, Agrobacterium tumefaciens str. C58
MTKPLLQIRGIRKQYGPLVAVQDVNLDVQPGEFMTFLGPSGSGKSTTLYILAGFEQPTSGDILLNGESLLSTPSHKRNIGMVFQRYTLFPHLSVGENIAFPLKVRRRSKADIDAKVKEMLRLVRLEGFEDRKPAQMSGGQQQRVALARALAYDPPVLLMDEPLSALDKKLREEIQFEIRRIHQQTEVTILYVTHDQEEALRLSDRIAVFSKGVIDQIGTGPELYAHPTTRFVAEFIGDSDFIACDLIAASGGKATVSLGRDIIFDHIPMHGEAAPGKKAALMLRPERLQLSRNRPVASAGFQATVSDITFLGNNVHVVAHTGSGEPLAVRLPFGHEAISGLNRGDLVHLAFDPASAQVFC

SEQ ID NO: 84499 - DNA, 750 bp, Agrobacterium tumefaciens str. C58
  CDS (1)..(750): transl_table=11
atgtcgcaaacaaccagcatgatcgaactgcaatccgtcaataaatggtacgggccgcatttccaggttctgaccaattgcagcctcaatgtcgccaagggcgaagtcgtcgtgatctgcgggccctccggctcgggcaagtcgacgctgatcaaatgcgtcaatgcactcgagacgatcggcaacggcgtcattaccgtcaatggcgtggaagtgaccaacccaaagaccgatatgccgaaactgcgctccagagtgggcatggtatttcagcatttcgaactcttcccgcatatgacgatcctcgaaaatctctgcatcgggcaggagaaggttctgggccgtacaccggcggaagcgctggccaaggccaatgcgctgctggagagggtgggactgacggcgcatgccagaaaatatcccggccaattgtcgggtgggcagcagcagcgcgtcgccattgcccgcgcgctggccatggacccggttgcgatgctgttcgacgagccgacatcggcgctcgatccggaaatgatcaacgaggtcctcgacgtcatggtctcgctcgcccaggagggcatgacgatgatggtggtgacgcatgagatggggtttgcccgcaaggtggcggaccgcatcgtcttcatggatggcggcaagatcgtcgagatcggtgagggcgacagtttcttcaccgatccgaagacggaaagagcccgctcgttcctgtcgaaaatcctggcccactag
